United States Patent Application Publication US 2007/0134655 A1 - sequence listing, part 7

SEQ ID NO: 239229 - RNA, 32 nt, Human
ucuacaagccaaggacagagaccuggaacaga

SEQ ID NO: 239230 - RNA, 32 nt, Human
ucuacaagggcauguggcagcugcaguaugug

SEQ ID NO: 239231 - RNA, 32 nt, Human
ucuacaagggugcucagagaguuuggagcgaa

SEQ ID NO: 239232 - RNA, 27 nt, Human
ucuacaagugcccaggcucaggugcag

SEQ ID NO: 239233 - RNA, 32 nt, Human
ucuacaaugagcugugcugcagugcacggccg

SEQ ID NO: 239234 - RNA, 17 nt, Human
ucuacaauguuauuuua

SEQ ID NO: 239235 - RNA, 32 nt, Human
ucuacacacacagaggaugcuggauacuguau

SEQ ID NO: 239236 - RNA, 20 nt, Human
ucuacacauuaaucuacuua

SEQ ID NO: 239237 - RNA, 32 nt, Human
ucuacaccaucaucccuuuuucuuuuuauccu

SEQ ID NO: 239238 - RNA, 32 nt, Human
ucuacaccccaggauacuccagccuccagcug

SEQ ID NO: 239239 - RNA, 32 nt, Human
ucuacacccgagacacagggccccaggagaca

SEQ ID NO: 239240 - RNA, 21 nt, Human
ucuacaccuggaaauuuacuc

SEQ ID NO: 239241 - RNA, 32 nt, Human
ucuacacgggacugaagacagcucagaaguuu

SEQ ID NO: 239242 - RNA, 32 nt, Human
ucuacacuccaucacaggacauugagucccuc

SEQ ID NO: 239243 - RNA, 31 nt, Human
ucuacacugcaugucugacauugcagaguga

SEQ ID NO: 239244 - RNA, 32 nt, Human
ucuacacugccuccucucaccaaccaaauugu

SEQ ID NO: 239245 - RNA, 32 nt, Human
ucuacacugcuggugacuuucugcagugaaug

SEQ ID NO: 239246 - RNA, 32 nt, Human
ucuacagaaaaauuuuaaaauuagcugggcgu

SEQ ID NO: 239247 - RNA, 32 nt, Human
ucuacagaaacuaccaaaauuagccaggugug

SEQ ID NO: 239248 - RNA, 32 nt, Human
ucuacagaaaguuuuaaaauuagccaggugua

SEQ ID NO: 239249 - RNA, 32 nt, Human
ucuacagaacaaagaacggcaugugaauucug

SEQ ID NO: 239250 - RNA, 32 nt, Human
ucuacagaccacacucuaguuguuuuccauga

SEQ ID NO: 239251 - RNA, 32 nt, Human
ucuacagacucaggaagccccagcugacauuc

SEQ ID NO: 239252 - RNA, 32 nt, Human
ucuacagacucugcugucgcuggcuuccuaga

SEQ ID NO: 239253 - RNA, 32 nt, Human
ucuacagauaaaucuacagagacaauuccuca

SEQ ID NO: 239254 - RNA, 32 nt, Human
ucuacagaugcaugaggguuggaagagucugg

SEQ ID NO: 239255 - RNA, 32 nt, Human
ucuacagauucuaggaauucucuccccugaaa

SEQ ID NO: 239256 - RNA, 32 nt, Human
ucuacagcacagauucacuggcugggucucca

SEQ ID NO: 239257 - RNA, 32 nt, Human
ucuacagcauucucucccaccuacguccugcu

SEQ ID NO: 239258 - RNA, 32 nt, Human
ucuacagcauuuucuuacacccccuccccagc

SEQ ID NO: 239259 - RNA, 32 nt, Human
ucuacagccaggaaguggggauucugccagug

SEQ ID NO: 239260 - RNA, 32 nt, Human
ucuacagcccuuccucugcauguggccacagg

SEQ ID NO: 239261 - RNA, 32 nt, Human
ucuacagcgacaaggccggccugugcguggug

SEQ ID NO: 239262 - RNA, 32 nt, Human
ucuacagcgaccuguaccugaccguaugcgag

SEQ ID NO: 239263 - RNA, 32 nt, Human
ucuacagcgugugugccuucuguaccaucccc

SEQ ID NO: 239264 - RNA, 19 nt, Human
ucuacagcucccagcauga

SEQ ID NO: 239265 - RNA, 32 nt, Human
ucuacagcugcggaggauggcagguggcaucu

SEQ ID NO: 239266 - RNA, 32 nt, Human
ucuacagcuuuucauguaaauuagucuugguu

SEQ ID NO: 239267 - RNA, 32 nt, Human
ucuacaggagaggaggaaaacaccugggaugc

SEQ ID NO: 239268 - RNA, 32 nt, Human
ucuacaggcccaaccucugccucaugggggcu

SEQ ID NO: 239269 - RNA, 32 nt, Human
ucuacaggguucccuaggccagguggagauga

SEQ ID NO: 239270 - RNA, 32 nt, Human
ucuacagucaacugaagacuacccaaaggagc

SEQ ID NO: 239271 - RNA, 32 nt, Human
ucuacagucccaacgucugccucacagcagau

SEQ ID NO: 239272 - RNA, 32 nt, Human
ucuacaguccucccgggcugccagcccugacu

SEQ ID NO: 239273 - RNA, 32 nt, Human
ucuacaguuauucaaaugagagucacgcuuuu

SEQ ID NO: 239274 - RNA, 21 nt, Human
ucuacauaaaauaaaucuacu

SEQ ID NO: 239275 - RNA, 32 nt, Human
ucuacauagaaaacaugcaguaccuucuuauu

SEQ ID NO: 239276 - RNA, 32 nt, Human
ucuacauagccccagcuugggguccaauccau

SEQ ID NO: 239277 - RNA, 17 nt, Human
ucuacauaguuauucua

SEQ ID NO: 239278 - RNA, 32 nt, Human
ucuacaucagccuuagucauuauggauaguaa

SEQ ID NO: 239279 - RNA, 32 nt, Human
ucuacauccaucaagagagacagagcgcacaa

SEQ ID NO: 239280 - RNA, 32 nt, Human
ucuacaucccaggaggaugcaccaaguugcuc

SEQ ID NO: 239281 - RNA, 22 nt, Human
ucuacauccccuucccccuccu

SEQ ID NO: 239282 - RNA, 32 nt, Human
ucuacaucugcaaccucgcgcccaaggacagc

SEQ ID NO: 239283 - RNA, 32 nt, Human
ucuacaucugcagaaccaggugauugauccuc

SEQ ID NO: 239284 - RNA, 32 nt, Human
ucuacaucugcagcuugagguuagccucauau

SEQ ID NO: 239285 - RNA, 32 nt, Human
ucuacaucuggcaaaagccaaagguuuggaag

SEQ ID NO: 239286 - RNA, 32 nt, Human
ucuacaugaaguuuacagauugguaaauauca

SEQ ID NO: 239287 - RNA, 32 nt, Human
ucuacaugccaugaccuuccuccuccucuuca

SEQ ID NO: 239288 - RNA, 32 nt, Human
ucuacauggaaagaaguuauagaaucuucaua

SEQ ID NO: 239289 - RNA, 32 nt, Human
ucuacauggggcugcugaucuaugccaugugg

SEQ ID NO: 239290 - RNA, 32 nt, Human
ucuacauguaguagagguguaugaagaucaua

SEQ ID NO: 239291 - RNA, 32 nt, Human
ucuacaugugcuuaaaaacaaaaagaaaccua

SEQ ID NO: 239292 - RNA, 32 nt, Human
ucuacauugggcggaagucugugugcacagag

SEQ ID NO: 239293 - RNA, 32 nt, Human
ucuaccaaaaauaaaaauaaaaauuauccagg

SEQ ID NO: 239294 - RNA, 32 nt, Human
ucuaccaaaaauacaaaaauuagccagacgug

SEQ ID NO: 239295 - RNA, 32 nt, Human
ucuaccaaaaauacaaaaauuagccaggcaua

SEQ ID NO: 239296 - RNA, 32 nt, Human
ucuaccaaaaauacaaaaauuagccaggcgug

SEQ ID NO: 239297 - RNA, 32 nt, Human
ucuaccaaaaauacaaaaauuagccgggcgug

SEQ ID NO: 239298 - RNA, 32 nt, Human
ucuaccaaaaauacaaaaauuagccgggugug

SEQ ID NO: 239299 - RNA, 32 nt, Human
ucuaccaaaaauacaaaaauuagcuagacaua

SEQ ID NO: 239300 - RNA, 32 nt, Human
ucuaccaaaaauacaggaaauuaucugggcau

SEQ ID NO: 239301 - RNA, 32 nt, Human
ucuaccaaaacuacaaaaauuagccgggcuca

SEQ ID NO: 239302 - RNA, 32 nt, Human
ucuaccaaaauacaaaaauuagccgggcauga

SEQ ID NO: 239303 - RNA, 32 nt, Human
ucuaccaagccacuccaagagccagccccuuu

SEQ ID NO: 239304 - RNA, 32 nt, Human
ucuaccaaggcccuguuagugcacugauuaua

SEQ ID NO: 239305 - RNA, 32 nt, Human
ucuaccaaguccuggagaugaagggaauucac

SEQ ID NO: 239306 - RNA, 32 nt, Human
ucuaccaauauacaaaaauuagccgggcauga

SEQ ID NO: 239307 - RNA, 32 nt, Human
ucuaccaaugggcaauagagguugagagagau

SEQ ID NO: 239308 - RNA, 32 nt, Human
ucuaccaauucuucaaccagaaaaaccuauug

SEQ ID NO: 239309 - RNA, 32 nt, Human
ucuaccacaauccuccuccuccucuccagggg

SEQ ID NO: 239310 - RNA, 32 nt, Human
ucuaccaccaccacagcaccccagacagcuag

SEQ ID NO: 239311 - RNA, 32 nt, Human
ucuaccacccaggcuggagugcagugguguga

SEQ ID NO: 239312 - RNA, 32 nt, Human
ucuaccacuuuugcaaaaagagaggacccgug

SEQ ID NO: 239313 - RNA, 32 nt, Human
ucuaccagaagccagaaucacagaacagucuc

SEQ ID NO: 239314 - RNA, 32 nt, Human
ucuaccagaucacuccuucacccuccauaaag

SEQ ID NO: 239315 - RNA, 32 nt, Human
ucuaccagcagagaagagaguggcccauucgg

SEQ ID NO: 239316 - RNA, 32 nt, Human
ucuaccaggcagccgagaacagggagauaaac

SEQ ID NO: 239317 - RNA, 32 nt, Human
ucuaccaugagcaauucuccugccucagccuc

SEQ ID NO: 239318 - RNA, 32 nt, Human
ucuaccauggagaagagcaggaagggauacac

SEQ ID NO: 239319 - RNA, 32 nt, Human
ucuaccauguauuguacauaugacuuuaugua

SEQ ID NO: 239320 - RNA, 32 nt, Human
ucuaccauguccaguggaguucagagaucguu

SEQ ID NO: 239321 - RNA, 32 nt, Human
ucuaccaugugauuuccagacuauuggaagug

SEQ ID NO: 239322 - RNA, 32 nt, Human
ucuaccauuucugccacugguguucagcuccu

SEQ ID NO: 239323 - RNA, 32 nt, Human
ucuacccaaagcucugucccccugcucccacu

SEQ ID NO: 239324 - RNA, 32 nt, Human
ucuacccaaagucacuguaacaguuaagugug

SEQ ID NO: 239325 - RNA, 32 nt, Human
ucuacccagauccuuuuucauuuccuuaaguu

SEQ ID NO: 239326 - RNA, 32 nt, Human
ucuacccagcaacuuuccgugcuuuguucccc

SEQ ID NO: 239327 - RNA, 32 nt, Human
ucuacccagcgaggaggaggcggggagagaaa

SEQ ID NO: 239328 - RNA, 32 nt, Human
ucuacccauaccucagccucaggcgaguggcu

SEQ ID NO: 239329 - RNA, 32 nt, Human
ucuacccaucucccaguugcauaguacagugu

SEQ ID NO: 239330 - RNA, 32 nt, Human
ucuacccaucucugcugcuccagcucauaaag

SEQ ID NO: 239331 - RNA, 32 nt, Human
ucuaccccacugcuuccuucugcuccaggccu

SEQ ID NO: 239332 - RNA, 32 nt, Human
ucuaccccagggagaacucgccagagacugag

SEQ ID NO: 239333 - RNA, 24 nt, Human
ucuaccccccaggcugaagugcag

SEQ ID NO: 239334 - RNA, 31 nt, Human
ucuacccccuaaaaauagaaagauuagcaag

SEQ ID NO: 239335 - RNA, 32 nt, Human
ucuaccccucauuucacgcucaaggagucaua

SEQ ID NO: 239336 - RNA, 32 nt, Human
ucuaccccucccggcccugccugcuggugggc

SEQ ID NO: 239337 - RNA, 32 nt, Human
ucuaccccucuggaugccccagucuccucucc

SEQ ID NO: 239338 - RNA, 32 nt, Human
ucuacccgccacugcauuccacagccuguaga

SEQ ID NO: 239339 - RNA, 32 nt, Human
ucuacccggaggagaaagaggcuuccgggcug

SEQ ID NO: 239340 - RNA, 32 nt, Human
ucuacccucagugcaagaccagugccagaugu

SEQ ID NO: 239341 - RNA, 18 nt, Human
ucuacccuccccaagaaa

SEQ ID NO: 239342 - RNA, 32 nt, Human
ucuacccucugccucucaccaggagacacucu

SEQ ID NO: 239343 - RNA, 32 nt, Human
ucuacccugcagcagcagcagccgugauacac

SEQ ID NO: 239344 - RNA, 32 nt, Human
ucuacccugccuggccacuugcuguuucuuca

SEQ ID NO: 239345 - RNA, 32 nt, Human
ucuacccugcucugcaccugugcucgacugcc

SEQ ID NO: 239346 - RNA, 32 nt, Human
ucuacccuguggaggcugaggggucgggggaa

SEQ ID NO: 239347 - RNA, 32 nt, Human
ucuacccuuaccuuucccagcagcaaguucag

SEQ ID NO: 239348 - RNA, 32 nt, Human
ucuaccgacccuguuggcaagucuguaccugu

SEQ ID NO: 239349 - RNA, 32 nt, Human
ucuaccggcauuaagaggcauuccgucuugga

SEQ ID NO: 239350 - RNA, 32 nt, Human
ucuaccgucccucugucugucuuuggaaguau

SEQ ID NO: 239351 - RNA, 32 nt, Human
ucuaccguuggcucuggcagggccaggagaca

SEQ ID NO: 239352 - RNA, 32 nt, Human
ucuaccuagcgcugcaggcuccugggcgauug

SEQ ID NO: 239353 - RNA, 32 nt, Human
ucuaccuaucaucugucuauuuuucugucuau

SEQ ID NO: 239354 - RNA, 32 nt, Human
ucuaccucacugccaccacuccugcuuuuagg

SEQ ID NO: 239355 - RNA, 32 nt, Human
ucuaccuccacccugcauuuuccucuuguccu

SEQ ID NO: 239356 - RNA, 32 nt, Human
ucuaccucccaaagugcugggauuacagacau

SEQ ID NO: 239357 - RNA, 32 nt, Human
ucuaccucccaaagugcugggauuacaggcau

SEQ ID NO: 239358 - RNA, 32 nt, Human
ucuaccucccaaagugcugggauuacagucgu

SEQ ID NO: 239359 - RNA, 32 nt, Human
ucuaccuccuccuaucuggaaucuaggccuaa

SEQ ID NO: 239360 - RNA, 32 nt, Human
ucuaccuccucuuccuccaucuuuggcucuuu

SEQ ID NO: 239361 - RNA, 32 nt, Human
ucuaccucgcacugaacucacagucuauuucc

SEQ ID NO: 239362 - RNA, 32 nt, Human
ucuaccucugaagcgcccuccugggcccugcu

SEQ ID NO: 239363 - RNA, 32 nt, Human
ucuaccucuggcugaaggaguggugcagucaa

SEQ ID NO: 239364 - RNA, 32 nt, Human
ucuaccucugggagaaaaaugacaaauagcaa

SEQ ID NO: 239365 - RNA, 32 nt, Human
ucuaccugacccccucuccucacuggccuggg

SEQ ID NO: 239366 - RNA, 32 nt, Human
ucuaccugccucaagaaggggcucagagcaga

SEQ ID NO: 239367 - RNA, 32 nt, Human
ucuaccugcucacucagaaucauuucugcacc

SEQ ID NO: 239368 - RNA, 32 nt, Human
ucuaccugcuccacccucaauccaccagaacc

SEQ ID NO: 239369 - RNA, 32 nt, Human
ucuaccugcucuguccucuuccuugccagaug

SEQ ID NO: 239370 - RNA, 32 nt, Human
ucuaccuggaaccucggaaugugcuuuauuug

SEQ ID NO: 239371 - RNA, 32 nt, Human
ucuaccuggcaaagcuuuuggauuucaaagcu

SEQ ID NO: 239372 - RNA, 32 nt, Human
ucuaccuggcagcagacugugcaggagcccca

SEQ ID NO: 239373 - RNA, 32 nt, Human
ucuaccugguauauccuauugucucuucugaa

SEQ ID NO: 239374 - RNA, 32 nt, Human
ucuaccuguaggaucagggucuaagcaccuug

SEQ ID NO: 239375 - RNA, 32 nt, Human
ucuaccugucaggaugacuccaggaagacagc

SEQ ID NO: 239376 - RNA, 32 nt, Human
ucuaccuugggacuggggucuccugggaacau

SEQ ID NO: 239377 - RNA, 32 nt, Human
ucuaccuugggugacagagagacggugucuca

SEQ ID NO: 239378 - RNA, 32 nt, Human
ucuaccuuuauugcaguuccccaaaucgccua

SEQ ID NO: 239379 - RNA, 32 nt, Human
ucuaccuuucaucuauuucucucccucccucc

SEQ ID NO: 239380 - RNA, 32 nt, Human
ucuaccuuugacacuccagcaugcuagugaau

SEQ ID NO: 239381 - RNA, 32 nt, Human
ucuacgaaaaacacagaaagauuagccaggca

SEQ ID NO: 239382 - RNA, 32 nt, Human
ucuacgaaaaauacaaaauuagccagauguga

SEQ ID NO: 239383 - RNA, 32 nt, Human
ucuacgaaaaauagaaaaauuagccagacgug

SEQ ID NO: 239384 - RNA, 32 nt, Human
ucuacgauggaagugauuuccuguacuucagc

SEQ ID NO: 239385 - RNA, 32 nt, Human
ucuacgccaauguuaugccagcuccauguucu

SEQ ID NO: 239386 - RNA, 32 nt, Human
ucuacgccacaucacuuaggugcuaagagaug

SEQ ID NO: 239387 - RNA, 32 nt, Human
ucuacgcuccagguggagaacagccccucucc

SEQ ID NO: 239388 - RNA, 32 nt, Human
ucuacggaggggaaccgcagagccagaagagc

SEQ ID NO: 239389 - RNA, 32 nt, Human
ucuacggauauccugcauguccaagccacccg

SEQ ID NO: 239390 - RNA, 32 nt, Human
ucuacggccaugagacugaucccuggccacug

SEQ ID NO: 239391 - RNA, 32 nt, Human
ucuacggggccgcggccacuagcgcggcgccg

SEQ ID NO: 239392 - RNA, 32 nt, Human
ucuacguagccacucuccuucccccauuucug

SEQ ID NO: 239393 - RNA, 32 nt, Human
ucuacgucucuccuggauuuuggguucuuuuu

SEQ ID NO: 239394 - RNA, 32 nt, Human
ucuacgucuuucuccaguuucugagcccuaug

SEQ ID NO: 239395 - RNA, 32 nt, Human
ucuacgugaccuuuaguccucuaccucagagc

SEQ ID NO: 239396 - RNA, 32 nt, Human
ucuacguggugcaccccaccagcuucaucaag

SEQ ID NO: 239397 - RNA, 32 nt, Human
ucuacgugguucaaucagucuucucccaucug

SEQ ID NO: 239398 - RNA, 32 nt, Human
ucuacuaaaaacacaaaaauuagccaggcaug

SEQ ID NO: 239399 - RNA, 32 nt, Human
ucuacuaaaaacacaaaaauuagccaggcgug

SEQ ID NO: 239400 - RNA, 32 nt, Human
ucuacuaaaaacacaaaaauuagccggacgug

SEQ ID NO: 239401 - RNA, 32 nt, Human
ucuacuaaaaacacaaaaauuagccgggcggg

SEQ ID NO: 239402 - RNA, 32 nt, Human
ucuacuaaaaacacaaaaauuagccgggugua

SEQ ID NO: 239403 - RNA, 32 nt, Human
ucuacuaaaaacacaaaaauuagcuaggcaug

SEQ ID NO: 239404 - RNA, 32 nt, Human
ucuacuaaaaacacaaaaauuagcugggcaug

SEQ ID NO: 239405 - RNA, 32 nt, Human
ucuacuaaaaacacaaaaauuagcugggcgug

SEQ ID NO: 239406 - RNA, 32 nt, Human
ucuacuaaaaacacaaaaauuagcugggugug

SEQ ID NO: 239407 - RNA, 32 nt, Human
ucuacuaaaaacacaaauuagccaggcguggu

SEQ ID NO: 239408 - RNA, 32 nt, Human
ucuacuaaaaacgcaaaauuagccgggcgugg

SEQ ID NO: 239409 - RNA, 32 nt, Human
ucuacuaaaaacgcacagaaaaauuagccagg

SEQ ID NO: 239410 - RNA, 32 nt, Human
ucuacuaaaaaguacaaaaauuagcugggugu

SEQ ID NO: 239411 - RNA, 32 nt, Human
ucuacuaaaaauaacaaaaauuagccaggcau

SEQ ID NO: 239412 - RNA, 32 nt, Human
ucuacuaaaaauaacaaaaauuagcugggcgu

SEQ ID NO: 239413 - RNA, 32 nt, Human
ucuacuaaaaauaacaacaauuagcuaggcgu

SEQ ID NO: 239414 - RNA, 32 nt, Human
ucuacuaaaaauaagaaaaauuagcugggcgu

SEQ ID NO: 239415 - RNA, 32 nt, Human
ucuacuaaaaauacaaaaauagccaggcaugg

SEQ ID NO: 239416 - RNA, 32 nt, Human
ucuacuaaaaauacaaaaauuagccagacgug

SEQ ID NO: 239417 - RNA, 32 nt, Human
ucuacuaaaaauacaaaaauuagccaggacug

SEQ ID NO: 239418 - RNA, 32 nt, Human
ucuacuaaaaauacaaaaauuagccaggcacg

SEQ ID NO: 239419 - RNA, 32 nt, Human
ucuacuaaaaauacaaaaauuagccaggcauc

SEQ ID NO: 239420 - RNA, 32 nt, Human
ucuacuaaaaauacaaaaauuagccaggcaug

SEQ ID NO: 239421 - RNA, 32 nt, Human
ucuacuaaaaauacaaaaauuagccaggcgug

SEQ ID NO: 239422 - RNA, 32 nt, Human
ucuacuaaaaauacaaaaauuagccaggcuua

SEQ ID NO: 239423 - RNA, 32 nt, Human
ucuacuaaaaauacaaaaauuagccaggggug

SEQ ID NO: 239424 - RNA, 32 nt, Human
ucuacuaaaaauacaaaaauuagccagguaug

SEQ ID NO: 239425 - RNA, 32 nt, Human
ucuacuaaaaauacaaaaauuagccagguggu

SEQ ID NO: 239426 - RNA, 32 nt, Human
ucuacuaaaaauacaaaaauuagccaggugug

SEQ ID NO: 239427 - RNA, 32 nt, Human
ucuacuaaaaauacaaaaauuagccagguguu

SEQ ID NO: 239428 - RNA, 32 nt, Human
ucuacuaaaaauacaaaaauuagccagucacg

SEQ ID NO: 239429 - RNA, 32 nt, Human
ucuacuaaaaauacaaaaauuagcccggcaug

SEQ ID NO: 239430 - RNA, 32 nt, Human
ucuacuaaaaauacaaaaauuagcccggcgug

SEQ ID NO: 239431 - RNA, 32 nt, Human
ucuacuaaaaauacaaaaauuagcccggugug

SEQ ID NO: 239432 - RNA, 32 nt, Human
ucuacuaaaaauacaaaaauuagccggacgca

SEQ ID NO: 239433 - RNA, 32 nt, Human
ucuacuaaaaauacaaaaauuagccggacgug

SEQ ID NO: 239434 - RNA, 32 nt, Human
ucuacuaaaaauacaaaaauuagccggcaggg

SEQ ID NO: 239435 - RNA, 32 nt, Human
ucuacuaaaaauacaaaaauuagccgggcaug

SEQ ID NO: 239436 - RNA, 32 nt, Human
ucuacuaaaaauacaaaaauuagccgggccug

SEQ ID NO: 239437 - RNA, 32 nt, Human
ucuacuaaaaauacaaaaauuagccgggcgua

SEQ ID NO: 239438 - RNA, 32 nt, Human
ucuacuaaaaauacaaaaauuagccgggcgug

SEQ ID NO: 239439 - RNA, 32 nt, Human
ucuacuaaaaauacaaaaauuagccggguagu

SEQ ID NO: 239440 - RNA, 32 nt, Human
ucuacuaaaaauacaaaaauuagccgggugug

SEQ ID NO: 239441 - RNA, 32 nt, Human
ucuacuaaaaauacaaaaauuagccgguggug

SEQ ID NO: 239442 - RNA, 32 nt, Human
ucuacuaaaaauacaaaaauuagcuaggcaug

SEQ ID NO: 239443 - RNA, 32 nt, Human
ucuacuaaaaauacaaaaauuagcuaggccug

SEQ ID NO: 239444 - RNA, 32 nt, Human
ucuacuaaaaauacaaaaauuagcuaggcggg

SEQ ID NO: 239445 - RNA, 32 nt, Human
ucuacuaaaaauacaaaaauuagcuaggcgug

SEQ ID NO: 239446 - RNA, 32 nt, Human
ucuacuaaaaauacaaaaauuagcuagguaug

SEQ ID NO: 239447 - RNA, 32 nt, Human
ucuacuaaaaauacaaaaauuaggccaggugc

SEQ ID NO: 239448 - RNA, 32 nt, Human
ucuacuaaaaauacaaaaauuaggccgggcgc

SEQ ID NO: 239449 - RNA, 32 nt, Human
ucuacuaaaaauacaaaaauuaggccggguac

SEQ ID NO: 239450 - RNA, 32 nt, Human
ucuacuaaaaauacaaaaauuagucaggcaug

SEQ ID NO: 239451 - RNA, 32 nt, Human
ucuacuaaaaauacaaaaauuagucaggcgcg

SEQ ID NO: 239452 - RNA, 32 nt, Human
ucuacuaaaaauacaaaaauuagucaggcgug

SEQ ID NO: 239453 - RNA, 32 nt, Human
ucuacuaaaaauacaaaaauuagucaggugug

SEQ ID NO: 239454 - RNA, 32 nt, Human
ucuacuaaaaauacaaaaauuagucgggcgug

SEQ ID NO: 239455 - RNA, 32 nt, Human
ucuacuaaaaauacaaaacuagccaggaaugg

SEQ ID NO: 239456 - RNA, 32 nt, Human
ucuacuaaaaauacaaaacuagccaggcgcgg

SEQ ID NO: 239457 - RNA, 32 nt, Human
ucuacuaaaaauacaaaacuuagccaggcaug

SEQ ID NO: 239458 - RNA, 32 nt, Human
ucuacuaaaaauacaaaacuuagccaggugug

SEQ ID NO: 239459 - RNA, 32 nt, Human
ucuacuaaaaauacaaaagaaaauuagccggg

SEQ ID NO: 239460 - RNA, 19 nt, Human
ucuacuaaaaauacaaaau

SEQ ID NO: 239461 - RNA, 32 nt, Human
ucuacuaaaaauacaaaauauuagcugggcgu

SEQ ID NO: 239462 - RNA, 32 nt, Human
ucuacuaaaaauacaaaauuagcagggcaugg

SEQ ID NO: 239463 - RNA, 32 nt, Human
ucuacuaaaaauacaaaauuagccagacgugg

SEQ ID NO: 239464 - RNA, 32 nt, Human
ucuacuaaaaauacaaaauuagccagaugugg

SEQ ID NO: 239465 - RNA, 32 nt, Human
ucuacuaaaaauacaaaauuagccaggcauga

SEQ ID NO: 239466 - RNA, 32 nt, Human
ucuacuaaaaauacaaaauuagccaggcaugg

SEQ ID NO: 239467 - RNA, 32 nt, Human
ucuacuaaaaauacaaaauuagccaggcguag

SEQ ID NO: 239468 - RNA, 32 nt, Human
ucuacuaaaaauacaaaauuagccaggcguga

SEQ ID NO: 239469 - RNA, 32 nt, Human
ucuacuaaaaauacaaaauuagccaggcgugg

SEQ ID NO: 239470 - RNA, 32 nt, Human
ucuacuaaaaauacaaaauuagccaggugugg

SEQ ID NO: 239471 - RNA, 32 nt, Human
ucuacuaaaaauacaaaauuagccgggcauga

SEQ ID NO: 239472 - RNA, 32 nt, Human
ucuacuaaaaauacaaaauuagccgggcaugg

SEQ ID NO: 239473 - RNA, 32 nt, Human
ucuacuaaaaauacaaaauuagccgggcgugg

SEQ ID NO: 239474 - RNA, 32 nt, Human
ucuacuaaaaauacaaaauuagccggguggug

SEQ ID NO: 239475 - RNA, 32 nt, Human
ucuacuaaaaauacaaaauuagccgggugugg

SEQ ID NO: 239476 - RNA, 32 nt, Human
ucuacuaaaaauacaaaauuagcugggcaugg

SEQ ID NO: 239477 - RNA, 32 nt, Human
ucuacuaaaaauacaaaauuagcugggcgugg

SEQ ID NO: 239478 - RNA, 32 nt, Human
ucuacuaaaaauacaaaauuagcugggugggg

SEQ ID NO: 239479 - RNA, 32 nt, Human
ucuacuaaaaauacaaaauuagcugggugugc

SEQ ID NO: 239480 - RNA, 32 nt, Human
ucuacuaaaaauacaaaauuagcugggugugg

SEQ ID NO: 239481 - RNA, 32 nt, Human
ucuacuaaaaauacaaaauuagucaggcauug

SEQ ID NO: 239482 - RNA, 32 nt, Human
ucuacuaaaaauacaaaauuagucgggcguag

SEQ ID NO: 239483 - RNA, 32 nt, Human
ucuacuaaaaauacaaaauuagucggguaugg

SEQ ID NO: 239484 - RNA, 32 nt, Human
ucuacuaaaaauacaaacauuagccaggugug

SEQ ID NO: 239485 - RNA, 32 nt, Human
ucuacuaaaaauacaagaaacuagccagaugc

SEQ ID NO: 239486 - RNA, 32 nt, Human
ucuacuaaaaauacaagaauuagccaggugug

SEQ ID NO: 239487 - RNA, 32 nt, Human
ucuacuaaaaauacaauaaauuagcugggcau

SEQ ID NO: 239488 - RNA, 32 nt, Human
ucuacuaaaaauacaauaauuagccaggcaug

SEQ ID NO: 239489 - RNA, 32 nt, Human
ucuacuaaaaauacacaaaauuagcugggcgu

SEQ ID NO: 239490 - RNA, 32 nt, Human
ucuacuaaaaauacacaaauuagcuaggcaug

SEQ ID NO: 239491 - RNA, 32 nt, Human
ucuacuaaaaauacagaaaauuagcugggcgc

SEQ ID NO: 239492 - RNA, 32 nt, Human
ucuacuaaaaauacagaaauuagccgggcaug

SEQ ID NO: 239493 - RNA, 32 nt, Human
ucuacuaaaaauacagaaauuagccgggcgug

SEQ ID NO: 239494 - RNA, 32 nt, Human
ucuacuaaaaauacagaaauuagccggucaug

SEQ ID NO: 239495 - RNA, 32 nt, Human
ucuacuaaaaauacagaauuagccaggcaugg

SEQ ID NO: 239496 - RNA, 32 nt, Human
ucuacuaaaaauacagcaaauuagcugggcgu

SEQ ID NO: 239497 - RNA, 32 nt, Human
ucuacuaaaaauaccaaaaauuagccgagcgu

SEQ ID NO: 239498 - RNA, 32 nt, Human
ucuacuaaaaauaccaaaaauuagccgggcgu

SEQ ID NO: 239499 - RNA, 32 nt, Human
ucuacuaaaaauaccaaauuagccaggcgugg

SEQ ID NO: 239500 - RNA, 32 nt, Human
ucuacuaaaaauacgaaauuagccaggugugg

SEQ ID NO: 239501 - RNA, 32 nt, Human
ucuacuaaaaauauaaaauuagccaggcaugg

SEQ ID NO: 239502 - RNA, 32 nt, Human
ucuacuaaaaaugcaaaaauuagccaggcgua

SEQ ID NO: 239503 - RNA, 32 nt, Human
ucuacuaaaaaugcaaaaauuagccgggcgug

SEQ ID NO: 239504 - RNA, 32 nt, Human
ucuacuaaaaaugcaaaaauuaguccggcgug

SEQ ID NO: 239505 - RNA, 32 nt, Human
ucuacuaaaaaugcaaaauuagccgggcgugg

SEQ ID NO: 239506 - RNA, 32 nt, Human
ucuacuaaaaaugcaaaauuagucaggcaugg

SEQ ID NO: 239507 - RNA, 32 nt, Human
ucuacuaaaaauuuaaaaauuagcugggcaug

SEQ ID NO: 239508 - RNA, 32 nt, Human
ucuacuaaaaauuugaaauuagccaggcaugg

SEQ ID NO: 239509 - RNA, 32 nt, Human
ucuacuaaaacauacaaaaauuagccgggcau

SEQ ID NO: 239510 - RNA, 32 nt, Human
ucuacuaaaacuacaaaaauuagccgggugug

SEQ ID NO: 239511 - RNA, 32 nt, Human
ucuacuaaaaguacaaaaauuagccaggcggu

SEQ ID NO: 239512 - RNA, 32 nt, Human
ucuacuaaaaguacaaaaauuagccaggcgug

SEQ ID NO: 239513 - RNA, 32 nt, Human
ucuacuaaaaguacaaaaauuagccagguggu

SEQ ID NO: 239514 - RNA, 32 nt, Human
ucuacuaaaaguacagaauuagccgggcgugg

SEQ ID NO: 239515 - RNA, 32 nt, Human
ucuacuaaaauacaaaaaguuagcugggcuug

SEQ ID NO: 239516 - RNA, 32 nt, Human
ucuacuaaaauacaaaaauuagccagacaugg

SEQ ID NO: 239517 - RNA, 27 nt, Human
ucuacuaaaauacaaaaauuagccggg

SEQ ID NO: 239518 - RNA, 32 nt, Human
ucuacuaaaauacaaaaauuagccgggcguag

SEQ ID NO: 239519 - RNA, 32 nt, Human
ucuacuaaaauacaaaaauuagcugggcauga

SEQ ID NO: 239520 - RNA, 32 nt, Human
ucuacuaaaauacaaaaauuagcugggcaugg

SEQ ID NO: 239521 - RNA, 32 nt, Human
ucuacuaaaauacaaaaauuagcugggugugg

SEQ ID NO: 239522 - RNA, 32 nt, Human
ucuacuaaaauacaaaaauuaggugugguggc

SEQ ID NO: 239523 - RNA, 32 nt, Human
ucuacuaaaauacaaaaauuauccgggcaugg

SEQ ID NO: 239524 - RNA, 32 nt, Human
ucuacuaaaauacaaaaauuuagccgggcgua

SEQ ID NO: 239525 - RNA, 32 nt, Human
ucuacuaaaauacaaaauuagccaggcguggu

SEQ ID NO: 239526 - RNA, 32 nt, Human
ucuacuaaaauacaaguaaauaagccaggcau

SEQ ID NO: 239527 - RNA, 32 nt, Human
ucuacuaaaauacacaaauuagcuaggcauug

SEQ ID NO: 239528 - RNA, 32 nt, Human
ucuacuaaaauacauaaauuagccgggugugg

SEQ ID NO: 239529 - RNA, 32 nt, Human
ucuacuaaaauauaaaaauuagccagaugugg

SEQ ID NO: 239530 - RNA, 32 nt, Human
ucuacuaaaauauaaaaauuagccgggugugg

SEQ ID NO: 239531 - RNA, 32 nt, Human
ucuacuaaaauauacaaaaauuagccaggugu

SEQ ID NO: 239532 - RNA, 32 nt, Human
ucuacuaaaauauacaaaaauuagccuggcgu

SEQ ID NO: 239533 - RNA, 32 nt, Human
ucuacuaaaauuacaaaaauuagccggccaug

SEQ ID NO: 239534 - RNA, 32 nt, Human
ucuacuaaaauuacaaaaauuagccgggcaug

SEQ ID NO: 239535 - RNA, 32 nt, Human
ucuacuaaaauuacaaaaauuagccggguguc

SEQ ID NO: 239536 - RNA, 32 nt, Human
ucuacuaaacauacaaaaauuagcuaggcgug

SEQ ID NO: 239537 - RNA, 32 nt, Human
ucuacuaaauacagaaaauuagccaggcaugg

SEQ ID NO: 239538 - RNA, 32 nt, Human
ucuacuaaauauacaaaauuagccgggcgugg

SEQ ID NO: 239539 - RNA, 32 nt, Human
ucuacuaagaauacaaaauuagcugggcaugg

SEQ ID NO: 239540 - RNA, 32 nt, Human
ucuacuaaggauacaaaauuagccgggcaugg

SEQ ID NO: 239541 - RNA, 32 nt, Human
ucuacuaaguuuccuuuuaauucuaccaaccc

SEQ ID NO: 239542 - RNA, 32 nt, Human
ucuacuaauacaucugcuucaaaaugaacaua

SEQ ID NO: 239543 - RNA, 32 nt, Human
ucuacuacaaauacaaaaauuagccaggcgug

SEQ ID NO: 239544 - RNA, 32 nt, Human
ucuacuacaaauacaaaaauuagccgggugug

SEQ ID NO: 239545 - RNA, 32 nt, Human
ucuacuaccauguagugugauggagagaacuu

SEQ ID NO: 239546 - RNA, 32 nt, Human
ucuacuacugcaggaugaccucaccuucccaa

SEQ ID NO: 239547 - RNA, 32 nt, Human
ucuacuagaaauacaaaaauuagccaggugug

SEQ ID NO: 239548 - RNA, 32 nt, Human
ucuacuagaacucagcuagagaggacaaaaca

SEQ ID NO: 239549 - RNA, 32 nt, Human
ucuacuagucgcuggccccagugcaguacccc

SEQ ID NO: 239550 - RNA, 32 nt, Human
ucuacuauaaauacaaaaauuagccaggcucg

SEQ ID NO: 239551 - RNA, 32 nt, Human
ucuacucaaaaauacaaaaauuagccuggugu

SEQ ID NO: 239552 - RNA, 32 nt, Human
ucuacucacugcaaccuccaccucccggguuc

SEQ ID NO: 239553 - RNA, 32 nt, Human
ucuacucagcacaacugacugcuucagugcug

SEQ ID NO: 239554 - RNA, 23 nt, Human
ucuacucaggaggcugaggcagu

SEQ ID NO: 239555 - RNA, 32 nt, Human
ucuacuccacugcugucuaucuugccugccgg

SEQ ID NO: 239556 - RNA, 32 nt, Human
ucuacuccagccugggcaacacagcaagaccc

SEQ ID NO: 239557 - RNA, 32 nt, Human
ucuacuccagccugggcaauaggguaagaucc

SEQ ID NO: 239558 - RNA, 32 nt, Human
ucuacuccaugauccagucggccaacagccau

SEQ ID NO: 239559 - RNA, 32 nt, Human
ucuacucccgaggcucuguacauugcugccac

SEQ ID NO: 239560 - RNA, 32 nt, Human
ucuacucccucuugacugucucagccucuggg

SEQ ID NO: 239561 - RNA, 32 nt, Human
ucuacucccugcagccccucgcacuacccagc

SEQ ID NO: 239562 - RNA, 32 nt, Human
ucuacuccgguuggcagagaacacucacacac

SEQ ID NO: 239563 - RNA, 32 nt, Human
ucuacuccucacccgucuacauugccuucuuc

SEQ ID NO: 239564 - RNA, 32 nt, Human
ucuacucuacccagcuugcgcuccccagccgc

SEQ ID NO: 239565 - RNA, 32 nt, Human
ucuacucuagaagaaagacuuuggaagcagcu

SEQ ID NO: 239566 - RNA, 32 nt, Human
ucuacucuagagaaguggacuggaggagcugg

SEQ ID NO: 239567 - RNA, 32 nt, Human
ucuacucucauuuugauuacuuccuuaugguu

SEQ ID NO: 239568 - RNA, 32 nt, Human
ucuacucuccaacauaccagauuguacacugu

SEQ ID NO: 239569 - RNA, 32 nt, Human
ucuacucuccuucucugguucucagcuguggc

SEQ ID NO: 239570 - RNA, 32 nt, Human
ucuacucugagaguuuuuauacacuuggaaaa

SEQ ID NO: 239571 - RNA, 32 nt, Human
ucuacucugccccuggggaauguguccccugc

SEQ ID NO: 239572 - RNA, 32 nt, Human
ucuacucugggugacagaaugagaccccaucu

SEQ ID NO: 239573 - RNA, 32 nt, Human
ucuacucuuagcacugagaguuuuucacgucc

SEQ ID NO: 239574 - RNA, 32 nt, Human
ucuacucuuccucuauuccuucauaagaaucu

SEQ ID NO: 239575 - RNA, 32 nt, Human
ucuacugaaaaauacaacaaaaauuagacagg

SEQ ID NO: 239576 - RNA, 32 nt, Human
ucuacugaaaacacaaacaacaaagcagaaga

SEQ ID NO: 239577 - RNA, 32 nt, Human
ucuacugaaaauacaaaaauuagccagacgug

SEQ ID NO: 239578 - RNA, 32 nt, Human
ucuacugaaaauacaaaaauuagccaggcgug

SEQ ID NO: 239579 - RNA, 32 nt, Human
ucuacugaaaauacaaaaauuagccaggcuug

SEQ ID NO: 239580 - RNA, 32 nt, Human
ucuacugaaaauacaaaaauuagccagguaug

SEQ ID NO: 239581 - RNA, 32 nt, Human
ucuacugaaaauacaaaaauuagccaggugug

SEQ ID NO: 239582 - RNA, 32 nt, Human
ucuacugaaaauacaaaaauuagccgggcaug

SEQ ID NO: 239583 - RNA, 32 nt, Human
ucuacugaaaauacaaaaauuagccgggcgug

SEQ ID NO: 239584 - RNA, 32 nt, Human
ucuacugaaaauacaaaaauuagucaggugca

SEQ ID NO: 239585 - RNA, 32 nt, Human
ucuacugaaaauacaaaauuagccgggcauug

SEQ ID NO: 239586 - RNA, 32 nt, Human
ucuacugaaaauacaagaaauuagcugggacu

SEQ ID NO: 239587 - RNA, 32 nt, Human
ucuacugaaaauacagaauuagccaggcaugg

SEQ ID NO: 239588 - RNA, 32 nt, Human
ucuacugaaaauauaaaaauuagccaggcaug

SEQ ID NO: 239589 - RNA, 32 nt, Human
ucuacugaaaauauaaaaauuagccaggcgug

SEQ ID NO: 239590 - RNA, 32 nt, Human
ucuacugaaaaugcaaaaauuagccagguaua

SEQ ID NO: 239591 - RNA, 32 nt, Human
ucuacugaaaaugcaaaaauuagccaggugug

SEQ ID NO: 239592 - RNA, 23 nt, Human
ucuacugaaaauucaaaauuagc

SEQ ID NO: 239593 - RNA, 32 nt, Human
ucuacugaaauacaaaagaaauuagccaggug

SEQ ID NO: 239594 - RNA, 32 nt, Human
ucuacugaaaugcacagucaugcagagcccag

SEQ ID NO: 239595 - RNA, 32 nt, Human
ucuacugaauucuucuaauuccuucacaacag

SEQ ID NO: 239596 - RNA, 19 nt, Human
ucuacugacauugacuagc

SEQ ID NO: 239597 - RNA, 32 nt, Human
ucuacugcauccaugcucucagucucuuccuc

SEQ ID NO: 239598 - RNA, 32 nt, Human
ucuacugcguagcugggauuacaggugcccac

SEQ ID NO: 239599 - RNA, 32 nt, Human
ucuacugcucaagaacagauuugaggccaggu

SEQ ID NO: 239600 - RNA, 32 nt, Human
ucuacugcucccuccaggucugggggcuuuua

SEQ ID NO: 239601 - RNA, 19 nt, Human
ucuacugcucguggugcuc

SEQ ID NO: 239602 - RNA, 32 nt, Human
ucuacugcucuucuuuagccugugaugagggg

SEQ ID NO: 239603 - RNA, 32 nt, Human
ucuacugcuucagagcauacaacugaugugcc

SEQ ID NO: 239604 - RNA, 32 nt, Human
ucuacuggaaaagauugugagauugaacuuau

SEQ ID NO: 239605 - RNA, 32 nt, Human
ucuacuggacuuuucucccaaacaggacaagc

SEQ ID NO: 239606 - RNA, 22 nt, Human
ucuacuggcuggagugcagugg

SEQ ID NO: 239607 - RNA, 32 nt, Human
ucuacugguccucuuaacugugguguugaggc

SEQ ID NO: 239608 - RNA, 32 nt, Human
ucuacuggugaggaaacaugaggaucagaggc

SEQ ID NO: 239609 - RNA, 32 nt, Human
ucuacuguaaucucucaauauucauagaagau

SEQ ID NO: 239610 - RNA, 32 nt, Human
ucuacuguaguuggagaucauuagaauugaau

SEQ ID NO: 239611 - RNA, 32 nt, Human
ucuacugucccuuccuagcugugugaucuuga

SEQ ID NO: 239612 - RNA, 32 nt, Human
ucuacugucuucaugccucagcacagcagaga

SEQ ID NO: 239613 - RNA, 32 nt, Human
ucuacugugcaaggaagauguaaggaaaaacu

SEQ ID NO: 239614 - RNA, 32 nt, Human
ucuacuguucauaaaccaugcuaacauuuucc

SEQ ID NO: 239615 - RNA, 32 nt, Human
ucuacuuaagaaaguccucuuugcccugugug

SEQ ID NO: 239616 - RNA, 32 nt, Human
ucuacuuaguucagaaaaaugauguugaauug

SEQ ID NO: 239617 - RNA, 32 nt, Human
ucuacuucaccugaaaccacagauccauggca

SEQ ID NO: 239618 - RNA, 32 nt, Human
ucuacuucaguuccugucuggcccagaucucu

SEQ ID NO: 239619 - RNA, 32 nt, Human
ucuacuugagccugugugcccacugaagagau

SEQ ID NO: 239620 - RNA, 32 nt, Human
ucuacuugcaggacccuuccuccuucccuagg

SEQ ID NO: 239621 - RNA, 32 nt, Human
ucuacuugggaucucaggaggcugcaaucaaa

SEQ ID NO: 239622 - RNA, 32 nt, Human
ucuacuuguuuuucccaucucuuccuuuccaa

SEQ ID NO: 239623 - RNA, 32 nt, Human
ucuacuuuacaccuuucucugccuuguaucug

SEQ ID NO: 239624 - RNA, 32 nt, Human
ucuacuuuaucccuuccuuuuaauaguuccuu

SEQ ID NO: 239625 - RNA, 32 nt, Human
ucuacuuuauuuauuguucccuugaaaugacu

SEQ ID NO: 239626 - RNA, 32 nt, Human
ucuacuuucccucugggauuugcccacguacc

SEQ ID NO: 239627 - RNA, 32 nt, Human
ucuacuuucccugaggcuuuggggucagagua

SEQ ID NO: 239628 - RNA, 32 nt, Human
ucuacuuuccuacugcagccuucagauucuca

SEQ ID NO: 239629 - RNA, 32 nt, Human
ucuacuuuccuauacugccaaagaaugugagg

SEQ ID NO: 239630 - RNA, 32 nt, Human
ucuacuuucuuucucacauucauuucuuaggu

SEQ ID NO: 239631 - RNA, 32 nt, Human
ucuacuuugugucccuggcagggccuggagaa

SEQ ID NO: 239632 - RNA, 32 nt, Human
ucuacuuuuacauccccaaaccaccuuuguca

SEQ ID NO: 239633 - RNA, 32 nt, Human
ucuacuuuucuuaaaucucuguucaucagugg

SEQ ID NO: 239634 - RNA, 32 nt, Human
ucuagaaaaauguagagacuccaccaaaaacu

SEQ ID NO: 239635 - RNA, 32 nt, Human
ucuagaaaacaaaaugaaagaaaacaaauaug

SEQ ID NO: 239636 - RNA, 32 nt, Human
ucuagaaaacauagcuucuuacugaacuugaa

SEQ ID NO: 239637 - RNA, 32 nt, Human
ucuagaaaaccagcuuguggcuaacagucccu

SEQ ID NO: 239638 - RNA, 32 nt, Human
ucuagaaaagagauuucuaggccucauguaua

SEQ ID NO: 239639 - RNA, 32 nt, Human
ucuagaaaaggggagacucacuucccugggag

SEQ ID NO: 239640 - RNA, 32 nt, Human
ucuagaaaguaaauauauugcugagagggaaa

SEQ ID NO: 239641 - RNA, 32 nt, Human
ucuagaaauaggugaaagugagagguggggga

SEQ ID NO: 239642 - RNA, 32 nt, Human
ucuagaaauguucacaagguaccccaaaacuc

SEQ ID NO: 239643 - RNA, 32 nt, Human
ucuagaaauuacaagcauauaacuuuagccua

SEQ ID NO: 239644 - RNA, 32 nt, Human
ucuagaaauuacguauauuuugugcuacuguc

SEQ ID NO: 239645 - RNA, 32 nt, Human
ucuagaacagccuggucaacauggugaaaccc

SEQ ID NO: 239646 - RNA, 32 nt, Human
ucuagaaccccacgcguccggaaguccuuaua

SEQ ID NO: 239647 - RNA, 32 nt, Human
ucuagaaccucaggaagcugcagcuggagggc

SEQ ID NO: 239648 - RNA, 32 nt, Human
ucuagaacgguucugaaauccugcugaagguu

SEQ ID NO: 239649 - RNA, 32 nt, Human
ucuagaacuaugagcccgaggccuuccccucu

SEQ ID NO: 239650 - RNA, 32 nt, Human
ucuagaacuucaucgcccucugaucgccgauc

SEQ ID NO: 239651 - RNA, 32 nt, Human
ucuagaagccaagggaaaggggugcuuuuaua

SEQ ID NO: 239652 - RNA, 32 nt, Human
ucuagaagccgcuguuaccucuuguuuacagu

SEQ ID NO: 239653 - RNA, 32 nt, Human
ucuagaaggaagccaagcagcugccuuccuuu

SEQ ID NO: 239654 - RNA, 32 nt, Human
ucuagaaggagcuuccugacuggaaccagaga

SEQ ID NO: 239655 - RNA, 20 nt, Human
ucuagaaggcugcagcguga

SEQ ID NO: 239656 - RNA, 32 nt, Human
ucuagaauccacccucuugugcccuuaagcau

SEQ ID NO: 239657 - RNA, 32 nt, Human
ucuagaaucuggaacugucaccaugaugaaug

SEQ ID NO: 239658 - RNA, 32 nt, Human
ucuagacaaaggacuaggacaggggcagccua

SEQ ID NO: 239659 - RNA, 32 nt, Human
ucuagacaucaguuuccacaucugaaaaauaa

SEQ ID NO: 239660 - RNA, 32 nt, Human
ucuagacauuuacuaucacugcaccugaagaa

SEQ ID NO: 239661 - RNA, 32 nt, Human
ucuagaccagaagaggaugacaauggcaacaa

SEQ ID NO: 239662 - RNA, 32 nt, Human
ucuagaccagaucuagccccacccucacucca

SEQ ID NO: 239663 - RNA, 32 nt, Human
ucuagaccagccugaccaacauggagaaaccc

SEQ ID NO: 239664 - RNA, 32 nt, Human
ucuagaccagccugaccaacauggugaaaccc

SEQ ID NO: 239665 - RNA, 32 nt, Human
ucuagaccagccuggccaacauauagugaaac

SEQ ID NO: 239666 - RNA, 32 nt, Human
ucuagaccagccuggccagcauggugaaaacc

SEQ ID NO: 239667 - RNA, 32 nt, Human
ucuagaccagccuggccagcauggugaaaccc

SEQ ID NO: 239668 - RNA, 32 nt, Human
ucuagaccagccugggcaacauagugagaccc

SEQ ID NO: 239669 - RNA, 32 nt, Human
ucuagaccagccugggcaacguggugaaaccc

SEQ ID NO: 239670 - RNA, 32 nt, Human
ucuagaccagccuggucaacauggcgaaaccc

SEQ ID NO: 239671 - RNA, 32 nt, Human
ucuagaccaucccugaugcguagaugugagag

SEQ ID NO: 239672 - RNA, 23 nt, Human
ucuagacccucccuuuccuguca

SEQ ID NO: 239673 - RNA, 32 nt, Human
ucuagaccucugacaucaugguguuuucuuaa

SEQ ID NO: 239674 - RNA, 32 nt, Human
ucuagaccuggcucuuucucucccgucucagu

SEQ ID NO: 239675 - RNA, 32 nt, Human
ucuagaccuucaucgcccucugaucgccgauc

SEQ ID NO: 239676 - RNA, 32 nt, Human
ucuagacucacugcaaccuccaccuccugugu

SEQ ID NO: 239677 - RNA, 32 nt, Human
ucuagacuccagcggcuggaauuggguggggg

SEQ ID NO: 239678 - RNA, 32 nt, Human
ucuagacugggaaacauacacauacaagcaga

SEQ ID NO: 239679 - RNA, 32 nt, Human
ucuagacugggacaauggcucacaucuguaau

SEQ ID NO: 239680 - RNA, 32 nt, Human
ucuagagaaacagaacaaauauacaaagagau

SEQ ID NO: 239681 - RNA, 32 nt, Human
ucuagagacaucuuaggcccucccuucaucuu

SEQ ID NO: 239682 - RNA, 23 nt, Human
ucuagagaccccaccucugugaa

SEQ ID NO: 239683 - RNA, 32 nt, Human
ucuagagagaaaagccucauggaacagauaac

SEQ ID NO: 239684 - RNA, 32 nt, Human
ucuagagagaaggaaauuaauguuucuuaaua

SEQ ID NO: 239685 - RNA, 32 nt, Human
ucuagagagucaaauggucuugcucaauucuu

SEQ ID NO: 239686 - RNA, 32 nt, Human
ucuagagcaguuggguuggaggcucauugagg

SEQ ID NO: 239687 - RNA, 32 nt, Human
ucuagagcccaggaauucaaguuuaacaugag

SEQ ID NO: 239688 - RNA, 32 nt, Human
ucuagagccccagcugcuggcggcugcuggaa

SEQ ID NO: 239689 - RNA, 32 nt, Human
ucuagagcuacacuacugccaaugccuucaua

SEQ ID NO: 239690 - RNA, 32 nt, Human
ucuagagcugguugcaauuauuggacaagcag

SEQ ID NO: 239691 - RNA, 32 nt, Human
ucuagagcuugcugcuguucaaagcacuccuu

SEQ ID NO: 239692 - RNA, 32 nt, Human
ucuagaggaagaggaggacgacaggccauacg

SEQ ID NO: 239693 - RNA, 32 nt, Human
ucuagaggaaguaucuauucacugugaaaauc

SEQ ID NO: 239694 - RNA, 20 nt, Human
ucuagagggauccaccgcca

SEQ ID NO: 239695 - RNA, 32 nt, Human
ucuagaguagcucccauauauggagaugggug

SEQ ID NO: 239696 - RNA, 26 nt, Human
ucuagagucacucuaaccuugcuaag

SEQ ID NO: 239697 - RNA, 31 nt, Human
ucuagaguuaucuucuuuauuauuccuaguc

SEQ ID NO: 239698 - RNA, 32 nt, Human
ucuagaguuccuaccauggagugggucuggag

SEQ ID NO: 239699 - RNA, 23 nt, Human
ucuagaguugcccauuccuguua

SEQ ID NO: 239700 - RNA, 32 nt, Human
ucuagauaaaacuuucuuuucugaucaugaau

SEQ ID NO: 239701 - RNA, 32 nt, Human
ucuagauagauaaccucaccccaaucacaggc

SEQ ID NO: 239702 - RNA, 32 nt, Human
ucuagauaucuucuccacccuccuugcaccag

SEQ ID NO: 239703 - RNA, 32 nt, Human
ucuagauauuuuuaguuuguugccaagguagc

SEQ ID NO: 239704 - RNA, 32 nt, Human
ucuagaucccccuccccugccugcucugcagu

SEQ ID NO: 239705 - RNA, 32 nt, Human
ucuagauccucaacuugaccucccaggcccag

SEQ ID NO: 239706 - RNA, 32 nt, Human
ucuagaugaacuguccaaugcugacaguagga

SEQ ID NO: 239707 - RNA, 32 nt, Human
ucuagaugaaguuuuacauuguugagcuauug

SEQ ID NO: 239708 - RNA, 32 nt, Human
ucuagaugaauugggaguaucucuccaguuau

SEQ ID NO: 239709 - RNA, 32 nt, Human
ucuagaugacagagcaagacccugcuccugga

SEQ ID NO: 239710 - RNA, 30 nt, Human
ucuagaugacucugacccccgccccagguc

SEQ ID NO: 239711 - RNA, 32 nt, Human
ucuagaugcaaauaacuccuucaccaggcagu

SEQ ID NO: 239712 - RNA, 32 nt, Human
ucuagaugccuaguuugguagccaauucugcu

SEQ ID NO: 239713 - RNA, 32 nt, Human
ucuagauggcacaaaccaccucucagggaaua

SEQ ID NO: 239714 - RNA, 32 nt, Human
ucuagauggcccugucuugacccugaaaugaa

SEQ ID NO: 239715 - RNA, 32 nt, Human
ucuagauuuuccuauguugaaugcuuaaagca

SEQ ID NO: 239716 - RNA, 32 nt, Human
ucuagauuuuuccuugcuuucuguguuuauug

SEQ ID NO: 239717 - RNA, 32 nt, Human
ucuagcaaaaauacaaaaauuagucaggagug

SEQ ID NO: 239718 - RNA, 32 nt, Human
ucuagcaacaugggaaagcauuugcuguggau

SEQ ID NO: 239719 - RNA, 32 nt, Human
ucuagcacaauguugaaaaguauggcccagac

SEQ ID NO: 239720 - RNA, 32 nt, Human
ucuagcaccuccugacagcagugagaagaucu

SEQ ID NO: 239721 - RNA, 32 nt, Human
ucuagcacucagcucagccuccuguccccaug

SEQ ID NO: 239722 - RNA, 32 nt, Human
ucuagcagagagagacuaacauugucguuagu

SEQ ID NO: 239723 - RNA, 32 nt, Human
ucuagcagagagaugguauauuacucccuucu

SEQ ID NO: 239724 - RNA, 32 nt, Human
ucuagcagcauuauggggacuuuuccauaagu

SEQ ID NO: 239725 - RNA, 32 nt, Human
ucuagcagggcucuuccaguccugcagcacgg

SEQ ID NO: 239726 - RNA, 32 nt, Human
ucuagcaggggacaggauuggcucagaugacc

SEQ ID NO: 239727 - RNA, 32 nt, Human
ucuagcagguaucagggcaaccagaugaagca

SEQ ID NO: 239728 - RNA, 32 nt, Human
ucuagcaguaaacucucucggucuccauuaaa

SEQ ID NO: 239729 - RNA, 32 nt, Human
ucuagcaguuugagcccagccuaggcaacaua

SEQ ID NO: 239730 - RNA, 23 nt, Human
ucuagcauggacagccaguucca

SEQ ID NO: 239731 - RNA, 32 nt, Human
ucuagcauggcuuggguaaucugugauuguac

SEQ ID NO: 239732 - RNA, 32 nt, Human
ucuagcauuucuguucugugcugugcuaagcu

SEQ ID NO: 239733 - RNA, 21 nt, Human
ucuagccaaaggaagaccagu

SEQ ID NO: 239734 - RNA, 32 nt, Human
ucuagccaccucuuccuuuuccuucuuuauuc

SEQ ID NO: 239735 - RNA, 32 nt, Human
ucuagccacucccugcacuucccguucucagc

SEQ ID NO: 239736 - RNA, 32 nt, Human
ucuagccacuccucccagcucuucugugcugu

SEQ ID NO: 239737 - RNA, 32 nt, Human
ucuagccagauggggguggaguggaggacaca

SEQ ID NO: 239738 - RNA, 32 nt, Human
ucuagcccaaccuacauuccacccuguuacuu

SEQ ID NO: 239739 - RNA, 32 nt, Human
ucuagccccaccauugcucucucugucuucag

SEQ ID NO: 239740 - RNA, 23 nt, Human
ucuagccccgcucucuuccccuc

SEQ ID NO: 239741 - RNA, 23 nt, Human
ucuagccccuccaacaguucuuc

SEQ ID NO: 239742 - RNA, 32 nt, Human
ucuagccccugccucugcgcccccaucacugg

SEQ ID NO: 239743 - RNA, 26 nt, Human
ucuagcccugcccggauggagcgggg

SEQ ID NO: 239744 - RNA, 24 nt, Human
ucuagccggagugacagaguaaga

SEQ ID NO: 239745 - RNA, 32 nt, Human
ucuagccggagugacagaguaagacucugucu

SEQ ID NO: 239746 - RNA, 25 nt, Human
ucuagccgggccaugcuuuccuuuu

SEQ ID NO: 239747 - RNA, 32 nt, Human
ucuagccggggcagacacccagcuggcugggu

SEQ ID NO: 239748 - RNA, 32 nt, Human
ucuagccggggcgacagagcgagacucugucu

SEQ ID NO: 239749 - RNA, 24 nt, Human
ucuagccuaggugacagagugaga

SEQ ID NO: 239750 - RNA, 32 nt, Human
ucuagccuaggugacagagugagacuccaucu

SEQ ID NO: 239751 - RNA, 32 nt, Human
ucuagccucagucuugucaucuguaaaauggg

SEQ ID NO: 239752 - RNA, 32 nt, Human
ucuagccuccacugcccuagccccagacugcu

SEQ ID NO: 239753 - RNA, 32 nt, Human
ucuagccuccagcccaccugcccaugugauga

SEQ ID NO: 239754 - RNA, 32 nt, Human
ucuagccuccgcuucucuaucuccuacaggcg

SEQ ID NO: 239755 - RNA, 32 nt, Human
ucuagccucggugacagaguaagauuccaucu

SEQ ID NO: 239756 - RNA, 24 nt, Human
ucuagccugagcgacagagugaga

SEQ ID NO: 239757 - RNA, 24 nt, Human
ucuagccugagggacagagugaga

SEQ ID NO: 239758 - RNA, 32 nt, Human
ucuagccugaguaccgggcuacuucuuaaaug

SEQ ID NO: 239759 - RNA, 22 nt, Human
ucuagccugagugacagagcag

SEQ ID NO: 239760 - RNA, 23 nt, Human
ucuagccugagugacagagcaga

SEQ ID NO: 239761 - RNA, 32 nt, Human
ucuagccugagugacagagcagacuccugucu

SEQ ID NO: 239762 - RNA, 32 nt, Human
ucuagccugagugacagagcaugauuccaucu

SEQ ID NO: 239763 - RNA, 32 nt, Human
ucuagccugcuacugccuggggacacggacuu

SEQ ID NO: 239764 - RNA, 22 nt, Human
ucuagccugcuggaggaugaga

SEQ ID NO: 239765 - RNA, 32 nt, Human
ucuagccugcuggccugccuucacuguccugg

SEQ ID NO: 239766 - RNA, 32 nt, Human
ucuagccuggaagacagagugagaccccaucu

SEQ ID NO: 239767 - RNA, 32 nt, Human
ucuagccuggacaacaagagugaaacucuguc

SEQ ID NO: 239768 - RNA, 32 nt, Human
ucuagccuggacaacacagcaggacuccaucu

SEQ ID NO: 239769 - RNA, 32 nt, Human
ucuagccuggacagcagagcaagacuccaucu

SEQ ID NO: 239770 - RNA, 32 nt, Human
ucuagccuggaugacagagcaagacucugucu

SEQ ID NO: 239771 - RNA, 23 nt, Human
ucuagccuggcaacagagcaaga

SEQ ID NO: 239772 - RNA, 23 nt, Human
ucuagccuggcaacagagcgaga

SEQ ID NO: 239773 - RNA, 23 nt, Human
ucuagccugggcaacaagaguga

SEQ ID NO: 239774 - RNA, 24 nt, Human
ucuagccugggcaacagagcaagg

SEQ ID NO: 239775 - RNA, 31 nt, Human
ucuagccugggcaacagagcaaggcucuguc

SEQ ID NO: 239776 - RNA, 24 nt, Human
ucuagccugggcaacagagcgaga

SEQ ID NO: 239777 - RNA, 24 nt, Human
ucuagccugggcaacagaguaaga

SEQ ID NO: 239778 - RNA, 24 nt, Human
ucuagccugggcaacagagugaga

SEQ ID NO: 239779 - RNA, 23 nt, Human
ucuagccugggcaacgagagcga

SEQ ID NO: 239780 - RNA, 24 nt, Human
ucuagccugggcagcagagugaga

SEQ ID NO: 239781 - RNA, 32 nt, Human
ucuagccugggcagcagagugagacccugucu

SEQ ID NO: 239782 - RNA, 24 nt, Human
ucuagccugggccacagggcgaga

SEQ ID NO: 239783 - RNA, 24 nt, Human
ucuagccugggcgacagagcaaga

SEQ ID NO: 239784 - RNA, 32 nt, Human
ucuagccugggcgacagagcaagacuccaucu

SEQ ID NO: 239785 - RNA, 32 nt, Human
ucuagccugggcgacagagcaagacugucuca

SEQ ID NO: 239786 - RNA, 24 nt, Human
ucuagccugggcgacagagcgaga

SEQ ID NO: 239787 - RNA, 32 nt, Human
ucuagccugggcgacagagcgagacuccaucu

SEQ ID NO: 239788 - RNA, 24 nt, Human
ucuagccugggcgacagagugaga

SEQ ID NO: 239789 - RNA, 24 nt, Human
ucuagccuggggaauagagugaga

SEQ ID NO: 239790 - RNA, 32 nt, Human
ucuagccugggugaaagagcgaaacuccaucu

SEQ ID NO: 239791 - RNA, 24 nt, Human
ucuagccugggugacaaagcaaga

SEQ ID NO: 239792 - RNA, 32 nt, Human
ucuagccugggugacaaagcaagacuccaucu

SEQ ID NO: 239793 - RNA, 24 nt, Human
ucuagccugggugacaaagugaga

SEQ ID NO: 239794 - RNA, 31 nt, Human
ucuagccugggugacaaagugagacccuguc

SEQ ID NO: 239795 - RNA, 21 nt, Human
ucuagccugggugacaagagc

SEQ ID NO: 239796 - RNA, 25 nt, Human
ucuagccugggugacaagagcaaga

SEQ ID NO: 239797 - RNA, 24 nt, Human
ucuagccugggugacagaacgaga

SEQ ID NO: 239798 - RNA, 24 nt, Human
ucuagccugggugacagaaugaga

SEQ ID NO: 239799 - RNA, 24 nt, Human
ucuagccugggugacagagagaga

SEQ ID NO: 239800 - RNA, 32 nt, Human
ucuagccugggugacagagagagacuccgucu

SEQ ID NO: 239801 - RNA, 20 nt, Human
ucuagccugggugacagagc

SEQ ID NO: 239802 - RNA, 22 nt, Human
ucuagccugggugacagagcaa

SEQ ID NO: 239803 - RNA, 32 nt, Human
ucuagccugggugacagagcaaaacugugucu

SEQ ID NO: 239804 - RNA, 24 nt, Human
ucuagccugggugacagagcaaga

SEQ ID NO: 239805 - RNA, 32 nt, Human
ucuagccugggugacagagcaagacucugucu

SEQ ID NO: 239806 - RNA, 32 nt, Human
ucuagccugggugacagagcaagacuuugucu

SEQ ID NO: 239807 - RNA, 32 nt, Human
ucuagccugggugacagagcgagaccuugucu

SEQ ID NO: 239808 - RNA, 32 nt, Human
ucuagccugggugacagagcgagacuccaucu

SEQ ID NO: 239809 - RNA, 32 nt, Human
ucuagccugggugacagagcgagacucugucu

SEQ ID NO: 239810 - RNA, 24 nt, Human
ucuagccugggugacagagucaga

SEQ ID NO: 239811 - RNA, 32 nt, Human
ucuagccugggugacagagucagacuccgucc

SEQ ID NO: 239812 - RNA, 24 nt, Human
ucuagccugggugacagagugaga

SEQ ID NO: 239813 - RNA, 32 nt, Human
ucuagccugggugacagagugagacuccauca

SEQ ID NO: 239814 - RNA, 32 nt, Human
ucuagccugggugacagugagacugucucaaa

SEQ ID NO: 239815 - RNA, 24 nt, Human
ucuagccugggugacagugugaga

SEQ ID NO: 239816 - RNA, 32 nt, Human
ucuagccugggugacagugugagacucugucu

SEQ ID NO: 239817 - RNA, 32 nt, Human
ucucggcucacugcaagcuccgccuccugggu

SEQ ID NO: 239818 - RNA, 32 nt, Human
ucucggcucacugcaagcuccgccucucgggu

SEQ ID NO: 239819 - RNA, 32 nt, Human
ucucggcucacugcaagcuccggcucccaggu

SEQ ID NO: 239820 - RNA, 32 nt, Human
ucucggcucacugcaagcucggccuccugggu

SEQ ID NO: 239821 - RNA, 23 nt, Human
ucucggcucacugcaagcucugc

SEQ ID NO: 239822 - RNA, 32 nt, Human
ucucggcucacugcaagcucugccucccaggu

SEQ ID NO: 239823 - RNA, 32 nt, Human
ucucggcucacugcaagcucugccucccgggc

SEQ ID NO: 239824 - RNA, 32 nt, Human
ucucggcucacugcaagcucugccucccgggu

SEQ ID NO: 239825 - RNA, 32 nt, Human
ucucggcucacugcaagcucugccucccgguu

SEQ ID NO: 239826 - RNA, 32 nt, Human
ucucggcucacugcaagcucugccucccgugu

SEQ ID NO: 239827 - RNA, 32 nt, Human
ucucggcucacugcaagcucugccuccugggu

SEQ ID NO: 239828 - RNA, 32 nt, Human
ucucggcucacugcaagcucugccucucgggu

SEQ ID NO: 239829 - RNA, 32 nt, Human
ucucggcucacugcaagcucugcguccugggu

SEQ ID NO: 239830 - RNA, 32 nt, Human
ucucggcucacugcaagcucugcuucccaggu

SEQ ID NO: 239831 - RNA, 32 nt, Human
ucucggcucacugcaagcuucgccucccgggu

SEQ ID NO: 239832 - RNA, 32 nt, Human
ucucggcucacugcaaguuccgccucccgggu

SEQ ID NO: 239833 - RNA, 32 nt, Human
ucucggcucacugcaaucuccgccucccaggu

SEQ ID NO: 239834 - RNA, 32 nt, Human
ucucggcucacugcaaucucugccucccaagc

SEQ ID NO: 239835 - RNA, 32 nt, Human
ucucggcucacugcaaucucugccucccaggu

SEQ ID NO: 239836 - RNA, 32 nt, Human
ucucggcucacugcaaucucugccucccggau

SEQ ID NO: 239837 - RNA, 32 nt, Human
ucucggcucacugcaaucucugccucccgggu

SEQ ID NO: 239838 - RNA, 32 nt, Human
ucucggcucacugcaaucucugccuccugggu

SEQ ID NO: 239839 - RNA, 32 nt, Human
ucucggcucacugcaauuugcgucucccaagu

SEQ ID NO: 239840 - RNA, 32 nt, Human
ucucggcucacugcacccucugccucuugggu

SEQ ID NO: 239841 - RNA, 32 nt, Human
ucucggcucacugcaccuccgccucccagguu

SEQ ID NO: 239842 - RNA, 32 nt, Human
ucucggcucacugcaccucugccuccuggauu

SEQ ID NO: 239843 - RNA, 32 nt, Human
ucucggcucacugcaccuucugccuaccgagu

SEQ ID NO: 239844 - RNA, 32 nt, Human
ucucggcucacugcagccccugccucccaggc

SEQ ID NO: 239845 - RNA, 32 nt, Human
ucucggcucacugcagccucaaccuccugggc

SEQ ID NO: 239846 - RNA, 32 nt, Human
ucucggcucacugcagccuccgccucccaggu

SEQ ID NO: 239847 - RNA, 32 nt, Human
ucucggcucacugcagccuccgccucccguau

SEQ ID NO: 239848 - RNA, 32 nt, Human
ucucggcucacugcagccuccgccucccuggu

SEQ ID NO: 239849 - RNA, 32 nt, Human
ucucggcucacugcagccuccgccugccgggu

SEQ ID NO: 239850 - RNA, 32 nt, Human
ucucggcucacugcagccucugccucccgggu

SEQ ID NO: 239851 - RNA, 32 nt, Human
ucucggcucacugcagccuucaccucccgggu

SEQ ID NO: 239852 - RNA, 32 nt, Human
ucucggcucacugcagccuugacuucccaggc

SEQ ID NO: 239853 - RNA, 32 nt, Human
ucucggcucacugcagccuugacuuccugggc

SEQ ID NO: 239854 - RNA, 32 nt, Human
ucucggcucacugcagccuuugccucccgggu

SEQ ID NO: 239855 - RNA, 32 nt, Human
ucucggcucacugcagcgucgacauuucgggu

SEQ ID NO: 239856 - RNA, 32 nt, Human
ucucggcucacugcaggcucugccuccugggu

SEQ ID NO: 239857 - RNA, 32 nt, Human
ucucggcucacugcagucaccuccucucaggu

SEQ ID NO: 239858 - RNA, 32 nt, Human
ucucggcucacugcauccuccaccuccugggu

SEQ ID NO: 239859 - RNA, 32 nt, Human
ucucggcucacugcauccuccgccucccgggu

SEQ ID NO: 239860 - RNA, 32 nt, Human
ucucggcucacugcauccucugccucccgggu

SEQ ID NO: 239861 - RNA, 32 nt, Human
ucucggcucacugcauccucugccuccugggu

SEQ ID NO: 239862 - RNA, 32 nt, Human
ucucggcucacugcaucuuccgccucccgggu

SEQ ID NO: 239863 - RNA, 32 nt, Human
ucucggcucacugccaccucucccucaugguu

SEQ ID NO: 239864 - RNA, 32 nt, Human
ucucggcucacugccaccucugccucccaggu

SEQ ID NO: 239865 - RNA, 32 nt, Human
ucucggcucacugcgaccuccgucucccgggc

SEQ ID NO: 239866 - RNA, 32 nt, Human
ucucggcucacugcgaccucggccuccuggau

SEQ ID NO: 239867 - RNA, 32 nt, Human
ucucggcucacugcgaccucugccucccaggu

SEQ ID NO: 239868 - RNA, 32 nt, Human
ucucggcucacugcgaccucugcuuccugggu

SEQ ID NO: 239869 - RNA, 32 nt, Human
ucucggcucacugcgagcuccaccucucgggu

SEQ ID NO: 239870 - RNA, 32 nt, Human
ucucggcucacugcgagcucugccuccugggu

SEQ ID NO: 239871 - RNA, 32 nt, Human
ucucggcucacuguaaccuccaccuccugggu

SEQ ID NO: 239872 - RNA, 32 nt, Human
ucucggcucacuguaaccuccgccuccugaau

SEQ ID NO: 239873 - RNA, 32 nt, Human
ucucggcucacuguaaccuccgccuccugggu

SEQ ID NO: 239874 - RNA, 32 nt, Human
ucucggcucacuguaaccucugccuccugccu

SEQ ID NO: 239875 - RNA, 32 nt, Human
ucucggcucacuguaaccuucaccuacugggu

SEQ ID NO: 239876 - RNA, 32 nt, Human
ucucggcucacuguaagcuccgccucccgggu

SEQ ID NO: 239877 - RNA, 32 nt, Human
ucucggcucacuguaaucuccgccuccugggu

SEQ ID NO: 239878 - RNA, 32 nt, Human
ucucggcucacuguaccucugucucccugguu

SEQ ID NO: 239879 - RNA, 32 nt, Human
ucucggcucacuguagccucaaccugccaggu

SEQ ID NO: 239880 - RNA, 32 nt, Human
ucucggcucacuguagccuccaccucccccaa

SEQ ID NO: 239881 - RNA, 32 nt, Human
ucucggcucacugugaccucugccuccugggu

SEQ ID NO: 239882 - RNA, 32 nt, Human
ucucggcucagugcaaccucugccucccaggu

SEQ ID NO: 239883 - RNA, 32 nt, Human
ucucggcucauuacaaccuccaccucccgggu

SEQ ID NO: 239884 - RNA, 32 nt, Human
ucucggcucauugcaaccuccaccuuccagau

SEQ ID NO: 239885 - RNA, 32 nt, Human
ucucggcucauugcaaccuccgccucccgggu

SEQ ID NO: 239886 - RNA, 32 nt, Human
ucucggcucauugcaaccuccgccuccugggu

SEQ ID NO: 239887 - RNA, 32 nt, Human
ucucggcucauugcaaccuccgccuuccgggu

SEQ ID NO: 239888 - RNA, 32 nt, Human
ucucggcucauugcaaccucugcuuccugggc

SEQ ID NO: 239889 - RNA, 32 nt, Human
ucucggcucccugcaaccuccaccucccgggu

SEQ ID NO: 239890 - RNA, 32 nt, Human
ucucggcucccugcaaccuccaccuccugggu

SEQ ID NO: 239891 - RNA, 32 nt, Human
ucucggcucccugcaaccuucgccucccgggu

SEQ ID NO: 239892 - RNA, 32 nt, Human
ucucggcucccugcaaucuccaccucccaggu

SEQ ID NO: 239893 - RNA, 32 nt, Human
ucucggcucgccuuccagccucgccugagccc

SEQ ID NO: 239894 - RNA, 32 nt, Human
ucucggcucgcuacaaccuccaccucccagca

SEQ ID NO: 239895 - RNA, 32 nt, Human
ucucggcucgcugcaaccuccgccucccgggu

SEQ ID NO: 239896 - RNA, 32 nt, Human
ucucggcucgcugcaaccuccuccuccugggu

SEQ ID NO: 239897 - RNA, 32 nt, Human
ucucggcucgcugcaaccucugacucccuggu

SEQ ID NO: 239898 - RNA, 32 nt, Human
ucucggcucuaugcaaccuccaccuccugggu

SEQ ID NO: 239899 - RNA, 32 nt, Human
ucucggcucucaccgcaaccuccgucuccugg

SEQ ID NO: 239900 - RNA, 32 nt, Human
ucucggcucucugcaaccuccgccucccaggu

SEQ ID NO: 239901 - RNA, 32 nt, Human
ucucggcucucugcaaccucugccucccgggu

SEQ ID NO: 239902 - RNA, 32 nt, Human
ucucggcucucugcaaccucugucucccgggu

SEQ ID NO: 239903 - RNA, 32 nt, Human
ucucggcugacugcaaccacugccuccagggu

SEQ ID NO: 239904 - RNA, 32 nt, Human
ucucggcugacugcaaccuccaccucccgggu

SEQ ID NO: 239905 - RNA, 32 nt, Human
ucucggcugacugcaaccuccaccuccugggu

SEQ ID NO: 239906 - RNA, 32 nt, Human
ucucggcugccacccccucccccgguccuccg

SEQ ID NO: 239907 - RNA, 32 nt, Human
ucucggcuuacugcaaccuccaccucccaggu

SEQ ID NO: 239908 - RNA, 32 nt, Human
ucucggcuuacugcaaccuccgccuacugggu

SEQ ID NO: 239909 - RNA, 32 nt, Human
ucucggcuuacugcaaccuuugccucccaggu

SEQ ID NO: 239910 - RNA, 32 nt, Human
ucucggcuuacugcaacuuccagcuccugggu

SEQ ID NO: 239911 - RNA, 23 nt, Human
ucucggcuuacugcaagcuccgc

SEQ ID NO: 239912 - RNA, 32 nt, Human
ucucggcuuauggcaaccuccgccucccgggu

SEQ ID NO: 239913 - RNA, 32 nt, Human
ucucggcuuauugcaaccuccgcuuccugggu

SEQ ID NO: 239914 - RNA, 32 nt, Human
ucucgggacaggcuaaccaggaggacaggagc

SEQ ID NO: 239915 - RNA, 32 nt, Human
ucucgggagacgccgcgaaucucuccagggaa

SEQ ID NO: 239916 - RNA, 32 nt, Human
ucucgggaggcagagguugcagugagccgaga

SEQ ID NO: 239917 - RNA, 32 nt, Human
ucucgggaggcugaggcaggagaaucacuuga

SEQ ID NO: 239918 - RNA, 19 nt, Human
ucucgggauccuucuguca

SEQ ID NO: 239919 - RNA, 32 nt, Human
ucucgggcaagaaacauucaugcaugaguaua

SEQ ID NO: 239920 - RNA, 32 nt, Human
ucucgggcagcaauggccgagaagcgcgacac

SEQ ID NO: 239921 - RNA, 22 nt, Human
ucucgggcaguggguuuccugg

SEQ ID NO: 239922 - RNA, 32 nt, Human
ucucgggccagggagguugaggcugcagugag

SEQ ID NO: 239923 - RNA, 21 nt, Human
ucucgggcccauuggggccug

SEQ ID NO: 239924 - RNA, 32 nt, Human
ucucgggccuaguucaaaccuuugccucaaag

SEQ ID NO: 239925 - RNA, 32 nt, Human
ucucgggcucaagcaguccuccugccucaguc

SEQ ID NO: 239926 - RNA, 32 nt, Human
ucucgggcucaagccauuuuucugccucagcu

SEQ ID NO: 239927 - RNA, 32 nt, Human
ucucggggaagaagcuuccucuggccuggcgc

SEQ ID NO: 239928 - RNA, 32 nt, Human
ucucggggaagagaaagauagguuuaauuuau

SEQ ID NO: 239929 - RNA, 32 nt, Human
ucucggggaagagauggcggcggagcggggag

SEQ ID NO: 239930 - RNA, 32 nt, Human
ucucggggcaccuggcaggaggcgggugugug

SEQ ID NO: 239931 - RNA, 32 nt, Human
ucucggggcucuggagagaguggggcgggagg

SEQ ID NO: 239932 - RNA, 32 nt, Human
ucucgggggacgggggacagagccagggcuca

SEQ ID NO: 239933 - RNA, 32 nt, Human
ucucgggggccugugcaccucagucccuccug

SEQ ID NO: 239934 - RNA, 32 nt, Human
ucucgggucaccacaaccuccgccucccggau

SEQ ID NO: 239935 - RNA, 32 nt, Human
ucucgggucacugcaaccuccgccucccgggu

SEQ ID NO: 239936 - RNA, 32 nt, Human
ucucgggucacugcaaccucuaccuccagggu

SEQ ID NO: 239937 - RNA, 32 nt, Human
ucucgggucacugcaagcucugccucccaagu

SEQ ID NO: 239938 - RNA, 32 nt, Human
ucucgggucacugcagccucugucccuggguu

SEQ ID NO: 239939 - RNA, 32 nt, Human
ucucggguucaagcgauucuccugccucagcu

SEQ ID NO: 239940 - RNA, 32 nt, Human
ucucggguucaagugacucuucugccucagcc

SEQ ID NO: 239941 - RNA, 32 nt, Human
ucucggguucacaccauucuccugccucagcc

SEQ ID NO: 239942 - RNA, 32 nt, Human
ucucggguucacgccauucuccugccucagcc

SEQ ID NO: 239943 - RNA, 18 nt, Human
ucucggguuccacaugcc

SEQ ID NO: 239944 - RNA, 32 nt, Human
ucucggguuugcaccauucuccugccucagcc

SEQ ID NO: 239945 - RNA, 32 nt, Human
ucucgguauuucacaugcagcucucuuucugc

SEQ ID NO: 239946 - RNA, 32 nt, Human
ucucggucacagggaggaaggcagcuagaaau

SEQ ID NO: 239947 - RNA, 31 nt, Human
ucucggucacucaggaggcaguuggcagagu

SEQ ID NO: 239948 - RNA, 32 nt, Human
ucucggucuuccuucuugcuuuagggaccgga

SEQ ID NO: 239949 - RNA, 32 nt, Human
ucucgguggccgcugcuccagcgcggccugcg

SEQ ID NO: 239950 - RNA, 32 nt, Human
ucucggugggccugugcaggucugggaaggcc

SEQ ID NO: 239951 - RNA, 32 nt, Human
ucucgguguguucuguuaauguaagacgauga

SEQ ID NO: 239952 - RNA, 32 nt, Human
ucucgguucaagaaagcacguugcuauaugaa

SEQ ID NO: 239953 - RNA, 32 nt, Human
ucucgguucaccgcaaccuccacaucccaggu

SEQ ID NO: 239954 - RNA, 32 nt, Human
ucucgguucacugcaacauucaccucccaggu

SEQ ID NO: 239955 - RNA, 32 nt, Human
ucucgguucacugcaaccuccaccucccgagu

SEQ ID NO: 239956 - RNA, 32 nt, Human
ucucgguucacugcaaccuccaccucucagau

SEQ ID NO: 239957 - RNA, 32 nt, Human
ucucgguucacugcaaccuccgccuccagguu

SEQ ID NO: 239958 - RNA, 32 nt, Human
ucucgguucacugcaaccuccgccucccgguu

SEQ ID NO: 239959 - RNA, 32 nt, Human
ucucgguucacugcaaccucugccacccaugu

SEQ ID NO: 239960 - RNA, 32 nt, Human
ucucgguucacugcaaccucugccucccagga

SEQ ID NO: 239961 - RNA, 32 nt, Human
ucucgguucacugcaaccucugccucccaggu

SEQ ID NO: 239962 - RNA, 32 nt, Human
ucucgguucacugcaaccucugccuccugggu

SEQ ID NO: 239963 - RNA, 32 nt, Human
ucucgguucacugcaaccucugccucucaggu

SEQ ID NO: 239964 - RNA, 32 nt, Human
ucucgguucacugcaaccuuggccuccuaggu

SEQ ID NO: 239965 - RNA, 32 nt, Human
ucucgguucacugcagccuccaccucccgagc

SEQ ID NO: 239966 - RNA, 32 nt, Human
ucucgguucacugcagccucugccuucugggc

SEQ ID NO: 239967 - RNA, 32 nt, Human
ucucgguucauugcaaccuccgccucccgagu

SEQ ID NO: 239968 - RNA, 32 nt, Human
ucucgguucauugcaaccuccgccuccugcgu

SEQ ID NO: 239969 - RNA, 32 nt, Human
ucucgguucucuagucccacccgcucccacua

SEQ ID NO: 239970 - RNA, 32 nt, Human
ucucgguuugccagccuuugcagccacuuuug

SEQ ID NO: 239971 - RNA, 32 nt, Human
ucucguaccacagaggacaggucuccuccagc

SEQ ID NO: 239972 - RNA, 32 nt, Human
ucucguacuguaucuuacuauguccauacaga

SEQ ID NO: 239973 - RNA, 32 nt, Human
ucucguagauaacuucacagucauccaguccc

SEQ ID NO: 239974 - RNA, 32 nt, Human
ucucguagcuucaaauaccaucuaguuuauag

SEQ ID NO: 239975 - RNA, 32 nt, Human
ucucgucaaguacagcucugcaccguuguggc

SEQ ID NO: 239976 - RNA, 32 nt, Human
ucucgucaugcugcugugccugcucugccaac

SEQ ID NO: 239977 - RNA, 32 nt, Human
ucucgucccuuucuuacagccauuuuccugcu

SEQ ID NO: 239978 - RNA, 32 nt, Human
ucucguccgccucuccauaucuccccauuucc

SEQ ID NO: 239979 - RNA, 32 nt, Human
ucucguccuccuuugugcaggcgaggaagggg

SEQ ID NO: 239980 - RNA, 32 nt, Human
ucucguccugcccccaggcccugccggucccc

SEQ ID NO: 239981 - RNA, 32 nt, Human
ucucgucgcccaggcuggaaugcaguggugcg

SEQ ID NO: 239982 - RNA, 32 nt, Human
ucucgucgugcugcugugccugcucugccaac

SEQ ID NO: 239983 - RNA, 32 nt, Human
ucucgucucacauuugcacucucuccuuccca

SEQ ID NO: 239984 - RNA, 32 nt, Human
ucucgucucacccacucccagccuggggaaga

SEQ ID NO: 239985 - RNA, 32 nt, Human
ucucgucucacugcaaccuccgccucccagau

SEQ ID NO: 239986 - RNA, 32 nt, Human
ucucgucucacugcaaccucugccuccugggu

SEQ ID NO: 239987 - RNA, 32 nt, Human
ucucgucuccuccccuccuucuugucacuggc

SEQ ID NO: 239988 - RNA, 22 nt, Human
ucucgucuccuuccccucgcca

SEQ ID NO: 239989 - RNA, 32 nt, Human
ucucgucugacuccaaaugcaccaagaggaug

SEQ ID NO: 239990 - RNA, 32 nt, Human
ucucgugagaucugguuguuuaaaagugugca

SEQ ID NO: 239991 - RNA, 32 nt, Human
ucucgugauucuguuuguuacccauguucacu

SEQ ID NO: 239992 - RNA, 32 nt, Human
ucucgugcaauuacagaaugaacacccaucag

SEQ ID NO: 239993 - RNA, 32 nt, Human
ucucgugcccgccuccugccagucuccgggcc

SEQ ID NO: 239994 - RNA, 32 nt, Human
ucucgugcucagccacucugcccagcuggguu

SEQ ID NO: 239995 - RNA, 32 nt, Human
ucucgugcuucauguagaacccuuagguuugc

SEQ ID NO: 239996 - RNA, 32 nt, Human
ucucguggaacccagaggggcugaggacugug

SEQ ID NO: 239997 - RNA, 32 nt, Human
ucucguggguaaggcccggugccuggaagacc

SEQ ID NO: 239998 - RNA, 20 nt, Human
ucucguucucucuccuuccc

SEQ ID NO: 239999 - RNA, 32 nt, Human
ucucguugccaaggcuggagugcaauggcacg

SEQ ID NO: 240000 - RNA, 24 nt, Human
ucucguugcccaggcuggagugca

SEQ ID NO: 240001 - RNA, 32 nt, Human
ucucguugcccaggcuggagugcaauggcgcg

SEQ ID NO: 240002 - RNA, 32 nt, Human
ucucguugccgaggcuggaguguaguagugug

SEQ ID NO: 240003 - RNA, 32 nt, Human
ucucguuuugggccagaggcagccucugcacu

SEQ ID NO: 240004 - RNA, 32 nt, Human
ucucuaaaaauacaaaaauuagcugggcgugg

SEQ ID NO: 240005 - RNA, 26 nt, Human
ucucuaaaacugccaagaucacauca

SEQ ID NO: 240006 - RNA, 32 nt, Human
ucucuaaaauaugaaaucagaguuuggaacau

SEQ ID NO: 240007 - RNA, 32 nt, Human
ucucuaaaccucagugcugagaccuaugcagu

SEQ ID NO: 240008 - RNA, 32 nt, Human
ucucuaaagcagugguccagacuugccacaua

SEQ ID NO: 240009 - RNA, 32 nt, Human
ucucuaaagcaucuuaccccugugcuggaggu

SEQ ID NO: 240010 - RNA, 25 nt, Human
ucucuaaauauguagaccucacuaa

SEQ ID NO: 240011 - RNA, 32 nt, Human
ucucuaaauuccagcuuuacugugaaguucua

SEQ ID NO: 240012 - RNA, 32 nt, Human
ucucuaacauuuccuuacagaacuacuucuua

SEQ ID NO: 240013 - RNA, 32 nt, Human
ucucuaacccgagcuagagugcagugacgcga

SEQ ID NO: 240014 - RNA, 32 nt, Human
ucucuaacucuuaucuuccacaggguccaaga

SEQ ID NO: 240015 - RNA, 32 nt, Human
ucucuaaggaagggagaggagcccuagagaga

SEQ ID NO: 240016 - RNA, 24 nt, Human
ucucuacaaaaaacacaaaaauua

SEQ ID NO: 240017 - RNA, 24 nt, Human
ucucuacaaaaaacauaaaaguua

SEQ ID NO: 240018 - RNA, 22 nt, Human
ucucuacaaaaaauaaaaaaua

SEQ ID NO: 240019 - RNA, 23 nt, Human
ucucuacaaaaaauaaaaaauua

SEQ ID NO: 240020 - RNA, 20 nt, Human
ucucuacaaaaaauacaaaa

SEQ ID NO: 240021 - RNA, 24 nt, Human
ucucuacaaaaaauacaaaaauua

SEQ ID NO: 240022 - RNA, 21 nt, Human
ucucuacaaaaaauacaaaau

SEQ ID NO: 240023 - RNA, 23 nt, Human
ucucuacaaaaaauacaaaauua

SEQ ID NO: 240024 - RNA, 24 nt, Human
ucucuacaaaaaauacagaaauua

SEQ ID NO: 240025 - RNA, 24 nt, Human
ucucuacaaaaaaugcaaaaauua

SEQ ID NO: 240026 - RNA, 24 nt, Human
ucucuacaaaaaaugcuaaaauua

SEQ ID NO: 240027 - RNA, 22 nt, Human
ucucuacaaaaaauuaaaaauu

SEQ ID NO: 240028 - RNA, 24 nt, Human
ucucuacaaaaaauuaaaacauua

SEQ ID NO: 240029 - RNA, 23 nt, Human
ucucuacaaaaaauuaaagauua

SEQ ID NO: 240030 - RNA, 25 nt, Human
ucucuacaaaaaauuuaaaaaauua

SEQ ID NO: 240031 - RNA, 24 nt, Human
ucucuacaaaaaauuuaaaaauua

SEQ ID NO: 240032 - RNA, 24 nt, Human
ucucuacaaaaaauuuaagaauua

SEQ ID NO: 240033 - RNA, 23 nt, Human
ucucuacaaaaaauuuuaaaaau

SEQ ID NO: 240034 - RNA, 23 nt, Human
ucucuacaaaaaccaaaaaguua

SEQ ID NO: 240035 - RNA, 24 nt, Human
ucucuacaaaaacuacaaaaauua

SEQ ID NO: 240036 - RNA, 25 nt, Human
ucucuacaaaaagacacaaaaauua

SEQ ID NO: 240037 - RNA, 24 nt, Human
ucucuacaaaaagcauaaaaauua

SEQ ID NO: 240038 - RNA, 22 nt, Human
ucucuacaaaaaguaaaaauua

SEQ ID NO: 240039 - RNA, 30 nt, Human
ucucuacaaaaaguaaacaaaaaucagccg

SEQ ID NO: 240040 - RNA, 24 nt, Human
ucucuacaaaaaguacaaaaauua

SEQ ID NO: 240041 - RNA, 24 nt, Human
ucucuacaaaaaguuaaaaaauua

SEQ ID NO: 240042 - RNA, 19 nt, Human
ucucuacaaaaauacaaaa

SEQ ID NO: 240043 - RNA, 23 nt, Human
ucucuacaaaaauacaaaaauua

SEQ ID NO: 240044 - RNA, 32 nt, Human
ucucuacaaaaauacaaaaauuaauugggcgu

SEQ ID NO: 240045 - RNA, 32 nt, Human
ucucuacaaaaauacaaaaauuagccaggcgu

SEQ ID NO: 240046 - RNA, 32 nt, Human
ucucuacaaaaauacaaaaauuagccaggugu

SEQ ID NO: 240047 - RNA, 32 nt, Human
ucucuacaaaaauacaaaaauuagcugggcgu

SEQ ID NO: 240048 - RNA, 32 nt, Human
ucucuacaaaaauacaaaaauuaggugggugu

SEQ ID NO: 240049 - RNA, 32 nt, Human
ucucuacaaaaauacaaaauuagccagguaug

SEQ ID NO: 240050 - RNA, 32 nt, Human
ucucuacaaaaauauggaaauuagcugggcau

SEQ ID NO: 240051 - RNA, 24 nt, Human
ucucuacaaaaauuuaaaaaauua

SEQ ID NO: 240052 - RNA, 23 nt, Human
ucucuacaaaaauuuaaaaauua

SEQ ID NO: 240053 - RNA, 27 nt, Human
ucucuacaaaaauuuuuuaaaaaauua

SEQ ID NO: 240054 - RNA, 22 nt, Human
ucucuacaaaacuuaaaaguua

SEQ ID NO: 240055 - RNA, 32 nt, Human
ucucuacaaaacuuaaaaguuagccaggccug

SEQ ID NO: 240056 - RNA, 23 nt, Human
ucucuacaaaagauuaaaaauua

SEQ ID NO: 240057 - RNA, 32 nt, Human
ucucuacaaaagauuaaaaauuagcugcgugu

SEQ ID NO: 240058 - RNA, 26 nt, Human
ucucuacaaaagauuuuuaaaaauua

SEQ ID NO: 240059 - RNA, 32 nt, Human
ucucuacaaaagauuuuuaaaaauuagccagg

SEQ ID NO: 240060 - RNA, 23 nt, Human
ucucuacaaaaguacaaaaauua

SEQ ID NO: 240061 - RNA, 32 nt, Human
ucucuacaaaaguacaaaaauuagccaggcgu

SEQ ID NO: 240062 - RNA, 27 nt, Human
ucucuacaaaauaauuuuuaaaaauua

SEQ ID NO: 240063 - RNA, 24 nt, Human
ucucuacaaaauauacaaaaauua

SEQ ID NO: 240064 - RNA, 22 nt, Human
ucucuacaaaauauacaaaaua

SEQ ID NO: 240065 - RNA, 24 nt, Human
ucucuacaaaauauuaaaacauua

SEQ ID NO: 240066 - RNA, 24 nt, Human
ucucuacaaacaauacaaaaauua

SEQ ID NO: 240067 - RNA, 24 nt, Human
ucucuacaaacauuuuaaaaauua

SEQ ID NO: 240068 - RNA, 24 nt, Human
ucucuacaaauaaauaaaaaauua

SEQ ID NO: 240069 - RNA, 23 nt, Human
ucucuacaaauaaauaaaaauua

SEQ ID NO: 240070 - RNA, 32 nt, Human
ucucuacaaauaaauaaaaauuagcugggcaa

SEQ ID NO: 240071 - RNA, 19 nt, Human
ucucuacaaauaauaaaaa

SEQ ID NO: 240072 - RNA, 32 nt, Human
ucucuacaacaaaaauacaaaaauuagccaag

SEQ ID NO: 240073 - RNA, 32 nt, Human
ucucuacacccacccaaaagucacccagggac

SEQ ID NO: 240074 - RNA, 24 nt, Human
ucucuacagacgaucaaaaaauua

SEQ ID NO: 240075 - RNA, 32 nt, Human
ucucuacagagcugugacgggggcacugagcc

SEQ ID NO: 240076 - RNA, 32 nt, Human
ucucuacagcauccaccucucuuggcucuugu

SEQ ID NO: 240077 - RNA, 32 nt, Human
ucucuacauccuggaagaggcagcagucucuu

SEQ ID NO: 240078 - RNA, 32 nt, Human
ucucuacaucuucucuuggagugagggaggcu

SEQ ID NO: 240079 - RNA, 32 nt, Human
ucucuacaugaacugcucauuuggaggacagc

SEQ ID NO: 240080 - RNA, 32 nt, Human
ucucuacaugguggucuagauaagcuaauuuu

SEQ ID NO: 240081 - RNA, 26 nt, Human
ucucuaccaaaaaacuuuaaaaauua

SEQ ID NO: 240082 - RNA, 20 nt, Human
ucucuaccaaaaauacaaaa

SEQ ID NO: 240083 - RNA, 32 nt, Human
ucucuaccaaaacagaagcaguauagaccgac

SEQ ID NO: 240084 - RNA, 32 nt, Human
ucucuaccaaaauaaaaauuagcugggcaugg

SEQ ID NO: 240085 - RNA, 32 nt, Human
ucucuaccaaaauacaaaaauuagccgggcau

SEQ ID NO: 240086 - RNA, 32 nt, Human
ucucuaccaaccacugucccagagucaccaaa

SEQ ID NO: 240087 - RNA, 32 nt, Human
ucucuaccacaagccaccagcacuauaaccag

SEQ ID NO: 240088 - RNA, 32 nt, Human
ucucuaccacagcaaacacauucuccaccaug

SEQ ID NO: 240089 - RNA, 32 nt, Human
ucucuaccauggagaagagcaggaagggauac

SEQ ID NO: 240090 - RNA, 22 nt, Human
ucucuaccaugucccccagaca

SEQ ID NO: 240091 - RNA, 32 nt, Human
ucucuaccauuugaaguugauuucucaaugcu

SEQ ID NO: 240092 - RNA, 32 nt, Human
ucucuacccuauucccccucugagccuuugcu

SEQ ID NO: 240093 - RNA, 32 nt, Human
ucucuacccuugccguaucuaaggagcugagg

SEQ ID NO: 240094 - RNA, 32 nt, Human
ucucuaccuccauccuugaaucauccacuuuu

SEQ ID NO: 240095 - RNA, 32 nt, Human
ucucuaccuccccuccccaccucuucucuccc

SEQ ID NO: 240096 - RNA, 20 nt, Human
ucucuacgaaaaauacaaaa

SEQ ID NO: 240097 - RNA, 21 nt, Human
ucucuacgaaaaauacaaaau

SEQ ID NO: 240098 - RNA, 32 nt, Human
ucucuacgcuggaaauuugcugccucaauguu

SEQ ID NO: 240099 - RNA, 21 nt, Human
ucucuacuaaaaaauacaaaa

SEQ ID NO: 240100 - RNA, 20 nt, Human
ucucuacuaaaaacacaaaa

SEQ ID NO: 240101 - RNA, 32 nt, Human
ucucuacuaaaaacacaaauuagccaggcgug

SEQ ID NO: 240102 - RNA, 21 nt, Human
ucucuacuaaaaacgcaaaau

SEQ ID NO: 240103 - RNA, 20 nt, Human
ucucuacuaaaaagacaaaa

SEQ ID NO: 240104 - RNA, 21 nt, Human
ucucuacuaaaaaguacaaaa

SEQ ID NO: 240105 - RNA, 21 nt, Human
ucucuacuaaaaauaaaaaau

SEQ ID NO: 240106 - RNA, 19 nt, Human
ucucuacuaaaaauacaaa

SEQ ID NO: 240107 - RNA, 20 nt, Human
ucucuacuaaaaauacaaaa

SEQ ID NO: 240108 - RNA, 21 nt, Human
ucucuacuaaaaauacaaaau

SEQ ID NO: 240109 - RNA, 32 nt, Human
ucucuacuaaaaauacaaaauuagcugggcau

SEQ ID NO: 240110 - RNA, 32 nt, Human
ucucuacuaaaaauacaaaauuagcugggcgu

SEQ ID NO: 240111 - RNA, 32 nt, Human
ucucuacuaaaaauacaaaauuagcugggugg

SEQ ID NO: 240112 - RNA, 32 nt, Human
ucucuacuaaaaauacaaaauuagcugggugu

SEQ ID NO: 240113 - RNA, 32 nt, Human
ucucuacuaaaaauacaaaauuagucgggcgu

SEQ ID NO: 240114 - RNA, 32 nt, Human
ucucuacuaaaaauacaaaauuagucggguau

SEQ ID NO: 240115 - RNA, 32 nt, Human
ucucuacuaaaaauacaauuagccaggugugg

SEQ ID NO: 240116 - RNA, 20 nt, Human
ucucuacuaaaaauacagaa

SEQ ID NO: 240117 - RNA, 32 nt, Human
ucucuacuaaaaauacagaaaaauuagccagg

SEQ ID NO: 240118 - RNA, 32 nt, Human
ucucuacuaaaaauacagaauuagcugagugu

SEQ ID NO: 240119 - RNA, 22 nt, Human
ucucuacuaaaaauaccaaaau

SEQ ID NO: 240120 - RNA, 20 nt, Human
ucucuacuaaaaauacgaaa

SEQ ID NO: 240121 - RNA, 20 nt, Human
ucucuacuaaaaauauaaaa

SEQ ID NO: 240122 - RNA, 21 nt, Human
ucucuacuaaaaauauaaaau

SEQ ID NO: 240123 - RNA, 19 nt, Human
ucucuacuaaaaaugcaaa

SEQ ID NO: 240124 - RNA, 20 nt, Human
ucucuacuaaaaaugcaaaa

SEQ ID NO: 240125 - RNA, 32 nt, Human
ucucuacuaaaaaugcaaaauuagucaggcau

SEQ ID NO: 240126 - RNA, 32 nt, Human
ucucuacuaaaaauuaaaaauuagcuggacau

SEQ ID NO: 240127 - RNA, 21 nt, Human
ucucuacuaaaaauucaaaau

SEQ ID NO: 240128 - RNA, 24 nt, Human
ucucuacuaaaaauuuaaaaauua

SEQ ID NO: 240129 - RNA, 21 nt, Human
ucucuacuaaaacauacaaaa

SEQ ID NO: 240130 - RNA, 20 nt, Human
ucucuacuaaaacuacaaaa

SEQ ID NO: 240131 - RNA, 19 nt, Human
ucucuacuaaaaguacaaa

SEQ ID NO: 240132 - RNA, 20 nt, Human
ucucuacuaaaaguacaaaa

SEQ ID NO: 240133 - RNA, 19 nt, Human
ucucuacuaaaauacaaaa

SEQ ID NO: 240134 - RNA, 32 nt, Human
ucucuacuaaaauacaaaaaguuagcugggcu

SEQ ID NO: 240135 - RNA, 32 nt, Human
ucucuacuaaaauacaaaaauuagcugggcau

SEQ ID NO: 240136 - RNA, 32 nt, Human
ucucuacuaaaauacaaaaauuagcugggugu

SEQ ID NO: 240137 - RNA, 32 nt, Human
ucucuacuaaaauacaaaaauuagguguggug

SEQ ID NO: 240138 - RNA, 20 nt, Human
ucucuacuaaaauacaaaau

SEQ ID NO: 240139 - RNA, 32 nt, Human
ucucuacuaaaauaguacaaaaauuagccggg

SEQ ID NO: 240140 - RNA, 20 nt, Human
ucucuacuaaaauuacaaaa

SEQ ID NO: 240141 - RNA, 24 nt, Human
ucucuacuaaaauuauaaaaauua

SEQ ID NO: 240142 - RNA, 32 nt, Human
ucucuacuaaacauacaaaauuagcugggcau

SEQ ID NO: 240143 - RNA, 21 nt, Human
ucucuacuaaacuacaaaaua

SEQ ID NO: 240144 - RNA, 20 nt, Human
ucucuacuaaagauacaaaa

SEQ ID NO: 240145 - RNA, 32 nt, Human
ucucuacuaacauacaaaauuagcugggcaca

SEQ ID NO: 240146 - RNA, 20 nt, Human
ucucuacuaagaauacaaaa

SEQ ID NO: 240147 - RNA, 32 nt, Human
ucucuacuaagaauacaaaauuagcugggcau

SEQ ID NO: 240148 - RNA, 20 nt, Human
ucucuacuaauaauacaaaa

SEQ ID NO: 240149 - RNA, 20 nt, Human
ucucuacuagaaauacaaaa

SEQ ID NO: 240150 - RNA, 21 nt, Human
ucucuacuagaaauacaaaau

SEQ ID NO: 240151 - RNA, 32 nt, Human
ucucuacuagaaauacagaaaaauuagcuggg

SEQ ID NO: 240152 - RNA, 20 nt, Human
ucucuacuauaaauacaaaa

SEQ ID NO: 240153 - RNA, 32 nt, Human
ucucuacucacugcaaccuccaccucccgggu

SEQ ID NO: 240154 - RNA, 32 nt, Human
ucucuacucacugcagccucaaucuccugguc

SEQ ID NO: 240155 - RNA, 19 nt, Human
ucucuacucagcccaguca

SEQ ID NO: 240156 - RNA, 32 nt, Human
ucucuacucauaguuucaagcuuuucaguuua

SEQ ID NO: 240157 - RNA, 20 nt, Human
ucucuacugaaaauacaaaa

SEQ ID NO: 240158 - RNA, 32 nt, Human
ucucuacugaaaauucaaaauuagccuggugu

SEQ ID NO: 240159 - RNA, 32 nt, Human
ucucuacugcaaaaacucaaaaauuagccagg

SEQ ID NO: 240160 - RNA, 32 nt, Human
ucucuacuucugguuucagaaaacacgagaga

SEQ ID NO: 240161 - RNA, 32 nt, Human
ucucuagaaagacauccugagaggacuuggca

SEQ ID NO: 240162 - RNA, 32 nt, Human
ucucuagaagcugcauccccagcccuuucacc

SEQ ID NO: 240163 - RNA, 31 nt, Human
ucucuagagagguacaguuguaagucagagu

SEQ ID NO: 240164 - RNA, 32 nt, Human
ucucuagauguccaugcccugccuucucagga

SEQ ID NO: 240165 - RNA, 32 nt, Human
ucucuagcaaguggucaggacgcugauuguuc

SEQ ID NO: 240166 - RNA, 32 nt, Human
ucucuagcagagggaggggacccaccccagug

SEQ ID NO: 240167 - RNA, 32 nt, Human
ucucuagcagcaccuccugucccuugaccuua

SEQ ID NO: 240168 - RNA, 32 nt, Human
ucucuagccagccugaccucuccauucccuuc

SEQ ID NO: 240169 - RNA, 32 nt, Human
ucucuagccugugcucuccauaugcucaucca

SEQ ID NO: 240170 - RNA, 32 nt, Human
ucucuagcuagugccucuugcccucuccucac

SEQ ID NO: 240171 - RNA, 32 nt, Human
ucucuaggacgcagcagccucuccccagcacu

SEQ ID NO: 240172 - RNA, 26 nt, Human
ucucuaggacggggcugcagcauagg

SEQ ID NO: 240173 - RNA, 32 nt, Human
ucucuaggcaagaaucccggaggcagaggcca

SEQ ID NO: 240174 - RNA, 32 nt, Human
ucucuaggcucuggaguauggaagugacagcu

SEQ ID NO: 240175 - RNA, 32 nt, Human
ucucuagggcugacaugagaacuccaugucac

SEQ ID NO: 240176 - RNA, 32 nt, Human
ucucuagggcugggacgcccauuucuucuugc

SEQ ID NO: 240177 - RNA, 32 nt, Human
ucucuagggugcuucuuccagagucugucuuc

SEQ ID NO: 240178 - RNA, 32 nt, Human
ucucuaggugagggucuugaugaggacagaag

SEQ ID NO: 240179 - RNA, 20 nt, Human
ucucuaguaaaaauacaaaa

SEQ ID NO: 240180 - RNA, 32 nt, Human
ucucuaguagguggaaagguagguggagcagg

SEQ ID NO: 240181 - RNA, 32 nt, Human
ucucuagucccaauuacucaggaggcugaggc

SEQ ID NO: 240182 - RNA, 32 nt, Human
ucucuagucccagcuacucgggaggcugaggc

SEQ ID NO: 240183 - RNA, 32 nt, Human
ucucuagucucagcuacucaggaggcuguggc

SEQ ID NO: 240184 - RNA, 32 nt, Human
ucucuagugcugccucacauugggccucagca

SEQ ID NO: 240185 - RNA, 32 nt, Human
ucucuaguuacucccucccuguccucacuccu

SEQ ID NO: 240186 - RNA, 32 nt, Human
ucucuaguucacaaggacagaggagauggaga

SEQ ID NO: 240187 - RNA, 32 nt, Human
ucucuaguucgucauccucccuucccauaucc

SEQ ID NO: 240188 - RNA, 24 nt, Human
ucucuauaaaaauuuuaaaaauua

SEQ ID NO: 240189 - RNA, 21 nt, Human
ucucuauaaccugccccguca

SEQ ID NO: 240190 - RNA, 26 nt, Human
ucucuauauacacauuuuaaacauua

SEQ ID NO: 240191 - RNA, 32 nt, Human
ucucuauccaggacaucaggagugagggaugg

SEQ ID NO: 240192 - RNA, 32 nt, Human
ucucuaucuguagcuacuuucucugggcugca

SEQ ID NO: 240193 - RNA, 32 nt, Human
ucucuaucuuucuauucucaccaauaaucucu

SEQ ID NO: 240194 - RNA, 32 nt, Human
ucucuaugaaaaauauuuaaaaauuagcuggg

SEQ ID NO: 240195 - RNA, 25 nt, Human
ucucuaugaugaaguuuaaaaauua

SEQ ID NO: 240196 - RNA, 20 nt, Human
ucucuauuaaaaauacaaaa

SEQ ID NO: 240197 - RNA, 32 nt, Human
ucucuauucccuccuucucauaacugccaccc

SEQ ID NO: 240198 - RNA, 32 nt, Human
ucucuauuccugacccucccuaccugaggccu

SEQ ID NO: 240199 - RNA, 32 nt, Human
ucucuauucuauccugguucugccucaaccau

SEQ ID NO: 240200 - RNA, 32 nt, Human
ucucuauucucccagccccgcacugccugggg

SEQ ID NO: 240201 - RNA, 32 nt, Human
ucucuauucucccagcccugcacugccugggg

SEQ ID NO: 240202 - RNA, 21 nt, Human
ucucuauucuuucaacagguu

SEQ ID NO: 240203 - RNA, 32 nt, Human
ucucuauuggagugucuguuucuuuaagcugu

SEQ ID NO: 240204 - RNA, 32 nt, Human
ucucuauuucacuugaccccugcccaccucuc

SEQ ID NO: 240205 - RNA, 32 nt, Human
ucucuauuuugucccugaauaauauuuuucuu

SEQ ID NO: 240206 - RNA, 32 nt, Human
ucucucaaaauugccauuuucucuaccauguc

SEQ ID NO: 240207 - RNA, 32 nt, Human
ucucucaaagugcugggauuacaggcauaagc

SEQ ID NO: 240208 - RNA, 32 nt, Human
ucucucaaagugcugggauuacaggcaugagc

SEQ ID NO: 240209 - RNA, 32 nt, Human
ucucucaaagugcugggauuacaggugugagc

SEQ ID NO: 240210 - RNA, 32 nt, Human
ucucucaagaagcaagagaacaccugcaggaa

SEQ ID NO: 240211 - RNA, 32 nt, Human
ucucucaagaugaccugaguuccuuccugcca

SEQ ID NO: 240212 - RNA, 32 nt, Human
ucucucaagccugauguguccucucucucuuu

SEQ ID NO: 240213 - RNA, 32 nt, Human
ucucucaaggggcacugucauguaggagucug

SEQ ID NO: 240214 - RNA, 32 nt, Human
ucucucaauccuccuccuccuccucuuucuug

SEQ ID NO: 240215 - RNA, 32 nt, Human
ucucucacccaggccugaagugcaguggcaug

SEQ ID NO: 240216 - RNA, 32 nt, Human
ucucucaccucagccuccugaguaggugggau

SEQ ID NO: 240217 - RNA, 32 nt, Human
ucucucaccuucuugacccucucuccaucauu

SEQ ID NO: 240218 - RNA, 32 nt, Human
ucucucacucacugcaauugcuucuacucugg

SEQ ID NO: 240219 - RNA, 32 nt, Human
ucucucacugauccauuuggcuguaguuuuca

SEQ ID NO: 240220 - RNA, 32 nt, Human
ucucucacuuccccaucuugucuuccuagacc

SEQ ID NO: 240221 - RNA, 32 nt, Human
ucucucagaccagcucacugaggcagaggagu

SEQ ID NO: 240222 - RNA, 32 nt, Human
ucucucagaguguugggauuacagccaugagc

SEQ ID NO: 240223 - RNA, 32 nt, Human
ucucucagaguugcugucuucucugagacaca

SEQ ID NO: 240224 - RNA, 21 nt, Human
ucucucagcaaaccugcuggg

SEQ ID NO: 240225 - RNA, 32 nt, Human
ucucucagcagagaucuuccagagugucagcc

SEQ ID NO: 240226 - RNA, 32 nt, Human
ucucucagcauccccucuagcuccuuacaccc

SEQ ID NO: 240227 - RNA, 32 nt, Human
ucucucagccuccacucccugucugaaaccag

SEQ ID NO: 240228 - RNA, 32 nt, Human
ucucucagcuggagagacucgggaugggguaa

SEQ ID NO: 240229 - RNA, 32 nt, Human
ucucucagcuucccucccaggaucaguuucua

SEQ ID NO: 240230 - RNA, 32 nt, Human
ucucucaggaggugggcugaccaccagaauga

SEQ ID NO: 240231 - RNA, 32 nt, Human
ucucucaggcuggguugcaauggcacaaucuc

SEQ ID NO: 240232 - RNA, 32 nt, Human
ucucucagggcugcuaugggcugaauugcuuu

SEQ ID NO: 240233 - RNA, 32 nt, Human
ucucucaucuugcaccccaaccucuguaaaua

SEQ ID NO: 240234 - RNA, 32 nt, Human
ucucucaucuuucucauccuguucucucacua

SEQ ID NO: 240235 - RNA, 32 nt, Human
ucucucaugaaaggagaugaacugcuucagau

SEQ ID NO: 240236 - RNA, 32 nt, Human
ucucucaugcauucccuggccuggaggcguca

SEQ ID NO: 240237 - RNA, 32 nt, Human
ucucucauggucugaaauugacuggggucucc

SEQ ID NO: 240238 - RNA, 32 nt, Human
ucucucauuuucuucccucucucccuccaucu

SEQ ID NO: 240239 - RNA, 32 nt, Human
ucucuccaaaccuguuucugcuggauugcgca

SEQ ID NO: 240240 - RNA, 32 nt, Human
ucucuccaaaugaagacaucacagccucauuc

SEQ ID NO: 240241 - RNA, 32 nt, Human
ucucuccaagccuucuuauuucacugcaguua

SEQ ID NO: 240242 - RNA, 32 nt, Human
ucucuccacacggagcuccuggcagcgagaac

SEQ ID NO: 240243 - RNA, 21 nt, Human
ucucuccaccaaagcucaucc

SEQ ID NO: 240244 - RNA, 32 nt, Human
ucucuccacuacccgcuggagauuucugcagc

SEQ ID NO: 240245 - RNA, 21 nt, Human
ucucuccacucaacuccaccc

SEQ ID NO: 240246 - RNA, 32 nt, Human
ucucuccacucucagccaucagugccagucca

SEQ ID NO: 240247 - RNA, 32 nt, Human
ucucuccacugcauuguuucacugggcucacc

SEQ ID NO: 240248 - RNA, 32 nt, Human
ucucuccacuggccgccagccucccuagcaca

SEQ ID NO: 240249 - RNA, 32 nt, Human
ucucuccagacuccaccacugacuguuucaga

SEQ ID NO: 240250 - RNA, 32 nt, Human
ucucuccagcauggacaggcggcugagaaggg

SEQ ID NO: 240251 - RNA, 32 nt, Human
ucucuccagccagccacugccuucuuuguaau

SEQ ID NO: 240252 - RNA, 19 nt, Human
ucucuccagcccacucuuc

SEQ ID NO: 240253 - RNA, 32 nt, Human
ucucuccagggcuguugguucuuucuccugac

SEQ ID NO: 240254 - RNA, 32 nt, Human
ucucuccaguugguuuucagcuggggcuugaa

SEQ ID NO: 240255 - RNA, 32 nt, Human
ucucuccauccagcgugaccagggcccgagag

SEQ ID NO: 240256 - RNA, 32 nt, Human
ucucuccauugccugcaccccaccccagccac

SEQ ID NO: 240257 - RNA, 28 nt, Human
ucucucccaagugccuugaucuuuguaa

SEQ ID NO: 240258 - RNA, 32 nt, Human
ucucucccacacccugcccuccuuguuucagc

SEQ ID NO: 240259 - RNA, 32 nt, Human
ucucucccacccacacuuaucucccccagggc

SEQ ID NO: 240260 - RNA, 19 nt, Human
ucucucccaccuccuuccc

SEQ ID NO: 240261 - RNA, 32 nt, Human
ucucucccacugcaacuccacuuucuuugcau

SEQ ID NO: 240262 - RNA, 32 nt, Human
ucucucccagaacccacagugggaaagcgguc

SEQ ID NO: 240263 - RNA, 32 nt, Human
ucucucccagagaacuacuggauuuccucaua

SEQ ID NO: 240264 - RNA, 32 nt, Human
ucucucccagcuuagccucuggcuguaagcuu

SEQ ID NO: 240265 - RNA, 32 nt, Human
ucucucccauuuucucucugcuuucucuccaa

SEQ ID NO: 240266 - RNA, 24 nt, Human
ucucuccccacagccucaaggcca

SEQ ID NO: 240267 - RNA, 32 nt, Human
ucucuccccagcugccuccuccucuucucucc

SEQ ID NO: 240268 - RNA, 32 nt, Human
ucucuccccgccccucuccucggcccuuucuc

SEQ ID NO: 240269 - RNA, 32 nt, Human
ucucuccccgccucgccuucccucucuucugu

SEQ ID NO: 240270 - RNA, 32 nt, Human
ucucuccccucacauccuccugcccagcuccu

SEQ ID NO: 240271 - RNA, 32 nt, Human
ucucuccccuccucugaauuuaauucuuucaa

SEQ ID NO: 240272 - RNA, 32 nt, Human
ucucuccccuucuuccucgguuucuuccgucc

SEQ ID NO: 240273 - RNA, 32 nt, Human
ucucucccgaaaauacaaaauuagccaggcgu

SEQ ID NO: 240274 - RNA, 32 nt, Human
ucucucccgcagcugccucagucggcuacucu

SEQ ID NO: 240275 - RNA, 32 nt, Human
ucucucccguuuucucuuugcuuucucuccaa

SEQ ID NO: 240276 - RNA, 32 nt, Human
ucucucccuagugucccuucagccugggcuga

SEQ ID NO: 240277 - RNA, 32 nt, Human
ucucucccucaugaacacccacccaccucguu

SEQ ID NO: 240278 - RNA, 32 nt, Human
ucucucccuccaccccuugcagccugggcugu

SEQ ID NO: 240279 - RNA, 32 nt, Human
ucucucccuccagggccacugcuugaagaaga

SEQ ID NO: 240280 - RNA, 32 nt, Human
ucucucccuccccacuuucuccuuuuccuucc

SEQ ID NO: 240281 - RNA, 32 nt, Human
ucucucccucccccuucaggggcucccugccu

SEQ ID NO: 240282 - RNA, 32 nt, Human
ucucucccuccccuaauuucugagguugguuc

SEQ ID NO: 240283 - RNA, 32 nt, Human
ucucucccuccccucccccuucuacuuuagcc

SEQ ID NO: 240284 - RNA, 32 nt, Human
ucucucccuccuacagugcucucccucccugg

SEQ ID NO: 240285 - RNA, 32 nt, Human
ucucucccuccuccuccccucucccucccccu

SEQ ID NO: 240286 - RNA, 32 nt, Human
ucucucccucucccucucccacucucccucuc

SEQ ID NO: 240287 - RNA, 32 nt, Human
ucucucccucucccucucccucucugucucgg

SEQ ID NO: 240288 - RNA, 20 nt, Human
ucucucccucucuccuuccc

SEQ ID NO: 240289 - RNA, 32 nt, Human
ucucucccucugggcuggagcucagugaggga

SEQ ID NO: 240290 - RNA, 32 nt, Human
ucucucccucugucucccuccuggccauucug

SEQ ID NO: 240291 - RNA, 19 nt, Human
ucucucccucuucuuuccc

SEQ ID NO: 240292 - RNA, 32 nt, Human
ucucucccugaaccugauccucagccuucagu

SEQ ID NO: 240293 - RNA, 32 nt, Human
ucucucccugcccuuuuccugccugaagagca

SEQ ID NO: 240294 - RNA, 32 nt, Human
ucucucccugccuuuaaaugaaacaagucuag

SEQ ID NO: 240295 - RNA, 32 nt, Human
ucucucccugcucucugccugagcucugggcc

SEQ ID NO: 240296 - RNA, 21 nt, Human
ucucucccugcuguauauuaa

SEQ ID NO: 240297 - RNA, 32 nt, Human
ucucucccuguggcuggucugguucucaugua

SEQ ID NO: 240298 - RNA, 32 nt, Human
ucucucccuucggcuucucucuuucggccggc

SEQ ID NO: 240299 - RNA, 32 nt, Human
ucucucccuucuuuaccuucauuucauccugu

SEQ ID NO: 240300 - RNA, 32 nt, Human
ucucucccuuggcaaauguaaguuuucuaagu

SEQ ID NO: 240301 - RNA, 32 nt, Human
ucucucccuuucuagguauuugcauaggaauc

SEQ ID NO: 240302 - RNA, 32 nt, Human
ucucucccuuucucccccucucucucugccuu

SEQ ID NO: 240303 - RNA, 32 nt, Human
ucucucccuuucucccuccauccuuccacuuc

SEQ ID NO: 240304 - RNA, 32 nt, Human
ucucucccuuucucccucgcuccccaccaacu

SEQ ID NO: 240305 - RNA, 32 nt, Human
ucucucccuuucucucuccuucucuguuucuc

SEQ ID NO: 240306 - RNA, 20 nt, Human
ucucuccgcugccccgguca

SEQ ID NO: 240307 - RNA, 32 nt, Human
ucucuccggcugggaugaucacacccucugcu

SEQ ID NO: 240308 - RNA, 23 nt, Human
ucucuccguugccccagcuucac

SEQ ID NO: 240309 - RNA, 32 nt, Human
ucucuccuauuuccuuucuaccuuccguguuu

SEQ ID NO: 240310 - RNA, 32 nt, Human
ucucuccucauuucccugucaugaacaccucg

SEQ ID NO: 240311 - RNA, 32 nt, Human
ucucuccuccccaucagugaggaccagacacc

SEQ ID NO: 240312 - RNA, 32 nt, Human
ucucuccuccccuccucucucuuccucuccuc

SEQ ID NO: 240313 - RNA, 32 nt, Human
ucucuccuccucccccucucuccuuccuuccu

SEQ ID NO: 240314 - RNA, 32 nt, Human
ucucuccuccucuuccucucucuggacgcccg

SEQ ID NO: 240315 - RNA, 32 nt, Human
ucucuccuccugcuggagugccagucccugag

SEQ ID NO: 240316 - RNA, 32 nt, Human
ucucuccuccuuccaccuccccucccuccauc

SEQ ID NO: 240317 - RNA, 32 nt, Human
ucucuccucucccccuccuucaucucuccucc

SEQ ID NO: 240318 - RNA, 32 nt, Human
ucucuccucuccgcuucucucccccucugucu

SEQ ID NO: 240319 - RNA, 32 nt, Human
ucucuccugaacccuacucucuccuuuuugcu

SEQ ID NO: 240320 - RNA, 32 nt, Human
ucucuccugaugcuagguuggggcccacccug

SEQ ID NO: 240321 - RNA, 32 nt, Human
ucucuccugcaacccccacugcucagccucua

SEQ ID NO: 240322 - RNA, 24 nt, Human
ucucuccugcauccuguagacuca

SEQ ID NO: 240323 - RNA, 32 nt, Human
ucucuccugccagucucuuguacucugugucc

SEQ ID NO: 240324 - RNA, 32 nt, Human
ucucuccugccugcccugccucagccaggccc

SEQ ID NO: 240325 - RNA, 32 nt, Human
ucucuccugccugccuuauccuugggccauca

SEQ ID NO: 240326 - RNA, 32 nt, Human
ucucuccugcucacccgccucuugccccuucu

SEQ ID NO: 240327 - RNA, 32 nt, Human
ucucuccuggcagaaagcaggcgaagggcagg

SEQ ID NO: 240328 - RNA, 32 nt, Human
ucucuccugggcagccacaccacagagcgggg

SEQ ID NO: 240329 - RNA, 32 nt, Human
ucucuccuggggacacagaggucggcaggcag

SEQ ID NO: 240330 - RNA, 32 nt, Human
ucucuccuggucaaagaggcuuggggacugga

SEQ ID NO: 240331 - RNA, 32 nt, Human
ucucuccuguauaaccccaccuugccaagcuu

SEQ ID NO: 240332 - RNA, 32 nt, Human
ucucuccugucaaagugaaugauauauucuug

SEQ ID NO: 240333 - RNA, 32 nt, Human
ucucuccugugcaaaauggcaacucuuaagga

SEQ ID NO: 240334 - RNA, 32 nt, Human
ucucuccuucccaggcuacugauguccugggu

SEQ ID NO: 240335 - RNA, 32 nt, Human
ucucuccuuccucccuuccuuuacaguuuaaa

SEQ ID NO: 240336 - RNA, 32 nt, Human
ucucuccuucuccuccuccuccuccucuuccc

SEQ ID NO: 240337 - RNA, 32 nt, Human
ucucuccuucucucuucucuucuucuugccug

SEQ ID NO: 240338 - RNA, 32 nt, Human
ucucuccuucuggccucucauuuccuuacacu

SEQ ID NO: 240339 - RNA, 32 nt, Human
ucucuccuuucaccaucucuccucucccccuc

SEQ ID NO: 240340 - RNA, 32 nt, Human
ucucuccuuuccagucggagaccucugccgca

SEQ ID NO: 240341 - RNA, 32 nt, Human
ucucucgcaguuuccccgucccucucugucuc

SEQ ID NO: 240342 - RNA, 32 nt, Human
ucucucgcccacccuucccccuucuuccccca

SEQ ID NO: 240343 - RNA, 32 nt, Human
ucucucgcccaggcuggagugcaguggcguga

SEQ ID NO: 240344 - RNA, 32 nt, Human
ucucucgcccaggcuggagugcaguggugcga

SEQ ID NO: 240345 - RNA, 32 nt, Human
ucucucgcccaggcuggagugcagugguguga

SEQ ID NO: 240346 - RNA, 32 nt, Human
ucucucgccuguucugugucucacaugcuuuu

SEQ ID NO: 240347 - RNA, 32 nt, Human
ucucucggcggagcugcugugcaguggaacgc

SEQ ID NO: 240348 - RNA, 32 nt, Human
ucucucgggagcccuagcccugcuccaacucc

SEQ ID NO: 240349 - RNA, 32 nt, Human
ucucucgggccagggagguugaggcugcagug

SEQ ID NO: 240350 - RNA, 32 nt, Human
ucucucggguucaagcaauugucugccucagc

SEQ ID NO: 240351 - RNA, 32 nt, Human
ucucucgugggucgccuuugcccacacuggcg

SEQ ID NO: 240352 - RNA, 19 nt, Human
ucucucuaaaaauacaaaa

SEQ ID NO: 240353 - RNA, 32 nt, Human
ucucucuaaaaauacaaaaauuagcugggcgu

SEQ ID NO: 240354 - RNA, 32 nt, Human
ucucucuaccacccucuccugcgccccugaga

SEQ ID NO: 240355 - RNA, 32 nt, Human
ucucucuaccauggagaagagcaggaagggau

SEQ ID NO: 240356 - RNA, 32 nt, Human
ucucucuacccuggggaggaacaguggcuucu

SEQ ID NO: 240357 - RNA, 32 nt, Human
ucucucuagccgugugaaacugugaguccauu

SEQ ID NO: 240358 - RNA, 32 nt, Human
ucucucuagggcagcagagagcuuuuugcacu

SEQ ID NO: 240359 - RNA, 32 nt, Human
ucucucuaggguacauggugcugggagaggca

SEQ ID NO: 240360 - RNA, 32 nt, Human
ucucucuaguagcuggaauuauaggcacacgc

SEQ ID NO: 240361 - RNA, 32 nt, Human
ucucucuauuucccccuuucuuccucauuccc

SEQ ID NO: 240362 - RNA, 32 nt, Human
ucucucucaagaaagcagcuguuggccauuca

SEQ ID NO: 240363 - RNA, 32 nt, Human
ucucucucacccaggcuggaguggaguggcgc

SEQ ID NO: 240364 - RNA, 23 nt, Human
ucucucucagccauggagagcug

SEQ ID NO: 240365 - RNA, 32 nt, Human
ucucucucaucauccuccucaugccagauagc

SEQ ID NO: 240366 - RNA, 32 nt, Human
ucucucucauuucagaaacggacuuucucauc

SEQ ID NO: 240367 - RNA, 32 nt, Human
ucucucucauuuccuacucccugauuauccua

SEQ ID NO: 240368 - RNA, 32 nt, Human
ucucucuccaauaaaccuuuugcuucagggua

SEQ ID NO: 240369 - RNA, 20 nt, Human
ucucucuccacugagugcug

SEQ ID NO: 240370 - RNA, 32 nt, Human
ucucucuccagcugccaccacagccuggaggc

SEQ ID NO: 240371 - RNA, 32 nt, Human
ucucucuccaucccucuccucugcccucugcu

SEQ ID NO: 240372 - RNA, 32 nt, Human
ucucucucccagacccuucccccaccacaucg

SEQ ID NO: 240373 - RNA, 32 nt, Human
ucucucuccccacugucucucuucuuucuguc

SEQ ID NO: 240374 - RNA, 32 nt, Human
ucucucucccccucauuucucuuccuccucac

SEQ ID NO: 240375 - RNA, 32 nt, Human
ucucucucccucacucccaaaaccuggcauca

SEQ ID NO: 240376 - RNA, 32 nt, Human
ucucucucccucccucuccuucccuacccucu

SEQ ID NO: 240377 - RNA, 32 nt, Human
ucucucucccuucacccuuucuccauaccagg

SEQ ID NO: 240378 - RNA, 32 nt, Human
ucucucuccgucucuccuccccucucucucuu

SEQ ID NO: 240379 - RNA, 32 nt, Human
ucucucuccucauuucggugcauguccuuucu

SEQ ID NO: 240380 - RNA, 32 nt, Human
ucucucuccugccuccuccuccacacugaagg

SEQ ID NO: 240381 - RNA, 32 nt, Human
ucucucuccuucagggagauucuuuuucucua

SEQ ID NO: 240382 - RNA, 32 nt, Human
ucucucucgccaugguuggagugcaguggugc

SEQ ID NO: 240383 - RNA, 32 nt, Human
ucucucucgcccacccuucccccuucuucccc

SEQ ID NO: 240384 - RNA, 22 nt, Human
ucucucucugccuuaggcucug

SEQ ID NO: 240385 - RNA, 21 nt, Human
ucucucucugcgccugggucg

SEQ ID NO: 240386 - RNA, 20 nt, Human
ucucucucugucucucagcc

SEQ ID NO: 240387 - RNA, 32 nt, Human
ucucucucugugcccuuagccugcugugccca

SEQ ID NO: 240388 - RNA, 32 nt, Human
ucucucucuucccugacuaucucucucaauga

SEQ ID NO: 240389 - RNA, 32 nt, Human
ucucucucuuugcucucuuucucccuccccua

SEQ ID NO: 240390 - RNA, 32 nt, Human
ucucucugacuuaagucucugccauucuaaaa

SEQ ID NO: 240391 - RNA, 32 nt, Human
ucucucugagccuggaugggcuuggggccaga

SEQ ID NO: 240392 - RNA, 32 nt, Human
ucucucugagggcagaugaggcgcaggaaaau

SEQ ID NO: 240393 - RNA, 32 nt, Human
ucucucugagggggugggggugcugcucucuc

SEQ ID NO: 240394 - RNA, 32 nt, Human
ucucucugcaccucucuggucaggccuaguca

SEQ ID NO: 240395 - RNA, 32 nt, Human
ucucucugcacuccagccugggugacagagca

SEQ ID NO: 240396 - RNA, 32 nt, Human
ucucucugcccaacccuucccucaccuuggca

SEQ ID NO: 240397 - RNA, 20 nt, Human
ucucucugcccccaaaagug

SEQ ID NO: 240398 - RNA, 32 nt, Human
ucucucugccccucagguccuggcccuugggu

SEQ ID NO: 240399 - RNA, 32 nt, Human
ucucucugcucacccuugaaugcagcuaccau

SEQ ID NO: 240400 - RNA, 32 nt, Human
ucucucugcuccagcgugccuccgggaaucac

SEQ ID NO: 240401 - RNA, 32 nt, Human
ucucucugcuucucucuugcauagauacaauc

SEQ ID NO: 240402 - RNA, 32 nt, Human
ucucucuggaaacugucauuaggguuagggaa

SEQ ID NO: 240403 - RNA, 32 nt, Human
ucucucuggaggaauggcaaugccuggauugu

SEQ ID NO: 240404 - RNA, 32 nt, Human
ucucucuggaggaguggcaaugccuggacacc

SEQ ID NO: 240405 - RNA, 32 nt, Human
ucucucuggaggaguggcaaugccuggacacu

SEQ ID NO: 240406 - RNA, 32 nt, Human
ucucucuggaggaguggcaaugccuggauacu

SEQ ID NO: 240407 - RNA, 32 nt, Human
ucucucugggaggggucuggugcggguggaau

SEQ ID NO: 240408 - RNA, 32 nt, Human
ucucucugggaugagucaggaggccuggaggc

SEQ ID NO: 240409 - RNA, 32 nt, Human
ucucucuggggucccacacuggggucaugaga

SEQ ID NO: 240410 - RNA, 32 nt, Human
ucucucuggucaggcccacugcagagauggug

SEQ ID NO: 240411 - RNA, 32 nt, Human
ucucucuguaccacgugcacaugagguccauu

SEQ ID NO: 240412 - RNA, 32 nt, Human
ucucucuguaccaugagcuccuccaggagauu

SEQ ID NO: 240413 - RNA, 32 nt, Human
ucucucuguagccaggcuggagggcaauugua

SEQ ID NO: 240414 - RNA, 32 nt, Human
ucucucugucaucugggcugcagugcaguggu

SEQ ID NO: 240415 - RNA, 22 nt, Human
ucucucuguccucuucuccccu

SEQ ID NO: 240416 - RNA, 32 nt, Human
ucucucuguccucuucuccccucucucagauu

SEQ ID NO: 240417 - RNA, 32 nt, Human
ucucucugucgccaggcuggaaugcagugcag

SEQ ID NO: 240418 - RNA, 29 nt, Human
ucucucugucuguguggaugccugaugcu

SEQ ID NO: 240419 - RNA, 32 nt, Human
ucucucugugcccuccugcaauggcagccuug

SEQ ID NO: 240420 - RNA, 32 nt, Human
ucucucugugcuggugggggccucuuuaccau

SEQ ID NO: 240421 - RNA, 32 nt, Human
ucucucuguguccuagacuuccauugcauuua

SEQ ID NO: 240422 - RNA, 19 nt, Human
ucucucuguuccugaagug

SEQ ID NO: 240423 - RNA, 32 nt, Human
ucucucuguugucccccugccugguccucugg

SEQ ID NO: 240424 - RNA, 32 nt, Human
ucucucuuagguaccaccucauggagaccccc

SEQ ID NO: 240425 - RNA, 32 nt, Human
ucucucuuauaagcuauuccugccucacaccu

SEQ ID NO: 240426 - RNA, 32 nt, Human
ucucucuucccaaccauaacucugcccucagc

SEQ ID NO: 240427 - RNA, 32 nt, Human
ucucucuucccugacuaucucucucaaugauc

SEQ ID NO: 240428 - RNA, 18 nt, Human
ucucucuucuccagggca

SEQ ID NO: 240429 - RNA, 32 nt, Human
ucucucuucucccaguucuaccuccccagaag

SEQ ID NO: 240430 - RNA, 32 nt, Human
ucucucuucucccugccgucaugucuaaguca

SEQ ID NO: 240431 - RNA, 32 nt, Human
ucucucuucuccucucuuucucuccucugucu

SEQ ID NO: 240432 - RNA, 32 nt, Human
ucucucuucucucuccucuccucucucuucuc

SEQ ID NO: 240433 - RNA, 24 nt, Human
ucucucuucugaaccuggagccug

SEQ ID NO: 240434 - RNA, 32 nt, Human
ucucucuucuugccccugccuccuagagggag

SEQ ID NO: 240435 - RNA, 32 nt, Human
ucucucuugcuccccgcuucguucuguuuugg

SEQ ID NO: 240436 - RNA, 32 nt, Human
ucucucuugguauuucuucucucccaacuuua

SEQ ID NO: 240437 - RNA, 32 nt, Human
ucucucuuggucauuuaggcagucuccuauac

SEQ ID NO: 240438 - RNA, 32 nt, Human
ucucucuugucgcccaggcuggagugcaaugg

SEQ ID NO: 240439 - RNA, 32 nt, Human
ucucucuugucucccaggcuggagugcaaucg

SEQ ID NO: 240440 - RNA, 32 nt, Human
ucucucuuguuacccaggcuggagugcaaugg

SEQ ID NO: 240441 - RNA, 32 nt, Human
ucucucuuguugcccaggcugaagugcaaugu

SEQ ID NO: 240442 - RNA, 32 nt, Human
ucucucuuguugcccaggcugaagugcagugu

SEQ ID NO: 240443 - RNA, 32 nt, Human
ucucucuuguugcccaggcuggagugcauugg

SEQ ID NO: 240444 - RNA, 22 nt, Human
ucucucuuuaaaaugcaaaaua

SEQ ID NO: 240445 - RNA, 32 nt, Human
ucucucuuuccacggcaguagcuccugcaaga

SEQ ID NO: 240446 - RNA, 32 nt, Human
ucucucuuuccucugcuguucuucccauuguu

SEQ ID NO: 240447 - RNA, 32 nt, Human
ucucucuuucuucacuccuuuuucuuuccaaa

SEQ ID NO: 240448 - RNA, 32 nt, Human
ucucucuuucuuucccuuucucuuucuaucuc

SEQ ID NO: 240449 - RNA, 32 nt, Human
ucucucuuucuuucuuucuuucuuucuuucug

SEQ ID NO: 240450 - RNA, 32 nt, Human
ucucucuuucuuucuuuucuuucuuucucuuu

SEQ ID NO: 240451 - RNA, 32 nt, Human
ucucucuuucuuuugugcauauggcaacguuc

SEQ ID NO: 240452 - RNA, 21 nt, Human
ucucucuuugcaggagcaccg

SEQ ID NO: 240453 - RNA, 19 nt, Human
ucucucuuugccucgcucc

SEQ ID NO: 240454 - RNA, 23 nt, Human
ucucucuuugccuuuaguuugcc

SEQ ID NO: 240455 - RNA, 22 nt, Human
ucucucuuugcuuuggcugcug

SEQ ID NO: 240456 - RNA, 32 nt, Human
ucucucuuuggccauccuuccuuucccccacc

SEQ ID NO: 240457 - RNA, 24 nt, Human
ucucucuuuguuuuuauggcucug

SEQ ID NO: 240458 - RNA, 32 nt, Human
ucucucuuuuccuaggucugcagccaccccag

SEQ ID NO: 240459 - RNA, 32 nt, Human
ucucucuuuuuccccgauuuuccagagcuagg

SEQ ID NO: 240460 - RNA, 22 nt, Human
ucucugaaacgagcaacagguu

SEQ ID NO: 240461 - RNA, 21 nt, Human
ucucugaaaucccagcacuca

SEQ ID NO: 240462 - RNA, 21 nt, Human
ucucugaagacccggcacagg

SEQ ID NO: 240463 - RNA, 22 nt, Human
ucucugaagaucuggacugagg

SEQ ID NO: 240464 - RNA, 22 nt, Human
ucucugaagaucuuugugaggu

SEQ ID NO: 240465 - RNA, 32 nt, Human
ucucugaagauguuuugugaccagguuugugu

SEQ ID NO: 240466 - RNA, 22 nt, Human
ucucugaagcacacaacaaguu

SEQ ID NO: 240467 - RNA, 32 nt, Human
ucucugaagcugugcaggcugccuguaugguu

SEQ ID NO: 240468 - RNA, 31 nt, Human
ucucugaaucaauaugaccucacuuaaaaca

SEQ ID NO: 240469 - RNA, 21 nt, Human
ucucugaaucucaaacaaguu

SEQ ID NO: 240470 - RNA, 32 nt, Human
ucucugacacaaaccaagaaaagguggugauu

SEQ ID NO: 240471 - RNA, 32 nt, Human
ucucugacagagcgggacagaauggauauuug

SEQ ID NO: 240472 - RNA, 32 nt, Human
ucucugacagccacagcacuacaucaaucccu

SEQ ID NO: 240473 - RNA, 32 nt, Human
ucucugacauaaggagugccugaauagcuugg

SEQ ID NO: 240474 - RNA, 23 nt, Human
ucucugaccagcuuggggcacug

SEQ ID NO: 240475 - RNA, 32 nt, Human
ucucugaccaugcccuuuccugccucagauuu

SEQ ID NO: 240476 - RNA, 32 nt, Human
ucucugacccuugaguucuguuggcccacuga

SEQ ID NO: 240477 - RNA, 32 nt, Human
ucucugacucuugaacccuugugcagauuucc

SEQ ID NO: 240478 - RNA, 32 nt, Human
ucucugacugccaccccugccugccugcccgg

SEQ ID NO: 240479 - RNA, 32 nt, Human
ucucugacugccuuucccacagacacagcaca

SEQ ID NO: 240480 - RNA, 25 nt, Human
ucucugacuucugccuggagacuua

SEQ ID NO: 240481 - RNA, 32 nt, Human
ucucugacuucugcuugauuccacagucucca

SEQ ID NO: 240482 - RNA, 32 nt, Human
ucucugacuugguuuuucugucccugucuccc

SEQ ID NO: 240483 - RNA, 24 nt, Human
ucucugacuuuaccuugagaucug

SEQ ID NO: 240484 - RNA, 32 nt, Human
ucucugagaaccauucucccaccccaaguucc

SEQ ID NO: 240485 - RNA, 32 nt, Human
ucucugagaacuggcuuggugacuuugcuuca

SEQ ID NO: 240486 - RNA, 24 nt, Human
ucucugagauaacagcagaaguca

SEQ ID NO: 240487 - RNA, 26 nt, Human
ucucugagauauaccucaaucacaca

SEQ ID NO: 240488 - RNA, 32 nt, Human
ucucugagcagggaccugcuccugcagcaacc

SEQ ID NO: 240489 - RNA, 32 nt, Human
ucucugagcauuuuaaacaucuucccauuuaa

SEQ ID NO: 240490 - RNA, 32 nt, Human
ucucugagccaguuuucauuucuuccuggugg

SEQ ID NO: 240491 - RNA, 32 nt, Human
ucucugagccucuccuggaaaguaugaugcua

SEQ ID NO: 240492 - RNA, 32 nt, Human
ucucugagcuaaagcaguaaacucccaaauug

SEQ ID NO: 240493 - RNA, 32 nt, Human
ucucugagcuccagagguggccucuuggacag

SEQ ID NO: 240494 - RNA, 32 nt, Human
ucucugagcugugcagguggggagacugggcu

SEQ ID NO: 240495 - RNA, 32 nt, Human
ucucugaggaagcugggguucaugacaauggc

SEQ ID NO: 240496 - RNA, 32 nt, Human
ucucugaggaccaccagcuggccagggucuga

SEQ ID NO: 240497 - RNA, 32 nt, Human
ucucugaggcagggugggagccugggcugggc

SEQ ID NO: 240498 - RNA, 32 nt, Human
ucucugaggcggaggaugcgggagcgcaucug

SEQ ID NO: 240499 - RNA, 23 nt, Human
ucucugagggccugcaaggaggc

SEQ ID NO: 240500 - RNA, 32 nt, Human
ucucugaggguaugggggccagauggcucuug

SEQ ID NO: 240501 - RNA, 32 nt, Human
ucucugaggugcaaagaaugcacuuuucccua

SEQ ID NO: 240502 - RNA, 32 nt, Human
ucucugagucccccuuccuuuuuaaucuucuu

SEQ ID NO: 240503 - RNA, 32 nt, Human
ucucugagugugaaacagagcacuugcagagc

SEQ ID NO: 240504 - RNA, 32 nt, Human
ucucugaguuccuguggcuccugggcccaugc

SEQ ID NO: 240505 - RNA, 32 nt, Human
ucucugaucagugucuuuucagcacuuugagc

SEQ ID NO: 240506 - RNA, 32 nt, Human
ucucugauccucagcagggaaggcgaggguua

SEQ ID NO: 240507 - RNA, 32 nt, Human
ucucugaucgcacagaaaucacugccuaucac

SEQ ID NO: 240508 - RNA, 32 nt, Human
ucucugaucuccucucucucugugucugcucc

SEQ ID NO: 240509 - RNA, 32 nt, Human
ucucugaugacaacuccaaagccccggcucuu

SEQ ID NO: 240510 - RNA, 32 nt, Human
ucucugaugccaccaccugaacccugcucccu

SEQ ID NO: 240511 - RNA, 32 nt, Human
ucucugaugggaauauugccaguccugcuuuu

SEQ ID NO: 240512 - RNA, 32 nt, Human
ucucugaugggacuggaguugagggaaggagc

SEQ ID NO: 240513 - RNA, 32 nt, Human
ucucugcaacaagccacccaucugccaucaac

SEQ ID NO: 240514 - RNA, 32 nt, Human
ucucugcaacuccuuccucccugggccucccu

SEQ ID NO: 240515 - RNA, 31 nt, Human
ucucugcaagugucuguuauuagagaaacga

SEQ ID NO: 240516 - RNA, 32 nt, Human
ucucugcaauccaaauguauccauucuggcug

SEQ ID NO: 240517 - RNA, 32 nt, Human
ucucugcaauccaguaugcauuccaaaugaaa

SEQ ID NO: 240518 - RNA, 32 nt, Human
ucucugcaccccaccauccacauguauuuuuc

SEQ ID NO: 240519 - RNA, 32 nt, Human
ucucugcaccugcuuagaacaugggguuuuga

SEQ ID NO: 240520 - RNA, 32 nt, Human
ucucugcacucagacaguuuacagaaauaaau

SEQ ID NO: 240521 - RNA, 32 nt, Human
ucucugcacuccugauuuugcuccauacuuuu

SEQ ID NO: 240522 - RNA, 31 nt, Human
ucucugcacuugucucccauuaaggucccau

SEQ ID NO: 240523 - RNA, 32 nt, Human
ucucugcacuuugaggaugcagacagugaagu

SEQ ID NO: 240524 - RNA, 32 nt, Human
ucucugcagcagcaaccggauuucagccuggg

SEQ ID NO: 240525 - RNA, 32 nt, Human
ucucugcagccuguucuggggcugggccucgg

SEQ ID NO: 240526 - RNA, 32 nt, Human
ucucugcaggccucacaugccgugacaccaga

SEQ ID NO: 240527 - RNA, 32 nt, Human
ucucugcaggcgccgggagaagugaccagagc

SEQ ID NO: 240528 - RNA, 32 nt, Human
ucucugcagggguuuccucuccauccauuucc

SEQ ID NO: 240529 - RNA, 32 nt, Human
ucucugcaggucgagcccagcccagcuggugg

SEQ ID NO: 240530 - RNA, 32 nt, Human
ucucugcaggugucguggaggaaccuagcacc

SEQ ID NO: 240531 - RNA, 32 nt, Human
ucucugcaguuucucuaccugcccccagagcu

SEQ ID NO: 240532 - RNA, 32 nt, Human
ucucugcauccuaacuugcugccuuaucgucu

SEQ ID NO: 240533 - RNA, 32 nt, Human
ucucugcaucuauucuggacaccagaauggcg

SEQ ID NO: 240534 - RNA, 32 nt, Human
ucucugcaucugacucucuuuugaggucccug

SEQ ID NO: 240535 - RNA, 32 nt, Human
ucucugcauuuggagauucguggagaaccuau

SEQ ID NO: 240536 - RNA, 32 nt, Human
ucucugccaacaugaggacagaaggacuggug

SEQ ID NO: 240537 - RNA, 23 nt, Human
ucucugccaagucacucagguca

SEQ ID NO: 240538 - RNA, 32 nt, Human
ucucugccaagugcucuugauaauuucuucag

SEQ ID NO: 240539 - RNA, 32 nt, Human
ucucugccaaugugaggacagaaggacuggug

SEQ ID NO: 240540 - RNA, 20 nt, Human
ucucugccacugggcugcaa

SEQ ID NO: 240541 - RNA, 32 nt, Human
ucucugccagccaggcuggagugcaguggcau

SEQ ID NO: 240542 - RNA, 32 nt, Human
ucucugccaggccucagggugccugagacacu

SEQ ID NO: 240543 - RNA, 32 nt, Human
ucucugccauguccugagucugcuucagucug

SEQ ID NO: 240544 - RNA, 32 nt, Human
ucucugccauuuucucuaucagaaaacauuaa

SEQ ID NO: 240545 - RNA, 32 nt, Human
ucucugcccacuacaaccuccaccuccugggu

SEQ ID NO: 240546 - RNA, 32 nt, Human
ucucugcccaggagucagaggugccuccagga

SEQ ID NO: 240547 - RNA, 32 nt, Human
ucucugcccaguuugaaaaucucauggcagag

SEQ ID NO: 240548 - RNA, 32 nt, Human
ucucugcccauuucuucugucucccacagaca

SEQ ID NO: 240549 - RNA, 32 nt, Human
ucucugccccgugggagccggcggggcggcgg

SEQ ID NO: 240550 - RNA, 32 nt, Human
ucucugccccuauuuccuuguaaagagggagc

SEQ ID NO: 240551 - RNA, 32 nt, Human
ucucugccccuuccuuccuuccuuccuucguu

SEQ ID NO: 240552 - RNA, 32 nt, Human
ucucugcccuauuuuucuggauauuucugugu

SEQ ID NO: 240553 - RNA, 32 nt, Human
ucucugcccugccucccucugcuguguuccca

SEQ ID NO: 240554 - RNA, 32 nt, Human
ucucugcccuuccucuagccucuugucacaug

SEQ ID NO: 240555 - RNA, 32 nt, Human
ucucugccgcggcuuccucggcugccagcucu

SEQ ID NO: 240556 - RNA, 22 nt, Human
ucucugccuaugcaaaaauuca

SEQ ID NO: 240557 - RNA, 32 nt, Human
ucucugccuccagagagguggaugccuggguu

SEQ ID NO: 240558 - RNA, 32 nt, Human
ucucugccuccagccccaccuuccccgggaga

SEQ ID NO: 240559 - RNA, 32 nt, Human
ucucugccuccuccucccuuucucccuugugg

SEQ ID NO: 240560 - RNA, 32 nt, Human
ucucugccuccuuccuccuccuucccagucua

SEQ ID NO: 240561 - RNA, 32 nt, Human
ucucugccucugccugccuccugguccccacu

SEQ ID NO: 240562 - RNA, 32 nt, Human
ucucugccugacaaggccagcacccaaagggu

SEQ ID NO: 240563 - RNA, 32 nt, Human
ucucugccugggaaacaggcuucauucagcac

SEQ ID NO: 240564 - RNA, 32 nt, Human
ucucugccugggagauggcuuccccgagcccc

SEQ ID NO: 240565 - RNA, 32 nt, Human
ucucugccugggcucaaccucugugauuucug

SEQ ID NO: 240566 - RNA, 32 nt, Human
ucucugccuucaguuccacauuucccuuuggc

SEQ ID NO: 240567 - RNA, 32 nt, Human
ucucugccuucugccaccucugccucaggagc

SEQ ID NO: 240568 - RNA, 32 nt, Human
ucucugccuuucgagcucugcagcacucuuau

SEQ ID NO: 240569 - RNA, 32 nt, Human
ucucugcggcacucuucugccuggugacugac

SEQ ID NO: 240570 - RNA, 31 nt, Human
ucucugcguuucagugaccuaccuuaaaaca

SEQ ID NO: 240571 - RNA, 20 nt, Human
ucucugcuaaaaauacaaaa

SEQ ID NO: 240572 - RNA, 21 nt, Human
ucucugcuaaaaauacaaaau

SEQ ID NO: 240573 - RNA, 32 nt, Human
ucucugcuaaaaauacaaaauuagcugggcgu

SEQ ID NO: 240574 - RNA, 32 nt, Human
ucucugcuauucaugaaucuugcuauugcaca

SEQ ID NO: 240575 - RNA, 31 nt, Human
ucucugcucaauaaaauaccuguaacuggaa

SEQ ID NO: 240576 - RNA, 32 nt, Human
ucucugcucaccaggacguacuucucucuaca

SEQ ID NO: 240577 - RNA, 32 nt, Human
ucucugcucacgaggcaggagcaguaugugcu

SEQ ID NO: 240578 - RNA, 32 nt, Human
ucucugcucacuacagcacccgcuucccaggu

SEQ ID NO: 240579 - RNA, 32 nt, Human
ucucugcucacugaaagcuccgccucccgggu

SEQ ID NO: 240580 - RNA, 32 nt, Human
ucucugcucacugcaaccuccgccucccgggu

SEQ ID NO: 240581 - RNA, 32 nt, Human
ucucugcucacugcaaccucugccuccugggu

SEQ ID NO: 240582 - RNA, 32 nt, Human
ucucugcucacugcaagcucagccucucgggu

SEQ ID NO: 240583 - RNA, 32 nt, Human
ucucugcucacugcaagcuccgccaucugggu

SEQ ID NO: 240584 - RNA, 32 nt, Human
ucucugcucacugcaagcuccgccucccgggu

SEQ ID NO: 240585 - RNA, 32 nt, Human
ucucugcucacugcaagcuccgccuccugggu

SEQ ID NO: 240586 - RNA, 32 nt, Human
ucucugcucacuguaaccucugccuccugggu

SEQ ID NO: 240587 - RNA, 32 nt, Human
ucucugcucauuuagucccgucuuccucaccg

SEQ ID NO: 240588 - RNA, 32 nt, Human
ucucugcucccacccuugccugccucuaaccc

SEQ ID NO: 240589 - RNA, 32 nt, Human
ucucugcucccaggagccagugacaugaggug

SEQ ID NO: 240590 - RNA, 32 nt, Human
ucucugcucccugcaaccuccaccucccgggu

SEQ ID NO: 240591 - RNA, 32 nt, Human
ucucugcucccuucuucaguaagcaaggagcc

SEQ ID NO: 240592 - RNA, 20 nt, Human
ucucugcuccuguuugaauu

SEQ ID NO: 240593 - RNA, 22 nt, Human
ucucugcuccuucuugcugugu

SEQ ID NO: 240594 - RNA, 32 nt, Human
ucucugcucugacccuucucaggcccgccuga

SEQ ID NO: 240595 - RNA, 32 nt, Human
ucucugcugacuucagccuggucaugcuugcu

SEQ ID NO: 240596 - RNA, 32 nt, Human
ucucugcugagcuguggcugcgguccuggugc

SEQ ID NO: 240597 - RNA, 32 nt, Human
ucucugcugaggaaguggcagguguguggccc

SEQ ID NO: 240598 - RNA, 32 nt, Human
ucucugcugaggcugccugccugccgggccca

SEQ ID NO: 240599 - RNA, 32 nt, Human
ucucugcugccagacacccccugcugcccacu

SEQ ID NO: 240600 - RNA, 32 nt, Human
ucucugcugccuccuccuuucuugagaagcuc

SEQ ID NO: 240601 - RNA, 32 nt, Human
ucucugcugccuccuuccuuuccugagaggcu

SEQ ID NO: 240602 - RNA, 24 nt, Human
ucucugcugcguguucgcgggcca

SEQ ID NO: 240603 - RNA, 32 nt, Human
ucucugcugcuuguuugagcuuaauaagccuc

SEQ ID NO: 240604 - RNA, 32 nt, Human
ucucugcugggcaggcaaccugggguccagcu

SEQ ID NO: 240605 - RNA, 32 nt, Human
ucucugcuguccuuuauuuaugggagaaacau

SEQ ID NO: 240606 - RNA, 20 nt, Human
ucucugcuguggcaguaggu

SEQ ID NO: 240607 - RNA, 32 nt, Human
ucucugcuguggcguucucucuugagagaccc

SEQ ID NO: 240608 - RNA, 32 nt, Human
ucucugcugugggaagacugugcaauggcaca

SEQ ID NO: 240609 - RNA, 32 nt, Human
ucucugcuguguagucuccuucaggcuuauug

SEQ ID NO: 240610 - RNA, 32 nt, Human
ucucugcuguguauuaaauucauuuaucuaaa

SEQ ID NO: 240611 - RNA, 32 nt, Human
ucucugcuguguugcgcagugcaguggggugc

SEQ ID NO: 240612 - RNA, 32 nt, Human
ucucugcuguucccugcguggaggaagcccac

SEQ ID NO: 240613 - RNA, 22 nt, Human
ucucugcuuaggucgcagcuca

SEQ ID NO: 240614 - RNA, 32 nt, Human
ucucugcuuauggcuggaccucagcuggcagg

SEQ ID NO: 240615 - RNA, 32 nt, Human
ucucugcuuccagaaugagaagcuuugcugug

SEQ ID NO: 240616 - RNA, 32 nt, Human
ucucugcuuccuguaccuugacaugcaaaagg

SEQ ID NO: 240617 - RNA, 32 nt, Human
ucucugcuucucuccagcucucaaucugcugc

SEQ ID NO: 240618 - RNA, 23 nt, Human
ucucugcuugcaauuuuuguuca

SEQ ID NO: 240619 - RNA, 32 nt, Human
ucucugcuugccacccuuggggccuccuucag

SEQ ID NO: 240620 - RNA, 18 nt, Human
ucucugcuugcugagcua

SEQ ID NO: 240621 - RNA, 32 nt, Human
ucucugcuuguccugggcugagguguccauga

SEQ ID NO: 240622 - RNA, 32 nt, Human
ucucugcuuuauucucuccauguggcaacauu

SEQ ID NO: 240623 - RNA, 32 nt, Human
ucucugcuuuccuccggagaaauaacagcguc

SEQ ID NO: 240624 - RNA, 32 nt, Human
ucucugcuuuuccauucuggguguuuucagaa

SEQ ID NO: 240625 - RNA, 20 nt, Human
ucucugcuuuuguugcuuca

SEQ ID NO: 240626 - RNA, 22 nt, Human
ucucuggacaaggcagcgcuga

SEQ ID NO: 240627 - RNA, 22 nt, Human
ucucuggacacuccaggguaga

SEQ ID NO: 240628 - RNA, 23 nt, Human
ucucuggacagcuacggcgccga

SEQ ID NO: 240629 - RNA, 23 nt, Human
ucucuggacaucuucagcccaga

SEQ ID NO: 240630 - RNA, 32 nt, Human
ucucuggaccuauucuaaccacuuaaaauuau

SEQ ID NO: 240631 - RNA, 21 nt, Human
ucucuggacgugcagaccaga

SEQ ID NO: 240632 - RNA, 32 nt, Human
ucucuggacguguagaccagauccagaagaaa

SEQ ID NO: 240633 - RNA, 32 nt, Human
ucucuggacugcacuguagggccuggagaccu

SEQ ID NO: 240634 - RNA, 32 nt, Human
ucucuggacuguugcauguacagugccuccau

SEQ ID NO: 240635 - RNA, 32 nt, Human
ucucuggagaacuuccucacacaccgcagcaa

SEQ ID NO: 240636 - RNA, 32 nt, Human
ucucuggagaaggcuucacugacuaaacuaug

SEQ ID NO: 240637 - RNA, 32 nt, Human
ucucuggagcagaauuuaucacacacaaaagu

SEQ ID NO: 240638 - RNA, 32 nt, Human
ucucuggagccugcaagccucuucccaugugu

SEQ ID NO: 240639 - RNA, 32 nt, Human
ucucuggagcugaaggggccagagagugggca

SEQ ID NO: 240640 - RNA, 32 nt, Human
ucucuggaggcagaaugagggagugagcagca

SEQ ID NO: 240641 - RNA, 32 nt, Human
ucucuggagggugcccuccuucugcuggcauc

SEQ ID NO: 240642 - RNA, 32 nt, Human
ucucuggaguuucccaguaggagagaaaugac

SEQ ID NO: 240643 - RNA, 22 nt, Human
ucucuggaugcucugaggcaga

SEQ ID NO: 240644 - RNA, 21 nt, Human
ucucuggauuaggcaggcaga

SEQ ID NO: 240645 - RNA, 32 nt, Human
ucucuggcacacacacuuggacauacaguucu

SEQ ID NO: 240646 - RNA, 32 nt, Human
ucucuggcagacucagcccacugccuugccag

SEQ ID NO: 240647 - RNA, 32 nt, Human
ucucuggcagagaaggauguccguuccaggag

SEQ ID NO: 240648 - RNA, 32 nt, Human
ucucuggcaggagaaccaggagguaagagucu

SEQ ID NO: 240649 - RNA, 32 nt, Human
ucucuggcaucugggguuccugacugauacca

SEQ ID NO: 240650 - RNA, 32 nt, Human
ucucuggcauucaugcagagcaaagcacuuua

SEQ ID NO: 240651 - RNA, 32 nt, Human
ucucuggcauugcuuccucuccuuccuuccug

SEQ ID NO: 240652 - RNA, 32 nt, Human
ucucuggccaccauggcaaaugcugagaucug

SEQ ID NO: 240653 - RNA, 32 nt, Human
ucucuggcccaagcuggagugcaguggcacga

SEQ ID NO: 240654 - RNA, 23 nt, Human
ucucuggccccuagcagcacgga

SEQ ID NO: 240655 - RNA, 17 nt, Human
ucucuggccucaucuug

SEQ ID NO: 240656 - RNA, 32 nt, Human
ucucuggccugggagcucucacacccugcacg

SEQ ID NO: 240657 - RNA, 32 nt, Human
ucucuggcgggcuguccuccuuggugggagcu

SEQ ID NO: 240658 - RNA, 32 nt, Human
ucucuggcgugcugugggagaggaccuuugcu

SEQ ID NO: 240659 - RNA, 32 nt, Human
ucucuggcucaagcaauccucucacuucagcc

SEQ ID NO: 240660 - RNA, 32 nt, Human
ucucuggcucaccgcaaccuccgccucccagg

SEQ ID NO: 240661 - RNA, 32 nt, Human
ucucuggcucacugcaaccucccugccugauu

SEQ ID NO: 240662 - RNA, 32 nt, Human
ucucuggcugagaggaugggggcagaugggga

SEQ ID NO: 240663 - RNA, 22 nt, Human
ucucuggcuggugggcugcaag

SEQ ID NO: 240664 - RNA, 32 nt, Human
ucucuggcuguaaugaucacuuuggaagauuu

SEQ ID NO: 240665 - RNA, 32 nt, Human
ucucuggcuuuacccaaguucugaaugcauug

SEQ ID NO: 240666 - RNA, 32 nt, Human
ucucugggaaaacacaagauuuacagacugca

SEQ ID NO: 240667 - RNA, 19 nt, Human
ucucugggaaaaggaaugc

SEQ ID NO: 240668 - RNA, 32 nt, Human
ucucugggacaugcucaccugccagaccagcc

SEQ ID NO: 240669 - RNA, 32 nt, Human
ucucugggacuguggaccuggccucgcacagg

SEQ ID NO: 240670 - RNA, 21 nt, Human
ucucugggagcugagcacaga

SEQ ID NO: 240671 - RNA, 32 nt, Human
ucucugggauuccggacuggcuucgcccaacu

SEQ ID NO: 240672 - RNA, 25 nt, Human
ucucugggcacccgcugugcaugga

SEQ ID NO: 240673 - RNA, 24 nt, Human
ucucugggcaucugcauggccagg

SEQ ID NO: 240674 - RNA, 32 nt, Human
ucucugggccucgucuuuccucccucuaaaau

SEQ ID NO: 240675 - RNA, 21 nt, Human
ucucugggccuucagcgcggg

SEQ ID NO: 240676 - RNA, 32 nt, Human
ucucugggcucgaaccaauacaagcaccuuuc

SEQ ID NO: 240677 - RNA, 32 nt, Human
ucucugggcuggaggugggggugggggcagcc

SEQ ID NO: 240678 - RNA, 32 nt, Human
ucucugggcuuccuuuuuaaaaacuuuuucua

SEQ ID NO: 240679 - RNA, 17 nt, Human
ucucuggggaaaggaag

SEQ ID NO: 240680 - RNA, 32 nt, Human
ucucuggggaaaggaagguggcacagaccaug

SEQ ID NO: 240681 - RNA, 32 nt, Human
ucucuggggaggcaguaaggggccguggagcu

SEQ ID NO: 240682 - RNA, 32 nt, Human
ucucuggggcugggcucuacucccugcagccc

SEQ ID NO: 240683 - RNA, 32 nt, Human
ucucugggggcugagggacccaccuggccccu

SEQ ID NO: 240684 - RNA, 32 nt, Human
ucucuggggucaggaaccucagaggagggggc

SEQ ID NO: 240685 - RNA, 17 nt, Human
ucucuggggucaggaag

SEQ ID NO: 240686 - RNA, 32 nt, Human
ucucugggguccucuuucaaggauguccacgg

SEQ ID NO: 240687 - RNA, 19 nt, Human
ucucuggggugcucuuccc

SEQ ID NO: 240688 - RNA, 32 nt, Human
ucucuggguaccccagccugggcugggggaga

SEQ ID NO: 240689 - RNA, 32 nt, Human
ucucugggucauaaauccugcaggcaguccaa

SEQ ID NO: 240690 - RNA, 32 nt, Human
ucucugggucccucuaacaucucccauggcuc

SEQ ID NO: 240691 - RNA, 19 nt, Human
ucucugggugccccaguua

SEQ ID NO: 240692 - RNA, 32 nt, Human
ucucugguacucaggcuggagugcgguggugu

SEQ ID NO: 240693 - RNA, 32 nt, Human
ucucuggucugugucugugugugccuguaagu

SEQ ID NO: 240694 - RNA, 22 nt, Human
ucucuggucuucuccagacugg

SEQ ID NO: 240695 - RNA, 32 nt, Human
ucucuggugaacaaacuuccucucuggccucu

SEQ ID NO: 240696 - RNA, 32 nt, Human
ucucuggugauuuuugcaccagaagagggaaa

SEQ ID NO: 240697 - RNA, 32 nt, Human
ucucuggugcugcuucuguauauuuccacagc

SEQ ID NO: 240698 - RNA, 24 nt, Human
ucucugguguucccaccacccuag

SEQ ID NO: 240699 - RNA, 23 nt, Human
ucucugguuauagcuggucccag

SEQ ID NO: 240700 - RNA, 32 nt, Human
ucucugguucaagcgauucuccugccucagcc

SEQ ID NO: 240701 - RNA, 32 nt, Human
ucucugguucauuuuucuguuuacagaaguaa

SEQ ID NO: 240702 - RNA, 32 nt, Human
ucucugguucccaguuucucuggucauuuugg

SEQ ID NO: 240703 - RNA, 32 nt, Human
ucucugguucucagcuguggcuuuuguucugg

SEQ ID NO: 240704 - RNA, 21 nt, Human
ucucugguuuccaucauucug

SEQ ID NO: 240705 - RNA, 20 nt, Human
ucucugguuuccuacucuua

SEQ ID NO: 240706 - RNA, 22 nt, Human
ucucugguuuucuccacaucua

SEQ ID NO: 240707 - RNA, 25 nt, Human
ucucugguuuucuguguaauuccag

SEQ ID NO: 240708 - RNA, 32 nt, Human
ucucuguaacuucaguucugguguuuuccuug

SEQ ID NO: 240709 - RNA, 32 nt, Human
ucucuguacccagcugacagccugucucuaug

SEQ ID NO: 240710 - RNA, 32 nt, Human
ucucuguacucaguugguucucaguuagcugg

SEQ ID NO: 240711 - RNA, 32 nt, Human
ucucuguacucuagucuccugccuccucaguu

SEQ ID NO: 240712 - RNA, 32 nt, Human
ucucuguacuuuccccaugcugccucaaaagu

SEQ ID NO: 240713 - RNA, 32 nt, Human
ucucuguagagaaacaaauugucauucuucuc

SEQ ID NO: 240714 - RNA, 32 nt, Human
ucucuguagccaggcuggagggcaauuguaca

SEQ ID NO: 240715 - RNA, 32 nt, Human
ucucuguauucaugcucuuggcaauuucuuug

SEQ ID NO: 240716 - RNA, 32 nt, Human
ucucuguauuuugauacuugaaugacuuuccc

SEQ ID NO: 240717 - RNA, 32 nt, Human
ucucugucaaccuaagaauguuggccuuacug

SEQ ID NO: 240718 - RNA, 32 nt, Human
ucucugucaacuucaguuucucucucaguuua

SEQ ID NO: 240719 - RNA, 32 nt, Human
ucucugucacaagcaucauacauugcugauug

SEQ ID NO: 240720 - RNA, 32 nt, Human
ucucugucaccaggcuguauuacaguggugca

SEQ ID NO: 240721 - RNA, 32 nt, Human
ucucugucacccaagcuggaauacaauggcac

SEQ ID NO: 240722 - RNA, 32 nt, Human
ucucugucacccaagcuggaaugcaauggcac

SEQ ID NO: 240723 - RNA, 32 nt, Human
ucucugucacccaaggguguuucuugaggagg

SEQ ID NO: 240724 - RNA, 32 nt, Human
ucucugucacccaaguuggagugcaguggccc

SEQ ID NO: 240725 - RNA, 32 nt, Human
ucucugucacccaggauggagugcaguguugu

SEQ ID NO: 240726 - RNA, 32 nt, Human
ucucugucacccaggcuagagugcaguggagc

SEQ ID NO: 240727 - RNA, 32 nt, Human
ucucugucacccaggcuggaaugcaguggcgu

SEQ ID NO: 240728 - RNA, 32 nt, Human
ucucugucacccaggcuggagugcaauggcac

SEQ ID NO: 240729 - RNA, 32 nt, Human
ucucugucacccaggcuggagugcaauggcgc

SEQ ID NO: 240730 - RNA, 32 nt, Human
ucucugucacccaggcuggagugcagugcaca

SEQ ID NO: 240731 - RNA, 32 nt, Human
ucucugucacccaggcuggagugcaguggcgu

SEQ ID NO: 240732 - RNA, 32 nt, Human
ucucugucacccaggcuggagugcaguggugc

SEQ ID NO: 240733 - RNA, 32 nt, Human
ucucugucacccaggcuggagugcaguggugu

SEQ ID NO: 240734 - RNA, 32 nt, Human
ucucugucacccaggcuggcgugcaauggcgc

SEQ ID NO: 240735 - RNA, 32 nt, Human
ucucugucacccagguuggagugcaguggugu

SEQ ID NO: 240736 - RNA, 32 nt, Human
ucucugucaccuaagcaggacauguggugagu

SEQ ID NO: 240737 - RNA, 32 nt, Human
ucucugucaccuagccaggagggguagcaaaa

SEQ ID NO: 240738 - RNA, 32 nt, Human
ucucugucaccuaggcuggagggcaggguuga

SEQ ID NO: 240739 - RNA, 32 nt, Human
ucucugucaccuaggcuggagugcaguggcac

SEQ ID NO: 240740 - RNA, 32 nt, Human
ucucugucagccaggcuggagugugguggcac

SEQ ID NO: 240741 - RNA, 32 nt, Human
ucucugucauccaggcuagagugcaguggcac

SEQ ID NO: 240742 - RNA, 25 nt, Human
ucucugucauccucgucucucuucu

SEQ ID NO: 240743 - RNA, 32 nt, Human
ucucugucauccucgucucucuucugaaauga

SEQ ID NO: 240744 - RNA, 32 nt, Human
ucucugucaucugggcugcagugcaguggugu

SEQ ID NO: 240745 - RNA, 32 nt, Human
ucucuguccacugcaaccuccacauccugggu

SEQ ID NO: 240746 - RNA, 20 nt, Human
ucucuguccaguucauuuuc

SEQ ID NO: 240747 - RNA, 32 nt, Human
ucucuguccccaaggcuggagugcaguggugc

SEQ ID NO: 240748 - RNA, 32 nt, Human
ucucugucccccaggcugaagugcagcggcau

SEQ ID NO: 240749 - RNA, 32 nt, Human
ucucuguccccuaggcugcagugcaguggcgc

SEQ ID NO: 240750 - RNA, 32 nt, Human
ucucuguccccuuugcccauccuuccuuuucu

SEQ ID NO: 240751 - RNA, 31 nt, Human
ucucugucccucucugggccucugcacgaug

SEQ ID NO: 240752 - RNA, 32 nt, Human
ucucuguccuacuucugacuuuacuuguggug

SEQ ID NO: 240753 - RNA, 32 nt, Human
ucucuguccugacuucauaggugccaccuugu

SEQ ID NO: 240754 - RNA, 32 nt, Human
ucucuguccugcuucauaggugccaccuugug

SEQ ID NO: 240755 - RNA, 32 nt, Human
ucucugucgccaggcuggaaugcagugcagug

SEQ ID NO: 240756 - RNA, 32 nt, Human
ucucugucgcccaggcuggagcccaguggcga

SEQ ID NO: 240757 - RNA, 32 nt, Human
ucucugucgcccaggcuggaguacaguggugc

SEQ ID NO: 240758 - RNA, 32 nt, Human
ucucugucgcccaggcuggagugcaguggcuc

SEQ ID NO: 240759 - RNA, 32 nt, Human
ucucugucgcccaggcuggcgugaaguggcgc

SEQ ID NO: 240760 - RNA, 32 nt, Human
ucucugucgcccaggcuggggugcaguggcgc

SEQ ID NO: 240761 - RNA, 32 nt, Human
ucucugucgcccagguuggagugccauggcac

SEQ ID NO: 240762 - RNA, 32 nt, Human
ucucugucgccuaggcuggagugcaguggugc

SEQ ID NO: 240763 - RNA, 32 nt, Human
ucucugucguggacacgcgugauugacccuuu

SEQ ID NO: 240764 - RNA, 32 nt, Human
ucucugucucaaggagagcaggguaggugaaa

SEQ ID NO: 240765 - RNA, 32 nt, Human
ucucugucuccgaggcuggagugcaauguugc

SEQ ID NO: 240766 - RNA, 32 nt, Human
ucucugucucuuggaccugccaccaucacuuu

SEQ ID NO: 240767 - RNA, 32 nt, Human
ucucugucugccagggucuccgacugucccag

SEQ ID NO: 240768 - RNA, 32 nt, Human
ucucugucugcuccugccuccuccaggcaaug

SEQ ID NO: 240769 - RNA, 32 nt, Human
ucucugucuuuuccugucuucugauuuaucug

SEQ ID NO: 240770 - RNA, 21 nt, Human
ucucugugaacauguaacuca

SEQ ID NO: 240771 - RNA, 32 nt, Human
ucucugugaagagucugggagggacgguuuag

SEQ ID NO: 240772 - RNA, 21 nt, Human
ucucugugacugaggaaguca

SEQ ID NO: 240773 - RNA, 22 nt, Human
ucucugugcauuuugaaaauua

SEQ ID NO: 240774 - RNA, 32 nt, Human
ucucugugcccugucuuuguguguuucuuucu

SEQ ID NO: 240775 - RNA, 32 nt, Human
ucucugugccguuccccaugcauucccugcac

SEQ ID NO: 240776 - RNA, 32 nt, Human
ucucugugcuuacgcaguugugaagguuguga

SEQ ID NO: 240777 - RNA, 32 nt, Human
ucucuguggaaaggaaaucagccuugcagagc

SEQ ID NO: 240778 - RNA, 32 nt, Human
ucucuguggcaaagcagcaacuauucacaaaa

SEQ ID NO: 240779 - RNA, 32 nt, Human
ucucuguggccaaccucugcuccuuccccauc

SEQ ID NO: 240780 - RNA, 32 nt, Human
ucucuguggcccaggcugaagugcaguggugu

SEQ ID NO: 240781 - RNA, 32 nt, Human
ucucugugggcaaggccagcuugcuucaggcu

SEQ ID NO: 240782 - RNA, 32 nt, Human
ucucugugggggagacagggacuauaacaggg

SEQ ID NO: 240783 - RNA, 32 nt, Human
ucucugugguaaacgaggaaacugacaggauu

SEQ ID NO: 240784 - RNA, 32 nt, Human
ucucuguguaguuccagcaaaucaagcugagc

SEQ ID NO: 240785 - RNA, 32 nt, Human
ucucugugugcuuucuggacugugauaaguga

SEQ ID NO: 240786 - RNA, 32 nt, Human
ucucugugugggccaggugggcuaagguuagc

SEQ ID NO: 240787 - RNA, 32 nt, Human
ucucugugugugugcacauaugcagauguaug

SEQ ID NO: 240788 - RNA, 32 nt, Human
ucucuguguugauuacuaaucaucuuagauau

SEQ ID NO: 240789 - RNA, 32 nt, Human
ucucuguguuuccagaaggccccacacaccca

SEQ ID NO: 240790 - RNA, 32 nt, Human
ucucuguuaaccuugugccugucuccuguaug

SEQ ID NO: 240791 - RNA, 32 nt, Human
ucucuguuacccaggcuagagugcaauggcgu

SEQ ID NO: 240792 - RNA, 32 nt, Human
ucucuguuaguccccaaauccuuacuuauuuu

SEQ ID NO: 240793 - RNA, 25 nt, Human
ucucuguuauacgccggggcauaga

SEQ ID NO: 240794 - RNA, 32 nt, Human
ucucuguucacugcaaccgccucccgugcuca

SEQ ID NO: 240795 - RNA, 32 nt, Human
ucucuguucauggccuguuugcugcuaugagg

SEQ ID NO: 240796 - RNA, 32 nt, Human
ucucuguucauuuuguuuuuauuucauugaca

SEQ ID NO: 240797 - RNA, 32 nt, Human
ucucuguuccagcugcugucagggauuaacaa

SEQ ID NO: 240798 - RNA, 32 nt, Human
ucucuguuccgcaggaugggguuuguuaaagu

SEQ ID NO: 240799 - RNA, 32 nt, Human
ucucuguuccucacacucagcuucagcauaag

SEQ ID NO: 240800 - RNA, 32 nt, Human
ucucuguuccugagagaccagaauuuauucuu

SEQ ID NO: 240801 - RNA, 32 nt, Human
ucucuguuccugcagacaguuuugccagcuuu

SEQ ID NO: 240802 - RNA, 32 nt, Human
ucucuguucugagaucucuuuauuccugaaua

SEQ ID NO: 240803 - RNA, 32 nt, Human
ucucuguugcccaagcuugagggcaguggugc

SEQ ID NO: 240804 - RNA, 32 nt, Human
ucucuguugcccaggcuagagugcacuggugg

SEQ ID NO: 240805 - RNA, 32 nt, Human
ucucuguugcccaggcugcagugcaguggugc

SEQ ID NO: 240806 - RNA, 32 nt, Human
ucucuguugcccaggcuggaguacaauggcgu

SEQ ID NO: 240807 - RNA, 32 nt, Human
ucucuguugcccaggcuggagugcaauggcac

SEQ ID NO: 240808 - RNA, 32 nt, Human
ucucuguugcccaggcuggagugcaauggcau

SEQ ID NO: 240809 - RNA, 32 nt, Human
ucucuguugcccaggcuggagugcaguggcac

SEQ ID NO: 240810 - RNA, 32 nt, Human
ucucuguugcccaggcuggagugcaguggcgc

SEQ ID NO: 240811 - RNA, 32 nt, Human
ucucuguugcccaggcuggaguguaguggugc

SEQ ID NO: 240812 - RNA, 32 nt, Human
ucucuguugccugggcuggagugcaguggccc

SEQ ID NO: 240813 - RNA, 24 nt, Human
ucucuguugugggcagcagggcca

SEQ ID NO: 240814 - RNA, 32 nt, Human
ucucuguuucaaaucaacauccuggauacccu

SEQ ID NO: 240815 - RNA, 32 nt, Human
ucucuguuuccuuuuuguguuuuguugcuuuu

SEQ ID NO: 240816 - RNA, 23 nt, Human
ucucuguuucuccucucuucucu

SEQ ID NO: 240817 - RNA, 32 nt, Human
ucucuguuucuggggccucccccaccauagcu

SEQ ID NO: 240818 - RNA, 32 nt, Human
ucucuuaaaggaacagggugacccugcuggcu

SEQ ID NO: 240819 - RNA, 32 nt, Human
ucucuuaagggugggagcuggggcagggacua

SEQ ID NO: 240820 - RNA, 32 nt, Human
ucucuuacaagggaagucuauauggcaaucug

SEQ ID NO: 240821 - RNA, 32 nt, Human
ucucuuacauugaauguagagaauguagccau

SEQ ID NO: 240822 - RNA, 32 nt, Human
ucucuuacccaagcuggagugcagugacauga

SEQ ID NO: 240823 - RNA, 32 nt, Human
ucucuuacccuugcccccuccacccggucuug

SEQ ID NO: 240824 - RNA, 32 nt, Human
ucucuuaccuacagcuggacaguaccugucug

SEQ ID NO: 240825 - RNA, 32 nt, Human
ucucuuagagccucuagaaagaacuagcccua

SEQ ID NO: 240826 - RNA, 32 nt, Human
ucucuuagccaagaacuugaacaguacaaaau

SEQ ID NO: 240827 - RNA, 32 nt, Human
ucucuuagcccaagccugucccucgcacagcc

SEQ ID NO: 240828 - RNA, 32 nt, Human
ucucuuaggcuucucucagguccccuuucccu

SEQ ID NO: 240829 - RNA, 32 nt, Human
ucucuuaggucaccaagauauuaguugcugcu

SEQ ID NO: 240830 - RNA, 32 nt, Human
ucucuuagucuucuuauuuaauuaacuucauu

SEQ ID NO: 240831 - RNA, 32 nt, Human
ucucuuaguucuucucuaacauaguacuuucu

SEQ ID NO: 240832 - RNA, 32 nt, Human
ucucuuauaaauucuguuagcugcucacuuaa

SEQ ID NO: 240833 - RNA, 32 nt, Human
ucucuuauacuucuccuaccuuccucaauauu

SEQ ID NO: 240834 - RNA, 32 nt, Human
ucucuuaucccaguaacuccucuucccauuuu

SEQ ID NO: 240835 - RNA, 32 nt, Human
ucucuuaucuaugaauuaaagacuucauguac

SEQ ID NO: 240836 - RNA, 32 nt, Human
ucucuucacaaaaggcucugaagacaucauga

SEQ ID NO: 240837 - RNA, 32 nt, Human
ucucuucaccucuccuccucuugguccacuug

SEQ ID NO: 240838 - RNA, 32 nt, Human
ucucuucacugcucuguguccucugcuccuag

SEQ ID NO: 240839 - RNA, 32 nt, Human
ucucuucagcuccugugguaugugggaaucga

SEQ ID NO: 240840 - RNA, 23 nt, Human
ucucuucaggaagucagaccuuc

SEQ ID NO: 240841 - RNA, 32 nt, Human
ucucuucagguuuaacagagaagaacuccugg

SEQ ID NO: 240842 - RNA, 32 nt, Human
ucucuucaugcucuccccaucccaguuuuuag

SEQ ID NO: 240843 - RNA, 32 nt, Human
ucucuuccacagcauagccacucagaagaaaa

SEQ ID NO: 240844 - RNA, 32 nt, Human
ucucuuccacuccauuccccugcccaccucca

SEQ ID NO: 240845 - RNA, 32 nt, Human
ucucuuccagaagccaagaggagaacaaaggu

SEQ ID NO: 240846 - RNA, 32 nt, Human
ucucuuccagagcugugacacccuucucaugc

SEQ ID NO: 240847 - RNA, 17 nt, Human
ucucuuccauuugauca

SEQ ID NO: 240848 - RNA, 20 nt, Human
ucucuucccaaccauaacuc

SEQ ID NO: 240849 - RNA, 24 nt, Human
ucucuucccacagccuguaacuca

SEQ ID NO: 240850 - RNA, 32 nt, Human
ucucuucccacugugggccgguuccagccugg

SEQ ID NO: 240851 - RNA, 32 nt, Human
ucucuucccacuugcagagccugcugcccacg

SEQ ID NO: 240852 - RNA, 32 nt, Human
ucucuuccccacccuucucucuucccugcaaa

SEQ ID NO: 240853 - RNA, 32 nt, Human
ucucuucccccuuuuuggcauccuggcuugcc

SEQ ID NO: 240854 - RNA, 32 nt, Human
ucucuuccccuccucuaucucuuccucuccuc

SEQ ID NO: 240855 - RNA, 32 nt, Human
ucucuuccccucucagagcuacuugggccaua

SEQ ID NO: 240856 - RNA, 32 nt, Human
ucucuuccccucuccccuucucuuccccgagg

SEQ ID NO: 240857 - RNA, 32 nt, Human
ucucuucccggcuuggcaaucucagcugugcc

SEQ ID NO: 240858 - RNA, 32 nt, Human
ucucuucccuagggcauauccccaaauucuua

SEQ ID NO: 240859 - RNA, 21 nt, Human
ucucuucccucccugcaacuc

SEQ ID NO: 240860 - RNA, 32 nt, Human
ucucuucccugaccuggagagaaggaagcauu

SEQ ID NO: 240861 - RNA, 32 nt, Human
ucucuucccugacuaucucucucaaugaucau

SEQ ID NO: 240862 - RNA, 32 nt, Human
ucucuucccuucaucagggaagggaagccaag

SEQ ID NO: 240863 - RNA, 32 nt, Human
ucucuucccuuccccucucucauugcugcacc

SEQ ID NO: 240864 - RNA, 32 nt, Human
ucucuucccuucuaacuugacagggucuugcu

SEQ ID NO: 240865 - RNA, 32 nt, Human
ucucuucccuuuccucucucccccucggugaa

SEQ ID NO: 240866 - RNA, 32 nt, Human
ucucuuccuccagggacucuggggcccuuugg

SEQ ID NO: 240867 - RNA, 32 nt, Human
ucucuuccuccuccuccgucuucuucccuggc

SEQ ID NO: 240868 - RNA, 22 nt, Human
ucucuuccuccucuggacgcug

SEQ ID NO: 240869 - RNA, 32 nt, Human
ucucuuccucuccucucucucuuccucuccuc

SEQ ID NO: 240870 - RNA, 32 nt, Human
ucucuuccucuccucucucucuuccucuucuc

SEQ ID NO: 240871 - RNA, 32 nt, Human
ucucuuccucuuccuauaaaggcacuaacccu

SEQ ID NO: 240872 - RNA, 32 nt, Human
ucucuuccugacacaaauaccggauucucaga

SEQ ID NO: 240873 - RNA, 32 nt, Human
ucucuuccugcccucacuucuuucaccuugaa

SEQ ID NO: 240874 - RNA, 32 nt, Human
ucucuuccugcucuccaucauggcgcaggauc

SEQ ID NO: 240875 - RNA, 32 nt, Human
ucucuuccuggcuggggcuggggugaacugga

SEQ ID NO: 240876 - RNA, 32 nt, Human
ucucuuccugguaauccucuggcccagccuua

SEQ ID NO: 240877 - RNA, 32 nt, Human
ucucuuccuguccucuaucucuuccccuccuc

SEQ ID NO: 240878 - RNA, 32 nt, Human
ucucuuccugucuuuguugucucccucuuucu

SEQ ID NO: 240879 - RNA, 32 nt, Human
ucucuuccuguuacauuucaugcaucagaagc

SEQ ID NO: 240880 - RNA, 32 nt, Human
ucucuuccuugcuuuguuguguguucuaauuc

SEQ ID NO: 240881 - RNA, 18 nt, Human
ucucuuccuuuccuuucc

SEQ ID NO: 240882 - RNA, 32 nt, Human
ucucuuccuuucucucugccugucccucuccu

SEQ ID NO: 240883 - RNA, 32 nt, Human
ucucuuccuuugucauuucaagcaauuuucau

SEQ ID NO: 240884 - RNA, 18 nt, Human
ucucuuccuuuuccuccu

SEQ ID NO: 240885 - RNA, 32 nt, Human
ucucuucgucuucuccucuuccuuguccccuc

SEQ ID NO: 240886 - RNA, 32 nt, Human
ucucuucuccaaugcccugguuguuauuuuuc

SEQ ID NO: 240887 - RNA, 32 nt, Human
ucucuucuccaccucccacaaaggagagcuag

SEQ ID NO: 240888 - RNA, 32 nt, Human
ucucuucuccaccuucucuccacagaauguuu

SEQ ID NO: 240889 - RNA, 32 nt, Human
ucucuucuccuacucugggucuucuauccugg

SEQ ID NO: 240890 - RNA, 32 nt, Human
ucucuucuccuccuccucuuucuucacuccuc

SEQ ID NO: 240891 - RNA, 32 nt, Human
ucucuucuccuuuguaccugucaacaccagag

SEQ ID NO: 240892 - RNA, 32 nt, Human
ucucuucucuacugcccugggcuucagccuuu

SEQ ID NO: 240893 - RNA, 32 nt, Human
ucucuucucucuucucaauuuugagguccuca

SEQ ID NO: 240894 - RNA, 32 nt, Human
ucucuucucugaggagcucgacggcauaaauc

SEQ ID NO: 240895 - RNA, 32 nt, Human
ucucuucucugcacuccagggcuuugauaaua

SEQ ID NO: 240896 - RNA, 32 nt, Human
ucucuucucugcacuccugccgaccuucccac

SEQ ID NO: 240897 - RNA, 32 nt, Human
ucucuucucugccucucaccaggacagccgcc

SEQ ID NO: 240898 - RNA, 32 nt, Human
ucucuucucugccucuggcccuccuggcucuu

SEQ ID NO: 240899 - RNA, 32 nt, Human
ucucuucucuuaucuucugucuguucucuuuu

SEQ ID NO: 240900 - RNA, 32 nt, Human
ucucuucucuuccccuucuccccaucgccacu

SEQ ID NO: 240901 - RNA, 32 nt, Human
ucucuucucuucuauguugcaaugaauguaaa

SEQ ID NO: 240902 - RNA, 32 nt, Human
ucucuucucuuucuccccucuucgccacccua

SEQ ID NO: 240903 - RNA, 32 nt, Human
ucucuucugauucuucucuucucccaagcccg

SEQ ID NO: 240904 - RNA, 32 nt, Human
ucucuucugcuccacccuuggccugucucauc

SEQ ID NO: 240905 - RNA, 32 nt, Human
ucucuucugcugucucuccuaccugucuucug

SEQ ID NO: 240906 - RNA, 32 nt, Human
ucucuucuguccccaccuccucuugggaauuc

SEQ ID NO: 240907 - RNA, 32 nt, Human
ucucuucugugcaccuaaguugcccagcccug

SEQ ID NO: 240908 - RNA, 32 nt, Human
ucucuucuguggcccccaccugcuccgggacg

SEQ ID NO: 240909 - RNA, 32 nt, Human
ucucuucuuccucuugcgucuucccggccccu

SEQ ID NO: 240910 - RNA, 32 nt, Human
ucucuucuucuuuacaccccugaugacucugg

SEQ ID NO: 240911 - RNA, 18 nt, Human
ucucuucuucuuuggaga

SEQ ID NO: 240912 - RNA, 32 nt, Human
ucucuucuugcguguggggcagguguggagaa

SEQ ID NO: 240913 - RNA, 32 nt, Human
ucucuucuuuaugauguucacuuuaaaaacaa

SEQ ID NO: 240914 - RNA, 32 nt, Human
ucucuugaacccaggaggcagagguugcagug

SEQ ID NO: 240915 - RNA, 32 nt, Human
ucucuugaacccaggaggccgagguugcagug

SEQ ID NO: 240916 - RNA, 32 nt, Human
ucucuugaacccaggaggcggagguugcagug

SEQ ID NO: 240917 - RNA, 32 nt, Human
ucucuugaacccaggaggcggagguugcggug

SEQ ID NO: 240918 - RNA, 32 nt, Human
ucucuugaacccaggagguggaggaugcagug

SEQ ID NO: 240919 - RNA, 32 nt, Human
ucucuugaacccaggagguggagguugcagug

SEQ ID NO: 240920 - RNA, 32 nt, Human
ucucuugaacccaggggguggagguugcacug

SEQ ID NO: 240921 - RNA, 32 nt, Human
ucucuugaacugaggagguggagguugcagug

SEQ ID NO: 240922 - RNA, 32 nt, Human
ucucuugaauccaggaggcagaggcuguggug

SEQ ID NO: 240923 - RNA, 32 nt, Human
ucucuugagcccagagacaaggcagcuugguc

SEQ ID NO: 240924 - RNA, 32 nt, Human
ucucuugagcccaggagaugcaggcuugcagu

SEQ ID NO: 240925 - RNA, 32 nt, Human
ucucuugagcccaggaguuggaguccagucca

SEQ ID NO: 240926 - RNA, 32 nt, Human
ucucuugagccccucacccuguuucuuucugu

SEQ ID NO: 240927 - RNA, 32 nt, Human
ucucuugagcuucgacucuucugugcucuauu

SEQ ID NO: 240928 - RNA, 32 nt, Human
ucucuugaggcggugagcagaagcuuguccuc

SEQ ID NO: 240929 - RNA, 32 nt, Human
ucucuugaggcugccuuggcauucacccacgc

SEQ ID NO: 240930 - RNA, 32 nt, Human
ucucuugaguagcugagauuacagguacgcac

SEQ ID NO: 240931 - RNA, 32 nt, Human
ucucuugauugcauaugcaugccaucauacag

SEQ ID NO: 240932 - RNA, 32 nt, Human
ucucuugcagugguggggucagaugcugugga

SEQ ID NO: 240933 - RNA, 32 nt, Human
ucucuugccaucaccuagcugccugcaccugc

SEQ ID NO: 240934 - RNA, 32 nt, Human
ucucuugcccaggcuggagugcaguggcacgg

SEQ ID NO: 240935 - RNA, 32 nt, Human
ucucuugcccaggcuggagugcagugguauga

SEQ ID NO: 240936 - RNA, 32 nt, Human
ucucuugcccagguaagcuggggaagagccug

SEQ ID NO: 240937 - RNA, 32 nt, Human
ucucuugcccuucuucuagcagucugugccuc

SEQ ID NO: 240938 - RNA, 32 nt, Human
ucucuugccuugaaagccuccucuuuggaccu

SEQ ID NO: 240939 - RNA, 32 nt, Human
ucucuugcgugugaaucucuuacccugaaaaa

SEQ ID NO: 240940 - RNA, 32 nt, Human
ucucuugcucuuccuguacccacauuuggggg

SEQ ID NO: 240941 - RNA, 32 nt, Human
ucucuugcugucagacccauucuauauucuaa

SEQ ID NO: 240942 - RNA, 32 nt, Human
ucucuugcuuccucuucucuucucccuuaucg

SEQ ID NO: 240943 - RNA, 32 nt, Human
ucucuugcuuucccaacucggcuacgcuggcc

SEQ ID NO: 240944 - RNA, 32 nt, Human
ucucuuggaaaguccagucucuccucggcuug

SEQ ID NO: 240945 - RNA, 32 nt, Human
ucucuuggaccugccaccaucacuuucugggu

SEQ ID NO: 240946 - RNA, 32 nt, Human
ucucuuggagcagcagccgcccaggccuuuag

SEQ ID NO: 240947 - RNA, 32 nt, Human
ucucuuggcagagugagggccuggagauaacc

SEQ ID NO: 240948 - RNA, 32 nt, Human
ucucuuggcauaccacugccucccagggaaca

SEQ ID NO: 240949 - RNA, 32 nt, Human
ucucuuggccuggaggaauugcuccuaacuag

SEQ ID NO: 240950 - RNA, 32 nt, Human
ucucuuggcugggccaagagggccuuccugga

SEQ ID NO: 240951 - RNA, 32 nt, Human
ucucuugggacccuccugguuuuaacugggag

SEQ ID NO: 240952 - RNA, 32 nt, Human
ucucuuggggcugagggagcaccaugcagcuu

SEQ ID NO: 240953 - RNA, 32 nt, Human
ucucuugguaugucuuguuuggaaaaguggau

SEQ ID NO: 240954 - RNA, 32 nt, Human
ucucuuguaaccaucacugaagucaagaaaua

SEQ ID NO: 240955 - RNA, 32 nt, Human
ucucuugucaaccgggcuggagugcaguggug

SEQ ID NO: 240956 - RNA, 32 nt, Human
ucucuuguccaaggcuggaguguaguagugcu

SEQ ID NO: 240957 - RNA, 32 nt, Human
ucucuugucccucggcccucccugguuuuguc

SEQ ID NO: 240958 - RNA, 32 nt, Human
ucucuugucgcccaggcuggagugcaauggcg

SEQ ID NO: 240959 - RNA, 32 nt, Human
ucucuugucucccaggcuggagugcaaucgcg

SEQ ID NO: 240960 - RNA, 32 nt, Human
ucucuugucuucagacagcccugacagcacgc

SEQ ID NO: 240961 - RNA, 32 nt, Human
ucucuugugcuagcuggagcagcuccuucccc

SEQ ID NO: 240962 - RNA, 32 nt, Human
ucucuuguuacccaggcuggagugcaauggca

SEQ ID NO: 240963 - RNA, 32 nt, Human
ucucuuguugcccaggcugaagugcaauguug

SEQ ID NO: 240964 - RNA, 32 nt, Human
ucucuuguugcccaggcugaagugcaguguug

SEQ ID NO: 240965 - RNA, 32 nt, Human
ucucuuguugcccaggcuggagugcauuggcg

SEQ ID NO: 240966 - RNA, 31 nt, Human
ucucuuuaccagucccaccuaccucacuaug

SEQ ID NO: 240967 - RNA, 32 nt, Human
ucucuuuagcucaaccacucuguccauccagc

SEQ ID NO: 240968 - RNA, 32 nt, Human
ucucuuuauuuucccugguagagacaucuuca

SEQ ID NO: 240969 - RNA, 32 nt, Human
ucucuuucaagugccauuacagcugaacauua

SEQ ID NO: 240970 - RNA, 32 nt, Human
ucucuuucaagugccuuaauccgagccagcag

SEQ ID NO: 240971 - RNA, 32 nt, Human
ucucuuucacugggcugcuuuucaaucuuauu

SEQ ID NO: 240972 - RNA, 32 nt, Human
ucucuuuccccuccaaccaguucaaucucauc

SEQ ID NO: 240973 - RNA, 32 nt, Human
ucucuuucccucucccugucccucucuuucuu

SEQ ID NO: 240974 - RNA, 32 nt, Human
ucucuuuccucuuccuccuccacuucccacuu

SEQ ID NO: 240975 - RNA, 32 nt, Human
ucucuuuccucuuuguccaagcauccuauccc

SEQ ID NO: 240976 - RNA, 32 nt, Human
ucucuuuccuuuucucugucugcuacugacuu

SEQ ID NO: 240977 - RNA, 32 nt, Human
ucucuuucgccuccucuucucuuaguucucuc

SEQ ID NO: 240978 - RNA, 32 nt, Human
ucucuuucuccuccacauacugcagccucccu

SEQ ID NO: 240979 - RNA, 32 nt, Human
ucucuuucuccuccuggccuggccugaauauu

SEQ ID NO: 240980 - RNA, 32 nt, Human
ucucuuucucucuuucuuucucuguccccaag

SEQ ID NO: 240981 - RNA, 32 nt, Human
ucucuuucucuuccucccuucugccaucacug

SEQ ID NO: 240982 - RNA, 32 nt, Human
ucucuuucugccuccccuccccugggggccgg

SEQ ID NO: 240983 - RNA, 22 nt, Human
ucucuuucugcuucaguugcug

SEQ ID NO: 240984 - RNA, 32 nt, Human
ucucuuucuggcccauccucugcuucacacca

SEQ ID NO: 240985 - RNA, 32 nt, Human
ucucuuucuguccuuuuucuugcugauuuaug

SEQ ID NO: 240986 - RNA, 32 nt, Human
ucucuuucuuauccuaacaagugucuuauuug

SEQ ID NO: 240987 - RNA, 32 nt, Human
ucucuuucuucucugcugccccauggcuaagc

SEQ ID NO: 240988 - RNA, 32 nt, Human
ucucuuucuucucuuggcacugggggcgucag

SEQ ID NO: 240989 - RNA, 32 nt, Human
ucucuuucuuuccacccaguugcccuugcggc

SEQ ID NO: 240990 - RNA, 32 nt, Human
ucucuuucuuucucuuucuguuuccuggccuc

SEQ ID NO: 240991 - RNA, 32 nt, Human
ucucuuucuuucucuuuucccuuccuuccuuc

SEQ ID NO: 240992 - RNA, 32 nt, Human
ucucuuugaacccugaggguggccaggaucug

SEQ ID NO: 240993 - RNA, 32 nt, Human
ucucuuugaacucuggaucuuugcuuuugcuc

SEQ ID NO: 240994 - RNA, 22 nt, Human
ucucuuugaagcaauugugaau

SEQ ID NO: 240995 - RNA, 23 nt, Human
ucucuuugacagcaguuuggaau

SEQ ID NO: 240996 - RNA, 32 nt, Human
ucucuuugauuauguugugacuaguuuuguua

SEQ ID NO: 240997 - RNA, 21 nt, Human
ucucuuugcaucagaucugaa

SEQ ID NO: 240998 - RNA, 32 nt, Human
ucucuuugcccuuccagaugucugacugggac

SEQ ID NO: 240999 - RNA, 31 nt, Human
ucucuuugccucucugggucucuaucuccuc

SEQ ID NO: 241000 - RNA, 32 nt, Human
ucucuuuggaauugggagcacgaugacucuga

SEQ ID NO: 241001 - RNA, 32 nt, Human
ucucuuuggacucuccccucuuauguaccucu

SEQ ID NO: 241002 - RNA, 32 nt, Human
ucucuuuggaggaguggcaaugccuggacacu

SEQ ID NO: 241003 - RNA, 32 nt, Human
ucucuuuggcugcugccucagcacagagagcc

SEQ ID NO: 241004 - RNA, 32 nt, Human
ucucuuugggucucaauuuugccuucccuaau

SEQ ID NO: 241005 - RNA, 32 nt, Human
ucucuuugggugaccggaaaacuccaccucaa

SEQ ID NO: 241006 - RNA, 32 nt, Human
ucucuuuggguugucuuucuccucuccuacau

SEQ ID NO: 241007 - RNA, 32 nt, Human
ucucuuuggucucaaagcaaauugcucugauc

SEQ ID NO: 241008 - RNA, 32 nt, Human
ucucuuuggucuugcagucggcuucucuaugg

SEQ ID NO: 241009 - RNA, 32 nt, Human
ucucuuuggucuuguugauuuaccucugggca

SEQ ID NO: 241010 - RNA, 32 nt, Human
ucucuuuguagaaguuuuguuuuugaaaugug

SEQ ID NO: 241011 - RNA, 32 nt, Human
ucucuuuguggggcucaaaaccuccaaggacc

SEQ ID NO: 241012 - RNA, 31 nt, Human
ucucuuuuauacuagaauauuaaaaagccag

SEQ ID NO: 241013 - RNA, 24 nt, Human
ucucuuuucagaggggaaaaagga

SEQ ID NO: 241014 - RNA, 32 nt, Human
ucucuuuuccucccucuccuuccccuugcugu

SEQ ID NO: 241015 - RNA, 32 nt, Human
ucucuuuucuaccggacuuuuccucuucugcc

SEQ ID NO: 241016 - RNA, 32 nt, Human
ucucuuuucucuaccccuguguccugcuucuc

SEQ ID NO: 241017 - RNA, 32 nt, Human
ucucuuuucuuccuucuuuuccuuccuuuuug

SEQ ID NO: 241018 - RNA, 32 nt, Human
ucucuuuucuuuccuucucccuuucuucuuug

SEQ ID NO: 241019 - RNA, 32 nt, Human
ucucuuuucuuuuagcuccucuguggugaauu

SEQ ID NO: 241020 - RNA, 32 nt, Human
ucucuuuugccucccacugacugcccuuuucc

SEQ ID NO: 241021 - RNA, 32 nt, Human
ucucuuuuggaaaacaaaaaucagaaggcugc

SEQ ID NO: 241022 - RNA, 32 nt, Human
ucucuuuugucugaccucucuccuccccuccu

SEQ ID NO: 241023 - RNA, 32 nt, Human
ucucuuuuuaccacugaauuuuuccaaaagga

SEQ ID NO: 241024 - RNA, 32 nt, Human
ucucuuuuuacugcaacuuaauauuucuauuu

SEQ ID NO: 241025 - RNA, 32 nt, Human
ucucuuuuuauccuuauuccucccccgaccua

SEQ ID NO: 241026 - RNA, 32 nt, Human
ucucuuuuuccuuacaccuuguggaucaugug

SEQ ID NO: 241027 - RNA, 32 nt, Human
ucucuuuuugagacagucucgcucuguuaccc

SEQ ID NO: 241028 - RNA, 20 nt, Human
ucucuuuuuugucuugaauc

SEQ ID NO: 241029 - RNA, 32 nt, Human
ucugaaaacauguagagaagaugaguugagga

SEQ ID NO: 241030 - RNA, 32 nt, Human
ucugaaaaccuaccagccagaggguagggcac

SEQ ID NO: 241031 - RNA, 32 nt, Human
ucugaaaacugaggaguguccucuguucuucc

SEQ ID NO: 241032 - RNA, 32 nt, Human
ucugaaaagaauacauacucuuuccaugcaua

SEQ ID NO: 241033 - RNA, 32 nt, Human
ucugaaaagaggagccagagaaggugguaccc

SEQ ID NO: 241034 - RNA, 21 nt, Human
ucugaaaagccagcucuugaa

SEQ ID NO: 241035 - RNA, 31 nt, Human
ucugaaaagugugaggaaaaagaacuguaac

SEQ ID NO: 241036 - RNA, 32 nt, Human
ucugaaaauaaguggucucaagagaagcauuc

SEQ ID NO: 241037 - RNA, 32 nt, Human
ucugaaaauccccaguagcaucugccaagaag

SEQ ID NO: 241038 - RNA, 32 nt, Human
ucugaaaauucacuuuuaccuugaaguucaau

SEQ ID NO: 241039 - RNA, 32 nt, Human
ucugaaaauuuugccauuuaucuacagaaauu

SEQ ID NO: 241040 - RNA, 21 nt, Human
ucugaaacaaacagaggcugg

SEQ ID NO: 241041 - RNA, 32 nt, Human
ucugaaacaagguaucuuccaucagcauaaca

SEQ ID NO: 241042 - RNA, 21 nt, Human
ucugaaacagacagaggcugg

SEQ ID NO: 241043 - RNA, 32 nt, Human
ucugaaaccgagcaggcucuacuccagaacag

SEQ ID NO: 241044 - RNA, 32 nt, Human
ucugaaaccucggccugaucugaucucauguu

SEQ ID NO: 241045 - RNA, 32 nt, Human
ucugaaaccucugggucaucucucacacauuc

SEQ ID NO: 241046 - RNA, 32 nt, Human
ucugaaacucacaaccuaaagcccaaucuuga

SEQ ID NO: 241047 - RNA, 31 nt, Human
ucugaaacucacacaacuaggaaguggcuga

SEQ ID NO: 241048 - RNA, 32 nt, Human
ucugaaagagggcugugccuuccguuucagaa

SEQ ID NO: 241049 - RNA, 32 nt, Human
ucugaaagauggacagagagacaggagauggu

SEQ ID NO: 241050 - RNA, 32 nt, Human
ucugaaagcacaggucacccagccucagaauc

SEQ ID NO: 241051 - RNA, 20 nt, Human
ucugaaagcugguugaagga

SEQ ID NO: 241052 - RNA, 32 nt, Human
ucugaaaggagaaaggacuauuucucaguuag

SEQ ID NO: 241053 - RNA, 32 nt, Human
ucugaaaggccaucaggacaacuguuagagaa

SEQ ID NO: 241054 - RNA, 32 nt, Human
ucugaaagggaaaugcuuuucugcagaggccc

SEQ ID NO: 241055 - RNA, 32 nt, Human
ucugaaaguaagaucagugaacugcuuuucag

SEQ ID NO: 241056 - RNA, 32 nt, Human
ucugaaagugacuggaugagauccucaaaaau

SEQ ID NO: 241057 - RNA, 32 nt, Human
ucugaaaguuccuuuguggaccccagaaaccc

SEQ ID NO: 241058 - RNA, 32 nt, Human
ucugaaaguugucuaguucuuccuucaucaca

SEQ ID NO: 241059 - RNA, 32 nt, Human
ucugaaauagucaccucacagcucuucaaaga

SEQ ID NO: 241060 - RNA, 21 nt, Human
ucugaaauccccaaucaauca

SEQ ID NO: 241061 - RNA, 32 nt, Human
ucugaaaucuagguggagguucccaaacuuca

SEQ ID NO: 241062 - RNA, 32 nt, Human
ucugaaaucugacaccugcucucccggcaagg

SEQ ID NO: 241063 - RNA, 32 nt, Human
ucugaaaucuggcaaaugcagccucaacagaa

SEQ ID NO: 241064 - RNA, 32 nt, Human
ucugaaaucuuucucccuagcccccucuggaa

SEQ ID NO: 241065 - RNA, 31 nt, Human
ucugaaaugaagauggaggaggcagugggaa

SEQ ID NO: 241066 - RNA, 32 nt, Human
ucugaaaugucagcaaguaaguucugaaacac

SEQ ID NO: 241067 - RNA, 32 nt, Human
ucugaacaaaggaugcugauggauucaagcca

SEQ ID NO: 241068 - RNA, 32 nt, Human
ucugaacacaaccagagguggcaggagaauuu

SEQ ID NO: 241069 - RNA, 32 nt, Human
ucugaacacaguuaucaggauuacaaaaugug

SEQ ID NO: 241070 - RNA, 32 nt, Human
ucugaacaccaccaccaccaauaauacuuauc

SEQ ID NO: 241071 - RNA, 32 nt, Human
ucugaacaccuacauuuccuuugcagacaaau

SEQ ID NO: 241072 - RNA, 32 nt, Human
ucugaacaccucagcugcuguaagcuucuccu

SEQ ID NO: 241073 - RNA, 32 nt, Human
ucugaacaggcagguaggauucagugugcuca

SEQ ID NO: 241074 - RNA, 32 nt, Human
ucugaaccacccuuuauucuacauaugauagg

SEQ ID NO: 241075 - RNA, 32 nt, Human
ucugaaccagcuguguccagacugaggcccca

SEQ ID NO: 241076 - RNA, 32 nt, Human
ucugaacccagcaccaucaguaccaaagucuu

SEQ ID NO: 241077 - RNA, 32 nt, Human
ucugaacccaggagacagguugcagugagccg

SEQ ID NO: 241078 - RNA, 32 nt, Human
ucugaaccugccucuugcugggccuuuguucc

SEQ ID NO: 241079 - RNA, 32 nt, Human
ucugaacugaacauuugcuuugucagaaaaua

SEQ ID NO: 241080 - RNA, 32 nt, Human
ucugaacugcacccaggaggugacugggaagg

SEQ ID NO: 241081 - RNA, 32 nt, Human
ucugaacuguuacaacuuguauuuccaaaccu

SEQ ID NO: 241082 - RNA, 32 nt, Human
ucugaacuguucugagaccuguucccagucac

SEQ ID NO: 241083 - RNA, 32 nt, Human
ucugaacuuaacagggcacauucugucucuaa

SEQ ID NO: 241084 - RNA, 19 nt, Human
ucugaagaacugccaaugc

SEQ ID NO: 241085 - RNA, 32 nt, Human
ucugaagaagagcaagaagaagagugacuccu

SEQ ID NO: 241086 - RNA, 32 nt, Human
ucugaagaagaggcaaaacuguugaaugcaag

SEQ ID NO: 241087 - RNA, 32 nt, Human
ucugaagaaguccaggugaauucagcuuugga

SEQ ID NO: 241088 - RNA, 32 nt, Human
ucugaagaaugagacauugagaaaacuaugua

SEQ ID NO: 241089 - RNA, 32 nt, Human
ucugaagacauuaaacaggcaguuuguaggaa

SEQ ID NO: 241090 - RNA, 32 nt, Human
ucugaagaccccaaucucagaaauucaaauuu

SEQ ID NO: 241091 - RNA, 32 nt, Human
ucugaagacucaggcagagcagcuccacaacc

SEQ ID NO: 241092 - RNA, 32 nt, Human
ucugaagacucaugacaucugccccagccgca

SEQ ID NO: 241093 - RNA, 23 nt, Human
ucugaagagagcugcucuguguu

SEQ ID NO: 241094 - RNA, 32 nt, Human
ucugaagagcuuccgcgccuucccccuggucu

SEQ ID NO: 241095 - RNA, 32 nt, Human
ucugaagaggggaaucccuccaaccccaaacu

SEQ ID NO: 241096 - RNA, 32 nt, Human
ucugaagaugacugagucacacugccugcucc

SEQ ID NO: 241097 - RNA, 32 nt, Human
ucugaagcaaacaucuggugccaagaucuaca

SEQ ID NO: 241098 - RNA, 32 nt, Human
ucugaagcacagaguccaucucagaugggaaa

SEQ ID NO: 241099 - RNA, 32 nt, Human
ucugaagcacagcgcgguuaggaaaagucaca

SEQ ID NO: 241100 - RNA, 32 nt, Human
ucugaagcagagccaaaaggccagaauggguc

SEQ ID NO: 241101 - RNA, 32 nt, Human
ucugaagcagagcccugggacggaccccaugc

SEQ ID NO: 241102 - RNA, 32 nt, Human
ucugaagcagaggcaagacaaacacaggcgcu

SEQ ID NO: 241103 - RNA, 32 nt, Human
ucugaagcagcaacaccaagggcaaugugagu

SEQ ID NO: 241104 - RNA, 32 nt, Human
ucugaagcagcugcacugauacauuugggagu

SEQ ID NO: 241105 - RNA, 32 nt, Human
ucugaagcagggaccagagggagccaggcagc

SEQ ID NO: 241106 - RNA, 32 nt, Human
ucugaagcagggccaggggaggcucacucaca

SEQ ID NO: 241107 - RNA, 32 nt, Human
ucugaagccacucugaaaucacucugaagcca

SEQ ID NO: 241108 - RNA, 32 nt, Human
ucugaagccagguguugagaccagccugcugu

SEQ ID NO: 241109 - RNA, 32 nt, Human
ucugaagcccugaaaagccucaugucugcauc

SEQ ID NO: 241110 - RNA, 32 nt, Human
ucugaagccucuuccugaucuggagccacagu

SEQ ID NO: 241111 - RNA, 32 nt, Human
ucugaagcuacguggccaccagaagacacagc

SEQ ID NO: 241112 - RNA, 32 nt, Human
ucugaagcugaacccagggccuggcugugguc

SEQ ID NO: 241113 - RNA, 32 nt, Human
ucugaagcugcucaccuggccgagggaggucc

SEQ ID NO: 241114 - RNA, 32 nt, Human
ucugaagcuuagaaugagaagccaguagcuau

SEQ ID NO: 241115 - RNA, 32 nt, Human
ucugaagcuucugaguucugcagccucaccuc

SEQ ID NO: 241116 - RNA, 32 nt, Human
ucugaagcuuugcccaggauccauugcugcag

SEQ ID NO: 241117 - RNA, 32 nt, Human
ucugaaggaacaccugaugaggcugcacccuu

SEQ ID NO: 241118 - RNA, 32 nt, Human
ucugaaggaauccaaaugugacuuugaaaauu

SEQ ID NO: 241119 - RNA, 24 nt, Human
ucugaaggaucaccugccccaccu

SEQ ID NO: 241120 - RNA, 32 nt, Human
ucugaaggcucgagagagaacucccccagggc

SEQ ID NO: 241121 - RNA, 32 nt, Human
ucugaaggcuuaauuuugcaaaggaggaugca

SEQ ID NO: 241122 - RNA, 32 nt, Human
ucugaaggggcccccaacacaccaccugccuu

SEQ ID NO: 241123 - RNA, 32 nt, Human
ucugaagggguugugagaagagagacgggaaa

SEQ ID NO: 241124 - RNA, 32 nt, Human
ucugaaggugaucuccacaagagggugugugu

SEQ ID NO: 241125 - RNA, 32 nt, Human
ucugaaguaaauacagaagaggcuccaaaaua

SEQ ID NO: 241126 - RNA, 32 nt, Human
ucugaagucugaggaacaaugccuuaagaaaa

SEQ ID NO: 241127 - RNA, 31 nt, Human
ucugaagucugugucuuuaugccaagaacug

SEQ ID NO: 241128 - RNA, 23 nt, Human
ucugaagugcccaguuccugcca

SEQ ID NO: 241129 - RNA, 32 nt, Human
ucugaagugccuugagaacauguggguccgag

SEQ ID NO: 241130 - RNA, 32 nt, Human
ucugaaguggacauauucagccuuggcgagaa

SEQ ID NO: 241131 - RNA, 32 nt, Human
ucugaaguuauauuuccuauaccauuuccgua

SEQ ID NO: 241132 - RNA, 31 nt, Human
ucugaaguuggccuccuuucacuggggauug

SEQ ID NO: 241133 - RNA, 32 nt, Human
ucugaaguugucucccugacccuucuuuagug

SEQ ID NO: 241134 - RNA, 22 nt, Human
ucugaaguuuguaggaagggaa

SEQ ID NO: 241135 - RNA, 32 nt, Human
ucugaaguuuucucuuuucucucccauuuaag

SEQ ID NO: 241136 - RNA, 32 nt, Human
ucugaaguuuugcuccuuauugcacaucuuau

SEQ ID NO: 241137 - RNA, 22 nt, Human
ucugaauaaaccugccugcuca

SEQ ID NO: 241138 - RNA, 22 nt, Human
ucugaauagaugaucuuacuca

SEQ ID NO: 241139 - RNA, 32 nt, Human
ucugaauauuuacacacauagcacacuauagc

SEQ ID NO: 241140 - RNA, 32 nt, Human
ucugaaucaagugcugcuaguaccaagcugcu

SEQ ID NO: 241141 - RNA, 32 nt, Human
ucugaaucaccagcauucaaacaaauauuucg

SEQ ID NO: 241142 - RNA, 32 nt, Human
ucugaauccuaccugguuucuucaggcuucug

SEQ ID NO: 241143 - RNA, 32 nt, Human
ucugaaucuagagaacaguauugggcaggagg

SEQ ID NO: 241144 - RNA, 32 nt, Human
ucugaaugacacggaacgcucccacugcaggc

SEQ ID NO: 241145 - RNA, 32 nt, Human
ucugaaugagcgagaaaaauguggauguacug

SEQ ID NO: 241146 - RNA, 32 nt, Human
ucugaaugcaucuagcuuauuucuuggccauc

SEQ ID NO: 241147 - RNA, 32 nt, Human
ucugaaugccuccucccugccugcgcuuugcc

SEQ ID NO: 241148 - RNA, 21 nt, Human
ucugaaugccuccuuucucca

SEQ ID NO: 241149 - RNA, 32 nt, Human
ucugaaugcugauccccugugugagagaaaag

SEQ ID NO: 241150 - RNA, 32 nt, Human
ucugaauggcagcacgaagcaggccuguuacu

SEQ ID NO: 241151 - RNA, 32 nt, Human
ucugaauggggagcagguaagagcagagcacc

SEQ ID NO: 241152 - RNA, 32 nt, Human
ucugaaugucuccagugccuaugaggucagcu

SEQ ID NO: 241153 - RNA, 32 nt, Human
ucugaaugugcacagaacacguggcucaaaug

SEQ ID NO: 241154 - RNA, 32 nt, Human
ucugaaugugccagacccgggacucgaaccuu

SEQ ID NO: 241155 - RNA, 32 nt, Human
ucugaauguuugucccccaucuaggauuccag

SEQ ID NO: 241156 - RNA, 23 nt, Human
ucugaauuauuuucuuguugcuu

SEQ ID NO: 241157 - RNA, 32 nt, Human
ucugaauucauguuaugagugucaucuuuauc

SEQ ID NO: 241158 - RNA, 32 nt, Human
ucugaauuccagccaagaaguuccaggacccu

SEQ ID NO: 241159 - RNA, 32 nt, Human
ucugaauugagugaggagagaaaggggaaaga

SEQ ID NO: 241160 - RNA, 32 nt, Human
ucugaauuggcuuagagugugcaguccaaccc

SEQ ID NO: 241161 - RNA, 32 nt, Human
ucugaauuuccuuuucuuggcuuguuucuacu

SEQ ID NO: 241162 - RNA, 32 nt, Human
ucugacaacgcugaggccacgagcuccugggu

SEQ ID NO: 241163 - RNA, 32 nt, Human
ucugacacacguauuuauauuuggaaagagac

SEQ ID NO: 241164 - RNA, 23 nt, Human
ucugacacagaguccuugucugg

SEQ ID NO: 241165 - RNA, 32 nt, Human
ucugacaccacugacagucaugcgacaucuac

SEQ ID NO: 241166 - RNA, 32 nt, Human
ucugacaccaguuuuugcuauuguaauauguu

SEQ ID NO: 241167 - RNA, 32 nt, Human
ucugacaccugggcuggagugcaguggugcaa

SEQ ID NO: 241168 - RNA, 25 nt, Human
ucugacacgggcuccaaccccaccu

SEQ ID NO: 241169 - RNA, 32 nt, Human
ucugacacugaauuuggaugcaccuuguuuua

SEQ ID NO: 241170 - RNA, 32 nt, Human
ucugacacugguguccaaaagucaacaauaaa

SEQ ID NO: 241171 - RNA, 32 nt, Human
ucugacacuuagaaaacagauaacagccccuc

SEQ ID NO: 241172 - RNA, 32 nt, Human
ucugacagaacagagaccuccucaccagggcu

SEQ ID NO: 241173 - RNA, 32 nt, Human
ucugacagaagaggagcaggagaaacaaaucg

SEQ ID NO: 241174 - RNA, 32 nt, Human
ucugacagaagcagaggcaguucugaggcagc

SEQ ID NO: 241175 - RNA, 32 nt, Human
ucugacagagagggugaaggggaaccagagcg

SEQ ID NO: 241176 - RNA, 32 nt, Human
ucugacagauuuuaaaaauugauaugauaaaa

SEQ ID NO: 241177 - RNA, 20 nt, Human
ucugacagcagccugugagg

SEQ ID NO: 241178 - RNA, 32 nt, Human
ucugacagccaagacauggagcaucucugcua

SEQ ID NO: 241179 - RNA, 32 nt, Human
ucugacagccagccuggugugcuuauucaggc

SEQ ID NO: 241180 - RNA, 22 nt, Human
ucugacagccuagaaguccaau

SEQ ID NO: 241181 - RNA, 30 nt, Human
ucugacagccucucccccauucugugugug

SEQ ID NO: 241182 - RNA, 32 nt, Human
ucugacagcucccagaggguucugggggugac

SEQ ID NO: 241183 - RNA, 32 nt, Human
ucugacaggaagcuucugcuccccaguucucc

SEQ ID NO: 241184 - RNA, 23 nt, Human
ucugacaggcuguuucuggggua

SEQ ID NO: 241185 - RNA, 26 nt, Human
ucugacaggugugccugcccccaucu

SEQ ID NO: 241186 - RNA, 32 nt, Human
ucugacaguacagugcagccaccaccauccca

SEQ ID NO: 241187 - RNA, 32 nt, Human
ucugacauacauugcaguuacaugcauuauuu

SEQ ID NO: 241188 - RNA, 32 nt, Human
ucugacaucgugaacaguuugcagugggcuau

SEQ ID NO: 241189 - RNA, 32 nt, Human
ucugacaucuguguccucacucuuaaccacug

SEQ ID NO: 241190 - RNA, 19 nt, Human
ucugacauucacagcauga

SEQ ID NO: 241191 - RNA, 32 nt, Human
ucugaccaaaggacgaaugagggagacguucc

SEQ ID NO: 241192 - RNA, 32 nt, Human
ucugaccaaguuggagcagaugguuuguuacu

SEQ ID NO: 241193 - RNA, 32 nt, Human
ucugaccacaaacaaguuggcuguuacuguau

SEQ ID NO: 241194 - RNA, 32 nt, Human
ucugaccacacuugaggagcccuucagcccag

SEQ ID NO: 241195 - RNA, 32 nt, Human
ucugaccacugcagaccagucucggagguguc

SEQ ID NO: 241196 - RNA, 21 nt, Human
ucugaccagaugcauucacuu

SEQ ID NO: 241197 - RNA, 32 nt, Human
ucugaccaguaggaagaaaccaggacagcagu

SEQ ID NO: 241198 - RNA, 32 nt, Human
ucugaccaucccucucaaucuucccugcccag

SEQ ID NO: 241199 - RNA, 32 nt, Human
ucugaccaucuuucucuuacuguccucuuugu

SEQ ID NO: 241200 - RNA, 32 nt, Human
ucugaccaugagacacggcuugcagugggggu

SEQ ID NO: 241201 - RNA, 32 nt, Human
ucugaccauucuauuguguggaugaccacaua

SEQ ID NO: 241202 - RNA, 32 nt, Human
ucugaccauucuguucucucuggcaggucaug

SEQ ID NO: 241203 - RNA, 32 nt, Human
ucugacccaagugccaaaggcagacgugcuuu

SEQ ID NO: 241204 - RNA, 32 nt, Human
ucugaccccacccugcacucccauccuuuccu

SEQ ID NO: 241205 - RNA, 32 nt, Human
ucugaccccaucucccccuagcuccuccuggg

SEQ ID NO: 241206 - RNA, 25 nt, Human
ucugacccccaagaggccugugagg

SEQ ID NO: 241207 - RNA, 23 nt, Human
ucugaccccucagcuccuuggaa

SEQ ID NO: 241208 - RNA, 32 nt, Human
ucugaccccuggaggagccacuguggaagcag

SEQ ID NO: 241209 - RNA, 32 nt, Human
ucugacccucaagaacgggacagagcagcugc

SEQ ID NO: 241210 - RNA, 32 nt, Human
ucugacccucccccugccuuccucuugccuug

SEQ ID NO: 241211 - RNA, 32 nt, Human
ucugacccuccccugcucgccucccucacccc

SEQ ID NO: 241212 - RNA, 32 nt, Human
ucugacccucuccugggcauugguuccugcug

SEQ ID NO: 241213 - RNA, 32 nt, Human
ucugacccuugggccugggccucugccccucc

SEQ ID NO: 241214 - RNA, 21 nt, Human
ucugaccgaagcugguuccag

SEQ ID NO: 241215 - RNA, 32 nt, Human
ucugaccguucccaccaccaucugcauguccc

SEQ ID NO: 241216 - RNA, 23 nt, Human
ucugaccucaggugauccacccg

SEQ ID NO: 241217 - RNA, 21 nt, Human
ucugaccucccccaggaugag

SEQ ID NO: 241218 - RNA, 21 nt, Human
ucugaccuccccuggaggcga

SEQ ID NO: 241219 - RNA, 18 nt, Human
ucugaccucccugggacc

SEQ ID NO: 241220 - RNA, 32 nt, Human
ucugaccuccuuccuguucaccuuugccuuug

SEQ ID NO: 241221 - RNA, 32 nt, Human
ucugaccuccuuggcacuggagcaucuggggc

SEQ ID NO: 241222 - RNA, 25 nt, Human
ucugaccucgugauccgccgaccuc

SEQ ID NO: 241223 - RNA, 25 nt, Human
ucugaccucgugaucugcccgccuc

SEQ ID NO: 241224 - RNA, 32 nt, Human
ucugaccucucuccuccccuccuuccucucuc

SEQ ID NO: 241225 - RNA, 19 nt, Human
ucugaccugccuguaccac

SEQ ID NO: 241226 - RNA, 32 nt, Human
ucugaccuugucaugugugugccaccaaacac

SEQ ID NO: 241227 - RNA, 23 nt, Human
ucugaccuuuugucuuauagcua

SEQ ID NO: 241228 - RNA, 23 nt, Human
ucugacgcaccacugccaaugcu

SEQ ID NO: 241229 - RNA, 32 nt, Human
ucugacgcauacaauggaaaaggcuuugucag

SEQ ID NO: 241230 - RNA, 32 nt, Human
ucugacgcuggagugcucacaguguggcuggg

SEQ ID NO: 241231 - RNA, 32 nt, Human
ucugacgcuggggccugcugcagccaccaaca

SEQ ID NO: 241232 - RNA, 32 nt, Human
ucugacgggaagagacagccagcacaguguuu

SEQ ID NO: 241233 - RNA, 32 nt, Human
ucugacgggagugacugagggagcuccuggug

SEQ ID NO: 241234 - RNA, 32 nt, Human
ucugacgggauuuguugauucucuccauuuug

SEQ ID NO: 241235 - RNA, 32 nt, Human
ucugacgguauuccugcgccacugggcugguc

SEQ ID NO: 241236 - RNA, 25 nt, Human
ucugacgguuacccuccccccaccu

SEQ ID NO: 241237 - RNA, 32 nt, Human
ucugacgguugggagugguggaaauuggaagg

SEQ ID NO: 241238 - RNA, 32 nt, Human
ucugacgucuugacuuuagacuucuggucccc

SEQ ID NO: 241239 - RNA, 32 nt, Human
ucugacuagcagcugccucccacucccaaaca

SEQ ID NO: 241240 - RNA, 32 nt, Human
ucugacuauaugcacacaccuuugauaccauc

SEQ ID NO: 241241 - RNA, 32 nt, Human
ucugacuaugugaagauacggugggaagauga

SEQ ID NO: 241242 - RNA, 32 nt, Human
ucugacucaaaggacauauacauucauucuuu

SEQ ID NO: 241243 - RNA, 32 nt, Human
ucugacucccagacucaagugauccucuugcc

SEQ ID NO: 241244 - RNA, 32 nt, Human
ucugacucccagguccaugcuccagagucaga

SEQ ID NO: 241245 - RNA, 22 nt, Human
ucugacucccccaacagcgagg

SEQ ID NO: 241246 - RNA, 19 nt, Human
ucugacucccuccaccuca

SEQ ID NO: 241247 - RNA, 32 nt, Human
ucugacucggguccagcuguucuuccugccag

SEQ ID NO: 241248 - RNA, 32 nt, Human
ucugacucguggggcucccugcugcagagagc

SEQ ID NO: 241249 - RNA, 32 nt, Human
ucugacucuaccccacugcuuccuucugcucc

SEQ ID NO: 241250 - RNA, 32 nt, Human
ucugacucucaucugcacuguccucucccuuu

SEQ ID NO: 241251 - RNA, 32 nt, Human
ucugacucuggcuucugcuuuuguuuuaaggg

SEQ ID NO: 241252 - RNA, 24 nt, Human
ucugacugaaccaugcccccaccu

SEQ ID NO: 241253 - RNA, 32 nt, Human
ucugacugccaagccagauucucuugaauaaa

SEQ ID NO: 241254 - RNA, 32 nt, Human
ucugacuggcagcagggucaguggccauccuu

SEQ ID NO: 241255 - RNA, 32 nt, Human
ucugacuggcuguucagccuaggcugcacaca

SEQ ID NO: 241256 - RNA, 20 nt, Human
ucugacuguacacccccacc

SEQ ID NO: 241257 - RNA, 31 nt, Human
ucugacugucaggcugggccugccuccuugu

SEQ ID NO: 241258 - RNA, 23 nt, Human
ucugacugucccugccaaugcuc

SEQ ID NO: 241259 - RNA, 32 nt, Human
ucugacuguggaccccaacccucucauuugac

SEQ ID NO: 241260 - RNA, 32 nt, Human
ucugacuuagguuggagaucaagccuuuuucc

SEQ ID NO: 241261 - RNA, 32 nt, Human
ucugacuuccgaugaugguguugaagcagguc

SEQ ID NO: 241262 - RNA, 32 nt, Human
ucugacuucuaggagcacaagagaggagccug

SEQ ID NO: 241263 - RNA, 32 nt, Human
ucugacuugagucccugcugcugcagugcacg

SEQ ID NO: 241264 - RNA, 32 nt, Human
ucugacuugucaccugccaaugccuggaacag

SEQ ID NO: 241265 - RNA, 32 nt, Human
ucugacuuucugccccuccacugacauggccc

SEQ ID NO: 241266 - RNA, 32 nt, Human
ucugacuuugccucuguccugccuggugugga

SEQ ID NO: 241267 - RNA, 32 nt, Human
ucugacuuuuagaaaccuagucuucuaaggca

SEQ ID NO: 241268 - RNA, 32 nt, Human
ucugacuuuuuccaucucuugcuucaaaguaa

SEQ ID NO: 241269 - RNA, 24 nt, Human
ucugacuuuuuguuucuuuguguu

SEQ ID NO: 241270 - RNA, 32 nt, Human
ucugagaaaccuuuguccucacuugaggcauu

SEQ ID NO: 241271 - RNA, 32 nt, Human
ucugagaaagccucugcaccauugucucagag

SEQ ID NO: 241272 - RNA, 32 nt, Human
ucugagaacagaagcccccuccccuacucaga

SEQ ID NO: 241273 - RNA, 32 nt, Human
ucugagaaccuccagcuucaccuccuuuucug

SEQ ID NO: 241274 - RNA, 32 nt, Human
ucugagaacuucaggaugcagaugucuccagc

SEQ ID NO: 241275 - RNA, 32 nt, Human
ucugagaagcauccuucuaagacauucuguug

SEQ ID NO: 241276 - RNA, 32 nt, Human
ucugagaagccauuucaaaguugcugauaacu

SEQ ID NO: 241277 - RNA, 32 nt, Human
ucugagaagcccugagcuaccuuggggucugg

SEQ ID NO: 241278 - RNA, 22 nt, Human
ucugagaagcugggacuacagg

SEQ ID NO: 241279 - RNA, 28 nt, Human
ucugagaauucacuucaguuuugccaga

SEQ ID NO: 241280 - RNA, 32 nt, Human
ucugagacagagucucacucugucucccaggc

SEQ ID NO: 241281 - RNA, 32 nt, Human
ucugagacaggcuggcuuggaguuaguguaug

SEQ ID NO: 241282 - RNA, 32 nt, Human
ucugagaccagccucggcaacaugccaagacc

SEQ ID NO: 241283 - RNA, 32 nt, Human
ucugagaccagccugagcaacaugaugagacc

SEQ ID NO: 241284 - RNA, 32 nt, Human
ucugagaccagccuggccaacauagcaaaacc

SEQ ID NO: 241285 - RNA, 32 nt, Human
ucugagaccagccuggccaacauggcaaaacc

SEQ ID NO: 241286 - RNA, 32 nt, Human
ucugagaccagccuggcuaacauggugaaacc

SEQ ID NO: 241287 - RNA, 32 nt, Human
ucugagaccagccuggcuuacauggugaaacc

SEQ ID NO: 241288 - RNA, 24 nt, Human
ucugagaccagccugggcaacaua

SEQ ID NO: 241289 - RNA, 32 nt, Human
ucugagaccagccugggcaacauagcaagacc

SEQ ID NO: 241290 - RNA, 32 nt, Human
ucugagaccagccugggcaacauggugaaacc

SEQ ID NO: 241291 - RNA, 32 nt, Human
ucugagacucuaaggaggugaaaugaauccca

SEQ ID NO: 241292 - RNA, 32 nt, Human
ucugagacugccuguuccucccucucugugac

SEQ ID NO: 241293 - RNA, 32 nt, Human
ucugagacuguugcugaacuggcaacuuacuu

SEQ ID NO: 241294 - RNA, 32 nt, Human
ucugagagaccugaaccccuacccauccccug

SEQ ID NO: 241295 - RNA, 32 nt, Human
ucugagagagaaggcaugggauuuucagcaua

SEQ ID NO: 241296 - RNA, 32 nt, Human
ucugagagcaagaauauauuggaugaacugaa

SEQ ID NO: 241297 - RNA, 32 nt, Human
ucugagagcagaggagggaaggcgggauggcc

SEQ ID NO: 241298 - RNA, 32 nt, Human
ucugagagcagcagguugagggccggugggca

SEQ ID NO: 241299 - RNA, 32 nt, Human
ucugagagcaucaggaaauacaacccuuuugc

SEQ ID NO: 241300 - RNA, 32 nt, Human
ucugagagcccagccacgccuuggagggaggg

SEQ ID NO: 241301 - RNA, 32 nt, Human
ucugagagccucaugaggguuucuaggauuua

SEQ ID NO: 241302 - RNA, 22 nt, Human
ucugagagcuccuuuuuugcca

SEQ ID NO: 241303 - RNA, 24 nt, Human
ucugagagcuccuuuuuugccaag

SEQ ID NO: 241304 - RNA, 32 nt, Human
ucugagagcuuaugaagcacauggacaaggaa

SEQ ID NO: 241305 - RNA, 31 nt, Human
ucugagaggcacuucacucacaggccugugg

SEQ ID NO: 241306 - RNA, 31 nt, Human
ucugagaggcacuucugucuucuccuuacuu

SEQ ID NO: 241307 - RNA, 32 nt, Human
ucugagaguggacugucuucucucccuucaca

SEQ ID NO: 241308 - RNA, 21 nt, Human
ucugagaguuggcucaggcag

SEQ ID NO: 241309 - RNA, 32 nt, Human
ucugagaucaugcaucucccacccaucugccc

SEQ ID NO: 241310 - RNA, 32 nt, Human
ucugagaucccgggagaaggaggacaguucuu

SEQ ID NO: 241311 - RNA, 32 nt, Human
ucugagaucccuugguuucucucuuguugauc

SEQ ID NO: 241312 - RNA, 32 nt, Human
ucugagaucugcaagaggaagcaguggaggaa

SEQ ID NO: 241313 - RNA, 32 nt, Human
ucugagaucuuucagaugguuuugccacauug

SEQ ID NO: 241314 - RNA, 32 nt, Human
ucugagaugaggccucguccuccuggaagcug

SEQ ID NO: 241315 - RNA, 32 nt, Human
ucugagaugccaccguaccccuacugcaugca

SEQ ID NO: 241316 - RNA, 32 nt, Human
ucugagauggccccagugaaccagcuucuaga

SEQ ID NO: 241317 - RNA, 32 nt, Human
ucugagaugggcguguguccugacuggccagu

SEQ ID NO: 241318 - RNA, 21 nt, Human
ucugagauuccauuuuugcca

SEQ ID NO: 241319 - RNA, 32 nt, Human
ucugagauuguggaagaauuuuugcaaccagc

SEQ ID NO: 241320 - RNA, 32 nt, Human
ucugagcaacagaucgagacccugccugaaaa

SEQ ID NO: 241321 - RNA, 32 nt, Human
ucugagcaaccagaacaugcugcugcggggcu

SEQ ID NO: 241322 - RNA, 32 nt, Human
ucugagcaaccagggacuuuaagaucuaaucc

SEQ ID NO: 241323 - RNA, 32 nt, Human
ucugagcaagcuggcgaacagcccuggcugcu

SEQ ID NO: 241324 - RNA, 32 nt, Human
ucugagcaaggcucuuccuccacccacagauc

SEQ ID NO: 241325 - RNA, 32 nt, Human
ucugagcacaugcugggugaagucacagcuca

SEQ ID NO: 241326 - RNA, 32 nt, Human
ucugagcaccuccacaccccacugccucuguc

SEQ ID NO: 241327 - RNA, 32 nt, Human
ucugagcacuauauuuugcugggcuauaaaag

SEQ ID NO: 241328 - RNA, 32 nt, Human
ucugagcacucacgaggacccucagcugcugg

SEQ ID NO: 241329 - RNA, 32 nt, Human
ucugagcacuuccguggacugaaggaaccgua

SEQ ID NO: 241330 - RNA, 32 nt, Human
ucugagcagagacauugauuugguuucauuau

SEQ ID NO: 241331 - RNA, 23 nt, Human
ucugagcagagggcggggugcag

SEQ ID NO: 241332 - RNA, 32 nt, Human
ucugagcagcccugguggcugccugugcucag

SEQ ID NO: 241333 - RNA, 22 nt, Human
ucugagcaggacaaggccccug

SEQ ID NO: 241334 - RNA, 32 nt, Human
ucugagcaggaugcccauagaaacccccaugg

SEQ ID NO: 241335 - RNA, 32 nt, Human
ucugagcaggcagaccagaagaccaggcacug

SEQ ID NO: 241336 - RNA, 32 nt, Human
ucugagcaggcucauuuuaaagggacuugcaa

SEQ ID NO: 241337 - RNA, 32 nt, Human
ucugagcagucugggagccuggagcagcccca

SEQ ID NO: 241338 - RNA, 32 nt, Human
ucugagcagugaaugauucaguguuaaaugug

SEQ ID NO: 241339 - RNA, 19 nt, Human
ucugagcaucuuggugcua

SEQ ID NO: 241340 - RNA, 32 nt, Human
ucugagcauggauccaaccaccccggccuggg

SEQ ID NO: 241341 - RNA, 32 nt, Human
ucugagccaacaucuauccagcagcccugacc

SEQ ID NO: 241342 - RNA, 32 nt, Human
ucugagccacggagacagggaggaaggagcgc

SEQ ID NO: 241343 - RNA, 32 nt, Human
ucugagccacuuuaaagaugaauccaugguau

SEQ ID NO: 241344 - RNA, 28 nt, Human
ucugagccagaugcugccugggucgguu

SEQ ID NO: 241345 - RNA, 32 nt, Human
ucugagccauggugucgagugaagaguaguuc

SEQ ID NO: 241346 - RNA, 32 nt, Human
ucugagcccaggaugcgaggauggccagacca

SEQ ID NO: 241347 - RNA, 32 nt, Human
ucugagcccagggcagcuucuggggccacugc

SEQ ID NO: 241348 - RNA, 32 nt, Human
ucugagccccaccucagcaggucuccaggauc

SEQ ID NO: 241349 - RNA, 32 nt, Human
ucugagccccagcaagccugauuucccagccu

SEQ ID NO: 241350 - RNA, 32 nt, Human
ucugagccccggagguggcagagcggcagacu

SEQ ID NO: 241351 - RNA, 19 nt, Human
ucugagcccgaaccugcca

SEQ ID NO: 241352 - RNA, 32 nt, Human
ucugagcccuccuucuugcccugagcuuuccg

SEQ ID NO: 241353 - RNA, 32 nt, Human
ucugagcccugaggcagagaucucucaccugg

SEQ ID NO: 241354 - RNA, 32 nt, Human
ucugagcccuggcugcuuguccuccucgcaac

SEQ ID NO: 241355 - RNA, 32 nt, Human
ucugagccgggcagggacagagcugucgggga

SEQ ID NO: 241356 - RNA, 32 nt, Human
ucugagccggggcuccuuccaggagcugaaau

SEQ ID NO: 241357 - RNA, 18 nt, Human
ucugagccgggggcgcgg

SEQ ID NO: 241358 - RNA, 32 nt, Human
ucugagccuauggauucugucucagugauggg

SEQ ID NO: 241359 - RNA, 32 nt, Human
ucugagccucaaggagccucugcgacucggug

SEQ ID NO: 241360 - RNA, 32 nt, Human
ucugagccucaggagguugaggcugcagugag

SEQ ID NO: 241361 - RNA, 32 nt, Human
ucugagccuccugcaaccaccauuuuugaaau

SEQ ID NO: 241362 - RNA, 32 nt, Human
ucugagccugaccuccccuuggggaccuagcc

SEQ ID NO: 241363 - RNA, 32 nt, Human
ucugagccugcccugccuccuccaucagaucc

SEQ ID NO: 241364 - RNA, 32 nt, Human
ucugagccugggagggugaggaugcaugagcc

SEQ ID NO: 241365 - RNA, 32 nt, Human
ucugagccuguucccuccucuuagaccaucuc

SEQ ID NO: 241366 - RNA, 23 nt, Human
ucugagccuucauccgugcuaag

SEQ ID NO: 241367 - RNA, 32 nt, Human
ucugagccuucucuuacaacagggagucuuuc

SEQ ID NO: 241368 - RNA, 32 nt, Human
ucugagccuugugaugucaggcuguuaagauu

SEQ ID NO: 241369 - RNA, 32 nt, Human
ucugagccuuugucuauuguguuccugucacc

SEQ ID NO: 241370 - RNA, 32 nt, Human
ucugagcgauagggucucaccauguugcccag

SEQ ID NO: 241371 - RNA, 18 nt, Human
ucugagcggcgggcgcag

SEQ ID NO: 241372 - RNA, 32 nt, Human
ucugagcggcgggcgcagggaggucgcagguc

SEQ ID NO: 241373 - RNA, 32 nt, Human
ucugagcucacugcaaccucugacucccagac

SEQ ID NO: 241374 - RNA, 32 nt, Human
ucugagcucacugcaaccucugccucccaagu

SEQ ID NO: 241375 - RNA, 32 nt, Human
ucugagcucagucacugaagugagagugugcu

SEQ ID NO: 241376 - RNA, 22 nt, Human
ucugagcucauccuuugccaga

SEQ ID NO: 241377 - RNA, 32 nt, Human
ucugagcuccaaguggcuagguuguaaaaguu

SEQ ID NO: 241378 - RNA, 32 nt, Human
ucugagcuccuggcuggcucucaggcccucua

SEQ ID NO: 241379 - RNA, 32 nt, Human
ucugagcucugggcguggaggucugucugcag

SEQ ID NO: 241380 - RNA, 32 nt, Human
ucugagcucuuauccagcauccaggaagaauc

SEQ ID NO: 241381 - RNA, 32 nt, Human
ucugagcugcugggcccagcugccuggugcau

SEQ ID NO: 241382 - RNA, 32 nt, Human
ucugagcuggauugauggggccagucuccccc

SEQ ID NO: 241383 - RNA, 32 nt, Human
ucugagcuucugugaccugcuccugggacuuu

SEQ ID NO: 241384 - RNA, 32 nt, Human
ucugagcuuuucucccucauccuccccaaucc

SEQ ID NO: 241385 - RNA, 32 nt, Human
ucugaggaacacgccgcagggccaggcaugug

SEQ ID NO: 241386 - RNA, 32 nt, Human
ucugaggaacgcaggcccuggccacuaccagg

SEQ ID NO: 241387 - RNA, 32 nt, Human
ucugaggaacucaaguuugguugccagaaaaa

SEQ ID NO: 241388 - RNA, 32 nt, Human
ucugaggaacuggaauaaagaugaggggccuu

SEQ ID NO: 241389 - RNA, 32 nt, Human
ucugaggaagaaaaggaguuaggagaaagaag

SEQ ID NO: 241390 - RNA, 32 nt, Human
ucugaggaagaacugucugggugcaaaagucc

SEQ ID NO: 241391 - RNA, 32 nt, Human
ucugaggaagaagaggaggaggaggaagagga

SEQ ID NO: 241392 - RNA, 32 nt, Human
ucugaggaagauuuugcugcuuuugccugaag

SEQ ID NO: 241393 - RNA, 32 nt, Human
ucugaggaagcacaacagggacagacuugaag

SEQ ID NO: 241394 - RNA, 32 nt, Human
ucugaggaagccaagacgccaggagaggcuca

SEQ ID NO: 241395 - RNA, 32 nt, Human
ucugaggaaggugcgaggcggauggagcgggu

SEQ ID NO: 241396 - RNA, 32 nt, Human
ucugaggaauugccacacugucuuccacaaug

SEQ ID NO: 241397 - RNA, 32 nt, Human
ucugaggacagaaacagcugcaagaguaccau

SEQ ID NO: 241398 - RNA, 32 nt, Human
ucugaggaccguggcugagggugcaugggcgc

SEQ ID NO: 241399 - RNA, 20 nt, Human
ucugaggacggggggugggg

SEQ ID NO: 241400 - RNA, 32 nt, Human
ucugaggagcagucuagguuacaggcuuuuug

SEQ ID NO: 241401 - RNA, 32 nt, Human
ucugaggagcaguuuucaagaaagcugaaaau

SEQ ID NO: 241402 - RNA, 32 nt, Human
ucugaggagccccagucaugcucagcacgcua

SEQ ID NO: 241403 - RNA, 32 nt, Human
ucugaggagcuggggaaggaacaaagcgaggc

SEQ ID NO: 241404 - RNA, 32 nt, Human
ucugaggagguggcauuugagcacucaagugc

SEQ ID NO: 241405 - RNA, 32 nt, Human
ucugaggaugcucaagucccuuguauaaaaug

SEQ ID NO: 241406 - RNA, 32 nt, Human
ucugaggauggggaggggccagugagcucugg

SEQ ID NO: 241407 - RNA, 32 nt, Human
ucugaggcaaacacagcaaggcuggcccaggc

SEQ ID NO: 241408 - RNA, 32 nt, Human
ucugaggcaagcuggacaggagagguggauau

SEQ ID NO: 241409 - RNA, 32 nt, Human
ucugaggcagagaagacucgaguccagccccc

SEQ ID NO: 241410 - RNA, 32 nt, Human
ucugaggcagcuccgcaggacugugugugaau

SEQ ID NO: 241411 - RNA, 32 nt, Human
ucugaggcaguggacaggaagacuucucaucc

SEQ ID NO: 241412 - RNA, 32 nt, Human
ucugaggcauaagccucucuucccagggcucc

SEQ ID NO: 241413 - RNA, 32 nt, Human
ucugaggccagccuggccuccugccucuacug

SEQ ID NO: 241414 - RNA, 32 nt, Human
ucugaggccaggaguucaagaccagccuggcu

SEQ ID NO: 241415 - RNA, 32 nt, Human
ucugaggccaggaguucgagaccagccuggcc

SEQ ID NO: 241416 - RNA, 32 nt, Human
ucugaggccaggaguucgagaccugccuggcc

SEQ ID NO: 241417 - RNA, 32 nt, Human
ucugaggcccagggguggagguuaggggugga

SEQ ID NO: 241418 - RNA, 32 nt, Human
ucugaggcccauucucaggcugggcagagguc

SEQ ID NO: 241419 - RNA, 32 nt, Human
ucugaggccccaggcccuaggauuccuccccc

SEQ ID NO: 241420 - RNA, 32 nt, Human
ucugaggcccucaaccuggcaucuuaggguau

SEQ ID NO: 241421 - RNA, 32 nt, Human
ucugaggcccuugaguaacugaccacauuugg

SEQ ID NO: 241422 - RNA, 32 nt, Human
ucugaggccgaggcaccucuaagauacugaug

SEQ ID NO: 241423 - RNA, 22 nt, Human
ucugaggccugaauccaaaaga

SEQ ID NO: 241424 - RNA, 32 nt, Human
ucugaggccugccugauuugggccacauagau

SEQ ID NO: 241425 - RNA, 32 nt, Human
ucugaggccugggagagucucuacugucuauu

SEQ ID NO: 241426 - RNA, 32 nt, Human
ucugaggccuuaggguccuucggugucuuuga

SEQ ID NO: 241427 - RNA, 18 nt, Human
ucugaggcgagacggcuc

SEQ ID NO: 241428 - RNA, 32 nt, Human
ucugaggcucgcuggugacucaugcccuaauu

SEQ ID NO: 241429 - RNA, 32 nt, Human
ucugaggcugagcaagggcugagaggagaggc

SEQ ID NO: 241430 - RNA, 18 nt, Human
ucugaggcugcagcaugg

SEQ ID NO: 241431 - RNA, 32 nt, Human
ucugaggcugccauacugccacuguccaggug

SEQ ID NO: 241432 - RNA, 32 nt, Human
ucugaggcugggccaagccugagggaaauggg

SEQ ID NO: 241433 - RNA, 32 nt, Human
ucugaggcugggccucugccuuugugaaguug

SEQ ID NO: 241434 - RNA, 23 nt, Human
ucugaggcuggggcggggugggg

SEQ ID NO: 241435 - RNA, 32 nt, Human
ucugaggcuuugccccacacaugguccucacu

SEQ ID NO: 241436 - RNA, 32 nt, Human
ucugagggaagaagcuuugcagcaaccucugu

SEQ ID NO: 241437 - RNA, 32 nt, Human
ucugagggcaauugcguugcucaaaucacuag

SEQ ID NO: 241438 - RNA, 32 nt, Human
ucugagggcagagaugcugucagugccgcagg

SEQ ID NO: 241439 - RNA, 32 nt, Human
ucugagggcagcaagcccuguagauccuuccu

SEQ ID NO: 241440 - RNA, 32 nt, Human
ucugagggcaggcgggcagcugcagggaggag

SEQ ID NO: 241441 - RNA, 32 nt, Human
ucugagggcaguaaucacaggcugcaggcuag

SEQ ID NO: 241442 - RNA, 32 nt, Human
ucugagggcuccguguggcugccuguguuccu

SEQ ID NO: 241443 - RNA, 32 nt, Human
ucugaggggaaagcacaggcugugcugucgag

SEQ ID NO: 241444 - RNA, 32 nt, Human
ucugaggggaaggaacagcaaaagaggcccuu

SEQ ID NO: 241445 - RNA, 32 nt, Human
ucugaggggaauggggagagagaggaagcgac

SEQ ID NO: 241446 - RNA, 32 nt, Human
ucugaggggacugacagcauggucagggugua

SEQ ID NO: 241447 - RNA, 32 nt, Human
ucugaggggcccuugguggggagcucaaacag

SEQ ID NO: 241448 - RNA, 32 nt, Human
ucugagggugagcggcucauucugcuaguuua

SEQ ID NO: 241449 - RNA, 32 nt, Human
ucugagggugauuugugaucaaguuuaaucac

SEQ ID NO: 241450 - RNA, 32 nt, Human
ucugaggguuccaugaggcaggcuugcaggag

SEQ ID NO: 241451 - RNA, 32 nt, Human
ucugaggucacugcaaccuccaccucccgggu

SEQ ID NO: 241452 - RNA, 32 nt, Human
ucugaggugaccacugcaacuccaagccaucc

SEQ ID NO: 241453 - RNA, 32 nt, Human
ucugaggugacggacugagacgcaucuggucc

SEQ ID NO: 241454 - RNA, 19 nt, Human
ucugaggugccugcuggca

SEQ ID NO: 241455 - RNA, 32 nt, Human
ucugaggugcuugagaaaguguacacugcaga

SEQ ID NO: 241456 - RNA, 32 nt, Human
ucugagguguuucaacacaauuuuggaucagc

SEQ ID NO: 241457 - RNA, 32 nt, Human
ucugagguuagaauuaauucaaauucagaauc

SEQ ID NO: 241458 - RNA, 32 nt, Human
ucugagguuaguggucucucugcugugccaca

SEQ ID NO: 241459 - RNA, 32 nt, Human
ucugagguuggagagaaagaacagaccagcgc

SEQ ID NO: 241460 - RNA, 32 nt, Human
ucugagguuuuucugccagugucuugucugaa

SEQ ID NO: 241461 - RNA, 24 nt, Human
ucugaguaacugggacuacaggug

SEQ ID NO: 241462 - RNA, 21 nt, Human
ucugaguagcuaggauuacag

SEQ ID NO: 241463 - RNA, 22 nt, Human
ucugaguagcuggaauuacagg

SEQ ID NO: 241464 - RNA, 22 nt, Human
ucugaguagcugggaccacagg

SEQ ID NO: 241465 - RNA, 24 nt, Human
ucugaguagcugggacuacaagug

SEQ ID NO: 241466 - RNA, 22 nt, Human
ucugaguagcugggacuacagg

SEQ ID NO: 241467 - RNA, 24 nt, Human
ucugaguagcugggacuacaggug

SEQ ID NO: 241468 - RNA, 24 nt, Human
ucugaguagcugggacuacaguug

SEQ ID NO: 241469 - RNA, 22 nt, Human
ucugaguagcugggaguacagg

SEQ ID NO: 241470 - RNA, 21 nt, Human
ucugaguagcugggauuacag

SEQ ID NO: 241471 - RNA, 22 nt, Human
ucugaguagcugggauuacagg

SEQ ID NO: 241472 - RNA, 22 nt, Human
ucugaguagcugggauugcagg

SEQ ID NO: 241473 - RNA, 32 nt, Human
ucugaguagggagacgccagaggagccucacg

SEQ ID NO: 241474 - RNA, 32 nt, Human
ucugaguauuagacacuaguuaacauauuugu

SEQ ID NO: 241475 - RNA, 32 nt, Human
ucugagucaacauagcuagaaaaugcuaaacu

SEQ ID NO: 241476 - RNA, 32 nt, Human
ucugagucaccuaggccgccuggggcugagaa

SEQ ID NO: 241477 - RNA, 32 nt, Human
ucugagucacugguuucucaccugcaaaagaa

SEQ ID NO: 241478 - RNA, 32 nt, Human
ucugagucaggugcccuagggccaaagacuag

SEQ ID NO: 241479 - RNA, 32 nt, Human
ucugagucauggacaaaccagaauucuugccc

SEQ ID NO: 241480 - RNA, 32 nt, Human
ucugaguccagauuucuucucuccuuacuucc

SEQ ID NO: 241481 - RNA, 32 nt, Human
ucugaguccagccucgggagccccugcggugg

SEQ ID NO: 241482 - RNA, 32 nt, Human
ucugaguccccuaguacaugguagaggcugua

SEQ ID NO: 241483 - RNA, 32 nt, Human
ucugaguccccucccucaucccuuagggucca

SEQ ID NO: 241484 - RNA, 22 nt, Human
ucugaguccuagucucccuccu

SEQ ID NO: 241485 - RNA, 32 nt, Human
ucugagucuggcccagcagaggcugcaacugg

SEQ ID NO: 241486 - RNA, 22 nt, Human
ucugagugacccugguuucuga

SEQ ID NO: 241487 - RNA, 32 nt, Human
ucugagugcaaguucauguguggaaaugggac

SEQ ID NO: 241488 - RNA, 32 nt, Human
ucugagugccuugccagcacuaacauucuaga

SEQ ID NO: 241489 - RNA, 32 nt, Human
ucugagugcuuuccucuucuucaacacucaac

SEQ ID NO: 241490 - RNA, 32 nt, Human
ucugagugggaaagacaugugcugagacacgg

SEQ ID NO: 241491 - RNA, 32 nt, Human
ucugaguggggagagguugggcagugagugag

SEQ ID NO: 241492 - RNA, 23 nt, Human
ucugagugguggucuuugggaua

SEQ ID NO: 241493 - RNA, 32 nt, Human
ucugaguguuaacugugugccaggccuugucc

SEQ ID NO: 241494 - RNA, 32 nt, Human
ucugaguguuuuucagauguuuugccaugugg

SEQ ID NO: 241495 - RNA, 32 nt, Human
ucugaguuaauuggacuggagcgcagucggac

SEQ ID NO: 241496 - RNA, 32 nt, Human
ucugaguuagaccugcagauguguacagauag

SEQ ID NO: 241497 - RNA, 32 nt, Human
ucugaguuauucucucaguguaucgaagauau

SEQ ID NO: 241498 - RNA, 32 nt, Human
ucugaguuccaguuuccucugggcuccaaucu

SEQ ID NO: 241499 - RNA, 32 nt, Human
ucugaguucccuccccucucuuugacauuccu

SEQ ID NO: 241500 - RNA, 32 nt, Human
ucugaguucugcuggcagcuuccagaggauug

SEQ ID NO: 241501 - RNA, 32 nt, Human
ucugaguugcaggggccauggcuuccaaaugc

SEQ ID NO: 241502 - RNA, 32 nt, Human
ucugauaacucauauaaaaauaucaucauaaa

SEQ ID NO: 241503 - RNA, 32 nt, Human
ucugauaagugaauguuuaucuaucuuugugg

SEQ ID NO: 241504 - RNA, 32 nt, Human
ucugauaaucuuccuuuccucaaugcuuccua

SEQ ID NO: 241505 - RNA, 32 nt, Human
ucugauacaauccagcugucuucucuaccuua

SEQ ID NO: 241506 - RNA, 32 nt, Human
ucugauacucagccgggaaccucauucucagu

SEQ ID NO: 241507 - RNA, 32 nt, Human
ucugauaguccuaggagguucuggaagaaagu

SEQ ID NO: 241508 - RNA, 32 nt, Human
ucugauagugcccuugcucuucugucugucau

SEQ ID NO: 241509 - RNA, 32 nt, Human
ucugauaguucuucauuauuucacaaaggugg

SEQ ID NO: 241510 - RNA, 32 nt, Human
ucugauaucccauccgcaucacgggagugggg

SEQ ID NO: 241511 - RNA, 32 nt, Human
ucugauaucucaaacaccagcaucagggccag

SEQ ID NO: 241512 - RNA, 23 nt, Human
ucugauaucuucacauucuccca

SEQ ID NO: 241513 - RNA, 32 nt, Human
ucugauauucaacccacccucuugucaauaac

SEQ ID NO: 241514 - RNA, 32 nt, Human
ucugauauuuaggucuucagaagccuguaggu

SEQ ID NO: 241515 - RNA, 32 nt, Human
ucugauauuuauacugaaugaguuacuguaag

SEQ ID NO: 241516 - RNA, 31 nt, Human
ucugaucaaauaaauaaugcuggaauacuca

SEQ ID NO: 241517 - RNA, 32 nt, Human
ucugaucaauuggcaagaaagggagauuucaa

SEQ ID NO: 241518 - RNA, 32 nt, Human
ucugaucacaugcagggcaaagccagcauuca

SEQ ID NO: 241519 - RNA, 32 nt, Human
ucugaucaccucaagccucccacucugaacau

SEQ ID NO: 241520 - RNA, 32 nt, Human
ucugaucacuccacugcacuccagccugggug

SEQ ID NO: 241521 - RNA, 32 nt, Human
ucugaucagcaugguccagggacaguugagag

SEQ ID NO: 241522 - RNA, 32 nt, Human
ucugaucaucugaaucuuaaucauguccaacu

SEQ ID NO: 241523 - RNA, 32 nt, Human
ucugaucaugccagguuugcaccagccucgag

SEQ ID NO: 241524 - RNA, 32 nt, Human
ucugauccaagagcugagacacggccacccag

SEQ ID NO: 241525 - RNA, 32 nt, Human
ucugauccacccuccgcucugccugccaugga

SEQ ID NO: 241526 - RNA, 32 nt, Human
ucugauccacgagauaucucaggcugggaaga

SEQ ID NO: 241527 - RNA, 32 nt, Human
ucugauccaucagauugucaaaaauccaaaag

SEQ ID NO: 241528 - RNA, 32 nt, Human
ucugaucccaggcuggauggaguggcuggaag

SEQ ID NO: 241529 - RNA, 32 nt, Human
ucugaucccugaucaagcuucagaccucccuc

SEQ ID NO: 241530 - RNA, 22 nt, Human
ucugauccuggcuaaaacuagc

SEQ ID NO: 241531 - RNA, 32 nt, Human
ucugauccuugcaaaaacccugccaagaaagc

SEQ ID NO: 241532 - RNA, 32 nt, Human
ucugaucggagcugauguuucccuccaggaaa

SEQ ID NO: 241533 - RNA, 32 nt, Human
ucugaucgggucuuccuucaucaggaacgaau

SEQ ID NO: 241534 - RNA, 32 nt, Human
ucugaucuacaaaggcgguggcaucgacaaaa

SEQ ID NO: 241535 - RNA, 32 nt, Human
ucugaucuacucggggccucaggcuucucagc

SEQ ID NO: 241536 - RNA, 32 nt, Human
ucugaucuccaccuucuucuaauucaaaaggu

SEQ ID NO: 241537 - RNA, 32 nt, Human
ucugaucugcauuucaacauagagucacauaa

SEQ ID NO: 241538 - RNA, 32 nt, Human
ucugaucugcccaccuccucuuccuucuucuc

SEQ ID NO: 241539 - RNA, 32 nt, Human
ucugaucugcgcccccagcccccagccccagc

SEQ ID NO: 241540 - RNA, 32 nt, Human
ucugaucuggggaggcagaggugacagugagc

SEQ ID NO: 241541 - RNA, 32 nt, Human
ucugaucuguucuacauauuaaaguucaugcu

SEQ ID NO: 241542 - RNA, 32 nt, Human
ucugaucuugaaaaucugaguagguggacaaa

SEQ ID NO: 241543 - RNA, 32 nt, Human
ucugaucuugggcucucagcagccucuucugc

SEQ ID NO: 241544 - RNA, 22 nt, Human
ucugaucuuucauuuccugcca

SEQ ID NO: 241545 - RNA, 32 nt, Human
ucugaugaaaguacaauagccauguugauuca

SEQ ID NO: 241546 - RNA, 27 nt, Human
ucugaugaacaagguuguuuuaccuua

SEQ ID NO: 241547 - RNA, 32 nt, Human
ucugaugaaccagcuuugcaccuacauacgua

SEQ ID NO: 241548 - RNA, 32 nt, Human
ucugaugaacuuagaaaagaaggccugaaugc

SEQ ID NO: 241549 - RNA, 24 nt, Human
ucugaugacugaaugucuguuuca

SEQ ID NO: 241550 - RNA, 32 nt, Human
ucugaugaggaagaaaauggccagggggaagg

SEQ ID NO: 241551 - RNA, 32 nt, Human
ucugaugaggagcuuccuccugauuggagugg

SEQ ID NO: 241552 - RNA, 32 nt, Human
ucugaugaggucugggcaggaaccaaagagag

SEQ ID NO: 241553 - RNA, 32 nt, Human
ucugaugaucuccagccuccacugcuucugcc

SEQ ID NO: 241554 - RNA, 32 nt, Human
ucugaugcagaacguaucagugaaacucccuc

SEQ ID NO: 241555 - RNA, 32 nt, Human
ucugaugcagaacuuucucuuuugaauguuaa

SEQ ID NO: 241556 - RNA, 32 nt, Human
ucugaugccuucaggugugacacugcccugga

SEQ ID NO: 241557 - RNA, 32 nt, Human
ucugaugcucuaggcugcugugaggugguggu

SEQ ID NO: 241558 - RNA, 32 nt, Human
ucugaugcugcccaucgcuugcacuggggucu

SEQ ID NO: 241559 - RNA, 32 nt, Human
ucugaugcugggacaggugagaagaaacugug

SEQ ID NO: 241560 - RNA, 32 nt, Human
ucugaugcuucuuuugucaggugcagaagcac

SEQ ID NO: 241561 - RNA, 32 nt, Human
ucugauggaaggaagagaguagggccagugaa

SEQ ID NO: 241562 - RNA, 32 nt, Human
ucugauggcaacuguaugauagaagcuauaua

SEQ ID NO: 241563 - RNA, 20 nt, Human
ucugauggccaggcauggug

SEQ ID NO: 241564 - RNA, 32 nt, Human
ucugauggcgcacaccuguaaucaggaggcua

SEQ ID NO: 241565 - RNA, 32 nt, Human
ucugaugggaggagucgugggagcccagcucc

SEQ ID NO: 241566 - RNA, 32 nt, Human
ucugaugguaccacugcacuccagccugggug

SEQ ID NO: 241567 - RNA, 32 nt, Human
ucugauggucagcaucuuccccaacacuuagg

SEQ ID NO: 241568 - RNA, 32 nt, Human
ucugauguaccugcuucuagcauacaagaaaa

SEQ ID NO: 241569 - RNA, 32 nt, Human
ucugauguccauaguuccuucccccuagauug

SEQ ID NO: 241570 - RNA, 32 nt, Human
ucugauguccccucaccuucugaugucaccuc

SEQ ID NO: 241571 - RNA, 32 nt, Human
ucugaugugaggagggacuugaguugagugac

SEQ ID NO: 241572 - RNA, 32 nt, Human
ucugauguggaggaggcgguggcagaugccuu

SEQ ID NO: 241573 - RNA, 32 nt, Human
ucugauguuucggaacagucauuucaccuacu

SEQ ID NO: 241574 - RNA, 32 nt, Human
ucugauguuuugggaagauuuggacagagaaa

SEQ ID NO: 241575 - RNA, 32 nt, Human
ucugauuaaagaaaacaaaaagugccgugcca

SEQ ID NO: 241576 - RNA, 32 nt, Human
ucugauuaaagaaaauaaaaagugccgugcca

SEQ ID NO: 241577 - RNA, 32 nt, Human
ucugauuaaauacugugccuuaggagacugga

SEQ ID NO: 241578 - RNA, 32 nt, Human
ucugauuauuggagacagaaguccugucacuu

SEQ ID NO: 241579 - RNA, 32 nt, Human
ucugauucaccugccauuugcugagccucugc

SEQ ID NO: 241580 - RNA, 32 nt, Human
ucugauucagaaacacacuucuaccucuuuac

SEQ ID NO: 241581 - RNA, 32 nt, Human
ucugauucagaaucagugugggcuccugcagu

SEQ ID NO: 241582 - RNA, 32 nt, Human
ucugauucagccagggggaggacaggaaucug

SEQ ID NO: 241583 - RNA, 32 nt, Human
ucugauucccagagauagcagauucugucaac

SEQ ID NO: 241584 - RNA, 32 nt, Human
ucugauucccuuucccugucuucccgcuuauc

SEQ ID NO: 241585 - RNA, 32 nt, Human
ucugauuccuggaagaaaggguugguccccuc

SEQ ID NO: 241586 - RNA, 32 nt, Human
ucugauucugccugaauagcugagagguucca

SEQ ID NO: 241587 - RNA, 32 nt, Human
ucugauucugguggauccucccuccccuaauu

SEQ ID NO: 241588 - RNA, 32 nt, Human
ucugauugcaccacugcacuccaggcugggua

SEQ ID NO: 241589 - RNA, 32 nt, Human
ucugauugcuaucagcaaugccccaaacuuuc

SEQ ID NO: 241590 - RNA, 32 nt, Human
ucugauuggaaaugugugcaugugagucggcc

SEQ ID NO: 241591 - RNA, 32 nt, Human
ucugauuggagcaaaccacuucuuuagucauc

SEQ ID NO: 241592 - RNA, 32 nt, Human
ucugauuggaggagggacaguuucugguaccc

SEQ ID NO: 241593 - RNA, 32 nt, Human
ucugauugggacaacauucagacccauuucca

SEQ ID NO: 241594 - RNA, 32 nt, Human
ucugauuggggcucgcaccgcagcacgcugga

SEQ ID NO: 241595 - RNA, 32 nt, Human
ucugauuucccuuuugauuucuucuuuuaccc

SEQ ID NO: 241596 - RNA, 32 nt, Human
ucugauuuccuacccuguuacuuucauccaua

SEQ ID NO: 241597 - RNA, 32 nt, Human
ucugauuugccacccaugccucuucaggcugg

SEQ ID NO: 241598 - RNA, 32 nt, Human
ucugauuuguaacccacugagaggacagagag

SEQ ID NO: 241599 - RNA, 32 nt, Human
ucugauuuuagaacuguaggucaguggugagu

SEQ ID NO: 241600 - RNA, 32 nt, Human
ucugcaaaaauggauauuauuagaaauuagaa

SEQ ID NO: 241601 - RNA, 20 nt, Human
ucugcaaaacagccaaugcu

SEQ ID NO: 241602 - RNA, 32 nt, Human
ucugcaaaacagucaagagacucggacguuga

SEQ ID NO: 241603 - RNA, 32 nt, Human
ucugcaaacagaaucuuggauauuucuucuga

SEQ ID NO: 241604 - RNA, 32 nt, Human
ucugcaaaccagccauagauacaucuugcucu

SEQ ID NO: 241605 - RNA, 32 nt, Human
ucugcaaacccagcuacucgggaggcugaagc

SEQ ID NO: 241606 - RNA, 32 nt, Human
ucugcaaagauaaaagcuucgaugaugaagaa

SEQ ID NO: 241607 - RNA, 32 nt, Human
ucugcaaagcagggaugguccagauaauuucu

SEQ ID NO: 241608 - RNA, 32 nt, Human
ucugcaaagcuuuucugcuccuggguuaaggc

SEQ ID NO: 241609 - RNA, 32 nt, Human
ucugcaaaggaucagcugggagauaguuucaa

SEQ ID NO: 241610 - RNA, 32 nt, Human
ucugcaaaggcagagggucauugugacagcuu

SEQ ID NO: 241611 - RNA, 32 nt, Human
ucugcaaauauugccagcauuuuagccauauu

SEQ ID NO: 241612 - RNA, 32 nt, Human
ucugcaaauuggcaaugggauccagaggcuug

SEQ ID NO: 241613 - RNA, 25 nt, Human
ucugcaacaaaaauccagucuuuca

SEQ ID NO: 241614 - RNA, 23 nt, Human
ucugcaacaaaagccuccaccca

SEQ ID NO: 241615 - RNA, 32 nt, Human
ucugcaacaacagcaggcucuccaggcagcaa

SEQ ID NO: 241616 - RNA, 32 nt, Human
ucugcaacccacccacucccccagcaaacaua

SEQ ID NO: 241617 - RNA, 21 nt, Human
ucugcaacccacccaucccuc

SEQ ID NO: 241618 - RNA, 32 nt, Human
ucugcaacccacccaucccucccugcagcacc

SEQ ID NO: 241619 - RNA, 32 nt, Human
ucugcaacccuaauuaaaugaguacaggucua

SEQ ID NO: 241620 - RNA, 23 nt, Human
ucugcaacccugcucuaugcuga

SEQ ID NO: 241621 - RNA, 32 nt, Human
ucugcaacggugcuuccagccuucguaauuag

SEQ ID NO: 241622 - RNA, 32 nt, Human
ucugcaacucggcuucugagccaggccaccgg

SEQ ID NO: 241623 - RNA, 32 nt, Human
ucugcaagaggaagcaguggaggaacaggagg

SEQ ID NO: 241624 - RNA, 24 nt, Human
ucugcaagaucauguuguucuuuc

SEQ ID NO: 241625 - RNA, 32 nt, Human
ucugcaagccaaggagagaggcugcaggagaa

SEQ ID NO: 241626 - RNA, 31 nt, Human
ucugcaagccacuuuuccaugccaagcaucc

SEQ ID NO: 241627 - RNA, 32 nt, Human
ucugcaaggacaguuguuugguguuuugcuuc

SEQ ID NO: 241628 - RNA, 32 nt, Human
ucugcaaggcggccuguugcucacgucucucc

SEQ ID NO: 241629 - RNA, 32 nt, Human
ucugcaaggcuugacaaccacagaucagggac

SEQ ID NO: 241630 - RNA, 29 nt, Human
ucugcaagucugugugggccuugaaaaua

SEQ ID NO: 241631 - RNA, 32 nt, Human
ucugcaagugcuucccagcccagaacaggggu

SEQ ID NO: 241632 - RNA, 32 nt, Human
ucugcaaguguccugaaaaagacugaacgaaa

SEQ ID NO: 241633 - RNA, 32 nt, Human
ucugcaaguuugcaaggauuuuguagguccug

SEQ ID NO: 241634 - RNA, 22 nt, Human
ucugcaauagaaugcacucuua

SEQ ID NO: 241635 - RNA, 32 nt, Human
ucugcaauaguugugggcaugggugagaaaua

SEQ ID NO: 241636 - RNA, 32 nt, Human
ucugcaaucuacgugaagaccccacaccccuc

SEQ ID NO: 241637 - RNA, 24 nt, Human
ucugcaaucuauuguuccauucca

SEQ ID NO: 241638 - RNA, 32 nt, Human
ucugcaaucucagcuacucaggaggcugaggc

SEQ ID NO: 241639 - RNA, 32 nt, Human
ucugcaaucugcacuguccagccuagcaggcc

SEQ ID NO: 241640 - RNA, 32 nt, Human
ucugcaaucuuuaaaucagccuccaguuuuug

SEQ ID NO: 241641 - RNA, 19 nt, Human
ucugcaaugauuauuguuu

SEQ ID NO: 241642 - RNA, 32 nt, Human
ucugcaaugcagcccugccaacuggggaccug

SEQ ID NO: 241643 - RNA, 32 nt, Human
ucugcacaagcuagugaggaccugccagaauu

SEQ ID NO: 241644 - RNA, 32 nt, Human
ucugcacaaucagagacugucucgaucucucc

SEQ ID NO: 241645 - RNA, 32 nt, Human
ucugcacacagcaucugcucccaucccccaag

SEQ ID NO: 241646 - RNA, 32 nt, Human
ucugcacacagccccagucgggcagcaggaaa

SEQ ID NO: 241647 - RNA, 32 nt, Human
ucugcacagaugggagagggagugucccugaa

SEQ ID NO: 241648 - RNA, 22 nt, Human
ucugcacagccucuuucacuca

SEQ ID NO: 241649 - RNA, 32 nt, Human
ucugcacaggggagauuucuuauaccagcagu

SEQ ID NO: 241650 - RNA, 32 nt, Human
ucugcacaguggaacagaacagcuccagggua

SEQ ID NO: 241651 - RNA, 32 nt, Human
ucugcacauaauaucacacauugcgcuccacg

SEQ ID NO: 241652 - RNA, 32 nt, Human
ucugcacaugaggccaguauaggcaacgucac

SEQ ID NO: 241653 - RNA, 19 nt, Human
ucugcacaugccugucaaa

SEQ ID NO: 241654 - RNA, 32 nt, Human
ucugcaccaaagcucauugcaggcaauguugg

SEQ ID NO: 241655 - RNA, 32 nt, Human
ucugcaccaaagcugcuucuaaagcagaaagc

SEQ ID NO: 241656 - RNA, 32 nt, Human
ucugcaccacaccagcgcaugaggggauggag

SEQ ID NO: 241657 - RNA, 32 nt, Human
ucugcaccacaccagugcaugaggggaugcag

SEQ ID NO: 241658 - RNA, 32 nt, Human
ucugcaccacaccagugcaugaggggauggag

SEQ ID NO: 241659 - RNA, 32 nt, Human
ucugcaccauauucagcaccagaguugccuca

SEQ ID NO: 241660 - RNA, 32 nt, Human
ucugcaccaugccacacacuugcuguaaggcu

SEQ ID NO: 241661 - RNA, 32 nt, Human
ucugcacccaccccugcccugacuuguguugc

SEQ ID NO: 241662 - RNA, 32 nt, Human
ucugcacccagccugcccgcccacaccauccu

SEQ ID NO: 241663 - RNA, 32 nt, Human
ucugcaccccaagcccuugccccagcccaguc

SEQ ID NO: 241664 - RNA, 26 nt, Human
ucugcaccccaaguuguuucuucuca

SEQ ID NO: 241665 - RNA, 32 nt, Human
ucugcaccccacuucagaccucggugggcauu

SEQ ID NO: 241666 - RNA, 32 nt, Human
ucugcaccccucccuugggagggagacuucau

SEQ ID NO: 241667 - RNA, 23 nt, Human
ucugcacccuugccccaucccuc

SEQ ID NO: 241668 - RNA, 32 nt, Human
ucugcaccucaguuggcaaaggagacuggaug

SEQ ID NO: 241669 - RNA, 32 nt, Human
ucugcaccucugugguuccugcccucagcccu

SEQ ID NO: 241670 - RNA, 32 nt, Human
ucugcacggcucugcuagagagaggaucacaa

SEQ ID NO: 241671 - RNA, 32 nt, Human
ucugcacgggggaacugugugugcaaagguga

SEQ ID NO: 241672 - RNA, 32 nt, Human
ucugcacggugggagaccugcugccggaaguc

SEQ ID NO: 241673 - RNA, 32 nt, Human
ucugcacgucaccaaguaaccaggccccagcc

SEQ ID NO: 241674 - RNA, 32 nt, Human
ucugcacgugccugugccucacccagagccag

SEQ ID NO: 241675 - RNA, 32 nt, Human
ucugcacuccacggcccuucucagccacacuu

SEQ ID NO: 241676 - RNA, 32 nt, Human
ucugcacuccagccuaggugacagagugagac

SEQ ID NO: 241677 - RNA, 32 nt, Human
ucugcacuccagccuggcgacugagugagacu

SEQ ID NO: 241678 - RNA, 32 nt, Human
ucugcacuccagccugggugacagagugagag

SEQ ID NO: 241679 - RNA, 24 nt, Human
ucugcacucccacgccuguccucc

SEQ ID NO: 241680 - RNA, 32 nt, Human
ucugcacugcaaccuccaccaggaccaggauc

SEQ ID NO: 241681 - RNA, 32 nt, Human
ucugcacuggagucucacaucuguuagcuuug

SEQ ID NO: 241682 - RNA, 32 nt, Human
ucugcacugggagccucaggagggcucugcuc

SEQ ID NO: 241683 - RNA, 32 nt, Human
ucugcacugguccccucuuuucccuucagucu

SEQ ID NO: 241684 - RNA, 32 nt, Human
ucugcacuguucuuacuuccucuugucccuuu

SEQ ID NO: 241685 - RNA, 32 nt, Human
ucugcacuucugggccagccagcuccaacugc

SEQ ID NO: 241686 - RNA, 32 nt, Human
ucugcacuugccucaccagcucuggcuuuucu

SEQ ID NO: 241687 - RNA, 32 nt, Human
ucugcacuugggaacaaucauucucccccagc

SEQ ID NO: 241688 - RNA, 32 nt, Human
ucugcacuuuagccagccugggucggcaacca

SEQ ID NO: 241689 - RNA, 32 nt, Human
ucugcacuuugggagacugagguggguggauc

SEQ ID NO: 241690 - RNA, 32 nt, Human
ucugcacuuuuccuuaccuccuggccucagau

SEQ ID NO: 241691 - RNA, 32 nt, Human
ucugcacuuuuuccugcaucuuaugcauuaca

SEQ ID NO: 241692 - RNA, 32 nt, Human
ucugcagaaaagcuccagcaggcgcugccuuc

SEQ ID NO: 241693 - RNA, 32 nt, Human
ucugcagaaguauuaucagaguagagcugacu

SEQ ID NO: 241694 - RNA, 32 nt, Human
ucugcagaauccagccccucacuuccuugcuu

SEQ ID NO: 241695 - RNA, 22 nt, Human
ucugcagaauggggcugccugg

SEQ ID NO: 241696 - RNA, 32 nt, Human
ucugcagacacaccugggaggcaucagcacgu

SEQ ID NO: 241697 - RNA, 32 nt, Human
ucugcagaccacacaggaacuugcuucauggc

SEQ ID NO: 241698 - RNA, 32 nt, Human
ucugcagaccagcugaggggaggacuccuggg

SEQ ID NO: 241699 - RNA, 32 nt, Human
ucugcagaccguggcccugucggcagcccacg

SEQ ID NO: 241700 - RNA, 21 nt, Human
ucugcagacuaagucuagcca

SEQ ID NO: 241701 - RNA, 32 nt, Human
ucugcagacuccaaggaggucccaggaagagg

SEQ ID NO: 241702 - RNA, 32 nt, Human
ucugcagacuggcagucgcacacacauuugga

SEQ ID NO: 241703 - RNA, 32 nt, Human
ucugcagagacacaauaaaagccagcagaccc

SEQ ID NO: 241704 - RNA, 32 nt, Human
ucugcagagacacccguuucagccacaucuaa

SEQ ID NO: 241705 - RNA, 32 nt, Human
ucugcagagagagagcgcgagagauggagaug

SEQ ID NO: 241706 - RNA, 32 nt, Human
ucugcagagagggaauugcauguuuguguugu

SEQ ID NO: 241707 - RNA, 32 nt, Human
ucugcagagcacguagagucaccccgcaaagc

SEQ ID NO: 241708 - RNA, 32 nt, Human
ucugcagaggagcuggagaaucaguacugucc

SEQ ID NO: 241709 - RNA, 32 nt, Human
ucugcagaguccaugcugugagcuuccuaccu

SEQ ID NO: 241710 - RNA, 32 nt, Human
ucugcagaguccugugcaccagcucagaggac

SEQ ID NO: 241711 - RNA, 32 nt, Human
ucugcagaucaagauuuucucauuagaacaau

SEQ ID NO: 241712 - RNA, 32 nt, Human
ucugcagaucucggaugcuagcacuugacacu

SEQ ID NO: 241713 - RNA, 32 nt, Human
ucugcagauggaccucucuccgcuagagaugc

SEQ ID NO: 241714 - RNA, 32 nt, Human
ucugcagauggcacugccugggcaccaggaga

SEQ ID NO: 241715 - RNA, 32 nt, Human
ucugcagauuccaaacuggaauaagcucuauc

SEQ ID NO: 241716 - RNA, 32 nt, Human
ucugcagauuccugccuccccacuuugguuca

SEQ ID NO: 241717 - RNA, 32 nt, Human
ucugcagauuucugcauuuucuccucauuaau

SEQ ID NO: 241718 - RNA, 32 nt, Human
ucugcagauuuugguggggaggcgguaauagg

SEQ ID NO: 241719 - RNA, 21 nt, Human
ucugcagcaacucguccugcc

SEQ ID NO: 241720 - RNA, 32 nt, Human
ucugcagcaagcuucuuccuggacauccagac

SEQ ID NO: 241721 - RNA, 32 nt, Human
ucugcagcacuggguuggagagagggcacggg

SEQ ID NO: 241722 - RNA, 32 nt, Human
ucugcagcagaggcagccuaucccauugcaag

SEQ ID NO: 241723 - RNA, 32 nt, Human
ucugcagcagcccccagcgauggucuucagca

SEQ ID NO: 241724 - RNA, 22 nt, Human
ucugcagcagggcucagccuca

SEQ ID NO: 241725 - RNA, 32 nt, Human
ucugcagcauugaaguaugguguguucacgua

SEQ ID NO: 241726 - RNA, 32 nt, Human
ucugcagcauuuuacacuuacugggaaccuua

SEQ ID NO: 241727 - RNA, 32 nt, Human
ucugcagccauccuggacaggccgggguggcg

SEQ ID NO: 241728 - RNA, 21 nt, Human
ucugcagccaugcuucagggu

SEQ ID NO: 241729 - RNA, 32 nt, Human
ucugcagccccagcuacucgggaggcugagau

SEQ ID NO: 241730 - RNA, 18 nt, Human
ucugcagccccgcaggcc

SEQ ID NO: 241731 - RNA, 18 nt, Human
ucugcagccugccagugc

SEQ ID NO: 241732 - RNA, 23 nt, Human
ucugcagccugcccucccuuccc

SEQ ID NO: 241733 - RNA, 21 nt, Human
ucugcagcgugguccaccccg

SEQ ID NO: 241734 - RNA, 32 nt, Human
ucugcagcuguagauucucacugugaaucccu

SEQ ID NO: 241735 - RNA, 32 nt, Human
ucugcagcuguggggacaggagacugagaccc

SEQ ID NO: 241736 - RNA, 32 nt, Human
ucugcaggaaguggcugacuugaugcaaauga

SEQ ID NO: 241737 - RNA, 32 nt, Human
ucugcaggagcaagugaguacugugaacaccu

SEQ ID NO: 241738 - RNA, 32 nt, Human
ucugcaggagccaaagacauagcaauggagaa

SEQ ID NO: 241739 - RNA, 32 nt, Human
ucugcaggauggcaccggaccccugguucucc

SEQ ID NO: 241740 - RNA, 20 nt, Human
ucugcaggcaccgggcuggc

SEQ ID NO: 241741 - RNA, 32 nt, Human
ucugcaggcagccuugcccauucucuaagccu

SEQ ID NO: 241742 - RNA, 23 nt, Human
ucugcaggcaugcccuuccuucc

SEQ ID NO: 241743 - RNA, 21 nt, Human
ucugcaggccacuuaccuucc

SEQ ID NO: 241744 - RNA, 32 nt, Human
ucugcaggcccacucccuggggccgcacccuu

SEQ ID NO: 241745 - RNA, 32 nt, Human
ucugcaggcccagacuguugucaagucggccu

SEQ ID NO: 241746 - RNA, 32 nt, Human
ucugcaggcccaguguagaggcucacaccugu

SEQ ID NO: 241747 - RNA, 32 nt, Human
ucugcaggccccgcccuugccucccaggggcc

SEQ ID NO: 241748 - RNA, 32 nt, Human
ucugcaggcccggaagagagcccucaccagga

SEQ ID NO: 241749 - RNA, 32 nt, Human
ucugcaggcccugcucuugccucccaggggcu

SEQ ID NO: 241750 - RNA, 32 nt, Human
ucugcaggccgagcucuuccucccugcugugu

SEQ ID NO: 241751 - RNA, 22 nt, Human
ucugcaggcuuccuguccuuuu

SEQ ID NO: 241752 - RNA, 24 nt, Human
ucugcaggcuugcagaguucuucu

SEQ ID NO: 241753 - RNA, 32 nt, Human
ucugcagggaaagacuggcaaggaggcucagg

SEQ ID NO: 241754 - RNA, 32 nt, Human
ucugcagggaacaggugcugggggugcagauc

SEQ ID NO: 241755 - RNA, 32 nt, Human
ucugcagggaagucugugacugccuggccaga

SEQ ID NO: 241756 - RNA, 32 nt, Human
ucugcagggagaaggauuccauuuuucuucuc

SEQ ID NO: 241757 - RNA, 32 nt, Human
ucugcagggauccugggcuggaagaaaguuca

SEQ ID NO: 241758 - RNA, 22 nt, Human
ucugcagggcaaggcugucugg

SEQ ID NO: 241759 - RNA, 32 nt, Human
ucugcagggcaggccagaagccugggcacccc

SEQ ID NO: 241760 - RNA, 32 nt, Human
ucugcagggccugcucuugccucccaggggcu

SEQ ID NO: 241761 - RNA, 32 nt, Human
ucugcagggcuggacguggcggcucuugccug

SEQ ID NO: 241762 - RNA, 32 nt, Human
ucugcagggugguccagccuaggugacagggu

SEQ ID NO: 241763 - RNA, 32 nt, Human
ucugcagguggaccagccagcccugaccucca

SEQ ID NO: 241764 - RNA, 21 nt, Human
ucugcagguggcaaaauggca

SEQ ID NO: 241765 - RNA, 32 nt, Human
ucugcaguaccacagaacaggccccaugcuga

SEQ ID NO: 241766 - RNA, 32 nt, Human
ucugcagucagaagaucccuacccaggcuucu

SEQ ID NO: 241767 - RNA, 32 nt, Human
ucugcagucaucaaggcaguucuggcucauua

SEQ ID NO: 241768 - RNA, 32 nt, Human
ucugcagucccaacgucugccucacagcagau

SEQ ID NO: 241769 - RNA, 32 nt, Human
ucugcagucccagcuacucuugaaggcugagc

SEQ ID NO: 241770 - RNA, 32 nt, Human
ucugcaguccuccucagggcccaacaggaccc

SEQ ID NO: 241771 - RNA, 32 nt, Human
ucugcaguccuccucugcucaccccucccuca

SEQ ID NO: 241772 - RNA, 32 nt, Human
ucugcagucgcugcaaccuacccucucucugc

SEQ ID NO: 241773 - RNA, 32 nt, Human
ucugcagugaaaagcuggagcccugauuccua

SEQ ID NO: 241774 - RNA, 32 nt, Human
ucugcagugagcuaugauugcaccacugcacu

SEQ ID NO: 241775 - RNA, 32 nt, Human
ucugcagugcacugcaaccauuguuuccccua

SEQ ID NO: 241776 - RNA, 21 nt, Human
ucugcagugcuccccuggcca

SEQ ID NO: 241777 - RNA, 32 nt, Human
ucugcaguuccuugcuaaucugagcuacuuag

SEQ ID NO: 241778 - RNA, 32 nt, Human
ucugcaguucugaagcucacacauagucuccc

SEQ ID NO: 241779 - RNA, 32 nt, Human
ucugcaguugggggcguggcggggcaggagau

SEQ ID NO: 241780 - RNA, 32 nt, Human
ucugcaguuugcuccagcuaccaguuucuuua

SEQ ID NO: 241781 - RNA, 32 nt, Human
ucugcaguuuuugacuucauagauuaugcuuu

SEQ ID NO: 241782 - RNA, 32 nt, Human
ucugcauaaaugguaaccaguagcucuacuuu

SEQ ID NO: 241783 - RNA, 26 nt, Human
ucugcauaauguucacugccaaacuc

SEQ ID NO: 241784 - RNA, 32 nt, Human
ucugcauacgccaucucugagagccauggagg

SEQ ID NO: 241785 - RNA, 32 nt, Human
ucugcauagacagggucuagauuuuguuaacc

SEQ ID NO: 241786 - RNA, 32 nt, Human
ucugcauaguuucuuucucuuccuucauagau

SEQ ID NO: 241787 - RNA, 32 nt, Human
ucugcauauaugcacauacauacguaaggauc

SEQ ID NO: 241788 - RNA, 32 nt, Human
ucugcauaugcugcuuucucacucagcaucau

SEQ ID NO: 241789 - RNA, 32 nt, Human
ucugcauauucucuggcaaccuugccccauac

SEQ ID NO: 241790 - RNA, 32 nt, Human
ucugcaucaagaguacuguagccugggaaacc

SEQ ID NO: 241791 - RNA, 32 nt, Human
ucugcaucauuucuuaaggcugccuuccucuc

SEQ ID NO: 241792 - RNA, 32 nt, Human
ucugcaucuccggcucaagucacugcagaguc

SEQ ID NO: 241793 - RNA, 32 nt, Human
ucugcaucucucucugaucuagcuagcagugg

SEQ ID NO: 241794 - RNA, 32 nt, Human
ucugcaucuggaaagcugaagacugaagaaag

SEQ ID NO: 241795 - RNA, 32 nt, Human
ucugcaugaacugcucucaaaccaacaaacag

SEQ ID NO: 241796 - RNA, 32 nt, Human
ucugcaugaacugcucucaaaccaacaaauag

SEQ ID NO: 241797 - RNA, 32 nt, Human
ucugcaugcaugcucacccuggcaacaguuga

SEQ ID NO: 241798 - RNA, 32 nt, Human
ucugcauggagccacuccagggacuuuucuuc

SEQ ID NO: 241799 - RNA, 32 nt, Human
ucugcauggaggaaaaaugacuaaggacugag

SEQ ID NO: 241800 - RNA, 32 nt, Human
ucugcauggccaaaucuuucccuuauuucaag

SEQ ID NO: 241801 - RNA, 32 nt, Human
ucugcauggcgaucguggaagcagccaguugu

SEQ ID NO: 241802 - RNA, 32 nt, Human
ucugcauggugcauggccugugcugccuucug

SEQ ID NO: 241803 - RNA, 32 nt, Human
ucugcauggugcauggucugugcugccuucug

SEQ ID NO: 241804 - RNA, 32 nt, Human
ucugcauguaagauagaugacauccuagaaca

SEQ ID NO: 241805 - RNA, 32 nt, Human
ucugcaugugagcccugagagcugcagauguu

SEQ ID NO: 241806 - RNA, 32 nt, Human
ucugcaugugguacuucucuuuucccucaguu

SEQ ID NO: 241807 - RNA, 32 nt, Human
ucugcaugugugugagugugcacaggugagug

SEQ ID NO: 241808 - RNA, 32 nt, Human
ucugcauguuugucugugugucugcguugugu

SEQ ID NO: 241809 - RNA, 32 nt, Human
ucugcauuaagcugcuucucaucacauuauaa

SEQ ID NO: 241810 - RNA, 32 nt, Human
ucugcauuaguauuuuaaggagcacugugaga

SEQ ID NO: 241811 - RNA, 32 nt, Human
ucugcauuaguggggcugagagaugugggggc

SEQ ID NO: 241812 - RNA, 32 nt, Human
ucugcauucccaggagacccagggugauuaaa

SEQ ID NO: 241813 - RNA, 18 nt, Human
ucugcauucccuccuucc

SEQ ID NO: 241814 - RNA, 32 nt, Human
ucugcauucuacauuuucuuuguacuuuucuu

SEQ ID NO: 241815 - RNA, 32 nt, Human
ucugcauucugggaacauguggcuuccugacc

SEQ ID NO: 241816 - RNA, 22 nt, Human
ucugcauuguccccgucuuucc

SEQ ID NO: 241817 - RNA, 23 nt, Human
ucugcauuugcaaggcccggugg

SEQ ID NO: 241818 - RNA, 32 nt, Human
ucugcauuuggucugcugaucauguugccaua

SEQ ID NO: 241819 - RNA, 32 nt, Human
ucugcauuugucucagaacauuuccuuggcug

SEQ ID NO: 241820 - RNA, 32 nt, Human
ucugcauuuguuacaucaucucuucaucuuaa

SEQ ID NO: 241821 - RNA, 32 nt, Human
ucugcauuuuuggauuccacgugcuuagcacc

SEQ ID NO: 241822 - RNA, 32 nt, Human
ucugccaaaagacaauuucuacaguaguuuug

SEQ ID NO: 241823 - RNA, 32 nt, Human
ucugccaaacugggaaccagcagugcuaguaa

SEQ ID NO: 241824 - RNA, 32 nt, Human
ucugccaacgugguguuggaggcuccaccuug

SEQ ID NO: 241825 - RNA, 32 nt, Human
ucugccaagaaucuuccaguuauuagcaaacu

SEQ ID NO: 241826 - RNA, 32 nt, Human
ucugccaaggaucagaacucaugugaaacaaa

SEQ ID NO: 241827 - RNA, 32 nt, Human
ucugccaaggccagggccagcaggacggcagg

SEQ ID NO: 241828 - RNA, 32 nt, Human
ucugccaagggugggggcccacgcggaggcga

SEQ ID NO: 241829 - RNA, 32 nt, Human
ucugccacauagaaggcucucaacaucaugua

SEQ ID NO: 241830 - RNA, 32 nt, Human
ucugccacauccucaaucucuaccggaggaac

SEQ ID NO: 241831 - RNA, 32 nt, Human
ucugccaccaauauguaucuucauacacguuu

SEQ ID NO: 241832 - RNA, 32 nt, Human
ucugccaccacagcccuaccgggagccggaac

SEQ ID NO: 241833 - RNA, 32 nt, Human
ucugccaccagcugacggaaagcagccuucug

SEQ ID NO: 241834 - RNA, 32 nt, Human
ucugccaccagcugcucgcagcccaugccugg

SEQ ID NO: 241835 - RNA, 32 nt, Human
ucugccaccaucaccagcucugucuaagcaau

SEQ ID NO: 241836 - RNA, 32 nt, Human
ucugccaccauggccauugugcagacucugcc

SEQ ID NO: 241837 - RNA, 32 nt, Human
ucugccacccaccugugaacuucacuuugcca

SEQ ID NO: 241838 - RNA, 21 nt, Human
ucugccaccggaaauaccaug

SEQ ID NO: 241839 - RNA, 32 nt, Human
ucugccaccucagacugacacacagccagcug

SEQ ID NO: 241840 - RNA, 32 nt, Human
ucugccaccugacaacauuuuuccucaauuac

SEQ ID NO: 241841 - RNA, 32 nt, Human
ucugccaccugccccguguauccuggcucuca

SEQ ID NO: 241842 - RNA, 21 nt, Human
ucugccacgagcaguuucuca

SEQ ID NO: 241843 - RNA, 32 nt, Human
ucugccacucacacacugcugaguguucagcu

SEQ ID NO: 241844 - RNA, 32 nt, Human
ucugccacucauuuccccaguugguguuucca

SEQ ID NO: 241845 - RNA, 32 nt, Human
ucugccacugacccagugacugugcuggugau

SEQ ID NO: 241846 - RNA, 32 nt, Human
ucugccacugcacuccagccuggcgacagagc

SEQ ID NO: 241847 - RNA, 32 nt, Human
ucugccacuggcaauguccuguccugaacauu

SEQ ID NO: 241848 - RNA, 32 nt, Human
ucugccacugugcccaagccuggguaucacag

SEQ ID NO: 241849 - RNA, 32 nt, Human
ucugccacuucucuuagacuccuugucugcaa

SEQ ID NO: 241850 - RNA, 32 nt, Human
ucugccagagguggagggaggguuggggucgc

SEQ ID NO: 241851 - RNA, 21 nt, Human
ucugccagauaaguaccgcca

SEQ ID NO: 241852 - RNA, 32 nt, Human
ucugccagaucuucccaucuuguggcaugugg

SEQ ID NO: 241853 - RNA, 21 nt, Human
ucugccagcccccaccugcca

SEQ ID NO: 241854 - RNA, 32 nt, Human
ucugccagccccgggaacagcagaggcggcgg

SEQ ID NO: 241855 - RNA, 32 nt, Human
ucugccagccuccuccuccccugccagccucu

SEQ ID NO: 241856 - RNA, 32 nt, Human
ucugccagccuccuccuucucccgcccuccuc

SEQ ID NO: 241857 - RNA, 32 nt, Human
ucugccagccugggcaacauagugagacuuca

SEQ ID NO: 241858 - RNA, 32 nt, Human
ucugccagccugggguccuaagcgaugagcag

SEQ ID NO: 241859 - RNA, 32 nt, Human
ucugccagcguggcagagcaugucuuggaacc

SEQ ID NO: 241860 - RNA, 22 nt, Human
ucugccagcguuucucaccaca

SEQ ID NO: 241861 - RNA, 32 nt, Human
ucugccagcucacaaggggaggcugcaguggg

SEQ ID NO: 241862 - RNA, 32 nt, Human
ucugccaggacugggaagggaggcaggaggcu

SEQ ID NO: 241863 - RNA, 32 nt, Human
ucugccaggacuugcugcagagcugcugagag

SEQ ID NO: 241864 - RNA, 19 nt, Human
ucugccaggaucaacugcc

SEQ ID NO: 241865 - RNA, 23 nt, Human
ucugccaggauccuccgagguca

SEQ ID NO: 241866 - RNA, 32 nt, Human
ucugccaggcucugcccugcccagugaccaac

SEQ ID NO: 241867 - RNA, 32 nt, Human
ucugccaggcugucccgugcccugcucggugg

SEQ ID NO: 241868 - RNA, 32 nt, Human
ucugccagggcagcaggcaugccacaacuccu

SEQ ID NO: 241869 - RNA, 22 nt, Human
ucugccaggucucaaaaauuca

SEQ ID NO: 241870 - RNA, 32 nt, Human
ucugccagguggggcgggaggcuucugaugcu

SEQ ID NO: 241871 - RNA, 32 nt, Human
ucugccaguuauugacacagcucucuuuguaa

SEQ ID NO: 241872 - RNA, 32 nt, Human
ucugccauccacccucauuuucccuuuagcaa

SEQ ID NO: 241873 - RNA, 32 nt, Human
ucugccauccacuugaggguauugagagccag

SEQ ID NO: 241874 - RNA, 32 nt, Human
ucugccauccauaagguaaauguaauacaucu

SEQ ID NO: 241875 - RNA, 32 nt, Human
ucugccaucccccucccucccugggcccggcc

SEQ ID NO: 241876 - RNA, 18 nt, Human
ucugccauccuugcuaag

SEQ ID NO: 241877 - RNA, 32 nt, Human
ucugccaucucucuccuccuuuuucuucagcc

SEQ ID NO: 241878 - RNA, 32 nt, Human
ucugccaucuucccucccacaauuagaguugu

SEQ ID NO: 241879 - RNA, 23 nt, Human
ucugccaugaacuggaggccagg

SEQ ID NO: 241880 - RNA, 32 nt, Human
ucugccaugagacuagagguugcuugagaaca

SEQ ID NO: 241881 - RNA, 32 nt, Human
ucugccaugaggccauuuucagacaaguuaaa

SEQ ID NO: 241882 - RNA, 22 nt, Human
ucugccauucauucuuguuaaa

SEQ ID NO: 241883 - RNA, 32 nt, Human
ucugccauugauguccagccucugacaugcuc

SEQ ID NO: 241884 - RNA, 32 nt, Human
ucugccauuucagaccuuuugcugcuaccugc

SEQ ID NO: 241885 - RNA, 21 nt, Human
ucugcccaaaagaugcugcuu

SEQ ID NO: 241886 - RNA, 32 nt, Human
ucugcccaacagcaacaacaacuccagcagcu

SEQ ID NO: 241887 - RNA, 32 nt, Human
ucugcccaaccagguugcaguagcaguggaug

SEQ ID NO: 241888 - RNA, 32 nt, Human
ucugcccaagcccugucuuaaggcccaggggg

SEQ ID NO: 241889 - RNA, 32 nt, Human
ucugcccaagcuccucucagaguccagucccc

SEQ ID NO: 241890 - RNA, 32 nt, Human
ucugcccacacccucacucacacucagucucc

SEQ ID NO: 241891 - RNA, 32 nt, Human
ucugcccacagccucagcauuucuuggagcag

SEQ ID NO: 241892 - RNA, 32 nt, Human
ucugcccaccucuucucuucugcuuccauauu

SEQ ID NO: 241893 - RNA, 32 nt, Human
ucugcccaccuggggucucucucccuaccucc

SEQ ID NO: 241894 - RNA, 32 nt, Human
ucugcccaccuugcccugugcaucucuuccug

SEQ ID NO: 241895 - RNA, 32 nt, Human
ucugcccacuccacaaccucaggucguggaga

SEQ ID NO: 241896 - RNA, 32 nt, Human
ucugcccacugcagccauacugugaccuccag

SEQ ID NO: 241897 - RNA, 32 nt, Human
ucugcccacugcagcucucugcagucuccggc

SEQ ID NO: 241898 - RNA, 32 nt, Human
ucugcccacuucggacccccaaagugcuggga

SEQ ID NO: 241899 - RNA, 32 nt, Human
ucugcccagaguggccaugagcaccagaacag

SEQ ID NO: 241900 - RNA, 32 nt, Human
ucugcccagauccccucucuuuucucggaaaa

SEQ ID NO: 241901 - RNA, 32 nt, Human
ucugcccagcaaacccaggaagguguggcguc

SEQ ID NO: 241902 - RNA, 32 nt, Human
ucugcccagccacccagcugugugagaugagc

SEQ ID NO: 241903 - RNA, 24 nt, Human
ucugcccagccagcuacuccagca

SEQ ID NO: 241904 - RNA, 32 nt, Human
ucugcccagccaucugcugguggcaccucucc

SEQ ID NO: 241905 - RNA, 32 nt, Human
ucugcccaggaacucgcaccugugcuggagcc

SEQ ID NO: 241906 - RNA, 32 nt, Human
ucugcccaggcccggcuccacccugcaccuca

SEQ ID NO: 241907 - RNA, 32 nt, Human
ucugcccaggcugccagccucacacagaucuu

SEQ ID NO: 241908 - RNA, 32 nt, Human
ucugcccagggagccucaggagcaggaugagu

SEQ ID NO: 241909 - RNA, 32 nt, Human
ucugcccagggagggagaaggaagagggggag

SEQ ID NO: 241910 - RNA, 32 nt, Human
ucugcccagggugggugggacugagcaggaug

SEQ ID NO: 241911 - RNA, 32 nt, Human
ucugcccaggguugacuccaccaggagcggcu

SEQ ID NO: 241912 - RNA, 22 nt, Human
ucugcccaguuguucaaccuca

SEQ ID NO: 241913 - RNA, 32 nt, Human
ucugcccaucccucuucauucacacacaguuc

SEQ ID NO: 241914 - RNA, 32 nt, Human
ucugcccaugccaggagccagcugugugacca

SEQ ID NO: 241915 - RNA, 32 nt, Human
ucugcccauggccacagggugcagagaggcag

SEQ ID NO: 241916 - RNA, 32 nt, Human
ucugccccaagagccaagagggguggaaagga

SEQ ID NO: 241917 - RNA, 32 nt, Human
ucugccccacagucuccggccucuccagccuc

SEQ ID NO: 241918 - RNA, 32 nt, Human
ucugccccacaucugggcaagcuaagaaagcc

SEQ ID NO: 241919 - RNA, 32 nt, Human
ucugccccacccacuuccuccccaccaccugu

SEQ ID NO: 241920 - RNA, 32 nt, Human
ucugccccacucuugccauuuccccaggcccc

SEQ ID NO: 241921 - RNA, 32 nt, Human
ucugccccagaggaaggagcuguaguguccug

SEQ ID NO: 241922 - RNA, 32 nt, Human
ucugccccagcccuggggauucauccugccca

SEQ ID NO: 241923 - RNA, 32 nt, Human
ucugccccaggaggccagaguaaaaagugcug

SEQ ID NO: 241924 - RNA, 32 nt, Human
ucugccccaguaauuuaccaaagguagcaaaa

SEQ ID NO: 241925 - RNA, 25 nt, Human
ucugccccagugccuuuguccuucc

SEQ ID NO: 241926 - RNA, 32 nt, Human
ucugccccaugugcccuugaagcugccccaca

SEQ ID NO: 241927 - RNA, 22 nt, Human
ucugcccccacgccuguccuuc

SEQ ID NO: 241928 - RNA, 32 nt, Human
ucugcccccaggacaggagcuugacggaugaa

SEQ ID NO: 241929 - RNA, 32 nt, Human
ucugcccccuaccuucccuccuggaaccacac

SEQ ID NO: 241930 - RNA, 32 nt, Human
ucugcccccugccccucccugccccagguucc

SEQ ID NO: 241931 - RNA, 32 nt, Human
ucugccccguccaucucuuucccuucaucuua

SEQ ID NO: 241932 - RNA, 18 nt, Human
ucugccccucacuuccuu

SEQ ID NO: 241933 - RNA, 32 nt, Human
ucugccccuccagacccagggcaugguccugc

SEQ ID NO: 241934 - RNA, 32 nt, Human
ucugccccuccaggcccagggcaugguccugc

SEQ ID NO: 241935 - RNA, 32 nt, Human
ucugccccucccccuggcuucuuucucuuggg

SEQ ID NO: 241936 - RNA, 32 nt, Human
ucugccccuccuccuuuucuguccuuggccau

SEQ ID NO: 241937 - RNA, 32 nt, Human
ucugccccugaucacucccagcacuccccuug

SEQ ID NO: 241938 - RNA, 22 nt, Human
ucugccccugcccaggcugcca

SEQ ID NO: 241939 - RNA, 32 nt, Human
ucugccccugcucugcccucccuggcuccugg

SEQ ID NO: 241940 - RNA, 32 nt, Human
ucugccccugggcccagucucuccucggaggc

SEQ ID NO: 241941 - RNA, 32 nt, Human
ucugccccugugaacacccaucugcaguaucc

SEQ ID NO: 241942 - RNA, 21 nt, Human
ucugccccugugauugggcca

SEQ ID NO: 241943 - RNA, 32 nt, Human
ucugccccuguguuccccuuggguuucuguga

SEQ ID NO: 241944 - RNA, 32 nt, Human
ucugccccuuccucucugccccaaacucuucc

SEQ ID NO: 241945 - RNA, 24 nt, Human
ucugccccuucgaaaugaggcagu

SEQ ID NO: 241946 - RNA, 32 nt, Human
ucugccccuucggaccucgucucccaucuaca

SEQ ID NO: 241947 - RNA, 32 nt, Human
ucugccccuucuuuacccuucuuccaauuuuu

SEQ ID NO: 241948 - RNA, 24 nt, Human
ucugcccgccuuucccauccugcu

SEQ ID NO: 241949 - RNA, 32 nt, Human
ucugcccgcucgacuccuccgcccgggccgcu

SEQ ID NO: 241950 - RNA, 32 nt, Human
ucugcccgcugccucuugucuagcugcuguca

SEQ ID NO: 241951 - RNA, 32 nt, Human
ucugcccggcccagcaccaugcacacgcuugu

SEQ ID NO: 241952 - RNA, 32 nt, Human
ucugcccggcucccagugucugcccagcccuc

SEQ ID NO: 241953 - RNA, 17 nt, Human
ucugcccgggcgccggu

SEQ ID NO: 241954 - RNA, 32 nt, Human
ucugcccucaccaugagccucuggcagccccu

SEQ ID NO: 241955 - RNA, 32 nt, Human
ucugcccucaccucugugcccagccuggaaac

SEQ ID NO: 241956 - RNA, 32 nt, Human
ucugcccucccuucauuguacuuuaucauuaa

SEQ ID NO: 241957 - RNA, 32 nt, Human
ucugcccuccucacccucagggacaccacucg

SEQ ID NO: 241958 - RNA, 21 nt, Human
ucugcccucggauguccgacc

SEQ ID NO: 241959 - RNA, 32 nt, Human
ucugcccucuacucgugccaggcccacuugcc

SEQ ID NO: 241960 - RNA, 32 nt, Human
ucugcccucuacugaugagacuuccugcugcc

SEQ ID NO: 241961 - RNA, 32 nt, Human
ucugcccucuccccaccccuuccaaugagcuc

SEQ ID NO: 241962 - RNA, 32 nt, Human
ucugcccucucuccuaccuccaccuucucaga

SEQ ID NO: 241963 - RNA, 32 nt, Human
ucugcccucugcuccguucccugggggcuggg

SEQ ID NO: 241964 - RNA, 32 nt, Human
ucugcccugaaccaaaccuaauuguccugguc

SEQ ID NO: 241965 - RNA, 32 nt, Human
ucugcccugagaucugggcauaaaguggauga

SEQ ID NO: 241966 - RNA, 32 nt, Human
ucugcccugaguauugaggugcaggcuucuuc

SEQ ID NO: 241967 - RNA, 32 nt, Human
ucugcccugcagcugaaacuuggccaucacau

SEQ ID NO: 241968 - RNA, 32 nt, Human
ucugcccugcccacccagagccccucuuugug

SEQ ID NO: 241969 - RNA, 19 nt, Human
ucugcccugccccaccccc

SEQ ID NO: 241970 - RNA, 20 nt, Human
ucugcccugccccccacccc

SEQ ID NO: 241971 - RNA, 32 nt, Human
ucugcccugcccuccagccugggacaauaaaa

SEQ ID NO: 241972 - RNA, 22 nt, Human
ucugcccugcccugcacccccc

SEQ ID NO: 241973 - RNA, 32 nt, Human
ucugcccugccuccuccuuucguuguaggagg

SEQ ID NO: 241974 - RNA, 32 nt, Human
ucugcccugccugcccacaucccugccuccug

SEQ ID NO: 241975 - RNA, 32 nt, Human
ucugcccugccugccucccugcaccugcggcc

SEQ ID NO: 241976 - RNA, 21 nt, Human
ucugcccugcgcguucuuccc

SEQ ID NO: 241977 - RNA, 22 nt, Human
ucugcccugcgcuccuucuccc

SEQ ID NO: 241978 - RNA, 32 nt, Human
ucugcccuggaaaacccaaagcaaguagugau

SEQ ID NO: 241979 - RNA, 32 nt, Human
ucugcccuggacaaggugcugaggugcauugu

SEQ ID NO: 241980 - RNA, 32 nt, Human
ucugcccuggaccugugacacucuggacuauu

SEQ ID NO: 241981 - RNA, 32 nt, Human
ucugcccuggaccugugacauucuggacuauu

SEQ ID NO: 241982 - RNA, 18 nt, Human
ucugcccuggacuuuccc

SEQ ID NO: 241983 - RNA, 32 nt, Human
ucugcccuggccucuccugcuccagggcagcc

SEQ ID NO: 241984 - RNA, 19 nt, Human
ucugcccugggcagacagg

SEQ ID NO: 241985 - RNA, 32 nt, Human
ucugcccugggccuucccagggagacaauagu

SEQ ID NO: 241986 - RNA, 32 nt, Human
ucugcccuguaaaaaucagacucggaaccgau

SEQ ID NO: 241987 - RNA, 32 nt, Human
ucugcccugucugggagguugaggccacagug

SEQ ID NO: 241988 - RNA, 19 nt, Human
ucugcccuguguacuuccc

SEQ ID NO: 241989 - RNA, 32 nt, Human
ucugcccuuaacuggcuggaacugguucauuc

SEQ ID NO: 241990 - RNA, 32 nt, Human
ucugcccuuacacccaugacugaggaccaaug

SEQ ID NO: 241991 - RNA, 20 nt, Human
ucugcccuucacacucuccu

SEQ ID NO: 241992 - RNA, 32 nt, Human
ucugcccuucacuuagcaccugccucagcccc

SEQ ID NO: 241993 - RNA, 32 nt, Human
ucugcccuucagccuccuccagcugggcccug

SEQ ID NO: 241994 - RNA, 27 nt, Human
ucugcccuucuaagucauagacuaggu

SEQ ID NO: 241995 - RNA, 32 nt, Human
ucugcccuugggaggcggguggaggagcagca

SEQ ID NO: 241996 - RNA, 32 nt, Human
ucugcccuuggguucaagaaccagacugugga

SEQ ID NO: 241997 - RNA, 19 nt, Human
ucugcccuuuccccagcca

SEQ ID NO: 241998 - RNA, 32 nt, Human
ucugccgagacugccgugcccauugcucgccu

SEQ ID NO: 241999 - RNA, 32 nt, Human
ucugccgagagcagcuggaggacagcugagcu

SEQ ID NO: 242000 - RNA, 32 nt, Human
ucugccgaguagcugggauuacaggcaugcgc

SEQ ID NO: 242001 - RNA, 32 nt, Human
ucugccgcagacauggagaaacucagcgcgcu

SEQ ID NO: 242002 - RNA, 32 nt, Human
ucugccgcagcccugcagagggcacagaaaau

SEQ ID NO: 242003 - RNA, 20 nt, Human
ucugccgccguggcugcaag

SEQ ID NO: 242004 - RNA, 23 nt, Human
ucugccgccucuugggacugggg

SEQ ID NO: 242005 - RNA, 18 nt, Human
ucugccgcgggggcgcgg

SEQ ID NO: 242006 - RNA, 32 nt, Human
ucugccgcucugucuucucucuucaguuuucu

SEQ ID NO: 242007 - RNA, 32 nt, Human
ucugccgcugccgccucagcugcuuuggccca

SEQ ID NO: 242008 - RNA, 32 nt, Human
ucugccggacgcguguuccugccaccaggugc

SEQ ID NO: 242009 - RNA, 32 nt, Human
ucugccggaugucuuucuuuaccuaccccuca

SEQ ID NO: 242010 - RNA, 32 nt, Human
ucugccggcauccucgaaagcagcggguuugg

SEQ ID NO: 242011 - RNA, 32 nt, Human
ucugccggccggugguuggaggccgcggcggc

SEQ ID NO: 242012 - RNA, 32 nt, Human
ucugccggcucccgcccagccuguguggaaag

SEQ ID NO: 242013 - RNA, 32 nt, Human
ucugccggggaggaggaggaggaggaagagga

SEQ ID NO: 242014 - RNA, 32 nt, Human
ucugccggggccugcugacugaaggaauuugu

SEQ ID NO: 242015 - RNA, 32 nt, Human
ucugccggguccucccagcccuugccacacag

SEQ ID NO: 242016 - RNA, 32 nt, Human
ucugccggugagugggaagugggugccuugcg

SEQ ID NO: 242017 - RNA, 32 nt, Human
ucugccgguuucuugucccagcagguuggggg

SEQ ID NO: 242018 - RNA, 32 nt, Human
ucugccguccgggcccugccaggcuugccagg

SEQ ID NO: 242019 - RNA, 32 nt, Human
ucugccguggccugggcugccugcgcccaccc

SEQ ID NO: 242020 - RNA, 32 nt, Human
ucugccguucuucuccacuuggcuccagcugc

SEQ ID NO: 242021 - RNA, 18 nt, Human
ucugccguuuuccuuucc

SEQ ID NO: 242022 - RNA, 32 nt, Human
ucugccuaccugccagguucaguucuuuuaag

SEQ ID NO: 242023 - RNA, 32 nt, Human
ucugccuacuauuuuggucugacauuuuugua

SEQ ID NO: 242024 - RNA, 32 nt, Human
ucugccuagcuggugagggcauggggaaagag

SEQ ID NO: 242025 - RNA, 32 nt, Human
ucugccuagucucugugcccugucuuugugug

SEQ ID NO: 242026 - RNA, 32 nt, Human
ucugccucaaaaccagcccuaacuggacuacu

SEQ ID NO: 242027 - RNA, 32 nt, Human
ucugccucaagcgauccucccaucucagccuc

SEQ ID NO: 242028 - RNA, 32 nt, Human
ucugccucacauagcuuacaagccagcuggag

SEQ ID NO: 242029 - RNA, 23 nt, Human
ucugccucaccaaacacaugcua

SEQ ID NO: 242030 - RNA, 32 nt, Human
ucugccucagacuggagggggcucagcuccug

SEQ ID NO: 242031 - RNA, 32 nt, Human
ucugccucagccaguagcgcagucucggccuc

SEQ ID NO: 242032 - RNA, 32 nt, Human
ucugccucauccuccuccucauucagaccaau

SEQ ID NO: 242033 - RNA, 32 nt, Human
ucugccuccaaagugcuggauuacaggcugag

SEQ ID NO: 242034 - RNA, 32 nt, Human
ucugccuccaucucagucacacaugucuagcc

SEQ ID NO: 242035 - RNA, 32 nt, Human
ucugccuccaugucaccaccuuugaaggacug

SEQ ID NO: 242036 - RNA, 32 nt, Human
ucugccucccaaaaugcugggauuacaggcgu

SEQ ID NO: 242037 - RNA, 32 nt, Human
ucugccucccaaagggcugggacugcaggugc

SEQ ID NO: 242038 - RNA, 32 nt, Human
ucugccucccaaagugcuaggauuacaggcgu

SEQ ID NO: 242039 - RNA, 32 nt, Human
ucugccucccaaagugcugggaucacaggcau

SEQ ID NO: 242040 - RNA, 32 nt, Human
ucugccucccaaagugcugggauuacaggcau

SEQ ID NO: 242041 - RNA, 32 nt, Human
ucugccucccaaagugcugggauuacaggcgu

SEQ ID NO: 242042 - RNA, 32 nt, Human
ucugccucccaaagugcugggauuacaggugu

SEQ ID NO: 242043 - RNA, 32 nt, Human
ucugccucccaaagugcugugauuacaggccu

SEQ ID NO: 242044 - RNA, 32 nt, Human
ucugccucccaaggugcugggauugcagacgu

SEQ ID NO: 242045 - RNA, 32 nt, Human
ucugccucccaaguagcugggauuaaggcgcc

SEQ ID NO: 242046 - RNA, 32 nt, Human
ucugccucccaaguagcugggauuacaggcac

SEQ ID NO: 242047 - RNA, 32 nt, Human
ucugccucccauucugaccacccuucucauuc

SEQ ID NO: 242048 - RNA, 20 nt, Human
ucugccucccccaccccuua

SEQ ID NO: 242049 - RNA, 32 nt, Human
ucugccucccgaguagcugggauuacaggcau

SEQ ID NO: 242050 - RNA, 24 nt, Human
ucugccucccuuuuuguuuuccca

SEQ ID NO: 242051 - RNA, 32 nt, Human
ucugccuccguccccgcccuccaggcuucucg

SEQ ID NO: 242052 - RNA, 32 nt, Human
ucugccuccuaaagugcugggauucugggccu

SEQ ID NO: 242053 - RNA, 20 nt, Human
ucugccuccucccccuuccc

SEQ ID NO: 242054 - RNA, 32 nt, Human
ucugccuccuccucccaugagguggggagagg

SEQ ID NO: 242055 - RNA, 32 nt, Human
ucugccuccuccugccugucugcacuauuccu

SEQ ID NO: 242056 - RNA, 32 nt, Human
ucugccuccucuuccacacauccugggucagc

SEQ ID NO: 242057 - RNA, 32 nt, Human
ucugccuccugaggcagguuuucagagagaaa

SEQ ID NO: 242058 - RNA, 32 nt, Human
ucugccuccugaguagcugggauuacuggcac

SEQ ID NO: 242059 - RNA, 19 nt, Human
ucugccuccugguuuccuu

SEQ ID NO: 242060 - RNA, 32 nt, Human
ucugccuccuuggccccacauuucugcaaaca

SEQ ID NO: 242061 - RNA, 21 nt, Human
ucugccucuagccaaaugcua

SEQ ID NO: 242062 - RNA, 32 nt, Human
ucugccucucccucccuuccucaggcaucaga

SEQ ID NO: 242063 - RNA, 32 nt, Human
ucugccucuccucaaaugcugugugcugcaau

SEQ ID NO: 242064 - RNA, 32 nt, Human
ucugccucuccugucaccccugcccaccaccc

SEQ ID NO: 242065 - RNA, 32 nt, Human
ucugccucucugcuucuucaucuucuuauaau

SEQ ID NO: 242066 - RNA, 26 nt, Human
ucugccucugccucauauucuuguua

SEQ ID NO: 242067 - RNA, 32 nt, Human
ucugccucugcugcacacacaggcaccagcag

SEQ ID NO: 242068 - RNA, 32 nt, Human
ucugccucugcugccaggcagggaagggcccc

SEQ ID NO: 242069 - RNA, 32 nt, Human
ucugccucuguaccugcagcucugcucucggg

SEQ ID NO: 242070 - RNA, 32 nt, Human
ucugccucuguucgcauaguaagaaggaguga

SEQ ID NO: 242071 - RNA, 32 nt, Human
ucugccucuuggcugcuuccaguucccgccau

SEQ ID NO: 242072 - RNA, 32 nt, Human
ucugccucuugggucuuccucccaggccuugu

SEQ ID NO: 242073 - RNA, 28 nt, Human
ucugccucuuuuaggucagaguaugcua

SEQ ID NO: 242074 - RNA, 32 nt, Human
ucugccucuuuucucuccccagccugcccugu

SEQ ID NO: 242075 - RNA, 32 nt, Human
ucugccugaacagccccuucucucccuccacc

SEQ ID NO: 242076 - RNA, 32 nt, Human
ucugccugcagcugggccucugccucauccug

SEQ ID NO: 242077 - RNA, 32 nt, Human
ucugccugccaagaagacacagugagaggggu

SEQ ID NO: 242078 - RNA, 32 nt, Human
ucugccugcccagcaucaugaagggccuugca

SEQ ID NO: 242079 - RNA, 18 nt, Human
ucugccugcccugaaagu

SEQ ID NO: 242080 - RNA, 32 nt, Human
ucugccugcccuuuguccuccugcugccagua

SEQ ID NO: 242081 - RNA, 32 nt, Human
ucugccugccgccugccugccugccacugagg

SEQ ID NO: 242082 - RNA, 32 nt, Human
ucugccugccuaaccagccuuucauaaaauuu

SEQ ID NO: 242083 - RNA, 31 nt, Human
ucugccugccucucagcuugcuucagaaaau

SEQ ID NO: 242084 - RNA, 32 nt, Human
ucugccugccuuccugccguccuuccuucuuc

SEQ ID NO: 242085 - RNA, 18 nt, Human
ucugccugcucagcucca

SEQ ID NO: 242086 - RNA, 32 nt, Human
ucugccugcuccucucccuccuaaggaaaagg

SEQ ID NO: 242087 - RNA, 32 nt, Human
ucugccuggaaacuuugacaugguucauguuu

SEQ ID NO: 242088 - RNA, 32 nt, Human
ucugccuggaaccuggcucgugcugugaccag

SEQ ID NO: 242089 - RNA, 32 nt, Human
ucugccuggagugucggauccugugaguaggc

SEQ ID NO: 242090 - RNA, 20 nt, Human
ucugccuggaucccccgggc

SEQ ID NO: 242091 - RNA, 32 nt, Human
ucugccuggcccucggaccccucugccugccc

SEQ ID NO: 242092 - RNA, 19 nt, Human
ucugccuggcgcggcuaca

SEQ ID NO: 242093 - RNA, 32 nt, Human
ucugccuggcucuucuccacuggaccagggag

SEQ ID NO: 242094 - RNA, 29 nt, Human
ucugccugggccucacugacagccugcag

SEQ ID NO: 242095 - RNA, 32 nt, Human
ucugccuggucugagggugcagccagggcaca

SEQ ID NO: 242096 - RNA, 32 nt, Human
ucugccuguagucccagcuacucgggaggcug

SEQ ID NO: 242097 - RNA, 20 nt, Human
ucugccuguccggggcacca

SEQ ID NO: 242098 - RNA, 32 nt, Human
ucugccugugcacggccagcugcaucuacuca

SEQ ID NO: 242099 - RNA, 32 nt, Human
ucugccugugcagccccaccucaagggccaug

SEQ ID NO: 242100 - RNA, 32 nt, Human
ucugccuguggguggucacgggagggugugag

SEQ ID NO: 242101 - RNA, 32 nt, Human
ucugccuguggucccagcuacucgggaggcug

SEQ ID NO: 242102 - RNA, 21 nt, Human
ucugccuguguccccaccacu

SEQ ID NO: 242103 - RNA, 32 nt, Human
ucugccugugugugugcacucgugucgcgccu

SEQ ID NO: 242104 - RNA, 32 nt, Human
ucugccuguuacugcugcucccucccuggucc

SEQ ID NO: 242105 - RNA, 32 nt, Human
ucugccuguugguugugaucugugggcaccag

SEQ ID NO: 242106 - RNA, 32 nt, Human
ucugccuguuucccuccucccuuccuuuccac

SEQ ID NO: 242107 - RNA, 32 nt, Human
ucugccuuaauuaacuuaaagacugauuuuaa

SEQ ID NO: 242108 - RNA, 32 nt, Human
ucugccuuaguguguguuauugccauuucaau

SEQ ID NO: 242109 - RNA, 32 nt, Human
ucugccuucaaccuuaagauuuaggaaguucu

SEQ ID NO: 242110 - RNA, 32 nt, Human
ucugccuucaaggagcuugcaguauagugaga

SEQ ID NO: 242111 - RNA, 25 nt, Human
ucugccuucaugcaccuguccuuuc

SEQ ID NO: 242112 - RNA, 32 nt, Human
ucugccuuccaaggaagaaggggaagaaaagg

SEQ ID NO: 242113 - RNA, 32 nt, Human
ucugccuuccagaaucucucucuggcuucuca

SEQ ID NO: 242114 - RNA, 22 nt, Human
ucugccuuccccagagcaggug

SEQ ID NO: 242115 - RNA, 32 nt, Human
ucugccuuccucccaagaaacagcagcucaaa

SEQ ID NO: 242116 - RNA, 32 nt, Human
ucugccuuccugagucccuuccagucaugugu

SEQ ID NO: 242117 - RNA, 23 nt, Human
ucugccuucucccacaccccuua

SEQ ID NO: 242118 - RNA, 32 nt, Human
ucugccuucuccccuuacccucccgccuccca

SEQ ID NO: 242119 - RNA, 32 nt, Human
ucugccuucucccucuucucuugccugaucau

SEQ ID NO: 242120 - RNA, 32 nt, Human
ucugccuucucccuuuacccucccgccuccca

SEQ ID NO: 242121 - RNA, 20 nt, Human
ucugccuugaccacuuuccc

SEQ ID NO: 242122 - RNA, 32 nt, Human
ucugccuugaguagcugggacuucaggugcac

SEQ ID NO: 242123 - RNA, 32 nt, Human
ucugccuugcacucuuugcugauggcuguggg

SEQ ID NO: 242124 - RNA, 32 nt, Human
ucugccuugccucaagaaccauccccugcaga

SEQ ID NO: 242125 - RNA, 32 nt, Human
ucugccuugccuggaggcagaaggagggggcu

SEQ ID NO: 242126 - RNA, 32 nt, Human
ucugccuuuaaaauccuuccucuuucuuccuc

SEQ ID NO: 242127 - RNA, 32 nt, Human
ucugccuuucaguucugaacagcuuccagcau

SEQ ID NO: 242128 - RNA, 32 nt, Human
ucugccuuuccuauuuguuccaguuuuugcuu

SEQ ID NO: 242129 - RNA, 23 nt, Human
ucugccuuucuaccgaccaugug

SEQ ID NO: 242130 - RNA, 19 nt, Human
ucugccuuugcauuuccuu

SEQ ID NO: 242131 - RNA, 22 nt, Human
ucugccuuugcugccacugcca

SEQ ID NO: 242132 - RNA, 32 nt, Human
ucugccuuuguagagcucugagcgcccacucu

SEQ ID NO: 242133 - RNA, 32 nt, Human
ucugccuuuguauaaagaaacagccucugaaa

SEQ ID NO: 242134 - RNA, 32 nt, Human
ucugccuuuucuguaaaaugcauggacugagg

SEQ ID NO: 242135 - RNA, 32 nt, Human
ucugccuuuuugggaaagagacaggaaagauu

SEQ ID NO: 242136 - RNA, 32 nt, Human
ucugcgagccccugcacuccauccugcugacc

SEQ ID NO: 242137 - RNA, 32 nt, Human
ucugcgaugccggccuuccguuccucugggag

SEQ ID NO: 242138 - RNA, 22 nt, Human
ucugcgccacuuguccgcuuca

SEQ ID NO: 242139 - RNA, 32 nt, Human
ucugcgcccaggauggagugcaguggcaugau

SEQ ID NO: 242140 - RNA, 32 nt, Human
ucugcgccccggauugccuggccagcaccacg

SEQ ID NO: 242141 - RNA, 32 nt, Human
ucugcgcccugccuaccuguccaggggugggg

SEQ ID NO: 242142 - RNA, 32 nt, Human
ucugcgccgaagguggaggccgaagugagccu

SEQ ID NO: 242143 - RNA, 32 nt, Human
ucugcgccgcagcugccgcccccgccucuuug

SEQ ID NO: 242144 - RNA, 32 nt, Human
ucugcgcgauaucaauacuggcuauuuucucu

SEQ ID NO: 242145 - RNA, 24 nt, Human
ucugcgcgggaguggggggcgcgg

SEQ ID NO: 242146 - RNA, 32 nt, Human
ucugcgcucauuucauccucuggcuuccucac

SEQ ID NO: 242147 - RNA, 32 nt, Human
ucugcgcucccaggccggcaucgagugucauc

SEQ ID NO: 242148 - RNA, 22 nt, Human
ucugcgcugagcagaaccagcu

SEQ ID NO: 242149 - RNA, 32 nt, Human
ucugcgcugccuggcagccguguguggcugug

SEQ ID NO: 242150 - RNA, 32 nt, Human
ucugcggaaggugggaggaggcagacacccug

SEQ ID NO: 242151 - RNA, 21 nt, Human
ucugcggaccccagcugugag

SEQ ID NO: 242152 - RNA, 32 nt, Human
ucugcggaggaggucaccugagcucacaggac

SEQ ID NO: 242153 - RNA, 32 nt, Human
ucugcggagggugagacugagguggcugcagu

SEQ ID NO: 242154 - RNA, 32 nt, Human
ucugcggagguggaaguuggggagcuuugagg

SEQ ID NO: 242155 - RNA, 32 nt, Human
ucugcggaucuucugguugaaccacguggcca

SEQ ID NO: 242156 - RNA, 22 nt, Human
ucugcggcaagggcuucaccca

SEQ ID NO: 242157 - RNA, 32 nt, Human
ucugcggccaggaagugcuggucauggagcaa

SEQ ID NO: 242158 - RNA, 32 nt, Human
ucugcggcccggggcuggagcgcagcgggaag

SEQ ID NO: 242159 - RNA, 32 nt, Human
ucugcggccgcagcagcacuuuuugcacaguc

SEQ ID NO: 242160 - RNA, 18 nt, Human
ucugcggccugcagagca

SEQ ID NO: 242161 - RNA, 32 nt, Human
ucugcggcgggccgcguccccgcugagccucg

SEQ ID NO: 242162 - RNA, 32 nt, Human
ucugcggcucucuccaccugccgaccugccgg

SEQ ID NO: 242163 - RNA, 32 nt, Human
ucugcgggcccagcuccugccucccaguggcc

SEQ ID NO: 242164 - RNA, 32 nt, Human
ucugcgggcucccuccucuggcaggcuucccc

SEQ ID NO: 242165 - RNA, 32 nt, Human
ucugcgggcugcaucugugcagccuggcagcg

SEQ ID NO: 242166 - RNA, 32 nt, Human
ucugcggggacugaggcauggcagggaaacug

SEQ ID NO: 242167 - RNA, 32 nt, Human
ucugcgggguggggugggggagggacgggagc

SEQ ID NO: 242168 - RNA, 32 nt, Human
ucugcggucacaguggccccugggcaggggca

SEQ ID NO: 242169 - RNA, 32 nt, Human
ucugcggugaagccaagccgcaagguuacaag

SEQ ID NO: 242170 - RNA, 32 nt, Human
ucugcgguguagucgcucuguccucagggugg

SEQ ID NO: 242171 - RNA, 32 nt, Human
ucugcguaaucaggacuugcaacacccugauu

SEQ ID NO: 242172 - RNA, 24 nt, Human
ucugcguaucccccagccuugagg

SEQ ID NO: 242173 - RNA, 24 nt, Human
ucugcguccucuuaucuucugcca

SEQ ID NO: 242174 - RNA, 32 nt, Human
ucugcgucggaucccugagaacuucgaagcca

SEQ ID NO: 242175 - RNA, 32 nt, Human
ucugcgucucccucucugcagccuguguaagc

SEQ ID NO: 242176 - RNA, 32 nt, Human
ucugcgugagggccuuaaugucacccaccaga

SEQ ID NO: 242177 - RNA, 32 nt, Human
ucugcgugcaaaccccagccucccucuucuuc

SEQ ID NO: 242178 - RNA, 32 nt, Human
ucugcgugcaugggcacgugugcauugcucag

SEQ ID NO: 242179 - RNA, 16 nt, Human
ucugcgugcuuucaaa

SEQ ID NO: 242180 - RNA, 32 nt, Human
ucugcgugugucucagcaccgcuaucucagcc

SEQ ID NO: 242181 - RNA, 32 nt, Human
ucugcguugugugaaauguccaucuuaguuuu

SEQ ID NO: 242182 - RNA, 32 nt, Human
ucugcguuuaagacaggaagcugccggguuac

SEQ ID NO: 242183 - RNA, 32 nt, Human
ucugcuaaaaauacaaaaauuagccagaugug

SEQ ID NO: 242184 - RNA, 32 nt, Human
ucugcuaaaaauacaaaaauuagccaggcaug

SEQ ID NO: 242185 - RNA, 32 nt, Human
ucugcuaaaaauacaaaaauuagccgggcgug

SEQ ID NO: 242186 - RNA, 32 nt, Human
ucugcuaaaaauacaaaaauuagccgggugug

SEQ ID NO: 242187 - RNA, 32 nt, Human
ucugcuaaaaauacaaaauuagcugggcgugg

SEQ ID NO: 242188 - RNA, 32 nt, Human
ucugcuaagguagcucucacacaccucggcuc

SEQ ID NO: 242189 - RNA, 32 nt, Human
ucugcuacaccagggcugccucaggccaggcc

SEQ ID NO: 242190 - RNA, 32 nt, Human
ucugcuacacucgucccccuccugccucaucu

SEQ ID NO: 242191 - RNA, 32 nt, Human
ucugcuacauauauaaauagacuugcaguuau

SEQ ID NO: 242192 - RNA, 32 nt, Human
ucugcuaccaagcaggcgucucagcuuuccuc

SEQ ID NO: 242193 - RNA, 32 nt, Human
ucugcuaccacaguaaccagcagaccuccagg

SEQ ID NO: 242194 - RNA, 18 nt, Human
ucugcuaccauuuccuua

SEQ ID NO: 242195 - RNA, 32 nt, Human
ucugcuaccccgugaccucccucucuccuucc

SEQ ID NO: 242196 - RNA, 32 nt, Human
ucugcuaccuagucuauacacagcgugaaccu

SEQ ID NO: 242197 - RNA, 21 nt, Human
ucugcuaccugcuccugaagc

SEQ ID NO: 242198 - RNA, 32 nt, Human
ucugcuacuuugcugcuaugguuuucuccaag

SEQ ID NO: 242199 - RNA, 32 nt, Human
ucugcuagaggcagaggaagaagggugaggac

SEQ ID NO: 242200 - RNA, 32 nt, Human
ucugcuagcugucacccugccuugugccccag

SEQ ID NO: 242201 - RNA, 32 nt, Human
ucugcuaggagagguuuuauaugccaggcgug

SEQ ID NO: 242202 - RNA, 32 nt, Human
ucugcuauauagaacuagcucaaaagacugua

SEQ ID NO: 242203 - RNA, 32 nt, Human
ucugcuaucuuugagcaaucugggcacuuuua

SEQ ID NO: 242204 - RNA, 32 nt, Human
ucugcuauggcuggagccacugcugagggacu

SEQ ID NO: 242205 - RNA, 31 nt, Human
ucugcuauugugcucuuucauuuaaaaugua

SEQ ID NO: 242206 - RNA, 32 nt, Human
ucugcucaacuugcuguuguccauagagcaug

SEQ ID NO: 242207 - RNA, 31 nt, Human
ucugcucaauaaaauaccuguaacuggaaaa

SEQ ID NO: 242208 - RNA, 32 nt, Human
ucugcucaauccaaaucacagcucucccguuu

SEQ ID NO: 242209 - RNA, 32 nt, Human
ucugcucaauccugcaugugcaggaggucaug

SEQ ID NO: 242210 - RNA, 32 nt, Human
ucugcucaauuuccuuuccucaucucaaauaa

SEQ ID NO: 242211 - RNA, 32 nt, Human
ucugcucacaccagccuugggcuccagcccuc

SEQ ID NO: 242212 - RNA, 32 nt, Human
ucugcucacaugcacugcguguggcgcaucuc

SEQ ID NO: 242213 - RNA, 32 nt, Human
ucugcucacccacauccucccuccacagcccc

SEQ ID NO: 242214 - RNA, 32 nt, Human
ucugcucaccgcaaccuccgccucccagguuc

SEQ ID NO: 242215 - RNA, 32 nt, Human
ucugcucacugaacagccacgucugggggcgu

SEQ ID NO: 242216 - RNA, 32 nt, Human
ucugcucacugcaaccuccgccucccagguuc

SEQ ID NO: 242217 - RNA, 32 nt, Human
ucugcucacugcaaccuccgccucccggguuc

SEQ ID NO: 242218 - RNA, 32 nt, Human
ucugcucacugcaagcucagccucucggguuc

SEQ ID NO: 242219 - RNA, 32 nt, Human
ucugcucacugcaagcuccgccaucuggguuc

SEQ ID NO: 242220 - RNA, 32 nt, Human
ucugcucacugcaagcuccgccucccggguuc

SEQ ID NO: 242221 - RNA, 32 nt, Human
ucugcucagaagcagaacaagugaugaccuaa

SEQ ID NO: 242222 - RNA, 32 nt, Human
ucugcucagaccugcacccagucacagcagca

SEQ ID NO: 242223 - RNA, 23 nt, Human
ucugcucagaggaggcuuucuua

SEQ ID NO: 242224 - RNA, 32 nt, Human
ucugcucagcuauucuugggccagauggggcc

SEQ ID NO: 242225 - RNA, 32 nt, Human
ucugcucagcuccccucugcccccucuuucca

SEQ ID NO: 242226 - RNA, 32 nt, Human
ucugcucaguguuugguaccuagaaagaacug

SEQ ID NO: 242227 - RNA, 32 nt, Human
ucugcucaguucucugugccugucucccucca

SEQ ID NO: 242228 - RNA, 21 nt, Human
ucugcucaguuuuucuguguu

SEQ ID NO: 242229 - RNA, 32 nt, Human
ucugcucaucccuccucauucagacauccucc

SEQ ID NO: 242230 - RNA, 32 nt, Human
ucugcucauggagggcagcccugugugucccu

SEQ ID NO: 242231 - RNA, 32 nt, Human
ucugcucaugggagaauggcagagggaucccc

SEQ ID NO: 242232 - RNA, 32 nt, Human
ucugcucauuuagucccgucuuccucaccgcc

SEQ ID NO: 242233 - RNA, 32 nt, Human
ucugcuccaagaggcagaggugggccccaccg

SEQ ID NO: 242234 - RNA, 32 nt, Human
ucugcuccaccacauccuccguccagccgcca

SEQ ID NO: 242235 - RNA, 32 nt, Human
ucugcuccaccccugugccaccccagagcccu

SEQ ID NO: 242236 - RNA, 32 nt, Human
ucugcuccagaacucuauccacuguauuucca

SEQ ID NO: 242237 - RNA, 32 nt, Human
ucugcuccagccuguccucucgucagccuucc

SEQ ID NO: 242238 - RNA, 32 nt, Human
ucugcuccagucaaggaguuacagggggaauc

SEQ ID NO: 242239 - RNA, 21 nt, Human
ucugcucccaggcaacugugu

SEQ ID NO: 242240 - RNA, 32 nt, Human
ucugcucccaggggcccugggacgcugggcug

SEQ ID NO: 242241 - RNA, 18 nt, Human
ucugcuccccaggcuauu

SEQ ID NO: 242242 - RNA, 22 nt, Human
ucugcuccccgcccgucuucuc

SEQ ID NO: 242243 - RNA, 32 nt, Human
ucugcucccgauucuccuccucuccuuucucu

SEQ ID NO: 242244 - RNA, 21 nt, Human
ucugcucccuauguuauuuca

SEQ ID NO: 242245 - RNA, 32 nt, Human
ucugcucccucauucucuccccaccacucucu

SEQ ID NO: 242246 - RNA, 32 nt, Human
ucugcucccugaccacacaucggaagggcugg

SEQ ID NO: 242247 - RNA, 32 nt, Human
ucugcucccugcaaccuccaccucccggguuc

SEQ ID NO: 242248 - RNA, 32 nt, Human
ucugcucccugccuuugccucacuuuacgcaa

SEQ ID NO: 242249 - RNA, 32 nt, Human
ucugcucccuggggcugcuucuagcucaggac

SEQ ID NO: 242250 - RNA, 27 nt, Human
ucugcucccugucuccucuuucugcca

SEQ ID NO: 242251 - RNA, 32 nt, Human
ucugcuccgcagaaccccauguccucagauaa

SEQ ID NO: 242252 - RNA, 32 nt, Human
ucugcuccucuccugggccccugcucuuccca

SEQ ID NO: 242253 - RNA, 32 nt, Human
ucugcuccucuccugggccccugcucuucccg

SEQ ID NO: 242254 - RNA, 32 nt, Human
ucugcuccugacacugcuuuucccucugacuc

SEQ ID NO: 242255 - RNA, 32 nt, Human
ucugcuccugagacugagcccagauccccaaa

SEQ ID NO: 242256 - RNA, 32 nt, Human
ucugcuccugggaauggggugggagccacagg

SEQ ID NO: 242257 - RNA, 23 nt, Human
ucugcuccuuuguggaaggcagu

SEQ ID NO: 242258 - RNA, 32 nt, Human
ucugcucggaaaucguccuggcccaacucggc

SEQ ID NO: 242259 - RNA, 23 nt, Human
ucugcucggcgggacuccggcca

SEQ ID NO: 242260 - RNA, 32 nt, Human
ucugcucuaucccgcugaccucauuguugagg

SEQ ID NO: 242261 - RNA, 32 nt, Human
ucugcucuccaaacgcugggggagacugauuu

SEQ ID NO: 242262 - RNA, 32 nt, Human
ucugcucuccccaggauggggucagaggagac

SEQ ID NO: 242263 - RNA, 32 nt, Human
ucugcucuccuccucugugagcucugggcuuc

SEQ ID NO: 242264 - RNA, 32 nt, Human
ucugcucucuggccuccagccucccagcagca

SEQ ID NO: 242265 - RNA, 28 nt, Human
ucugcucucugugaggccucaucuugaa

SEQ ID NO: 242266 - RNA, 32 nt, Human
ucugcucucuucugaaucucaugccuuuggca

SEQ ID NO: 242267 - RNA, 32 nt, Human
ucugcucugacccuucucaggcccgccugaug

SEQ ID NO: 242268 - RNA, 32 nt, Human
ucugcucugagaaacucuggcaaguggacgcc

SEQ ID NO: 242269 - RNA, 32 nt, Human
ucugcucugagaugcauuguuccuaugacuuc

SEQ ID NO: 242270 - RNA, 32 nt, Human
ucugcucugaguaaacaguaauuacuguuuaa

SEQ ID NO: 242271 - RNA, 32 nt, Human
ucugcucugauuacugcucugccuuccauucu

SEQ ID NO: 242272 - RNA, 32 nt, Human
ucugcucugcagggucccucaggcucccuauc

SEQ ID NO: 242273 - RNA, 32 nt, Human
ucugcucugccauccagccccaucuggaugug

SEQ ID NO: 242274 - RNA, 32 nt, Human
ucugcucugcuucuaguucuccaccuccaggu

SEQ ID NO: 242275 - RNA, 32 nt, Human
ucugcucugggaacagcaaaaaucaggauggu

SEQ ID NO: 242276 - RNA, 24 nt, Human
ucugcucugggucaggcgaggcag

SEQ ID NO: 242277 - RNA, 32 nt, Human
ucugcucuggugucuugggaguugugcaggga

SEQ ID NO: 242278 - RNA, 19 nt, Human
ucugcucuguggcucccag

SEQ ID NO: 242279 - RNA, 32 nt, Human
ucugcucuuaaaggagccgcgucccucaggca

SEQ ID NO: 242280 - RNA, 32 nt, Human
ucugcucuuucccuccccauccucuggcagaa

SEQ ID NO: 242281 - RNA, 32 nt, Human
ucugcugaagaaagaagaauagaagaaaauca

SEQ ID NO: 242282 - RNA, 32 nt, Human
ucugcugaagucagaaguuugagaccagccuu

SEQ ID NO: 242283 - RNA, 32 nt, Human
ucugcugaccuggguguggcggagggagaggc

SEQ ID NO: 242284 - RNA, 21 nt, Human
ucugcugacuugcccccagcu

SEQ ID NO: 242285 - RNA, 32 nt, Human
ucugcugacuugcuagucuuagcaggagguug

SEQ ID NO: 242286 - RNA, 32 nt, Human
ucugcugagcacgugucccagccacagaggcc

SEQ ID NO: 242287 - RNA, 32 nt, Human
ucugcugagcuucccccuggaagaacccucuu

SEQ ID NO: 242288 - RNA, 32 nt, Human
ucugcugagcuucugcgcaccccucccuggaa

SEQ ID NO: 242289 - RNA, 32 nt, Human
ucugcugaggcugccaacagaggaugaagagg

SEQ ID NO: 242290 - RNA, 32 nt, Human
ucugcugaucugagucugccugcagcauggac

SEQ ID NO: 242291 - RNA, 32 nt, Human
ucugcugauggucuccacagcuuccccagcga

SEQ ID NO: 242292 - RNA, 32 nt, Human
ucugcugauguguccccaucucuggcagagcc

SEQ ID NO: 242293 - RNA, 32 nt, Human
ucugcugcacacacaggcaccagcagggaugc

SEQ ID NO: 242294 - RNA, 32 nt, Human
ucugcugcacguggcaucugauuaccuguggu

SEQ ID NO: 242295 - RNA, 32 nt, Human
ucugcugcagccgcugguugcaggcagaguuu

SEQ ID NO: 242296 - RNA, 19 nt, Human
ucugcugcaggaggcgugg

SEQ ID NO: 242297 - RNA, 32 nt, Human
ucugcugcagggguaagcucucagggagaacc

SEQ ID NO: 242298 - RNA, 32 nt, Human
ucugcugccaggauggagcagaggagcgccac

SEQ ID NO: 242299 - RNA, 32 nt, Human
ucugcugccaucaucuuccaugggcuuuccag

SEQ ID NO: 242300 - RNA, 32 nt, Human
ucugcugcccaggaguggccaguguucggcgu

SEQ ID NO: 242301 - RNA, 32 nt, Human
ucugcugcccagguuggagugcaguggcacga

SEQ ID NO: 242302 - RNA, 32 nt, Human
ucugcugcccauggggaaacaggcugggagac

SEQ ID NO: 242303 - RNA, 32 nt, Human
ucugcugcccgggcuagagugcagugguggga

SEQ ID NO: 242304 - RNA, 31 nt, Human
ucugcugccggcucugggccugaggguccac

SEQ ID NO: 242305 - RNA, 32 nt, Human
ucugcugccuuggcccccuccagaguuugggu

SEQ ID NO: 242306 - RNA, 32 nt, Human
ucugcugcuacugcugcugccgcugcuuuuga

SEQ ID NO: 242307 - RNA, 32 nt, Human
ucugcugcuaucucuagagcuugcugcuguuc

SEQ ID NO: 242308 - RNA, 32 nt, Human
ucugcugcucaggcuggagugcaguggugcaa

SEQ ID NO: 242309 - RNA, 19 nt, Human
ucugcugcucuggacuggg

SEQ ID NO: 242310 - RNA, 32 nt, Human
ucugcugcuguuuagagaaauugugaaacaag

SEQ ID NO: 242311 - RNA, 32 nt, Human
ucugcugcuuuccccagcuccaaccucucugg

SEQ ID NO: 242312 - RNA, 32 nt, Human
ucugcuggaaggggcagcaggaggaguggaag

SEQ ID NO: 242313 - RNA, 32 nt, Human
ucugcuggacccaagcggcucuccagcccuuc

SEQ ID NO: 242314 - RNA, 32 nt, Human
ucugcuggagaaagcccugcagaggaggucau

SEQ ID NO: 242315 - RNA, 32 nt, Human
ucugcuggagaacuuagcccagagcuagugaa

SEQ ID NO: 242316 - RNA, 32 nt, Human
ucugcuggagagcccaggugggcacagagaag

SEQ ID NO: 242317 - RNA, 32 nt, Human
ucugcuggaggcaccauaucagccugcgggac

SEQ ID NO: 242318 - RNA, 32 nt, Human
ucugcuggagugaaacaggaugcuugauuucu

SEQ ID NO: 242319 - RNA, 32 nt, Human
ucugcuggaguguugcuguugcaccauacuuu

SEQ ID NO: 242320 - RNA, 32 nt, Human
ucugcuggcaucuucaagaggagggagggucc

SEQ ID NO: 242321 - RNA, 32 nt, Human
ucugcuggccucuguguggggagagaucagga

SEQ ID NO: 242322 - RNA, 32 nt, Human
ucuuccguucuggcuccagccagaccuucagu

SEQ ID NO: 242323 - RNA, 32 nt, Human
ucuuccuaaaugaaguuuauuuggaggaacac

SEQ ID NO: 242324 - RNA, 32 nt, Human
ucuuccuacaucuucuucccaguaaguuuccc

SEQ ID NO: 242325 - RNA, 32 nt, Human
ucuuccuacccaucugcuccccagagggcugc

SEQ ID NO: 242326 - RNA, 32 nt, Human
ucuuccuaccucucagccuucucccuccccag

SEQ ID NO: 242327 - RNA, 32 nt, Human
ucuuccuacuuccuccucuccuggaugcucau

SEQ ID NO: 242328 - RNA, 32 nt, Human
ucuuccuaggaacgucugguccuaaccaguga

SEQ ID NO: 242329 - RNA, 32 nt, Human
ucuuccuaguuuucuccucccaggaacugggc

SEQ ID NO: 242330 - RNA, 32 nt, Human
ucuuccuaugugucagaaacaacugugucuug

SEQ ID NO: 242331 - RNA, 32 nt, Human
ucuuccucaacacacauacaugcacaacacau

SEQ ID NO: 242332 - RNA, 17 nt, Human
ucuuccucacaccacaa

SEQ ID NO: 242333 - RNA, 32 nt, Human
ucuuccucaccaaugacauucuuuucuuuucu

SEQ ID NO: 242334 - RNA, 32 nt, Human
ucuuccucagcagccuggcaggcaggaaacag

SEQ ID NO: 242335 - RNA, 23 nt, Human
ucuuccucaucccuaggguguug

SEQ ID NO: 242336 - RNA, 32 nt, Human
ucuuccucaucuuccuccucuuccuucuuuuu

SEQ ID NO: 242337 - RNA, 32 nt, Human
ucuuccucauuuccucugccccuuaaaagauu

SEQ ID NO: 242338 - RNA, 32 nt, Human
ucuuccucauuuccuucuuuuauuccucccca

SEQ ID NO: 242339 - RNA, 32 nt, Human
ucuuccuccaaggcuggagugcagugacgcga

SEQ ID NO: 242340 - RNA, 32 nt, Human
ucuuccuccaauaaugggcacuucagaaggcc

SEQ ID NO: 242341 - RNA, 32 nt, Human
ucuuccuccagcugcaccagagcaaccucuca

SEQ ID NO: 242342 - RNA, 32 nt, Human
ucuuccuccccuuccuccuccagagccugcuc

SEQ ID NO: 242343 - RNA, 32 nt, Human
ucuuccucccucauuccaccuucccaugcccu

SEQ ID NO: 242344 - RNA, 32 nt, Human
ucuuccucccucccucccuuccucuuacucuc

SEQ ID NO: 242345 - RNA, 32 nt, Human
ucuuccucccuuccucccuuucuuaccacaga

SEQ ID NO: 242346 - RNA, 32 nt, Human
ucuuccuccucagagcugucauggacaauugg

SEQ ID NO: 242347 - RNA, 32 nt, Human
ucuuccuccucccaaggcauucucccagcucu

SEQ ID NO: 242348 - RNA, 32 nt, Human
ucuuccuccuccuccuccucucuaggcacccc

SEQ ID NO: 242349 - RNA, 32 nt, Human
ucuuccuccucuacagaaagagcugcugucca

SEQ ID NO: 242350 - RNA, 32 nt, Human
ucuuccuccucuuccuccuccuccucuuccuc

SEQ ID NO: 242351 - RNA, 32 nt, Human
ucuuccuccucuuccuccuccucuuguuccuc

SEQ ID NO: 242352 - RNA, 32 nt, Human
ucuuccuccucuuccuccuccuggugggugcc

SEQ ID NO: 242353 - RNA, 32 nt, Human
ucuuccuccucuuccuucuccuccuccauccc

SEQ ID NO: 242354 - RNA, 32 nt, Human
ucuuccuccucuuccuucuuuuucuugcuuuu

SEQ ID NO: 242355 - RNA, 32 nt, Human
ucuuccuccugcugcuaucauauuguccauag

SEQ ID NO: 242356 - RNA, 32 nt, Human
ucuuccucuacagaaggugcuucugacggcga

SEQ ID NO: 242357 - RNA, 32 nt, Human
ucuuccucuagucgccagcucaucagaaaaac

SEQ ID NO: 242358 - RNA, 32 nt, Human
ucuuccucucccuccuccuuuuccccucuccc

SEQ ID NO: 242359 - RNA, 32 nt, Human
ucuuccucuccucucuuuaagcuucacccucu

SEQ ID NO: 242360 - RNA, 32 nt, Human
ucuuccucuccugggccguccucugagcagca

SEQ ID NO: 242361 - RNA, 32 nt, Human
ucuuccucucuaguguauaacuuuaaauauuu

SEQ ID NO: 242362 - RNA, 32 nt, Human
ucuuccucucuccuuccuuuccuuccuuuuuc

SEQ ID NO: 242363 - RNA, 32 nt, Human
ucuuccucugacuuuguaucccuuaauaccua

SEQ ID NO: 242364 - RNA, 32 nt, Human
ucuuccucugcaggacacagaucuggaggacg

SEQ ID NO: 242365 - RNA, 21 nt, Human
ucuuccucugccccugcucug

SEQ ID NO: 242366 - RNA, 32 nt, Human
ucuuccucugccgggaggguguuuucaacucc

SEQ ID NO: 242367 - RNA, 32 nt, Human
ucuuccucuucucacccuccucccuccccuua

SEQ ID NO: 242368 - RNA, 32 nt, Human
ucuuccucuucuucuucuuccuccuccuccuc

SEQ ID NO: 242369 - RNA, 32 nt, Human
ucuuccucuugggaacaucccuccacuccgca

SEQ ID NO: 242370 - RNA, 32 nt, Human
ucuuccucuuucaagaccccuacccauuuugc

SEQ ID NO: 242371 - RNA, 32 nt, Human
ucuuccucuuucuccggccauguaagauaugc

SEQ ID NO: 242372 - RNA, 32 nt, Human
ucuuccucuuuugcuuccucccccucccccgc

SEQ ID NO: 242373 - RNA, 32 nt, Human
ucuuccugaacaagacuuucaauaggggccag

SEQ ID NO: 242374 - RNA, 32 nt, Human
ucuuccugacagcagaaugacugugugaccuu

SEQ ID NO: 242375 - RNA, 32 nt, Human
ucuuccugagauauccucagguuuucucagcc

SEQ ID NO: 242376 - RNA, 32 nt, Human
ucuuccugaggcagaaaauuggauuacuaagg

SEQ ID NO: 242377 - RNA, 32 nt, Human
ucuuccugagggcagagcucuuaccgcccacu

SEQ ID NO: 242378 - RNA, 32 nt, Human
ucuuccugauccugggaaggccuggaugacca

SEQ ID NO: 242379 - RNA, 32 nt, Human
ucuuccugcaagaccugcagaguguaugacac

SEQ ID NO: 242380 - RNA, 32 nt, Human
ucuuccugcacagcuuugccuucccagggauc

SEQ ID NO: 242381 - RNA, 32 nt, Human
ucuuccugcagaggccucuuucugccuccaug

SEQ ID NO: 242382 - RNA, 32 nt, Human
ucuuccugcagaggcuccuuucugccuccaug

SEQ ID NO: 242383 - RNA, 32 nt, Human
ucuuccugcagguauuuuccaucugcugugcc

SEQ ID NO: 242384 - RNA, 16 nt, Human
ucuuccugccagcugg

SEQ ID NO: 242385 - RNA, 32 nt, Human
ucuuccugccaucaaauauuuuuaguagaaaa

SEQ ID NO: 242386 - RNA, 32 nt, Human
ucuuccugccaucauuccuccuuuucccacag

SEQ ID NO: 242387 - RNA, 32 nt, Human
ucuuccugcccaggccucucccaccaccaccu

SEQ ID NO: 242388 - RNA, 32 nt, Human
ucuuccugccccgcuuuccucucccauccuca

SEQ ID NO: 242389 - RNA, 32 nt, Human
ucuuccugcccugcucuccuccagaggaugaa

SEQ ID NO: 242390 - RNA, 18 nt, Human
ucuuccugccucucccca

SEQ ID NO: 242391 - RNA, 32 nt, Human
ucuuccugccuuuaccccaccugggcccaguu

SEQ ID NO: 242392 - RNA, 21 nt, Human
ucuuccugcugcagggugcug

SEQ ID NO: 242393 - RNA, 20 nt, Human
ucuuccugcugggcucccag

SEQ ID NO: 242394 - RNA, 30 nt, Human
ucuuccugcuucuccaugcucuugauuugg

SEQ ID NO: 242395 - RNA, 32 nt, Human
ucuuccugcuuuguccagaacacauugaccaa

SEQ ID NO: 242396 - RNA, 32 nt, Human
ucuuccuggaagcagagcuggggagggagagc

SEQ ID NO: 242397 - RNA, 23 nt, Human
ucuuccuggaccugggcauucag

SEQ ID NO: 242398 - RNA, 32 nt, Human
ucuuccuggagaaggcacccuucauggaagac

SEQ ID NO: 242399 - RNA, 32 nt, Human
ucuuccuggagacaccgccauggccgggcuau

SEQ ID NO: 242400 - RNA, 32 nt, Human
ucuuccuggaucaucucuccccaucacuugcc

SEQ ID NO: 242401 - RNA, 32 nt, Human
ucuuccuggcagaucuguggccuucccugcuc

SEQ ID NO: 242402 - RNA, 32 nt, Human
ucuuccuggccucuggaaccagccugugugcc

SEQ ID NO: 242403 - RNA, 32 nt, Human
ucuuccugggcccucauugcugcuuaucguac

SEQ ID NO: 242404 - RNA, 32 nt, Human
ucuuccugguugggcccugcccugagcugcca

SEQ ID NO: 242405 - RNA, 32 nt, Human
ucuuccuguaaacccagauggcgucauacaga

SEQ ID NO: 242406 - RNA, 32 nt, Human
ucuuccuguaggugugggacgugcgugcggcg

SEQ ID NO: 242407 - RNA, 32 nt, Human
ucuuccuguccaucucuccaucugucugucca

SEQ ID NO: 242408 - RNA, 32 nt, Human
ucuuccugugugagccaccacacccagccugg

SEQ ID NO: 242409 - RNA, 32 nt, Human
ucuuccuguuacauuucaugcaucagaagcau

SEQ ID NO: 242410 - RNA, 29 nt, Human
ucuuccuguuuaugugugccaagggagua

SEQ ID NO: 242411 - RNA, 32 nt, Human
ucuuccuuacccuuucuguugccagucagcaa

SEQ ID NO: 242412 - RNA, 32 nt, Human
ucuuccuucacucacugcccgggcgggagcgg

SEQ ID NO: 242413 - RNA, 32 nt, Human
ucuuccuuccacacccuucacucaccaucuuu

SEQ ID NO: 242414 - RNA, 32 nt, Human
ucuuccuuccacccuguggccugcacuugagc

SEQ ID NO: 242415 - RNA, 32 nt, Human
ucuuccuuccccucucauucucccucuaaugu

SEQ ID NO: 242416 - RNA, 32 nt, Human
ucuuccuuccuuucuuucuuccuuccuuucuu

SEQ ID NO: 242417 - RNA, 32 nt, Human
ucuuccuucucccgaggccuuauucccccuuc

SEQ ID NO: 242418 - RNA, 32 nt, Human
ucuuccuucucccucgcuucccuccuccucuu

SEQ ID NO: 242419 - RNA, 32 nt, Human
ucuuccuugaucagccuuuacaguaaaaugac

SEQ ID NO: 242420 - RNA, 32 nt, Human
ucuuccuugcagaguaguguuagaauagaugg

SEQ ID NO: 242421 - RNA, 32 nt, Human
ucuuccuugccuggacugccuuugacaaggca

SEQ ID NO: 242422 - RNA, 32 nt, Human
ucuuccuugcugucucuggauauugucacaug

SEQ ID NO: 242423 - RNA, 32 nt, Human
ucuuccuugguuuuguucucuuggcuugaugu

SEQ ID NO: 242424 - RNA, 32 nt, Human
ucuuccuuguucaccacuauauuaccagaaca

SEQ ID NO: 242425 - RNA, 32 nt, Human
ucuuccuuuauccccuccuuuaccccacauau

SEQ ID NO: 242426 - RNA, 32 nt, Human
ucuuccuuuccuccuccaccugccuauugcag

SEQ ID NO: 242427 - RNA, 23 nt, Human
ucuuccuuugcuucaggcagcug

SEQ ID NO: 242428 - RNA, 32 nt, Human
ucuuccuuugucuuauugaauucaaguaccuu

SEQ ID NO: 242429 - RNA, 32 nt, Human
ucuuccuuugugcuggggccaggcgaguggag

SEQ ID NO: 242430 - RNA, 32 nt, Human
ucuuccuuuguucuaaaacuuagacugacauc

SEQ ID NO: 242431 - RNA, 32 nt, Human
ucuuccuuuuacccucucuugucuugccuuuu

SEQ ID NO: 242432 - RNA, 32 nt, Human
ucuuccuuuuguugggaggugagcacauuuac

SEQ ID NO: 242433 - RNA, 32 nt, Human
ucuucgaacuccugagauucuuacuguaaauu

SEQ ID NO: 242434 - RNA, 32 nt, Human
ucuucgaaugugucagaucaguauuuaacacg

SEQ ID NO: 242435 - RNA, 32 nt, Human
ucuucgagaguauagaaccguucauucuugcu

SEQ ID NO: 242436 - RNA, 32 nt, Human
ucuucgccuccuuuauuuaauucauguuauuu

SEQ ID NO: 242437 - RNA, 32 nt, Human
ucuucgccugcacuuuuucuuccccaggagau

SEQ ID NO: 242438 - RNA, 32 nt, Human
ucuucgccuuaaauucgggugucuuuuaugaa

SEQ ID NO: 242439 - RNA, 32 nt, Human
ucuucgccuuucccacccuccugccccacacu

SEQ ID NO: 242440 - RNA, 32 nt, Human
ucuucgccuuucuucuccgcuucuaccccguc

SEQ ID NO: 242441 - RNA, 32 nt, Human
ucuucgcggcuguggaggcgcaggccgggcgu

SEQ ID NO: 242442 - RNA, 32 nt, Human
ucuucgcucacuucaaccucugccuucugggu

SEQ ID NO: 242443 - RNA, 32 nt, Human
ucuucgcugaaaucuaaaauauacuauaacaa

SEQ ID NO: 242444 - RNA, 21 nt, Human
ucuucgcugcagcgucagcca

SEQ ID NO: 242445 - RNA, 26 nt, Human
ucuucggaaaacauuuuaucaaacca

SEQ ID NO: 242446 - RNA, 32 nt, Human
ucuucggacugugagcccugaugccuuuuugc

SEQ ID NO: 242447 - RNA, 32 nt, Human
ucuucggagagggcgcgggggccggggccaaa

SEQ ID NO: 242448 - RNA, 32 nt, Human
ucuucggaggagaagaggggcggagucacggc

SEQ ID NO: 242449 - RNA, 32 nt, Human
ucuucggccagcaccucugcccuccagaaccu

SEQ ID NO: 242450 - RNA, 32 nt, Human
ucuucggcccucuccugucgccgccaugagca

SEQ ID NO: 242451 - RNA, 32 nt, Human
ucuucgggaccuggcuucauuuggaguucagc

SEQ ID NO: 242452 - RNA, 32 nt, Human
ucuucgggaggcagaauugaagugaacaugaa

SEQ ID NO: 242453 - RNA, 32 nt, Human
ucuucggugaaauauuuauaugcauaaauggc

SEQ ID NO: 242454 - RNA, 32 nt, Human
ucuucgguggccagguaugucccuuaccuggg

SEQ ID NO: 242455 - RNA, 32 nt, Human
ucuucgguuuugugcuugugcugguaugauuu

SEQ ID NO: 242456 - RNA, 32 nt, Human
ucuucguauggauacuccuguucugcauccca

SEQ ID NO: 242457 - RNA, 32 nt, Human
ucuucgucccacgucagcaggaaguaguuaca

SEQ ID NO: 242458 - RNA, 32 nt, Human
ucuucguccugaucccuccacccccauguggc

SEQ ID NO: 242459 - RNA, 32 nt, Human
ucuucgucgguggcagaggugggcgugggugc

SEQ ID NO: 242460 - RNA, 32 nt, Human
ucuucgucucucaggauggcgaguagcagcgg

SEQ ID NO: 242461 - RNA, 32 nt, Human
ucuucgucugcaucagggugaccucuggaagg

SEQ ID NO: 242462 - RNA, 32 nt, Human
ucuucgucugcccugcuuuucucccuccccuu

SEQ ID NO: 242463 - RNA, 32 nt, Human
ucuucgucuucacucuuaggcacuuugggggu

SEQ ID NO: 242464 - RNA, 32 nt, Human
ucuucgucuuccuccucuuccuccuccuccuc

SEQ ID NO: 242465 - RNA, 24 nt, Human
ucuucguggcgcucucggggccug

SEQ ID NO: 242466 - RNA, 31 nt, Human
ucuucguucgucuccuugccugugucugcua

SEQ ID NO: 242467 - RNA, 32 nt, Human
ucuucguuucaggucagaacagccuggggucu

SEQ ID NO: 242468 - RNA, 32 nt, Human
ucuucguuuucuuccuccguauugauuuucuc

SEQ ID NO: 242469 - RNA, 32 nt, Human
ucuucuaaaauacuucacucacauuguaauuc

SEQ ID NO: 242470 - RNA, 32 nt, Human
ucuucuaacuccaagccgaguguacucuccag

SEQ ID NO: 242471 - RNA, 32 nt, Human
ucuucuaacugaucuaggauggggacgcaccc

SEQ ID NO: 242472 - RNA, 32 nt, Human
ucuucuaaucuccucccugccugcugagagag

SEQ ID NO: 242473 - RNA, 21 nt, Human
ucuucuaccccuucagugucu

SEQ ID NO: 242474 - RNA, 32 nt, Human
ucuucuacccuuuagcagguaaugacucaguu

SEQ ID NO: 242475 - RNA, 19 nt, Human
ucuucuaccugugaugcuu

SEQ ID NO: 242476 - RNA, 32 nt, Human
ucuucuagaagagagaaggaggaaaagaagca

SEQ ID NO: 242477 - RNA, 32 nt, Human
ucuucuagcuacuuacuucauucuccaugggu

SEQ ID NO: 242478 - RNA, 32 nt, Human
ucuucuagcuauuuauccauuguuggauacuu

SEQ ID NO: 242479 - RNA, 32 nt, Human
ucuucuagcugaagccaaccucccaggaaaag

SEQ ID NO: 242480 - RNA, 32 nt, Human
ucuucuagcugcuuccucaaccccuguccccu

SEQ ID NO: 242481 - RNA, 32 nt, Human
ucuucuagcuuuguuguccucccaggaaccaa

SEQ ID NO: 242482 - RNA, 32 nt, Human
ucuucuagguaaagcugagaucacaggaacag

SEQ ID NO: 242483 - RNA, 32 nt, Human
ucuucuagguauuccccacacauuauuugugg

SEQ ID NO: 242484 - RNA, 32 nt, Human
ucuucuaucugugguugcuguuuuuggaguaa

SEQ ID NO: 242485 - RNA, 32 nt, Human
ucuucuaugccacccuacagauucuauuuuaa

SEQ ID NO: 242486 - RNA, 32 nt, Human
ucuucuauggcagaagguuuuggggaauaaau

SEQ ID NO: 242487 - RNA, 32 nt, Human
ucuucuauugcucuccucuguccaccguucca

SEQ ID NO: 242488 - RNA, 32 nt, Human
ucuucuauuguguggcuuucugaguauuugaa

SEQ ID NO: 242489 - RNA, 23 nt, Human
ucuucuauuuauuaauuugcaga

SEQ ID NO: 242490 - RNA, 32 nt, Human
ucuucucaaacccugagcgggcugccggccuc

SEQ ID NO: 242491 - RNA, 32 nt, Human
ucuucucaagcagagugugguuaucuccugua

SEQ ID NO: 242492 - RNA, 32 nt, Human
ucuucucacagucaaaaggaacugggugguuu

SEQ ID NO: 242493 - RNA, 32 nt, Human
ucuucucacauggugcccagucaccaauauuu

SEQ ID NO: 242494 - RNA, 32 nt, Human
ucuucucacccaggcuggaaugcaguggcaca

SEQ ID NO: 242495 - RNA, 32 nt, Human
ucuucucaccccuuggcuucugagcaaggcuc

SEQ ID NO: 242496 - RNA, 23 nt, Human
ucuucucaccucuuuccuaguca

SEQ ID NO: 242497 - RNA, 32 nt, Human
ucuucucacuacugcacuugacuagucuuaaa

SEQ ID NO: 242498 - RNA, 32 nt, Human
ucuucucagaaacacuccuucaauauuauauu

SEQ ID NO: 242499 - RNA, 32 nt, Human
ucuucucagagcagcacugggguuugggggcu

SEQ ID NO: 242500 - RNA, 32 nt, Human
ucuucucaggcaccccucuuccccagcugucc

SEQ ID NO: 242501 - RNA, 32 nt, Human
ucuucucagggcacugcacuggaacacugggu

SEQ ID NO: 242502 - RNA, 31 nt, Human
ucuucucaguuucagcacuuugugaucauau

SEQ ID NO: 242503 - RNA, 31 nt, Human
ucuucucaguuucagggccuuugcagccucu

SEQ ID NO: 242504 - RNA, 22 nt, Human
ucuucucaguuuucucauuuua

SEQ ID NO: 242505 - RNA, 32 nt, Human
ucuucucaucaggagccaggagagagggggac

SEQ ID NO: 242506 - RNA, 32 nt, Human
ucuucucaucccuaggacaagcauagugccug

SEQ ID NO: 242507 - RNA, 32 nt, Human
ucuucucaucuggccccaccucuaaggagucc

SEQ ID NO: 242508 - RNA, 30 nt, Human
ucuucucauucagcuaaauucacauuugcc

SEQ ID NO: 242509 - RNA, 32 nt, Human
ucuucuccaagaaacucaaccacuagugacaa

SEQ ID NO: 242510 - RNA, 32 nt, Human
ucuucuccaagguguugaggugagcugggguu

SEQ ID NO: 242511 - RNA, 32 nt, Human
ucuucuccacauaccaccucccaucagaaauc

SEQ ID NO: 242512 - RNA, 32 nt, Human
ucuucuccacaucugcucguucuugccgaggg

SEQ ID NO: 242513 - RNA, 32 nt, Human
ucuucuccagaaggcaauaccaaccugaaagu

SEQ ID NO: 242514 - RNA, 32 nt, Human
ucuucuccagggccucauucagucucagacca

SEQ ID NO: 242515 - RNA, 32 nt, Human
ucuucuccauuuucaauuuuucccuucuuucc

SEQ ID NO: 242516 - RNA, 32 nt, Human
ucuucucccagaggauccuggagcugcaggac

SEQ ID NO: 242517 - RNA, 32 nt, Human
ucuucuccccguguaggggagccccagcaugg

SEQ ID NO: 242518 - RNA, 32 nt, Human
ucuucucccuacuuucagauguuuucagccca

SEQ ID NO: 242519 - RNA, 32 nt, Human
ucuucucccuuagggaggcucuugaaggagca

SEQ ID NO: 242520 - RNA, 32 nt, Human
ucuucuccucaacaucugaaucaugccaugug

SEQ ID NO: 242521 - RNA, 32 nt, Human
ucuucuccucacccaguuuggccaacagcauc

SEQ ID NO: 242522 - RNA, 32 nt, Human
ucuucuccuccacugcucacaggaggcccgug

SEQ ID NO: 242523 - RNA, 32 nt, Human
ucuucuccuccaugccaagaccugccagacac

SEQ ID NO: 242524 - RNA, 32 nt, Human
ucuucuccuccuccuccuuccuuccuccuccu

SEQ ID NO: 242525 - RNA, 32 nt, Human
ucuucuccucuguggccugggagaccucugcc

SEQ ID NO: 242526 - RNA, 32 nt, Human
ucuucuccuuccccaucucacuccaccccacu

SEQ ID NO: 242527 - RNA, 32 nt, Human
ucuucuccuuuucucuuccugagaaguucucc

SEQ ID NO: 242528 - RNA, 32 nt, Human
ucuucucgaggcgguggugggaagggagacau

SEQ ID NO: 242529 - RNA, 32 nt, Human
ucuucucgcccuucucacccucccuacccagc

SEQ ID NO: 242530 - RNA, 32 nt, Human
ucuucucuaccgaacuucccaggauuucaucu

SEQ ID NO: 242531 - RNA, 21 nt, Human
ucuucucucaaagggaagcug

SEQ ID NO: 242532 - RNA, 32 nt, Human
ucuucucucaaggagcacaguccugggaaagg

SEQ ID NO: 242533 - RNA, 32 nt, Human
ucuucucucacuauccguuucugacaaaugaa

SEQ ID NO: 242534 - RNA, 22 nt, Human
ucuucucucagaaguucagcug

SEQ ID NO: 242535 - RNA, 24 nt, Human
ucuucucucaggcaagaaaggcug

SEQ ID NO: 242536 - RNA, 32 nt, Human
ucuucucucaggcaagaaaggcugcaggcugc

SEQ ID NO: 242537 - RNA, 32 nt, Human
ucuucucuccaaugauacuaccaagucuuagu

SEQ ID NO: 242538 - RNA, 32 nt, Human
ucuucucucccaggaaggacuugcugggcucu

SEQ ID NO: 242539 - RNA, 32 nt, Human
ucuucucucccaggcucuggcucaugcacaug

SEQ ID NO: 242540 - RNA, 32 nt, Human
ucuucucuccccuaaagcaucucaguuuccag

SEQ ID NO: 242541 - RNA, 32 nt, Human
ucuucucuccuuggccucacucugcagugggg

SEQ ID NO: 242542 - RNA, 32 nt, Human
ucuucucucugccucgucccaccuugcugucu

SEQ ID NO: 242543 - RNA, 32 nt, Human
ucuucucugcuccccuugcccacugggacucc

SEQ ID NO: 242544 - RNA, 32 nt, Human
ucuucucugcugguucccaggcugcugcuccg

SEQ ID NO: 242545 - RNA, 32 nt, Human
ucuucucuggaggucaaugguggagggagaug

SEQ ID NO: 242546 - RNA, 32 nt, Human
ucuucucugugguucuagccuugggcagaauu

SEQ ID NO: 242547 - RNA, 32 nt, Human
ucuucucuuauccucucucucuucuaggccca

SEQ ID NO: 242548 - RNA, 32 nt, Human
ucuucucuuccuccuccacuucugugcccgcg

SEQ ID NO: 242549 - RNA, 32 nt, Human
ucuucucuuccucucaggcuaggcuuucuuac

SEQ ID NO: 242550 - RNA, 32 nt, Human
ucuucucuucggggaagcacaaggcagauguu

SEQ ID NO: 242551 - RNA, 32 nt, Human
ucuucucuucuccuccuccucuuucuucacuc

SEQ ID NO: 242552 - RNA, 32 nt, Human
ucuucucuucuguccccaccuccucuugggaa

SEQ ID NO: 242553 - RNA, 21 nt, Human
ucuucucuuguaaagaagcug

SEQ ID NO: 242554 - RNA, 32 nt, Human
ucuucucuuguccuaucucauuccagcccaca

SEQ ID NO: 242555 - RNA, 32 nt, Human
ucuucucuuucucuuggucaacucaggagccu

SEQ ID NO: 242556 - RNA, 32 nt, Human
ucuucugaacaacuuaggagaaacuuuugauc

SEQ ID NO: 242557 - RNA, 32 nt, Human
ucuucugaccggcaguggcucuggaagcaguc

SEQ ID NO: 242558 - RNA, 32 nt, Human
ucuucugacuccaagcucugggguuuugccau

SEQ ID NO: 242559 - RNA, 32 nt, Human
ucuucugagauguccucugccuuccagguauu

SEQ ID NO: 242560 - RNA, 32 nt, Human
ucuucugagcauuccaaaauaucugcuuagaa

SEQ ID NO: 242561 - RNA, 32 nt, Human
ucuucugaggagcuuaauguguuuuugcaacu

SEQ ID NO: 242562 - RNA, 32 nt, Human
ucuucugaggcagaggcuggagcaguucuuuu

SEQ ID NO: 242563 - RNA, 32 nt, Human
ucuucugaguagcugggacuacaggcaugcau

SEQ ID NO: 242564 - RNA, 32 nt, Human
ucuucugauggaagacauuaagaguggaugca

SEQ ID NO: 242565 - RNA, 32 nt, Human
ucuucugcaacucccauucaugcccaccaggc

SEQ ID NO: 242566 - RNA, 31 nt, Human
ucuucugcaauuuucugauuggagauugcau

SEQ ID NO: 242567 - RNA, 32 nt, Human
ucuucugcacacauaucacacaucaguacugu

SEQ ID NO: 242568 - RNA, 32 nt, Human
ucuucugcacuuccaagcucuuucacacucag

SEQ ID NO: 242569 - RNA, 29 nt, Human
ucuucugcagacaccuagcugcccucaga

SEQ ID NO: 242570 - RNA, 32 nt, Human
ucuucugcagccaccugcuuuccagagagaug

SEQ ID NO: 242571 - RNA, 32 nt, Human
ucuucugcagccugcugaccucguggcccccu

SEQ ID NO: 242572 - RNA, 24 nt, Human
ucuucugcagcuccuggugcugcu

SEQ ID NO: 242573 - RNA, 32 nt, Human
ucuucugcagucuuaaaagaccuagucccuaa

SEQ ID NO: 242574 - RNA, 32 nt, Human
ucuucugcagugaguauggcccgaugcuuucu

SEQ ID NO: 242575 - RNA, 32 nt, Human
ucuucugcauguuuuuaugcacugccaauuag

SEQ ID NO: 242576 - RNA, 32 nt, Human
ucuucugcauucugggaacaugcggcuuccug

SEQ ID NO: 242577 - RNA, 32 nt, Human
ucuucugccaaggucaccagcaccccagaugg

SEQ ID NO: 242578 - RNA, 32 nt, Human
ucuucugccacuccucccugcuugcaucucgu

SEQ ID NO: 242579 - RNA, 32 nt, Human
ucuucugccagccauggauuccaggcuauaua

SEQ ID NO: 242580 - RNA, 20 nt, Human
ucuucugcccccagugcccu

SEQ ID NO: 242581 - RNA, 32 nt, Human
ucuucugccccuccuccuuuucuguccuuggc

SEQ ID NO: 242582 - RNA, 32 nt, Human
ucuucugccccuucaacugcaggcuggaaaau

SEQ ID NO: 242583 - RNA, 24 nt, Human
ucuucugccgcuccuggugcugcu

SEQ ID NO: 242584 - RNA, 20 nt, Human
ucuucugccucagccuucca

SEQ ID NO: 242585 - RNA, 23 nt, Human
ucuucugcggcucucggugcccu

SEQ ID NO: 242586 - RNA, 32 nt, Human
ucuucugcgggcccacucacacaucugccugc

SEQ ID NO: 242587 - RNA, 32 nt, Human
ucuucugcuacuuuagaagagucacagagaaa

SEQ ID NO: 242588 - RNA, 32 nt, Human
ucuucugcuagugcccugccccugucucugcc

SEQ ID NO: 242589 - RNA, 32 nt, Human
ucuucugcucuuccucaacuaccaaagaaaaa

SEQ ID NO: 242590 - RNA, 32 nt, Human
ucuucugcucuuucuucuuccacacaugcaag

SEQ ID NO: 242591 - RNA, 32 nt, Human
ucuucugcugugcgcucagcuuccgacgggag

SEQ ID NO: 242592 - RNA, 32 nt, Human
ucuucugcuugaggaacugacugugaagcgac

SEQ ID NO: 242593 - RNA, 32 nt, Human
ucuucuggaaaaucauggauuuucauauuucu

SEQ ID NO: 242594 - RNA, 32 nt, Human
ucuucuggacucuucucucaggcaagaaaggc

SEQ ID NO: 242595 - RNA, 32 nt, Human
ucuucuggagaaaaaggugccaucucaggaga

SEQ ID NO: 242596 - RNA, 32 nt, Human
ucuucuggagcaggaagcaaauguccuggaau

SEQ ID NO: 242597 - RNA, 32 nt, Human
ucuucuggaggaagacuggacaaaggggguca

SEQ ID NO: 242598 - RNA, 32 nt, Human
ucuucuggagugacucaaaugcagaggaagcc

SEQ ID NO: 242599 - RNA, 32 nt, Human
ucuucuggaucugccuauguuuuccuuucuca

SEQ ID NO: 242600 - RNA, 32 nt, Human
ucuucuggcaaaaacugccagaauaaaacagc

SEQ ID NO: 242601 - RNA, 32 nt, Human
ucuucuggccagggccugugcugcagucgggg

SEQ ID NO: 242602 - RNA, 32 nt, Human
ucuucuggccuaaaugaauauuuaugugcaaa

SEQ ID NO: 242603 - RNA, 32 nt, Human
ucuucuggcuccucgaggguagacccugaccc

SEQ ID NO: 242604 - RNA, 21 nt, Human
ucuucuggcugggcgcagugg

SEQ ID NO: 242605 - RNA, 32 nt, Human
ucuucuggcuuuucagcuguucuuuguagucc

SEQ ID NO: 242606 - RNA, 32 nt, Human
ucuucuggggaccccagaggugucugugcuga

SEQ ID NO: 242607 - RNA, 32 nt, Human
ucuucuggggccacccuccagccuggggcauc

SEQ ID NO: 242608 - RNA, 32 nt, Human
ucuucuggguuaggccuugccuaggcauagcc

SEQ ID NO: 242609 - RNA, 32 nt, Human
ucuucuggugcaaacaguugcuuguggacuua

SEQ ID NO: 242610 - RNA, 32 nt, Human
ucuucugguugcaggugcaaagugacuuuguu

SEQ ID NO: 242611 - RNA, 32 nt, Human
ucuucuguaaagaugucuaggacgaaauauuu

SEQ ID NO: 242612 - RNA, 32 nt, Human
ucuucuguaggugagagaaaauaaguaagucu

SEQ ID NO: 242613 - RNA, 32 nt, Human
ucuucuguaguggaugugaaauuuccuuuagu

SEQ ID NO: 242614 - RNA, 32 nt, Human
ucuucugucaccuaggcuggaguguagugaca

SEQ ID NO: 242615 - RNA, 32 nt, Human
ucuucuguccaaggaacaucaucugaggaucg

SEQ ID NO: 242616 - RNA, 32 nt, Human
ucuucugucuucauuuuggccccagcauucuu

SEQ ID NO: 242617 - RNA, 32 nt, Human
ucuucuguuagugccaugcgaguccugaacac

SEQ ID NO: 242618 - RNA, 32 nt, Human
ucuucuguuaucuuugacauguaacauccuuu

SEQ ID NO: 242619 - RNA, 32 nt, Human
ucuucuuacuggcacaguuggcaccagucagu

SEQ ID NO: 242620 - RNA, 32 nt, Human
ucuucuuagcagcucaucagcuuauaaacuac

SEQ ID NO: 242621 - RNA, 32 nt, Human
ucuucuuagcgccuacccucauaccuaucucc

SEQ ID NO: 242622 - RNA, 32 nt, Human
ucuucuuauucccauucccauucuggaauccu

SEQ ID NO: 242623 - RNA, 32 nt, Human
ucuucuucaccuuugcauccucauagcuuagc

SEQ ID NO: 242624 - RNA, 32 nt, Human
ucuucuucagagaggcaggagggcgguccgaa

SEQ ID NO: 242625 - RNA, 32 nt, Human
ucuucuucagccacugcucuuuggccucuuac

SEQ ID NO: 242626 - RNA, 32 nt, Human
ucuucuucauauucuaaaaccauuccauuucc

SEQ ID NO: 242627 - RNA, 32 nt, Human
ucuucuucauuaauucuccaucuagucuugug

SEQ ID NO: 242628 - RNA, 32 nt, Human
ucuucuuccacacuaggcugggcccagcaaua

SEQ ID NO: 242629 - RNA, 32 nt, Human
ucuucuuccauucagugacauccacagauuau

SEQ ID NO: 242630 - RNA, 32 nt, Human
ucuucuuccccaauaccuggcucuaacccagc

SEQ ID NO: 242631 - RNA, 32 nt, Human
ucuucuucccgcaccuucuucucccccgcagu

SEQ ID NO: 242632 - RNA, 32 nt, Human
ucuucuucccuaucuccauccaaggcagauuu

SEQ ID NO: 242633 - RNA, 32 nt, Human
ucuucuucccuugaguaacucgccuucuguau

SEQ ID NO: 242634 - RNA, 22 nt, Human
ucuucuuccguaccacuugaca

SEQ ID NO: 242635 - RNA, 32 nt, Human
ucuucuuccuucugucccuccugccuuccuuc

SEQ ID NO: 242636 - RNA, 32 nt, Human
ucuucuucuccucuccggcuucgcgcggcccu

SEQ ID NO: 242637 - RNA, 32 nt, Human
ucuucuucuccucuucuucucucucuugccuc

SEQ ID NO: 242638 - RNA, 32 nt, Human
ucuucuucuggcccuugaggcaggucuggaga

SEQ ID NO: 242639 - RNA, 32 nt, Human
ucuucuucuuccucaccuccuucuaccccacc

SEQ ID NO: 242640 - RNA, 32 nt, Human
ucuucuucuucuuccuccuccuccuccucuuu

SEQ ID NO: 242641 - RNA, 32 nt, Human
ucuucuugaacccuuggugcacagauccauau

SEQ ID NO: 242642 - RNA, 32 nt, Human
ucuucuugaauccauugcagauugacuuccac

SEQ ID NO: 242643 - RNA, 32 nt, Human
ucuucuugacccuucucuuuaaaggguaaaau

SEQ ID NO: 242644 - RNA, 32 nt, Human
ucuucuugaggugggguggagguggggagcaa

SEQ ID NO: 242645 - RNA, 32 nt, Human
ucuucuugcuaucuccuauaccaauaaauacg

SEQ ID NO: 242646 - RNA, 32 nt, Human
ucuucuugcuccucauccuauuuccuuugucu

SEQ ID NO: 242647 - RNA, 32 nt, Human
ucuucuugcugcagccugccccuagacaugga

SEQ ID NO: 242648 - RNA, 32 nt, Human
ucuucuuggagcuguaggucuugaagcagcaa

SEQ ID NO: 242649 - RNA, 32 nt, Human
ucuucuuggaggacaggaggagaggcgaaggc

SEQ ID NO: 242650 - RNA, 32 nt, Human
ucuucuuggcauccuucuuaugcuacuucucc

SEQ ID NO: 242651 - RNA, 32 nt, Human
ucuucuuggcugcagccucuuccccacuuccu

SEQ ID NO: 242652 - RNA, 32 nt, Human
ucuucuuggcugcugcuguuuucuucauuuua

SEQ ID NO: 242653 - RNA, 32 nt, Human
ucuucuugugaacagcguggggagaggaaaau

SEQ ID NO: 242654 - RNA, 22 nt, Human
ucuucuuuacagauuacucagu

SEQ ID NO: 242655 - RNA, 32 nt, Human
ucuucuuuauuauuuuggaugaugucauauga

SEQ ID NO: 242656 - RNA, 32 nt, Human
ucuucuuucaacguucacgucuugcagggcac

SEQ ID NO: 242657 - RNA, 32 nt, Human
ucuucuuuccacccugucccuaucucuaccac

SEQ ID NO: 242658 - RNA, 32 nt, Human
ucuucuuuccagccucacccuaaucucuguga

SEQ ID NO: 242659 - RNA, 32 nt, Human
ucuucuuuccauccccuagaaauccugggagg

SEQ ID NO: 242660 - RNA, 21 nt, Human
ucuucuuuccauuuauuucgu

SEQ ID NO: 242661 - RNA, 21 nt, Human
ucuucuuuccugggacauggu

SEQ ID NO: 242662 - RNA, 32 nt, Human
ucuucuuucucaauaccugcccugucucaaau

SEQ ID NO: 242663 - RNA, 32 nt, Human
ucuucuuucucccaugcuuuuguucauucagu

SEQ ID NO: 242664 - RNA, 24 nt, Human
ucuucuuucuugguuuccuuuagu

SEQ ID NO: 242665 - RNA, 32 nt, Human
ucuucuuucuuuccuuuuuccuuucuucuucc

SEQ ID NO: 242666 - RNA, 32 nt, Human
ucuucuuucuuucuuuugcaggaguuuguggu

SEQ ID NO: 242667 - RNA, 32 nt, Human
ucuucuuugagcccucuccuccacugcccccg

SEQ ID NO: 242668 - RNA, 32 nt, Human
ucuucuuugcaagcuccauucuaccuggauga

SEQ ID NO: 242669 - RNA, 32 nt, Human
ucuucuuugccauuugcaucuacagcauuuau

SEQ ID NO: 242670 - RNA, 32 nt, Human
ucuucuuugccucugcuggaguccggggagug

SEQ ID NO: 242671 - RNA, 32 nt, Human
ucuucuuugcuuauuauacagcaacaagaauc

SEQ ID NO: 242672 - RNA, 32 nt, Human
ucuucuuuggguaaacgugugacgggggaaag

SEQ ID NO: 242673 - RNA, 32 nt, Human
ucuucuuugugccuggcuucuuucacuuaaca

SEQ ID NO: 242674 - RNA, 32 nt, Human
ucuucuuuuaccuuuuugucuaccucauaguc

SEQ ID NO: 242675 - RNA, 32 nt, Human
ucuucuuuucccuuuuugucccagagcucagc

SEQ ID NO: 242676 - RNA, 24 nt, Human
ucuucuuuucuucuucccucauca

SEQ ID NO: 242677 - RNA, 32 nt, Human
ucuucuuuugagauggagucuugcucugucac

SEQ ID NO: 242678 - RNA, 32 nt, Human
ucuugaaaaccucacugcaaggcugaagcuga

SEQ ID NO: 242679 - RNA, 32 nt, Human
ucuugaaaagcuggagcuucaccagaaugcac

SEQ ID NO: 242680 - RNA, 32 nt, Human
ucuugaaaaugauugggguuuaauaccacugc

SEQ ID NO: 242681 - RNA, 32 nt, Human
ucuugaaacagcccuguuguucugucauggcc

SEQ ID NO: 242682 - RNA, 32 nt, Human
ucuugaaacccccauucuguuuccagcccaga

SEQ ID NO: 242683 - RNA, 32 nt, Human
ucuugaaacuugaggaaacaagauacauacua

SEQ ID NO: 242684 - RNA, 32 nt, Human
ucuugaaagccuuacugcaaaugaguauuaua

SEQ ID NO: 242685 - RNA, 22 nt, Human
ucuugaaauguucuguaguguu

SEQ ID NO: 242686 - RNA, 32 nt, Human
ucuugaaauuuccuaauagcaagaccagcgaa

SEQ ID NO: 242687 - RNA, 32 nt, Human
ucuugaaccaggagguggacguugcagugauc

SEQ ID NO: 242688 - RNA, 32 nt, Human
ucuugaacccaggagacggaaguugcagugag

SEQ ID NO: 242689 - RNA, 32 nt, Human
ucuugaacccaggaggcagagguugcagugag

SEQ ID NO: 242690 - RNA, 32 nt, Human
ucuugaacccaggaggccgagguugcagugag

SEQ ID NO: 242691 - RNA, 32 nt, Human
ucuugaacccaggaggcggagguugcagugag

SEQ ID NO: 242692 - RNA, 32 nt, Human
ucuugaacccaggaggcggagguugcggugag

SEQ ID NO: 242693 - RNA, 32 nt, Human
ucuugaacccaggagguggaggaugcagugaa

SEQ ID NO: 242694 - RNA, 32 nt, Human
ucuugaacccaggagguggagguugcagugag

SEQ ID NO: 242695 - RNA, 32 nt, Human
ucuugaacccgggaguuggagguugcagugag

SEQ ID NO: 242696 - RNA, 32 nt, Human
ucuugaaccuaggagguggagguugcagugag

SEQ ID NO: 242697 - RNA, 32 nt, Human
ucuugaaccugggaggugaagguugcuguggg

SEQ ID NO: 242698 - RNA, 32 nt, Human
ucuugaacuaugaguacugcaaucuuuuuaau

SEQ ID NO: 242699 - RNA, 22 nt, Human
ucuugaacuccugaccucguga

SEQ ID NO: 242700 - RNA, 24 nt, Human
ucuugaacuccuggccuccuugaa

SEQ ID NO: 242701 - RNA, 32 nt, Human
ucuugaacugaggagguggagguugcagugag

SEQ ID NO: 242702 - RNA, 32 nt, Human
ucuugaacugauuaagaauggaucauaaaaua

SEQ ID NO: 242703 - RNA, 22 nt, Human
ucuugaacuucugaccuuguga

SEQ ID NO: 242704 - RNA, 32 nt, Human
ucuugaagacuaauuaguuacacuggauaugc

SEQ ID NO: 242705 - RNA, 32 nt, Human
ucuugaagcagggcuucccaaugcccuuuucc

SEQ ID NO: 242706 - RNA, 32 nt, Human
ucuugaagccagggauaccauaucaggaacua

SEQ ID NO: 242707 - RNA, 32 nt, Human
ucuugaaggaagcagaaagagggacuccucuc

SEQ ID NO: 242708 - RNA, 32 nt, Human
ucuugaagucagagucuaucuccucugucacu

SEQ ID NO: 242709 - RNA, 32 nt, Human
ucuugaaguuuuggguuccugcccugaugguc

SEQ ID NO: 242710 - RNA, 32 nt, Human
ucuugaauaaaucauguguucuuugcaauggg

SEQ ID NO: 242711 - RNA, 32 nt, Human
ucuugaauacauguugggaagaaucggugucu

SEQ ID NO: 242712 - RNA, 23 nt, Human
ucuugaauagaaugauccacuca

SEQ ID NO: 242713 - RNA, 32 nt, Human
ucuugaauagagagcugcaaaccaccaggggg

SEQ ID NO: 242714 - RNA, 32 nt, Human
ucuugaaugcagacuucauuuguauuuuucgu

SEQ ID NO: 242715 - RNA, 32 nt, Human
ucuugaauucaaauacucccaaugagcuugua

SEQ ID NO: 242716 - RNA, 32 nt, Human
ucuugacaaauugagauuugcugauggaagaa

SEQ ID NO: 242717 - RNA, 32 nt, Human
ucuugacaaauugagauuugcugauggaagca

SEQ ID NO: 242718 - RNA, 32 nt, Human
ucuugacaaccaagggccuccgucuggauuuc

SEQ ID NO: 242719 - RNA, 32 nt, Human
ucuugacacagcugugucuuaguaugagaaac

SEQ ID NO: 242720 - RNA, 32 nt, Human
ucuugaccacaccugugccuggcacugugcac

SEQ ID NO: 242721 - RNA, 32 nt, Human
ucuugaccagcacucccucccaaccagagaau

SEQ ID NO: 242722 - RNA, 32 nt, Human
ucuugacccagggaaagggaagcaggguagga

SEQ ID NO: 242723 - RNA, 32 nt, Human
ucuugacccaucucccccucacugaaugccuc

SEQ ID NO: 242724 - RNA, 24 nt, Human
ucuugaccucaaaugauccaccca

SEQ ID NO: 242725 - RNA, 32 nt, Human
ucuugaccucaagugauccaccugucucagcc

SEQ ID NO: 242726 - RNA, 32 nt, Human
ucuugaccucaagugauccaccugucucggcc

SEQ ID NO: 242727 - RNA, 32 nt, Human
ucuugaccucaagugauccgcccaccuuggcc

SEQ ID NO: 242728 - RNA, 32 nt, Human
ucuugaccucaagugaucuguccaccuuggcc

SEQ ID NO: 242729 - RNA, 23 nt, Human
ucuugaccucaggcugccucacu

SEQ ID NO: 242730 - RNA, 21 nt, Human
ucuugaccucaggugauccac

SEQ ID NO: 242731 - RNA, 24 nt, Human
ucuugaccucaggugauccaccca

SEQ ID NO: 242732 - RNA, 21 nt, Human
ucuugaccucaggugauccau

SEQ ID NO: 242733 - RNA, 32 nt, Human
ucuugaccucaggugauccugagccucagccu

SEQ ID NO: 242734 - RNA, 24 nt, Human
ucuugaccucaggugaucugcccg

SEQ ID NO: 242735 - RNA, 32 nt, Human
ucuugaccucaugauccacccaccucggucuc

SEQ ID NO: 242736 - RNA, 32 nt, Human
ucuugaccucaugaucugcccaccucggccuc

SEQ ID NO: 242737 - RNA, 22 nt, Human
ucuugaccucauguuccacccg

SEQ ID NO: 242738 - RNA, 32 nt, Human
ucuugaccuccaccgcccuccucacagccaug

SEQ ID NO: 242739 - RNA, 21 nt, Human
ucuugaccuccuccuccuuca

SEQ ID NO: 242740 - RNA, 22 nt, Human
ucuugaccuccugauccaccca

SEQ ID NO: 242741 - RNA, 24 nt, Human
ucuugaccucgggugauccaccca

SEQ ID NO: 242742 - RNA, 32 nt, Human
ucuugaccucgugauccacccaccucggccuc

SEQ ID NO: 242743 - RNA, 32 nt, Human
ucuugaccucgugauccgcccaccucagccuc

SEQ ID NO: 242744 - RNA, 22 nt, Human
ucuugaccucgugaucugcccg

SEQ ID NO: 242745 - RNA, 22 nt, Human
ucuugaccucuugauccacccg

SEQ ID NO: 242746 - RNA, 32 nt, Human
ucuugaccuguccccucuggcugccucugagu

SEQ ID NO: 242747 - RNA, 32 nt, Human
ucuugaccuuuggccacugccuucccagcugc

SEQ ID NO: 242748 - RNA, 32 nt, Human
ucuugaccuuuuugcauggcuuuuugcugaaa

SEQ ID NO: 242749 - RNA, 32 nt, Human
ucuugacucaaccuuccagcagucuccacugc

SEQ ID NO: 242750 - RNA, 32 nt, Human
ucuugacucacuacaaccuccgccucccaggu

SEQ ID NO: 242751 - RNA, 32 nt, Human
ucuugacucacugcaacaucugccucccgggu

SEQ ID NO: 242752 - RNA, 32 nt, Human
ucuugacucacugcaaccuccaccucccaggu

SEQ ID NO: 242753 - RNA, 32 nt, Human
ucuugacucacugcaaccuccgccucacagcu

SEQ ID NO: 242754 - RNA, 32 nt, Human
ucuugacucacugcaaccuccgccucccaggu

SEQ ID NO: 242755 - RNA, 32 nt, Human
ucuugacucacugcaaccucugccucccaggu

SEQ ID NO: 242756 - RNA, 32 nt, Human
ucuugacucacugcaaccucugccucucgggu

SEQ ID NO: 242757 - RNA, 32 nt, Human
ucuugacucacugcaacuucugccacccaggu

SEQ ID NO: 242758 - RNA, 32 nt, Human
ucuugacucacugcaaucuccaccucccacag

SEQ ID NO: 242759 - RNA, 32 nt, Human
ucuugacucacugcaauucugccuccuggguu

SEQ ID NO: 242760 - RNA, 32 nt, Human
ucuugacucacugcagccucaaccucccaggc

SEQ ID NO: 242761 - RNA, 32 nt, Human
ucuugacucacugcauuuuccaccuugggagu

SEQ ID NO: 242762 - RNA, 32 nt, Human
ucuugacuccacccucaccaugucuucucaca

SEQ ID NO: 242763 - RNA, 32 nt, Human
ucuugacucgcagcaaccuccgccuccugggu

SEQ ID NO: 242764 - RNA, 32 nt, Human
ucuugacucgcugcagucuccaccuccaggau

SEQ ID NO: 242765 - RNA, 32 nt, Human
ucuugacucuagggcagaacagaucuaaccau

SEQ ID NO: 242766 - RNA, 32 nt, Human
ucuugacucugggaacagcugcuacccccaag

SEQ ID NO: 242767 - RNA, 32 nt, Human
ucuugacugcaccccaaagaggcuccaggauc

SEQ ID NO: 242768 - RNA, 32 nt, Human
ucuugacuguuuucccuacuugcugacuuaac

SEQ ID NO: 242769 - RNA, 32 nt, Human
ucuugacuuagagugucacuucacuuuauaga

SEQ ID NO: 242770 - RNA, 24 nt, Human
ucuugacuucaagugauccacccg

SEQ ID NO: 242771 - RNA, 32 nt, Human
ucuugacuucaagugauccacccgccucagcc

SEQ ID NO: 242772 - RNA, 21 nt, Human
ucuugacuucagaugauccau

SEQ ID NO: 242773 - RNA, 23 nt, Human
ucuugacuuuaccuuggcacuug

SEQ ID NO: 242774 - RNA, 22 nt, Human
ucuugacuuuaucuccgcugca

SEQ ID NO: 242775 - RNA, 32 nt, Human
ucuugagaaguagaacaaggcacuucaguccu

SEQ ID NO: 242776 - RNA, 32 nt, Human
ucuugagaccaaaucuggaacaugguguaucu

SEQ ID NO: 242777 - RNA, 32 nt, Human
ucuugagaccagccugggcaacaggcuauuuu

SEQ ID NO: 242778 - RNA, 32 nt, Human
ucuugagacucaacuccugggaggagaggguc

SEQ ID NO: 242779 - RNA, 32 nt, Human
ucuugagaggcugaucaucagggguucacuuu

SEQ ID NO: 242780 - RNA, 32 nt, Human
ucuugagauccccuuccucaccugccaaucaa

SEQ ID NO: 242781 - RNA, 32 nt, Human
ucuugagauggcucuggccaggaucugccccc

SEQ ID NO: 242782 - RNA, 32 nt, Human
ucuugagcaaacugaguuagggaggguaugcu

SEQ ID NO: 242783 - RNA, 21 nt, Human
ucuugagcaagcuaaagaaac

SEQ ID NO: 242784 - RNA, 32 nt, Human
ucuugagcaguggcugguccagggcuagugac

SEQ ID NO: 242785 - RNA, 32 nt, Human
ucuugagccaucauucaucccuuaacaggcac

SEQ ID NO: 242786 - RNA, 32 nt, Human
ucuugagcccaggagaugcaggcuugcaguga

SEQ ID NO: 242787 - RNA, 32 nt, Human
ucuugagcccaggaguuugagacuagccuggc

SEQ ID NO: 242788 - RNA, 32 nt, Human
ucuugagcccaggaguuugagacuagccuggg

SEQ ID NO: 242789 - RNA, 32 nt, Human
ucuugagcccaggaguuugaggccagacugca

SEQ ID NO: 242790 - RNA, 32 nt, Human
ucuugagcccagggguuugaggcugcagugag

SEQ ID NO: 242791 - RNA, 32 nt, Human
ucuugagccugggaggucaaggcugcagugaa

SEQ ID NO: 242792 - RNA, 32 nt, Human
ucuugagccugggaggucaaggcugcagugag

SEQ ID NO: 242793 - RNA, 32 nt, Human
ucuugagcguguccaccuucucccucuccacu

SEQ ID NO: 242794 - RNA, 32 nt, Human
ucuugagcugggggugugagggggagggccug

SEQ ID NO: 242795 - RNA, 32 nt, Human
ucuugaggaaacugaggcaaagaggagggcag

SEQ ID NO: 242796 - RNA, 32 nt, Human
ucuugaggccaagauuaagagauguucuuaca

SEQ ID NO: 242797 - RNA, 32 nt, Human
ucuugaggcguuuccagggcgcugagucugag

SEQ ID NO: 242798 - RNA, 32 nt, Human
ucuugaggcuguagccugugucaagcuguuuc

SEQ ID NO: 242799 - RNA, 32 nt, Human
ucuugagggucugcugccccagccuggcagca

SEQ ID NO: 242800 - RNA, 32 nt, Human
ucuugaguauguauauugaggccaucugagcu

SEQ ID NO: 242801 - RNA, 32 nt, Human
ucuugaguauguauguugaggccaucugagcu

SEQ ID NO: 242802 - RNA, 32 nt, Human
ucuugaguauguauguugaggccaucugcacu

SEQ ID NO: 242803 - RNA, 20 nt, Human
ucuugagucaagaguggcag

SEQ ID NO: 242804 - RNA, 32 nt, Human
ucuugagucuguacugaggaccagccuguaca

SEQ ID NO: 242805 - RNA, 32 nt, Human
ucuugagucuuucuguccaucccauucuauuc

SEQ ID NO: 242806 - RNA, 24 nt, Human
ucuugaguuaauuuucugccucca

SEQ ID NO: 242807 - RNA, 32 nt, Human
ucuugaguuacuguacuauagcauuuuauugu

SEQ ID NO: 242808 - RNA, 32 nt, Human
ucuugaguucaagcgauucuccugccucagcu

SEQ ID NO: 242809 - RNA, 32 nt, Human
ucuugauaguuucaaguagcuaugauggucuc

SEQ ID NO: 242810 - RNA, 32 nt, Human
ucuugaucaucagccaggauuuugccacagca

SEQ ID NO: 242811 - RNA, 32 nt, Human
ucuugauccacaugcauggaagugagaauccu

SEQ ID NO: 242812 - RNA, 23 nt, Human
ucuugaucucuuggaucuccuca

SEQ ID NO: 242813 - RNA, 32 nt, Human
ucuugaucugcagcuucucugaaguuuggaaa

SEQ ID NO: 242814 - RNA, 32 nt, Human
ucuugaugaucccacuuccuguuuccaucugc

SEQ ID NO: 242815 - RNA, 32 nt, Human
ucuugaugauggcgguggagguggugguugua

SEQ ID NO: 242816 - RNA, 32 nt, Human
ucuugaugccuagagagcuggcccagccaaca

SEQ ID NO: 242817 - RNA, 32 nt, Human
ucuugauuaaagucuucaguugaaauuccacu

SEQ ID NO: 242818 - RNA, 32 nt, Human
ucuugauuccaaauccuaaaccaggaagaguu

SEQ ID NO: 242819 - RNA, 32 nt, Human
ucuugauuccaggacacccuccccugugucua

SEQ ID NO: 242820 - RNA, 32 nt, Human
ucuugauugaaggaggauagggcauuaaagug

SEQ ID NO: 242821 - RNA, 32 nt, Human
ucuugauuuuugaauguauuuguuucaggaag

SEQ ID NO: 242822 - RNA, 32 nt, Human
ucuugcaagacauuucuccuuucacagaacug

SEQ ID NO: 242823 - RNA, 32 nt, Human
ucuugcacaccccucccuguaaccaaggaaca

SEQ ID NO: 242824 - RNA, 32 nt, Human
ucuugcacacugcaacaacucugugacacugg

SEQ ID NO: 242825 - RNA, 32 nt, Human
ucuugcacaugaacugucacauguuuaaaaau

SEQ ID NO: 242826 - RNA, 32 nt, Human
ucuugcacauuaggaagcagaauauccuccag

SEQ ID NO: 242827 - RNA, 19 nt, Human
ucuugcaccagcagcauga

SEQ ID NO: 242828 - RNA, 32 nt, Human
ucuugcaccucagcagcugaaggucucagaga

SEQ ID NO: 242829 - RNA, 20 nt, Human
ucuugcaccuucuccugccu

SEQ ID NO: 242830 - RNA, 32 nt, Human
ucuugcacgcgcucccugccugggcacaccaa

SEQ ID NO: 242831 - RNA, 22 nt, Human
ucuugcacgcucucucuucucu

SEQ ID NO: 242832 - RNA, 26 nt, Human
ucuugcacugaucuuucuccucuccu

SEQ ID NO: 242833 - RNA, 32 nt, Human
ucuugcagacuggcccacccugccuacuuccc

SEQ ID NO: 242834 - RNA, 32 nt, Human
ucuugcagagcuagggcucugaaggggaggga

SEQ ID NO: 242835 - RNA, 32 nt, Human
ucuugcagcaucagagaguucacacuagagaa

SEQ ID NO: 242836 - RNA, 32 nt, Human
ucuugcagccuccccgccccucccgcaacgcu

SEQ ID NO: 242837 - RNA, 32 nt, Human
ucuugcagcuacucuguggucaggccgggucc

SEQ ID NO: 242838 - RNA, 32 nt, Human
ucuugcagcuggugccauccaugucucacagc

SEQ ID NO: 242839 - RNA, 32 nt, Human
ucuugcaggcugggccggcuucaugccagugc

SEQ ID NO: 242840 - RNA, 32 nt, Human
ucuugcagggcuggcccugccugcuccugcgg

SEQ ID NO: 242841 - RNA, 32 nt, Human
ucuugcaguccggggaaagugugcagauggau

SEQ ID NO: 242842 - RNA, 32 nt, Human
ucuugcagugacggaaaguugcagccccuggu

SEQ ID NO: 242843 - RNA, 32 nt, Human
ucuugcauaaggcaguuccuggagacccagca

SEQ ID NO: 242844 - RNA, 32 nt, Human
ucuugcaucagccuguggauguaugccuacca

SEQ ID NO: 242845 - RNA, 32 nt, Human
ucuugcaucccucucucuuccuuuuccugccg

SEQ ID NO: 242846 - RNA, 32 nt, Human
ucuugcaucuucuuccacugggcucuggauua

SEQ ID NO: 242847 - RNA, 32 nt, Human
ucuugcaugagacuccuggggccugggcacag

SEQ ID NO: 242848 - RNA, 32 nt, Human
ucuugcauuuggaaaguacuuuauccagaaaa

SEQ ID NO: 242849 - RNA, 32 nt, Human
ucuugccacaaaaaucugcaaauuugauaauu

SEQ ID NO: 242850 - RNA, 32 nt, Human
ucuugccacagauugaggccacuuuugagcaa

SEQ ID NO: 242851 - RNA, 32 nt, Human
ucuugccacccaccauccugcccaggcccuga

SEQ ID NO: 242852 - RNA, 32 nt, Human
ucuugccaccccagguaucccugguauugucc

SEQ ID NO: 242853 - RNA, 32 nt, Human
ucuugccacugcacaccagccugggcaacaca

SEQ ID NO: 242854 - RNA, 32 nt, Human
ucuugccacugcacuccagccugggcaacaga

SEQ ID NO: 242855 - RNA, 32 nt, Human
ucuugccacugcucuccagccugagcgacaga

SEQ ID NO: 242856 - RNA, 32 nt, Human
ucuugccacuguacuccagccugaagagcgag

SEQ ID NO: 242857 - RNA, 32 nt, Human
ucuugccagcccagcccugccuccccggucuc

SEQ ID NO: 242858 - RNA, 32 nt, Human
ucuugccaggaggaggaaugagagugauguug

SEQ ID NO: 242859 - RNA, 32 nt, Human
ucuugccagggugggaaguagaauuucaugua

SEQ ID NO: 242860 - RNA, 32 nt, Human
ucuugccauaaugguaaaggacugauugauau

SEQ ID NO: 242861 - RNA, 32 nt, Human
ucuugccauagagaggaggagaagaaacuaac

SEQ ID NO: 242862 - RNA, 32 nt, Human
ucuugccaugaucagacaugcagcugccuacc

SEQ ID NO: 242863 - RNA, 32 nt, Human
ucuugccaugccugugugccccacagaccuaa

SEQ ID NO: 242864 - RNA, 32 nt, Human
ucuugccauugcacuccagcugagagugugac

SEQ ID NO: 242865 - RNA, 23 nt, Human
ucuugccauuuguauuaucuuua

SEQ ID NO: 242866 - RNA, 32 nt, Human
ucuugcccaauacuuugcugcuugccuauacc

SEQ ID NO: 242867 - RNA, 32 nt, Human
ucuugcccagagcugugcagugcaguggcuga

SEQ ID NO: 242868 - RNA, 32 nt, Human
ucuugcccagcugcccagcagagaguggacga

SEQ ID NO: 242869 - RNA, 32 nt, Human
ucuugcccaggcccuccugggagggggacagg

SEQ ID NO: 242870 - RNA, 32 nt, Human
ucuugcccauuuucugcucgacucgccccuga

SEQ ID NO: 242871 - RNA, 32 nt, Human
ucuugccccucagaccuugcauccacagaagc

SEQ ID NO: 242872 - RNA, 32 nt, Human
ucuugcccuagauuguaaauuaaguuuggcau

SEQ ID NO: 242873 - RNA, 32 nt, Human
ucuugcccugcuccuucauugucuauagggca

SEQ ID NO: 242874 - RNA, 32 nt, Human
ucuugcccugcucuccgcuccacccccugcca

SEQ ID NO: 242875 - RNA, 32 nt, Human
ucuugcccuuaacccagcuucuuccaaagaua

SEQ ID NO: 242876 - RNA, 32 nt, Human
ucuugcccuuuggccaacagauuucuuguccu

SEQ ID NO: 242877 - RNA, 32 nt, Human
ucuugcccuuuucagcagcuugcccagcucuu

SEQ ID NO: 242878 - RNA, 32 nt, Human
ucuugccguccaccccgggccaugccagugug

SEQ ID NO: 242879 - RNA, 32 nt, Human
ucuugccguccaggcuggagugcaauggcgug

SEQ ID NO: 242880 - RNA, 21 nt, Human
ucuugccguucuguaaguguu

SEQ ID NO: 242881 - RNA, 31 nt, Human
ucuugccuaguguccagagcagcagagauuu

SEQ ID NO: 242882 - RNA, 32 nt, Human
ucuugccucacugcaacgccugccucucaggc

SEQ ID NO: 242883 - RNA, 28 nt, Human
ucuugccucagagcagccucaucccagg

SEQ ID NO: 242884 - RNA, 32 nt, Human
ucuugccucauuuugcuucccaucugaagagu

SEQ ID NO: 242885 - RNA, 32 nt, Human
ucuugccuccacuucauaaugucauaaaagcc

SEQ ID NO: 242886 - RNA, 32 nt, Human
ucuugccuccuucuggcugccugcccccuccc

SEQ ID NO: 242887 - RNA, 32 nt, Human
ucuugccucuacuuugauuucagagucuuucc

SEQ ID NO: 242888 - RNA, 32 nt, Human
ucuugccugccuguuuuugaccucugcaugag

SEQ ID NO: 242889 - RNA, 32 nt, Human
ucuugccugcuguuccaguucuggucaagggc

SEQ ID NO: 242890 - RNA, 32 nt, Human
ucuugccuggagccugagaaagggaggagaga

SEQ ID NO: 242891 - RNA, 21 nt, Human
ucuugccuggcucccagggcu

SEQ ID NO: 242892 - RNA, 22 nt, Human
ucuugccugggcccaccccuca

SEQ ID NO: 242893 - RNA, 32 nt, Human
ucuugccuguaacccuagcacuuugggaggcc

SEQ ID NO: 242894 - RNA, 24 nt, Human
ucuugccuguaaucccagcacuuu

SEQ ID NO: 242895 - RNA, 32 nt, Human
ucuugccuguaaucccagcacuuugauaggcu

SEQ ID NO: 242896 - RNA, 32 nt, Human
ucuugccuguaaucccagcacuuugggaggcc

SEQ ID NO: 242897 - RNA, 32 nt, Human
ucuugccuguaaucccagcacuuugggaggcu

SEQ ID NO: 242898 - RNA, 32 nt, Human
ucuugccuguaaucccagcacuuuggggagga

SEQ ID NO: 242899 - RNA, 22 nt, Human
ucuugccuguaaucccagcauu

SEQ ID NO: 242900 - RNA, 32 nt, Human
ucuugccuguaaucccagcauucugggaggcc

SEQ ID NO: 242901 - RNA, 32 nt, Human
ucuugccuguaaucuuagcacuuugggaggcc

SEQ ID NO: 242902 - RNA, 32 nt, Human
ucuugccuguaauuccagcuacuugggaggcu

SEQ ID NO: 242903 - RNA, 32 nt, Human
ucuugccuguuucucuugaggcugccuuggca

SEQ ID NO: 242904 - RNA, 22 nt, Human
ucuugccuuaaccagucucuca

SEQ ID NO: 242905 - RNA, 32 nt, Human
ucuugccuuccuggcaucauuuccuccuacca

SEQ ID NO: 242906 - RNA, 24 nt, Human
ucuugccuugggacccagucccuc

SEQ ID NO: 242907 - RNA, 32 nt, Human
ucuugcgccuguacucccagcacuuugggagg

SEQ ID NO: 242908 - RNA, 32 nt, Human
ucuugcgcuugcagauaccuggcaaagaacuc

SEQ ID NO: 242909 - RNA, 32 nt, Human
ucuugcgggaggcgugggcugggauugcggug

SEQ ID NO: 242910 - RNA, 32 nt, Human
ucuugcgguggaguccuguugcugugagggag

SEQ ID NO: 242911 - RNA, 32 nt, Human
ucuugcgguggcguaaucucucagccuuucug

SEQ ID NO: 242912 - RNA, 32 nt, Human
ucuugcgucccugccagcauccuggaguccua

SEQ ID NO: 242913 - RNA, 32 nt, Human
ucuugcgugccuuuuaaaugcugacauuccuu

SEQ ID NO: 242914 - RNA, 32 nt, Human
ucuugcuaauuuccaaccauauugaauaaaug

SEQ ID NO: 242915 - RNA, 32 nt, Human
ucuugcuaccuccaccuccaccgccaccucca

SEQ ID NO: 242916 - RNA, 32 nt, Human
ucuugcuaccugugagcauccuucccagcaga

SEQ ID NO: 242917 - RNA, 23 nt, Human
ucuugcuaggagcccuucugucc

SEQ ID NO: 242918 - RNA, 32 nt, Human
ucuugcuauguugcccaagcuaguuucaaacu

SEQ ID NO: 242919 - RNA, 32 nt, Human
ucuugcuauuggaaacucagcacauuugaacu

SEQ ID NO: 242920 - RNA, 32 nt, Human
ucuugcucaaguucuggucaacuaguagccug

SEQ ID NO: 242921 - RNA, 32 nt, Human
ucuugcucaccgcccugauucuguuccucggc

SEQ ID NO: 242922 - RNA, 32 nt, Human
ucuugcucauccuugucccuuugacaauaagg

SEQ ID NO: 242923 - RNA, 32 nt, Human
ucuugcuccagcccaggcuggagugcaguggc

SEQ ID NO: 242924 - RNA, 32 nt, Human
ucuugcucccaugcugcugucccuucaggcuc

SEQ ID NO: 242925 - RNA, 32 nt, Human
ucuugcucccccacccuuccugaaacucuuga

SEQ ID NO: 242926 - RNA, 32 nt, Human
ucuugcuccuuacuccuccaucaucucuaaug

SEQ ID NO: 242927 - RNA, 32 nt, Human
ucuugcucgcccaggguggagugcaguggugu

SEQ ID NO: 242928 - RNA, 32 nt, Human
ucuugcucucccaggcuggagugcaguggugu

SEQ ID NO: 242929 - RNA, 32 nt, Human
ucuugcucuccccuccccuggcuuuccucucu

SEQ ID NO: 242930 - RNA, 21 nt, Human
ucuugcucucccuccccuccc

SEQ ID NO: 242931 - RNA, 31 nt, Human
ucuugcucugaugcucccaugcucaguacag

SEQ ID NO: 242932 - RNA, 32 nt, Human
ucuugcucugcuccuuucauccucgucucccc

SEQ ID NO: 242933 - RNA, 32 nt, Human
ucuugcucugcucucguucuccagaaggcugu

SEQ ID NO: 242934 - RNA, 32 nt, Human
ucuugcucugucgcccacccaggcuggaguac

SEQ ID NO: 242935 - RNA, 32 nt, Human
ucuugcucugucuacagccuaggccaacuagu

SEQ ID NO: 242936 - RNA, 32 nt, Human
ucuugcucugugacccagguugcagugagcca

SEQ ID NO: 242937 - RNA, 32 nt, Human
ucuugcucuucucuccccuuugccucccucug

SEQ ID NO: 242938 - RNA, 32 nt, Human
ucuugcucuuuuagcuagaguguaugugaaaa

SEQ ID NO: 242939 - RNA, 32 nt, Human
ucuugcugagauuauggaucugugccacaggg

SEQ ID NO: 242940 - RNA, 32 nt, Human
ucuugcugcccaggcuagagugcaauggugcg

SEQ ID NO: 242941 - RNA, 32 nt, Human
ucuugcugcccaggcuggagugcaauggugca

SEQ ID NO: 242942 - RNA, 32 nt, Human
ucuugcugcccaggcuggagugcaguggcuca

SEQ ID NO: 242943 - RNA, 21 nt, Human
ucuugcugcccccugugaccc

SEQ ID NO: 242944 - RNA, 24 nt, Human
ucuugcugccuuuucuccuguccu

SEQ ID NO: 242945 - RNA, 32 nt, Human
ucuugcugcuccguggccucugaggccccagg

SEQ ID NO: 242946 - RNA, 19 nt, Human
ucuugcugcuguccugucc

SEQ ID NO: 242947 - RNA, 32 nt, Human
ucuugcugcuugccucugcugcucuggucugg

SEQ ID NO: 242948 - RNA, 32 nt, Human
ucuugcuggaggaccugcaccuagccacuucu

SEQ ID NO: 242949 - RNA, 26 nt, Human
ucuugcuggcuacgccucuucugucc

SEQ ID NO: 242950 - RNA, 20 nt, Human
ucuugcuggcucaccugucc

SEQ ID NO: 242951 - RNA, 32 nt, Human
ucuugcugggagggucugcaggagaaccgcag

SEQ ID NO: 242952 - RNA, 32 nt, Human
ucuugcuggguccucagggagcugcaggagcg

SEQ ID NO: 242953 - RNA, 32 nt, Human
ucuugcugguuuggaauaggcugccauguguu

SEQ ID NO: 242954 - RNA, 32 nt, Human
ucuugcuguccacucccugccugccugcccgc

SEQ ID NO: 242955 - RNA, 32 nt, Human
ucuugcuguggacgaaauaucuggggguuagg

SEQ ID NO: 242956 - RNA, 29 nt, Human
ucuugcugugugccugugccuggggccuu

SEQ ID NO: 242957 - RNA, 25 nt, Human
ucuugcuuaaauuuuguccuauccu

SEQ ID NO: 242958 - RNA, 32 nt, Human
ucuugcuuacuacccaaagagcucugcagaag

SEQ ID NO: 242959 - RNA, 32 nt, Human
ucuugcuucaaaauugucccacaguggcauuc

SEQ ID NO: 242960 - RNA, 32 nt, Human
ucuugcuucacccuccucuguuguggaaugau

SEQ ID NO: 242961 - RNA, 32 nt, Human
ucuugcuucaggaaggugaagugcuucccauu

SEQ ID NO: 242962 - RNA, 32 nt, Human
ucuugcuucgcguccggcucucaggcccugga

SEQ ID NO: 242963 - RNA, 32 nt, Human
ucuugcuugagugcuggaacucaggccagaag

SEQ ID NO: 242964 - RNA, 32 nt, Human
ucuugcuuguggcgccuuccucaucucuauau

SEQ ID NO: 242965 - RNA, 32 nt, Human
ucuugcuuuaaagaguccuccuucccagcucu

SEQ ID NO: 242966 - RNA, 32 nt, Human
ucuugcuuuauucauccuccaucucaaaauga

SEQ ID NO: 242967 - RNA, 32 nt, Human
ucuugcuuuccaggguaucuaugugugugcau

SEQ ID NO: 242968 - RNA, 32 nt, Human
ucuugcuuucuuucuugcuuucuuucuugcuu

SEQ ID NO: 242969 - RNA, 32 nt, Human
ucuugcuuucuuucuuucuugcuuucuuucuu

SEQ ID NO: 242970 - RNA, 32 nt, Human
ucuugcuuuguugcccaggcuggucuugaacu

SEQ ID NO: 242971 - RNA, 32 nt, Human
ucuugcuuuguugcccagguuagucuuauucu

SEQ ID NO: 242972 - RNA, 32 nt, Human
ucuuggaaagguucuauuccugaucuccagcu

SEQ ID NO: 242973 - RNA, 32 nt, Human
ucuuggaacaaaugugagcuauuugaaaacaa

SEQ ID NO: 242974 - RNA, 32 nt, Human
ucuuggaacagcuacaguuucacaguaggaag

SEQ ID NO: 242975 - RNA, 32 nt, Human
ucuuggaacagcuucucuauguguggauucgu

SEQ ID NO: 242976 - RNA, 32 nt, Human
ucuuggaaccaccacaccuguuuaaagaaccu

SEQ ID NO: 242977 - RNA, 32 nt, Human
ucuuggaagaaaguauaaaauugaccggcauc

SEQ ID NO: 242978 - RNA, 21 nt, Human
ucuuggaagaagaaagaaaca

SEQ ID NO: 242979 - RNA, 32 nt, Human
ucuuggaagugaggcccggccccggacagggu

SEQ ID NO: 242980 - RNA, 32 nt, Human
ucuuggaauccuuggccugccugcaggccucu

SEQ ID NO: 242981 - RNA, 32 nt, Human
ucuuggaaucuguagaccagaucgguggaggu

SEQ ID NO: 242982 - RNA, 32 nt, Human
ucuuggacacugaaggaaaaggccaacuaggg

SEQ ID NO: 242983 - RNA, 32 nt, Human
ucuuggacauuaaccccugaggcuccaccacc

SEQ ID NO: 242984 - RNA, 32 nt, Human
ucuuggaccagcccgcccugaccaccagcucu

SEQ ID NO: 242985 - RNA, 24 nt, Human
ucuuggacccaccuguggggccug

SEQ ID NO: 242986 - RNA, 32 nt, Human
ucuuggaccugaggcugcuuucuugaagaaaa

SEQ ID NO: 242987 - RNA, 32 nt, Human
ucuuggacucaggccucagagccuggccuggu

SEQ ID NO: 242988 - RNA, 32 nt, Human
ucuuggacuucuagccuauggaacuguaagau

SEQ ID NO: 242989 - RNA, 32 nt, Human
ucuuggacuuugccccgaaagcacauccauaa

SEQ ID NO: 242990 - RNA, 32 nt, Human
ucuuggagaagagggaggaauaggagcaaauc

SEQ ID NO: 242991 - RNA, 32 nt, Human
ucuuggagccugaaaagaaggagcagcgacug

SEQ ID NO: 242992 - RNA, 32 nt, Human
ucuuggagcuucccccugucgaacucgucuag

SEQ ID NO: 242993 - RNA, 32 nt, Human
ucuuggaggaaggcauccuucuauucuacuga

SEQ ID NO: 242994 - RNA, 21 nt, Human
ucuuggaggagucguaagaaa

SEQ ID NO: 242995 - RNA, 32 nt, Human
ucuuggaggauucugagguagagaguagcaua

SEQ ID NO: 242996 - RNA, 21 nt, Human
ucuuggaggccccuccugcuu

SEQ ID NO: 242997 - RNA, 32 nt, Human
ucuuggaggccccuccugcuucguuggguucu

SEQ ID NO: 242998 - RNA, 32 nt, Human
ucuuggagggggcaggaggagagaggaaaagg

SEQ ID NO: 242999 - RNA, 32 nt, Human
ucuuggagucugaaagcucaaugaagucacga

SEQ ID NO: 243000 - RNA, 32 nt, Human
ucuuggaucaccacaaccuccgucucccaggu

SEQ ID NO: 243001 - RNA, 32 nt, Human
ucuuggaucacuacaaccuccaccucccgggu

SEQ ID NO: 243002 - RNA, 32 nt, Human
ucuuggauccuucagagccucagccacuagcu

SEQ ID NO: 243003 - RNA, 32 nt, Human
ucuuggaugagacuguagagcggucuugugcg

SEQ ID NO: 243004 - RNA, 32 nt, Human
ucuuggauuacaucaaguuuauaauuuuggca

SEQ ID NO: 243005 - RNA, 32 nt, Human
ucuuggcaagcauggagggaggggcuaacugu

SEQ ID NO: 243006 - RNA, 32 nt, Human
ucuuggcacuguacuccaaccuggguaacagg

SEQ ID NO: 243007 - RNA, 32 nt, Human
ucuuggcagagugagggccuggagauaaccag

SEQ ID NO: 243008 - RNA, 32 nt, Human
ucuuggcagaguuccagccacgcucuuuauuc

SEQ ID NO: 243009 - RNA, 32 nt, Human
ucuuggcagaugcugcagauaacguggagagc

SEQ ID NO: 243010 - RNA, 32 nt, Human
ucuuggcagcgggcgaggaggcugcgagcgag

SEQ ID NO: 243011 - RNA, 32 nt, Human
ucuuggcagggugggcaugaggcaucacuguu

SEQ ID NO: 243012 - RNA, 32 nt, Human
ucuuggcauugcaaccuccauuucuagcuccu

SEQ ID NO: 243013 - RNA, 32 nt, Human
ucuuggccagagaagacagaaggacccggcuu

SEQ ID NO: 243014 - RNA, 32 nt, Human
ucuuggccaucuuuucaaccgcugucuuuccu

SEQ ID NO: 243015 - RNA, 32 nt, Human
ucuuggcccacagucucccagaaaugauguuu

SEQ ID NO: 243016 - RNA, 32 nt, Human
ucuuggcccacugcaaccucugccucccgggu

SEQ ID NO: 243017 - RNA, 32 nt, Human
ucuuggcccacugcaaccucugcuuccuaggu

SEQ ID NO: 243018 - RNA, 32 nt, Human
ucuuggcccaggaugggagagccgccugcccu

SEQ ID NO: 243019 - RNA, 32 nt, Human
ucuuggcccccugcaaccuccgccucccgggu

SEQ ID NO: 243020 - RNA, 32 nt, Human
ucuuggcccccuugguuauucauucuagauga

SEQ ID NO: 243021 - RNA, 32 nt, Human
ucuuggcccugugcccugcacuuucuucacug

SEQ ID NO: 243022 - RNA, 24 nt, Human
ucuuggccuagccuggcccacuca

SEQ ID NO: 243023 - RNA, 32 nt, Human
ucuuggccuagggaguggaggguaaggaaaau

SEQ ID NO: 243024 - RNA, 32 nt, Human
ucuuggccucaagugauccuccugccuuagcu

SEQ ID NO: 243025 - RNA, 23 nt, Human
ucuuggccucaggugauccucuu

SEQ ID NO: 243026 - RNA, 32 nt, Human
ucuuggccucaggugauccucuucccucagcu

SEQ ID NO: 243027 - RNA, 24 nt, Human
ucuuggccucaugugucuccguca

SEQ ID NO: 243028 - RNA, 22 nt, Human
ucuuggccuccacucucccuca

SEQ ID NO: 243029 - RNA, 21 nt, Human
ucuuggccuccagagucccuu

SEQ ID NO: 243030 - RNA, 19 nt, Human
ucuuggccucugcagccuu

SEQ ID NO: 243031 - RNA, 32 nt, Human
ucuuggccucuuccucucucaagauaaagaug

SEQ ID NO: 243032 - RNA, 32 nt, Human
ucuuggccuggcugaauaucuucuacaaagau

SEQ ID NO: 243033 - RNA, 32 nt, Human
ucuuggccuuacuguauaaaggugugcugugu

SEQ ID NO: 243034 - RNA, 32 nt, Human
ucuuggccuuccaaaugcagcgcuggaaagag

SEQ ID NO: 243035 - RNA, 22 nt, Human
ucuuggccuuugcauuuauuua

SEQ ID NO: 243036 - RNA, 32 nt, Human
ucuuggcgccggagaagaggcagggucacccu

SEQ ID NO: 243037 - RNA, 32 nt, Human
ucuuggcggguuuggagccaggggauggcaug

SEQ ID NO: 243038 - RNA, 32 nt, Human
ucuuggcggucccugagaguccugcugaaauc

SEQ ID NO: 243039 - RNA, 32 nt, Human
ucuuggcuaacugcaaccuccagcuccugggu

SEQ ID NO: 243040 - RNA, 32 nt, Human
ucuuggcuaacugcaaccuccgccucccaggu

SEQ ID NO: 243041 - RNA, 32 nt, Human
ucuuggcuaacugcaacuuccaccuccugggu

SEQ ID NO: 243042 - RNA, 32 nt, Human
ucuuggcucacagcaaccucuaccuccugggu

SEQ ID NO: 243043 - RNA, 32 nt, Human
ucuuggcucacagcagccucugccucccgggu

SEQ ID NO: 243044 - RNA, 32 nt, Human
ucuuggcucaccacaaccuccaccucccaggu

SEQ ID NO: 243045 - RNA, 32 nt, Human
ucuuggcucaccacaaccuccgccucccggau

SEQ ID NO: 243046 - RNA, 32 nt, Human
ucuuggcucaccgcaaccuccaccuccugagu

SEQ ID NO: 243047 - RNA, 32 nt, Human
ucuuggcucaccgcaaccuccgccucccaggu

SEQ ID NO: 243048 - RNA, 32 nt, Human
ucuuggcucaccgcaaccuccgccuccuaggu

SEQ ID NO: 243049 - RNA, 32 nt, Human
ucuuggcucaccgcaaccucugccuaccgggu

SEQ ID NO: 243050 - RNA, 32 nt, Human
ucuuggcucaccgcaaccucugccucccuggu

SEQ ID NO: 243051 - RNA, 32 nt, Human
ucuuggcucaccgcaaccucugccuccugggu

SEQ ID NO: 243052 - RNA, 32 nt, Human
ucuuggcucacuacaaccuccaccucccaggu

SEQ ID NO: 243053 - RNA, 32 nt, Human
ucuuggcucacuacaaccuccaccucccgggu

SEQ ID NO: 243054 - RNA, 32 nt, Human
ucuuggcucacuacaaccuccaccuuccaggc

SEQ ID NO: 243055 - RNA, 32 nt, Human
ucuuggcucacuacaaccuccgccucccaggu

SEQ ID NO: 243056 - RNA, 32 nt, Human
ucuuggcucacuacaaccuccgccuccugggu

SEQ ID NO: 243057 - RNA, 32 nt, Human
ucuuggcucacuccaaccuccaccuuccaggu

SEQ ID NO: 243058 - RNA, 32 nt, Human
ucuuggcucacuccaaccuccgccuccugggu

SEQ ID NO: 243059 - RNA, 32 nt, Human
ucuuggcucacugaaaccucugccucccgguu

SEQ ID NO: 243060 - RNA, 32 nt, Human
ucuuggcucacugcaaacccgccucccagguu

SEQ ID NO: 243061 - RNA, 32 nt, Human
ucuuggcucacugcaaacuccgccuuccaggu

SEQ ID NO: 243062 - RNA, 32 nt, Human
ucuuggcucacugcaaacucugccuaccaggu

SEQ ID NO: 243063 - RNA, 32 nt, Human
ucuuggcucacugcaaacucugccuuuugggu

SEQ ID NO: 243064 - RNA, 32 nt, Human
ucuuggcucacugcaacauccgccucccgggu

SEQ ID NO: 243065 - RNA, 32 nt, Human
ucuuggcucacugcaacaucugacuccugggu

SEQ ID NO: 243066 - RNA, 32 nt, Human
ucuuggcucacugcaaccacugcuuccugggu

SEQ ID NO: 243067 - RNA, 32 nt, Human
ucuuggcucacugcaaccacugucucccgggu

SEQ ID NO: 243068 - RNA, 32 nt, Human
ucuuggcucacugcaacccccaccucccgggu

SEQ ID NO: 243069 - RNA, 32 nt, Human
ucuuggcucacugcaacccccgccaccuaggu

SEQ ID NO: 243070 - RNA, 32 nt, Human
ucuuggcucacugcaacccccgccuccagggu

SEQ ID NO: 243071 - RNA, 32 nt, Human
ucuuggcucacugcaaccccgccucccagguu

SEQ ID NO: 243072 - RNA, 32 nt, Human
ucuuggcucacugcaacccucccucccggguu

SEQ ID NO: 243073 - RNA, 32 nt, Human
ucuuggcucacugcaaccucaaccagcccagg

SEQ ID NO: 243074 - RNA, 32 nt, Human
ucuuggcucacugcaaccucagccucccaggu

SEQ ID NO: 243075 - RNA, 32 nt, Human
ucuuggcucacugcaaccuccacccgccgggu

SEQ ID NO: 243076 - RNA, 32 nt, Human
ucuuggcucacugcaaccuccaccuccagguu

SEQ ID NO: 243077 - RNA, 32 nt, Human
ucuuggcucacugcaaccuccaccucccaggu

SEQ ID NO: 243078 - RNA, 32 nt, Human
ucuuggcucacugcaaccuccaccucccaguu

SEQ ID NO: 243079 - RNA, 32 nt, Human
ucuuggcucacugcaaccuccaccucccgggu

SEQ ID NO: 243080 - RNA, 32 nt, Human
ucuuggcucacugcaaccuccaccuccugggc

SEQ ID NO: 243081 - RNA, 32 nt, Human
ucuuggcucacugcaaccuccaccuccugggu

SEQ ID NO: 243082 - RNA, 32 nt, Human
ucuuggcucacugcaaccuccaccucugggau

SEQ ID NO: 243083 - RNA, 32 nt, Human
ucuuggcucacugcaaccuccaccuuccuggu

SEQ ID NO: 243084 - RNA, 32 nt, Human
ucuuggcucacugcaaccuccacuucccaggu

SEQ ID NO: 243085 - RNA, 32 nt, Human
ucuuggcucacugcaaccuccacuucccgggu

SEQ ID NO: 243086 - RNA, 32 nt, Human
ucuuggcucacugcaaccuccacuuccugggu

SEQ ID NO: 243087 - RNA, 32 nt, Human
ucuuggcucacugcaaccuccacuucucaggu

SEQ ID NO: 243088 - RNA, 32 nt, Human
ucuuggcucacugcaaccuccgacucccaggu

SEQ ID NO: 243089 - RNA, 32 nt, Human
ucuuggcucacugcaaccuccgacucccuggu

SEQ ID NO: 243090 - RNA, 32 nt, Human
ucuuggcucacugcaaccuccgccuccagggc

SEQ ID NO: 243091 - RNA, 32 nt, Human
ucuuggcucacugcaaccuccgccuccagggu

SEQ ID NO: 243092 - RNA, 32 nt, Human
ucuuggcucacugcaaccuccgccucccaggu

SEQ ID NO: 243093 - RNA, 32 nt, Human
ucuuggcucacugcaaccuccgccucccgagu

SEQ ID NO: 243094 - RNA, 32 nt, Human
ucuuggcucacugcaaccuccgccucccgggu

SEQ ID NO: 243095 - RNA, 32 nt, Human
ucuuggcucacugcaaccuccgccucccuggu

SEQ ID NO: 243096 - RNA, 32 nt, Human
ucuuggcucacugcaaccuccgccuccugggu

SEQ ID NO: 243097 - RNA, 32 nt, Human
ucuuggcucacugcaaccuccgccucucaggu

SEQ ID NO: 243098 - RNA, 32 nt, Human
ucuuggcucacugcaaccuccgccucucgggu

SEQ ID NO: 243099 - RNA, 32 nt, Human
ucuuggcucacugcaaccuccgccucuugggu

SEQ ID NO: 243100 - RNA, 32 nt, Human
ucuuggcucacugcaaccuccgccuuccuggu

SEQ ID NO: 243101 - RNA, 32 nt, Human
ucuuggcucacugcaaccuccgucucccaggu

SEQ ID NO: 243102 - RNA, 32 nt, Human
ucuuggcucacugcaaccuccgucuccugggu

SEQ ID NO: 243103 - RNA, 32 nt, Human
ucuuggcucacugcaaccuccgucuuccgggu

SEQ ID NO: 243104 - RNA, 32 nt, Human
ucuuggcucacugcaaccuccuccucccgggu

SEQ ID NO: 243105 - RNA, 32 nt, Human
ucuuggcucacugcaaccuccugcuuccuggg

SEQ ID NO: 243106 - RNA, 32 nt, Human
ucuuggcucacugcaaccucuaccuccugggu

SEQ ID NO: 243107 - RNA, 32 nt, Human
ucuuggcucacugcaaccucugccaccugggu

SEQ ID NO: 243108 - RNA, 32 nt, Human
ucuuggcucacugcaaccucugccccaccaaa

SEQ ID NO: 243109 - RNA, 32 nt, Human
ucuuggcucacugcaaccucugccuaccggau

SEQ ID NO: 243110 - RNA, 32 nt, Human
ucuuggcucacugcaaccucugccucacaggc

SEQ ID NO: 243111 - RNA, 32 nt, Human
ucuuggcucacugcaaccucugccucacaggu

SEQ ID NO: 243112 - RNA, 32 nt, Human
ucuuggcucacugcaaccucugccucccaggu

SEQ ID NO: 243113 - RNA, 32 nt, Human
ucuuggcucacugcaaccucugccucccgggc

SEQ ID NO: 243114 - RNA, 32 nt, Human
ucuuggcucacugcaaccucugccucccgggu

SEQ ID NO: 243115 - RNA, 29 nt, Human
ucuuggcucacugcaaccucugccuccug

SEQ ID NO: 243116 - RNA, 32 nt, Human
ucuuggcucacugcaaccucugccuccugaau

SEQ ID NO: 243117 - RNA, 32 nt, Human
ucuuggcucacugcaaccucugccuccugggc

SEQ ID NO: 243118 - RNA, 32 nt, Human
ucuuggcucacugcaaccucugccuccugggu

SEQ ID NO: 243119 - RNA, 32 nt, Human
ucuuggcucacugcaaccucugccuccuucgu

SEQ ID NO: 243120 - RNA, 32 nt, Human
ucuuggcucacugcaaccucugccuccuuggu

SEQ ID NO: 243121 - RNA, 32 nt, Human
ucuuggcucacugcaaccucugccugccgggu

SEQ ID NO: 243122 - RNA, 32 nt, Human
ucuuggcucacugcaaccucugccuucugggu

SEQ ID NO: 243123 - RNA, 32 nt, Human
ucuuggcucacugcaaccucugcgggcucacg

SEQ ID NO: 243124 - RNA, 32 nt, Human
ucuuggcucacugcaaccucugcuucccaggu

SEQ ID NO: 243125 - RNA, 32 nt, Human
ucuuggcucacugcaaccucugcuucccgagu

SEQ ID NO: 243126 - RNA, 32 nt, Human
ucuuggcucacugcaaccucugcuucccgggu

SEQ ID NO: 243127 - RNA, 32 nt, Human
ucuuggcucacugcaaccucugucucccaggu

SEQ ID NO: 243128 - RNA, 32 nt, Human
ucuuggcucacugcaaccucugucuccugggc

SEQ ID NO: 243129 - RNA, 32 nt, Human
ucuuggcucacugcaaccucugucuuccaggu

SEQ ID NO: 243130 - RNA, 32 nt, Human
ucuuggcucacugcaaccucuguguccugggc

SEQ ID NO: 243131 - RNA, 32 nt, Human
ucuuggcucacugcaaccucuuccuccugguu

SEQ ID NO: 243132 - RNA, 32 nt, Human
ucuuggcucacugcaaccugcgccuccugggu

SEQ ID NO: 243133 - RNA, 32 nt, Human
ucuuggcucacugcaacguccgccucccaggu

SEQ ID NO: 243134 - RNA, 32 nt, Human
ucuuggcucacugcaacgucugccuccugggu

SEQ ID NO: 243135 - RNA, 32 nt, Human
ucuuggcucacugcaacucugcuucccagguu

SEQ ID NO: 243136 - RNA, 32 nt, Human
ucuuggcucacugcaacuuccaccucugggau

SEQ ID NO: 243137 - RNA, 32 nt, Human
ucuuggcucacugcaacuuccacuucccgggu

SEQ ID NO: 243138 - RNA, 32 nt, Human
ucuuggcucacugcaacuuccgccuccugugu

SEQ ID NO: 243139 - RNA, 32 nt, Human
ucuuggcucacugcaacuuccgucucccgggu

SEQ ID NO: 243140 - RNA, 32 nt, Human
ucuuggcucacugcaacuucuaccuccgaggu

SEQ ID NO: 243141 - RNA, 32 nt, Human
ucuuggcucacugcaacuucugccaccugggu

SEQ ID NO: 243142 - RNA, 32 nt, Human
ucuuggcucacugcaacuucugccucuugggu

SEQ ID NO: 243143 - RNA, 32 nt, Human
ucuuggcucacugcaacuucugccuuccaggu

SEQ ID NO: 243144 - RNA, 32 nt, Human
ucuuggcucacugcaacuugggccucccaggu

SEQ ID NO: 243145 - RNA, 32 nt, Human
ucuuggcucacugcaagcuccaccuccugggu

SEQ ID NO: 243146 - RNA, 32 nt, Human
ucuuggcucacugcaagcuccgccucccaggu

SEQ ID NO: 243147 - RNA, 32 nt, Human
ucuuggcucacugcaagcuccgccucccgagu

SEQ ID NO: 243148 - RNA, 32 nt, Human
ucuuggcucacugcaagcuccgccucccggcu

SEQ ID NO: 243149 - RNA, 32 nt, Human
ucuuggcucacugcaagcuccgccucccgggu

SEQ ID NO: 243150 - RNA, 32 nt, Human
ucuuggcucacugcaagcuccgccuccugggu

SEQ ID NO: 243151 - RNA, 32 nt, Human
ucuuggcucacugcaagcuccgccucucgggu

SEQ ID NO: 243152 - RNA, 32 nt, Human
ucuuggcucacugcaagcuccgucugccgggu

SEQ ID NO: 243153 - RNA, 32 nt, Human
ucuuggcucacugcaagcucugcccuccccgg

SEQ ID NO: 243154 - RNA, 32 nt, Human
ucuuggcucacugcaagcuuccccuuccgggu

SEQ ID NO: 243155 - RNA, 32 nt, Human
ucuuggcucacugcaaucucuauccccugggu

SEQ ID NO: 243156 - RNA, 32 nt, Human
ucuuggcucacugcaaucucugccucucgggu

SEQ ID NO: 243157 - RNA, 32 nt, Human
ucuuggcucacugcaaucucugccuuccgggu

SEQ ID NO: 243158 - RNA, 32 nt, Human
ucuuggcucacugcacccuccgccuccugggc

SEQ ID NO: 243159 - RNA, 32 nt, Human
ucuuggcucacugcaccuccaccuuccgggcu

SEQ ID NO: 243160 - RNA, 32 nt, Human
ucuuggcucacugcaccucugucucccaaguu

SEQ ID NO: 243161 - RNA, 32 nt, Human
ucuuggcucacugcagacuucaccuccugagu

SEQ ID NO: 243162 - RNA, 32 nt, Human
ucuuggcucacugcagccucaaccuguugggg

SEQ ID NO: 243163 - RNA, 32 nt, Human
ucuuggcucacugcagccucaacuuccagcgc

SEQ ID NO: 243164 - RNA, 32 nt, Human
ucuuggcucacugcagccuccaccuccccggu

SEQ ID NO: 243165 - RNA, 32 nt, Human
ucuuggcucacugcagccuccaccucccgggu

SEQ ID NO: 243166 - RNA, 32 nt, Human
ucuuggcucacugcagccuccaccuccugggc

SEQ ID NO: 243167 - RNA, 32 nt, Human
ucuuggcucacugcagccuccgccucccgggu

SEQ ID NO: 243168 - RNA, 32 nt, Human
ucuuggcucacugcagccucgacuuccugggc

SEQ ID NO: 243169 - RNA, 32 nt, Human
ucuuggcucacugcagccucugccucccaggu

SEQ ID NO: 243170 - RNA, 32 nt, Human
ucuuggcucacugcagccucugccucccgggu

SEQ ID NO: 243171 - RNA, 32 nt, Human
ucuuggcucacugcagccucugccuccugagu

SEQ ID NO: 243172 - RNA, 32 nt, Human
ucuuggcucacugcagccucugccuccugggu

SEQ ID NO: 243173 - RNA, 32 nt, Human
ucuuggcucacugcagccuucgccucccgggu

SEQ ID NO: 243174 - RNA, 32 nt, Human
ucuuggcucacugcaggcucugccucccgguu

SEQ ID NO: 243175 - RNA, 32 nt, Human
ucuuggcucacugcauccuccgccuuccaggu

SEQ ID NO: 243176 - RNA, 32 nt, Human
ucuuggcucacugcggccucugccucccggcu

SEQ ID NO: 243177 - RNA, 32 nt, Human
ucuuggcucacugcugcaaccucccccuccug

SEQ ID NO: 243178 - RNA, 32 nt, Human
ucuuggcucacuguaaacucaagcuccugaac

SEQ ID NO: 243179 - RNA, 32 nt, Human
ucuuggcucacuguaaccuccaccucccaggc

SEQ ID NO: 243180 - RNA, 32 nt, Human
ucuuggcucacuguaaccuccgccucccaggu

SEQ ID NO: 243181 - RNA, 32 nt, Human
ucuuggcucacuguaaccuccgccucccgggu

SEQ ID NO: 243182 - RNA, 32 nt, Human
ucuuggcucacuguaaccucugccuccaggau

SEQ ID NO: 243183 - RNA, 32 nt, Human
ucuuggcucacuguaaccucugccucccaguu

SEQ ID NO: 243184 - RNA, 32 nt, Human
ucuuggcucacuguaacuuccacuugccaggc

SEQ ID NO: 243185 - RNA, 32 nt, Human
ucuuggcucacuguagccuugacauccugggc

SEQ ID NO: 243186 - RNA, 32 nt, Human
ucuuggcucacuucaaccuccgcccccaaggu

SEQ ID NO: 243187 - RNA, 32 nt, Human
ucuuggcucacuuuaaccuccacuucccuggu

SEQ ID NO: 243188 - RNA, 32 nt, Human
ucuuggcucagugcaaccuccgccuccugggu

SEQ ID NO: 243189 - RNA, 32 nt, Human
ucuuggcucaucguaaccuccaccucccgggu

SEQ ID NO: 243190 - RNA, 32 nt, Human
ucuuggcucauugcaaccuccgccucccuccc

SEQ ID NO: 243191 - RNA, 32 nt, Human
ucuuggcucauugcaaccucugccucccaggu

SEQ ID NO: 243192 - RNA, 32 nt, Human
ucuuggcuccaagugauacuucugccuuggcc

SEQ ID NO: 243193 - RNA, 32 nt, Human
ucuuggcucccuacaacuuccaccucccaggu

SEQ ID NO: 243194 - RNA, 32 nt, Human
ucuuggcucccugcaaccucugcuuccugggu

SEQ ID NO: 243195 - RNA, 32 nt, Human
ucuuggcuccugggagcgacucuugcuaccca

SEQ ID NO: 243196 - RNA, 32 nt, Human
ucuuggcuccuugccaguuccaaugcucccag

SEQ ID NO: 243197 - RNA, 32 nt, Human
ucuuggcucgcugcaaccucagcuuccagagu

SEQ ID NO: 243198 - RNA, 32 nt, Human
ucuuggcucgcugcaaccuccgccucccaggu

SEQ ID NO: 243199 - RNA, 30 nt, Human
ucuuggcucgcugcaaccucugccuccugg

SEQ ID NO: 243200 - RNA, 32 nt, Human
ucuuggcucgcugcaaccuucacccuucaccu

SEQ ID NO: 243201 - RNA, 32 nt, Human
ucuuggcucgcugcagccuccaccucccaggu

SEQ ID NO: 243202 - RNA, 32 nt, Human
ucuuggcucucugcaaccucugccucccaggu

SEQ ID NO: 243203 - RNA, 32 nt, Human
ucuuggcucugcaaccuccacuucccagguuc

SEQ ID NO: 243204 - RNA, 32 nt, Human
ucuuggcucugcaaccuccgccucccgguuua

SEQ ID NO: 243205 - RNA, 31 nt, Human
ucuuggcucugcucagccaugccaggcagga

SEQ ID NO: 243206 - RNA, 32 nt, Human
ucuuggcucuuugcaaccucugccuccugggc

SEQ ID NO: 243207 - RNA, 32 nt, Human
ucuuggcugacugcaacuucugccuccugggu

SEQ ID NO: 243208 - RNA, 32 nt, Human
ucuuggcugcacacuucugcucuaagagucuc

SEQ ID NO: 243209 - RNA, 19 nt, Human
ucuuggcuggagugagugg

SEQ ID NO: 243210 - RNA, 32 nt, Human
ucuuggcuuacuacaaccuccgccuccugggu

SEQ ID NO: 243211 - RNA, 32 nt, Human
ucuuggcuuacugcaaccuccaccucccaggu

SEQ ID NO: 243212 - RNA, 32 nt, Human
ucuuggcuuacugcaaccuccaccuccugggu

SEQ ID NO: 243213 - RNA, 32 nt, Human
ucuuggcuuacugcaaccuccgccucccaggu

SEQ ID NO: 243214 - RNA, 32 nt, Human
ucuuggcuuacugcaaccuccgccuccugggu

SEQ ID NO: 243215 - RNA, 32 nt, Human
ucuuggcuuacugcaaccucugccucccaggu

SEQ ID NO: 243216 - RNA, 32 nt, Human
ucuuggcuuacugcaacuuccgacucccaggu

SEQ ID NO: 243217 - RNA, 23 nt, Human
ucuuggcuuauugaagccucugc

SEQ ID NO: 243218 - RNA, 32 nt, Human
ucuuggcuuccucuuauucuuccacaaaccau

SEQ ID NO: 243219 - RNA, 32 nt, Human
ucuuggcuucggguugagaugagggacaggga

SEQ ID NO: 243220 - RNA, 32 nt, Human
ucuuggcuucuccaaaaggguuuauacggacu

SEQ ID NO: 243221 - RNA, 32 nt, Human
ucuuggcuucuuguccccuccuggggucaucc

SEQ ID NO: 243222 - RNA, 32 nt, Human
ucuuggcuuucugcaaccucugccucccaggu

SEQ ID NO: 243223 - RNA, 32 nt, Human
ucuugggaaacccagcccugguggcuccugca

SEQ ID NO: 243224 - RNA, 32 nt, Human
ucuugggaaaggggugaauucacugggucaug

SEQ ID NO: 243225 - RNA, 32 nt, Human
ucuugggaaggaguuuuauguuguuuaaaaga

SEQ ID NO: 243226 - RNA, 32 nt, Human
ucuugggagaugacuccucuucagagcaccug

SEQ ID NO: 243227 - RNA, 32 nt, Human
ucuugggagccagcgguauggcgucgggcugc

SEQ ID NO: 243228 - RNA, 32 nt, Human
ucuugggagcuggggaggaggcugcggaggcu

SEQ ID NO: 243229 - RNA, 32 nt, Human
ucuugggaggccauaaaccuauguugcuggga

SEQ ID NO: 243230 - RNA, 32 nt, Human
ucuugggaggcugagaugggaaucacuugaac

SEQ ID NO: 243231 - RNA, 32 nt, Human
ucuugggaggcugaggcaggauugcuugagcc

SEQ ID NO: 243232 - RNA, 32 nt, Human
ucuugggaggcugaggcgggaguaucauuuga

SEQ ID NO: 243233 - RNA, 32 nt, Human
ucuugggaggcugaggugggaggauccacuga

SEQ ID NO: 243234 - RNA, 32 nt, Human
ucuugggaggcugaggugggaggauugcuuga

SEQ ID NO: 243235 - RNA, 32 nt, Human
ucuugggagugaggacuuggggcaggugggua

SEQ ID NO: 243236 - RNA, 27 nt, Human
ucuugggauaguguucugcuccugcuu

SEQ ID NO: 243237 - RNA, 32 nt, Human
ucuugggcauuuuccccugcccugaaagcgua

SEQ ID NO: 243238 - RNA, 32 nt, Human
ucuugggccaucugagggcuccugggucacuc

SEQ ID NO: 243239 - RNA, 32 nt, Human
ucuugggcccaagugauacucccaccucugcc

SEQ ID NO: 243240 - RNA, 22 nt, Human
ucuugggcccagccagcugggc

SEQ ID NO: 243241 - RNA, 32 nt, Human
ucuugggcucaagcaauccuccugccucagcc

SEQ ID NO: 243242 - RNA, 32 nt, Human
ucuugggcucaagcacuccucccuccucagcc

SEQ ID NO: 243243 - RNA, 32 nt, Human
ucuugggcucaagcagugcuccaaccucagcc

SEQ ID NO: 243244 - RNA, 27 nt, Human
ucuugggcucaagccauccuucugccu

SEQ ID NO: 243245 - RNA, 32 nt, Human
ucuugggcucaagccauccuucugccucacug

SEQ ID NO: 243246 - RNA, 32 nt, Human
ucuugggcucaagcgauccucccaccugggac

SEQ ID NO: 243247 - RNA, 32 nt, Human
ucuugggcucaagugauccucccgccucagcc

SEQ ID NO: 243248 - RNA, 32 nt, Human
ucuugggcucaagugauccucucgccuuggcc

SEQ ID NO: 243249 - RNA, 32 nt, Human
ucuugggcucacugcagccucaaccucccagg

SEQ ID NO: 243250 - RNA, 32 nt, Human
ucuugggcucaggugauccucccaccuuggcc

SEQ ID NO: 243251 - RNA, 32 nt, Human
ucuugggcugagagcaggaacaacgcgguagg

SEQ ID NO: 243252 - RNA, 32 nt, Human
ucuugggcuggggcaucucaggaacagugagg

SEQ ID NO: 243253 - RNA, 20 nt, Human
ucuugggcugggugcagugg

SEQ ID NO: 243254 - RNA, 32 nt, Human
ucuugggcugugagcuguguucuguccuuccu

SEQ ID NO: 243255 - RNA, 24 nt, Human
ucuuggggaaggggcaccucucuu

SEQ ID NO: 243256 - RNA, 32 nt, Human
ucuuggggaccugaguuugggugggguggcag

SEQ ID NO: 243257 - RNA, 23 nt, Human
ucuuggggagaagagcauccugc

SEQ ID NO: 243258 - RNA, 22 nt, Human
ucuuggggagaagaguaugcuu

SEQ ID NO: 243259 - RNA, 20 nt, Human
ucuuggggagagaccgugcu

SEQ ID NO: 243260 - RNA, 32 nt, Human
ucuuggggagagaggaggaggugacugcuuag

SEQ ID NO: 243261 - RNA, 22 nt, Human
ucuuggggagaggagauuucgc

SEQ ID NO: 243262 - RNA, 21 nt, Human
ucuuggggagagggaacccug

SEQ ID NO: 243263 - RNA, 32 nt, Human
ucuuggggaggcagaggcaggaggaucgcuug

SEQ ID NO: 243264 - RNA, 32 nt, Human
ucuuggggagguggccgggugcaguggcucgc

SEQ ID NO: 243265 - RNA, 32 nt, Human
ucuuggggauaugagcucuaaauaugagaagc

SEQ ID NO: 243266 - RNA, 20 nt, Human
ucuuggggauuaaccucugc

SEQ ID NO: 243267 - RNA, 32 nt, Human
ucuuggggcaggacagcagaggaugugcuggg

SEQ ID NO: 243268 - RNA, 32 nt, Human
ucuuggggcccagcugcagccugcugccugcc

SEQ ID NO: 243269 - RNA, 32 nt, Human
ucuugggggccaggauccaccugcuggaacca

SEQ ID NO: 243270 - RNA, 26 nt, Human
ucuugggggcuugcuacuuuuugucu

SEQ ID NO: 243271 - RNA, 32 nt, Human
ucuugggggugagaggagaaggagggagggaa

SEQ ID NO: 243272 - RNA, 32 nt, Human
ucuuggggugugcggggagggagccagggagu

SEQ ID NO: 243273 - RNA, 32 nt, Human
ucuugggguucauuugugcaggccgguuggcc

SEQ ID NO: 243274 - RNA, 24 nt, Human
ucuugggguugcccccucuuguuu

SEQ ID NO: 243275 - RNA, 25 nt, Human
ucuuggguacucgcaccucuuggcu

SEQ ID NO: 243276 - RNA, 32 nt, Human
ucuuggguacugccuucugcccccaaaucucu

SEQ ID NO: 243277 - RNA, 32 nt, Human
ucuugggucacugcaaacuccgccucccaggu

SEQ ID NO: 243278 - RNA, 32 nt, Human
ucuugggucacugcaaccucugccuccugggu

SEQ ID NO: 243279 - RNA, 32 nt, Human
ucuugggucacugcagccuccaacuccuuggc

SEQ ID NO: 243280 - RNA, 32 nt, Human
ucuugggucucccauuccagcuucccugucuc

SEQ ID NO: 243281 - RNA, 24 nt, Human
ucuugggucuccuacuuccugucu

SEQ ID NO: 243282 - RNA, 32 nt, Human
ucuugggugaagccuagacaaagccgccaggu

SEQ ID NO: 243283 - RNA, 32 nt, Human
ucuugggugaagguauugcugucucuaagcca

SEQ ID NO: 243284 - RNA, 32 nt, Human
ucuugggugaagguauugcugucucuaaggca

SEQ ID NO: 243285 - RNA, 32 nt, Human
ucuugggugagcugaugacugcuucaaccaau

SEQ ID NO: 243286 - RNA, 32 nt, Human
ucuugggugccagcagagccauucaguacaac

SEQ ID NO: 243287 - RNA, 32 nt, Human
ucuugggugggaacuuggaggcauuggauauu

SEQ ID NO: 243288 - RNA, 32 nt, Human
ucuugggugggagggaguuggggaagggaggu

SEQ ID NO: 243289 - RNA, 22 nt, Human
ucuugggugugugccuucugcc

SEQ ID NO: 243290 - RNA, 32 nt, Human
ucuuggguuacugcaaccucugccccucggga

SEQ ID NO: 243291 - RNA, 32 nt, Human
ucuuggguucaagcgauucuccugccucagcc

SEQ ID NO: 243292 - RNA, 32 nt, Human
ucuuggguucaagcgauucuccugccucaguc

SEQ ID NO: 243293 - RNA, 32 nt, Human
ucuuggguucaagugauucuccugccucagcc

SEQ ID NO: 243294 - RNA, 32 nt, Human
ucuuggguucaagugauucuccugucucagcc

SEQ ID NO: 243295 - RNA, 32 nt, Human
ucuuggguucaagugauucuuccaccucagcc

SEQ ID NO: 243296 - RNA, 32 nt, Human
ucuuggguucaagugauucuugugccucagcc

SEQ ID NO: 243297 - RNA, 32 nt, Human
ucuuggguucaugccauucuccugccucagcc

SEQ ID NO: 243298 - RNA, 32 nt, Human
ucuuggguuggcagagugugaaggggcaagag

SEQ ID NO: 243299 - RNA, 32 nt, Human
ucuuggguuucagugauuuuucugccucggcc

SEQ ID NO: 243300 - RNA, 32 nt, Human
ucuugguagcugguguggagggccgguguccu

SEQ ID NO: 243301 - RNA, 32 nt, Human
ucuugguaugaacaguugacuucaugguggag

SEQ ID NO: 243302 - RNA, 23 nt, Human
ucuuggucaagacaccaggcagg

SEQ ID NO: 243303 - RNA, 32 nt, Human
ucuuggucccugucuacuaagagucaugaagg

SEQ ID NO: 243304 - RNA, 32 nt, Human
ucuugguccuguuaacccuccaccuccucucu

SEQ ID NO: 243305 - RNA, 28 nt, Human
ucuuggucucaaguugccucauugcggc

SEQ ID NO: 243306 - RNA, 32 nt, Human
ucuuggucuccacagaaccacagugccuuaag

SEQ ID NO: 243307 - RNA, 32 nt, Human
ucuuggucugaguaggcaucaugugggggcca

SEQ ID NO: 243308 - RNA, 32 nt, Human
ucuuggucuuuccuuaaaaagacuugguaaau

SEQ ID NO: 243309 - RNA, 32 nt, Human
ucuuggugcacuucucacucuuccugccuguu

SEQ ID NO: 243310 - RNA, 32 nt, Human
ucuuggugccacccucuccacuccuacugcca

SEQ ID NO: 243311 - RNA, 24 nt, Human
ucuuggugcccaggcuagagugca

SEQ ID NO: 243312 - RNA, 32 nt, Human
ucuuggugcccaggcuagagugcaauggcgcg

SEQ ID NO: 243313 - RNA, 32 nt, Human
ucuuggugcuaccugauggaauuccugcacuu

SEQ ID NO: 243314 - RNA, 24 nt, Human
ucuuggugcuauuucauuccugcu

SEQ ID NO: 243315 - RNA, 32 nt, Human
ucuuggugcucaaggguauaaguggccgggaa

SEQ ID NO: 243316 - RNA, 32 nt, Human
ucuuggugcucuggguagugagggaugaccag

SEQ ID NO: 243317 - RNA, 32 nt, Human
ucuugguggcagugguagcagcaacagcagca

SEQ ID NO: 243318 - RNA, 32 nt, Human
ucuugguggccgcugcuggagcgcggccugcg

SEQ ID NO: 243319 - RNA, 32 nt, Human
ucuugguggcucugcugucucagcccagccuu

SEQ ID NO: 243320 - RNA, 32 nt, Human
ucuugguggggaggggauguuaucagcuucug

SEQ ID NO: 243321 - RNA, 32 nt, Human
ucuugguguuaacuauguuaguagauucuuca

SEQ ID NO: 243322 - RNA, 32 nt, Human
ucuugguguugcaugcucacaacucugcugac

SEQ ID NO: 243323 - RNA, 32 nt, Human
ucuugguuagcccacuuucccucuccaugugg

SEQ ID NO: 243324 - RNA, 32 nt, Human
ucuugguucacugcaaccuccaccuccagggu

SEQ ID NO: 243325 - RNA, 32 nt, Human
ucuugguucacugcaaccuccaccucccaggu

SEQ ID NO: 243326 - RNA, 32 nt, Human
ucuugguucacugcaaccuccaccucuugggu

SEQ ID NO: 243327 - RNA, 32 nt, Human
ucuugguucacugcaaccuccgcauccggggu

SEQ ID NO: 243328 - RNA, 32 nt, Human
ucuugguucacugcaaccuccgccuccuggau

SEQ ID NO: 243329 - RNA, 32 nt, Human
ucuugguucacugcaaccucugccucccaggu

SEQ ID NO: 243330 - RNA, 32 nt, Human
ucuugguucacugcaaccucugccucccgggu

SEQ ID NO: 243331 - RNA, 32 nt, Human
ucuugguucacugcaagcuccaccucccgggu

SEQ ID NO: 243332 - RNA, 32 nt, Human
ucuugguucaucuccagcccgugagcuggucc

SEQ ID NO: 243333 - RNA, 32 nt, Human
ucuugguucugcaugguacauuuugccaaccc

SEQ ID NO: 243334 - RNA, 32 nt, Human
ucuugguuggcaagacuuggguguagauauga

SEQ ID NO: 243335 - RNA, 32 nt, Human
ucuugguugucccagagacaccuguguguguc

SEQ ID NO: 243336 - RNA, 32 nt, Human
ucuugguuuacugcaaccuccaccuccuaggc

SEQ ID NO: 243337 - RNA, 32 nt, Human
ucuugguuucccguugugcccaugaaggcgcc

SEQ ID NO: 243338 - RNA, 32 nt, Human
ucuugguuucuuuucuugccuuccccuacuuu

SEQ ID NO: 243339 - RNA, 32 nt, Human
ucuugguuuggucccuagaaauggcagccugc

SEQ ID NO: 243340 - RNA, 32 nt, Human
ucuugguuugguucuaacaaacucucauguuc

SEQ ID NO: 243341 - RNA, 32 nt, Human
ucuugguuuuccaugaauacagcauguauaau

SEQ ID NO: 243342 - RNA, 32 nt, Human
ucuuguaaacucugcugcuucccaacacaacu

SEQ ID NO: 243343 - RNA, 32 nt, Human
ucuuguaaccacugagcacugaaggagagagg

SEQ ID NO: 243344 - RNA, 32 nt, Human
ucuuguaagauggauuucacccccaggccaau

SEQ ID NO: 243345 - RNA, 32 nt, Human
ucuuguaaucugcauucuccaggaguuuuaug

SEQ ID NO: 243346 - RNA, 32 nt, Human
ucuuguaauuaauuugguggguucuacuuguu

SEQ ID NO: 243347 - RNA, 32 nt, Human
ucuuguacaauacaguauuacaucccagaaac

SEQ ID NO: 243348 - RNA, 24 nt, Human
ucuuguacauuugugucucccuuc

SEQ ID NO: 243349 - RNA, 32 nt, Human
ucuuguaccaccagcaccacacuguuuuaauu

SEQ ID NO: 243350 - RNA, 32 nt, Human
ucuuguaccccaggcuggagugcaauggcgug

SEQ ID NO: 243351 - RNA, 24 nt, Human
ucuuguaccucugucccuuacucu

SEQ ID NO: 243352 - RNA, 32 nt, Human
ucuuguacgucucaucacagcugguagagacc

SEQ ID NO: 243353 - RNA, 32 nt, Human
ucuuguacuaggaucuagcauauuucacuauu

SEQ ID NO: 243354 - RNA, 32 nt, Human
ucuuguacuaugaauagcuucuugcuuuauga

SEQ ID NO: 243355 - RNA, 32 nt, Human
ucuuguagaauuugaugagacccucccuaguc

SEQ ID NO: 243356 - RNA, 32 nt, Human
ucuuguagcccaggcuggagugcaauggcagg

SEQ ID NO: 243357 - RNA, 32 nt, Human
ucuuguagcccaggcugggaugcaauggcaug

SEQ ID NO: 243358 - RNA, 32 nt, Human
ucuuguagcuuaacuacugccuccucauuuuu

SEQ ID NO: 243359 - RNA, 32 nt, Human
ucuuguauagccacugcauauuacauagccag

SEQ ID NO: 243360 - RNA, 32 nt, Human
ucuuguaucagcaacagaagccucagauuauc

SEQ ID NO: 243361 - RNA, 32 nt, Human
ucuuguauguaaguugcuuucuauuccaguau

SEQ ID NO: 243362 - RNA, 32 nt, Human
ucuuguauuauaauuaauuuucuacccccaga

SEQ ID NO: 243363 - RNA, 24 nt, Human
ucuuguauuuauugguuuugcaga

SEQ ID NO: 243364 - RNA, 32 nt, Human
ucuugucaaaccugagcacuccuccugcugaa

SEQ ID NO: 243365 - RNA, 32 nt, Human
ucuugucaaccagauuggagugcaguggugca

SEQ ID NO: 243366 - RNA, 32 nt, Human
ucuugucaaccgggcuggagugcaguggugca

SEQ ID NO: 243367 - RNA, 32 nt, Human
ucuugucacccacgcuggagugcaauggugug

SEQ ID NO: 243368 - RNA, 32 nt, Human
ucuugucacccagacuggagugcgauggcacg

SEQ ID NO: 243369 - RNA, 32 nt, Human
ucuugucacccaggcaggagugcaguggcguu

SEQ ID NO: 243370 - RNA, 32 nt, Human
ucuugucacccaggcuggaguacaaugaugcg

SEQ ID NO: 243371 - RNA, 32 nt, Human
ucuugucacccaggcuggaguacaguggcacg

SEQ ID NO: 243372 - RNA, 32 nt, Human
ucuugucacccaggcuggagugcaauggcacg

SEQ ID NO: 243373 - RNA, 32 nt, Human
ucuugucacccaggcuggagugcaauggcgcg

SEQ ID NO: 243374 - RNA, 32 nt, Human
ucuugucacccaggcuggagugcaguagugcg

SEQ ID NO: 243375 - RNA, 32 nt, Human
ucuugucacccaggcuggagugcaguggcaca

SEQ ID NO: 243376 - RNA, 32 nt, Human
ucuugucacccaggcuggagugcaguggcgca

SEQ ID NO: 243377 - RNA, 32 nt, Human
ucuugucacccaggcuggagugcaguggcgcc

SEQ ID NO: 243378 - RNA, 32 nt, Human
ucuugucacccaggcuggagugcaguggcgcg

SEQ ID NO: 243379 - RNA, 32 nt, Human
ucuugucacccaggcuggagugcaguggugca

SEQ ID NO: 243380 - RNA, 32 nt, Human
ucuugucacccaggcuggaguguaguggugug

SEQ ID NO: 243381 - RNA, 32 nt, Human
ucuugucaccccagcuggagugcaguagcacg

SEQ ID NO: 243382 - RNA, 32 nt, Human
ucuugucaccgaggcuggagugcaaugacaug

SEQ ID NO: 243383 - RNA, 32 nt, Human
ucuugucaccuagacuggagugcaauggcgug

SEQ ID NO: 243384 - RNA, 32 nt, Human
ucuugucaccuaggcaagagugcaauggcaca

SEQ ID NO: 243385 - RNA, 32 nt, Human
ucuugucaccuaggccagagugcagugucaug

SEQ ID NO: 243386 - RNA, 32 nt, Human
ucuugucaccucuucaagcuuucaagccuuua

SEQ ID NO: 243387 - RNA, 32 nt, Human
ucuugucacucaggcuggagugcaguggugug

SEQ ID NO: 243388 - RNA, 32 nt, Human
ucuugucacucauguccagaucugcagugcca

SEQ ID NO: 243389 - RNA, 32 nt, Human
ucuugucacugcacaacaguggccuggucccc

SEQ ID NO: 243390 - RNA, 32 nt, Human
ucuugucagacaauggcuauaaacugaauuag

SEQ ID NO: 243391 - RNA, 32 nt, Human
ucuugucagccugugaacuaggcccugccucu

SEQ ID NO: 243392 - RNA, 32 nt, Human
ucuugucauccuggcuggagugugauggugcg

SEQ ID NO: 243393 - RNA, 32 nt, Human
ucuugucaucuucucauccucugcgccaagaa

SEQ ID NO: 243394 - RNA, 32 nt, Human
ucuugucaugggguggaggggaaaguaggagg

SEQ ID NO: 243395 - RNA, 32 nt, Human
ucuuguccaaggcuggaguguaguagugcuau

SEQ ID NO: 243396 - RNA, 24 nt, Human
ucuuguccacaccccuuaucccca

SEQ ID NO: 243397 - RNA, 21 nt, Human
ucuuguccacauucuacuuca

SEQ ID NO: 243398 - RNA, 23 nt, Human
ucuuguccacauugugauguuca

SEQ ID NO: 243399 - RNA, 32 nt, Human
ucuuguccaggcuggaggagugcagucguaca

SEQ ID NO: 243400 - RNA, 32 nt, Human
ucuugucccagcagguugggggcgccugcccc

SEQ ID NO: 243401 - RNA, 32 nt, Human
ucuugucccccagacuggagugcaauggcacg

SEQ ID NO: 243402 - RNA, 32 nt, Human
ucuugucccccaggcuggaguggugcaguggc

SEQ ID NO: 243403 - RNA, 32 nt, Human
ucuugucccccaggcuugagugcaaugacuca

SEQ ID NO: 243404 - RNA, 32 nt, Human
ucuuguccucaagugauccucccaccuuagcc

SEQ ID NO: 243405 - RNA, 32 nt, Human
ucuuguccucaccaucacagcuguuaaagaug

SEQ ID NO: 243406 - RNA, 32 nt, Human
ucuuguccucaguuucgguauguuauccaaag

SEQ ID NO: 243407 - RNA, 32 nt, Human
ucuuguccuccacuacccucaggaaaccaaga

SEQ ID NO: 243408 - RNA, 24 nt, Human
ucuuguccugcugaaguaucucca

SEQ ID NO: 243409 - RNA, 32 nt, Human
ucuuguccugcuuccucacuguggaccccugu

SEQ ID NO: 243410 - RNA, 32 nt, Human
ucuuguccugggcccucaggucagccuggcug

SEQ ID NO: 243411 - RNA, 32 nt, Human
ucuuguccuguuucccuuccugcccuugcagu

SEQ ID NO: 243412 - RNA, 32 nt, Human
ucuugucgcccaggcuggagguuaauggcaug

SEQ ID NO: 243413 - RNA, 32 nt, Human
ucuugucgcccaggcuggagugcaacgguaug

SEQ ID NO: 243414 - RNA, 32 nt, Human
ucuugucgcccaggcuggagugcaauggcgca

SEQ ID NO: 243415 - RNA, 32 nt, Human
ucuugucgcccaggcuggagugcaauggcgug

SEQ ID NO: 243416 - RNA, 32 nt, Human
ucuugucgcccaggcuggagugcaguggcacg

SEQ ID NO: 243417 - RNA, 32 nt, Human
ucuugucgcccaggcuggagugcaguggcgca

SEQ ID NO: 243418 - RNA, 32 nt, Human
ucuugucgcccaggcuggagugcaguggcgug

SEQ ID NO: 243419 - RNA, 32 nt, Human
ucuugucgcccaggcuguagugcagugguaca

SEQ ID NO: 243420 - RNA, 32 nt, Human
ucuugucgcucagccuggagugcagugagcug

SEQ ID NO: 243421 - RNA, 32 nt, Human
ucuugucgcucaggcuggagugccauggcgcg

SEQ ID NO: 243422 - RNA, 32 nt, Human
ucuugucggccagcccacuccccagccagaga

SEQ ID NO: 243423 - RNA, 32 nt, Human
ucuugucggccaggcuagagugcaguggcgcu

SEQ ID NO: 243424 - RNA, 32 nt, Human
ucuugucuacaaaauuuggcagcugcaacaua

SEQ ID NO: 243425 - RNA, 32 nt, Human
ucuugucuacccacccucccucccccauccuc

SEQ ID NO: 243426 - RNA, 32 nt, Human
ucuugucuacugaacaaauaagugagagagug

SEQ ID NO: 243427 - RNA, 32 nt, Human
ucuugucuauacagauccucucuuucuuuccc

SEQ ID NO: 243428 - RNA, 32 nt, Human
ucuugucucacugcaaccucugccucccgggu

SEQ ID NO: 243429 - RNA, 32 nt, Human
ucuugucucagucuccuugauagccacuucac

SEQ ID NO: 243430 - RNA, 32 nt, Human
ucuugucuccauaauccucccuuucaaggaug

SEQ ID NO: 243431 - RNA, 32 nt, Human
ucuugucucccagacuggagugcaauggcaug

SEQ ID NO: 243432 - RNA, 32 nt, Human
ucuugucucccaggcuggagugcaaucgcgca

SEQ ID NO: 243433 - RNA, 32 nt, Human
ucuugucucccaggcuggagugcagugacaca

SEQ ID NO: 243434 - RNA, 32 nt, Human
ucuugucucccaucccagcacauugaggaugu

SEQ ID NO: 243435 - RNA, 32 nt, Human
ucuugucuccccggcuggagugcaguggcaug

SEQ ID NO: 243436 - RNA, 32 nt, Human
ucuugucuccugggaagagcuugcucccgccc

SEQ ID NO: 243437 - RNA, 32 nt, Human
ucuugucucucaggcuggguugcaauggcaca

SEQ ID NO: 243438 - RNA, 32 nt, Human
ucuugucucuccccugcguccugccaggaagc

SEQ ID NO: 243439 - RNA, 32 nt, Human
ucuugucugggugacagagugagaccccuagc

SEQ ID NO: 243440 - RNA, 32 nt, Human
ucuugucugguugaggacuuggggcaggaaag

SEQ ID NO: 243441 - RNA, 32 nt, Human
ucuugucuguaaucccagcgcucugggaggcu

SEQ ID NO: 243442 - RNA, 32 nt, Human
ucuugucuguucugccgcugugugggccuggg

SEQ ID NO: 243443 - RNA, 32 nt, Human
ucuugucuucccacgcaagaugugacaauguu

SEQ ID NO: 243444 - RNA, 23 nt, Human
ucuugucuuccccgcccuguccu

SEQ ID NO: 243445 - RNA, 32 nt, Human
ucuugucuucuuuuuaauuuauggacuagucu

SEQ ID NO: 243446 - RNA, 23 nt, Human
ucuugucuuucucccuccugcuu

SEQ ID NO: 243447 - RNA, 32 nt, Human
ucuugucuuuuucuuuucuuuuuaacuaagaa

SEQ ID NO: 243448 - RNA, 32 nt, Human
ucuugugaaaccagaaagaaaguucaagaaau

SEQ ID NO: 243449 - RNA, 32 nt, Human
ucuugugaccaccacaugucuagugauuauuu

SEQ ID NO: 243450 - RNA, 32 nt, Human
ucuugugagaucugguuguuuaaaaauaugug

SEQ ID NO: 243451 - RNA, 32 nt, Human
ucuugugagcagcaauaccucacuuuuuauca

SEQ ID NO: 243452 - RNA, 32 nt, Human
ucuugugagggcugggggcauccaggcacuca

SEQ ID NO: 243453 - RNA, 21 nt, Human
ucuugugcagagccucugcuu

SEQ ID NO: 243454 - RNA, 32 nt, Human
ucuugugccacagagcucagaaagcuaaagca

SEQ ID NO: 243455 - RNA, 32 nt, Human
ucuugugccaggaccagggaugacugggccau

SEQ ID NO: 243456 - RNA, 32 nt, Human
ucuugugccaugaugaauaaaaaguuaagcaa

SEQ ID NO: 243457 - RNA, 23 nt, Human
ucuugugcccaggcuggagugca

SEQ ID NO: 243458 - RNA, 32 nt, Human
ucuugugccuaggaguucgaggcugcaguggg

SEQ ID NO: 243459 - RNA, 32 nt, Human
ucuugugccuggcagcuacacgcccggggugg

SEQ ID NO: 243460 - RNA, 28 nt, Human
ucuugugcuagccacuggauuuugcaga

SEQ ID NO: 243461 - RNA, 25 nt, Human
ucuugugcugacuuucuccuguccu

SEQ ID NO: 243462 - RNA, 32 nt, Human
ucuugugcuguuccacucuuggcuccagcaga

SEQ ID NO: 243463 - RNA, 32 nt, Human
ucuugugcuuuaauacuuuauggcaggauugu

SEQ ID NO: 243464 - RNA, 32 nt, Human
ucuuguggaaggacagcaaggcugaggagaau

SEQ ID NO: 243465 - RNA, 32 nt, Human
ucuuguggagcuuagagguugguggggaagaa

SEQ ID NO: 243466 - RNA, 32 nt, Human
ucuuguggauaugagggaagagccaaauagac

SEQ ID NO: 243467 - RNA, 32 nt, Human
ucuuguggauccuguugggaccagccacucac

SEQ ID NO: 243468 - RNA, 32 nt, Human
ucuuguggcaaacacaagacccucuaugcguc

SEQ ID NO: 243469 - RNA, 32 nt, Human
ucuuguggccacucugggcucaccgggaacau

SEQ ID NO: 243470 - RNA, 32 nt, Human
ucuuguggcccuggcagaaucaagaugaggcc

SEQ ID NO: 243471 - RNA, 32 nt, Human
ucuugugggagccuaguggagagcagacgugg

SEQ ID NO: 243472 - RNA, 32 nt, Human
ucuugugggaggacacugcugggcacaguuaa

SEQ ID NO: 243473 - RNA, 32 nt, Human
ucuugugggaggcggugggcagcgacacuccu

SEQ ID NO: 243474 - RNA, 32 nt, Human
ucuuguggggagcaaggaggggaugagcggua

SEQ ID NO: 243475 - RNA, 32 nt, Human
ucuugugggggaaaaauucuaguauuuugauu

SEQ ID NO: 243476 - RNA, 32 nt, Human
ucuugugggugaccuggaugugagaccuggag

SEQ ID NO: 243477 - RNA, 21 nt, Human
ucuuguggguuuucuguuuga

SEQ ID NO: 243478 - RNA, 32 nt, Human
ucuuguguauuuuacuuuccauguaacacugu

SEQ ID NO: 243479 - RNA, 32 nt, Human
ucuuguguauuuuuguccauauccaauguuau

SEQ ID NO: 243480 - RNA, 32 nt, Human
ucuugugucacccaggcuggagugcaauggcg

SEQ ID NO: 243481 - RNA, 32 nt, Human
ucuugugucacccaggcuggcgugcagggccc

SEQ ID NO: 243482 - RNA, 21 nt, Human
ucuugugucacgucuccuccu

SEQ ID NO: 243483 - RNA, 24 nt, Human
ucuuguguccaggcuggagugcag

SEQ ID NO: 243484 - RNA, 32 nt, Human
ucuuguguccaggcuggagugcaguggcacua

SEQ ID NO: 243485 - RNA, 32 nt, Human
ucuugugucuuauguucucuguauuuaugcag

SEQ ID NO: 243486 - RNA, 32 nt, Human
ucuugugucuuucugccaggcaaaauccuggg

SEQ ID NO: 243487 - RNA, 32 nt, Human
ucuugugugacuggcccugccgucacagcugg

SEQ ID NO: 243488 - RNA, 32 nt, Human
ucuugugugguuuggcccuucuccuuuugaaa

SEQ ID NO: 243489 - RNA, 32 nt, Human
ucuuguguugaaaugugaugcccagccaggca

SEQ ID NO: 243490 - RNA, 32 nt, Human
ucuuguguugagauacacauaucuguacuuuu

SEQ ID NO: 243491 - RNA, 32 nt, Human
ucuuguguuggcuuaauuucuggaugggggcc

SEQ ID NO: 243492 - RNA, 32 nt, Human
ucuuguguuuaaccuaaugcucagccuuggua

SEQ ID NO: 243493 - RNA, 32 nt, Human
ucuuguuacccaggcaggagugcaguggcgug

SEQ ID NO: 243494 - RNA, 32 nt, Human
ucuuguuacccaggcuggagugcaauggcacg

SEQ ID NO: 243495 - RNA, 32 nt, Human
ucuuguuacccaggcuggagugcaguggcgcg

SEQ ID NO: 243496 - RNA, 32 nt, Human
ucuuguuacccaggcuggagugcaguggcgug

SEQ ID NO: 243497 - RNA, 32 nt, Human
ucuuguuagagagcuuuucacugugaggaagu

SEQ ID NO: 243498 - RNA, 32 nt, Human
ucuuguuauccaggcuggggugcaauggugcg

SEQ ID NO: 243499 - RNA, 32 nt, Human
ucuuguucaccuuccacuugucugcauaccuc

SEQ ID NO: 243500 - RNA, 32 nt, Human
ucuuguucaccuuccacuugucugcauauauc

SEQ ID NO: 243501 - RNA, 32 nt, Human
ucuuguucagguagucgcccuucugguuuguu

SEQ ID NO: 243502 - RNA, 32 nt, Human
ucuuguuccccaggcuggagugcaauggcacg

SEQ ID NO: 243503 - RNA, 32 nt, Human
ucuuguuccucugccauuccccaugaagccgu

SEQ ID NO: 243504 - RNA, 32 nt, Human
ucuuguucuccacuugugcuguuagaacucac

SEQ ID NO: 243505 - RNA, 32 nt, Human
ucuuguucuuucucaucgcucuccuugccagc

SEQ ID NO: 243506 - RNA, 32 nt, Human
ucuuguugaugaggcuggagugcaguggcgcg

SEQ ID NO: 243507 - RNA, 32 nt, Human
ucuuguugcaucuuuucuacuucaguacacuu

SEQ ID NO: 243508 - RNA, 32 nt, Human
ucuuguugcccaaccuggagugcaguggugcg

SEQ ID NO: 243509 - RNA, 32 nt, Human
ucuuguugcccaagcuggagugcaauggcacg

SEQ ID NO: 243510 - RNA, 32 nt, Human
ucuuguugcccaagcuggagugcaauggcgcg

SEQ ID NO: 243511 - RNA, 32 nt, Human
ucuuguugcccaagcuggagugcaguggcgcg

SEQ ID NO: 243512 - RNA, 32 nt, Human
ucuuguugcccaagcuggagugcaguggugca

SEQ ID NO: 243513 - RNA, 32 nt, Human
ucuuguugcccacgcuggagugcaauggugca

SEQ ID NO: 243514 - RNA, 32 nt, Human
ucuuguugcccagacuggagugcaauggcaca

SEQ ID NO: 243515 - RNA, 32 nt, Human
ucuuguugcccagccuggagugcaauagcgug

SEQ ID NO: 243516 - RNA, 32 nt, Human
ucuuguugcccaggcaggaguacaauggcagg

SEQ ID NO: 243517 - RNA, 32 nt, Human
ucuuguugcccaggccagagugcaauggcgug

SEQ ID NO: 243518 - RNA, 32 nt, Human
ucuuguugcccaggcccgagugcaguggugcg

SEQ ID NO: 243519 - RNA, 32 nt, Human
ucuuguugcccaggcggaguacaaugguggga

SEQ ID NO: 243520 - RNA, 32 nt, Human
ucuuguugcccaggcggagugcaguggaacaa

SEQ ID NO: 243521 - RNA, 32 nt, Human
ucuuguugcccaggcuagagggcaauggugca

SEQ ID NO: 243522 - RNA, 32 nt, Human
ucuuguugcccaggcuagagugcaauggcaca

SEQ ID NO: 243523 - RNA, 32 nt, Human
ucuuguugcccaggcuagagugcaauggcaug

SEQ ID NO: 243524 - RNA, 32 nt, Human
ucuuguugcccaggcuagagugcaauggcgcc

SEQ ID NO: 243525 - RNA, 32 nt, Human
ucuuguugcccaggcuagcaugcaauggugug

SEQ ID NO: 243526 - RNA, 32 nt, Human
ucuuguugcccaggcuaugggaagaaaugaaa

SEQ ID NO: 243527 - RNA, 32 nt, Human
ucuuguugcccaggcugaagugcaauguugug

SEQ ID NO: 243528 - RNA, 32 nt, Human
ucuuguugcccaggcugaagugcaguguugug

SEQ ID NO: 243529 - RNA, 32 nt, Human
ucuuguugcccaggcugcagugcaauggcaca

SEQ ID NO: 243530 - RNA, 32 nt, Human
ucuuguugcccaggcuggaaauggcgcgaucu

SEQ ID NO: 243531 - RNA, 32 nt, Human
ucuuguugcccaggcuggaaugcaauggcgcg

SEQ ID NO: 243532 - RNA, 32 nt, Human
ucuuguugcccaggcuggaaugcaguggcacg

SEQ ID NO: 243533 - RNA, 32 nt, Human
ucuuguugcccaggcuggagggcaauggugca

SEQ ID NO: 243534 - RNA, 32 nt, Human
ucuuguugcccaggcuggaguacaauggcaug

SEQ ID NO: 243535 - RNA, 32 nt, Human
ucuuguugcccaggcuggaguacaauggcgcg

SEQ ID NO: 243536 - RNA, 32 nt, Human
ucuuguugcccaggcuggaguacaauggcgug

SEQ ID NO: 243537 - RNA, 32 nt, Human
ucuuguugcccaggcuggaguacaauggugcg

SEQ ID NO: 243538 - RNA, 32 nt, Human
ucuuguugcccaggcuggaguacagugguaug

SEQ ID NO: 243539 - RNA, 32 nt, Human
ucuuguugcccaggcuggagugaaauggugcg

SEQ ID NO: 243540 - RNA, 32 nt, Human
ucuuguugcccaggcuggagugaaguggcgug

SEQ ID NO: 243541 - RNA, 32 nt, Human
ucuuguugcccaggcuggagugcaacggcacg

SEQ ID NO: 243542 - RNA, 32 nt, Human
ucuuguugcccaggcuggagugcaacggcaug

SEQ ID NO: 243543 - RNA, 32 nt, Human
ucuuguugcccaggcuggagugcaacggugca

SEQ ID NO: 243544 - RNA, 32 nt, Human
ucuuguugcccaggcuggagugcaauagcaug

SEQ ID NO: 243545 - RNA, 32 nt, Human
ucuuguugcccaggcuggagugcaauagcgca

SEQ ID NO: 243546 - RNA, 32 nt, Human
ucuuguugcccaggcuggagugcaauagcgcg

SEQ ID NO: 243547 - RNA, 32 nt, Human
ucuuguugcccaggcuggagugcaaugacacg

SEQ ID NO: 243548 - RNA, 32 nt, Human
ucuuguugcccaggcuggagugcaaugcgcga

SEQ ID NO: 243549 - RNA, 32 nt, Human
ucuuguugcccaggcuggagugcaauggagcg

SEQ ID NO: 243550 - RNA, 32 nt, Human
ucuuguugcccaggcuggagugcaauggcaca

SEQ ID NO: 243551 - RNA, 32 nt, Human
ucuuguugcccaggcuggagugcaauggcacc

SEQ ID NO: 243552 - RNA, 32 nt, Human
ucuuguugcccaggcuggagugcaauggcacg

SEQ ID NO: 243553 - RNA, 32 nt, Human
ucuuguugcccaggcuggagugcaauggcaua

SEQ ID NO: 243554 - RNA, 32 nt, Human
ucuuguugcccaggcuggagugcaauggcaug

SEQ ID NO: 243555 - RNA, 32 nt, Human
ucuuguugcccaggcuggagugcaauggcgca

SEQ ID NO: 243556 - RNA, 32 nt, Human
ucuuguugcccaggcuggagugcaauggcgcg

SEQ ID NO: 243557 - RNA, 32 nt, Human
ucuuguugcccaggcuggagugcaauggcgug

SEQ ID NO: 243558 - RNA, 32 nt, Human
ucuuguugcccaggcuggagugcaaugguaug

SEQ ID NO: 243559 - RNA, 32 nt, Human
ucuuguugcccaggcuggagugcaauggugca

SEQ ID NO: 243560 - RNA, 32 nt, Human
ucuuguugcccaggcuggagugcaauggugcg

SEQ ID NO: 243561 - RNA, 32 nt, Human
ucuuguugcccaggcuggagugcaguagcacu

SEQ ID NO: 243562 - RNA, 32 nt, Human
ucuuguugcccaggcuggagugcagugacaca

SEQ ID NO: 243563 - RNA, 32 nt, Human
ucuuguugcccaggcuggagugcaguggugcg

SEQ ID NO: 243564 - RNA, 32 nt, Human
ucuuguugcccaggcuggagugcaguggugug

SEQ ID NO: 243565 - RNA, 32 nt, Human
ucuuguugcccaggcuggagugcauuggcgcg

SEQ ID NO: 243566 - RNA, 32 nt, Human
ucuuguugcccaggcuggagugcggugguaca

SEQ ID NO: 243567 - RNA, 32 nt, Human
ucuuguugcccaggcuggagugcguuggcgug

SEQ ID NO: 243568 - RNA, 32 nt, Human
ucuuguugcccaggcuggagugugaugggcuc

SEQ ID NO: 243569 - RNA, 32 nt, Human
ucuuguugcccaggcugggagggcaauggcac

SEQ ID NO: 243570 - RNA, 32 nt, Human
ucuuguugcccaggcuggugugcaauggcgug

SEQ ID NO: 243571 - RNA, 32 nt, Human
ucuuguugcccaggcuugagugcagugaugca

SEQ ID NO: 243572 - RNA, 32 nt, Human
ucuuguugcccagggcuggagugcaguggcau

SEQ ID NO: 243573 - RNA, 32 nt, Human
ucuuguugcccagguuagagugcaguggcacg

SEQ ID NO: 243574 - RNA, 32 nt, Human
ucuuguugcccagguuggaguguaauagcacg

SEQ ID NO: 243575 - RNA, 32 nt, Human
ucuuguugcccgggcuggagugcaauggcgcg

SEQ ID NO: 243576 - RNA, 32 nt, Human
ucuuguugcccgggcuggagugcaauggugag

SEQ ID NO: 243577 - RNA, 32 nt, Human
ucuuguugccgaggcuggagugcaauggcgca

SEQ ID NO: 243578 - RNA, 32 nt, Human
ucuuguugccuagcuggagugcaauggcgcaa

SEQ ID NO: 243579 - RNA, 32 nt, Human
ucuuguugccuaggcuggagugcaauggcgag

SEQ ID NO: 243580 - RNA, 32 nt, Human
ucuuguugccuaggcuggagugcaauggugcg

SEQ ID NO: 243581 - RNA, 32 nt, Human
ucuuguugccuaggcuggagugcaguggcgca

SEQ ID NO: 243582 - RNA, 32 nt, Human
ucuuguugccugcacucauuucccagggaccc

SEQ ID NO: 243583 - RNA, 32 nt, Human
ucuuguugcugaggcaggagaauugcucaaac

SEQ ID NO: 243584 - RNA, 32 nt, Human
ucuuguugcugaggcuggagugcaguggcacc

SEQ ID NO: 243585 - RNA, 32 nt, Human
ucuuguuggacauaggcaaaauaacuuggcaa

SEQ ID NO: 243586 - RNA, 32 nt, Human
ucuuguuggcccuaugaaauucugcacuuuuc

SEQ ID NO: 243587 - RNA, 32 nt, Human
ucuuguuggccugggaacuucuuggaacuuua

SEQ ID NO: 243588 - RNA, 32 nt, Human
ucuuguuggcuaggcuggaguaaaauggugcg

SEQ ID NO: 243589 - RNA, 32 nt, Human
ucuuguuguccaggcuagagugcaauggcaug

SEQ ID NO: 243590 - RNA, 32 nt, Human
ucuuguuguccaggcuggagugcaauggcacg

SEQ ID NO: 243591 - RNA, 32 nt, Human
ucuuguuguccaggcuggagugcaauggcgca

SEQ ID NO: 243592 - RNA, 32 nt, Human
ucuuguuguccaggcuggagugcaguggcgcg

SEQ ID NO: 243593 - RNA, 32 nt, Human
ucuuguuguccagucuggagugcaauggcaca

SEQ ID NO: 243594 - RNA, 32 nt, Human
ucuuguugucuaggcuggagugccguggugcg

SEQ ID NO: 243595 - RNA, 32 nt, Human
ucuuguuguuuauaugaaaacacucaaaauga

SEQ ID NO: 243596 - RNA, 32 nt, Human
ucuuguuuaccauucauguaacaaaacccagc

SEQ ID NO: 243597 - RNA, 32 nt, Human
ucuuguuucaauuacaaacuccugggcuuucu

SEQ ID NO: 243598 - RNA, 32 nt, Human
ucuuguuucccaggcuggagugcaauggcaca

SEQ ID NO: 243599 - RNA, 32 nt, Human
ucuuguuucccaggcuggagugcaauggguga

SEQ ID NO: 243600 - RNA, 32 nt, Human
ucuuguuucccagucuucucuucacccuuccu

SEQ ID NO: 243601 - RNA, 32 nt, Human
ucuuguuucucaaaucauaggagaugacauuu

SEQ ID NO: 243602 - RNA, 32 nt, Human
ucuuguuucuuuccucccugucuuagacuuug

SEQ ID NO: 243603 - RNA, 32 nt, Human
ucuuguuugggauaggcaagagccaaagguuc

SEQ ID NO: 243604 - RNA, 23 nt, Human
ucuuguuuuacccuauacaucca

SEQ ID NO: 243605 - RNA, 32 nt, Human
ucuuguuuuccaacucuucauuuuguugcaau

SEQ ID NO: 243606 - RNA, 32 nt, Human
ucuuguuuucuugggguugcccccucuuguuu

SEQ ID NO: 243607 - RNA, 32 nt, Human
ucuuguuuugacuuccacugacucauucugaa

SEQ ID NO: 243608 - RNA, 32 nt, Human
ucuuguuuuuccacuacugcuaccacaacuau

SEQ ID NO: 243609 - RNA, 32 nt, Human
ucuuuaaaaaccauuuaaacugcuagauagua

SEQ ID NO: 243610 - RNA, 32 nt, Human
ucuuuaaaaauggauuuaucuggggguugcag

SEQ ID NO: 243611 - RNA, 32 nt, Human
ucuuuaaaauaacauguaaacuucaauguucu

SEQ ID NO: 243612 - RNA, 32 nt, Human
ucuuuaaagaggaaggggaguggagggaaccc

SEQ ID NO: 243613 - RNA, 32 nt, Human
ucuuuaaagcaucuuuaggaagcgguugccac

SEQ ID NO: 243614 - RNA, 32 nt, Human
ucuuuaaaugauuuguauuacuuuauuaaaac

SEQ ID NO: 243615 - RNA, 32 nt, Human
ucuuuaacacccuuaggaccucaggccaucuu

SEQ ID NO: 243616 - RNA, 32 nt, Human
ucuuuaacaucccacugugaacauuaggcaga

SEQ ID NO: 243617 - RNA, 32 nt, Human
ucuuuaaccauggcgucccucuucaagaagag

SEQ ID NO: 243618 - RNA, 32 nt, Human
ucuuuaacugauuuugcuaaaaaucucccugu

SEQ ID NO: 243619 - RNA, 32 nt, Human
ucuuuaacugggcugcucagcacugcuugggg

SEQ ID NO: 243620 - RNA, 32 nt, Human
ucuuuaacuuauuucaaaaucaucucaugacc

SEQ ID NO: 243621 - RNA, 32 nt, Human
ucuuuaacuucuaacaaaggccuaguaaacaa

SEQ ID NO: 243622 - RNA, 32 nt, Human
ucuuuaagcaguggagguccaggagcagagcc

SEQ ID NO: 243623 - RNA, 32 nt, Human
ucuuuaagcugccuggauugcaccuuugaaau

SEQ ID NO: 243624 - RNA, 24 nt, Human
ucuuuaaguguggucaucagguca

SEQ ID NO: 243625 - RNA, 32 nt, Human
ucuuuaauacaguguuucuaccucucauuugu

SEQ ID NO: 243626 - RNA, 32 nt, Human
ucuuuaaucucucaucuucagauuauacaagg

SEQ ID NO: 243627 - RNA, 32 nt, Human
ucuuuaaucuuucuugguccacauccugaaag

SEQ ID NO: 243628 - RNA, 32 nt, Human
ucuuuaauuauuucaagagucaagaccaaaag

SEQ ID NO: 243629 - RNA, 32 nt, Human
ucuuuaauucccaagaauaaguuuacauuuca

SEQ ID NO: 243630 - RNA, 32 nt, Human
ucuuuaauuugugaaaaauuaccauggugagu

SEQ ID NO: 243631 - RNA, 32 nt, Human
ucuuuacaaaaauacaaaaauuagcuggacgu

SEQ ID NO: 243632 - RNA, 32 nt, Human
ucuuuacaacagcaaccaaagaaaacauaccu

SEQ ID NO: 243633 - RNA, 32 nt, Human
ucuuuacacagauugcucugauucucacaacu

SEQ ID NO: 243634 - RNA, 32 nt, Human
ucuuuacaggagaaagaggugauuauggaggg

SEQ ID NO: 243635 - RNA, 32 nt, Human
ucuuuacagggugggagcgggcugagcaagca

SEQ ID NO: 243636 - RNA, 32 nt, Human
ucuuuacaucacuuaucuuucucacugagguu

SEQ ID NO: 243637 - RNA, 32 nt, Human
ucuuuaccagaggcuggguguggugggaagga

SEQ ID NO: 243638 - RNA, 32 nt, Human
ucuuuaccaguauccuggcaaugguuguuuaa

SEQ ID NO: 243639 - RNA, 32 nt, Human
ucuuuaccaucccuccuucucuccuuccacag

SEQ ID NO: 243640 - RNA, 32 nt, Human
ucuuuaccauuaugcucgaugguuuguuuguu

SEQ ID NO: 243641 - RNA, 32 nt, Human
ucuuuaccgggaccuucucucaauuuucaugg

SEQ ID NO: 243642 - RNA, 32 nt, Human
ucuuuaccuaggcuguguuuccuaagcucuga

SEQ ID NO: 243643 - RNA, 32 nt, Human
ucuuuaccucuucugcugauuaucaguugaca

SEQ ID NO: 243644 - RNA, 20 nt, Human
ucuuuacuaaaaauacaaaa

SEQ ID NO: 243645 - RNA, 32 nt, Human
ucuuuacuccacugagaugucugggugcagag

SEQ ID NO: 243646 - RNA, 22 nt, Human
ucuuuacugaaaauacaaaaua

SEQ ID NO: 243647 - RNA, 32 nt, Human
ucuuuacugcucaaaaaccaaaaucuuuggaa

SEQ ID NO: 243648 - RNA, 32 nt, Human
ucuuuacugcucagaaccucuacuucucaucu

SEQ ID NO: 243649 - RNA, 32 nt, Human
ucuuuacugcuuuuucaucaagugaauauuua

SEQ ID NO: 243650 - RNA, 32 nt, Human
ucuuuacuggcccugacugcuguuaauaauug

SEQ ID NO: 243651 - RNA, 32 nt, Human
ucuuuacuguguccacaaaacuacccaucaua

SEQ ID NO: 243652 - RNA, 32 nt, Human
ucuuuacuuacagugugacuguaacuuucaga

SEQ ID NO: 243653 - RNA, 32 nt, Human
ucuuuacuuuuuccuuuuccuucuuaaguuag

SEQ ID NO: 243654 - RNA, 32 nt, Human
ucuuuagaacagugguucucaaacuuuaguac

SEQ ID NO: 243655 - RNA, 32 nt, Human
ucuuuagacccagcuccugccucccagccuuc

SEQ ID NO: 243656 - RNA, 32 nt, Human
ucuuuagacuauagucugucuccucugaccug

SEQ ID NO: 243657 - RNA, 32 nt, Human
ucuuuagaggauccuguacacaguuccacuau

SEQ ID NO: 243658 - RNA, 32 nt, Human
ucuuuagagguucccuguauaaaucauucaua

SEQ ID NO: 243659 - RNA, 32 nt, Human
ucuuuagaugacgaauuaacccuugcuucuuc

SEQ ID NO: 243660 - RNA, 32 nt, Human
ucuuuagauggucccuucccucuuucucuccc

SEQ ID NO: 243661 - RNA, 32 nt, Human
ucuuuagaugguggcacauuccuuuggguaug

SEQ ID NO: 243662 - RNA, 32 nt, Human
ucuuuaggaaaucacaacacagagaagcaaaa

SEQ ID NO: 243663 - RNA, 32 nt, Human
ucuuuaggacaaagcagagaguccaauuuauu

SEQ ID NO: 243664 - RNA, 32 nt, Human
ucuuuaggagcagaaaaggggagugcuaacug

SEQ ID NO: 243665 - RNA, 32 nt, Human
ucuuuaggauuugcagcuccaggaagcgagau

SEQ ID NO: 243666 - RNA, 32 nt, Human
ucuuuaggcaaaacaggaaacuucuuaaguga

SEQ ID NO: 243667 - RNA, 32 nt, Human
ucuuuaggccuuucacaacuaggacugagaau

SEQ ID NO: 243668 - RNA, 32 nt, Human
ucuuuagggcuggaaggcagcaucccucugac

SEQ ID NO: 243669 - RNA, 32 nt, Human
ucuuuagggugacugugguaagaaggauauuu

SEQ ID NO: 243670 - RNA, 32 nt, Human
ucuuuagguggcuaggagggcuggggaggccc

SEQ ID NO: 243671 - RNA, 32 nt, Human
ucuuuaguaauaauucacaccuugcacagcau

SEQ ID NO: 243672 - RNA, 32 nt, Human
ucuuuaguaauuugggcccagugccuugguga

SEQ ID NO: 243673 - RNA, 32 nt, Human
ucuuuaguuccauugagcucccccucuggauu

SEQ ID NO: 243674 - RNA, 22 nt, Human
ucuuuaguuccuaaaguuucuu

SEQ ID NO: 243675 - RNA, 32 nt, Human
ucuuuaguucucagagguagggacaaaaccac

SEQ ID NO: 243676 - RNA, 32 nt, Human
ucuuuauacuauauaauaugguaacuugggua

SEQ ID NO: 243677 - RNA, 32 nt, Human
ucuuuauaucucuuccuuuuccuccucaucuu

SEQ ID NO: 243678 - RNA, 32 nt, Human
ucuuuaucacuuccgagcaaauacucagauuu

SEQ ID NO: 243679 - RNA, 32 nt, Human
ucuuuauccagccuaucauucaugggcauucg

SEQ ID NO: 243680 - RNA, 32 nt, Human
ucuuuaucccuacugauaguuccucuuucuca

SEQ ID NO: 243681 - RNA, 32 nt, Human
ucuuuaucuuugaccuccuucuaucuguaaau

SEQ ID NO: 243682 - RNA, 32 nt, Human
ucuuuaugaaaguacccugggucuuucauccg

SEQ ID NO: 243683 - RNA, 32 nt, Human
ucuuuaugccaagaacuguauuuacugugguu

SEQ ID NO: 243684 - RNA, 32 nt, Human
ucuuuaugcugauguugaguuuugggauuguu

SEQ ID NO: 243685 - RNA, 32 nt, Human
ucuuuaugucuuuuuaaauuuucauuguacag

SEQ ID NO: 243686 - RNA, 31 nt, Human
ucuuuauguuuucucccuuugcucuaaaagg

SEQ ID NO: 243687 - RNA, 21 nt, Human
ucuuuauuaaaaaucaaaaua

SEQ ID NO: 243688 - RNA, 32 nt, Human
ucuuuauucccuucuuuccucuuccagcugag

SEQ ID NO: 243689 - RNA, 32 nt, Human
ucuuuauuccugguuaggaaggugggccgcua

SEQ ID NO: 243690 - RNA, 32 nt, Human
ucuuuauuuagacaugguugccugcagguauu

SEQ ID NO: 243691 - RNA, 32 nt, Human
ucuuuauuuucccugguagagacaucuucaag

SEQ ID NO: 243692 - RNA, 32 nt, Human
ucuuuauuuugaaaaauacagaacuuuggaau

SEQ ID NO: 243693 - RNA, 32 nt, Human
ucuuucaaaagacaguuuuaaugaguaauuaa

SEQ ID NO: 243694 - RNA, 32 nt, Human
ucuuucaaaauauggcugggugcaguggcuca

SEQ ID NO: 243695 - RNA, 32 nt, Human
ucuuucaaacacagcaguggauucuuucucuc

SEQ ID NO: 243696 - RNA, 32 nt, Human
ucuuucaaaccagcuaaauauuugucacaaaa

SEQ ID NO: 243697 - RNA, 32 nt, Human
ucuuucaacgccuugggagacugggugaaagg

SEQ ID NO: 243698 - RNA, 32 nt, Human
ucuuucaagaagcaggcauuguaggacagcug

SEQ ID NO: 243699 - RNA, 32 nt, Human
ucuuucaagauucauucucccugaaucuuacc

SEQ ID NO: 243700 - RNA, 32 nt, Human
ucuuucacacagaauuguacaagcaaaguuug

SEQ ID NO: 243701 - RNA, 32 nt, Human
ucuuucaccagucugucucuuuaauuaaauaa

SEQ ID NO: 243702 - RNA, 32 nt, Human
ucuuucacccaccuucuuaccccugucagcgc

SEQ ID NO: 243703 - RNA, 32 nt, Human
ucuuucacccagccagggagaagguucuucgc

SEQ ID NO: 243704 - RNA, 32 nt, Human
ucuuucacccaggcuggagugcaguggcacga

SEQ ID NO: 243705 - RNA, 32 nt, Human
ucuuucaccccuuccccucucccuugggcucu

SEQ ID NO: 243706 - RNA, 32 nt, Human
ucuuucaccuguaaucccagcacuuugggagg

SEQ ID NO: 243707 - RNA, 32 nt, Human
ucuuucacguguuugaggccaucugugucuau

SEQ ID NO: 243708 - RNA, 32 nt, Human
ucuuucacugauuucugaaucauguucuacuu

SEQ ID NO: 243709 - RNA, 32 nt, Human
ucuuucacugauuucugaaucauguucuaguu

SEQ ID NO: 243710 - RNA, 32 nt, Human
ucuuucacuuuauuaccuucuuucuaauacaa

SEQ ID NO: 243711 - RNA, 32 nt, Human
ucuuucagacacauaucuccccaguacccuac

SEQ ID NO: 243712 - RNA, 32 nt, Human
ucuuucagaguuguuaguuuacuccauucuuu

SEQ ID NO: 243713 - RNA, 32 nt, Human
ucuuucagauuuggaacuguaucuguauggaa

SEQ ID NO: 243714 - RNA, 32 nt, Human
ucuuucaggaauaauaaagagcaugauuccac

SEQ ID NO: 243715 - RNA, 32 nt, Human
ucuuucaggcuuuccauggaguacaauauaug

SEQ ID NO: 243716 - RNA, 32 nt, Human
ucuuucagugaaagaggaaggaaaggaguagg

SEQ ID NO: 243717 - RNA, 32 nt, Human
ucuuucaguuauguauauuuguuuuccuuguu

SEQ ID NO: 243718 - RNA, 32 nt, Human
ucuuucauaggugaaaagcaccagagaauaca

SEQ ID NO: 243719 - RNA, 32 nt, Human
ucuuucaucucaccacagcugccuccuuugaa

SEQ ID NO: 243720 - RNA, 32 nt, Human
ucuuucaugaguguuucccaugguguuuuugc

SEQ ID NO: 243721 - RNA, 32 nt, Human
ucuuucauggggagagaaggagacugaauuac

SEQ ID NO: 243722 - RNA, 32 nt, Human
ucuuucauguacacuguuucuuuuucaauacu

SEQ ID NO: 243723 - RNA, 32 nt, Human
ucuuucauuacauuuaaucucuggacccugga

SEQ ID NO: 243724 - RNA, 32 nt, Human
ucuuucauuauggaaugugaaauaucaguguu

SEQ ID NO: 243725 - RNA, 32 nt, Human
ucuuucauuccuuccuuccucuguuucuuucu

SEQ ID NO: 243726 - RNA, 32 nt, Human
ucuuucauugcacuucacucugccuguuuuca

SEQ ID NO: 243727 - RNA, 32 nt, Human
ucuuucauuuauuugcuuuccugggccucuau

SEQ ID NO: 243728 - RNA, 32 nt, Human
ucuuuccaaaaggcagcuugaaauguuggucc

SEQ ID NO: 243729 - RNA, 32 nt, Human
ucuuuccaaagaagcuuccuggacacuguuau

SEQ ID NO: 243730 - RNA, 32 nt, Human
ucuuuccaagucacaaaauucuccccuccccu

SEQ ID NO: 243731 - RNA, 32 nt, Human
ucuuuccaaucacuuguucauacaacagccau

SEQ ID NO: 243732 - RNA, 32 nt, Human
ucuuuccacagcuguugcuucugguuggaugg

SEQ ID NO: 243733 - RNA, 32 nt, Human
ucuuuccacauucuagagagggcucggaggcc

SEQ ID NO: 243734 - RNA, 32 nt, Human
ucuuuccaccacugccuucaucuuuggggugg

SEQ ID NO: 243735 - RNA, 32 nt, Human
ucuuuccacgcuuuccagccugugggagcggc

SEQ ID NO: 243736 - RNA, 32 nt, Human
ucuuuccagcucuaggucggcugugcuggagu

SEQ ID NO: 243737 - RNA, 31 nt, Human
ucuuuccaguuucauaaguuacccaguccaa

SEQ ID NO: 243738 - RNA, 32 nt, Human
ucuuuccaugaggagcaggugagggucugaga

SEQ ID NO: 243739 - RNA, 32 nt, Human
ucuuuccauucaaaucacauggcuuuccacca

SEQ ID NO: 243740 - RNA, 32 nt, Human
ucuuuccauuucucuaucaagcauuaaauaau

SEQ ID NO: 243741 - RNA, 32 nt, Human
ucuuucccaccauucucacccccaccaccccc

SEQ ID NO: 243742 - RNA, 32 nt, Human
ucuuucccaccccaacaccacugccaccaccc

SEQ ID NO: 243743 - RNA, 32 nt, Human
ucuuucccaucuccacucaguauuccaauggc

SEQ ID NO: 243744 - RNA, 32 nt, Human
ucuuuccccaaaagugaugaucucaaguccuu

SEQ ID NO: 243745 - RNA, 32 nt, Human
ucuuuccccagucuccccucagggaccugcag

SEQ ID NO: 243746 - RNA, 32 nt, Human
ucuuucccccacccuacucccuccaauucccc

SEQ ID NO: 243747 - RNA, 32 nt, Human
ucuuucccccuuccuuucugugucuccugccu

SEQ ID NO: 243748 - RNA, 32 nt, Human
ucuuuccccugccccuaguugcugucucggcu

SEQ ID NO: 243749 - RNA, 32 nt, Human
ucuuuccccuuucaaagaggagcaucucuaag

SEQ ID NO: 243750 - RNA, 32 nt, Human
ucuuuccccuuuccugcccuuucugcucaucu

SEQ ID NO: 243751 - RNA, 32 nt, Human
ucuuuccccuuuccuuuccuucuucccuaccu

SEQ ID NO: 243752 - RNA, 32 nt, Human
ucuuucccuccagccggcccuuaggacggcug

SEQ ID NO: 243753 - RNA, 32 nt, Human
ucuuucccuccccucuggucuccauucucuuc

SEQ ID NO: 243754 - RNA, 32 nt, Human
ucuuucccucugucugugcuuguguuguugac

SEQ ID NO: 243755 - RNA, 32 nt, Human
ucuuucccuucuuccuccucuccuucacaaau

SEQ ID NO: 243756 - RNA, 32 nt, Human
ucuuucccuuucucuucuucaugaaugcuuau

SEQ ID NO: 243757 - RNA, 32 nt, Human
ucuuucccuuuucucaaagaccuguguggggc

SEQ ID NO: 243758 - RNA, 32 nt, Human
ucuuuccgcggcccuuuccaccucuuuucacu

SEQ ID NO: 243759 - RNA, 32 nt, Human
ucuuuccguguaagcuaucccaccucagcggc

SEQ ID NO: 243760 - RNA, 32 nt, Human
ucuuuccuaaauggaaggaauuggaacugaaa

SEQ ID NO: 243761 - RNA, 22 nt, Human
ucuuuccuacuccagucccucu

SEQ ID NO: 243762 - RNA, 32 nt, Human
ucuuuccuacuuccucaagguucuuucugucc

SEQ ID NO: 243763 - RNA, 32 nt, Human
ucuuuccuagcucugggcugccuucucagccu

SEQ ID NO: 243764 - RNA, 32 nt, Human
ucuuuccucaaaaggguuaagaugucuaaaau

SEQ ID NO: 243765 - RNA, 32 nt, Human
ucuuuccucaguucucacuaacaagaaagcac

SEQ ID NO: 243766 - RNA, 32 nt, Human
ucuuuccuccaccccuccaucccccaaugcuu

SEQ ID NO: 243767 - RNA, 32 nt, Human
ucuuuccucccgcugccaugcacccugcagcc

SEQ ID NO: 243768 - RNA, 32 nt, Human
ucuuuccuccuugccacuuaccuuugcaaagu

SEQ ID NO: 243769 - RNA, 32 nt, Human
ucuuuccuccuuggcauuacugccccagccgc

SEQ ID NO: 243770 - RNA, 32 nt, Human
ucuuuccucuccaaagccucagucuagccugc

SEQ ID NO: 243771 - RNA, 32 nt, Human
ucuuuccucucugugccucucuguaaaauggg

SEQ ID NO: 243772 - RNA, 32 nt, Human
ucuuuccucuuucugcucugccaucuucagga

SEQ ID NO: 243773 - RNA, 32 nt, Human
ucuuuccugaagccaccaccacuguggccacu

SEQ ID NO: 243774 - RNA, 32 nt, Human
ucuuuccugccaccagaauugcagugguucac

SEQ ID NO: 243775 - RNA, 32 nt, Human
ucuuuccuguagaguaauagcuacuucaugau

SEQ ID NO: 243776 - RNA, 32 nt, Human
ucuuuccugucugcacaagugaaguguuuugu

SEQ ID NO: 243777 - RNA, 32 nt, Human
ucuuuccuguuacuuucaccucaggucguaac

SEQ ID NO: 243778 - RNA, 32 nt, Human
ucuuuccuguuuugccuggaccacuuaaagcc

SEQ ID NO: 243779 - RNA, 32 nt, Human
ucuuuccuuccuuccuccuggucuguuccaaa

SEQ ID NO: 243780 - RNA, 32 nt, Human
ucuuuccuuccuuccuccuuuccuaucuuccu

SEQ ID NO: 243781 - RNA, 32 nt, Human
ucuuuccuucucccuuucuucuuugccuucua

SEQ ID NO: 243782 - RNA, 32 nt, Human
ucuuuccuucuuuccuuccuuuugcucuuucc

SEQ ID NO: 243783 - RNA, 32 nt, Human
ucuuuccuucuuucuuucuuucuuucuucuuu

SEQ ID NO: 243784 - RNA, 32 nt, Human
ucuuuccuugcuuuguuuguguguuuguccag

SEQ ID NO: 243785 - RNA, 32 nt, Human
ucuuuccuuuauaaauugcucagucugaggua

SEQ ID NO: 243786 - RNA, 32 nt, Human
ucuuuccuuuuucccggcuuccuuccucgcgu

SEQ ID NO: 243787 - RNA, 32 nt, Human
ucuuuccuuuuuccuuucuucuuccuuuccuu

SEQ ID NO: 243788 - RNA, 32 nt, Human
ucuuucgacaacagcuguauggcaucaaaacc

SEQ ID NO: 243789 - RNA, 32 nt, Human
ucuuucgccaaggcuggagugcaguggcacga

SEQ ID NO: 243790 - RNA, 32 nt, Human
ucuuucgcccaggauggagugcaguggugcga

SEQ ID NO: 243791 - RNA, 32 nt, Human
ucuuucgcccaggcuggagugcaguggcgcaa

SEQ ID NO: 243792 - RNA, 32 nt, Human
ucuuucgcccaggcuggagugcagugguauga

SEQ ID NO: 243793 - RNA, 32 nt, Human
ucuuucgcugcagccuccaccgugcugagguc

SEQ ID NO: 243794 - RNA, 32 nt, Human
ucuuucguucuuucuuucuuucuuucuuucuc

SEQ ID NO: 243795 - RNA, 32 nt, Human
ucuuucguugcuucugguccaggcuaauaaag

SEQ ID NO: 243796 - RNA, 32 nt, Human
ucuuucuaauccagccaacgucugcucaggaa

SEQ ID NO: 243797 - RNA, 32 nt, Human
ucuuucuaaucucaauccuguucuuuguuuaa

SEQ ID NO: 243798 - RNA, 32 nt, Human
ucuuucuacagauggugcuacucuuggucucc

SEQ ID NO: 243799 - RNA, 32 nt, Human
ucuuucuacagggcugacauuguggcacauuc

SEQ ID NO: 243800 - RNA, 32 nt, Human
ucuuucuacuaccacacauaaaauugcuuugc

SEQ ID NO: 243801 - RNA, 32 nt, Human
ucuuucuacugaugcuuuguuuuguuguaugu

SEQ ID NO: 243802 - RNA, 32 nt, Human
ucuuucuagaggugcuacauaguugguaaugc

SEQ ID NO: 243803 - RNA, 32 nt, Human
ucuuucuagaguagcucccauauauggagaug

SEQ ID NO: 243804 - RNA, 32 nt, Human
ucuuucuaucacccucuucagucaccucuaua

SEQ ID NO: 243805 - RNA, 32 nt, Human
ucuuucuauccaugcagugauagugaguguaa

SEQ ID NO: 243806 - RNA, 32 nt, Human
ucuuucuccaucccucuccucuucccgccgcg

SEQ ID NO: 243807 - RNA, 32 nt, Human
ucuuucuccauccugugcuccaaaaacauacu

SEQ ID NO: 243808 - RNA, 32 nt, Human
ucuuucucccccaaagaaaccccaucgccauc

SEQ ID NO: 243809 - RNA, 32 nt, Human
ucuuucucccuaccaaccuccuccucuccugu

SEQ ID NO: 243810 - RNA, 32 nt, Human
ucuuucucccucagauccuccccacagcucag

SEQ ID NO: 243811 - RNA, 32 nt, Human
ucuuucucccugccaaccuccuccucuccugc

SEQ ID NO: 243812 - RNA, 32 nt, Human
ucuuucuccucccacagggucccccuugcccc

SEQ ID NO: 243813 - RNA, 21 nt, Human
ucuuucuccugcauaccaccu

SEQ ID NO: 243814 - RNA, 32 nt, Human
ucuuucuccugccucagcagcacggacggguu

SEQ ID NO: 243815 - RNA, 32 nt, Human
ucuuucucguuuguggacaaagcagcacguau

SEQ ID NO: 243816 - RNA, 32 nt, Human
ucuuucucucacucuucugucauuugcugcua

SEQ ID NO: 243817 - RNA, 32 nt, Human
ucuuucucucauuuuccuugcuuuuacauaga

SEQ ID NO: 243818 - RNA, 32 nt, Human
ucuuucucucccagaagccucacucugcacag

SEQ ID NO: 243819 - RNA, 32 nt, Human
ucuuucucuccccucacuuccaccccuucacc

SEQ ID NO: 243820 - RNA, 32 nt, Human
ucuuucucucccuuucccuccugaaucgauuc

SEQ ID NO: 243821 - RNA, 32 nt, Human
ucuuucucuccucugucucucuuccucuccuc

SEQ ID NO: 243822 - RNA, 32 nt, Human
ucuuucucuccucuuugccugucuucugucuu

SEQ ID NO: 243823 - RNA, 32 nt, Human
ucuuucucucucccucucccacaccucacaca

SEQ ID NO: 243824 - RNA, 32 nt, Human
ucuuucucucugccuuugcauuuccuuugaca

SEQ ID NO: 243825 - RNA, 32 nt, Human
ucuuucucucuuuccaucucccuugguuguuc

SEQ ID NO: 243826 - RNA, 32 nt, Human
ucuuucucucuuucuuucuuuucuuucuuucu

SEQ ID NO: 243827 - RNA, 32 nt, Human
ucuuucucugcacuccagccuaggcaacagag

SEQ ID NO: 243828 - RNA, 32 nt, Human
ucuuucucugcauacucuccagccuccuucua

SEQ ID NO: 243829 - RNA, 32 nt, Human
ucuuucucuggcccccuguccucucucucugu

SEQ ID NO: 243830 - RNA, 32 nt, Human
ucuuucucuggugucauuuccaaaggacucaa

SEQ ID NO: 243831 - RNA, 32 nt, Human
ucuuucucuuagucccacuuuaucucuucuuu

SEQ ID NO: 243832 - RNA, 32 nt, Human
ucuuucucuuccucccuucugccaucacuggc

SEQ ID NO: 243833 - RNA, 32 nt, Human
ucuuucucuuccuccuuccucuuccuuacuuu

SEQ ID NO: 243834 - RNA, 32 nt, Human
ucuuucucuuccucucccuccuccuuuucccc

SEQ ID NO: 243835 - RNA, 32 nt, Human
ucuuucucuuccugccuuuccucuaucagaga

SEQ ID NO: 243836 - RNA, 32 nt, Human
ucuuucucuucucuuguaagaaguuccuuuug

SEQ ID NO: 243837 - RNA, 32 nt, Human
ucuuucucuuggucaacucaggagccuuuuag

SEQ ID NO: 243838 - RNA, 32 nt, Human
ucuuucucuuucucccccucaggccaccuccu

SEQ ID NO: 243839 - RNA, 32 nt, Human
ucuuucucuuucuuucucuuuucccuuccuuc

SEQ ID NO: 243840 - RNA, 32 nt, Human
ucuuucucuuuucccuuccuuccuuccuuccu

SEQ ID NO: 243841 - RNA, 32 nt, Human
ucuuucugaacuucuaacaguuccaaaguuau

SEQ ID NO: 243842 - RNA, 32 nt, Human
ucuuucugagccugcuggacaugaagagcaga

SEQ ID NO: 243843 - RNA, 32 nt, Human
ucuuucugcaccuuagaucaucucuacaacua

SEQ ID NO: 243844 - RNA, 32 nt, Human
ucuuucugccacccuccuuuccuuccucccuc

SEQ ID NO: 243845 - RNA, 32 nt, Human
ucuuucugccuuuuguugcugccugucaugcu

SEQ ID NO: 243846 - RNA, 32 nt, Human
ucuuucugcuccaucguccccaaggaauaagu

SEQ ID NO: 243847 - RNA, 32 nt, Human
ucuuucuggaaaagggaaagaaaauagucuuc

SEQ ID NO: 243848 - RNA, 32 nt, Human
ucuuucuggacucuuuggcagaugguuuuggu

SEQ ID NO: 243849 - RNA, 32 nt, Human
ucuuucuggagaccccaaagcuggagggagau

SEQ ID NO: 243850 - RNA, 32 nt, Human
ucuuucuggaguuuaaguacagugaugguugg

SEQ ID NO: 243851 - RNA, 32 nt, Human
ucuuucuggaguuuuuccagcauacaauacau

SEQ ID NO: 243852 - RNA, 32 nt, Human
ucuuucuggcccacagaugagggcuccugauu

SEQ ID NO: 243853 - RNA, 22 nt, Human
ucuuucuggcucccaacugaag

SEQ ID NO: 243854 - RNA, 32 nt, Human
ucuuucugggccuggagaccacggucacuugu

SEQ ID NO: 243855 - RNA, 32 nt, Human
ucuuucugggccuuacugugcugguauaauua

SEQ ID NO: 243856 - RNA, 32 nt, Human
ucuuucugggucucugccugggucauguggcc

SEQ ID NO: 243857 - RNA, 20 nt, Human
ucuuucuguccccucuuccu

SEQ ID NO: 243858 - RNA, 32 nt, Human
ucuuucuguccuuuuaaguguaccuggaauuc

SEQ ID NO: 243859 - RNA, 32 nt, Human
ucuuucuguuauugcacuaugaaaaucaguua

SEQ ID NO: 243860 - RNA, 32 nt, Human
ucuuucuuaaaauguuuagagcaaguauagcu

SEQ ID NO: 243861 - RNA, 32 nt, Human
ucuuucuuaaagccacuuuagugagaagcagg

SEQ ID NO: 243862 - RNA, 32 nt, Human
ucuuucuuaccuucucuccucuugucauucag

SEQ ID NO: 243863 - RNA, 32 nt, Human
ucuuucuuagauucucuaccucccucuuccau

SEQ ID NO: 243864 - RNA, 32 nt, Human
ucuuucuucauagcuucucugcuuggcaaaga

SEQ ID NO: 243865 - RNA, 32 nt, Human
ucuuucuuccagcugcucacugggucaaaggg

SEQ ID NO: 243866 - RNA, 32 nt, Human
ucuuucuucccagccagucaguggcuuugagc

SEQ ID NO: 243867 - RNA, 32 nt, Human
ucuuucuuccucccucucccugccuuuccauu

SEQ ID NO: 243868 - RNA, 32 nt, Human
ucuuucuuccuuccuuucuuucuuccuuccuu

SEQ ID NO: 243869 - RNA, 32 nt, Human
ucuuucuucuucuucuacaacuggaaccagcc

SEQ ID NO: 243870 - RNA, 32 nt, Human
ucuuucuucuuucuuuccuuuuuccuuucuuc

SEQ ID NO: 243871 - RNA, 32 nt, Human
ucuuucuugcuuucuuucuuucuugcuuucuu

SEQ ID NO: 243872 - RNA, 32 nt, Human
ucuuucuugucucucaggaucaagcugaagug

SEQ ID NO: 243873 - RNA, 32 nt, Human
ucuuucuuuaaugucagaaauagaagaaaucu

SEQ ID NO: 243874 - RNA, 32 nt, Human
ucuuucuuuccuuucuuuccucccuuuuuccc

SEQ ID NO: 243875 - RNA, 32 nt, Human
ucuuucuuucugacggauucucgcucuguugg

SEQ ID NO: 243876 - RNA, 32 nt, Human
ucuuucuuucuugcuuucuuucuucucucucu

SEQ ID NO: 243877 - RNA, 32 nt, Human
ucuuucuuucuugcuuucuuucuugcuuucuu

SEQ ID NO: 243878 - RNA, 32 nt, Human
ucuuucuuucuuucuugcuuucuuucuugcuu

SEQ ID NO: 243879 - RNA, 32 nt, Human
ucuuucuuucuuucuuuccuucuuucuuucuu

SEQ ID NO: 243880 - RNA, 32 nt, Human
ucuuucuuucuuucuuucugacggauucucgc

SEQ ID NO: 243881 - RNA, 32 nt, Human
ucuuucuuucuuucuuucuugcuuucuuucuu

SEQ ID NO: 243882 - RNA, 32 nt, Human
ucuuucuuucuuucuuucuuuccuucuuucuu

SEQ ID NO: 243883 - RNA, 32 nt, Human
ucuuucuuucuuucuuucuuucugacggauuc

SEQ ID NO: 243884 - RNA, 32 nt, Human
ucuuucuuucuuucuuucuuucuugcuuucuu

SEQ ID NO: 243885 - RNA, 32 nt, Human
ucuuucuuucuuucuuucuuucuuucugacgg

SEQ ID NO: 243886 - RNA, 32 nt, Human
ucuuucuuucuuucuuucuuucuuucuugcuu

SEQ ID NO: 243887 - RNA, 32 nt, Human
ucuuucuuucuuucuuucuuucuuucuuucuu

SEQ ID NO: 243888 - RNA, 32 nt, Human
ucuuucuuucuuucuuucuuuuuaagcucagu

SEQ ID NO: 243889 - RNA, 32 nt, Human
ucuuucuuucuuucuuuuuaagcucaguggca

SEQ ID NO: 243890 - RNA, 32 nt, Human
ucuuucuuugcaccaaagacaucagucuccaa

SEQ ID NO: 243891 - RNA, 32 nt, Human
ucuuucuuuuaaggcuguuccugggccuggcg

SEQ ID NO: 243892 - RNA, 32 nt, Human
ucuuucuuuucagaaucuagguggugaauuuu

SEQ ID NO: 243893 - RNA, 32 nt, Human
ucuuucuuuucauugacaacaccuacacccac

SEQ ID NO: 243894 - RNA, 32 nt, Human
ucuuucuuuuugagguggugggauuauuccac

SEQ ID NO: 243895 - RNA, 32 nt, Human
ucuuugaaaauacuucauuuucuuagcauuuc

SEQ ID NO: 243896 - RNA, 32 nt, Human
ucuuugaagccagcauccuagcaucuucaaau

SEQ ID NO: 243897 - RNA, 32 nt, Human
ucuuugaaggcagaaucaguugaguugugagg

SEQ ID NO: 243898 - RNA, 32 nt, Human
ucuuugaaugugcuauuuuuauaacugaacuu

SEQ ID NO: 243899 - RNA, 32 nt, Human
ucuuugacaggcaauucugguuggcuguggcu

SEQ ID NO: 243900 - RNA, 32 nt, Human
ucuuugaccagauggcaguaacauuugaagau

SEQ ID NO: 243901 - RNA, 32 nt, Human
ucuuugacuccuggcauuugccuuaaggaccu

SEQ ID NO: 243902 - RNA, 32 nt, Human
ucuuugacugacugaccucauuccacugggau

SEQ ID NO: 243903 - RNA, 32 nt, Human
ucuuugacuguugccaccacacaguucccuag

SEQ ID NO: 243904 - RNA, 32 nt, Human
ucuuugacuuccaauggcaaaccugggugauc

SEQ ID NO: 243905 - RNA, 32 nt, Human
ucuuugagacuauccugaacuugaaaucccac

SEQ ID NO: 243906 - RNA, 32 nt, Human
ucuuugagacuauuuaaaaacugguacaacag

SEQ ID NO: 243907 - RNA, 32 nt, Human
ucuuugagagcagcaguuugaggucugacucc

SEQ ID NO: 243908 - RNA, 32 nt, Human
ucuuugaggagccugggcuuggaucuauccug

SEQ ID NO: 243909 - RNA, 32 nt, Human
ucuuugaggccaagaagcugguguaugcccuc

SEQ ID NO: 243910 - RNA, 32 nt, Human
ucuuugaggccuuacagcucuucacaguacaa

SEQ ID NO: 243911 - RNA, 32 nt, Human
ucuuugauagagaaagagucucaaauggacaa

SEQ ID NO: 243912 - RNA, 32 nt, Human
ucuuugauccuucugagcuccaccucuggugg

SEQ ID NO: 243913 - RNA, 32 nt, Human
ucuuugaucucaaauuuuuauauguaaaacaa

SEQ ID NO: 243914 - RNA, 32 nt, Human
ucuuugaucugguuuuauuccuguaauucagc

SEQ ID NO: 243915 - RNA, 32 nt, Human
ucuuugcaauaccugucccugccggucuccaa

SEQ ID NO: 243916 - RNA, 32 nt, Human
ucuuugcaauaggcagcuugacugcagcguug

SEQ ID NO: 243917 - RNA, 32 nt, Human
ucuuugcacaacaacaacaacaacaaauucac

SEQ ID NO: 243918 - RNA, 32 nt, Human
ucuuugcacaauugaaggccugugcaucugau

SEQ ID NO: 243919 - RNA, 32 nt, Human
ucuuugcacauccugcucuuucugccugaaaa

SEQ ID NO: 243920 - RNA, 32 nt, Human
ucuuugcacugaggcacccgccgggcagggac

SEQ ID NO: 243921 - RNA, 32 nt, Human
ucuuugcacugaggccuugcugcuguggauac

SEQ ID NO: 243922 - RNA, 32 nt, Human
ucuuugcagaacugcugguggacugauguggu

SEQ ID NO: 243923 - RNA, 32 nt, Human
ucuuugcagaccugcauuuuucagugaacaau

SEQ ID NO: 243924 - RNA, 32 nt, Human
ucuuugcagagaaccucagaucaggugcaccu

SEQ ID NO: 243925 - RNA, 32 nt, Human
ucuuugcagagacaguauuuugcugaauacuu

SEQ ID NO: 243926 - RNA, 32 nt, Human
ucuuugcagcuggagaugaacuuuuaaaaauc

SEQ ID NO: 243927 - RNA, 32 nt, Human
ucuuugcaguaggggagagagcagagaaguac

SEQ ID NO: 243928 - RNA, 32 nt, Human
ucuuugcaugauaccaugauagacacuccauu

SEQ ID NO: 243929 - RNA, 32 nt, Human
ucuuugcauucacuugauuugucagaauauua

SEQ ID NO: 243930 - RNA, 32 nt, Human
ucuuugccaccgaggcauaguguagaacaguc

SEQ ID NO: 243931 - RNA, 32 nt, Human
ucuuugccauuuuagaagguuccagugagcug

SEQ ID NO: 243932 - RNA, 32 nt, Human
ucuuugcccugaccuugaucaacaggggugaa

SEQ ID NO: 243933 - RNA, 32 nt, Human
ucuuugccuccucccuucccuuccacucuuua

SEQ ID NO: 243934 - RNA, 32 nt, Human
ucuuugccucugcuuugucaugccauuaagcc

SEQ ID NO: 243935 - RNA, 32 nt, Human
ucuuugccucugcuuugucaugccauuaagcu

SEQ ID NO: 243936 - RNA, 32 nt, Human
ucuuugccugguccucaguuugcccaucaaua

SEQ ID NO: 243937 - RNA, 32 nt, Human
ucuuugccuuccuauuuccuuucaaagaaauc

SEQ ID NO: 243938 - RNA, 32 nt, Human
ucuuugccuuucuggguagggagcugucuaau

SEQ ID NO: 243939 - RNA, 32 nt, Human
ucuuugcuaaagcagugaaggaagagaacaga

SEQ ID NO: 243940 - RNA, 32 nt, Human
ucuuugcuaccaggcugaagucugucaugaaa

SEQ ID NO: 243941 - RNA, 32 nt, Human
ucuuugcuaccugaacgcaccacccucuggcc

SEQ ID NO: 243942 - RNA, 32 nt, Human
ucuuugcucacacccucacagcugcucucugg

SEQ ID NO: 243943 - RNA, 32 nt, Human
ucuuugcucacugcaacauccaccucaugggc

SEQ ID NO: 243944 - RNA, 32 nt, Human
ucuuugcucacugcaaccucugccacccgggu

SEQ ID NO: 243945 - RNA, 32 nt, Human
ucuuugcucacugccccaugucccucggucag

SEQ ID NO: 243946 - RNA, 32 nt, Human
ucuuugcucagauugagaacugcagcauuuau

SEQ ID NO: 243947 - RNA, 32 nt, Human
ucuuugcucccccgcccugcccugcccucacc

SEQ ID NO: 243948 - RNA, 32 nt, Human
ucuuugcugcuuuguuuuccuccugauucucu

SEQ ID NO: 243949 - RNA, 24 nt, Human
ucuuugcugugccaaagcagguca

SEQ ID NO: 243950 - RNA, 22 nt, Human
ucuuugcuguuggaucagacca

SEQ ID NO: 243951 - RNA, 32 nt, Human
ucuuugcuguuucacaggcuucacugaugaua

SEQ ID NO: 243952 - RNA, 32 nt, Human
ucuuugcuguuucucugggcuccugagcauac

SEQ ID NO: 243953 - RNA, 32 nt, Human
ucuuugcuuaaguaugagauacuugauggggg

SEQ ID NO: 243954 - RNA, 32 nt, Human
ucuuugcuuacagugcaucacaacugaagaau

SEQ ID NO: 243955 - RNA, 32 nt, Human
ucuuugcuucugccgguccucagucuggcgug

SEQ ID NO: 243956 - RNA, 32 nt, Human
ucuuugcuuguuuauuucugaaaaagaacugu

SEQ ID NO: 243957 - RNA, 32 nt, Human
ucuuugcuuuaaguguaacuggcaguuuucca

SEQ ID NO: 243958 - RNA, 32 nt, Human
ucuuugcuuucuuaguaguauuucaagguguu

SEQ ID NO: 243959 - RNA, 32 nt, Human
ucuuugcuuuucucccaaacccgccuccccgc

SEQ ID NO: 243960 - RNA, 32 nt, Human
ucuuuggaaaguacacucugcuguuugacacc

SEQ ID NO: 243961 - RNA, 32 nt, Human
ucuuuggacacacaagccuagcccaugggcug

SEQ ID NO: 243962 - RNA, 32 nt, Human
ucuuuggacguggcagaaccuuacauauucug

SEQ ID NO: 243963 - RNA, 23 nt, Human
ucuuuggacuucugaagagacca

SEQ ID NO: 243964 - RNA, 32 nt, Human
ucuuuggagaagcucaucagaaacucaaaaga

SEQ ID NO: 243965 - RNA, 32 nt, Human
ucuuuggagaaggagaaagaaaggaaagaacu

SEQ ID NO: 243966 - RNA, 32 nt, Human
ucuuuggagacagggucucacugugucaugca

SEQ ID NO: 243967 - RNA, 22 nt, Human
ucuuuggagagcucaguacagg

SEQ ID NO: 243968 - RNA, 32 nt, Human
ucuuuggagaggaggauggaagggaggggucc

SEQ ID NO: 243969 - RNA, 32 nt, Human
ucuuuggagagggggaggagugauaaacuagc

SEQ ID NO: 243970 - RNA, 32 nt, Human
ucuuuggaggcuggggauaguagcaucaacau

SEQ ID NO: 243971 - RNA, 25 nt, Human
ucuuuggaugcggcugcggcaugga

SEQ ID NO: 243972 - RNA, 24 nt, Human
ucuuuggaugugguucaccaacca

SEQ ID NO: 243973 - RNA, 32 nt, Human
ucuuuggcaaagucauuuaccugggcuggaau

SEQ ID NO: 243974 - RNA, 23 nt, Human
ucuuuggcaagauugcagcaaga

SEQ ID NO: 243975 - RNA, 32 nt, Human
ucuuuggccauagcugaagcuguggggccagu

SEQ ID NO: 243976 - RNA, 32 nt, Human
ucuuuggcccagucucugacccuucccaagua

SEQ ID NO: 243977 - RNA, 32 nt, Human
ucuuuggccccuugcuggagucaugugccucu

SEQ ID NO: 243978 - RNA, 32 nt, Human
ucuuuggcccucaucgagaagcuggaacuugu

SEQ ID NO: 243979 - RNA, 32 nt, Human
ucuuuggccucaaccccuccccugcacugaga

SEQ ID NO: 243980 - RNA, 32 nt, Human
ucuuuggccuccaggauaaguggaaccgucug

SEQ ID NO: 243981 - RNA, 32 nt, Human
ucuuuggccugacaacagucuucugcccaugu

SEQ ID NO: 243982 - RNA, 32 nt, Human
ucuuuggcucaagccauccauccuccuaccuc

SEQ ID NO: 243983 - RNA, 32 nt, Human
ucuuuggcucaagugaucuuccugccucagcc

SEQ ID NO: 243984 - RNA, 32 nt, Human
ucuuuggcucaugugauccucccaucucagcc

SEQ ID NO: 243985 - RNA, 25 nt, Human
ucuuuggcugcugccucagcacaga

SEQ ID NO: 243986 - RNA, 24 nt, Human
ucuuuggcuucgccgcgcggaccu

SEQ ID NO: 243987 - RNA, 32 nt, Human
ucuuuggcuuugcuaccaguuccauaugauga

SEQ ID NO: 243988 - RNA, 32 nt, Human
ucuuugggcagccauugagauuauacggaacc

SEQ ID NO: 243989 - RNA, 24 nt, Human
ucuuugggcaugccagcccaugga

SEQ ID NO: 243990 - RNA, 23 nt, Human
ucuuugggcccagcggcugcggg

SEQ ID NO: 243991 - RNA, 32 nt, Human
ucuuugggcuguggcuugcagaacaaacuaca

SEQ ID NO: 243992 - RNA, 32 nt, Human
ucuuuggggaaugggcauuuugguagguaaag

SEQ ID NO: 243993 - RNA, 32 nt, Human
ucuuuggggaauggggugggggugggagagga

SEQ ID NO: 243994 - RNA, 32 nt, Human
ucuuuggggaaugggugggaaaggauuguuug

SEQ ID NO: 243995 - RNA, 22 nt, Human
ucuuuggggacuugagcauggg

SEQ ID NO: 243996 - RNA, 32 nt, Human
ucuuuggggaggcaacuaggaugguguggccg

SEQ ID NO: 243997 - RNA, 32 nt, Human
ucuuuggggaugacauuuucaccgugacauuu

SEQ ID NO: 243998 - RNA, 18 nt, Human
ucuuuggggauguuuuca

SEQ ID NO: 243999 - RNA, 32 nt, Human
ucuuugggggauuccaccacacccaaugcucu

SEQ ID NO: 244000 - RNA, 32 nt, Human
ucuuuggggucacaaugaccacugcaggcagg

SEQ ID NO: 244001 - RNA, 32 nt, Human
ucuuugggguugguuccuagaggcagagguug

SEQ ID NO: 244002 - RNA, 32 nt, Human
ucuuugguaaagucacauguuaaggaugacug

SEQ ID NO: 244003 - RNA, 32 nt, Human
ucuuuggucccgcaggaggguggguggagcag

SEQ ID NO: 244004 - RNA, 32 nt, Human
ucuuuggugaguggccuuugcccacauccccu

SEQ ID NO: 244005 - RNA, 32 nt, Human
ucuuuggugcugggaccaaauucuucacuucu

SEQ ID NO: 244006 - RNA, 32 nt, Human
ucuuugguuuccuguaucuuuuuaaucaaguc

SEQ ID NO: 244007 - RNA, 31 nt, Human
ucuuugguuuuguaaaggugggugaagguug

SEQ ID NO: 244008 - RNA, 32 nt, Human
ucuuugguuuuuguaaacggagaggacaguuc

SEQ ID NO: 244009 - RNA, 32 nt, Human
ucuuuguaaccugugugaagcagcagccagcc

SEQ ID NO: 244010 - RNA, 32 nt, Human
ucuuuguaaggacuugugccucuugggagacg

SEQ ID NO: 244011 - RNA, 32 nt, Human
ucuuuguacagaagaguacuguauuuuugaau

SEQ ID NO: 244012 - RNA, 32 nt, Human
ucuuuguaccucccuccucucccucacucaug

SEQ ID NO: 244013 - RNA, 32 nt, Human
ucuuuguauuuuuaguagagaugggguuugac

SEQ ID NO: 244014 - RNA, 32 nt, Human
ucuuuguauuuuuaguggagaugggguuucac

SEQ ID NO: 244015 - RNA, 32 nt, Human
ucuuugucaacauuaguaacugauacauagaa

SEQ ID NO: 244016 - RNA, 32 nt, Human
ucuuugucaccaccacccagugugugggucug

SEQ ID NO: 244017 - RNA, 32 nt, Human
ucuuuguccagauuuccaaagcuggauaaguu

SEQ ID NO: 244018 - RNA, 19 nt, Human
ucuuuguccaggucaaaaa

SEQ ID NO: 244019 - RNA, 32 nt, Human
ucuuugucccaccagggguugcaguggcuugg

SEQ ID NO: 244020 - RNA, 32 nt, Human
ucuuugucccuaaugugugacaccucaucaug

SEQ ID NO: 244021 - RNA, 32 nt, Human
ucuuuguccuggcggugagcacccagggcuaa

SEQ ID NO: 244022 - RNA, 32 nt, Human
ucuuugucucuuccuuucaccucauucuggua

SEQ ID NO: 244023 - RNA, 31 nt, Human
ucuuugucucuuuucuggguugcagagggau

SEQ ID NO: 244024 - RNA, 32 nt, Human
ucuuugucuuucuuucuuuuccuuccucccuu

SEQ ID NO: 244025 - RNA, 32 nt, Human
ucuuugugaacaaaugagacaaggcugcaaau

SEQ ID NO: 244026 - RNA, 32 nt, Human
ucuuugugaccagccagaccucaggucuucac

SEQ ID NO: 244027 - RNA, 32 nt, Human
ucuuugugagaagguacagagauggaaaccuu

SEQ ID NO: 244028 - RNA, 32 nt, Human
ucuuugugcaagugccuuccugagcagaagaa

SEQ ID NO: 244029 - RNA, 23 nt, Human
ucuuugugccuccuuccaaacca

SEQ ID NO: 244030 - RNA, 32 nt, Human
ucuuugugccuguacuuaugcagcuuucuaca

SEQ ID NO: 244031 - RNA, 32 nt, Human
ucuuuguggacucuacccuucccuucaaggag

SEQ ID NO: 244032 - RNA, 32 nt, Human
ucuuuguggagccucucagugugggcagcccu

SEQ ID NO: 244033 - RNA, 32 nt, Human
ucuuuguggauaauacauucagguggugcugg

SEQ ID NO: 244034 - RNA, 32 nt, Human
ucuuuguguauacuucugugucuguuauguuc

SEQ ID NO: 244035 - RNA, 32 nt, Human
ucuuugugucaggcugacaucaaauggcaggg

SEQ ID NO: 244036 - RNA, 32 nt, Human
ucuuugugucuccuggcacaggcccuggcccc

SEQ ID NO: 244037 - RNA, 32 nt, Human
ucuuuguguuccccauggaugaagacucugcu

SEQ ID NO: 244038 - RNA, 32 nt, Human
ucuuuguuacccaggcuggaguacaguggugu

SEQ ID NO: 244039 - RNA, 32 nt, Human
ucuuuguucagcaucccaggagacaggccucu

SEQ ID NO: 244040 - RNA, 32 nt, Human
ucuuuguucccauccagccgaugaaggagcaa

SEQ ID NO: 244041 - RNA, 32 nt, Human
ucuuuguucuuguuugcugcuauuuucugucc

SEQ ID NO: 244042 - RNA, 32 nt, Human
ucuuuguugaggucuuugcagauggcuguuuc

SEQ ID NO: 244043 - RNA, 32 nt, Human
ucuuuguugauacugcuuauuuagagaagggu

SEQ ID NO: 244044 - RNA, 32 nt, Human
ucuuuguugcccaggcuggagugcaauggcgc

SEQ ID NO: 244045 - RNA, 32 nt, Human
ucuuuguugcccaggcuggagugcaguggcac

SEQ ID NO: 244046 - RNA, 32 nt, Human
ucuuuguugcucaggcuggaguacaguggcau

SEQ ID NO: 244047 - RNA, 32 nt, Human
ucuuuguugcucugggagaggggacuccugga

SEQ ID NO: 244048 - RNA, 32 nt, Human
ucuuuguuggaauaugcaaaggucauucuuua

SEQ ID NO: 244049 - RNA, 32 nt, Human
ucuuuguugguggaaguaucuacugaaguauu

SEQ ID NO: 244050 - RNA, 32 nt, Human
ucuuuguuugagauggagucuugcucugucac

SEQ ID NO: 244051 - RNA, 32 nt, Human
ucuuuguuugcuccuguguuugcccagcuuua

SEQ ID NO: 244052 - RNA, 21 nt, Human
ucuuuguuuuuccccaaacca

SEQ ID NO: 244053 - RNA, 32 nt, Human
ucuuuuaaaacacaaaccaccaccaaaaauuu

SEQ ID NO: 244054 - RNA, 23 nt, Human
ucuuuuaaaaguuucucacuuua

SEQ ID NO: 244055 - RNA, 32 nt, Human
ucuuuuaaaaucaagaagaaccauggugucca

SEQ ID NO: 244056 - RNA, 32 nt, Human
ucuuuuaaaauuggaaugcaacuguagguuuu

SEQ ID NO: 244057 - RNA, 32 nt, Human
ucuuuuaaaguaaaugcaaguaccaaagcuca

SEQ ID NO: 244058 - RNA, 32 nt, Human
ucuuuuaaauguugaauauucccuuguaugga

SEQ ID NO: 244059 - RNA, 32 nt, Human
ucuuuuaacauacucuuucuguucuauuguau

SEQ ID NO: 244060 - RNA, 32 nt, Human
ucuuuuaacauaggugguucugugauaacauc

SEQ ID NO: 244061 - RNA, 32 nt, Human
ucuuuuaauccuucauuguuucauguaugaag

SEQ ID NO: 244062 - RNA, 32 nt, Human
ucuuuuaaugucagauaugauacacugcacau

SEQ ID NO: 244063 - RNA, 32 nt, Human
ucuuuuaaugugcaaugauggcuggaucauuu

SEQ ID NO: 244064 - RNA, 32 nt, Human
ucuuuuaauuagcaucucagaaaugcaugggu

SEQ ID NO: 244065 - RNA, 32 nt, Human
ucuuuuacauuuuuccuauucacugcacuuuu

SEQ ID NO: 244066 - RNA, 32 nt, Human
ucuuuuaccaaaagugucuguacagcagccau

SEQ ID NO: 244067 - RNA, 32 nt, Human
ucuuuuacccuggccccucucccuugggcucu

SEQ ID NO: 244068 - RNA, 21 nt, Human
ucuuuuaccuuucuccucccu

SEQ ID NO: 244069 - RNA, 32 nt, Human
ucuuuuacuaguaggcaagccugggcauuucu

SEQ ID NO: 244070 - RNA, 32 nt, Human
ucuuuuacucacugcccacuucucaucucugu

SEQ ID NO: 244071 - RNA, 32 nt, Human
ucuuuuacugacuguuuauaacacucaauuga

SEQ ID NO: 244072 - RNA, 32 nt, Human
ucuuuuagacuucucauuuaacucaauucccu

SEQ ID NO: 244073 - RNA, 32 nt, Human
ucuuuuagagccuaggacucaggcuggaggca

SEQ ID NO: 244074 - RNA, 32 nt, Human
ucuuuuagagugguucugauagguacagauuc

SEQ ID NO: 244075 - RNA, 32 nt, Human
ucuuuuagugcauuuccuccugccuuugcuug

SEQ ID NO: 244076 - RNA, 31 nt, Human
ucuuuuauaaaacuauuacauuuaaaauaug

SEQ ID NO: 244077 - RNA, 23 nt, Human
ucuuuuaucacgauauuauuagu

SEQ ID NO: 244078 - RNA, 32 nt, Human
ucuuuuaucucaaauuuuuauauguaaaacaa

SEQ ID NO: 244079 - RNA, 32 nt, Human
ucuuuuaucugcaaugugugaagggacucuuu

SEQ ID NO: 244080 - RNA, 32 nt, Human
ucuuuuauuaacacccugcucucauguccaua

SEQ ID NO: 244081 - RNA, 32 nt, Human
ucuuuuauuguuucuuuucuuuuccgcgacag

SEQ ID NO: 244082 - RNA, 32 nt, Human
ucuuuuauuuucuugcauuugugaauuaguuc

SEQ ID NO: 244083 - RNA, 31 nt, Human
ucuuuucaaagcuagaaauaagcacugucua

SEQ ID NO: 244084 - RNA, 32 nt, Human
ucuuuucaaguuggucaggcuuuggacaggug

SEQ ID NO: 244085 - RNA, 32 nt, Human
ucuuuucacagcaagaacaguccauguuguau

SEQ ID NO: 244086 - RNA, 32 nt, Human
ucuuuucacaguuaaagguuuaagcagagggc

SEQ ID NO: 244087 - RNA, 21 nt, Human
ucuuuucaccccccaccuccu

SEQ ID NO: 244088 - RNA, 32 nt, Human
ucuuuucaccucuuuaaccacuccucaggaac

SEQ ID NO: 244089 - RNA, 32 nt, Human
ucuuuucagaagcaagccagaccuagcaggcu

SEQ ID NO: 244090 - RNA, 32 nt, Human
ucuuuucagaggggaaaaaggagcagcucuua

SEQ ID NO: 244091 - RNA, 32 nt, Human
ucuuuucagcaacccgguccaguacugggaga

SEQ ID NO: 244092 - RNA, 32 nt, Human
ucuuuucagccuguuacuguccugugccauuu

SEQ ID NO: 244093 - RNA, 32 nt, Human
ucuuuucaggagaaaucacuguugcacagaga

SEQ ID NO: 244094 - RNA, 20 nt, Human
ucuuuucaguaucugcuuua

SEQ ID NO: 244095 - RNA, 32 nt, Human
ucuuuucaguauuuacuguguaauacuuaagu

SEQ ID NO: 244096 - RNA, 32 nt, Human
ucuuuucaguucagagaacugcagaauaagua

SEQ ID NO: 244097 - RNA, 32 nt, Human
ucuuuucaucaaaaauuccacacccucaggua

SEQ ID NO: 244098 - RNA, 32 nt, Human
ucuuuucaugccagcgccaacaggaggcuguc

SEQ ID NO: 244099 - RNA, 32 nt, Human
ucuuuucaugccagcgucaacaggaggcuguc

SEQ ID NO: 244100 - RNA, 32 nt, Human
ucuuuuccaagaagcuuuugaauaagcauauu

SEQ ID NO: 244101 - RNA, 32 nt, Human
ucuuuuccacaguuggcugagugccuucguga

SEQ ID NO: 244102 - RNA, 32 nt, Human
ucuuuuccagaaggugaaagagaaagggccug

SEQ ID NO: 244103 - RNA, 32 nt, Human
ucuuuuccagcuuuuaguuacucucaucaaau

SEQ ID NO: 244104 - RNA, 32 nt, Human
ucuuuuccaguucuccuuccucuaggagccau

SEQ ID NO: 244105 - RNA, 32 nt, Human
ucuuuuccauugucuuuggcucucacaggagc

SEQ ID NO: 244106 - RNA, 32 nt, Human
ucuuuuccauuucucccuccaucaccaccugc

SEQ ID NO: 244107 - RNA, 32 nt, Human
ucuuuucccagagaccuucugaucuccaaaaa

SEQ ID NO: 244108 - RNA, 32 nt, Human
ucuuuucccuccagagccgggguuuguaaacc

SEQ ID NO: 244109 - RNA, 32 nt, Human
ucuuuucccugcuagagaaagcagagagcggg

SEQ ID NO: 244110 - RNA, 20 nt, Human
ucuuuuccgggaacucaccc

SEQ ID NO: 244111 - RNA, 32 nt, Human
ucuuuuccgugcuaccugcagagggguccaua

SEQ ID NO: 244112 - RNA, 24 nt, Human
ucuuuuccucaggugguauacuua

SEQ ID NO: 244113 - RNA, 32 nt, Human
ucuuuuccucuacagcuccaucuuguuucacc

SEQ ID NO: 244114 - RNA, 32 nt, Human
ucuuuuccugaacucacagucuugggguguuu

SEQ ID NO: 244115 - RNA, 22 nt, Human
ucuuuuccugaccaaucuuguu

SEQ ID NO: 244116 - RNA, 32 nt, Human
ucuuuuccugcucuuuggcccuggaucgagaa

SEQ ID NO: 244117 - RNA, 32 nt, Human
ucuuuuccuuugaugagccucuccccaggugu

SEQ ID NO: 244118 - RNA, 32 nt, Human
ucuuuuccuuuuccucuuugacugagcaccga

SEQ ID NO: 244119 - RNA, 32 nt, Human
ucuuuucgccccucacgcuuuuguaauaaugg

SEQ ID NO: 244120 - RNA, 28 nt, Human
ucuuuucuaagugcugugggaucuggga

SEQ ID NO: 244121 - RNA, 32 nt, Human
ucuuuucuaauugugaaggacauggcagauug

SEQ ID NO: 244122 - RNA, 32 nt, Human
ucuuuucuacuaauaaagauggaucaagucuc

SEQ ID NO: 244123 - RNA, 32 nt, Human
ucuuuucucaucuccuggacagucugugguca

SEQ ID NO: 244124 - RNA, 32 nt, Human
ucuuuucucgggacgggagaggccguguagcg

SEQ ID NO: 244125 - RNA, 32 nt, Human
ucuuuucucuaaucagagauacagagguugag

SEQ ID NO: 244126 - RNA, 32 nt, Human
ucuuuucucuagacggaaagcugcaaaggaaa

SEQ ID NO: 244127 - RNA, 32 nt, Human
ucuuuucucucaucaucauguucuuuuacccc

SEQ ID NO: 244128 - RNA, 32 nt, Human
ucuuuucucucccuuccauuucuaagucaaua

SEQ ID NO: 244129 - RNA, 32 nt, Human
ucuuuucugacuggcccugaaguugucagugg

SEQ ID NO: 244130 - RNA, 32 nt, Human
ucuuuucugcccuuucuuugcagcuacuggug

SEQ ID NO: 244131 - RNA, 32 nt, Human
ucuuuucugccucugaaucccuaccuuuaaag

SEQ ID NO: 244132 - RNA, 32 nt, Human
ucuuuucugccucugucaggcgaacugugaug

SEQ ID NO: 244133 - RNA, 32 nt, Human
ucuuuucugggagcggggaggugguuuggagu

SEQ ID NO: 244134 - RNA, 32 nt, Human
ucuuuucuguuuuucucagagcaaguuaucua

SEQ ID NO: 244135 - RNA, 32 nt, Human
ucuuuucuuacugcaaccuucgccucccgagu

SEQ ID NO: 244136 - RNA, 32 nt, Human
ucuuuucuucuuuccggcugcucucuggcccu

SEQ ID NO: 244137 - RNA, 32 nt, Human
ucuuuucuucuuuuuccuauauguccuggaug

SEQ ID NO: 244138 - RNA, 32 nt, Human
ucuuuucuugccucugugccccuucucucauc

SEQ ID NO: 244139 - RNA, 32 nt, Human
ucuuuucuuucuuucuccuuccuuccuuccuc

SEQ ID NO: 244140 - RNA, 32 nt, Human
ucuuuugaaagccauaugauaaaaugauuuua

SEQ ID NO: 244141 - RNA, 32 nt, Human
ucuuuugaauaguuuuacuucucuccaucuug

SEQ ID NO: 244142 - RNA, 32 nt, Human
ucuuuugaauuuccucaucccuccaucucaau

SEQ ID NO: 244143 - RNA, 23 nt, Human
ucuuuugacaaaguagccaaaga

SEQ ID NO: 244144 - RNA, 32 nt, Human
ucuuuugacaauagcgucauugccaagugcac

SEQ ID NO: 244145 - RNA, 32 nt, Human
ucuuuugacucuggcuuccgucaagagcuguc

SEQ ID NO: 244146 - RNA, 32 nt, Human
ucuuuugagauggagucuugcucugucaccca

SEQ ID NO: 244147 - RNA, 32 nt, Human
ucuuuugagauggaguuuugcucugucaccca

SEQ ID NO: 244148 - RNA, 32 nt, Human
ucuuuugauaccuuuaaaagaaccacugucaa

SEQ ID NO: 244149 - RNA, 32 nt, Human
ucuuuugcaaaacugugugaucuuugugaaag

SEQ ID NO: 244150 - RNA, 32 nt, Human
ucuuuugcaaaagggucugcuuggagaggcca

SEQ ID NO: 244151 - RNA, 32 nt, Human
ucuuuugcagaacucugauaagaaaaguguuc

SEQ ID NO: 244152 - RNA, 32 nt, Human
ucuuuugcagauaucagcugguuggauuucuc

SEQ ID NO: 244153 - RNA, 32 nt, Human
ucuuuugcaguggaaaggagcagugcugcagc

SEQ ID NO: 244154 - RNA, 32 nt, Human
ucuuuugcauuaagggaucauuccaagagcag

SEQ ID NO: 244155 - RNA, 32 nt, Human
ucuuuugccacccugaauugcuggagacccuc

SEQ ID NO: 244156 - RNA, 32 nt, Human
ucuuuugccacugucugggccccaucugggau

SEQ ID NO: 244157 - RNA, 24 nt, Human
ucuuuugcccaggcuggagugcag

SEQ ID NO: 244158 - RNA, 32 nt, Human
ucuuuugcccaggcuggagugcaguggcacaa

SEQ ID NO: 244159 - RNA, 32 nt, Human
ucuuuugccugguacaaggcuugaugagaaga

SEQ ID NO: 244160 - RNA, 32 nt, Human
ucuuuugccugucauggugaccugaaagcaag

SEQ ID NO: 244161 - RNA, 32 nt, Human
ucuuuugcuuccucccccucccccgccccugc

SEQ ID NO: 244162 - RNA, 32 nt, Human
ucuuuugcuuuauuccagaaugcuguacaucu

SEQ ID NO: 244163 - RNA, 32 nt, Human
ucuuuuggaaaaucauuuuucagcucaauuac

SEQ ID NO: 244164 - RNA, 30 nt, Human
ucuuuuggaggccacagggaauagaggugg

SEQ ID NO: 244165 - RNA, 32 nt, Human
ucuuuuggauaccugcuuuucaucccacaggg

SEQ ID NO: 244166 - RNA, 31 nt, Human
ucuuuuggcagcuagauccauacuaggcaca

SEQ ID NO: 244167 - RNA, 32 nt, Human
ucuuuuggcccagcuccuaccucccagcagcc

SEQ ID NO: 244168 - RNA, 32 nt, Human
ucuuuuggcccucuucuuucugaggcccacuu

SEQ ID NO: 244169 - RNA, 32 nt, Human
ucuuuuggccggaaauggaugggcagggaucu

SEQ ID NO: 244170 - RNA, 32 nt, Human
ucuuuugggauucaucuucuggcuuugugauu

SEQ ID NO: 244171 - RNA, 32 nt, Human
ucuuuuggggccccuagaaaucaaagagaccc

SEQ ID NO: 244172 - RNA, 32 nt, Human
ucuuuuggggguugggaggaguaggacugguc

SEQ ID NO: 244173 - RNA, 32 nt, Human
ucuuuuggucucaagugauucccuucaaguug

SEQ ID NO: 244174 - RNA, 32 nt, Human
ucuuuuggucucaagugauucucuucauguug

SEQ ID NO: 244175 - RNA, 32 nt, Human
ucuuuugguggagucaggaaagacaggcugag

SEQ ID NO: 244176 - RNA, 32 nt, Human
ucuuuugguuggcagagauucaggaucaugga

SEQ ID NO: 244177 - RNA, 20 nt, Human
ucuuuugguuguuguucuua

SEQ ID NO: 244178 - RNA, 32 nt, Human
ucuuuugguuuguguuucuguuuuuccagaaa

SEQ ID NO: 244179 - RNA, 32 nt, Human
ucuuuuguauauguaucugucuuagauauuug

SEQ ID NO: 244180 - RNA, 32 nt, Human
ucuuuugugccauguggagugcuccucaguaa

SEQ ID NO: 244181 - RNA, 32 nt, Human
ucuuuuguguaaaacaucccauuuuucacauu

SEQ ID NO: 244182 - RNA, 32 nt, Human
ucuuuuguguuauguggagcaaugccaucucu

SEQ ID NO: 244183 - RNA, 32 nt, Human
ucuuuuguguuguacugaacacaauauuugug

SEQ ID NO: 244184 - RNA, 32 nt, Human
ucuuuuguuggggaggggaaugggaggggaaa

SEQ ID NO: 244185 - RNA, 32 nt, Human
ucuuuuguuuuuaaaauguacaaaccuauaag

SEQ ID NO: 244186 - RNA, 32 nt, Human
ucuuuuguuuuuaauaaguuucuuacuauaaa

SEQ ID NO: 244187 - RNA, 32 nt, Human
ucuuuuuaaaaaguaagagauuuugaaaagca

SEQ ID NO: 244188 - RNA, 32 nt, Human
ucuuuuuaaaacacuggaagacucauguuaaa

SEQ ID NO: 244189 - RNA, 32 nt, Human
ucuuuuuaaacaucagaggcucuggcuacaca

SEQ ID NO: 244190 - RNA, 32 nt, Human
ucuuuuuaaagcuucugccaaaaugauguuuc

SEQ ID NO: 244191 - RNA, 32 nt, Human
ucuuuuuaacacuaaaaauacaauucaaauuu

SEQ ID NO: 244192 - RNA, 32 nt, Human
ucuuuuuaaugggguugcuuguuuuucgcuug

SEQ ID NO: 244193 - RNA, 32 nt, Human
ucuuuuuacccaggcuggagugcaaugaugcg

SEQ ID NO: 244194 - RNA, 32 nt, Human
ucuuuuuaccccuguuuccauucuuuuagauc

SEQ ID NO: 244195 - RNA, 32 nt, Human
ucuuuuuagaauggaucucugaugccugccca

SEQ ID NO: 244196 - RNA, 32 nt, Human
ucuuuuuauaacuaaguuuaagaaauacuuuu

SEQ ID NO: 244197 - RNA, 32 nt, Human
ucuuuuuauuuuuaaugaaagguguaccacgg

SEQ ID NO: 244198 - RNA, 32 nt, Human
ucuuuuucaaguuuggguuguggccuggcaug

SEQ ID NO: 244199 - RNA, 32 nt, Human
ucuuuuucaccaugcuuugggcaguuucugua

SEQ ID NO: 244200 - RNA, 32 nt, Human
ucuuuuucaccauggaugaaacuauaacuuaa

SEQ ID NO: 244201 - RNA, 32 nt, Human
ucuuuuucagccccggagaggguccugaccug

SEQ ID NO: 244202 - RNA, 32 nt, Human
ucuuuuucaugucuucugagggcuggauauaa

SEQ ID NO: 244203 - RNA, 32 nt, Human
ucuuuuuccaauaaaagaacuugcccagcgug

SEQ ID NO: 244204 - RNA, 32 nt, Human
ucuuuuuccagccuucaguucuagugcacucu

SEQ ID NO: 244205 - RNA, 32 nt, Human
ucuuuuuccccuuugccucucuccuuacauca

SEQ ID NO: 244206 - RNA, 32 nt, Human
ucuuuuuccgagauggagucuugcucugucgc

SEQ ID NO: 244207 - RNA, 32 nt, Human
ucuuuuuccgccccucuccuucucuccucccc

SEQ ID NO: 244208 - RNA, 32 nt, Human
ucuuuuuccucuuauuauacuuuggccaaggu

SEQ ID NO: 244209 - RNA, 32 nt, Human
ucuuuuucuagggucccugaacgcccugguaa

SEQ ID NO: 244210 - RNA, 32 nt, Human
ucuuuuucuauucauucccccuucaacauauu

SEQ ID NO: 244211 - RNA, 24 nt, Human
ucuuuuucucauuuucaaugcaca

SEQ ID NO: 244212 - RNA, 32 nt, Human
ucuuuuucuccucaucggccagccccuccucc

SEQ ID NO: 244213 - RNA, 32 nt, Human
ucuuuuucuccucucugagccuuugucuauug

SEQ ID NO: 244214 - RNA, 32 nt, Human
ucuuuuucucucuaccauucucaaccuguauu

SEQ ID NO: 244215 - RNA, 32 nt, Human
ucuuuuucucugcagugcauuucacagaauaa

SEQ ID NO: 244216 - RNA, 32 nt, Human
ucuuuuucucugccucccucugccucacucuc

SEQ ID NO: 244217 - RNA, 32 nt, Human
ucuuuuucucuuuucuccuuuuucuucuuuuu

SEQ ID NO: 244218 - RNA, 32 nt, Human
ucuuuuucuguugaggcuucccccucucugag

SEQ ID NO: 244219 - RNA, 32 nt, Human
ucuuuuucuucugugcuugccucccagugaac

SEQ ID NO: 244220 - RNA, 32 nt, Human
ucuuuuucuucuuuugagauggagucuugcuc

SEQ ID NO: 244221 - RNA, 32 nt, Human
ucuuuuugagagcacagcuucucagaugugcu

SEQ ID NO: 244222 - RNA, 32 nt, Human
ucuuuuugcccaggccggagugcaauggcacg

SEQ ID NO: 244223 - RNA, 32 nt, Human
ucuuuuugcccaggcuggagugcaguggcgcc

SEQ ID NO: 244224 - RNA, 32 nt, Human
ucuuuuugccuaggcuggagugcagugguaca

SEQ ID NO: 244225 - RNA, 32 nt, Human
ucuuuuugccugcuggaggacacggaccauug

SEQ ID NO: 244226 - RNA, 32 nt, Human
ucuuuuuggacucagccugccugcacccaggu

SEQ ID NO: 244227 - RNA, 32 nt, Human
ucuuuuuggcccucccucccucccucuucugc

SEQ ID NO: 244228 - RNA, 32 nt, Human
ucuuuuuguccaccucuccuuuaucucuguuu

SEQ ID NO: 244229 - RNA, 32 nt, Human
ucuuuuuguggugugaauaaaucuuuuaucuu

SEQ ID NO: 244230 - RNA, 32 nt, Human
ucuuuuuguucgugaggucacuguccaggccu

SEQ ID NO: 244231 - RNA, 32 nt, Human
ucuuuuuguucgugaggucacuguccgggccu

SEQ ID NO: 244232 - RNA, 32 nt, Human
ucuuuuuguugacagauuacauugaggcaacu

SEQ ID NO: 244233 - RNA, 32 nt, Human
ucuuuuuguuuggccaaaauguaauacauucc

SEQ ID NO: 244234 - RNA, 23 nt, Human
ucuuuuuucaaauguugcauagu

SEQ ID NO: 244235 - RNA, 22 nt, Human
ucuuuuuucaggugugcuuggu

SEQ ID NO: 244236 - RNA, 23 nt, Human
ucuuuuuuccguaauuacuaggu

SEQ ID NO: 244237 - RNA, 21 nt, Human
ucuuuuuuccuaugcacuggu

SEQ ID NO: 244238 - RNA, 21 nt, Human
ucuuuuuuccucuccugucuu

SEQ ID NO: 244239 - RNA, 24 nt, Human
ucuuuuuuccugggaauauuuugu

SEQ ID NO: 244240 - RNA, 23 nt, Human
ucuuuuuucuugucauugcuggu

SEQ ID NO: 244241 - RNA, 22 nt, Human
ucuuuuuucuuuuauauuuagu

SEQ ID NO: 244242 - RNA, 23 nt, Human
ucuuuuuuguuguaaugcuuagu

SEQ ID NO: 244243 - RNA, 32 nt, Human
ugaaaaacaaaacaaaaccacaugugaagugu

SEQ ID NO: 244244 - RNA, 32 nt, Human
ugaaaaacacugacauaguaaagcucaacaaa

SEQ ID NO: 244245 - RNA, 32 nt, Human
ugaaaaacagcuuuguugaggaaugguuggga

SEQ ID NO: 244246 - RNA, 26 nt, Human
ugaaaaacaugcuauguuuuguuuua

SEQ ID NO: 244247 - RNA, 32 nt, Human
ugaaaaacccagcaugagaacgcagugucagg

SEQ ID NO: 244248 - RNA, 32 nt, Human
ugaaaaacuaagaacaugaaaugucaagagug

SEQ ID NO: 244249 - RNA, 32 nt, Human
ugaaaaacuaaugacucugcugccuucuccuu

SEQ ID NO: 244250 - RNA, 32 nt, Human
ugaaaaacucaggccuguggagucagaacccg

SEQ ID NO: 244251 - RNA, 32 nt, Human
ugaaaaagaaacauaguuguaguacuuagccu

SEQ ID NO: 244252 - RNA, 25 nt, Human
ugaaaaagaacuuauaaugaagcua

SEQ ID NO: 244253 - RNA, 32 nt, Human
ugaaaaagaccagccucuauuagaucaguguc

SEQ ID NO: 244254 - RNA, 32 nt, Human
ugaaaaagagaaaaagaaugaaguacuuccug

SEQ ID NO: 244255 - RNA, 32 nt, Human
ugaaaaagaggcaccguguaaagaaaauggca

SEQ ID NO: 244256 - RNA, 32 nt, Human
ugaaaaagagguguuugguuacgugugagcca

SEQ ID NO: 244257 - RNA, 32 nt, Human
ugaaaaagcaggcuggacacaguggcucaugc

SEQ ID NO: 244258 - RNA, 32 nt, Human
ugaaaaaggaaacaccaaagggaagagugaua

SEQ ID NO: 244259 - RNA, 32 nt, Human
ugaaaaaggacacccugagaaaagguccuagc

SEQ ID NO: 244260 - RNA, 32 nt, Human
ugaaaaaggauauggaaaaccuuacaaaacac

SEQ ID NO: 244261 - RNA, 19 nt, Human
ugaaaaaggauggguccca

SEQ ID NO: 244262 - RNA, 32 nt, Human
ugaaaaagucagcaguggauugcuugagaucu

SEQ ID NO: 244263 - RNA, 32 nt, Human
ugaaaaaguucagcaucccaggaaaggagcaa

SEQ ID NO: 244264 - RNA, 32 nt, Human
ugaaaaaguugcuuaguauuuaugaggaaauu

SEQ ID NO: 244265 - RNA, 32 nt, Human
ugaaaaauacaaaaauuagcuggaugugaugc

SEQ ID NO: 244266 - RNA, 32 nt, Human
ugaaaaauccucuccgucucccuucccugccu

SEQ ID NO: 244267 - RNA, 32 nt, Human
ugaaaaaucugucauccuuaucuuuguuccuc

SEQ ID NO: 244268 - RNA, 32 nt, Human
ugaaaaaugaaaagcccucaauccagagagcu

SEQ ID NO: 244269 - RNA, 18 nt, Human
ugaaaaaugaggguccca

SEQ ID NO: 244270 - RNA, 32 nt, Human
ugaaaaauggacaaauaaugaagaucucuccu

SEQ ID NO: 244271 - RNA, 32 nt, Human
ugaaaaauguacaauuuaucgaucucaucagu

SEQ ID NO: 244272 - RNA, 32 nt, Human
ugaaaaauuccagaaauaaacaauucacacgu

SEQ ID NO: 244273 - RNA, 32 nt, Human
ugaaaaauugcacucccuugguguagacaaau

SEQ ID NO: 244274 - RNA, 32 nt, Human
ugaaaacaaauuuguucccagguucuuggggc

SEQ ID NO: 244275 - RNA, 32 nt, Human
ugaaaacaagcaggacagccuggcacagaggc

SEQ ID NO: 244276 - RNA, 32 nt, Human
ugaaaacaagggcccuucaugggugaacauua

SEQ ID NO: 244277 - RNA, 32 nt, Human
ugaaaacaauccagcacucugguuaaauuuua

SEQ ID NO: 244278 - RNA, 32 nt, Human
ugaaaacacuccuuuaccaacuguuuuagggg

SEQ ID NO: 244279 - RNA, 32 nt, Human
ugaaaacacugcaacagugaacuuuugcaucu

SEQ ID NO: 244280 - RNA, 20 nt, Human
ugaaaacagaucaacucuca

SEQ ID NO: 244281 - RNA, 32 nt, Human
ugaaaacagcacuucagcuuuagcugauguau

SEQ ID NO: 244282 - RNA, 32 nt, Human
ugaaaacagccucuagcuucaggcugggcacg

SEQ ID NO: 244283 - RNA, 32 nt, Human
ugaaaacaggagguggagguugcagugagccg

SEQ ID NO: 244284 - RNA, 32 nt, Human
ugaaaacagucccauguacacuuucuggaagc

SEQ ID NO: 244285 - RNA, 32 nt, Human
ugaaaacaucagugaacuuguaacuauuguuu

SEQ ID NO: 244286 - RNA, 32 nt, Human
ugaaaacaugaccaaacucauacuucaaaaau

SEQ ID NO: 244287 - RNA, 28 nt, Human
ugaaaacaugggaggagaagauaaagag

SEQ ID NO: 244288 - RNA, 32 nt, Human
ugaaaaccaaaaacucuccaaguguauuuauu

SEQ ID NO: 244289 - RNA, 32 nt, Human
ugaaaaccacagguucaucuuugacuucaaau

SEQ ID NO: 244290 - RNA, 32 nt, Human
ugaaaaccacagugagucagcccuucacagaa

SEQ ID NO: 244291 - RNA, 32 nt, Human
ugaaaaccacuuccagagucuaaagcagcuca

SEQ ID NO: 244292 - RNA, 18 nt, Human
ugaaaaccaucugggaga

SEQ ID NO: 244293 - RNA, 32 nt, Human
ugaaaacccacguguuuuacacagaaccaccc

SEQ ID NO: 244294 - RNA, 32 nt, Human
ugaaaacccagaggaauacauuugguggcuga

SEQ ID NO: 244295 - RNA, 31 nt, Human
ugaaaacccucugaugccuguugaggagccu

SEQ ID NO: 244296 - RNA, 32 nt, Human
ugaaaacccuugccaugugcuaguaauuggaa

SEQ ID NO: 244297 - RNA, 32 nt, Human
ugaaaaccugcacuuuuccuugcaugacaggu

SEQ ID NO: 244298 - RNA, 32 nt, Human
ugaaaaccuuucucucuuucugaugccuucag

SEQ ID NO: 244299 - RNA, 32 nt, Human
ugaaaacguacacacaugcagaauaaugcguu

SEQ ID NO: 244300 - RNA, 32 nt, Human
ugaaaacuacagccuuagucuuacaggccccc

SEQ ID NO: 244301 - RNA, 32 nt, Human
ugaaaacuccaucccuccuaagaaucuuaaaa

SEQ ID NO: 244302 - RNA, 32 nt, Human
ugaaaacucuaaaagauaucagcggauuugaa

SEQ ID NO: 244303 - RNA, 32 nt, Human
ugaaaacucuagaguuggagcaagucuuccau

SEQ ID NO: 244304 - RNA, 32 nt, Human
ugaaaacucucaagcuguuuucccucugauuu

SEQ ID NO: 244305 - RNA, 32 nt, Human
ugaaaacugaggcagcagccugguuguggggc

SEQ ID NO: 244306 - RNA, 32 nt, Human
ugaaaacuucauuuuaaaugaucuuaagcaag

SEQ ID NO: 244307 - RNA, 32 nt, Human
ugaaaagaaagaaaggaggaccaagagaugaa

SEQ ID NO: 244308 - RNA, 32 nt, Human
ugaaaagaaagccauccaaccaaaggaaguga

SEQ ID NO: 244309 - RNA, 32 nt, Human
ugaaaagaaagcccggaggagcgaacagaagg

SEQ ID NO: 244310 - RNA, 17 nt, Human
ugaaaagaaaugagucc

SEQ ID NO: 244311 - RNA, 32 nt, Human
ugaaaagaaauguugacaccagugaaugaaac

SEQ ID NO: 244312 - RNA, 32 nt, Human
ugaaaagacccacgugcuccagucccagcucc

SEQ ID NO: 244313 - RNA, 32 nt, Human
ugaaaagacgcagaacaugaagggacucagaa

SEQ ID NO: 244314 - RNA, 22 nt, Human
ugaaaagacugaagggccagga

SEQ ID NO: 244315 - RNA, 32 nt, Human
ugaaaagacuguccuuucucccuugaaugguc

SEQ ID NO: 244316 - RNA, 32 nt, Human
ugaaaagagacacagagacaccucuggcuacc

SEQ ID NO: 244317 - RNA, 32 nt, Human
ugaaaagagacuggccgaagaacugugaauag

SEQ ID NO: 244318 - RNA, 32 nt, Human
ugaaaagaggaaauggauccaggagaaggaga

SEQ ID NO: 244319 - RNA, 32 nt, Human
ugaaaagaggagggaaaggccuuuggugugga

SEQ ID NO: 244320 - RNA, 21 nt, Human
ugaaaagcagaaaucgguugc

SEQ ID NO: 244321 - RNA, 32 nt, Human
ugaaaagcagcaaucgaaagucaguguguucu

SEQ ID NO: 244322 - RNA, 24 nt, Human
ugaaaagcaggaaaauacauugca

SEQ ID NO: 244323 - RNA, 32 nt, Human
ugaaaagcagugucuuugaucugcaacagcaa

SEQ ID NO: 244324 - RNA, 32 nt, Human
ugaaaagccaucaaaaaguugugauaucaaaa

SEQ ID NO: 244325 - RNA, 32 nt, Human
ugaaaagcccauauucuguucuugucaccuga

SEQ ID NO: 244326 - RNA, 32 nt, Human
ugaaaagccuguagguggcaccugccacucug

SEQ ID NO: 244327 - RNA, 32 nt, Human
ugaaaagcgggcuccaguugggugccaggaaa

SEQ ID NO: 244328 - RNA, 32 nt, Human
ugaaaagcuacuuagagaacuuaggaacuugg

SEQ ID NO: 244329 - RNA, 32 nt, Human
ugaaaagcucugaggucccacaauucauggua

SEQ ID NO: 244330 - RNA, 32 nt, Human
ugaaaagcugcugccaucaguaaucucaauag

SEQ ID NO: 244331 - RNA, 32 nt, Human
ugaaaagcuggaaacuuccacuuccccaaccu

SEQ ID NO: 244332 - RNA, 32 nt, Human
ugaaaaggaaaucuagcaugugaggggacuaa

SEQ ID NO: 244333 - RNA, 32 nt, Human
ugaaaaggaaggguaauuaaaauggaaugucu

SEQ ID NO: 244334 - RNA, 32 nt, Human
ugaaaaggaccuuguagaaccucuuugcagac

SEQ ID NO: 244335 - RNA, 32 nt, Human
ugaaaaggagaaaagguucguuuggaaguaua

SEQ ID NO: 244336 - RNA, 32 nt, Human
ugaaaaggaggaucgagcucacuguggaguau

SEQ ID NO: 244337 - RNA, 32 nt, Human
ugaaaaggagggauuucuccauaacucauuuu

SEQ ID NO: 244338 - RNA, 32 nt, Human
ugaaaagggaggagcaagaugggaugaaagca

SEQ ID NO: 244339 - RNA, 32 nt, Human
ugaaaagggaguuucguaagcaaaauagagga

SEQ ID NO: 244340 - RNA, 32 nt, Human
ugaaaaggggaguguaacuaguggauuuggga

SEQ ID NO: 244341 - RNA, 32 nt, Human
ugaaaagggguuugagaaagagcccaguagga

SEQ ID NO: 244342 - RNA, 32 nt, Human
ugaaaagguauuauaguaaggagagaaggaga

SEQ ID NO: 244343 - RNA, 22 nt, Human
ugaaaaggugauguguggggag

SEQ ID NO: 244344 - RNA, 32 nt, Human
ugaaaagguuaaguaugccaguaguuuacaaa

SEQ ID NO: 244345 - RNA, 32 nt, Human
ugaaaaguacuggaaucuggcucugcucugug

SEQ ID NO: 244346 - RNA, 32 nt, Human
ugaaaaguagugcuugcuagguguuugaagau

SEQ ID NO: 244347 - RNA, 32 nt, Human
ugaaaagucccagcauauuuugccgaguaguc

SEQ ID NO: 244348 - RNA, 32 nt, Human
ugaaaagugccucuaagacauccacaggugug

SEQ ID NO: 244349 - RNA, 32 nt, Human
ugaaaagugucacccuccuuggacuuauucag

SEQ ID NO: 244350 - RNA, 32 nt, Human
ugaaaaguguuaaaacauugccaacucaaaau

SEQ ID NO: 244351 - RNA, 32 nt, Human
ugaaaaguuccuguuugcauuacucugcaguu

SEQ ID NO: 244352 - RNA, 32 nt, Human
ugaaaaguuuucugagaggcaauacuuaagac

SEQ ID NO: 244353 - RNA, 23 nt, Human
ugaaaauaaaguauguacuguuu

SEQ ID NO: 244354 - RNA, 32 nt, Human
ugaaaauaaagugagaaaguucaauuaggacu

SEQ ID NO: 244355 - RNA, 32 nt, Human
ugaaaauacaagaaauuagcugggacuacagg

SEQ ID NO: 244356 - RNA, 32 nt, Human
ugaaaauacauacaugcuugucucaacucuuc

SEQ ID NO: 244357 - RNA, 32 nt, Human
ugaaaauacauacuuuuacauuucuacuuuau

SEQ ID NO: 244358 - RNA, 32 nt, Human
ugaaaauagagccagacaggcagaggagaagu

SEQ ID NO: 244359 - RNA, 32 nt, Human
ugaaaauauaaauauauguauacacuacuaaa

SEQ ID NO: 244360 - RNA, 32 nt, Human
ugaaaauauaacuguuuccccucucugcugcu

SEQ ID NO: 244361 - RNA, 32 nt, Human
ugaaaauauaugcacauaugcacccuaauaac

SEQ ID NO: 244362 - RNA, 32 nt, Human
ugaaaauaucuagaaauguggaagagaccuac

SEQ ID NO: 244363 - RNA, 32 nt, Human
ugaaaaucaaaugaugcaaaauauauacaagc

SEQ ID NO: 244364 - RNA, 32 nt, Human
ugaaaaucaucucuuuuucucaagaagaaagc

SEQ ID NO: 244365 - RNA, 32 nt, Human
ugaaaaucauuuccagacaaccucuuacuuuc

SEQ ID NO: 244366 - RNA, 32 nt, Human
ugaaaaucucagaaaccugaacauggaaacca

SEQ ID NO: 244367 - RNA, 32 nt, Human
ugaaaaucuccaaacauaugcacaagcagaga

SEQ ID NO: 244368 - RNA, 32 nt, Human
ugaaaaucuccacucccaaugucugaggguuc

SEQ ID NO: 244369 - RNA, 32 nt, Human
ugaaaaugaccaggccacuucuuccgagggcc

SEQ ID NO: 244370 - RNA, 32 nt, Human
ugaaaaugaucacuucauuugauacuguuuuu

SEQ ID NO: 244371 - RNA, 32 nt, Human
ugaaaaugcaaugacuggcugggugcaguggc

SEQ ID NO: 244372 - RNA, 32 nt, Human
ugaaaaugcagauucacugagccagacuaagg

SEQ ID NO: 244373 - RNA, 32 nt, Human
ugaaaaugccuaaugccuggaucuguguucua

SEQ ID NO: 244374 - RNA, 32 nt, Human
ugaaaaugccuccaaacugagaugcuuucagc

SEQ ID NO: 244375 - RNA, 30 nt, Human
ugaaaauggagcuuccugcaaagagaagcc

SEQ ID NO: 244376 - RNA, 32 nt, Human
ugaaaauggugaggacaggcacaaacgcaaag

SEQ ID NO: 244377 - RNA, 31 nt, Human
ugaaaaugucaugauaccuguugagauaacu

SEQ ID NO: 244378 - RNA, 30 nt, Human
ugaaaaugucuguacagccaaagcuuuccc

SEQ ID NO: 244379 - RNA, 32 nt, Human
ugaaaauguguuugcugccuugcuccuagcag

SEQ ID NO: 244380 - RNA, 32 nt, Human
ugaaaauguucuguucucacuuuuggcuuuau

SEQ ID NO: 244381 - RNA, 32 nt, Human
ugaaaauguuugcugucccuugcugaugcuaa

SEQ ID NO: 244382 - RNA, 32 nt, Human
ugaaaauuacuaauuuguuugacauuccaugu

SEQ ID NO: 244383 - RNA, 32 nt, Human
ugaaaauuagugacugguuaaggugugccacu

SEQ ID NO: 244384 - RNA, 24 nt, Human
ugaaaauucagaccuuguuuuaca

SEQ ID NO: 244385 - RNA, 32 nt, Human
ugaaaauugccuccuccaucucucaccuuuuc

SEQ ID NO: 244386 - RNA, 32 nt, Human
ugaaaauugcuuguaauuccuagccuucaaau

SEQ ID NO: 244387 - RNA, 32 nt, Human
ugaaaauuguacuuuacuacuacagcauuaca

SEQ ID NO: 244388 - RNA, 32 nt, Human
ugaaacaaaagagcauuucuucagguuucuau

SEQ ID NO: 244389 - RNA, 17 nt, Human
ugaaacaaaggucccuc

SEQ ID NO: 244390 - RNA, 20 nt, Human
ugaaacaaaucuugcucugu

SEQ ID NO: 244391 - RNA, 20 nt, Human
ugaaacaaauuaaugaagcu

SEQ ID NO: 244392 - RNA, 32 nt, Human
ugaaacaagagaaaguggccugccuggcaucc

SEQ ID NO: 244393 - RNA, 32 nt, Human
ugaaacaaggggaucacuugaggccaggaguu

SEQ ID NO: 244394 - RNA, 32 nt, Human
ugaaacaauaaggcuuuuuagagcagacuuug

SEQ ID NO: 244395 - RNA, 23 nt, Human
ugaaacaauccuugugaugaagu

SEQ ID NO: 244396 - RNA, 32 nt, Human
ugaaacaccaagaugucugucucugaagcgug

SEQ ID NO: 244397 - RNA, 32 nt, Human
ugaaacaccuuccugguaguccggccuuguca

SEQ ID NO: 244398 - RNA, 32 nt, Human
ugaaacacuccucccgcugccugcuccugagg

SEQ ID NO: 244399 - RNA, 32 nt, Human
ugaaacacuguacuguacuaucuugcucugag

SEQ ID NO: 244400 - RNA, 32 nt, Human
ugaaacagaagcaauggaugagugcuggacga

SEQ ID NO: 244401 - RNA, 32 nt, Human
ugaaacagagugagauagauaggguagaaauu

SEQ ID NO: 244402 - RNA, 32 nt, Human
ugaaacagaguuuggggguuguuugggauuag

SEQ ID NO: 244403 - RNA, 28 nt, Human
ugaaacagcacuguuuuguuuuguuuug

SEQ ID NO: 244404 - RNA, 21 nt, Human
ugaaacaggaucuugcucugu

SEQ ID NO: 244405 - RNA, 32 nt, Human
ugaaacaggaucuugcucugucacccaggcuu

SEQ ID NO: 244406 - RNA, 32 nt, Human
ugaaacaggcagcguaggauggggguccagug

SEQ ID NO: 244407 - RNA, 32 nt, Human
ugaaacagggucucacccuguugcccaggcua

SEQ ID NO: 244408 - RNA, 19 nt, Human
ugaaacagggucucacucu

SEQ ID NO: 244409 - RNA, 32 nt, Human
ugaaacagggucucacucuauugcccaggcug

SEQ ID NO: 244410 - RNA, 32 nt, Human
ugaaacagggucucacucuguugcccaggcug

SEQ ID NO: 244411 - RNA, 19 nt, Human
ugaaacaggugucaggcug

SEQ ID NO: 244412 - RNA, 32 nt, Human
ugaaacaguagggauugcgggaagaagggugu

SEQ ID NO: 244413 - RNA, 19 nt, Human
ugaaacagucucgcucugu

SEQ ID NO: 244414 - RNA, 32 nt, Human
ugaaacagucucuugcuugucguguauuuuuc

SEQ ID NO: 244415 - RNA, 32 nt, Human
ugaaacaucguuucucaggaaguucaccagaa

SEQ ID NO: 244416 - RNA, 32 nt, Human
ugaaacaucugucaauaaaauggcuacacuca

SEQ ID NO: 244417 - RNA, 32 nt, Human
ugaaacaucuucccuccucaaccuggaaaauu

SEQ ID NO: 244418 - RNA, 32 nt, Human
ugaaacauuauucaggcugauaagcuaagugc

SEQ ID NO: 244419 - RNA, 32 nt, Human
ugaaacauucagagcauccucuaccccgagga

SEQ ID NO: 244420 - RNA, 32 nt, Human
ugaaacauuugaucucaugacacuucauccaa

SEQ ID NO: 244421 - RNA, 20 nt, Human
ugaaaccaaaacgggcccug

SEQ ID NO: 244422 - RNA, 32 nt, Human
ugaaaccaaaggacuaggagucaggagaacaa

SEQ ID NO: 244423 - RNA, 32 nt, Human
ugaaaccaacaacaaacauuuuuaaaauuaaa

SEQ ID NO: 244424 - RNA, 32 nt, Human
ugaaaccacauacacagaccacugcagcauuc

SEQ ID NO: 244425 - RNA, 32 nt, Human
ugaaaccacaugcaucauucaggaagccuuca

SEQ ID NO: 244426 - RNA, 32 nt, Human
ugaaaccagccaacugcuuuuugugcggucuc

SEQ ID NO: 244427 - RNA, 32 nt, Human
ugaaaccaggauacaagacagccucgacucug

SEQ ID NO: 244428 - RNA, 31 nt, Human
ugaaaccagguggaaagaaaggggaagaauu

SEQ ID NO: 244429 - RNA, 32 nt, Human
ugaaaccagugugauaaaaaccugccaagcca

SEQ ID NO: 244430 - RNA, 32 nt, Human
ugaaaccaucugauuggcuuucugagguuuag

SEQ ID NO: 244431 - RNA, 32 nt, Human
ugaaacccacaggcggagguugcggugggcug

SEQ ID NO: 244432 - RNA, 18 nt, Human
ugaaacccaucucuacua

SEQ ID NO: 244433 - RNA, 32 nt, Human
ugaaaccccaggaggagguccucugagcccug

SEQ ID NO: 244434 - RNA, 19 nt, Human
ugaaaccccaucgcuacua

SEQ ID NO: 244435 - RNA, 19 nt, Human
ugaaaccccaucucaacua

SEQ ID NO: 244436 - RNA, 19 nt, Human
ugaaaccccaucuccacua

SEQ ID NO: 244437 - RNA, 18 nt, Human
ugaaaccccaucucuacu

SEQ ID NO: 244438 - RNA, 19 nt, Human
ugaaaccccaucucuacua

SEQ ID NO: 244439 - RNA, 19 nt, Human
ugaaaccccaucucuacug

SEQ ID NO: 244440 - RNA, 19 nt, Human
ugaaaccccaucucuagua

SEQ ID NO: 244441 - RNA, 19 nt, Human
ugaaaccccaucucuauua

SEQ ID NO: 244442 - RNA, 19 nt, Human
ugaaaccccaucuguacua

SEQ ID NO: 244443 - RNA, 19 nt, Human
ugaaaccccaugucuacua

SEQ ID NO: 244444 - RNA, 19 nt, Human
ugaaaccccgucucuacua

SEQ ID NO: 244445 - RNA, 24 nt, Human
ugaaaccccucgccagauuuugca

SEQ ID NO: 244446 - RNA, 19 nt, Human
ugaaaccccuucucuacua

SEQ ID NO: 244447 - RNA, 32 nt, Human
ugaaacccgacagaaguaucucagccugcagu

SEQ ID NO: 244448 - RNA, 32 nt, Human
ugaaacccgggagucagaggcugcagagagcc

SEQ ID NO: 244449 - RNA, 19 nt, Human
ugaaacccuaucucuacua

SEQ ID NO: 244450 - RNA, 32 nt, Human
ugaaacccucacccuuccgucccucccagcca

SEQ ID NO: 244451 - RNA, 32 nt, Human
ugaaacccugcagccuuaagagagaggggccc

SEQ ID NO: 244452 - RNA, 32 nt, Human
ugaaaccggaagcagaagcugaguguggugag

SEQ ID NO: 244453 - RNA, 32 nt, Human
ugaaaccggaaggcagagguugcagugagcca

SEQ ID NO: 244454 - RNA, 32 nt, Human
ugaaaccggccuaauuuuucugacugauaugg

SEQ ID NO: 244455 - RNA, 32 nt, Human
ugaaaccgggaggcggagguugaggugagccg

SEQ ID NO: 244456 - RNA, 32 nt, Human
ugaaaccguuuguuuucccucuccauuuuccc

SEQ ID NO: 244457 - RNA, 24 nt, Human
ugaaaccuccaccucccggguuca

SEQ ID NO: 244458 - RNA, 32 nt, Human
ugaaaccuccuugggccgcaauuucaucaucu

SEQ ID NO: 244459 - RNA, 32 nt, Human
ugaaaccucuaauuugauuauugggaggauuu

SEQ ID NO: 244460 - RNA, 32 nt, Human
ugaaaccugagauaaaugaaugugagguaucu

SEQ ID NO: 244461 - RNA, 32 nt, Human
ugaaaccugcagcaguucaggaugacuaauga

SEQ ID NO: 244462 - RNA, 32 nt, Human
ugaaaccuuugucuuaaaaauacucagcuuuc

SEQ ID NO: 244463 - RNA, 32 nt, Human
ugaaacgaauauaagcuuaaaauaagugaauc

SEQ ID NO: 244464 - RNA, 32 nt, Human
ugaaacgagguuucaccauauuggccaggcug

SEQ ID NO: 244465 - RNA, 19 nt, Human
ugaaacgccaucucuacua

SEQ ID NO: 244466 - RNA, 21 nt, Human
ugaaacggagucucacucugu

SEQ ID NO: 244467 - RNA, 32 nt, Human
ugaaacggagucucacucugucaccaggcugg

SEQ ID NO: 244468 - RNA, 21 nt, Human
ugaaacggagucucgcucugu

SEQ ID NO: 244469 - RNA, 32 nt, Human
ugaaacggagucucgcucugucacccaggcug

SEQ ID NO: 244470 - RNA, 32 nt, Human
ugaaacggagucucgcucugucgcccaggcug

SEQ ID NO: 244471 - RNA, 32 nt, Human
ugaaacggagucucgcucuguugcccaggcug

SEQ ID NO: 244472 - RNA, 21 nt, Human
ugaaacggagucuugcucugu

SEQ ID NO: 244473 - RNA, 32 nt, Human
ugaaacggagucuugcucugucccccaggcug

SEQ ID NO: 244474 - RNA, 32 nt, Human
ugaaacgggagccagacgaauuaagaagauuc

SEQ ID NO: 244475 - RNA, 32 nt, Human
ugaaacgggaggcggagguugcagugagccga

SEQ ID NO: 244476 - RNA, 22 nt, Human
ugaaacgggagucucacucuuc

SEQ ID NO: 244477 - RNA, 32 nt, Human
ugaaacuaaaaaggcaauuuuggaaaaagaga

SEQ ID NO: 244478 - RNA, 32 nt, Human
ugaaacuaauaauaauacaaaaauuagcuggg

SEQ ID NO: 244479 - RNA, 32 nt, Human
ugaaacuagacagggucuugccauguucugga

SEQ ID NO: 244480 - RNA, 32 nt, Human
ugaaacuagcugguuuguggauucagauacuc

SEQ ID NO: 244481 - RNA, 32 nt, Human
ugaaacuaggaguucaagaccagccaaggcaa

SEQ ID NO: 244482 - RNA, 32 nt, Human
ugaaacuaggucuggggcacucccaaugcagc

SEQ ID NO: 244483 - RNA, 32 nt, Human
ugaaacucaaaaccaucucucuuccagcugcu

SEQ ID NO: 244484 - RNA, 32 nt, Human
ugaaacucaccagcaaaugcugaccugggaau

SEQ ID NO: 244485 - RNA, 32 nt, Human
ugaaacuccaucucaaaaagaaagagagagag

SEQ ID NO: 244486 - RNA, 19 nt, Human
ugaaacuccaucucuacua

SEQ ID NO: 244487 - RNA, 32 nt, Human
ugaaacuccaucucuacuaaaaguacaaaaau

SEQ ID NO: 244488 - RNA, 32 nt, Human
ugaaacuccgucucaaaacaaaacaaaacaaa

SEQ ID NO: 244489 - RNA, 32 nt, Human
ugaaacuccuagcucaucugucaccgagcuuc

SEQ ID NO: 244490 - RNA, 32 nt, Human
ugaaacucugcaggccuuccgccugauuauua

SEQ ID NO: 244491 - RNA, 32 nt, Human
ugaaacucugggccagcagcccccaggagcau

SEQ ID NO: 244492 - RNA, 32 nt, Human
ugaaacucuguggaauauaaacuuuuuaaaaa

SEQ ID NO: 244493 - RNA, 32 nt, Human
ugaaacucuguuuucuugccccagucaggcuc

SEQ ID NO: 244494 - RNA, 32 nt, Human
ugaaacucuugaaauccaguugccauugagua

SEQ ID NO: 244495 - RNA, 32 nt, Human
ugaaacugaaagcucaucugcagcucagaaaa

SEQ ID NO: 244496 - RNA, 32 nt, Human
ugaaacugagccacacgcaccucugcuaguag

SEQ ID NO: 244497 - RNA, 32 nt, Human
ugaaacugagguucaggagaccggccuguucc

SEQ ID NO: 244498 - RNA, 32 nt, Human
ugaaacugagucuguggacacuguggaaagcu

SEQ ID NO: 244499 - RNA, 32 nt, Human
ugaaacuggaaggcagagguugcagugagcca

SEQ ID NO: 244500 - RNA, 32 nt, Human
ugaaacuggaaggcagagguugcagugagccg

SEQ ID NO: 244501 - RNA, 32 nt, Human
ugaaacuggcaguugacggcuccugggacuag

SEQ ID NO: 244502 - RNA, 32 nt, Human
ugaaacugggaggcagggguuggagugagcca

SEQ ID NO: 244503 - RNA, 32 nt, Human
ugaaacugggaggcggagcuugcagugagccg

SEQ ID NO: 244504 - RNA, 32 nt, Human
ugaaacugggagguggagguugcagugagcca

SEQ ID NO: 244505 - RNA, 32 nt, Human
ugaaacuggguuggggacagggauaguuucca

SEQ ID NO: 244506 - RNA, 32 nt, Human
ugaaacugucuccuccugccuccacuugaccu

SEQ ID NO: 244507 - RNA, 32 nt, Human
ugaaacuucuccucacggggugaggaucgagg

SEQ ID NO: 244508 - RNA, 32 nt, Human
ugaaacuugagaagccaccuaaagcuauauca

SEQ ID NO: 244509 - RNA, 32 nt, Human
ugaaacuugcaacuuugagaacaaaacagucc

SEQ ID NO: 244510 - RNA, 32 nt, Human
ugaaacuugcagggcgaagagcaggcggcgag

SEQ ID NO: 244511 - RNA, 32 nt, Human
ugaaacuuggugguaagauagagaucguaucu

SEQ ID NO: 244512 - RNA, 32 nt, Human
ugaaacuuguacaguaagagaagccugcuaag

SEQ ID NO: 244513 - RNA, 32 nt, Human
ugaaacuugugccacagagcuauauguaauau

SEQ ID NO: 244514 - RNA, 23 nt, Human
ugaaagaaaaagaacacuugcuc

SEQ ID NO: 244515 - RNA, 32 nt, Human
ugaaagaaaagcuucucagggaacugcaagcu

SEQ ID NO: 244516 - RNA, 32 nt, Human
ugaaagaaaaggaagcaaagaaaauagcugcc

SEQ ID NO: 244517 - RNA, 32 nt, Human
ugaaagaaacacggcggaaucucuccaggaga

SEQ ID NO: 244518 - RNA, 17 nt, Human
ugaaagaaagggaccca

SEQ ID NO: 244519 - RNA, 17 nt, Human
ugaaagaaagggguccc

SEQ ID NO: 244520 - RNA, 22 nt, Human
ugaaagaaaguaugguaugucu

SEQ ID NO: 244521 - RNA, 32 nt, Human
ugaaagaaauaauauuugaucuucucaguguu

SEQ ID NO: 244522 - RNA, 18 nt, Human
ugaaagaaauggauucca

SEQ ID NO: 244523 - RNA, 18 nt, Human
ugaaagaacggagucuca

SEQ ID NO: 244524 - RNA, 32 nt, Human
ugaaagaacuccugccaagagcccagaccucu

SEQ ID NO: 244525 - RNA, 32 nt, Human
ugaaagaagaauuuguggaaguuaauuuguaa

SEQ ID NO: 244526 - RNA, 21 nt, Human
ugaaagaauaguacuuuggug

SEQ ID NO: 244527 - RNA, 32 nt, Human
ugaaagacaaacacaucugcccaaugauccag

SEQ ID NO: 244528 - RNA, 32 nt, Human
ugaaagacaaggauaaagucccagggaaacaa

SEQ ID NO: 244529 - RNA, 32 nt, Human
ugaaagacacacacccaggcaaccccugaggc

SEQ ID NO: 244530 - RNA, 32 nt, Human
ugaaagacacugcuccuuccucucauggaguu

SEQ ID NO: 244531 - RNA, 32 nt, Human
ugaaagacacuguuucuccuguuggcucacag

SEQ ID NO: 244532 - RNA, 32 nt, Human
ugaaagacagcagugcccuucucuggaagaag

SEQ ID NO: 244533 - RNA, 32 nt, Human
ugaaagaccuaugagcaaauggugcugaauac

SEQ ID NO: 244534 - RNA, 32 nt, Human
ugaaagacucacugucuacaccaucccucuuc

SEQ ID NO: 244535 - RNA, 32 nt, Human
ugaaagacucggcuucugcugcuagcgccgga

SEQ ID NO: 244536 - RNA, 32 nt, Human
ugaaagacugggugcuagacaagaaggaagca

SEQ ID NO: 244537 - RNA, 32 nt, Human
ugaaagacuuguuuguucugcuucucuucaua

SEQ ID NO: 244538 - RNA, 32 nt, Human
ugaaagagaaggcauuaaaaagaagugcgauu

SEQ ID NO: 244539 - RNA, 32 nt, Human
ugaaagagacaugcucuagcugcagaggcaaa

SEQ ID NO: 244540 - RNA, 32 nt, Human
ugaaagagaggcggaggggagagagggauuuu

SEQ ID NO: 244541 - RNA, 32 nt, Human
ugaaagagagugaaaaugcagacaagacaguu

SEQ ID NO: 244542 - RNA, 31 nt, Human
ugaaagagaugaggaagaaaagacugacgca

SEQ ID NO: 244543 - RNA, 32 nt, Human
ugaaagagauggaagggcuacugugcagcuuu

SEQ ID NO: 244544 - RNA, 32 nt, Human
ugaaagagcaagagaaagccagcugggcggcu

SEQ ID NO: 244545 - RNA, 32 nt, Human
ugaaagagcaagauggagcaauggagagaaga

SEQ ID NO: 244546 - RNA, 32 nt, Human
ugaaagagccaguagagacagcuguagauaac

SEQ ID NO: 244547 - RNA, 32 nt, Human
ugaaagagcuaaaucccucucuucaucucgug

SEQ ID NO: 244548 - RNA, 32 nt, Human
ugaaagaggaagaggcugcaauggagcagcac

SEQ ID NO: 244549 - RNA, 32 nt, Human
ugaaagaggcagaguuuaucccaaugacuucu

SEQ ID NO: 244550 - RNA, 32 nt, Human
ugaaagagggaacugaggugcagagaagccag

SEQ ID NO: 244551 - RNA, 32 nt, Human
ugaaagagucaaugaaaagaaagcuuuaaacu

SEQ ID NO: 244552 - RNA, 32 nt, Human
ugaaagagucagcaccagcagaggcuacucga

SEQ ID NO: 244553 - RNA, 32 nt, Human
ugaaagagugagagaagauggaagggaagggc

SEQ ID NO: 244554 - RNA, 32 nt, Human
ugaaagaguuacuacaaccccaaagaguugug

SEQ ID NO: 244555 - RNA, 23 nt, Human
ugaaagaguuucuuuuacugaga

SEQ ID NO: 244556 - RNA, 32 nt, Human
ugaaagauauggaagacagagcccaggccaua

SEQ ID NO: 244557 - RNA, 32 nt, Human
ugaaagaugcauucacuucuccuuugagaguu

SEQ ID NO: 244558 - RNA, 32 nt, Human
ugaaagaugccagagccggagaugucugcugg

SEQ ID NO: 244559 - RNA, 32 nt, Human
ugaaagcaaacagugcugcucuuuauuccaga

SEQ ID NO: 244560 - RNA, 32 nt, Human
ugaaagcaaauacauuuggauuucaaauuuca

SEQ ID NO: 244561 - RNA, 32 nt, Human
ugaaagcaaaugggagaugaugucagaggcau

SEQ ID NO: 244562 - RNA, 19 nt, Human
ugaaagcaauaguuccuca

SEQ ID NO: 244563 - RNA, 32 nt, Human
ugaaagcaaucugagagauuugaauagaaaaa

SEQ ID NO: 244564 - RNA, 32 nt, Human
ugaaagcacagccgugccuggccagacuccau

SEQ ID NO: 244565 - RNA, 32 nt, Human
ugaaagcaccuccggccacuccugggagacag

SEQ ID NO: 244566 - RNA, 32 nt, Human
ugaaagcagaauaccuguuucaaagagucaac

SEQ ID NO: 244567 - RNA, 32 nt, Human
ugaaagcaguagccaccauguucaaccaucug

SEQ ID NO: 244568 - RNA, 32 nt, Human
ugaaagcagucaucuucagcguuuuccagccc

SEQ ID NO: 244569 - RNA, 22 nt, Human
ugaaagccaagcacacuuuccu

SEQ ID NO: 244570 - RNA, 32 nt, Human
ugaaagccaaggagucacugagaccaaggcuu

SEQ ID NO: 244571 - RNA, 32 nt, Human
ugaaagccaccuggagccaccuugccgggauu

SEQ ID NO: 244572 - RNA, 32 nt, Human
ugaaagccagaacaagagagcgcuccucuccc

SEQ ID NO: 244573 - RNA, 22 nt, Human
ugaaagccauggguucugaaga

SEQ ID NO: 244574 - RNA, 21 nt, Human
ugaaagccgguauugcugaga

SEQ ID NO: 244575 - RNA, 23 nt, Human
ugaaagccucaguuucugaguga

SEQ ID NO: 244576 - RNA, 17 nt, Human
ugaaagccugaguccca

SEQ ID NO: 244577 - RNA, 22 nt, Human
ugaaagccuggugagcagaaag

SEQ ID NO: 244578 - RNA, 32 nt, Human
ugaaagccuuccccggcuccgggcauuauuug

SEQ ID NO: 244579 - RNA, 22 nt, Human
ugaaagccuugcacacucaccu

SEQ ID NO: 244580 - RNA, 32 nt, Human
ugaaagccuuguucuggcauugcagcccagug

SEQ ID NO: 244581 - RNA, 32 nt, Human
ugaaagccuuucugccuuccuuccuguagcug

SEQ ID NO: 244582 - RNA, 32 nt, Human
ugaaagcuaauucucaugaauucaaguagcug

SEQ ID NO: 244583 - RNA, 32 nt, Human
ugaaagcucacucuggauuccacacugcacug

SEQ ID NO: 244584 - RNA, 32 nt, Human
ugaaagcucuuggcagaccucuugucugauaa

SEQ ID NO: 244585 - RNA, 32 nt, Human
ugaaagcugagaagggaaggcagaugggagaa

SEQ ID NO: 244586 - RNA, 32 nt, Human
ugaaagcugauucucaugaauucaaguagcug

SEQ ID NO: 244587 - RNA, 31 nt, Human
ugaaagcugauuuucugagcagcagauacgg

SEQ ID NO: 244588 - RNA, 32 nt, Human
ugaaagcugcacuuaacccuuugugauaauga

SEQ ID NO: 244589 - RNA, 32 nt, Human
ugaaagcuggaaaaggagaagugaaggaugac

SEQ ID NO: 244590 - RNA, 20 nt, Human
ugaaagcuggugugagccca

SEQ ID NO: 244591 - RNA, 32 nt, Human
ugaaagcuguagguaggugaaguggcucacgc

SEQ ID NO: 244592 - RNA, 32 nt, Human
ugaaagcuucaccucuucccucguuuauaucu

SEQ ID NO: 244593 - RNA, 19 nt, Human
ugaaagcuuggggguccca

SEQ ID NO: 244594 - RNA, 32 nt, Human
ugaaaggaaagggagagcuguaagcuucacuc

SEQ ID NO: 244595 - RNA, 17 nt, Human
ugaaaggaaaguagucc

SEQ ID NO: 244596 - RNA, 20 nt, Human
ugaaaggaaagugcuuucca

SEQ ID NO: 244597 - RNA, 17 nt, Human
ugaaaggaaaugcacca

SEQ ID NO: 244598 - RNA, 32 nt, Human
ugaaaggaaaugggugugacucugaggaagcc

SEQ ID NO: 244599 - RNA, 32 nt, Human
ugaaaggaaauuaucaguauuaggcaaagaug

SEQ ID NO: 244600 - RNA, 20 nt, Human
ugaaaggaagacauuuucua

SEQ ID NO: 244601 - RNA, 32 nt, Human
ugaaaggaagacuucuggcuucuccuaaaucu

SEQ ID NO: 244602 - RNA, 19 nt, Human
ugaaaggaagauaugacua

SEQ ID NO: 244603 - RNA, 18 nt, Human
ugaaaggaagaugccccg

SEQ ID NO: 244604 - RNA, 19 nt, Human
ugaaaggaagaugcuuuca

SEQ ID NO: 244605 - RNA, 20 nt, Human
ugaaaggaagauuucagucc

SEQ ID NO: 244606 - RNA, 20 nt, Human
ugaaaggaaggaaugugccc

SEQ ID NO: 244607 - RNA, 19 nt, Human
ugaaaggaaugaagcacca

SEQ ID NO: 244608 - RNA, 32 nt, Human
ugaaaggaaugagaaaagacaguuugagagag

SEQ ID NO: 244609 - RNA, 20 nt, Human
ugaaaggaccgugcagccca

SEQ ID NO: 244610 - RNA, 32 nt, Human
ugaaaggagaaaaaggaggugugggaaguaaa

SEQ ID NO: 244611 - RNA, 18 nt, Human
ugaaaggagaaaauucca

SEQ ID NO: 244612 - RNA, 18 nt, Human
ugaaaggagacagccuca

SEQ ID NO: 244613 - RNA, 32 nt, Human
ugaaaggaggagaggggaaaaggggaggggaa

SEQ ID NO: 244614 - RNA, 32 nt, Human
ugaaaggaggcugggaccaggggaccagguag

SEQ ID NO: 244615 - RNA, 32 nt, Human
ugaaaggaggggcaaaggagucaccagagguc

SEQ ID NO: 244616 - RNA, 32 nt, Human
ugaaaggaggucaagcagagaggaauggcugc

SEQ ID NO: 244617 - RNA, 32 nt, Human
ugaaaggcaaaaacuuccaucacaacaagaaa

SEQ ID NO: 244618 - RNA, 32 nt, Human
ugaaaggcaaauacauuuccauuuuucugucu

SEQ ID NO: 244619 - RNA, 32 nt, Human
ugaaaggcacugacauuagcagaauaagugau

SEQ ID NO: 244620 - RNA, 32 nt, Human
ugaaaggcaguagucauuuucaagacugaauu

SEQ ID NO: 244621 - RNA, 32 nt, Human
ugaaaggcauugaaggaaaccagauacauuaa

SEQ ID NO: 244622 - RNA, 32 nt, Human
ugaaaggcauuuuagugugguuuauguguaau

SEQ ID NO: 244623 - RNA, 32 nt, Human
ugaaaggccacugcacuccagccugagugaca

SEQ ID NO: 244624 - RNA, 32 nt, Human
ugaaaggccacuuuggaaaggguuuggaugag

SEQ ID NO: 244625 - RNA, 32 nt, Human
ugaaaggcuguggcuucaguccuggguuucug

SEQ ID NO: 244626 - RNA, 32 nt, Human
ugaaaggcuguggucuggaagagcccaggucc

SEQ ID NO: 244627 - RNA, 32 nt, Human
ugaaagggaaauuuucuuucaguuuacagaug

SEQ ID NO: 244628 - RNA, 19 nt, Human
ugaaagggacaggguccca

SEQ ID NO: 244629 - RNA, 32 nt, Human
ugaaagggagagaagauuggcgcugggugccg

SEQ ID NO: 244630 - RNA, 18 nt, Human
ugaaagggagcgagcccc

SEQ ID NO: 244631 - RNA, 32 nt, Human
ugaaagggaggaacuuguccuuuacccaguuu

SEQ ID NO: 244632 - RNA, 32 nt, Human
ugaaagggaugagagacagaaaaccuagagga

SEQ ID NO: 244633 - RNA, 32 nt, Human
ugaaagggcagugagacaagaccucauccuac

SEQ ID NO: 244634 - RNA, 18 nt, Human
ugaaagggccagguccca

SEQ ID NO: 244635 - RNA, 32 nt, Human
ugaaagggcuacuauucuuacucccaucccca

SEQ ID NO: 244636 - RNA, 32 nt, Human
ugaaagggcuagauuauaaaauuaagccuuag

SEQ ID NO: 244637 - RNA, 32 nt, Human
ugaaaggggaaagauuggagguaagagagaaa

SEQ ID NO: 244638 - RNA, 32 nt, Human
ugaaagggggauguaggauaugucaucuggcu

SEQ ID NO: 244639 - RNA, 32 nt, Human
ugaaaggguaggucaaggcagcgguggaagga

SEQ ID NO: 244640 - RNA, 32 nt, Human
ugaaagggucaacggcccuguuuauauuggua

SEQ ID NO: 244641 - RNA, 32 nt, Human
ugaaagggugagugcuugaugucuuuaguuua

SEQ ID NO: 244642 - RNA, 32 nt, Human
ugaaagggugaugcucuuaugccugagucuug

SEQ ID NO: 244643 - RNA, 32 nt, Human
ugaaaggguuugaagccaggaggagagaugca

SEQ ID NO: 244644 - RNA, 32 nt, Human
ugaaagguaaccuuagcccugccuuguguucc

SEQ ID NO: 244645 - RNA, 32 nt, Human
ugaaagguaaugaagauggagcagaaugagca

SEQ ID NO: 244646 - RNA, 19 nt, Human
ugaaagguaauuugagaga

SEQ ID NO: 244647 - RNA, 32 nt, Human
ugaaaggucccugguaucuggccagaguguua

SEQ ID NO: 244648 - RNA, 32 nt, Human
ugaaaggugacuucgacgcucuucugaggccu

SEQ ID NO: 244649 - RNA, 23 nt, Human
ugaaagguggggggugaguccca

SEQ ID NO: 244650 - RNA, 32 nt, Human
ugaaaggugugaacagcuuuguauguuuauga

SEQ ID NO: 244651 - RNA, 32 nt, Human
ugaaagguguuauuugugaagcugauaaccga

SEQ ID NO: 244652 - RNA, 32 nt, Human
ugaaagguugcacucuagggugaaccaagcua

SEQ ID NO: 244653 - RNA, 32 nt, Human
ugaaagguugggggaggcugggagaggggaac

SEQ ID NO: 244654 - RNA, 32 nt, Human
ugaaagguugggucugaaaagucaucaccuac

SEQ ID NO: 244655 - RNA, 20 nt, Human
ugaaagguuuucgaguccua

SEQ ID NO: 244656 - RNA, 32 nt, Human
ugaaaguaaggguuuccgagcagccuuaucau

SEQ ID NO: 244657 - RNA, 32 nt, Human
ugaaaguacagaaucucaaccuuacagucuuu

SEQ ID NO: 244658 - RNA, 23 nt, Human
ugaaaguacgaggcuggaagaaa

SEQ ID NO: 244659 - RNA, 32 nt, Human
ugaaaguacugaggaagaguugcugagaagac

SEQ ID NO: 244660 - RNA, 32 nt, Human
ugaaaguacugaggaagaguugcugagacgac

SEQ ID NO: 244661 - RNA, 32 nt, Human
ugaaaguagaagcaagaaucaguugguuugcu

SEQ ID NO: 244662 - RNA, 32 nt, Human
ugaaaguaggaggugggggaagaggcaagccu

SEQ ID NO: 244663 - RNA, 32 nt, Human
ugaaaguagggagggacuaagucagucaucau

SEQ ID NO: 244664 - RNA, 32 nt, Human
ugaaaguaucugccuggcagugcaguaaauga

SEQ ID NO: 244665 - RNA, 32 nt, Human
ugaaaguaugauuucauuucccagaaaaugua

SEQ ID NO: 244666 - RNA, 32 nt, Human
ugaaaguauugcaguauugaugccauuguaga

SEQ ID NO: 244667 - RNA, 32 nt, Human
ugaaagucaaagauuccauuuuaaagccauug

SEQ ID NO: 244668 - RNA, 32 nt, Human
ugaaagucacauccuucuccugccucuguccc

SEQ ID NO: 244669 - RNA, 32 nt, Human
ugaaagucagggucggcuucuaaaaauuuguu

SEQ ID NO: 244670 - RNA, 32 nt, Human
ugaaaguccacuccuuucaugguuuuuccugc

SEQ ID NO: 244671 - RNA, 32 nt, Human
ugaaagucuauugcuguucugagagcuccuuu

SEQ ID NO: 244672 - RNA, 32 nt, Human
ugaaagucuuacugggcccuggggaagguauc

SEQ ID NO: 244673 - RNA, 32 nt, Human
ugaaagugacccugggcuggggcgccggggcg

SEQ ID NO: 244674 - RNA, 32 nt, Human
ugaaagugacucugcuuuuauucaucaaauug

SEQ ID NO: 244675 - RNA, 32 nt, Human
ugaaagugagaccagcugucccaguuggaagc

SEQ ID NO: 244676 - RNA, 32 nt, Human
ugaaagugaugcagagagccaaaaccagcauc

SEQ ID NO: 244677 - RNA, 32 nt, Human
ugaaagugccuucgcagacuuuugccagcaaa

SEQ ID NO: 244678 - RNA, 20 nt, Human
ugaaaguggaguccugagag

SEQ ID NO: 244679 - RNA, 32 nt, Human
ugaaaguggcucuucuaaccucagccaaacac

SEQ ID NO: 244680 - RNA, 32 nt, Human
ugaaaguggcugguugggagcagagcuaagug

SEQ ID NO: 244681 - RNA, 32 nt, Human
ugaaagugggaaagcuuucauuagaaauuugc

SEQ ID NO: 244682 - RNA, 32 nt, Human
ugaaaguguaggaggaaggaagagauacaaac

SEQ ID NO: 244683 - RNA, 32 nt, Human
ugaaagugucaucuucacugccaaucaggcaa

SEQ ID NO: 244684 - RNA, 20 nt, Human
ugaaaguuaaacuuuacuga

SEQ ID NO: 244685 - RNA, 32 nt, Human
ugaaaguuaguauuuuggcucucacaaagccu

SEQ ID NO: 244686 - RNA, 32 nt, Human
ugaaaguuauauucuuuugaaccacguucuaa

SEQ ID NO: 244687 - RNA, 31 nt, Human
ugaaaguugaaaucauaccuaccucauaagg

SEQ ID NO: 244688 - RNA, 21 nt, Human
ugaaaguuuagcccacugaga

SEQ ID NO: 244689 - RNA, 32 nt, Human
ugaaaguuuuuggaaaagaugcagggucugag

SEQ ID NO: 244690 - RNA, 23 nt, Human
ugaaaguuuuuuguuuuguuuug

SEQ ID NO: 244691 - RNA, 32 nt, Human
ugaaauaaaccuggaagcagaauuccugaaug

SEQ ID NO: 244692 - RNA, 32 nt, Human
ugaaauaaaugcugugacucagacauuaagag

SEQ ID NO: 244693 - RNA, 32 nt, Human
ugaaauaaccuagugacccauuucucaagcuc

SEQ ID NO: 244694 - RNA, 32 nt, Human
ugaaauaagagaauuagaccccagggagugac

SEQ ID NO: 244695 - RNA, 32 nt, Human
ugaaauaagauagugacccugaagcccuuagc

SEQ ID NO: 244696 - RNA, 20 nt, Human
ugaaauaagccauuuucuug

SEQ ID NO: 244697 - RNA, 32 nt, Human
ugaaauaaggagggacaugauggggaaggagu

SEQ ID NO: 244698 - RNA, 32 nt, Human
ugaaauacuacugcaauugcuucccuucuuaa

SEQ ID NO: 244699 - RNA, 32 nt, Human
ugaaauacuccucccaccacacacacaugcuc

SEQ ID NO: 244700 - RNA, 32 nt, Human
ugaaauacugaguuguucuguugacuuuugca

SEQ ID NO: 244701 - RNA, 32 nt, Human
ugaaauacugcaacaucugcugcaaucaguaa

SEQ ID NO: 244702 - RNA, 32 nt, Human
ugaaauagaaggccugcccuuccuuucucugu

SEQ ID NO: 244703 - RNA, 32 nt, Human
ugaaauagaauuugcaugucugccuuaauuaa

SEQ ID NO: 244704 - RNA, 32 nt, Human
ugaaauagauuucauuucuugugcacacagcc

SEQ ID NO: 244705 - RNA, 32 nt, Human
ugaaauauaaaccaaaugaaauauuuuaacug

SEQ ID NO: 244706 - RNA, 32 nt, Human
ugaaauauaaggcaccucccacuuuuauguau

SEQ ID NO: 244707 - RNA, 32 nt, Human
ugaaauauacaguacauugcaggaacugccuc

SEQ ID NO: 244708 - RNA, 32 nt, Human
ugaaauauauuuucucuuuuugaucuugugcu

SEQ ID NO: 244709 - RNA, 32 nt, Human
ugaaauaugcugcaaucauuucugcauccuua

SEQ ID NO: 244710 - RNA, 32 nt, Human
ugaaauaugucauugaauuguauuccagacac

SEQ ID NO: 244711 - RNA, 32 nt, Human
ugaaauauuuaucuugauuacugagcuuuuug

SEQ ID NO: 244712 - RNA, 32 nt, Human
ugaaaucaacagaggcaggagugaaguugugu

SEQ ID NO: 244713 - RNA, 32 nt, Human
ugaaaucacaccacuacacuccagccaaagca

SEQ ID NO: 244714 - RNA, 32 nt, Human
ugaaaucaccgcgccucacucgccucgacagu

SEQ ID NO: 244715 - RNA, 32 nt, Human
ugaaaucaggaguucaagaucagccuggcuaa

SEQ ID NO: 244716 - RNA, 32 nt, Human
ugaaaucagggaaaagcuaauaguaucagaca

SEQ ID NO: 244717 - RNA, 32 nt, Human
ugaaaucaggggauauucauuuguaaauuuua

SEQ ID NO: 244718 - RNA, 32 nt, Human
ugaaaucaggguggggccugacagccguagug

SEQ ID NO: 244719 - RNA, 32 nt, Human
ugaaaucauauuuaaagagaagaauccuggag

SEQ ID NO: 244720 - RNA, 32 nt, Human
ugaaaucauauuuggaauaaaaauuccagaau

SEQ ID NO: 244721 - RNA, 32 nt, Human
ugaaaucaugagggagguuguguaggaaagaa

SEQ ID NO: 244722 - RNA, 32 nt, Human
ugaaaucaugccacugcacccuagcuugggug

SEQ ID NO: 244723 - RNA, 32 nt, Human
ugaaaucccagaacauuguuugccaguaucuc

SEQ ID NO: 244724 - RNA, 32 nt, Human
ugaaaucccugccucuggcuuccuaaacccau

SEQ ID NO: 244725 - RNA, 32 nt, Human
ugaaauccuacagaccaaaauccacuugucag

SEQ ID NO: 244726 - RNA, 32 nt, Human
ugaaauccuaggccucuuccagaggccagaug

SEQ ID NO: 244727 - RNA, 32 nt, Human
ugaaauccuuucucgcaaucuuccugcauugu

SEQ ID NO: 244728 - RNA, 32 nt, Human
ugaaaucgacuugccuuugugaaauugaccag

SEQ ID NO: 244729 - RNA, 32 nt, Human
ugaaaucgcguaccacacuccagccuggguga

SEQ ID NO: 244730 - RNA, 32 nt, Human
ugaaaucgggcuucacgcgucuugccuugucc

SEQ ID NO: 244731 - RNA, 32 nt, Human
ugaaaucggugguucucaucuucuguuucuug

SEQ ID NO: 244732 - RNA, 32 nt, Human
ugaaaucuaauauguagcuaaaucugugacuu

SEQ ID NO: 244733 - RNA, 31 nt, Human
ugaaaucucaauaaauuauuuuugaguuuau

SEQ ID NO: 244734 - RNA, 32 nt, Human
ugaaaucuccaccucugcucucugacccuuga

SEQ ID NO: 244735 - RNA, 32 nt, Human
ugaaaucugaacacuacuuagggcuaugaaac

SEQ ID NO: 244736 - RNA, 32 nt, Human
ugaaaucugcuuguaaaacucucaucucauuu

SEQ ID NO: 244737 - RNA, 32 nt, Human
ugaaaucugggcccuggugccugcugaagauu

SEQ ID NO: 244738 - RNA, 20 nt, Human
ugaaaucuguguagguuuua

SEQ ID NO: 244739 - RNA, 21 nt, Human
ugaaaucuuuuaaaaauucaa

SEQ ID NO: 244740 - RNA, 19 nt, Human
ugaaaucuuuucaaaaauc

SEQ ID NO: 244741 - RNA, 29 nt, Human
ugaaaugaagugagaagagaaguuuagag

SEQ ID NO: 244742 - RNA, 32 nt, Human
ugaaaugaagugagacuaucagcuaguugugg

SEQ ID NO: 244743 - RNA, 21 nt, Human
ugaaaugaaugaauuaggaag

SEQ ID NO: 244744 - RNA, 31 nt, Human
ugaaaugacaucaucuugcauuuaaagugag

SEQ ID NO: 244745 - RNA, 32 nt, Human
ugaaaugacgccauugcacuccagccuaggca

SEQ ID NO: 244746 - RNA, 32 nt, Human
ugaaaugacgguauaacacaucuacugaaaaa

SEQ ID NO: 244747 - RNA, 32 nt, Human
ugaaaugacucaauuucuauugugguaagcuc

SEQ ID NO: 244748 - RNA, 20 nt, Human
ugaaaugacugaccaggaaa

SEQ ID NO: 244749 - RNA, 32 nt, Human
ugaaaugagaugggaaugauccagcucuuuca

SEQ ID NO: 244750 - RNA, 19 nt, Human
ugaaaugagauggguccca

SEQ ID NO: 244751 - RNA, 32 nt, Human
ugaaaugagccaauccacauuccauuauuuca

SEQ ID NO: 244752 - RNA, 24 nt, Human
ugaaaugagcuuuugcuuuauuuu

SEQ ID NO: 244753 - RNA, 22 nt, Human
ugaaaugagggaaggcaagaaa

SEQ ID NO: 244754 - RNA, 32 nt, Human
ugaaaugaggggacccugacuggagagguggg

SEQ ID NO: 244755 - RNA, 32 nt, Human
ugaaaugaggugugugggcuugucaacacaga

SEQ ID NO: 244756 - RNA, 32 nt, Human
ugaaaugagugauccugccucuggucccagca

SEQ ID NO: 244757 - RNA, 32 nt, Human
ugaaaugauccaauccaacuugaagucaauug

SEQ ID NO: 244758 - RNA, 32 nt, Human
ugaaaugaugcaggcugcuccuauguuggaaa

SEQ ID NO: 244759 - RNA, 32 nt, Human
ugaaaugcaagaaauaacaaugauggcagcaa

SEQ ID NO: 244760 - RNA, 32 nt, Human
ugaaaugcagccaagaagaggagaccgucggc

SEQ ID NO: 244761 - RNA, 32 nt, Human
ugaaaugcagcucccuguccaagugccuugga

SEQ ID NO: 244762 - RNA, 29 nt, Human
ugaaaugcaguggcauaaucucagcucac

SEQ ID NO: 244763 - RNA, 29 nt, Human
ugaaaugccaacaacgucgaggccugcac

SEQ ID NO: 244764 - RNA, 32 nt, Human
ugaaaugccuaugaaugucucaguuagugugu

SEQ ID NO: 244765 - RNA, 32 nt, Human
ugaaaugcuacuuaacuuacuauuucaaaggg

SEQ ID NO: 244766 - RNA, 23 nt, Human
ugaaaugcuagggggccagggaa

SEQ ID NO: 244767 - RNA, 32 nt, Human
ugaaauggaaacauuauuuugaaacguuguca

SEQ ID NO: 244768 - RNA, 32 nt, Human
ugaaauggaaucaagaggaaaauuguaauuga

SEQ ID NO: 244769 - RNA, 21 nt, Human
ugaaauggaaucuugcucugu

SEQ ID NO: 244770 - RNA, 32 nt, Human
ugaaauggagaaagggcuucaggcuggugacu

SEQ ID NO: 244771 - RNA, 32 nt, Human
ugaaauggaggcagaggugugggaggcagaag

SEQ ID NO: 244772 - RNA, 21 nt, Human
ugaaauggagucucgcucugu

SEQ ID NO: 244773 - RNA, 32 nt, Human
ugaaauggagucucgcucugucauucaggcug

SEQ ID NO: 244774 - RNA, 32 nt, Human
ugaaauggagucucgcucugucgcccaggcug

SEQ ID NO: 244775 - RNA, 21 nt, Human
ugaaauggagucuugcucugu

SEQ ID NO: 244776 - RNA, 32 nt, Human
ugaaauggagucuugcucugucacccaggcug

SEQ ID NO: 244777 - RNA, 32 nt, Human
ugaaauggagugaacccaggagagcucaacca

SEQ ID NO: 244778 - RNA, 32 nt, Human
ugaaauggagugagcccaggagagcucagcca

SEQ ID NO: 244779 - RNA, 32 nt, Human
ugaaauggcgccacugcacuccagccugggua

SEQ ID NO: 244780 - RNA, 32 nt, Human
ugaaauggcuguaaggacuccugagauaugug

SEQ ID NO: 244781 - RNA, 32 nt, Human
ugaaaugggacagcagaguaggccagccucug

SEQ ID NO: 244782 - RNA, 32 nt, Human
ugaaaugggaggacucaggaaggaggaucguc

SEQ ID NO: 244783 - RNA, 32 nt, Human
ugaaaugggaggaucacuugagcccaggaguu

SEQ ID NO: 244784 - RNA, 32 nt, Human
ugaaaugggaggaucucuugagcccaggaguu

SEQ ID NO: 244785 - RNA, 32 nt, Human
ugaaaugggauggaguagaacaacagcaggcu

SEQ ID NO: 244786 - RNA, 32 nt, Human
ugaaaugggauuucuggacuguucauugauac

SEQ ID NO: 244787 - RNA, 22 nt, Human
ugaaaugggcugaggcaggaaa

SEQ ID NO: 244788 - RNA, 32 nt, Human
ugaaauggggugcccggguuccucucguuuuu

SEQ ID NO: 244789 - RNA, 32 nt, Human
ugaaaugggguuguggggcagagcaggguuag

SEQ ID NO: 244790 - RNA, 32 nt, Human
ugaaauggugccacugcacuccagucugggca

SEQ ID NO: 244791 - RNA, 32 nt, Human
ugaaauguaauccccaaugcuggaggugggac

SEQ ID NO: 244792 - RNA, 32 nt, Human
ugaaauguaucuccugcaccagccugggccuc

SEQ ID NO: 244793 - RNA, 23 nt, Human
ugaaauguaugcauucacauuua

SEQ ID NO: 244794 - RNA, 32 nt, Human
ugaaauguauuaucugaaaggcuaccugaagc

SEQ ID NO: 244795 - RNA, 32 nt, Human
ugaaaugucagguuguuuagucacugaauaga

SEQ ID NO: 244796 - RNA, 32 nt, Human
ugaaaugucagucuuuucaguaaugaggauac

SEQ ID NO: 244797 - RNA, 32 nt, Human
ugaaaugucucucuucucaucuccuaucuccg

SEQ ID NO: 244798 - RNA, 32 nt, Human
ugaaaugucucuguguugcagauauguagaug

SEQ ID NO: 244799 - RNA, 32 nt, Human
ugaaauguuaccacccucugcuccagguccuc

SEQ ID NO: 244800 - RNA, 32 nt, Human
ugaaauguuuguaaucucauaagcacuuuaua

SEQ ID NO: 244801 - RNA, 23 nt, Human
ugacacgaucuuggcucacugca

SEQ ID NO: 244802 - RNA, 23 nt, Human
ugacacgaucuugucucacugca

SEQ ID NO: 244803 - RNA, 32 nt, Human
ugacacgauuagacacuccuccccacaaaggc

SEQ ID NO: 244804 - RNA, 32 nt, Human
ugacacgccggccaggaggucuguagcugggg

SEQ ID NO: 244805 - RNA, 32 nt, Human
ugacacggagucucgcucuguugcccaggcug

SEQ ID NO: 244806 - RNA, 32 nt, Human
ugacacgggaccccuuuucuacagaccucauc

SEQ ID NO: 244807 - RNA, 21 nt, Human
ugacacgugccuguaauccua

SEQ ID NO: 244808 - RNA, 21 nt, Human
ugacacgugccuguaguccca

SEQ ID NO: 244809 - RNA, 32 nt, Human
ugacacgugccuguagucccagcuacucggga

SEQ ID NO: 244810 - RNA, 32 nt, Human
ugacacgugccuguagucccagcuacucugga

SEQ ID NO: 244811 - RNA, 20 nt, Human
ugacacuaaagcugcuccuu

SEQ ID NO: 244812 - RNA, 32 nt, Human
ugacacuacaugugaucugccuggugaaggcu

SEQ ID NO: 244813 - RNA, 32 nt, Human
ugacacuacuugaacaagaaaaggagggggaa

SEQ ID NO: 244814 - RNA, 22 nt, Human
ugacacuagccugggcaacaca

SEQ ID NO: 244815 - RNA, 32 nt, Human
ugacacucagagagaucaggccaguuucccag

SEQ ID NO: 244816 - RNA, 32 nt, Human
ugacacucaguucugucacugucaaggaugca

SEQ ID NO: 244817 - RNA, 32 nt, Human
ugacacucaugcacagcagccauugcacgugc

SEQ ID NO: 244818 - RNA, 32 nt, Human
ugacacucuagugacuuccuggugaggcccag

SEQ ID NO: 244819 - RNA, 32 nt, Human
ugacacucucagagauuccugaugggcuuucu

SEQ ID NO: 244820 - RNA, 32 nt, Human
ugacacucucuccaaaaauccauuccauuguc

SEQ ID NO: 244821 - RNA, 32 nt, Human
ugacacucugcagacugcuaguguucugucua

SEQ ID NO: 244822 - RNA, 22 nt, Human
ugacacucuuuagagcuuuaau

SEQ ID NO: 244823 - RNA, 32 nt, Human
ugacacugagccugaggacgagaagguuguuu

SEQ ID NO: 244824 - RNA, 23 nt, Human
ugacacugcacccgacucccagu

SEQ ID NO: 244825 - RNA, 32 nt, Human
ugacacugcacuccagccugggcaacagagug

SEQ ID NO: 244826 - RNA, 32 nt, Human
ugacacugcacuccagccugggcgacagagug

SEQ ID NO: 244827 - RNA, 32 nt, Human
ugacacugcacuccagccugggugauagagug

SEQ ID NO: 244828 - RNA, 32 nt, Human
ugacacugcacuccagccuuggcaacaaagca

SEQ ID NO: 244829 - RNA, 32 nt, Human
ugacacugcacuucagccuggcugacagagca

SEQ ID NO: 244830 - RNA, 32 nt, Human
ugacacugcccuccagccugggugacagagug

SEQ ID NO: 244831 - RNA, 32 nt, Human
ugacacugccuaggcauccagcucagugucau

SEQ ID NO: 244832 - RNA, 32 nt, Human
ugacacugcugggcugggugaauggccugguc

SEQ ID NO: 244833 - RNA, 32 nt, Human
ugacacugcuuuggcaaggucauagggggugc

SEQ ID NO: 244834 - RNA, 32 nt, Human
ugacacuggccugucugaacucaccuggccug

SEQ ID NO: 244835 - RNA, 32 nt, Human
ugacacugggaggugggagggccaggccaacu

SEQ ID NO: 244836 - RNA, 32 nt, Human
ugacacuggugacuugacccuuccuagacacc

SEQ ID NO: 244837 - RNA, 32 nt, Human
ugacacugugccagagaguggcugguuuuaaa

SEQ ID NO: 244838 - RNA, 32 nt, Human
ugacacuguuacuuccucaggcuguuaccugc

SEQ ID NO: 244839 - RNA, 32 nt, Human
ugacacuuaccuccacccccauccagcacccu

SEQ ID NO: 244840 - RNA, 32 nt, Human
ugacacuucccugcaacccauccaccccuggu

SEQ ID NO: 244841 - RNA, 17 nt, Human
ugacacuucuuguguua

SEQ ID NO: 244842 - RNA, 23 nt, Human
ugacacuuggauuuacuucuuua

SEQ ID NO: 244843 - RNA, 32 nt, Human
ugacacuuggucauucuuccagccuccauguc

SEQ ID NO: 244844 - RNA, 32 nt, Human
ugacacuuucuccuugcugcuuuuucuucugu

SEQ ID NO: 244845 - RNA, 17 nt, Human
ugacacuuuuuguguug

SEQ ID NO: 244846 - RNA, 32 nt, Human
ugacagaaaaggcagaagcuggggcuuucugg

SEQ ID NO: 244847 - RNA, 32 nt, Human
ugacagaaaggacuuuugaguucuaauuaauc

SEQ ID NO: 244848 - RNA, 32 nt, Human
ugacagaaauugacuggacugucauuguguga

SEQ ID NO: 244849 - RNA, 32 nt, Human
ugacagaagguucauaugcaucacacaccacu

SEQ ID NO: 244850 - RNA, 32 nt, Human
ugacagaagugugagaccagcccagccaacau

SEQ ID NO: 244851 - RNA, 32 nt, Human
ugacagacacaaaauucuacugcauuugggcu

SEQ ID NO: 244852 - RNA, 32 nt, Human
ugacagacgccuguaaucccagcuacuuggga

SEQ ID NO: 244853 - RNA, 32 nt, Human
ugacagacuccucaucuucaggagacucagga

SEQ ID NO: 244854 - RNA, 32 nt, Human
ugacagacucuuccccuccucucccucugccu

SEQ ID NO: 244855 - RNA, 32 nt, Human
ugacagacugauagaaaguauuggcagaccag

SEQ ID NO: 244856 - RNA, 32 nt, Human
ugacagacuguuaucuccucugggugaccuca

SEQ ID NO: 244857 - RNA, 32 nt, Human
ugacagagaacucacaggaaguuacuucaagc

SEQ ID NO: 244858 - RNA, 32 nt, Human
ugacagagaaggcagaggggaguguggagugg

SEQ ID NO: 244859 - RNA, 32 nt, Human
ugacagagacacacgcccuugcccaccuuccu

SEQ ID NO: 244860 - RNA, 18 nt, Human
ugacagagaccuaagcca

SEQ ID NO: 244861 - RNA, 32 nt, Human
ugacagagaggaaggaggaggaaugagagggg

SEQ ID NO: 244862 - RNA, 32 nt, Human
ugacagagaugauccagacagagauguucagg

SEQ ID NO: 244863 - RNA, 32 nt, Human
ugacagagauggggaggggcagaggaauuuaa

SEQ ID NO: 244864 - RNA, 32 nt, Human
ugacagagccugggaaggagagacgaggaggc

SEQ ID NO: 244865 - RNA, 32 nt, Human
ugacagagcugcagaccccugccuugagucuc

SEQ ID NO: 244866 - RNA, 32 nt, Human
ugacagagcugcaucuugauuuagacuaaaag

SEQ ID NO: 244867 - RNA, 32 nt, Human
ugacagagcuguccaggauugcaguggauagg

SEQ ID NO: 244868 - RNA, 19 nt, Human
ugacagaguggaugggguc

SEQ ID NO: 244869 - RNA, 31 nt, Human
ugacagaguggggaaagauggggacugaggg

SEQ ID NO: 244870 - RNA, 32 nt, Human
ugacagaucacugaggggaggacuuguuuuuc

SEQ ID NO: 244871 - RNA, 32 nt, Human
ugacagaucacugcagccuccaacuccugggc

SEQ ID NO: 244872 - RNA, 32 nt, Human
ugacagaucagugcauuucccuucccuguagg

SEQ ID NO: 244873 - RNA, 32 nt, Human
ugacagaucucaauuuuauaguagugggaaag

SEQ ID NO: 244874 - RNA, 32 nt, Human
ugacagaugaggaaacggcgaggcagacaggu

SEQ ID NO: 244875 - RNA, 32 nt, Human
ugacagauuggcagagugcagggaggugagag

SEQ ID NO: 244876 - RNA, 32 nt, Human
ugacagcaaagaagguggugaagguuucacag

SEQ ID NO: 244877 - RNA, 32 nt, Human
ugacagcacacaaaucuuuaauuuuccuuuuu

SEQ ID NO: 244878 - RNA, 32 nt, Human
ugacagcacaucugcaggaagcaugagggucu

SEQ ID NO: 244879 - RNA, 32 nt, Human
ugacagcaccacaagcucaggcaucguugaag

SEQ ID NO: 244880 - RNA, 32 nt, Human
ugacagcaccacugcacagagcuuugggaggc

SEQ ID NO: 244881 - RNA, 32 nt, Human
ugacagcaccacugcacuccagccaggaauga

SEQ ID NO: 244882 - RNA, 32 nt, Human
ugacagcaccugccuggugaugcucuuggagg

SEQ ID NO: 244883 - RNA, 32 nt, Human
ugacagcacuuagacgaggcuugggggcaggg

SEQ ID NO: 244884 - RNA, 15 nt, Human
ugacagcacuuccuc

SEQ ID NO: 244885 - RNA, 32 nt, Human
ugacagcagccagcucaggaggcagaggacga

SEQ ID NO: 244886 - RNA, 32 nt, Human
ugacagcagcccuggugccccagccugcuagg

SEQ ID NO: 244887 - RNA, 32 nt, Human
ugacagcagggucugcccucuugagugugggg

SEQ ID NO: 244888 - RNA, 32 nt, Human
ugacagcaguaaggauaagaagaagaaaacua

SEQ ID NO: 244889 - RNA, 16 nt, Human
ugacagcaguggccca

SEQ ID NO: 244890 - RNA, 32 nt, Human
ugacagcauccuggcgacuccacaguggagcu

SEQ ID NO: 244891 - RNA, 32 nt, Human
ugacagcaucugauaaucuguugguuuauuuc

SEQ ID NO: 244892 - RNA, 32 nt, Human
ugacagcaugaagauaaugccugugguuaugc

SEQ ID NO: 244893 - RNA, 32 nt, Human
ugacagcauuuuagaagacagaacaggaauuc

SEQ ID NO: 244894 - RNA, 20 nt, Human
ugacagccaaggacuggaag

SEQ ID NO: 244895 - RNA, 32 nt, Human
ugacagccagcucacaguuucuugccugaagc

SEQ ID NO: 244896 - RNA, 32 nt, Human
ugacagccaggaccccaggcagcagcgaguga

SEQ ID NO: 244897 - RNA, 23 nt, Human
ugacagccauguuuucccggaga

SEQ ID NO: 244898 - RNA, 32 nt, Human
ugacagcccaagauagaaucagucccagagca

SEQ ID NO: 244899 - RNA, 32 nt, Human
ugacagcccccaccccuccccacugccagauc

SEQ ID NO: 244900 - RNA, 32 nt, Human
ugacagcccccaggccugggggcacagauccc

SEQ ID NO: 244901 - RNA, 32 nt, Human
ugacagcccugccuucugcccucugcccugca

SEQ ID NO: 244902 - RNA, 32 nt, Human
ugacagcccuugaaggugguagcccagcuccu

SEQ ID NO: 244903 - RNA, 32 nt, Human
ugacagccgagacucauuuccaaggcacagca

SEQ ID NO: 244904 - RNA, 32 nt, Human
ugacagccgcagccgggcucucagccagcggc

SEQ ID NO: 244905 - RNA, 32 nt, Human
ugacagccggcgcuacagccuggcagaucuga

SEQ ID NO: 244906 - RNA, 32 nt, Human
ugacagccgguguccuggaaagccccaagcag

SEQ ID NO: 244907 - RNA, 32 nt, Human
ugacagccuuucuugcccucugaccucaaagg

SEQ ID NO: 244908 - RNA, 32 nt, Human
ugacagcggcgccgcugugcucgcgaccccgg

SEQ ID NO: 244909 - RNA, 32 nt, Human
ugacagcgugagccaccacaccuggccaagaa

SEQ ID NO: 244910 - RNA, 32 nt, Human
ugacagcgugggcaucuucaggcacagccuug

SEQ ID NO: 244911 - RNA, 32 nt, Human
ugacagcuaagauccugaucaaauuggaggag

SEQ ID NO: 244912 - RNA, 32 nt, Human
ugacagcucacuggaacuuuucaucugcuugg

SEQ ID NO: 244913 - RNA, 32 nt, Human
ugacagcucccagguacuucaagguuggcccu

SEQ ID NO: 244914 - RNA, 32 nt, Human
ugacagcugcagaggcagggcccagugcuggc

SEQ ID NO: 244915 - RNA, 32 nt, Human
ugacagcugcagcugccuugccuugccgccgc

SEQ ID NO: 244916 - RNA, 32 nt, Human
ugacagcugcuugccaugacugaugcagacua

SEQ ID NO: 244917 - RNA, 32 nt, Human
ugacagcuggaaagagcgcggagccagcgccu

SEQ ID NO: 244918 - RNA, 32 nt, Human
ugacagcuuggucaggguguauuguagcuuau

SEQ ID NO: 244919 - RNA, 32 nt, Human
ugacagcuuuaucuccccaggagcagcaucuc

SEQ ID NO: 244920 - RNA, 32 nt, Human
ugacaggaauguuaccuucaauuguauguuac

SEQ ID NO: 244921 - RNA, 24 nt, Human
ugacaggaccaaggucucagcaca

SEQ ID NO: 244922 - RNA, 32 nt, Human
ugacaggagaagguuuaaauguucuugaaaag

SEQ ID NO: 244923 - RNA, 32 nt, Human
ugacaggagauggagaagcaccagcugaucug

SEQ ID NO: 244924 - RNA, 32 nt, Human
ugacaggagcuugggagcucgggagcuuggga

SEQ ID NO: 244925 - RNA, 32 nt, Human
ugacaggaggcagcagaaguugcagagaagag

SEQ ID NO: 244926 - RNA, 32 nt, Human
ugacaggauaaauauccaaaccauaucacuua

SEQ ID NO: 244927 - RNA, 23 nt, Human
ugacaggaucucggcucacugca

SEQ ID NO: 244928 - RNA, 32 nt, Human
ugacaggauggaccacguggccaucugaggaa

SEQ ID NO: 244929 - RNA, 18 nt, Human
ugacaggauggcuuucuc

SEQ ID NO: 244930 - RNA, 32 nt, Human
ugacaggaugggggaggguggggaggggaaga

SEQ ID NO: 244931 - RNA, 32 nt, Human
ugacaggauguggcacugcuugaggaggggca

SEQ ID NO: 244932 - RNA, 32 nt, Human
ugacaggcacauacaugagaacaggccaucuc

SEQ ID NO: 244933 - RNA, 32 nt, Human
ugacaggcacccaccaccacacccagcuaauu

SEQ ID NO: 244934 - RNA, 25 nt, Human
ugacaggcacccccuucugugggaa

SEQ ID NO: 244935 - RNA, 21 nt, Human
ugacaggcaccuguaauccca

SEQ ID NO: 244936 - RNA, 32 nt, Human
ugacaggcagaggguguuccugacagagggaa

SEQ ID NO: 244937 - RNA, 32 nt, Human
ugacaggcaguggcgugaucuuggcucacugc

SEQ ID NO: 244938 - RNA, 32 nt, Human
ugacaggcauggccggggucagcucuuucagc

SEQ ID NO: 244939 - RNA, 32 nt, Human
ugacaggccaugacuguagaguggucagaacu

SEQ ID NO: 244940 - RNA, 28 nt, Human
ugacaggcccaaugugccucauugagaa

SEQ ID NO: 244941 - RNA, 15 nt, Human
ugacaggcccgaggu

SEQ ID NO: 244942 - RNA, 32 nt, Human
ugacaggccgcggcugucuguguguccuucug

SEQ ID NO: 244943 - RNA, 19 nt, Human
ugacaggccuguggcggua

SEQ ID NO: 244944 - RNA, 32 nt, Human
ugacaggccuuuucacaaaggccccaaggaca

SEQ ID NO: 244945 - RNA, 32 nt, Human
ugacaggcgcagcgaaaggcagcccucugcua

SEQ ID NO: 244946 - RNA, 32 nt, Human
ugacaggcgcuguuccccacagccagcgccgc

SEQ ID NO: 244947 - RNA, 32 nt, Human
ugacagggaauggauuccaaacaccagugugu

SEQ ID NO: 244948 - RNA, 32 nt, Human
ugacagggacaaaugccucccuucccugcagc

SEQ ID NO: 244949 - RNA, 32 nt, Human
ugacagggacaggggagcaggaagccaaccca

SEQ ID NO: 244950 - RNA, 32 nt, Human
ugacagggaugcaauccagggugggauuucuu

SEQ ID NO: 244951 - RNA, 32 nt, Human
ugacagggcaggaagagaagaaaacggaggag

SEQ ID NO: 244952 - RNA, 32 nt, Human
ugacaggggcccugcuccucucugugguugga

SEQ ID NO: 244953 - RNA, 32 nt, Human
ugacagggggaggagcccgccgggagggccgg

SEQ ID NO: 244954 - RNA, 32 nt, Human
ugacaggguccccagggagaccgugucaguag

SEQ ID NO: 244955 - RNA, 21 nt, Human
ugacagggucucacucuguca

SEQ ID NO: 244956 - RNA, 25 nt, Human
ugacagggucuugcucugucauuca

SEQ ID NO: 244957 - RNA, 32 nt, Human
ugacaggguucaggaagacugacugggccacu

SEQ ID NO: 244958 - RNA, 32 nt, Human
ugacaggguugcagaagccaaggaguucggca

SEQ ID NO: 244959 - RNA, 32 nt, Human
ugacaggugcagcaaaccaccauggcacaugu

SEQ ID NO: 244960 - RNA, 21 nt, Human
ugacaggugccuguaauccca

SEQ ID NO: 244961 - RNA, 32 nt, Human
ugacaggugccuguaaucccagcuacucggua

SEQ ID NO: 244962 - RNA, 32 nt, Human
ugacaggugccuguaaucccagcuacuuggga

SEQ ID NO: 244963 - RNA, 32 nt, Human
ugacaggugccuguagucccagcuacucggga

SEQ ID NO: 244964 - RNA, 32 nt, Human
ugacaggugcugcugccucugagcccucccug

SEQ ID NO: 244965 - RNA, 21 nt, Human
ugacagguuccgguauucuga

SEQ ID NO: 244966 - RNA, 32 nt, Human
ugacagguuugcuacacacagccccggacugu

SEQ ID NO: 244967 - RNA, 32 nt, Human
ugacagguuuugcccaaggcuuugauaccugu

SEQ ID NO: 244968 - RNA, 32 nt, Human
ugacaguaacagcaucuuuaacacaacucuuu

SEQ ID NO: 244969 - RNA, 32 nt, Human
ugacaguaaccccuaccucacaggguuguugu

SEQ ID NO: 244970 - RNA, 32 nt, Human
ugacaguaacccuuccccggaaagaaauagaa

SEQ ID NO: 244971 - RNA, 32 nt, Human
ugacaguacaaggacuagauccacaggaaaca

SEQ ID NO: 244972 - RNA, 32 nt, Human
ugacaguaccaggagacaaaugacuuacagau

SEQ ID NO: 244973 - RNA, 32 nt, Human
ugacaguagcaccagcaacugcagugauacca

SEQ ID NO: 244974 - RNA, 32 nt, Human
ugacaguaguuauuucucagcuuuucagugau

SEQ ID NO: 244975 - RNA, 32 nt, Human
ugacaguaucagaagacacagcuucuuuaaug

SEQ ID NO: 244976 - RNA, 32 nt, Human
ugacagucaccaggaaggacaagggugcucug

SEQ ID NO: 244977 - RNA, 32 nt, Human
ugacagucaccuccucaccucugcuccuugcc

SEQ ID NO: 244978 - RNA, 32 nt, Human
ugacagucacugcauuugccugcuucuuucca

SEQ ID NO: 244979 - RNA, 32 nt, Human
ugacagucacugccacgguuuccccaggcagg

SEQ ID NO: 244980 - RNA, 32 nt, Human
ugacagucucaccaauuucagaaaaucauuaa

SEQ ID NO: 244981 - RNA, 32 nt, Human
ugacagugaacccacagugggagagaguuuuu

SEQ ID NO: 244982 - RNA, 32 nt, Human
ugacagugacuguccccaccuccuguguuagu

SEQ ID NO: 244983 - RNA, 32 nt, Human
ugacagugagcagauccagacaccagauccag

SEQ ID NO: 244984 - RNA, 32 nt, Human
ugacagugagggugaugccaucuacccugccc

SEQ ID NO: 244985 - RNA, 32 nt, Human
ugacagugagggugcguccagguucagauaga

SEQ ID NO: 244986 - RNA, 32 nt, Human
ugacagugaucugacauccacuaagcaaauuu

SEQ ID NO: 244987 - RNA, 32 nt, Human
ugacagugaugagcuaggugcagagagaguua

SEQ ID NO: 244988 - RNA, 32 nt, Human
ugacagugauucaccacuggugaugauaaaaa

SEQ ID NO: 244989 - RNA, 32 nt, Human
ugacagugcccagagugacagcuguauauugc

SEQ ID NO: 244990 - RNA, 32 nt, Human
ugacagugcuucuguucaaggauauaaggccc

SEQ ID NO: 244991 - RNA, 32 nt, Human
ugacaguggaugaauggauggacguacagagg

SEQ ID NO: 244992 - RNA, 21 nt, Human
ugacaguggcugcaguauuga

SEQ ID NO: 244993 - RNA, 32 nt, Human
ugacagugggguccucugcagggucagguccc

SEQ ID NO: 244994 - RNA, 32 nt, Human
ugacaguguggaccauggaaucaccagcuaga

SEQ ID NO: 244995 - RNA, 32 nt, Human
ugacaguguggcauuacugauaaguuauggaa

SEQ ID NO: 244996 - RNA, 32 nt, Human
ugacaguguguguagagcaugugccacccagc

SEQ ID NO: 244997 - RNA, 32 nt, Human
ugacaguguugaagcagggugaauaacuaggg

SEQ ID NO: 244998 - RNA, 20 nt, Human
ugacaguguuggucauccca

SEQ ID NO: 244999 - RNA, 32 nt, Human
ugacaguuaguaaacugcuccagggaaauaag

SEQ ID NO: 245000 - RNA, 32 nt, Human
ugacaguuccaugagcugggaacccgcucagu

SEQ ID NO: 245001 - RNA, 32 nt, Human
ugacaguucuccacacugugcaugcacccuug

SEQ ID NO: 245002 - RNA, 32 nt, Human
ugacaguuggagggaaagccagccugggggcu

SEQ ID NO: 245003 - RNA, 32 nt, Human
ugacaguuuccugaguggcucugccaauccau

SEQ ID NO: 245004 - RNA, 32 nt, Human
ugacaguuucugaggcagaagccguaucaugu

SEQ ID NO: 245005 - RNA, 31 nt, Human
ugacaguuuguggcaucuugccaaggguccc

SEQ ID NO: 245006 - RNA, 32 nt, Human
ugacauaaaugcugaagagacaggcauuguuu

SEQ ID NO: 245007 - RNA, 26 nt, Human
ugacauaagguaauccacccgccuca

SEQ ID NO: 245008 - RNA, 32 nt, Human
ugacauaaucccuuccuccugggaaacaccag

SEQ ID NO: 245009 - RNA, 32 nt, Human
ugacauaaucuugaucuuuuaauuuguaaaua

SEQ ID NO: 245010 - RNA, 32 nt, Human
ugacauaauuuaguuucauguaaugaaacuuu

SEQ ID NO: 245011 - RNA, 32 nt, Human
ugacauacacauccaccauggaaagggaagca

SEQ ID NO: 245012 - RNA, 32 nt, Human
ugacauaccuaaaacacguggcucugaccugu

SEQ ID NO: 245013 - RNA, 32 nt, Human
ugacauaccucagacgccucuggauccaagaa

SEQ ID NO: 245014 - RNA, 32 nt, Human
ugacauacuaguuguauugacagugccucacu

SEQ ID NO: 245015 - RNA, 32 nt, Human
ugacauacugaagcuccagccagggggauggg

SEQ ID NO: 245016 - RNA, 24 nt, Human
ugacauacuucuccuuuguauucu

SEQ ID NO: 245017 - RNA, 24 nt, Human
ugacauagacacuagguuuuuaca

SEQ ID NO: 245018 - RNA, 32 nt, Human
ugacauaguaccauugggguuaagucauuuuc

SEQ ID NO: 245019 - RNA, 32 nt, Human
ugacauauauagaaacauaaaucaggcuagag

SEQ ID NO: 245020 - RNA, 32 nt, Human
ugacauaucacaugucagccacugugauagag

SEQ ID NO: 245021 - RNA, 32 nt, Human
ugacauaugaugggacugcuuccccuacauua

SEQ ID NO: 245022 - RNA, 32 nt, Human
ugacauauguaaucccagcacuuugggaggcu

SEQ ID NO: 245023 - RNA, 21 nt, Human
ugacaucaacagugacucagu

SEQ ID NO: 245024 - RNA, 20 nt, Human
ugacaucaagcugcuucgau

SEQ ID NO: 245025 - RNA, 32 nt, Human
ugacaucaauuccaaagacagaagcagcugcu

SEQ ID NO: 245026 - RNA, 20 nt, Human
ugacaucacagggccucagu

SEQ ID NO: 245027 - RNA, 32 nt, Human
ugacaucacccaggaugcaaugauccaaaaga

SEQ ID NO: 245028 - RNA, 32 nt, Human
ugacaucacuggcauugcaccugggugugccc

SEQ ID NO: 245029 - RNA, 32 nt, Human
ugacaucagcgucgacuugccuuucccggggu

SEQ ID NO: 245030 - RNA, 32 nt, Human
ugacaucaggaguuugagaccaaccuggccaa

SEQ ID NO: 245031 - RNA, 32 nt, Human
ugacaucaggcagaggagagugcagccucaca

SEQ ID NO: 245032 - RNA, 25 nt, Human
ugacaucaggugauccaccugccuc

SEQ ID NO: 245033 - RNA, 32 nt, Human
ugacaucaguaguucaagaccagccuggccaa

SEQ ID NO: 245034 - RNA, 32 nt, Human
ugacaucauccagggagacacacaagguccca

SEQ ID NO: 245035 - RNA, 32 nt, Human
ugacaucauccagguaaauggcacccagguga

SEQ ID NO: 245036 - RNA, 20 nt, Human
ugacaucauccauuuagucu

SEQ ID NO: 245037 - RNA, 17 nt, Human
ugacaucaugaccucaa

SEQ ID NO: 245038 - RNA, 22 nt, Human
ugacaucauuaggcauucuuga

SEQ ID NO: 245039 - RNA, 32 nt, Human
ugacaucauucaaccagcucucguccuagcaa

SEQ ID NO: 245040 - RNA, 32 nt, Human
ugacauccaauacagaguucugguaaagauaa

SEQ ID NO: 245041 - RNA, 32 nt, Human
ugacauccaccaggagaucggcaggggugcuu

SEQ ID NO: 245042 - RNA, 32 nt, Human
ugacauccaccgacuucugcuccuuccagcag

SEQ ID NO: 245043 - RNA, 32 nt, Human
ugacaucccacacagcugucuguucugccagu

SEQ ID NO: 245044 - RNA, 32 nt, Human
ugacaucccaucuccuccucugcauuaaagau

SEQ ID NO: 245045 - RNA, 31 nt, Human
ugacaucccgcagaugagaccaaagccacau

SEQ ID NO: 245046 - RNA, 32 nt, Human
ugacauccuccagagauggccccuccucaccu

SEQ ID NO: 245047 - RNA, 32 nt, Human
ugacaucgcccccugaggacuuggcugcaacc

SEQ ID NO: 245048 - RNA, 32 nt, Human
ugacaucgcgccacugcacuucagccuggaca

SEQ ID NO: 245049 - RNA, 32 nt, Human
ugacaucggcaacuucgagcuccuguggaggc

SEQ ID NO: 245050 - RNA, 19 nt, Human
ugacaucguucccugggga

SEQ ID NO: 245051 - RNA, 32 nt, Human
ugacaucuaauucaagauuacaacaucuguua

SEQ ID NO: 245052 - RNA, 31 nt, Human
ugacaucuacuuuucuuagagacaugaagaa

SEQ ID NO: 245053 - RNA, 32 nt, Human
ugacaucuagaaucaccugccaccuggagccu

SEQ ID NO: 245054 - RNA, 32 nt, Human
ugacaucuagcuuugacaaucauaguauguuu

SEQ ID NO: 245055 - RNA, 32 nt, Human
ugacaucuccauccccaggcucucaaccgucu

SEQ ID NO: 245056 - RNA, 32 nt, Human
ugacaucugccuggagucccgccccugcccag

SEQ ID NO: 245057 - RNA, 32 nt, Human
ugacaucugccugggcuugagugcuacggacu

SEQ ID NO: 245058 - RNA, 32 nt, Human
ugacaucuguaauccccgcacuuugugaggcu

SEQ ID NO: 245059 - RNA, 32 nt, Human
ugacaucuucauuucugggcuacuacuaugac

SEQ ID NO: 245060 - RNA, 32 nt, Human
ugacaucuuccagaugcuggaugugcugcagg

SEQ ID NO: 245061 - RNA, 32 nt, Human
ugacaugaaaagaucuggcucauggggcagag

SEQ ID NO: 245062 - RNA, 32 nt, Human
ugacaugaaaccugggugcuacaguaaaagaa

SEQ ID NO: 245063 - RNA, 18 nt, Human
ugacaugaaaucuuuguu

SEQ ID NO: 245064 - RNA, 32 nt, Human
ugacaugaacccaggaggcggagcuugcagug

SEQ ID NO: 245065 - RNA, 19 nt, Human
ugacaugaauuuuauguua

SEQ ID NO: 245066 - RNA, 32 nt, Human
ugacaugagaaaagaggagcuguuuugguauu

SEQ ID NO: 245067 - RNA, 19 nt, Human
ugacaugagaacuugguua

SEQ ID NO: 245068 - RNA, 18 nt, Human
ugacaugagccuauguug

SEQ ID NO: 245069 - RNA, 32 nt, Human
ugacaugaggugcagaggcccacccagccccc

SEQ ID NO: 245070 - RNA, 32 nt, Human
ugacaugagguggccugaacaccugagggacu

SEQ ID NO: 245071 - RNA, 20 nt, Human
ugacaugauaagugguguug

SEQ ID NO: 245072 - RNA, 32 nt, Human
ugacaugaucauagcucacuccagccugaagc

SEQ ID NO: 245073 - RNA, 24 nt, Human
ugacaugaucauagcucacugcag

SEQ ID NO: 245074 - RNA, 32 nt, Human
ugacaugaucauagcucacugcagccuggaac

SEQ ID NO: 245075 - RNA, 17 nt, Human
ugacaugaucgcugugu

SEQ ID NO: 245076 - RNA, 23 nt, Human
ugacaugaucucagcucacugca

SEQ ID NO: 245077 - RNA, 32 nt, Human
ugacaugaucuccgcucacugcagccuccgcc

SEQ ID NO: 245078 - RNA, 23 nt, Human
ugacaugaucuuggcugacugca

SEQ ID NO: 245079 - RNA, 17 nt, Human
ugacaugauggguguua

SEQ ID NO: 245080 - RNA, 20 nt, Human
ugacaugauuuccucagugu

SEQ ID NO: 245081 - RNA, 32 nt, Human
ugacaugcacaccuccccugccccaccagccc

SEQ ID NO: 245082 - RNA, 21 nt, Human
ugacaugcaccuguaauccca

SEQ ID NO: 245083 - RNA, 32 nt, Human
ugacaugccaaacacccugcucagggcuggaa

SEQ ID NO: 245084 - RNA, 32 nt, Human
ugacaugcccugucacagggcguauguguucu

SEQ ID NO: 245085 - RNA, 32 nt, Human
ugacaugcccuucaccucccaccaucauuuua

SEQ ID NO: 245086 - RNA, 32 nt, Human
ugacaugccugcucccccuccaccuuccacca

SEQ ID NO: 245087 - RNA, 18 nt, Human
ugacaugcgucuguaaca

SEQ ID NO: 245088 - RNA, 21 nt, Human
ugacauggaaagaaaggucug

SEQ ID NO: 245089 - RNA, 29 nt, Human
ugacauggagaguaaccugucuggccugg

SEQ ID NO: 245090 - RNA, 32 nt, Human
ugacauggccauaacagaaggaggugccucug

SEQ ID NO: 245091 - RNA, 32 nt, Human
ugacauggcucuggacucuaaagaccaaacuu

SEQ ID NO: 245092 - RNA, 17 nt, Human
ugacauggcuuauguua

SEQ ID NO: 245093 - RNA, 32 nt, Human
ugacaugggacccaucugcuccuccagccaac

SEQ ID NO: 245094 - RNA, 32 nt, Human
ugacaugggaucuugcuauguuauccaggcug

SEQ ID NO: 245095 - RNA, 32 nt, Human
ugacaugggcagaguuucucuugcccuuaaag

SEQ ID NO: 245096 - RNA, 32 nt, Human
ugacauggggcuguggcagugggagacaccgc

SEQ ID NO: 245097 - RNA, 32 nt, Human
ugacauggucaugcgucacugcagccuccacc

SEQ ID NO: 245098 - RNA, 32 nt, Human
ugacaugucaugccuggagaaggaacaaggcu

SEQ ID NO: 245099 - RNA, 21 nt, Human
ugacaugugccuguaauccca

SEQ ID NO: 245100 - RNA, 32 nt, Human
ugacaugugccuguaaucccagcuacucagga

SEQ ID NO: 245101 - RNA, 32 nt, Human
ugacauguggggagaggaccagcugggugcuu

SEQ ID NO: 245102 - RNA, 32 nt, Human
ugacauuacuguauuuaagaaaacaccaugga

SEQ ID NO: 245103 - RNA, 32 nt, Human
ugacauuagagugaaaacuccuuccuuugggu

SEQ ID NO: 245104 - RNA, 32 nt, Human
ugacauuagcagcaucuuuaacacagccgugu

SEQ ID NO: 245105 - RNA, 32 nt, Human
ugacauuauacacagucuccucccaucacuug

SEQ ID NO: 245106 - RNA, 32 nt, Human
ugacauuauucuuccuagagaagauuauccug

SEQ ID NO: 245107 - RNA, 32 nt, Human
ugacauucaaagaugugucuguggacuucacc

SEQ ID NO: 245108 - RNA, 32 nt, Human
ugacauucagggauguggccauagacuucucu

SEQ ID NO: 245109 - RNA, 32 nt, Human
ugacauucagggauguggccauugacuucucu

SEQ ID NO: 245110 - RNA, 32 nt, Human
ugacauuccaccauugugauuuguuccugccc

SEQ ID NO: 245111 - RNA, 32 nt, Human
ugacauuccaugacgacauacaugcuacuuuu

SEQ ID NO: 245112 - RNA, 32 nt, Human
ugacauucccucccucccucccgcagggcuga

SEQ ID NO: 245113 - RNA, 32 nt, Human
ugacauuccugccucccuauuugccaggcuuu

SEQ ID NO: 245114 - RNA, 32 nt, Human
ugacauucugcuccccuccuccagaaaggacu

SEQ ID NO: 245115 - RNA, 32 nt, Human
ugacauucuggguggaggggagcccaagugag

SEQ ID NO: 245116 - RNA, 19 nt, Human
ugacauugaauuuguguug

SEQ ID NO: 245117 - RNA, 32 nt, Human
ugacauugccaaugagaucacugacauuccac

SEQ ID NO: 245118 - RNA, 32 nt, Human
ugacauugccuacuaccagagacagagauucu

SEQ ID NO: 245119 - RNA, 32 nt, Human
ugacauugcgccacugcacuccagcgcggaag

SEQ ID NO: 245120 - RNA, 32 nt, Human
ugacauugcuggaccccugaaaaccauuccau

SEQ ID NO: 245121 - RNA, 32 nt, Human
ugacauuggagaauuggagugcagucauaauc

SEQ ID NO: 245122 - RNA, 32 nt, Human
ugacauuggguaguguagaagcaacaagcaug

SEQ ID NO: 245123 - RNA, 32 nt, Human
ugacauugguggcaaggaauagccaagugacc

SEQ ID NO: 245124 - RNA, 32 nt, Human
ugacauugguuauucuggguugcccagaugcu

SEQ ID NO: 245125 - RNA, 32 nt, Human
ugacauuguagcagaaacagaaaaugagauua

SEQ ID NO: 245126 - RNA, 32 nt, Human
ugacauugucauuccgccugguuguuucccuu

SEQ ID NO: 245127 - RNA, 23 nt, Human
ugacauugugauccaccugccuc

SEQ ID NO: 245128 - RNA, 32 nt, Human
ugacauugugguuccucacgaaggagauauaa

SEQ ID NO: 245129 - RNA, 19 nt, Human
ugacauuucauccaugucc

SEQ ID NO: 245130 - RNA, 32 nt, Human
ugacauuucccuuucuucuuuccuuuuuguuu

SEQ ID NO: 245131 - RNA, 19 nt, Human
ugacauuucuguaguccca

SEQ ID NO: 245132 - RNA, 32 nt, Human
ugacauuugagcagacaccugaaggaggugag

SEQ ID NO: 245133 - RNA, 32 nt, Human
ugacauuugaggauguagcugugaacuucacu

SEQ ID NO: 245134 - RNA, 32 nt, Human
ugacauuuguuugguuauagugcaauauauuu

SEQ ID NO: 245135 - RNA, 32 nt, Human
ugacauuuuauuaauccucugugaauuuucug

SEQ ID NO: 245136 - RNA, 32 nt, Human
ugacauuuucaccgugacauuuuuagccauuu

SEQ ID NO: 245137 - RNA, 32 nt, Human
ugacauuuucuccccuuccucacuuacaguca

SEQ ID NO: 245138 - RNA, 32 nt, Human
ugacauuuuguuaguaaagaaaaccggauggu

SEQ ID NO: 245139 - RNA, 32 nt, Human
ugaccaaaaauuaaggaaggaaaacacaguuu

SEQ ID NO: 245140 - RNA, 32 nt, Human
ugaccaaaagagaccuuguuuucuuugagaag

SEQ ID NO: 245141 - RNA, 32 nt, Human
ugaccaaaauggagaaaccccaucucuacuaa

SEQ ID NO: 245142 - RNA, 32 nt, Human
ugaccaaaccagccuugggagcguucuguccu

SEQ ID NO: 245143 - RNA, 32 nt, Human
ugaccaaaccucaguggaggggccucugcuuc

SEQ ID NO: 245144 - RNA, 32 nt, Human
ugaccaaagaugaccugugguaagcaaccugg

SEQ ID NO: 245145 - RNA, 32 nt, Human
ugaccaaauaucuacaggaggcagccauuugg

SEQ ID NO: 245146 - RNA, 32 nt, Human
ugaccaaaucacccaaucccaguucuuccugc

SEQ ID NO: 245147 - RNA, 32 nt, Human
ugaccaaaugcguagauuugggaucuugaauc

SEQ ID NO: 245148 - RNA, 32 nt, Human
ugaccaacacggagaaaccccaucucuacuaa

SEQ ID NO: 245149 - RNA, 32 nt, Human
ugaccaacacggagaaaccccgucucuacuaa

SEQ ID NO: 245150 - RNA, 32 nt, Human
ugaccaacacggugaaaccccaucucuacuaa

SEQ ID NO: 245151 - RNA, 32 nt, Human
ugaccaacacggugaaaccccgucucuacuaa

SEQ ID NO: 245152 - RNA, 32 nt, Human
ugaccaacacugagaaaccccaucucuauuaa

SEQ ID NO: 245153 - RNA, 21 nt, Human
ugaccaacauagugaaacccc

SEQ ID NO: 245154 - RNA, 32 nt, Human
ugaccaacauagugaaaccccaucucuacuaa

SEQ ID NO: 245155 - RNA, 32 nt, Human
ugaccaacauagugaaaccccaucucuacuga

SEQ ID NO: 245156 - RNA, 30 nt, Human
ugaccaacauaguuucaccccaucucuacu

SEQ ID NO: 245157 - RNA, 32 nt, Human
ugaccaacaugaagaaaccccaucucuacuaa

SEQ ID NO: 245158 - RNA, 32 nt, Human
ugaccaacaugacaaaaccccgucucuacuaa

SEQ ID NO: 245159 - RNA, 32 nt, Human
ugaccaacaugacgaaaccccgucucuacuaa

SEQ ID NO: 245160 - RNA, 32 nt, Human
ugaccaacaugcugaaaccccaucucuauuag

SEQ ID NO: 245161 - RNA, 32 nt, Human
ugaccaacauggaaaaaccccgucucuacuaa

SEQ ID NO: 245162 - RNA, 32 nt, Human
ugaccaacauggacaaaccccgucucuacuaa

SEQ ID NO: 245163 - RNA, 32 nt, Human
ugaccaacauggagaaaccccaucuccacuaa

SEQ ID NO: 245164 - RNA, 32 nt, Human
ugaccaacauggagaaaccccaucucuacuaa

SEQ ID NO: 245165 - RNA, 32 nt, Human
ugaccaacauggagaaaccccaucucucccga

SEQ ID NO: 245166 - RNA, 32 nt, Human
ugaccaacauggagaaaccccgucucuacuaa

SEQ ID NO: 245167 - RNA, 32 nt, Human
ugaccaacauggagaaaccccgucucuauugg

SEQ ID NO: 245168 - RNA, 32 nt, Human
ugaccaacauggagaaaccccgucucugcuaa

SEQ ID NO: 245169 - RNA, 32 nt, Human
ugaccaacauggagaaacgccaucucuacuaa

SEQ ID NO: 245170 - RNA, 32 nt, Human
ugaccaacauggagaaacuccaucucuacuaa

SEQ ID NO: 245171 - RNA, 32 nt, Human
ugaccaacauggagaaacuccgucucuacuaa

SEQ ID NO: 245172 - RNA, 32 nt, Human
ugaccaacauggagaaaucccgucucuacuaa

SEQ ID NO: 245173 - RNA, 32 nt, Human
ugaccaacauggagaaaugccaucucuacuaa

SEQ ID NO: 245174 - RNA, 32 nt, Human
ugaccaacauggagaaccccaucucuacuaaa

SEQ ID NO: 245175 - RNA, 32 nt, Human
ugaccaacauggagaagccccgucucuacuaa

SEQ ID NO: 245176 - RNA, 32 nt, Human
ugaccaacauggauaaaucccaucucuacuaa

SEQ ID NO: 245177 - RNA, 32 nt, Human
ugaccaacauggcaaaaccccgucucuacuaa

SEQ ID NO: 245178 - RNA, 32 nt, Human
ugaccaacauggcaaaaccccgucuguacuaa

SEQ ID NO: 245179 - RNA, 27 nt, Human
ugaccaacauggcaaaacccugucucu

SEQ ID NO: 245180 - RNA, 32 nt, Human
ugaccaacauggcaaaacccugucucuacuaa

SEQ ID NO: 245181 - RNA, 32 nt, Human
ugaccaacauggccaaaaacugucucuacuaa

SEQ ID NO: 245182 - RNA, 21 nt, Human
ugaccaacauggcgaaacccc

SEQ ID NO: 245183 - RNA, 32 nt, Human
ugaccaacauggcgaaaccccaucucuacuaa

SEQ ID NO: 245184 - RNA, 32 nt, Human
ugaccaacauggcgaaaccccauuucuacuaa

SEQ ID NO: 245185 - RNA, 32 nt, Human
ugaccaacauggcgaaaccccgucucuacuaa

SEQ ID NO: 245186 - RNA, 32 nt, Human
ugaccaacauggcgaaaccccgucucuagcaa

SEQ ID NO: 245187 - RNA, 32 nt, Human
ugaccaacauggggauaccccgucucuacuaa

SEQ ID NO: 245188 - RNA, 32 nt, Human
ugaccaacauggugaaacaccaucucuacuaa

SEQ ID NO: 245189 - RNA, 32 nt, Human
ugaccaacauggugaaaccccaucucuacaaa

SEQ ID NO: 245190 - RNA, 32 nt, Human
ugaccaacauggugaaaccccaucucuacgaa

SEQ ID NO: 245191 - RNA, 32 nt, Human
ugaccaacauggugaaaccccaucucuacuaa

SEQ ID NO: 245192 - RNA, 32 nt, Human
ugaccaacauggugaaaccccaucucuacuua

SEQ ID NO: 245193 - RNA, 32 nt, Human
ugaccaacauggugaaaccccgucucuacaaa

SEQ ID NO: 245194 - RNA, 32 nt, Human
ugaccaacauggugaaaccccgucucuacuaa

SEQ ID NO: 245195 - RNA, 32 nt, Human
ugaccaacauggugaaaccccgucuuuauuaa

SEQ ID NO: 245196 - RNA, 23 nt, Human
ugaccaacauggugaaacccugu

SEQ ID NO: 245197 - RNA, 32 nt, Human
ugaccaacauggugaaacgccaucucuacuaa

SEQ ID NO: 245198 - RNA, 32 nt, Human
ugaccaacauggugaaacuccaucucuacuaa

SEQ ID NO: 245199 - RNA, 32 nt, Human
ugaccaacauggugaaaucccgucucuauuaa

SEQ ID NO: 245200 - RNA, 32 nt, Human
ugaccaacauggugaaaugaaaccccaucuca

SEQ ID NO: 245201 - RNA, 32 nt, Human
ugaccaacaugucgaaaucccgucucuacuga

SEQ ID NO: 245202 - RNA, 32 nt, Human
ugaccaaccuggagaaaccccgucucuacuaa

SEQ ID NO: 245203 - RNA, 32 nt, Human
ugaccaacguggagaaaccccaucucuacuaa

SEQ ID NO: 245204 - RNA, 32 nt, Human
ugaccaacguggagaaaccccgucucuauuaa

SEQ ID NO: 245205 - RNA, 32 nt, Human
ugaccaacguggagaaaccccgucuuuacuaa

SEQ ID NO: 245206 - RNA, 32 nt, Human
ugaccaacguggagaaaugccaucucuacuaa

SEQ ID NO: 245207 - RNA, 32 nt, Human
ugaccaacguggugaaaccccaucucuacuaa

SEQ ID NO: 245208 - RNA, 32 nt, Human
ugaccaacguggugaaaccccgucucuacuaa

SEQ ID NO: 245209 - RNA, 32 nt, Human
ugaccaacguggugaaacuccgucucuacuaa

SEQ ID NO: 245210 - RNA, 32 nt, Human
ugaccaagaggaccaggaggaaccugacucag

SEQ ID NO: 245211 - RNA, 22 nt, Human
ugaccaagauucgccaaucuca

SEQ ID NO: 245212 - RNA, 32 nt, Human
ugaccaagcuggucucuaacuccugggcuuaa

SEQ ID NO: 245213 - RNA, 32 nt, Human
ugaccaaggucaaggggcaggugcagaggugg

SEQ ID NO: 245214 - RNA, 32 nt, Human
ugaccaagguggugaaaccccaucucuaguua

SEQ ID NO: 245215 - RNA, 32 nt, Human
ugaccaagguggugaaaccccgucucuacuaa

SEQ ID NO: 245216 - RNA, 32 nt, Human
ugaccaaguagggccugucacaccaggguggc

SEQ ID NO: 245217 - RNA, 23 nt, Human
ugaccaagugauccaccugcuuc

SEQ ID NO: 245218 - RNA, 32 nt, Human
ugaccaauaugaugaaaccccgucucuacuaa

SEQ ID NO: 245219 - RNA, 32 nt, Human
ugaccaauauggugaaaccccaucucuacuaa

SEQ ID NO: 245220 - RNA, 32 nt, Human
ugaccaauauggugaaaccccgucucuacuaa

SEQ ID NO: 245221 - RNA, 32 nt, Human
ugaccaauccccauggcagacagcgggcuggu

SEQ ID NO: 245222 - RNA, 32 nt, Human
ugaccaaucucugugacucgcuuagcugaaac

SEQ ID NO: 245223 - RNA, 32 nt, Human
ugaccaaugcccacuuccccuccugggucacc

SEQ ID NO: 245224 - RNA, 32 nt, Human
ugaccaauguggucaaaccccgucucuacuaa

SEQ ID NO: 245225 - RNA, 32 nt, Human
ugaccacaaagaaaaucaacuugcuacuacau

SEQ ID NO: 245226 - RNA, 20 nt, Human
ugaccacaaaugauauuguc

SEQ ID NO: 245227 - RNA, 20 nt, Human
ugaccacaaauguguccggg

SEQ ID NO: 245228 - RNA, 32 nt, Human
ugaccacacacagcaagaccugggacauggca

SEQ ID NO: 245229 - RNA, 20 nt, Human
ugaccacacagccuacaccc

SEQ ID NO: 245230 - RNA, 31 nt, Human
ugaccacacagcuagagcaccagagcccuuu

SEQ ID NO: 245231 - RNA, 21 nt, Human
ugaccacacaggcaccugccu

SEQ ID NO: 245232 - RNA, 32 nt, Human
ugaccacacugcuucccuuucucaguuccuga

SEQ ID NO: 245233 - RNA, 32 nt, Human
ugaccacagauucccagagggccaggugugga

SEQ ID NO: 245234 - RNA, 32 nt, Human
ugaccacagcaaaguaaccacugccagaugcu

SEQ ID NO: 245235 - RNA, 18 nt, Human
ugaccacagcuggcaguc

SEQ ID NO: 245236 - RNA, 32 nt, Human
ugaccacagggaggggacagcucagugacugg

SEQ ID NO: 245237 - RNA, 21 nt, Human
ugaccacaggggcuguggguc

SEQ ID NO: 245238 - RNA, 32 nt, Human
ugaccacagucuguaauuccccacuucaauac

SEQ ID NO: 245239 - RNA, 31 nt, Human
ugaccacaguuucagcgaugccucaggucuc

SEQ ID NO: 245240 - RNA, 25 nt, Human
ugaccacaugugguccacccaccuu

SEQ ID NO: 245241 - RNA, 22 nt, Human
ugaccacauuguacccauuuca

SEQ ID NO: 245242 - RNA, 24 nt, Human
ugaccaccaagguugcggcaggug

SEQ ID NO: 245243 - RNA, 32 nt, Human
ugaccaccauggagaaaccccgucucuacuga

SEQ ID NO: 245244 - RNA, 32 nt, Human
ugaccaccccugcaggcauccaaaggagcaca

SEQ ID NO: 245245 - RNA, 32 nt, Human
ugaccacccggcgaagugcacacacccagaag

SEQ ID NO: 245246 - RNA, 32 nt, Human
ugaccaccugauggacgugcugggcagcaugg

SEQ ID NO: 245247 - RNA, 32 nt, Human
ugaccacgcaccuccacgccacugccuccccc

SEQ ID NO: 245248 - RNA, 23 nt, Human
ugaccacgugauccgcccaccuc

SEQ ID NO: 245249 - RNA, 23 nt, Human
ugaccacgugcuacccccaugcu

SEQ ID NO: 245250 - RNA, 32 nt, Human
ugaccacgugggaacagccugcagugagcggu

SEQ ID NO: 245251 - RNA, 32 nt, Human
ugaccacguucccagggccuucacugaucaga

SEQ ID NO: 245252 - RNA, 32 nt, Human
ugaccacucuugggagugcugcagucuuuaau

SEQ ID NO: 245253 - RNA, 24 nt, Human
ugaccacugaauucacuccaguca

SEQ ID NO: 245254 - RNA, 32 nt, Human
ugaccacugcaaucccagcgcccaaggaaggc

SEQ ID NO: 245255 - RNA, 32 nt, Human
ugaccacugcagccuccaccuccuaggcucaa

SEQ ID NO: 245256 - RNA, 32 nt, Human
ugaccacugccaugcugaccugacaggcuccg

SEQ ID NO: 245257 - RNA, 32 nt, Human
ugaccacugcuuccugucuacccucagagggu

SEQ ID NO: 245258 - RNA, 32 nt, Human
ugaccacuucuuuguagccaccaauuguagug

SEQ ID NO: 245259 - RNA, 32 nt, Human
ugaccagacggcgggucuccaucuucuuucac

SEQ ID NO: 245260 - RNA, 32 nt, Human
ugaccagagacagaacugguccaucauguuug

SEQ ID NO: 245261 - RNA, 32 nt, Human
ugaccagagaggcugggcagaggcagagguca

SEQ ID NO: 245262 - RNA, 32 nt, Human
ugaccagaggagagcaugagggguggggcuuu

SEQ ID NO: 245263 - RNA, 22 nt, Human
ugaccagaucuagcccaucuua

SEQ ID NO: 245264 - RNA, 22 nt, Human
ugaccagcaaggucagaggccc

SEQ ID NO: 245265 - RNA, 32 nt, Human
ugaccagcaccaugcuucuccuggugacaagc

SEQ ID NO: 245266 - RNA, 32 nt, Human
ugaccagcauucucuucuugguaacaucuacu

SEQ ID NO: 245267 - RNA, 32 nt, Human
ugaccagccauggucuggacugugaguuuacu

SEQ ID NO: 245268 - RNA, 32 nt, Human
ugaccagcccaaggccacacagcuggucugag

SEQ ID NO: 245269 - RNA, 32 nt, Human
ugaccagcccaggcguuggguguuagucugca

SEQ ID NO: 245270 - RNA, 20 nt, Human
ugaccagccgugagcauguu

SEQ ID NO: 245271 - RNA, 32 nt, Human
ugaccagccugaccaacauagugaaaccccau

SEQ ID NO: 245272 - RNA, 20 nt, Human
ugaccagccugggcaacaua

SEQ ID NO: 245273 - RNA, 32 nt, Human
ugaccagcgaagagagagagcuguaggccagc

SEQ ID NO: 245274 - RNA, 32 nt, Human
ugaccagcuagugccuugucuucuccugccuc

SEQ ID NO: 245275 - RNA, 32 nt, Human
ugaccagcucacuugcagacacccugccggaa

SEQ ID NO: 245276 - RNA, 32 nt, Human
ugaccagcuguggucaggagagccucagcagg

SEQ ID NO: 245277 - RNA, 32 nt, Human
ugaccaggaaccugggcgagcagcggcggggg

SEQ ID NO: 245278 - RNA, 32 nt, Human
ugaccaggagugugugaaugccuuccaggagg

SEQ ID NO: 245279 - RNA, 32 nt, Human
ugaccaggaguucgaggcugcagugagccgag

SEQ ID NO: 245280 - RNA, 32 nt, Human
ugaccaggcaagcugugaucugaaaggagcaa

SEQ ID NO: 245281 - RNA, 32 nt, Human
ugaccaggccauccuucgcuggggugaacgga

SEQ ID NO: 245282 - RNA, 32 nt, Human
ugaccaggccugggcccaugugcccugggcaa

SEQ ID NO: 245283 - RNA, 21 nt, Human
ugaccaggcuggaguauagug

SEQ ID NO: 245284 - RNA, 32 nt, Human
ugaccaggcuggucuugaaccccugaccucag

SEQ ID NO: 245285 - RNA, 32 nt, Human
ugaccaggcuuaguugcuucccaccccagccu

SEQ ID NO: 245286 - RNA, 32 nt, Human
ugaccaggggcaaaauaggcuuuuaccgcugc

SEQ ID NO: 245287 - RNA, 32 nt, Human
ugaccagucaccuucaaagaugccauuaaggg

SEQ ID NO: 245288 - RNA, 32 nt, Human
ugaccagucgugguuacucccugcugccaggu

SEQ ID NO: 245289 - RNA, 32 nt, Human
ugaccagugguccccaguaccaggccagcgaa

SEQ ID NO: 245290 - RNA, 32 nt, Human
ugaccaguucccaaucucguccucugucccca

SEQ ID NO: 245291 - RNA, 32 nt, Human
ugaccauaaagaaacuaaagaaaaagugcucc

SEQ ID NO: 245292 - RNA, 32 nt, Human
ugaccauaccagugcauuccagccuggguaca

SEQ ID NO: 245293 - RNA, 32 nt, Human
ugaccauagaggcagagauuggagugaagugg

SEQ ID NO: 245294 - RNA, 32 nt, Human
ugaccaucugucuccagccaggccaccccuuu

SEQ ID NO: 245295 - RNA, 18 nt, Human
ugaccaugagaugggguc

SEQ ID NO: 245296 - RNA, 30 nt, Human
ugaccaugagccaccagguaaagggccuga

SEQ ID NO: 245297 - RNA, 32 nt, Human
ugaccaugaggaggaggaggggaaagcgccag

SEQ ID NO: 245298 - RNA, 32 nt, Human
ugaccaugaugcugggguuaccucacaguccc

SEQ ID NO: 245299 - RNA, 32 nt, Human
ugaccaugcaccccugcaucuuccugcugggc

SEQ ID NO: 245300 - RNA, 32 nt, Human
ugaccauggcagacaucaccaaucaagugcag

SEQ ID NO: 245301 - RNA, 25 nt, Human
ugaccaugucauuccaccugcuuua

SEQ ID NO: 245302 - RNA, 22 nt, Human
ugaccaugucugugagcuccua

SEQ ID NO: 245303 - RNA, 32 nt, Human
ugaccauguuggccaggauggucucgauaucc

SEQ ID NO: 245304 - RNA, 20 nt, Human
ugaccauuaaaaacacagca

SEQ ID NO: 245305 - RNA, 32 nt, Human
ugaccauuauagaacaacaaacugucaaaggg

SEQ ID NO: 245306 - RNA, 22 nt, Human
ugaccauuucccuuguauuuuu

SEQ ID NO: 245307 - RNA, 32 nt, Human
ugacccaaagugaaggacauugccgggagagg

SEQ ID NO: 245308 - RNA, 32 nt, Human
ugacccaaauaaauugggaaaggaggggguca

SEQ ID NO: 245309 - RNA, 32 nt, Human
ugacccaacugauccugcuccagcagcacacc

SEQ ID NO: 245310 - RNA, 32 nt, Human
ugacccaagcccacacagagacuugcacagcu

SEQ ID NO: 245311 - RNA, 32 nt, Human
ugacccaaggccuccugucucccuucaaaggg

SEQ ID NO: 245312 - RNA, 32 nt, Human
ugacccacaagcuuuuguucucucaguacuug

SEQ ID NO: 245313 - RNA, 32 nt, Human
ugacccacacagcgaaaccccgucucuacuaa

SEQ ID NO: 245314 - RNA, 21 nt, Human
ugacccacaccuguaauccca

SEQ ID NO: 245315 - RNA, 32 nt, Human
ugacccacaccuguaaucccagcacuuuggga

SEQ ID NO: 245316 - RNA, 32 nt, Human
ugacccacauggagaaacgccaucucuacuaa

SEQ ID NO: 245317 - RNA, 32 nt, Human
ugacccacauggucaagaccaggcagaagcuc

SEQ ID NO: 245318 - RNA, 32 nt, Human
ugacccaccacugucaggucucagagccaccc

SEQ ID NO: 245319 - RNA, 32 nt, Human
ugacccaccauggggcucagcaucuuuuugcu

SEQ ID NO: 245320 - RNA, 32 nt, Human
ugacccacccaccuaccuuugcaucaccuacc

SEQ ID NO: 245321 - RNA, 32 nt, Human
ugacccaccgcgucaagccucugacaacuauu

SEQ ID NO: 245322 - RNA, 32 nt, Human
ugacccacugcauuccagccuggcgacagagc

SEQ ID NO: 245323 - RNA, 32 nt, Human
ugacccacugcuuuuggucugugugaugauga

SEQ ID NO: 245324 - RNA, 32 nt, Human
ugacccagaaggcaguuggcagugggcuaccc

SEQ ID NO: 245325 - RNA, 20 nt, Human
ugacccagacaugccugucc

SEQ ID NO: 245326 - RNA, 16 nt, Human
ugacccagaccugaca

SEQ ID NO: 245327 - RNA, 32 nt, Human
ugacccagagccucugccugugcacugcaagc

SEQ ID NO: 245328 - RNA, 32 nt, Human
ugacccagagccugcacgcuuggucaugaagc

SEQ ID NO: 245329 - RNA, 18 nt, Human
ugacccagcacaguuggc

SEQ ID NO: 245330 - RNA, 21 nt, Human
ugacccagcccgagauggagu

SEQ ID NO: 245331 - RNA, 32 nt, Human
ugacccagccucagaacccacaugucaucccc

SEQ ID NO: 245332 - RNA, 32 nt, Human
ugacccagccuccaacucaucuccuuccuguc

SEQ ID NO: 245333 - RNA, 32 nt, Human
ugacccagccugggucuuccaggagaugcugu

SEQ ID NO: 245334 - RNA, 32 nt, Human
ugacccaggaagcggagguugcagugagccaa

SEQ ID NO: 245335 - RNA, 32 nt, Human
ugacccaggaaguucugggaguugccguuuuu

SEQ ID NO: 245336 - RNA, 32 nt, Human
ugacccaggaggcagagguugcagugagccaa

SEQ ID NO: 245337 - RNA, 32 nt, Human
ugacccaggaggcggagguugcggugacccuc

SEQ ID NO: 245338 - RNA, 32 nt, Human
ugacccaggaggucugguguagggggugcucc

SEQ ID NO: 245339 - RNA, 32 nt, Human
ugacccaggagguggaggucgcagugagccga

SEQ ID NO: 245340 - RNA, 32 nt, Human
ugacccaggaguucaagaccagccuggccaac

SEQ ID NO: 245341 - RNA, 32 nt, Human
ugacccaggauggcucuacuccccagccuuca

SEQ ID NO: 245342 - RNA, 32 nt, Human
ugacccaggcaucuugauuugcaaaaucacaa

SEQ ID NO: 245343 - RNA, 32 nt, Human
ugacccaggcggccguggaaacccaccugcag

SEQ ID NO: 245344 - RNA, 22 nt, Human
ugacccaggcuggaaugcaaug

SEQ ID NO: 245345 - RNA, 23 nt, Human
ugacccaggcuggaaugcaaugg

SEQ ID NO: 245346 - RNA, 32 nt, Human
ugacccaggcuggaaugcaauggcucacugca

SEQ ID NO: 245347 - RNA, 21 nt, Human
ugacccaggcuggaguguagu

SEQ ID NO: 245348 - RNA, 32 nt, Human
ugacccaggcuggaguguaguagcuauucaca

SEQ ID NO: 245349 - RNA, 32 nt, Human
ugacccaggcuugggagccagaaacaagugug

SEQ ID NO: 245350 - RNA, 32 nt, Human
ugacccaggggaaggaaguggggaaggggcgg

SEQ ID NO: 245351 - RNA, 32 nt, Human
ugacccaguggccaccacucccaccgggugac

SEQ ID NO: 245352 - RNA, 32 nt, Human
ugacccaucuagcuucagcuguauccauuuuc

SEQ ID NO: 245353 - RNA, 32 nt, Human
ugacccaucugucagcuuuuucccagggagcc

SEQ ID NO: 245354 - RNA, 32 nt, Human
ugacccaucuucuaccaggcagaucuuuauua

SEQ ID NO: 245355 - RNA, 16 nt, Human
ugacccaugccugccc

SEQ ID NO: 245356 - RNA, 32 nt, Human
ugacccauggggacccaugguaggacccucgg

SEQ ID NO: 245357 - RNA, 25 nt, Human
ugacccauguacugcuauaguccca

SEQ ID NO: 245358 - RNA, 18 nt, Human
ugacccauguucacguug

SEQ ID NO: 245359 - RNA, 32 nt, Human
ugacccauuuuucugcccucuucuuaccccaa

SEQ ID NO: 245360 - RNA, 32 nt, Human
ugaccccaaacaucucaccaaacugugaaaca

SEQ ID NO: 245361 - RNA, 32 nt, Human
ugaccccaacagcacagagaacagccaacggg

SEQ ID NO: 245362 - RNA, 32 nt, Human
ugaccccaagcauggucccccuuggucgccug

SEQ ID NO: 245363 - RNA, 32 nt, Human
ugaccccacuggccacugccauccugcugccu

SEQ ID NO: 245364 - RNA, 32 nt, Human
ugaccccagacagggcccugaggaccccaggg

SEQ ID NO: 245365 - RNA, 32 nt, Human
ugaccccagaugccucucccacccuuaccucc

SEQ ID NO: 245366 - RNA, 32 nt, Human
ugaccccaggaagugggagaaguggccccucg

SEQ ID NO: 245367 - RNA, 32 nt, Human
ugaccccaggagacguagguuguggugagcug

SEQ ID NO: 245368 - RNA, 32 nt, Human
ugaccccaggaggcagagguugaagugagcca

SEQ ID NO: 245369 - RNA, 32 nt, Human
ugaccccaggaggcgaagauugcagugagcug

SEQ ID NO: 245370 - RNA, 32 nt, Human
ugaccccaggagguggacauugcagugagccg

SEQ ID NO: 245371 - RNA, 32 nt, Human
ugaccccaggaguucaagaccagccugggcaa

SEQ ID NO: 245372 - RNA, 32 nt, Human
ugaccccagggagccaguccaagauugaagga

SEQ ID NO: 245373 - RNA, 32 nt, Human
ugaccccagggccugaggacagguccccaagu

SEQ ID NO: 245374 - RNA, 25 nt, Human
ugaccccaggugaucugcccaccuu

SEQ ID NO: 245375 - RNA, 32 nt, Human
ugaccccaggugggaggcuguguguggaggcc

SEQ ID NO: 245376 - RNA, 32 nt, Human
ugaccccaggugguggagguugcagugagcca

SEQ ID NO: 245377 - RNA, 25 nt, Human
ugaccccagucugccuccacauccc

SEQ ID NO: 245378 - RNA, 32 nt, Human
ugaccccagugcagugucuguagggaagagga

SEQ ID NO: 245379 - RNA, 24 nt, Human
ugaccccaugauccacccgccuca

SEQ ID NO: 245380 - RNA, 32 nt, Human
ugaccccauggacaccuccucaaacucucugc

SEQ ID NO: 245381 - RNA, 32 nt, Human
ugacccccacacaggcacugggaaugcagggg

SEQ ID NO: 245382 - RNA, 23 nt, Human
ugacccccagcagacccccagca

SEQ ID NO: 245383 - RNA, 32 nt, Human
ugacccccaggaggaggauuccuggggcuggu

SEQ ID NO: 245384 - RNA, 20 nt, Human
ugacccccaugcugcuuccu

SEQ ID NO: 245385 - RNA, 32 nt, Human
ugacccccuacuuggcucuuuccagggagcau

SEQ ID NO: 245386 - RNA, 32 nt, Human
ugacccccuccccucccauccuucaccuccua

SEQ ID NO: 245387 - RNA, 18 nt, Human
ugaccccgagcugucccu

SEQ ID NO: 245388 - RNA, 32 nt, Human
ugaccccgcggcggccugagggacgcucccug

SEQ ID NO: 245389 - RNA, 32 nt, Human
ugaccccgggagguggaggcugcagugaguug

SEQ ID NO: 245390 - RNA, 32 nt, Human
ugaccccgggcacaauuucuccuuccucugga

SEQ ID NO: 245391 - RNA, 32 nt, Human
ugaccccguagccaccaccacacugcuuccag

SEQ ID NO: 245392 - RNA, 24 nt, Human
ugaccccgucggcaucacaggggu

SEQ ID NO: 245393 - RNA, 32 nt, Human
ugaccccgugugggcagaaggcugcaaggccu

SEQ ID NO: 245394 - RNA, 32 nt, Human
ugaccccucagccugcauacugguauccuggu

SEQ ID NO: 245395 - RNA, 32 nt, Human
ugaccccucccaggacucgugaugccaaggcc

SEQ ID NO: 245396 - RNA, 32 nt, Human
ugaccccugacacgugugugcagcagccugca

SEQ ID NO: 245397 - RNA, 32 nt, Human
ugaccccugcagccauugcagcugccacaacc

SEQ ID NO: 245398 - RNA, 32 nt, Human
ugaccccugccucugcaguagccuuuugugag

SEQ ID NO: 245399 - RNA, 32 nt, Human
ugaccccugccugaccaagccaugucugaaca

SEQ ID NO: 245400 - RNA, 32 nt, Human
ugaccccuggaggagccacuguggaagcagag

SEQ ID NO: 245401 - RNA, 32 nt, Human
ugaccccuucaccucucccccucccuuuuccu

SEQ ID NO: 245402 - RNA, 22 nt, Human
ugacccgaaagaugauacagca

SEQ ID NO: 245403 - RNA, 32 nt, Human
ugacccgagugaccuccaggauacauccaaca

SEQ ID NO: 245404 - RNA, 32 nt, Human
ugacccgcagacccuggcugagcgacggauga

SEQ ID NO: 245405 - RNA, 32 nt, Human
ugacccgccagccugcaccgcgggcacguccu

SEQ ID NO: 245406 - RNA, 32 nt, Human
ugacccgccgcuuccccuucagccugggacca

SEQ ID NO: 245407 - RNA, 32 nt, Human
ugacccgccggcccaggcgaggcugcagccag

SEQ ID NO: 245408 - RNA, 32 nt, Human
ugacccgcucccuuucugaccugggccaguuc

SEQ ID NO: 245409 - RNA, 32 nt, Human
ugacccggcauccugacgccucaaaucccuuu

SEQ ID NO: 245410 - RNA, 32 nt, Human
ugacccggcgaggcccagagacaggggagggg

SEQ ID NO: 245411 - RNA, 32 nt, Human
ugacccgggacuagaaggaaaauaaaugaucu

SEQ ID NO: 245412 - RNA, 32 nt, Human
ugacccgggcccugaccuucucccucuucccu

SEQ ID NO: 245413 - RNA, 23 nt, Human
ugacccggguucccccacuccca

SEQ ID NO: 245414 - RNA, 21 nt, Human
ugacccggugugcgugggguc

SEQ ID NO: 245415 - RNA, 22 nt, Human
ugacccguuuuccaaccaguuc

SEQ ID NO: 245416 - RNA, 32 nt, Human
ugacccuagaauggggacagggaaagugaagg

SEQ ID NO: 245417 - RNA, 32 nt, Human
ugacccuagucucugcuguaugcugggcccug

SEQ ID NO: 245418 - RNA, 26 nt, Human
ugacccucaagugaucugcccaccuu

SEQ ID NO: 245419 - RNA, 32 nt, Human
ugacccucagaaccuccuuccugggccugcgg

SEQ ID NO: 245420 - RNA, 32 nt, Human
ugacccucagcagccucuccuggccuuggcag

SEQ ID NO: 245421 - RNA, 32 nt, Human
ugacccucccccagggccuuggcucugagcuu

SEQ ID NO: 245422 - RNA, 32 nt, Human
ugacccucccccugccuuccucuugccuuggg

SEQ ID NO: 245423 - RNA, 32 nt, Human
ugacccuccuacuugaggccgcccuuuucucc

SEQ ID NO: 245424 - RNA, 28 nt, Human
ugacccucuaacuccaugucuaacuugc

SEQ ID NO: 245425 - RNA, 32 nt, Human
ugacccugaagaagaugacaagcccugcucca

SEQ ID NO: 245426 - RNA, 32 nt, Human
ugacccugacagugcuuaaugaccucagauga

SEQ ID NO: 245427 - RNA, 32 nt, Human
ugacccugagccagugccaggucuccaagugc

SEQ ID NO: 245428 - RNA, 32 nt, Human
ugacccugcaaguaccuugauuuuggacuucu

SEQ ID NO: 245429 - RNA, 32 nt, Human
ugacccugcuccuuaccccaugggagcagcag

SEQ ID NO: 245430 - RNA, 31 nt, Human
ugacccuggcucgucucagccgagacccaga

SEQ ID NO: 245431 - RNA, 32 nt, Human
ugacccugggagguggagguggcagugagccg

SEQ ID NO: 245432 - RNA, 32 nt, Human
ugacccugggcaaguuacuuaaccucgcuaag

SEQ ID NO: 245433 - RNA, 32 nt, Human
ugacccugggcugcuggaggccagacugggcu

SEQ ID NO: 245434 - RNA, 19 nt, Human
ugacccugggcugcuuccu

SEQ ID NO: 245435 - RNA, 32 nt, Human
ugacccuggguggaggggacuugcugugaagu

SEQ ID NO: 245436 - RNA, 32 nt, Human
ugacccugguauaagaaguacucugaaauucu

SEQ ID NO: 245437 - RNA, 22 nt, Human
ugacccugucuuacccauuuca

SEQ ID NO: 245438 - RNA, 23 nt, Human
ugacccugugauccaccugccuu

SEQ ID NO: 245439 - RNA, 23 nt, Human
ugacccugugauccgcccgccuc

SEQ ID NO: 245440 - RNA, 16 nt, Human
ugacccuguggccuca

SEQ ID NO: 245441 - RNA, 32 nt, Human
ugacccuucaaggaguucagaccugggggcuc

SEQ ID NO: 245442 - RNA, 21 nt, Human
ugacccuuccaccccgccuca

SEQ ID NO: 245443 - RNA, 32 nt, Human
ugacccuucccaaaucugcuccagcaggacua

SEQ ID NO: 245444 - RNA, 32 nt, Human
ugacccuucccagcccccuccagggccaaugc

SEQ ID NO: 245445 - RNA, 19 nt, Human
ugacccuuccucgcucccu

SEQ ID NO: 245446 - RNA, 32 nt, Human
ugacccuugaguucuagaaaugggguucuccc

SEQ ID NO: 245447 - RNA, 32 nt, Human
ugacccuugcagcucaggcaggacauucugga

SEQ ID NO: 245448 - RNA, 31 nt, Human
ugacccuugcagucucccacauccagggccu

SEQ ID NO: 245449 - RNA, 32 nt, Human
ugacccuugggaacagugaacguagagaauug

SEQ ID NO: 245450 - RNA, 18 nt, Human
ugaccgaagcugcucucu

SEQ ID NO: 245451 - RNA, 32 nt, Human
ugaccgacauggagaaaccccaucucuacuaa

SEQ ID NO: 245452 - RNA, 32 nt, Human
ugaccgaccauugccauuucuggccucgcuag

SEQ ID NO: 245453 - RNA, 32 nt, Human
ugaccgacuccaccaucacccaaucuguugau

SEQ ID NO: 245454 - RNA, 32 nt, Human
ugaccgacuccacuuaacccccaaacccagcc

SEQ ID NO: 245455 - RNA, 32 nt, Human
ugaccgagaggcugcuggagcucguguuugga

SEQ ID NO: 245456 - RNA, 32 nt, Human
ugaccgagauaggucaucagcccagggcuuca

SEQ ID NO: 245457 - RNA, 26 nt, Human
ugaccgcaagcgauucacccaccuca

SEQ ID NO: 245458 - RNA, 25 nt, Human
ugaccgcaagugauccacccgccuc

SEQ ID NO: 245459 - RNA, 32 nt, Human
ugaccgcaggagacccuguaaggccugugagc

SEQ ID NO: 245460 - RNA, 32 nt, Human
ugaccgcaggguggcccagguggaucggcuuc

SEQ ID NO: 245461 - RNA, 32 nt, Human
ugaccgcaggguguucucagagaacccuggcu

SEQ ID NO: 245462 - RNA, 25 nt, Human
ugaccgcaggugauccaccugccuc

SEQ ID NO: 245463 - RNA, 24 nt, Human
ugaccgcagugauccucccgccuc

SEQ ID NO: 245464 - RNA, 32 nt, Human
ugaccgccaaccucacguuuucuuagucugag

SEQ ID NO: 245465 - RNA, 26 nt, Human
ugaccgcccagcucucccacauccca

SEQ ID NO: 245466 - RNA, 22 nt, Human
ugaccgccgcagaggcagcagg

SEQ ID NO: 245467 - RNA, 32 nt, Human
ugaccgccuuguacuccagguggaaccagccc

SEQ ID NO: 245468 - RNA, 32 nt, Human
ugaccgcgaggcugcgggaggaaggggacagg

SEQ ID NO: 245469 - RNA, 19 nt, Human
ugaccgcgccuguaauccc

SEQ ID NO: 245470 - RNA, 18 nt, Human
ugaccgcuuccccgggga

SEQ ID NO: 245471 - RNA, 32 nt, Human
ugaccggcaucccagauguggggaagaggcca

SEQ ID NO: 245472 - RNA, 32 nt, Human
ugaccggcuagugccggguauggccaccagcc

SEQ ID NO: 245473 - RNA, 32 nt, Human
ugaccgggacuggagccagggucuggggagag

SEQ ID NO: 245474 - RNA, 32 nt, Human
ugaccgggagacagagguugcagugagcugag

SEQ ID NO: 245475 - RNA, 32 nt, Human
ugaccgggccaucuugguuuucuucuggauga

SEQ ID NO: 245476 - RNA, 32 nt, Human
ugaccgggcccucuggcccacagccauuggua

SEQ ID NO: 245477 - RNA, 32 nt, Human
ugaccgggggccagcccaggagggcggguggu

SEQ ID NO: 245478 - RNA, 32 nt, Human
ugaccguagggagggaucuugagggcccuccg

SEQ ID NO: 245479 - RNA, 32 nt, Human
ugaccgucgagacugcagcagcgccuuuccug

SEQ ID NO: 245480 - RNA, 32 nt, Human
ugaccgugacauccucccucucgucaaaagac

SEQ ID NO: 245481 - RNA, 32 nt, Human
ugaccgugaccccucaaagcagagccaguagu

SEQ ID NO: 245482 - RNA, 32 nt, Human
ugaccgugccagcauuuacacagggaacacuu

SEQ ID NO: 245483 - RNA, 32 nt, Human
ugaccguggggagcucccuggagcucaacgug

SEQ ID NO: 245484 - RNA, 32 nt, Human
ugaccguggguguggcuggcucucggcccugc

SEQ ID NO: 245485 - RNA, 32 nt, Human
ugaccgugguggugcuggaggcucgaggccug

SEQ ID NO: 245486 - RNA, 32 nt, Human
ugaccgugucugcaggcagcacccagaacuga

SEQ ID NO: 245487 - RNA, 32 nt, Human
ugaccguguuagccaggauggucucgaucucc

SEQ ID NO: 245488 - RNA, 32 nt, Human
ugaccguguuagccaggauggucuugaucucc

SEQ ID NO: 245489 - RNA, 32 nt, Human
ugaccguuccauccuucccacugcuccacggg

SEQ ID NO: 245490 - RNA, 32 nt, Human
ugaccguugcccaccuggaggugugcaugcca

SEQ ID NO: 245491 - RNA, 25 nt, Human
ugaccuaaagugaucugcccgccuu

SEQ ID NO: 245492 - RNA, 32 nt, Human
ugaccuaaccuuccugucuccucuucgggaag

SEQ ID NO: 245493 - RNA, 32 nt, Human
ugaccuaagagccuaacaaccugcucuuuggg

SEQ ID NO: 245494 - RNA, 21 nt, Human
ugaccuaaggaaucaggggga

SEQ ID NO: 245495 - RNA, 32 nt, Human
ugaccuaagggacucccacaacaacaaaagcu

SEQ ID NO: 245496 - RNA, 32 nt, Human
ugaccuacaaagcaaugcuucacuggaaauuc

SEQ ID NO: 245497 - RNA, 32 nt, Human
ugaccuacuggccaucuuccucacagcccuca

SEQ ID NO: 245498 - RNA, 32 nt, Human
ugaccuacuucacugaccugugaggauuccuu

SEQ ID NO: 245499 - RNA, 32 nt, Human
ugaccuagcuagugccuggugcccagugaccu

SEQ ID NO: 245500 - RNA, 32 nt, Human
ugaccuaggaacuuggccaacauaugcaacau

SEQ ID NO: 245501 - RNA, 32 nt, Human
ugaccuaggugggaggugauaaaauuuguucc

SEQ ID NO: 245502 - RNA, 26 nt, Human
ugaccuagucugccauauuugccuuc

SEQ ID NO: 245503 - RNA, 23 nt, Human
ugaccuagugauccacccuccuc

SEQ ID NO: 245504 - RNA, 23 nt, Human
ugaccuagugaucugccugccuc

SEQ ID NO: 245505 - RNA, 23 nt, Human
ugaccuagugaugcacccaccuu

SEQ ID NO: 245506 - RNA, 32 nt, Human
ugaccuauaaugagccguugugcuccagccug

SEQ ID NO: 245507 - RNA, 32 nt, Human
ugaccuaugccugcaauccagcacuuugggaa

SEQ ID NO: 245508 - RNA, 26 nt, Human
ugaccucaaacgaucugcccacccca

SEQ ID NO: 245509 - RNA, 25 nt, Human
ugaccucaaaugauccacccaccuu

SEQ ID NO: 245510 - RNA, 25 nt, Human
ugaccucaaaugauccaccugccuc

SEQ ID NO: 245511 - RNA, 25 nt, Human
ugaccucaaaugauccgcccaccuc

SEQ ID NO: 245512 - RNA, 25 nt, Human
ugaccucaacugguccacccgccuc

SEQ ID NO: 245513 - RNA, 24 nt, Human
ugaccucaagcgauccacccaccu

SEQ ID NO: 245514 - RNA, 25 nt, Human
ugaccucaagcgauccacccaccuc

SEQ ID NO: 245515 - RNA, 25 nt, Human
ugaccucaagcgaucugcccgccuc

SEQ ID NO: 245516 - RNA, 32 nt, Human
ugaccucaagcuggcugcagagcgaggucagc

SEQ ID NO: 245517 - RNA, 25 nt, Human
ugaccucaaguaauccaccugccuc

SEQ ID NO: 245518 - RNA, 26 nt, Human
ugaccucaaguaauccaccugccuca

SEQ ID NO: 245519 - RNA, 26 nt, Human
ugaccucaaguaauccgccugccuca

SEQ ID NO: 245520 - RNA, 21 nt, Human
ugaccucaagugacccaccuu

SEQ ID NO: 245521 - RNA, 26 nt, Human
ugaccucaagugauaugccugccuca

SEQ ID NO: 245522 - RNA, 25 nt, Human
ugaccucaagugauccacccaccuc

SEQ ID NO: 245523 - RNA, 26 nt, Human
ugaccucaagugauccacccaccuca

SEQ ID NO: 245524 - RNA, 25 nt, Human
ugaccucaagugauccacccaccuu

SEQ ID NO: 245525 - RNA, 26 nt, Human
ugaccucaagugauccacccacuuca

SEQ ID NO: 245526 - RNA, 25 nt, Human
ugaccucaagugauccacccgccuc

SEQ ID NO: 245527 - RNA, 26 nt, Human
ugaccucaagugauccacccgccuca

SEQ ID NO: 245528 - RNA, 25 nt, Human
ugaccucaagugauccacccgccuu

SEQ ID NO: 245529 - RNA, 25 nt, Human
ugaccucaagugauccacccgucuu

SEQ ID NO: 245530 - RNA, 25 nt, Human
ugaccucaagugauccaccuaccuc

SEQ ID NO: 245531 - RNA, 25 nt, Human
ugaccucaagugauccaccugccuc

SEQ ID NO: 245532 - RNA, 25 nt, Human
ugaccucaagugauccaccugccuu

SEQ ID NO: 245533 - RNA, 25 nt, Human
ugaccucaagugauccaccugcuuc

SEQ ID NO: 245534 - RNA, 25 nt, Human
ugaccucaagugauccaccuuccuu

SEQ ID NO: 245535 - RNA, 25 nt, Human
ugaccucaagugauccacugccuca

SEQ ID NO: 245536 - RNA, 25 nt, Human
ugaccucaagugauccacuggccuu

SEQ ID NO: 245537 - RNA, 24 nt, Human
ugaccucaagugaucccccaccuc

SEQ ID NO: 245538 - RNA, 25 nt, Human
ugaccucaagugauccgcccacuuc

SEQ ID NO: 245539 - RNA, 24 nt, Human
ugaccucaagugauccgcccgcuu

SEQ ID NO: 245540 - RNA, 26 nt, Human
ugaccucaagugauccgccugccuca

SEQ ID NO: 245541 - RNA, 25 nt, Human
ugaccucaagugauccgccugccuu

SEQ ID NO: 245542 - RNA, 26 nt, Human
ugaccucaagugauccguccgccucg

SEQ ID NO: 245543 - RNA, 26 nt, Human
ugaccucaagugauccucccaccuca

SEQ ID NO: 245544 - RNA, 25 nt, Human
ugaccucaagugaucuacccaccuc

SEQ ID NO: 245545 - RNA, 25 nt, Human
ugaccucaagugaucuaccugccuc

SEQ ID NO: 245546 - RNA, 26 nt, Human
ugaccucaagugaucugcccaccuca

SEQ ID NO: 245547 - RNA, 25 nt, Human
ugaccucaagugaucugcccaccuu

SEQ ID NO: 245548 - RNA, 25 nt, Human
ugaccucaagugaucugcccacuuc

SEQ ID NO: 245549 - RNA, 26 nt, Human
ugaccucaagugaucugcccaucuca

SEQ ID NO: 245550 - RNA, 25 nt, Human
ugaccucaagugaucugcccgccuc

SEQ ID NO: 245551 - RNA, 26 nt, Human
ugaccucaagugaucugcccgccuca

SEQ ID NO: 245552 - RNA, 25 nt, Human
ugaccucaagugaucugcccgccuu

SEQ ID NO: 245553 - RNA, 26 nt, Human
ugaccucaagugaucugcccuccuca

SEQ ID NO: 245554 - RNA, 26 nt, Human
ugaccucaagugaucugcccuccuua

SEQ ID NO: 245555 - RNA, 25 nt, Human
ugaccucaagugaucugccuaccuu

SEQ ID NO: 245556 - RNA, 26 nt, Human
ugaccucaagugaucugccugccuca

SEQ ID NO: 245557 - RNA, 25 nt, Human
ugaccucaagugaucugcucaccuu

SEQ ID NO: 245558 - RNA, 25 nt, Human
ugaccucaagugaucuucccaccuu

SEQ ID NO: 245559 - RNA, 25 nt, Human
ugaccucaagugauuugcccaccuu

SEQ ID NO: 245560 - RNA, 25 nt, Human
ugaccucaagugguccaccugccuu

SEQ ID NO: 245561 - RNA, 32 nt, Human
ugaccucaauccaggcuggaguugguuuaucc

SEQ ID NO: 245562 - RNA, 31 nt, Human
ugaccucacagcuggaggcuuuccaggccaa

SEQ ID NO: 245563 - RNA, 20 nt, Human
ugaccucacauccucugcca

SEQ ID NO: 245564 - RNA, 32 nt, Human
ugaccucacuucagagccccucuagcagagug

SEQ ID NO: 245565 - RNA, 32 nt, Human
ugaccucagacgauccaccugccuuggccucc

SEQ ID NO: 245566 - RNA, 25 nt, Human
ugaccucagaugauccacccaccuu

SEQ ID NO: 245567 - RNA, 25 nt, Human
ugaccucagaugauccaccugccuu

SEQ ID NO: 245568 - RNA, 25 nt, Human
ugaccucagaugaucuaccagccuc

SEQ ID NO: 245569 - RNA, 25 nt, Human
ugaccucagaugaucuacccgccuu

SEQ ID NO: 245570 - RNA, 26 nt, Human
ugaccucagaugaucugcccacuuua

SEQ ID NO: 245571 - RNA, 26 nt, Human
ugaccucagaugaucugcccgccuca

SEQ ID NO: 245572 - RNA, 26 nt, Human
ugaccucagaugauucacccgccuca

SEQ ID NO: 245573 - RNA, 25 nt, Human
ugaccucagaugguccacccaccuc

SEQ ID NO: 245574 - RNA, 32 nt, Human
ugaccucagcaucugcucacaucccacccucu

SEQ ID NO: 245575 - RNA, 32 nt, Human
ugaccucaggaggcggagguugcagugagccg

SEQ ID NO: 245576 - RNA, 32 nt, Human
ugaccucaggaggucaccuuuucuugauucca

SEQ ID NO: 245577 - RNA, 19 nt, Human
ugaccucaggaguucgaga

SEQ ID NO: 245578 - RNA, 26 nt, Human
ugaccucaggcaaucugcccaccuca

SEQ ID NO: 245579 - RNA, 26 nt, Human
ugaccucaggcgauccgcccgccuca

SEQ ID NO: 245580 - RNA, 25 nt, Human
ugaccucaggcgaucuacccgccuc

SEQ ID NO: 245581 - RNA, 26 nt, Human
ugaccucaggcgaucugcccaccuca

SEQ ID NO: 245582 - RNA, 25 nt, Human
ugaccucaggggauccacccgccuc

SEQ ID NO: 245583 - RNA, 26 nt, Human
ugaccucagggugaucagcccaccuc

SEQ ID NO: 245584 - RNA, 32 nt, Human
ugaccucagggugugcucuguucuccacccua

SEQ ID NO: 245585 - RNA, 26 nt, Human
ugaccucagguaauccaccugcuuca

SEQ ID NO: 245586 - RNA, 25 nt, Human
ugaccucagguaauccgcccaucuc

SEQ ID NO: 245587 - RNA, 26 nt, Human
ugaccucagguaauccucccaccuca

SEQ ID NO: 245588 - RNA, 32 nt, Human
ugaccucagguaauccucccaccucagccucc

SEQ ID NO: 245589 - RNA, 25 nt, Human
ugaccucaggugagccacccgccuc

SEQ ID NO: 245590 - RNA, 25 nt, Human
ugaccucaggugauccaacugccuc

SEQ ID NO: 245591 - RNA, 24 nt, Human
ugaccucaggugauccaccaccuc

SEQ ID NO: 245592 - RNA, 25 nt, Human
ugaccucaggugauccaccagccuc

SEQ ID NO: 245593 - RNA, 25 nt, Human
ugaccucaggugauccacccaccuc

SEQ ID NO: 245594 - RNA, 26 nt, Human
ugaccucaggugauccacccaccuca

SEQ ID NO: 245595 - RNA, 25 nt, Human
ugaccucaggugauccacccaccuu

SEQ ID NO: 245596 - RNA, 26 nt, Human
ugaccucaggugauccacccacguca

SEQ ID NO: 245597 - RNA, 23 nt, Human
ugaccucaggugauccacccgcc

SEQ ID NO: 245598 - RNA, 24 nt, Human
ugaccucaggugauccacccgccu

SEQ ID NO: 245599 - RNA, 25 nt, Human
ugaccucaggugauccacccgccuc

SEQ ID NO: 245600 - RNA, 26 nt, Human
ugaccucaggugauccacccgccuca

SEQ ID NO: 245601 - RNA, 25 nt, Human
ugaccucaggugauccacccgccuu

SEQ ID NO: 245602 - RNA, 26 nt, Human
ugaccucaggugauccacccgccuua

SEQ ID NO: 245603 - RNA, 25 nt, Human
ugaccucaggugauccacccgcguu

SEQ ID NO: 245604 - RNA, 26 nt, Human
ugaccucaggugauccacccgcuuca

SEQ ID NO: 245605 - RNA, 25 nt, Human
ugaccucaggugauccacccuccuu

SEQ ID NO: 245606 - RNA, 25 nt, Human
ugaccucaggugauccaccuaccuc

SEQ ID NO: 245607 - RNA, 24 nt, Human
ugaccucaggugauccaccugccu

SEQ ID NO: 245608 - RNA, 25 nt, Human
ugaccucaggugauccaccugccuc

SEQ ID NO: 245609 - RNA, 26 nt, Human
ugaccucaggugauccaccugccuca

SEQ ID NO: 245610 - RNA, 25 nt, Human
ugaccucaggugauccaccugccuu

SEQ ID NO: 245611 - RNA, 25 nt, Human
ugaccucaggugauccacucgccuc

SEQ ID NO: 245612 - RNA, 26 nt, Human
ugaccucaggugauccauccaccucg

SEQ ID NO: 245613 - RNA, 26 nt, Human
ugaccucaggugauccaucugccucg

SEQ ID NO: 245614 - RNA, 25 nt, Human
ugaccucaggugauccgaccgccuc

SEQ ID NO: 245615 - RNA, 25 nt, Human
ugaccucaggugauccgcccaccuc

SEQ ID NO: 245616 - RNA, 26 nt, Human
ugaccucaggugauccgcccaccuca

SEQ ID NO: 245617 - RNA, 25 nt, Human
ugaccucaggugauccgcccgccuc

SEQ ID NO: 245618 - RNA, 26 nt, Human
ugaccucaggugauccgcccgccuca

SEQ ID NO: 245619 - RNA, 26 nt, Human
ugaccucaggugauccgccuaccuca

SEQ ID NO: 245620 - RNA, 25 nt, Human
ugaccucaggugauccgccugccuc

SEQ ID NO: 245621 - RNA, 26 nt, Human
ugaccucaggugauccgccugccuca

SEQ ID NO: 245622 - RNA, 25 nt, Human
ugaccucaggugauccgccugccuu

SEQ ID NO: 245623 - RNA, 26 nt, Human
ugaccucaggugauccguccaccuca

SEQ ID NO: 245624 - RNA, 25 nt, Human
ugaccucaggugauccucccaccuc

SEQ ID NO: 245625 - RNA, 32 nt, Human
ugaccucaggugauccucccaccucggccucc

SEQ ID NO: 245626 - RNA, 25 nt, Human
ugaccucaggugauccucccgccuc

SEQ ID NO: 245627 - RNA, 25 nt, Human
ugaccucaggugauccuccugccuc

SEQ ID NO: 245628 - RNA, 25 nt, Human
ugaccucaggugaucuacccaccuc

SEQ ID NO: 245629 - RNA, 26 nt, Human
ugaccucaggugaucuaccugccuca

SEQ ID NO: 245630 - RNA, 25 nt, Human
ugaccucaggugaucugcccaccuc

SEQ ID NO: 245631 - RNA, 26 nt, Human
ugaccucaggugaucugcccaccuca

SEQ ID NO: 245632 - RNA, 25 nt, Human
ugaccucaggugaucugcccaccuu

SEQ ID NO: 245633 - RNA, 25 nt, Human
ugaccucaggugaucugcccacuuu

SEQ ID NO: 245634 - RNA, 25 nt, Human
ugaccucaggugaucugcccaucuc

SEQ ID NO: 245635 - RNA, 26 nt, Human
ugaccucaggugaucugcccgccccg

SEQ ID NO: 245636 - RNA, 25 nt, Human
ugaccucaggugaucugcccgccuc

SEQ ID NO: 245637 - RNA, 26 nt, Human
ugaccucaggugaucugcccgccuca

SEQ ID NO: 245638 - RNA, 25 nt, Human
ugaccucaggugaucugcccgccuu

SEQ ID NO: 245639 - RNA, 32 nt, Human
ugaccucaggugaucugccugccuuggcaucc

SEQ ID NO: 245640 - RNA, 32 nt, Human
ugaccucaggugaucugccugccuuggccucc

SEQ ID NO: 245641 - RNA, 26 nt, Human
ugaccucaggugaugcacccaccuca

SEQ ID NO: 245642 - RNA, 25 nt, Human
ugaccucaggugaugcaccugccuc

SEQ ID NO: 245643 - RNA, 26 nt, Human
ugaccucaggugauucaccagccuca

SEQ ID NO: 245644 - RNA, 26 nt, Human
ugaccucaggugauucgccggccuca

SEQ ID NO: 245645 - RNA, 32 nt, Human
ugaccucagugaaagcagucaucuucagcguu

SEQ ID NO: 245646 - RNA, 24 nt, Human
ugaccucagugauccccccaccuc

SEQ ID NO: 245647 - RNA, 24 nt, Human
ugaccucagugauccccccgccuc

SEQ ID NO: 245648 - RNA, 32 nt, Human
ugaccucagugugugucugcaauuggggagau

SEQ ID NO: 245649 - RNA, 25 nt, Human
ugaccucaguugauccacccaccuu

SEQ ID NO: 245650 - RNA, 26 nt, Human
ugaccucaguugauccacccgccuca

SEQ ID NO: 245651 - RNA, 26 nt, Human
ugaccucaguugauccaccugccuca

SEQ ID NO: 245652 - RNA, 26 nt, Human
ugaccucaguugauccgccugccuca

SEQ ID NO: 245653 - RNA, 23 nt, Human
ugaccucauauuccacccgccuc

SEQ ID NO: 245654 - RNA, 17 nt, Human
ugaccucaucugcuccc

SEQ ID NO: 245655 - RNA, 23 nt, Human
ugaccucaugagccgcccgccuu

SEQ ID NO: 245656 - RNA, 32 nt, Human
ugaccucaugauaugguggcugcugaccaggg

SEQ ID NO: 245657 - RNA, 23 nt, Human
ugaccucaugauccacccaccuc

SEQ ID NO: 245658 - RNA, 24 nt, Human
ugaccucaugauccacccaccuca

SEQ ID NO: 245659 - RNA, 23 nt, Human
ugaccucaugauccacccaccuu

SEQ ID NO: 245660 - RNA, 24 nt, Human
ugaccucaugauccacccaccuua

SEQ ID NO: 245661 - RNA, 23 nt, Human
ugaccucaugauccaccccccuc

SEQ ID NO: 245662 - RNA, 23 nt, Human
ugaccucaugauccacccgccuc

SEQ ID NO: 245663 - RNA, 24 nt, Human
ugaccucaugauccacccgccuca

SEQ ID NO: 245664 - RNA, 24 nt, Human
ugaccucaugauccaccucccuca

SEQ ID NO: 245665 - RNA, 23 nt, Human
ugaccucaugauccaccugccuc

SEQ ID NO: 245666 - RNA, 24 nt, Human
ugaccucaugauccaccugccuca

SEQ ID NO: 245667 - RNA, 32 nt, Human
ugaccucaugauccccuccaccugcacuggug

SEQ ID NO: 245668 - RNA, 24 nt, Human
ugaccucaugauccgcccaccuca

SEQ ID NO: 245669 - RNA, 23 nt, Human
ugaccucaugauccgcccaccuu

SEQ ID NO: 245670 - RNA, 23 nt, Human
ugaccucaugauccgcccaucuu

SEQ ID NO: 245671 - RNA, 23 nt, Human
ugaccucaugauccgcccgccuc

SEQ ID NO: 245672 - RNA, 23 nt, Human
ugaccucaugauccgcccgccuu

SEQ ID NO: 245673 - RNA, 24 nt, Human
ugaccucaugauccgcccuccuca

SEQ ID NO: 245674 - RNA, 23 nt, Human
ugaccucaugauccgccugccuc

SEQ ID NO: 245675 - RNA, 23 nt, Human
ugaccucaugauccgccugccuu

SEQ ID NO: 245676 - RNA, 24 nt, Human
ugaccucaugauccucccgccuca

SEQ ID NO: 245677 - RNA, 23 nt, Human
ugaccucaugaucuacccgccuc

SEQ ID NO: 245678 - RNA, 23 nt, Human
ugaccucaugaucuacccgccuu

SEQ ID NO: 245679 - RNA, 23 nt, Human
ugaccucaugaucugcccaccuc

SEQ ID NO: 245680 - RNA, 24 nt, Human
ugaccucaugaucugcccgccuca

SEQ ID NO: 245681 - RNA, 24 nt, Human
ugaccucaugaucugccugccuca

SEQ ID NO: 245682 - RNA, 23 nt, Human
ugaccucaugaucuguccaccuc

SEQ ID NO: 245683 - RNA, 23 nt, Human
ugaccucaugaugugcccacuuc

SEQ ID NO: 245684 - RNA, 26 nt, Human
ugaccucauguaauccacccaccuca

SEQ ID NO: 245685 - RNA, 32 nt, Human
ugaccuccaagaagaugucaauuacaagaaca

SEQ ID NO: 245686 - RNA, 32 nt, Human
ugaccuccacucgcuagaccucaguagcaccu

SEQ ID NO: 245687 - RNA, 32 nt, Human
ugaccuccacuugcuuccaaggugcuagggaa

SEQ ID NO: 245688 - RNA, 32 nt, Human
ugaccuccaggcagcagucucugcuccagaau

SEQ ID NO: 245689 - RNA, 26 nt, Human
ugaccuccagugauccagcugccuca

SEQ ID NO: 245690 - RNA, 25 nt, Human
ugaccuccagugaucugcccaccuc

SEQ ID NO: 245691 - RNA, 32 nt, Human
ugaccuccaucgccaugcagagcugcucucac

SEQ ID NO: 245692 - RNA, 32 nt, Human
ugaccucccaggcugcggcucagguggccaac

SEQ ID NO: 245693 - RNA, 32 nt, Human
ugaccuccccaucagccugugcugcuaggucu

SEQ ID NO: 245694 - RNA, 32 nt, Human
ugaccuccccucauuguggccccacacccagu

SEQ ID NO: 245695 - RNA, 32 nt, Human
ugaccucccuccuccauuccucucacaggccc

SEQ ID NO: 245696 - RNA, 25 nt, Human
ugaccuccggugaucugcccaccuc

SEQ ID NO: 245697 - RNA, 32 nt, Human
ugaccuccguggggguggagaugaggaggaug

SEQ ID NO: 245698 - RNA, 32 nt, Human
ugaccuccuccugucuguuucccuucacggau

SEQ ID NO: 245699 - RNA, 24 nt, Human
ugaccuccugaccugcccaccuca

SEQ ID NO: 245700 - RNA, 23 nt, Human
ugaccuccugauccacccaccuc

SEQ ID NO: 245701 - RNA, 24 nt, Human
ugaccuccugauccacccaccuca

SEQ ID NO: 245702 - RNA, 23 nt, Human
ugaccuccugauccgcccaccuc

SEQ ID NO: 245703 - RNA, 24 nt, Human
ugaccuccugauccgcccaccuca

SEQ ID NO: 245704 - RNA, 24 nt, Human
ugaccuccugaugcgccugccuca

SEQ ID NO: 245705 - RNA, 32 nt, Human
ugaccuccuucagcagggcagcuccuaagagg

SEQ ID NO: 245706 - RNA, 22 nt, Human
ugaccucgagcugcucacuuca

SEQ ID NO: 245707 - RNA, 27 nt, Human
ugaccucggccaguguccacccaccuc

SEQ ID NO: 245708 - RNA, 17 nt, Human
ugaccucggcugcuccu

SEQ ID NO: 245709 - RNA, 24 nt, Human
ugaccucgggauccacccgccuca

SEQ ID NO: 245710 - RNA, 24 nt, Human
ugaccucgggauccaccggccuca

SEQ ID NO: 245711 - RNA, 26 nt, Human
ugaccucgggugauccacccaccuca

SEQ ID NO: 245712 - RNA, 25 nt, Human
ugaccucgggugauccacccgccuc

SEQ ID NO: 245713 - RNA, 23 nt, Human
ugaccucguauccacccgccuca

SEQ ID NO: 245714 - RNA, 23 nt, Human
ugaccucgugacccacccgccuu

SEQ ID NO: 245715 - RNA, 32 nt, Human
ugaccucgugagccaccacgcccagccucuuu

SEQ ID NO: 245716 - RNA, 23 nt, Human
ugaccucgugauaugcccaccuc

SEQ ID NO: 245717 - RNA, 23 nt, Human
ugaccucgugauccacccaacuc

SEQ ID NO: 245718 - RNA, 23 nt, Human
ugaccucgugauccacccaccuc

SEQ ID NO: 245719 - RNA, 24 nt, Human
ugaccucgugauccacccaccuca

SEQ ID NO: 245720 - RNA, 23 nt, Human
ugaccucgugauccacccaccuu

SEQ ID NO: 245721 - RNA, 23 nt, Human
ugaccucgugauccacccgacuc

SEQ ID NO: 245722 - RNA, 22 nt, Human
ugaccucgugauccacccgccu

SEQ ID NO: 245723 - RNA, 23 nt, Human
ugaccucgugauccacccgccuc

SEQ ID NO: 245724 - RNA, 24 nt, Human
ugaccucgugauccacccgccuca

SEQ ID NO: 245725 - RNA, 23 nt, Human
ugaccucgugauccacccgccuu

SEQ ID NO: 245726 - RNA, 24 nt, Human
ugaccucgugauccacccgccuua

SEQ ID NO: 245727 - RNA, 24 nt, Human
ugaccucgugauccacccgucuca

SEQ ID NO: 245728 - RNA, 21 nt, Human
ugaccucgugauccaccugcc

SEQ ID NO: 245729 - RNA, 23 nt, Human
ugaccucgugauccaccugccuc

SEQ ID NO: 245730 - RNA, 23 nt, Human
ugaccucgugauccaccugccuu

SEQ ID NO: 245731 - RNA, 23 nt, Human
ugaccucgugauccaccugcuuc

SEQ ID NO: 245732 - RNA, 23 nt, Human
ugaccucgugauccaccugucuc

SEQ ID NO: 245733 - RNA, 23 nt, Human
ugaccucgugaucccccugccuc

SEQ ID NO: 245734 - RNA, 23 nt, Human
ugaccucgugauccccugccuca

SEQ ID NO: 245735 - RNA, 23 nt, Human
ugaccucgugauccgcccaccuc

SEQ ID NO: 245736 - RNA, 24 nt, Human
ugaccucgugauccgcccaccuca

SEQ ID NO: 245737 - RNA, 23 nt, Human
ugaccucgugauccgcccaccuu

SEQ ID NO: 245738 - RNA, 23 nt, Human
ugaccucgugauccgcccaucuc

SEQ ID NO: 245739 - RNA, 22 nt, Human
ugaccucgugauccgcccgccu

SEQ ID NO: 245740 - RNA, 23 nt, Human
ugaccucgugauccgcccgccuc

SEQ ID NO: 245741 - RNA, 24 nt, Human
ugaccucgugauccgcccgccuca

SEQ ID NO: 245742 - RNA, 23 nt, Human
ugaccucgugauccgcccgccuu

SEQ ID NO: 245743 - RNA, 23 nt, Human
ugaccucgugauccgcccuccuc

SEQ ID NO: 245744 - RNA, 23 nt, Human
ugaccucgugauccgccuaccuc

SEQ ID NO: 245745 - RNA, 23 nt, Human
ugaccucgugauccgccugccuc

SEQ ID NO: 245746 - RNA, 24 nt, Human
ugaccucgugauccgccugccuca

SEQ ID NO: 245747 - RNA, 23 nt, Human
ugaccucgugauccgccugccuu

SEQ ID NO: 245748 - RNA, 23 nt, Human
ugaccucgugauccguccaccuu

SEQ ID NO: 245749 - RNA, 23 nt, Human
ugaccucgugaucuacccaccuc

SEQ ID NO: 245750 - RNA, 23 nt, Human
ugaccucgugaucuacccgccuc

SEQ ID NO: 245751 - RNA, 24 nt, Human
ugaccucgugaucuaccggccuca

SEQ ID NO: 245752 - RNA, 23 nt, Human
ugaccucgugaucugcccaccuc

SEQ ID NO: 245753 - RNA, 23 nt, Human
ugaccucgugaucugcccgccuc

SEQ ID NO: 245754 - RNA, 24 nt, Human
ugaccucgugaucugcccgccuca

SEQ ID NO: 245755 - RNA, 23 nt, Human
ugaccucgugaucugcccgccuu

SEQ ID NO: 245756 - RNA, 24 nt, Human
ugaccucgugaucugcccuccuca

SEQ ID NO: 245757 - RNA, 23 nt, Human
ugaccucgugaucugccugccuc

SEQ ID NO: 245758 - RNA, 23 nt, Human
ugaccucgugaugcacccaccuc

SEQ ID NO: 245759 - RNA, 23 nt, Human
ugaccucgugaugcaccugccuu

SEQ ID NO: 245760 - RNA, 23 nt, Human
ugaccucgugaugcacucaccuc

SEQ ID NO: 245761 - RNA, 24 nt, Human
ugaccucgugauucacccaccuca

SEQ ID NO: 245762 - RNA, 23 nt, Human
ugaccucgugauucacccaccuu

SEQ ID NO: 245763 - RNA, 23 nt, Human
ugaccucgugauucacccgccuc

SEQ ID NO: 245764 - RNA, 24 nt, Human
ugaccucgugauuggcccaccuca

SEQ ID NO: 245765 - RNA, 23 nt, Human
ugaccucgugauuugcccgccuc

SEQ ID NO: 245766 - RNA, 26 nt, Human
ugaccucgugugauccgcccuccuca

SEQ ID NO: 245767 - RNA, 32 nt, Human
ugaccucguguuccgcccgccuaggccuccca

SEQ ID NO: 245768 - RNA, 32 nt, Human
ugaccucuaaacagauccuccucuucucggag

SEQ ID NO: 245769 - RNA, 32 nt, Human
ugaccucucaauccucaccauccacagagcua

SEQ ID NO: 245770 - RNA, 32 nt, Human
ugaccucuccuuuccucguccugggccgggaa

SEQ ID NO: 245771 - RNA, 32 nt, Human
ugaccucucuaacacagagaagcacuaacuua

SEQ ID NO: 245772 - RNA, 21 nt, Human
ugaccucucucuacugccaca

SEQ ID NO: 245773 - RNA, 32 nt, Human
ugaccucucugacuucucuuccuccaccaagg

SEQ ID NO: 245774 - RNA, 32 nt, Human
ugaccucucugccucagucuuuguuaauguug

SEQ ID NO: 245775 - RNA, 24 nt, Human
ugaccucugaagacuauugugcug

SEQ ID NO: 245776 - RNA, 32 nt, Human
ugaccucugagugccaaggacaccacuggaac

SEQ ID NO: 245777 - RNA, 24 nt, Human
ugaccucugaugaucuacccgccu

SEQ ID NO: 245778 - RNA, 32 nt, Human
ugaccucugccacccacauccuucacaaacuc

SEQ ID NO: 245779 - RNA, 32 nt, Human
ugaccucugccucucccacauuccuccccgcg

SEQ ID NO: 245780 - RNA, 32 nt, Human
ugaccucugccuggcucccccuuggugcaacu

SEQ ID NO: 245781 - RNA, 32 nt, Human
ugaccucugccugguggcugguguaucccaac

SEQ ID NO: 245782 - RNA, 32 nt, Human
ugaccucugggcugaaaacagcagcauuuuca

SEQ ID NO: 245783 - RNA, 25 nt, Human
ugaccucuggugaucugcccacuuc

SEQ ID NO: 245784 - RNA, 21 nt, Human
ugaccucuguccacccacuuu

SEQ ID NO: 245785 - RNA, 32 nt, Human
ugaccucugugaccuugcacuccccuggccug

SEQ ID NO: 245786 - RNA, 32 nt, Human
ugaccucuuagcagaaccgcuuccauucugga

SEQ ID NO: 245787 - RNA, 23 nt, Human
ugaccucuugauccacccgacuu

SEQ ID NO: 245788 - RNA, 23 nt, Human
ugaccucuugauccgccugccuu

SEQ ID NO: 245789 - RNA, 23 nt, Human
ugaccucuugaucugcccaccuu

SEQ ID NO: 245790 - RNA, 22 nt, Human
ugaccucuuuaggccccgcuca

SEQ ID NO: 245791 - RNA, 21 nt, Human
ugaccucuuucacaguuggcu

SEQ ID NO: 245792 - RNA, 32 nt, Human
ugaccucuuucuuccucuuucaccaugugagg

SEQ ID NO: 245793 - RNA, 26 nt, Human
ugaccugaagugauccaccugccuua

SEQ ID NO: 245794 - RNA, 32 nt, Human
ugaccugacaaguacuaugugugugcaugucu

SEQ ID NO: 245795 - RNA, 32 nt, Human
ugaccugacaguuguaucccgauaauuugcca

SEQ ID NO: 245796 - RNA, 32 nt, Human
ugaccugaccuaggcuaggcagugggggccag

SEQ ID NO: 245797 - RNA, 32 nt, Human
ugaccugaccucaagugcucuugccacagaac

SEQ ID NO: 245798 - RNA, 32 nt, Human
ugaccugagagggacagugagauggggcuggc

SEQ ID NO: 245799 - RNA, 32 nt, Human
ugaccugagaugcacuucccuccucugugagc

SEQ ID NO: 245800 - RNA, 32 nt, Human
ugaccugagcccggggaggaacguggggcagg

SEQ ID NO: 245801 - RNA, 25 nt, Human
ugaccugaggcgaucugcccaccuc

SEQ ID NO: 245802 - RNA, 32 nt, Human
ugaccugaggcuguggucacagcggaggugug

SEQ ID NO: 245803 - RNA, 32 nt, Human
ugaccugaguauccaccaugugccaggcacag

SEQ ID NO: 245804 - RNA, 32 nt, Human
ugaccugaguguccuaggcauucacucggagc

SEQ ID NO: 245805 - RNA, 32 nt, Human
ugaccugaugcucuuccuggcaccacauggcc

SEQ ID NO: 245806 - RNA, 23 nt, Human
ugaccugauguccauucauccca

SEQ ID NO: 245807 - RNA, 32 nt, Human
ugaccugcacaggaucacagagcauggggcag

SEQ ID NO: 245808 - RNA, 32 nt, Human
ugaccugcacaucugcagugagggcagaauuc

SEQ ID NO: 245809 - RNA, 32 nt, Human
ugaccugcacccagguugugggggcuguaugg

SEQ ID NO: 245810 - RNA, 22 nt, Human
ugaccugcaccgaaguuugucc

SEQ ID NO: 245811 - RNA, 32 nt, Human
ugaccugcaccgaaguuugucccauuuguugc

SEQ ID NO: 245812 - RNA, 23 nt, Human
ugaccugcacuuucauuguacug

SEQ ID NO: 245813 - RNA, 21 nt, Human
ugaccugcagcaggccugcug

SEQ ID NO: 245814 - RNA, 32 nt, Human
ugaccugcaguggcuuaauuccgcuagcuaug

SEQ ID NO: 245815 - RNA, 32 nt, Human
ugaccugcaucaagucuucugaucucagauaa

SEQ ID NO: 245816 - RNA, 32 nt, Human
ugaccugcauuaacgucaaagcagagaucuua

SEQ ID NO: 245817 - RNA, 20 nt, Human
ugaccugcauugauuggcug

SEQ ID NO: 245818 - RNA, 18 nt, Human
ugaccugcccccugcaca

SEQ ID NO: 245819 - RNA, 32 nt, Human
ugaccugcccucugugagccucccucugacac

SEQ ID NO: 245820 - RNA, 32 nt, Human
ugaccugcccugggugacacggauagcgugga

SEQ ID NO: 245821 - RNA, 23 nt, Human
ugaccugccucccccuccccgcc

SEQ ID NO: 245822 - RNA, 32 nt, Human
ugaccugccucccuucaugcauggaaauuccc

SEQ ID NO: 245823 - RNA, 32 nt, Human
ugaccugccucuggcccugguccugggcgggg

SEQ ID NO: 245824 - RNA, 19 nt, Human
ugaccugccuguagcccca

SEQ ID NO: 245825 - RNA, 32 nt, Human
ugaccugccuuccaccauuaagaugaagagcu

SEQ ID NO: 245826 - RNA, 32 nt, Human
ugaccugcgauggugacacccugacucucagu

SEQ ID NO: 245827 - RNA, 32 nt, Human
ugaccugcucacugugucagcuguuuucccug

SEQ ID NO: 245828 - RNA, 21 nt, Human
ugaccugcuccgcugcuccuu

SEQ ID NO: 245829 - RNA, 32 nt, Human
ugaccugcugacugcacucugccaggcuuccc

SEQ ID NO: 245830 - RNA, 32 nt, Human
ugaccugcugcccggcuggaacugggggugcu

SEQ ID NO: 245831 - RNA, 32 nt, Human
ugaccugcugggaaggcaggcugauggggcac

SEQ ID NO: 245832 - RNA, 32 nt, Human
ugaccugcuguugguguacauguggguacagg

SEQ ID NO: 245833 - RNA, 32 nt, Human
ugaccuggaaccucugggagggcugcagagua

SEQ ID NO: 245834 - RNA, 32 nt, Human
ugaccuggacaaggcugaccucagugccagag

SEQ ID NO: 245835 - RNA, 32 nt, Human
ugaccuggcaggcggagguugcagugagccga

SEQ ID NO: 245836 - RNA, 20 nt, Human
ugaccuggcccgcccgccuu

SEQ ID NO: 245837 - RNA, 30 nt, Human
ugaccuggccucuccaaugucuccucgaac

SEQ ID NO: 245838 - RNA, 32 nt, Human
ugaccuggcgccagccucaucgucguguccuu

SEQ ID NO: 245839 - RNA, 32 nt, Human
ugaccuggcuccugcccauuggugucccaaga

SEQ ID NO: 245840 - RNA, 32 nt, Human
ugaccugggaggacagcggagccaggagcucc

SEQ ID NO: 245841 - RNA, 32 nt, Human
ugaccugggaggcggagauugcggugagccua

SEQ ID NO: 245842 - RNA, 32 nt, Human
ugaccugggcauacgcagcugcaggaucccuu

SEQ ID NO: 245843 - RNA, 32 nt, Human
ugaccugggggcuucuggaggagaggaugaga

SEQ ID NO: 245844 - RNA, 32 nt, Human
ugaccugggguccugggcugggauagcucaac

SEQ ID NO: 245845 - RNA, 32 nt, Human
ugaccugggucaucaccaugugcuuauugaag

SEQ ID NO: 245846 - RNA, 23 nt, Human
ugaccuggugauccacccaccuc

SEQ ID NO: 245847 - RNA, 23 nt, Human
ugaccuggugauccaccugccuc

SEQ ID NO: 245848 - RNA, 24 nt, Human
ugaccuggugauccuccugccuca

SEQ ID NO: 245849 - RNA, 23 nt, Human
ugaccuggugaucugcccaccca

SEQ ID NO: 245850 - RNA, 23 nt, Human
ugaccuggugaucugcccaccuc

SEQ ID NO: 245851 - RNA, 32 nt, Human
ugaccuggugaucugcccaccugggccuccca

SEQ ID NO: 245852 - RNA, 23 nt, Human
ugaccuggugauuugcccgccuu

SEQ ID NO: 245853 - RNA, 18 nt, Human
ugaccugguggacagggg

SEQ ID NO: 245854 - RNA, 18 nt, Human
ugaccugguggagggcga

SEQ ID NO: 245855 - RNA, 32 nt, Human
ugaccugguggagggcgacgagggcaggaugu

SEQ ID NO: 245856 - RNA, 23 nt, Human
ugaccuguauuccacuuacucca

SEQ ID NO: 245857 - RNA, 22 nt, Human
ugaccugucccauggauccuga

SEQ ID NO: 245858 - RNA, 19 nt, Human
ugaccugucuagggccaca

SEQ ID NO: 245859 - RNA, 32 nt, Human
ugaccugugacuguuuuaucuccagggccaac

SEQ ID NO: 245860 - RNA, 24 nt, Human
ugaccugugcacgccuucugcaac

SEQ ID NO: 245861 - RNA, 32 nt, Human
ugaccuguggaggaugggaggggugagcagca

SEQ ID NO: 245862 - RNA, 32 nt, Human
ugaccuguuacugaggcuggauggaggauggc

SEQ ID NO: 245863 - RNA, 32 nt, Human
ugaccuguuaggcugagcucaggaauugucca

SEQ ID NO: 245864 - RNA, 32 nt, Human
ugaccuguucacugcugaguccucagcacuga

SEQ ID NO: 245865 - RNA, 32 nt, Human
ugaccuuaaaacaccccagggccggcuccggc

SEQ ID NO: 245866 - RNA, 25 nt, Human
ugaccuuaagugauccacccaccuu

SEQ ID NO: 245867 - RNA, 24 nt, Human
ugaccuuaagugauccaccugccu

SEQ ID NO: 245868 - RNA, 32 nt, Human
ugaccuuacuugcauuuauccggcauuauuuc

SEQ ID NO: 245869 - RNA, 32 nt, Human
ugaccuuagccaugguuugcaagugaacagaa

SEQ ID NO: 245870 - RNA, 25 nt, Human
ugaccuuaggugauccacucgccuu

SEQ ID NO: 245871 - RNA, 26 nt, Human
ugaccuuaggugauccgcccgccuca

SEQ ID NO: 245872 - RNA, 25 nt, Human
ugaccuuaggugaucugcccacuuc

SEQ ID NO: 245873 - RNA, 25 nt, Human
ugaccuuagguggucagcccgccuc

SEQ ID NO: 245874 - RNA, 25 nt, Human
ugaccuuaguugaucugcccaccuc

SEQ ID NO: 245875 - RNA, 21 nt, Human
ugaccuuauaacccucugcac

SEQ ID NO: 245876 - RNA, 23 nt, Human
ugaccuuauaauccgcccaccuc

SEQ ID NO: 245877 - RNA, 22 nt, Human
ugaccuuaugccauuccauaua

SEQ ID NO: 245878 - RNA, 32 nt, Human
ugaccuucacccgggauggagggguccagugg

SEQ ID NO: 245879 - RNA, 26 nt, Human
ugaccuucaggugauccaccugccuc

SEQ ID NO: 245880 - RNA, 32 nt, Human
ugaccuucauuucuagguucuucaagaauggu

SEQ ID NO: 245881 - RNA, 32 nt, Human
ugaccuuccauccuuaccuguauucccaucuc

SEQ ID NO: 245882 - RNA, 23 nt, Human
ugaccuuccaucuggugaaccaa

SEQ ID NO: 245883 - RNA, 32 nt, Human
ugaccuuccgcacaucucuaaguuuuaucuuu

SEQ ID NO: 245884 - RNA, 18 nt, Human
ugaccuuccucagccuca

SEQ ID NO: 245885 - RNA, 32 nt, Human
ugaccuuccucuucuuuaacccuuuagcccua

SEQ ID NO: 245886 - RNA, 32 nt, Human
ugaccuuccuuccuuccuuccuucccucccuu

SEQ ID NO: 245887 - RNA, 32 nt, Human
ugaccuuccuucugcuggugaagggccaacag

SEQ ID NO: 245888 - RNA, 32 nt, Human
ugaccuucgcuugguguccuccuggccucagc

SEQ ID NO: 245889 - RNA, 23 nt, Human
ugaccuucuccugccccauuuca

SEQ ID NO: 245890 - RNA, 23 nt, Human
ugaccuucugaucugccugccuc

SEQ ID NO: 245891 - RNA, 24 nt, Human
ugaccuucugucccggccgccuua

SEQ ID NO: 245892 - RNA, 32 nt, Human
ugaccuucugugaagaacugggguagugacuu

SEQ ID NO: 245893 - RNA, 22 nt, Human
ugaccuucuuugcccaccugca

SEQ ID NO: 245894 - RNA, 32 nt, Human
ugaccuucuuuguccuuuuuacagcuuuugac

SEQ ID NO: 245895 - RNA, 19 nt, Human
ugaccuugacucucugagg

SEQ ID NO: 245896 - RNA, 26 nt, Human
ugaccuugagccuucuauuugccuca

SEQ ID NO: 245897 - RNA, 18 nt, Human
ugaccuugcacugcuccu

SEQ ID NO: 245898 - RNA, 32 nt, Human
ugaccuugcagaaccaccgcauuccacccugc

SEQ ID NO: 245899 - RNA, 32 nt, Human
ugaccuugcaucuccagacuguuccagagaag

SEQ ID NO: 245900 - RNA, 32 nt, Human
ugaccuugccacuugaauccuccagggccugu

SEQ ID NO: 245901 - RNA, 32 nt, Human
ugaccuugcccauagccuuggccacaccagua

SEQ ID NO: 245902 - RNA, 19 nt, Human
ugaccuugcccucugccca

SEQ ID NO: 245903 - RNA, 32 nt, Human
ugaccuugccuccuucuccuugccaacuuuga

SEQ ID NO: 245904 - RNA, 21 nt, Human
ugaccuugcuggccucucuca

SEQ ID NO: 245905 - RNA, 22 nt, Human
ugaccuuggacaagucacuuca

SEQ ID NO: 245906 - RNA, 32 nt, Human
ugaccuuggacaccagccuccagcacgcugag

SEQ ID NO: 245907 - RNA, 32 nt, Human
ugaccuuggagguggaggagaaugaugggcgu

SEQ ID NO: 245908 - RNA, 23 nt, Human
ugaccuuggcccaucugccugca

SEQ ID NO: 245909 - RNA, 32 nt, Human
ugaccuuggcucacugcaaccuccaggccagc

SEQ ID NO: 245910 - RNA, 32 nt, Human
ugaccuuggcuggauuucuucugccauuguuu

SEQ ID NO: 245911 - RNA, 32 nt, Human
ugaccuugggggcaaggaauccagaaagguag

SEQ ID NO: 245912 - RNA, 25 nt, Human
ugaccuuggguaauccaccugccuu

SEQ ID NO: 245913 - RNA, 24 nt, Human
ugaccuuggugauccacccgccuu

SEQ ID NO: 245914 - RNA, 32 nt, Human
ugaccuuguagauggccuuuuccuucaucccc

SEQ ID NO: 245915 - RNA, 23 nt, Human
ugaccuugucauccaccugucuu

SEQ ID NO: 245916 - RNA, 23 nt, Human
ugaccuugugaaccacccgucuc

SEQ ID NO: 245917 - RNA, 23 nt, Human
ugaccuugugaaccacucauuuu

SEQ ID NO: 245918 - RNA, 24 nt, Human
ugaccuugugauacaccugccuca

SEQ ID NO: 245919 - RNA, 24 nt, Human
ugaccuugugauccaccagccuca

SEQ ID NO: 245920 - RNA, 23 nt, Human
ugaccuugugauccacccaccuc

SEQ ID NO: 245921 - RNA, 24 nt, Human
ugaccuugugauccacccaccuca

SEQ ID NO: 245922 - RNA, 23 nt, Human
ugaccuugugauccacccaccuu

SEQ ID NO: 245923 - RNA, 24 nt, Human
ugaccuugugauccaccccgccuu

SEQ ID NO: 245924 - RNA, 23 nt, Human
ugaccuugugauccaccuccucg

SEQ ID NO: 245925 - RNA, 24 nt, Human
ugaccuugugauccaccugccuca

SEQ ID NO: 245926 - RNA, 23 nt, Human
ugaccuugugauccaccugccuu

SEQ ID NO: 245927 - RNA, 24 nt, Human
ugaccuugugauccaccuggccuu

SEQ ID NO: 245928 - RNA, 21 nt, Human
ugaccuugugauccaucgauc

SEQ ID NO: 245929 - RNA, 23 nt, Human
ugaccuugugaucccccugccuc

SEQ ID NO: 245930 - RNA, 24 nt, Human
ugaccuugugauccgcaugccuca

SEQ ID NO: 245931 - RNA, 23 nt, Human
ugaccuugugauccgccaaccuu

SEQ ID NO: 245932 - RNA, 23 nt, Human
ugaccuugugauccgcccaccuc

SEQ ID NO: 245933 - RNA, 23 nt, Human
ugaccuugugauccgcccgccuc

SEQ ID NO: 245934 - RNA, 24 nt, Human
ugaccuugugauccgcccgccuca

SEQ ID NO: 245935 - RNA, 23 nt, Human
ugaccuugugauccgccugccuc

SEQ ID NO: 245936 - RNA, 24 nt, Human
ugaccuugugauccgccugccuca

SEQ ID NO: 245937 - RNA, 24 nt, Human
ugaccuugugauccgcgcgccuca

SEQ ID NO: 245938 - RNA, 24 nt, Human
ugaccuugugauccgcucgccuca

SEQ ID NO: 245939 - RNA, 23 nt, Human
ugaccuugugauccguccgccuu

SEQ ID NO: 245940 - RNA, 24 nt, Human
ugaccuugugauccucccgccuca

SEQ ID NO: 245941 - RNA, 21 nt, Human
ugaccuugugaucuaccugcc

SEQ ID NO: 245942 - RNA, 23 nt, Human
ugaccuugugaucugcccaccuc

SEQ ID NO: 245943 - RNA, 23 nt, Human
ugaccuugugaucugcccaccuu

SEQ ID NO: 245944 - RNA, 23 nt, Human
ugaccuugugaucugcccgccuc

SEQ ID NO: 245945 - RNA, 23 nt, Human
ugaccuugugaucugcccgccuu

SEQ ID NO: 245946 - RNA, 24 nt, Human
ugaccuugugaucugccugccuca

SEQ ID NO: 245947 - RNA, 23 nt, Human
ugaccuugugaugcucccaccuc

SEQ ID NO: 245948 - RNA, 23 nt, Human
ugaccuugugcccgauucuuuca

SEQ ID NO: 245949 - RNA, 32 nt, Human
ugaccuugugcccgauucuuucagauugcuuu

SEQ ID NO: 245950 - RNA, 23 nt, Human
ugaccuugugguccacccgccuc

SEQ ID NO: 245951 - RNA, 24 nt, Human
ugaccuugugguccacccgccuca

SEQ ID NO: 245952 - RNA, 23 nt, Human
ugaccuugugguccaccugccuu

SEQ ID NO: 245953 - RNA, 23 nt, Human
ugaccuuguguucucccgccucg

SEQ ID NO: 245954 - RNA, 32 nt, Human
ugaccuuucaccugaugcuaagccccuacaag

SEQ ID NO: 245955 - RNA, 32 nt, Human
ugaccuuucaucuguugcuaagccccuacaag

SEQ ID NO: 245956 - RNA, 32 nt, Human
ugaccuuucugguaguuucucaaaucccugug

SEQ ID NO: 245957 - RNA, 32 nt, Human
ugaccuuucuucucucaacaggaaccugccug

SEQ ID NO: 245958 - RNA, 32 nt, Human
ugaccuuugaagcacagauaaucaaucaacgu

SEQ ID NO: 245959 - RNA, 18 nt, Human
ugaccuuugacccugcca

SEQ ID NO: 245960 - RNA, 32 nt, Human
ugaccuuugauacucucuaccuccuccagaaa

SEQ ID NO: 245961 - RNA, 23 nt, Human
ugaccuuugcaucugccugucca

SEQ ID NO: 245962 - RNA, 25 nt, Human
ugaccuuuggugauccaccugccuu

SEQ ID NO: 245963 - RNA, 23 nt, Human
ugaccuuuguaucuacucuuuua

SEQ ID NO: 245964 - RNA, 32 nt, Human
ugaccuuugucuggaaugucugaaaaguaguu

SEQ ID NO: 245965 - RNA, 32 nt, Human
ugaccuuuuucacuguggccaucaggacuuuc

SEQ ID NO: 245966 - RNA, 25 nt, Human
ugaccuuuuuucccacccuacuuca

SEQ ID NO: 245967 - RNA, 32 nt, Human
ugacgaagaaaagcccaagaucaaagaugugg

SEQ ID NO: 245968 - RNA, 32 nt, Human
ugacgaagaucuugagccacccuaccucccug

SEQ ID NO: 245969 - RNA, 32 nt, Human
ugacgacaagaccaccaacguguccuuguacc

SEQ ID NO: 245970 - RNA, 32 nt, Human
ugacgacaccugucuguuccugcccuguugcu

SEQ ID NO: 245971 - RNA, 32 nt, Human
ugacgacacgaucauaaccacucuggagaacc

SEQ ID NO: 245972 - RNA, 32 nt, Human
ugacgacacucagguccagccuugccagucuc

SEQ ID NO: 245973 - RNA, 32 nt, Human
ugacgacagaagcagggguuggagugauguga

SEQ ID NO: 245974 - RNA, 32 nt, Human
ugacgacaucacagcucacugcagccucaacc

SEQ ID NO: 245975 - RNA, 32 nt, Human
ugacgacucacugcagccucaaccuccugggg

SEQ ID NO: 245976 - RNA, 32 nt, Human
ugacgacuccgagagcccugacucccgccuug

SEQ ID NO: 245977 - RNA, 32 nt, Human
ugacgacucuugcgcgcacacacacauacaag

SEQ ID NO: 245978 - RNA, 32 nt, Human
ugacgagacagauaguuagagcagagucaaau

SEQ ID NO: 245979 - RNA, 32 nt, Human
ugacgagacaucguucauaaggcacagcacau

SEQ ID NO: 245980 - RNA, 32 nt, Human
ugacgagauaaagaagagucuuaaacaucuug

SEQ ID NO: 245981 - RNA, 32 nt, Human
ugacgagauaagcaguuaugugaccucacgug

SEQ ID NO: 245982 - RNA, 23 nt, Human
ugacgagaucuuggcucacugca

SEQ ID NO: 245983 - RNA, 32 nt, Human
ugacgagcagcagcgaaagcaccuugaggccu

SEQ ID NO: 245984 - RNA, 32 nt, Human
ugacgagccuuacuuuuccuuuguggaaauau

SEQ ID NO: 245985 - RNA, 32 nt, Human
ugacgagggaagaucacuugagcccaggaguu

SEQ ID NO: 245986 - RNA, 32 nt, Human
ugacgagggugaggagugacggccagacuggg

SEQ ID NO: 245987 - RNA, 32 nt, Human
ugacgaguguggcagagagugugcaugugaga

SEQ ID NO: 245988 - RNA, 32 nt, Human
ugacgaucggcuuuguagcaagauccacaggu

SEQ ID NO: 245989 - RNA, 32 nt, Human
ugacgaugcaggcuggagucuggcugaggagc

SEQ ID NO: 245990 - RNA, 23 nt, Human
ugacgcaaucucggcucacugca

SEQ ID NO: 245991 - RNA, 23 nt, Human
ugacgcacaggcuggagugcagu

SEQ ID NO: 245992 - RNA, 24 nt, Human
ugacgcacaggcuggagugcagug

SEQ ID NO: 245993 - RNA, 32 nt, Human
ugacgcacuuuuccagcucgagcccucacgag

SEQ ID NO: 245994 - RNA, 32 nt, Human
ugacgcagcgaguuucagucgugacuuuucug

SEQ ID NO: 245995 - RNA, 32 nt, Human
ugacgcagcugaugccugccuugguuccuacc

SEQ ID NO: 245996 - RNA, 32 nt, Human
ugacgcaguggugccaucguagccuaaaagca

SEQ ID NO: 245997 - RNA, 32 nt, Human
ugacgcauagcccugcaccugcagccagcugg

SEQ ID NO: 245998 - RNA, 32 nt, Human
ugacgcaucuucuuuuucugccuguagagaug

SEQ ID NO: 245999 - RNA, 32 nt, Human
ugacgcaugaaggagauuauguugugcucuuu

SEQ ID NO: 246000 - RNA, 32 nt, Human
ugacgcaugccugcgcgcacagcugggccggg

SEQ ID NO: 246001 - RNA, 32 nt, Human
ugacgcaugccuguaaucccagcuacucggga

SEQ ID NO: 246002 - RNA, 32 nt, Human
ugacgcaugccuguaguccuagcuacucagga

SEQ ID NO: 246003 - RNA, 32 nt, Human
ugacgccaagaguucgagaccagccugggcau

SEQ ID NO: 246004 - RNA, 32 nt, Human
ugacgccagagcuguaagugucgugacgagcu

SEQ ID NO: 246005 - RNA, 32 nt, Human
ugacgccaggagccgggagagccgagugggag

SEQ ID NO: 246006 - RNA, 32 nt, Human
ugacgccauugcacuccagccuaggcaauaag

SEQ ID NO: 246007 - RNA, 32 nt, Human
ugacgccauugcacuccagccugggugagaag

SEQ ID NO: 246008 - RNA, 32 nt, Human
ugacgccccagaaaugcugcuuccauaucagc

SEQ ID NO: 246009 - RNA, 32 nt, Human
ugacgccccaggagcugagcaccaggcuuugc

SEQ ID NO: 246010 - RNA, 32 nt, Human
ugacgcccggagcuggaguuauggcggcuacg

SEQ ID NO: 246011 - RNA, 32 nt, Human
ugacgcccucauucuccuuucguucaauaacu

SEQ ID NO: 246012 - RNA, 32 nt, Human
ugacgcccucugcccaccucccccgcugugug

SEQ ID NO: 246013 - RNA, 32 nt, Human
ugacgccucaggugaaaaucugguuuuaaaau

SEQ ID NO: 246014 - RNA, 21 nt, Human
ugacgccugccuguaguccca

SEQ ID NO: 246015 - RNA, 15 nt, Human
ugacgccuggccuca

SEQ ID NO: 246016 - RNA, 32 nt, Human
ugacgccuguaaucccagcacuuugggaggcc

SEQ ID NO: 246017 - RNA, 32 nt, Human
ugacgccuucugggccccaucuguccuuccuc

SEQ ID NO: 246018 - RNA, 32 nt, Human
ugacgcgaucuuggcugacugcagucugugcc

SEQ ID NO: 246019 - RNA, 23 nt, Human
ugacgcgaucuugguucacugca

SEQ ID NO: 246020 - RNA, 32 nt, Human
ugacgcggcacugcgucuccagccuaccuccu

SEQ ID NO: 246021 - RNA, 32 nt, Human
ugacgcggguguuuccccaguuuguggccccu

SEQ ID NO: 246022 - RNA, 22 nt, Human
ugacgcggugcggauccagauc

SEQ ID NO: 246023 - RNA, 21 nt, Human
ugacgcguaccugugauccca

SEQ ID NO: 246024 - RNA, 32 nt, Human
ugacgcuccuugggugcugcugcuacucagac

SEQ ID NO: 246025 - RNA, 32 nt, Human
ugacgcucguccgcaaccucugcuguccuccg

SEQ ID NO: 246026 - RNA, 32 nt, Human
ugacgcucugggccgccaccuccgcggacccu

SEQ ID NO: 246027 - RNA, 32 nt, Human
ugacgcugcccaggaaaggaguucugagugcu

SEQ ID NO: 246028 - RNA, 32 nt, Human
ugacgcuggagugcucacaguguggcugggac

SEQ ID NO: 246029 - RNA, 32 nt, Human
ugacgcuggccgcggcgagaucaacgaguuga

SEQ ID NO: 246030 - RNA, 32 nt, Human
ugacgcugggaacccaggguugugguccauuc

SEQ ID NO: 246031 - RNA, 32 nt, Human
ugacgcuuccagaaagcuguggagagggacag

SEQ ID NO: 246032 - RNA, 32 nt, Human
ugacgcuuccuuggggccacuuccuucuuuuu

SEQ ID NO: 246033 - RNA, 20 nt, Human
ugacgcuugccuguauccca

SEQ ID NO: 246034 - RNA, 32 nt, Human
ugacgcuugccuguaucccagcuacucaggaa

SEQ ID NO: 246035 - RNA, 32 nt, Human
ugacggacacuggguucaggcuggcaucauca

SEQ ID NO: 246036 - RNA, 32 nt, Human
ugacggacuucaccggggcucuccaggcaucu

SEQ ID NO: 246037 - RNA, 32 nt, Human
ugacggagaaggagagaaagagacgggagaga

SEQ ID NO: 246038 - RNA, 32 nt, Human
ugacggaggaggaucacuugagcccaggaauu

SEQ ID NO: 246039 - RNA, 32 nt, Human
ugacggagggaggaggaggaggaagagguaug

SEQ ID NO: 246040 - RNA, 32 nt, Human
ugacggcaccaugccauccucugccuucugug

SEQ ID NO: 246041 - RNA, 32 nt, Human
ugacggccacugcgaggcucagggagaauuua

SEQ ID NO: 246042 - RNA, 32 nt, Human
ugacggcccugcaauguaucccuucucacagc

SEQ ID NO: 246043 - RNA, 32 nt, Human
ugacggccucucacucucaucuccugugcuca

SEQ ID NO: 246044 - RNA, 32 nt, Human
ugacggcguuggcggggcugggcacaggggca

SEQ ID NO: 246045 - RNA, 32 nt, Human
ugacggcuacuguggagaugcaguggaggacc

SEQ ID NO: 246046 - RNA, 32 nt, Human
ugacggcucacauuugccccagggaaggucac

SEQ ID NO: 246047 - RNA, 32 nt, Human
ugacggcucacugcagccugcgccucccagcg

SEQ ID NO: 246048 - RNA, 32 nt, Human
ugacggcucauuucugcuucaucauacauucc

SEQ ID NO: 246049 - RNA, 32 nt, Human
ugacggcuggggaccuggcggccgugggcucc

SEQ ID NO: 246050 - RNA, 32 nt, Human
ugacggcuguggaggccaggguggaacugggg

SEQ ID NO: 246051 - RNA, 20 nt, Human
ugacggcuuuuucccggggg

SEQ ID NO: 246052 - RNA, 32 nt, Human
ugacgggaagcggagguugcagugagccgaga

SEQ ID NO: 246053 - RNA, 32 nt, Human
ugacgggaccccagaggugccgggugacagcc

SEQ ID NO: 246054 - RNA, 32 nt, Human
ugacgggacucgccuccugguguuugguggga

SEQ ID NO: 246055 - RNA, 23 nt, Human
ugacgggagccucugcgaagagg

SEQ ID NO: 246056 - RNA, 21 nt, Human
ugacgggcaccuguaguccca

SEQ ID NO: 246057 - RNA, 32 nt, Human
ugacgggcagcuucgcagagugcaguacagca

SEQ ID NO: 246058 - RNA, 32 nt, Human
ugacgggcagcuucgcggagugcaguacagca

SEQ ID NO: 246059 - RNA, 32 nt, Human
ugacgggccgccuucugcuccagcugcaucac

SEQ ID NO: 246060 - RNA, 21 nt, Human
ugacgggcgccuguaauccca

SEQ ID NO: 246061 - RNA, 32 nt, Human
ugacggggccagcuggacacacggugagauuu

SEQ ID NO: 246062 - RNA, 32 nt, Human
ugacggggcugcaggagcaggugcagugggcg

SEQ ID NO: 246063 - RNA, 21 nt, Human
ugacgggugcccguaauccca

SEQ ID NO: 246064 - RNA, 21 nt, Human
ugacgggugccuguaauccca

SEQ ID NO: 246065 - RNA, 32 nt, Human
ugacgggugccuguaaucccagcuacucagga

SEQ ID NO: 246066 - RNA, 32 nt, Human
ugacggucauuuucuccuucuuucucccucuu

SEQ ID NO: 246067 - RNA, 32 nt, Human
ugacggugccacugcacuccagcuugggugac

SEQ ID NO: 246068 - RNA, 32 nt, Human
ugacggugcccaggauagauguaauauuucuu

SEQ ID NO: 246069 - RNA, 24 nt, Human
ugacgguggcaacggcagcgucgg

SEQ ID NO: 246070 - RNA, 18 nt, Human
ugacgguguccucgggga

SEQ ID NO: 246071 - RNA, 32 nt, Human
ugacguacaccuguaauuccagcuacuuggga

SEQ ID NO: 246072 - RNA, 32 nt, Human
ugacguacugcagccucaaccuccugggcuca

SEQ ID NO: 246073 - RNA, 32 nt, Human
ugacguauuuugcuucuaguaugugccuacug

SEQ ID NO: 246074 - RNA, 25 nt, Human
ugacgucaagugauccacccgacuc

SEQ ID NO: 246075 - RNA, 32 nt, Human
ugacgucagccaacccagcuggacuggccuua

SEQ ID NO: 246076 - RNA, 32 nt, Human
ugacgucagcuuccauucuuccuuucuuauag

SEQ ID NO: 246077 - RNA, 25 nt, Human
ugacgucaggugauccacccgccuc

SEQ ID NO: 246078 - RNA, 25 nt, Human
ugacgucaggugauccgcccaccuu

SEQ ID NO: 246079 - RNA, 23 nt, Human
ugacgucgugauccacccgccuc

SEQ ID NO: 246080 - RNA, 23 nt, Human
ugacgucgugauccacccgccuu

SEQ ID NO: 246081 - RNA, 23 nt, Human
ugacgucgugauccagccaccuc

SEQ ID NO: 246082 - RNA, 24 nt, Human
ugacgucgugauccgcccaccuca

SEQ ID NO: 246083 - RNA, 24 nt, Human
ugacgucgugauucgcccgccuca

SEQ ID NO: 246084 - RNA, 32 nt, Human
ugacgucucggaaaauucccccuugcccaggc

SEQ ID NO: 246085 - RNA, 32 nt, Human
ugacgucuucuggggcuccuggcaucccuagg

SEQ ID NO: 246086 - RNA, 22 nt, Human
ugacgugagucugcccuccuua

SEQ ID NO: 246087 - RNA, 32 nt, Human
ugacgugaucagagcucacugcagcuucaaca

SEQ ID NO: 246088 - RNA, 32 nt, Human
ugacgugaucauggcucacugcagccucaacc

SEQ ID NO: 246089 - RNA, 23 nt, Human
ugacgugaucucagcucacugca

SEQ ID NO: 246090 - RNA, 23 nt, Human
ugacgugaucuccgcucacugca

SEQ ID NO: 246091 - RNA, 24 nt, Human
ugacgugaucucggcucacugcag

SEQ ID NO: 246092 - RNA, 32 nt, Human
ugacgugaucucggcucacugcagccuugacu

SEQ ID NO: 246093 - RNA, 32 nt, Human
ugacguggaagacgccgaagaggugagggagg

SEQ ID NO: 246094 - RNA, 32 nt, Human
ugacguggcgucaccgcccucuacccucgcuu

SEQ ID NO: 246095 - RNA, 32 nt, Human
ugacgugggaggauugcuugugcccagggguu

SEQ ID NO: 246096 - RNA, 32 nt, Human
ugacguggguggcucacuugagcacaggaguu

SEQ ID NO: 246097 - RNA, 32 nt, Human
ugacguggucaccaaggcagugagccccgcug

SEQ ID NO: 246098 - RNA, 24 nt, Human
ugacguggucauagcucacugcag

SEQ ID NO: 246099 - RNA, 23 nt, Human
ugacguggugauccaccugccuc

SEQ ID NO: 246100 - RNA, 32 nt, Human
ugacguguaccaggcgucugugggguuugugu

SEQ ID NO: 246101 - RNA, 26 nt, Human
ugacguucaauaaaacuguugaaucu

SEQ ID NO: 246102 - RNA, 32 nt, Human
ugacguuggguugcuuccuaggccuggcugag

SEQ ID NO: 246103 - RNA, 32 nt, Human
ugacguuucacuccucaccuucccaacaccuc

SEQ ID NO: 246104 - RNA, 32 nt, Human
ugacguuucucuuccuugccuggacugccuuu

SEQ ID NO: 246105 - RNA, 32 nt, Human
ugacguuugcuagcuuuuaaauauauuuauuu

SEQ ID NO: 246106 - RNA, 32 nt, Human
ugacuaaaaauggaauuucuucaggaaucaua

SEQ ID NO: 246107 - RNA, 32 nt, Human
ugacuaaacucugccaggaugucuugccagca

SEQ ID NO: 246108 - RNA, 32 nt, Human
ugacuaaacugaccucuuccuccuggcuaaau

SEQ ID NO: 246109 - RNA, 32 nt, Human
ugacuaaagaagcagaccugggaaucaccuaa

SEQ ID NO: 246110 - RNA, 32 nt, Human
ugacuaaagcuaaacaccaguuucucaggagg

SEQ ID NO: 246111 - RNA, 32 nt, Human
ugacuaaauuauucuugaucuuuuggcauuua

SEQ ID NO: 246112 - RNA, 32 nt, Human
ugacuaacacagugaaaccccgucucuaauaa

SEQ ID NO: 246113 - RNA, 32 nt, Human
ugacuaacacggugaaaccccaucucuacuaa

SEQ ID NO: 246114 - RNA, 32 nt, Human
ugacuaacagcaacuccaucacuugagaagua

SEQ ID NO: 246115 - RNA, 32 nt, Human
ugacuaacauggugaaaccccaucucuacuaa

SEQ ID NO: 246116 - RNA, 32 nt, Human
ugacuaaccuggugcugggauucuacgaagau

SEQ ID NO: 246117 - RNA, 32 nt, Human
ugacuaaggaaggacuacagaggcuuugccaa

SEQ ID NO: 246118 - RNA, 32 nt, Human
ugacuaaggaugacacuaauuguuagcuguuu

SEQ ID NO: 246119 - RNA, 32 nt, Human
ugacuaaggcucucaugaaauucaaagugcca

SEQ ID NO: 246120 - RNA, 32 nt, Human
ugacuaagggucaggucauguuugaaaccaug

SEQ ID NO: 246121 - RNA, 32 nt, Human
ugacuaaggguggucagccagagcucauggga

SEQ ID NO: 246122 - RNA, 22 nt, Human
ugacuaagucaagcuacuuccu

SEQ ID NO: 246123 - RNA, 32 nt, Human
ugacuaauccuguggcaaaaccacgacaccac

SEQ ID NO: 246124 - RNA, 32 nt, Human
ugacuacaccugaaaaguaucaagagacaucu

SEQ ID NO: 246125 - RNA, 32 nt, Human
ugacuacagggccaccggcaauaaaagcccag

SEQ ID NO: 246126 - RNA, 32 nt, Human
ugacuacaguagccauaaagaaaaugaaauac

SEQ ID NO: 246127 - RNA, 32 nt, Human
ugacuacaucacagccaggcggcauucccugc

SEQ ID NO: 246128 - RNA, 32 nt, Human
ugacuaccccagacucugccugccucagaucu

SEQ ID NO: 246129 - RNA, 32 nt, Human
ugacuaccucaaaggccaggcacccccaaauc

SEQ ID NO: 246130 - RNA, 32 nt, Human
ugacuaccuucccagccaugucucugcaguca

SEQ ID NO: 246131 - RNA, 19 nt, Human
ugacuacgaugacauagca

SEQ ID NO: 246132 - RNA, 32 nt, Human
ugacuacuagaggcuugacuugcagugaaacc

SEQ ID NO: 246133 - RNA, 32 nt, Human
ugacuagaaacugccuuuuucuccacuucauu

SEQ ID NO: 246134 - RNA, 32 nt, Human
ugacuagaagugaaacugcaacacuaacuucc

SEQ ID NO: 246135 - RNA, 32 nt, Human
ugacuagacuaugagcuauugcagugaaaggg

SEQ ID NO: 246136 - RNA, 32 nt, Human
ugacuagagaggaggugggaacagaagagaga

SEQ ID NO: 246137 - RNA, 32 nt, Human
ugacuagaucacguuucucagcagccugacag

SEQ ID NO: 246138 - RNA, 32 nt, Human
ugacuagcaaggagucugcuucugcuacuugg

SEQ ID NO: 246139 - RNA, 32 nt, Human
ugacuagcacagagcugaucucuguuucuguu

SEQ ID NO: 246140 - RNA, 32 nt, Human
ugacuagccagcccucuacuccuccaaccuuu

SEQ ID NO: 246141 - RNA, 32 nt, Human
ugacuagccuaggucaucagagcccagacucc

SEQ ID NO: 246142 - RNA, 32 nt, Human
ugacuagcuacugcacuccaaccugggcaaca

SEQ ID NO: 246143 - RNA, 32 nt, Human
ugacuagcugaaaugugaauucuguuaguguu

SEQ ID NO: 246144 - RNA, 32 nt, Human
ugacuaggacacauuugggaguauuuaaucag

SEQ ID NO: 246145 - RNA, 32 nt, Human
ugacuaggcccucucauuuccucccuccuugg

SEQ ID NO: 246146 - RNA, 32 nt, Human
ugacuaggccggcucccccagacucagagggc

SEQ ID NO: 246147 - RNA, 32 nt, Human
ugacuaggggcuggggugucuccucaccaggg

SEQ ID NO: 246148 - RNA, 18 nt, Human
ugacuaggguuucagaca

SEQ ID NO: 246149 - RNA, 32 nt, Human
ugacuaggugugugugcacauguguagggugc

SEQ ID NO: 246150 - RNA, 32 nt, Human
ugacuagucacagucagagucagaaucacagg

SEQ ID NO: 246151 - RNA, 32 nt, Human
ugacuagucccauccuguacauggagaaaacg

SEQ ID NO: 246152 - RNA, 32 nt, Human
ugacuagugaucucaggagauggcacuguccu

SEQ ID NO: 246153 - RNA, 32 nt, Human
ugacuauagugugagccaggaaucacuggcug

SEQ ID NO: 246154 - RNA, 32 nt, Human
ugacuaucacacacuuucucuucaaugaaaaa

SEQ ID NO: 246155 - RNA, 32 nt, Human
ugacuaucaucggccaugccacugccuugcuc

SEQ ID NO: 246156 - RNA, 32 nt, Human
ugacuaucuuuuaggaauucaggaagcaaauc

SEQ ID NO: 246157 - RNA, 32 nt, Human
ugacuaugaagaggaagaggaggacagugaug

SEQ ID NO: 246158 - RNA, 32 nt, Human
ugacuaugccacuguacuccagccuggguaac

SEQ ID NO: 246159 - RNA, 32 nt, Human
ugacuauggcugcuuuagacaacugugacaga

SEQ ID NO: 246160 - RNA, 22 nt, Human
ugacuauguuucacccgcuuca

SEQ ID NO: 246161 - RNA, 32 nt, Human
ugacuauucucaucucuguuuugcagguuuac

SEQ ID NO: 246162 - RNA, 32 nt, Human
ugacuauuuaauccuuucuacuugucgcuaaa

SEQ ID NO: 246163 - RNA, 32 nt, Human
ugacuauuuuuagaaucauaaaauuaguuacu

SEQ ID NO: 246164 - RNA, 32 nt, Human
ugacucaaaguagaucguuauuuugaucaaac

SEQ ID NO: 246165 - RNA, 32 nt, Human
ugacucaaauguauuauugccaaccaagucgu

SEQ ID NO: 246166 - RNA, 32 nt, Human
ugacucaacaccugggcucucacagggaggag

SEQ ID NO: 246167 - RNA, 32 nt, Human
ugacucaagauugcucuacagacucagaagau

SEQ ID NO: 246168 - RNA, 21 nt, Human
ugacucaagccuauaauccca

SEQ ID NO: 246169 - RNA, 32 nt, Human
ugacucaagccuguaucccagcacuuugggag

SEQ ID NO: 246170 - RNA, 32 nt, Human
ugacucaagucucggcccugaggacucagaac

SEQ ID NO: 246171 - RNA, 23 nt, Human
ugacucacaaccuucuaauccca

SEQ ID NO: 246172 - RNA, 32 nt, Human
ugacucacaauuguccucagaaccuagugcca

SEQ ID NO: 246173 - RNA, 21 nt, Human
ugacucacaccuauaauccca

SEQ ID NO: 246174 - RNA, 19 nt, Human
ugacucacaccuguaaucc

SEQ ID NO: 246175 - RNA, 21 nt, Human
ugacucacaccuguaauccca

SEQ ID NO: 246176 - RNA, 23 nt, Human
ugacucacaccuguaaucccagc

SEQ ID NO: 246177 - RNA, 32 nt, Human
ugacucacaccuguaaucccagcacuuucgga

SEQ ID NO: 246178 - RNA, 32 nt, Human
ugacucacaccuguaaucccagcacuuuggga

SEQ ID NO: 246179 - RNA, 21 nt, Human
ugacucacaccuguaauccua

SEQ ID NO: 246180 - RNA, 21 nt, Human
ugacucacaccuguaaucuca

SEQ ID NO: 246181 - RNA, 32 nt, Human
ugacucacaccuguaauuccagcacuucagga

SEQ ID NO: 246182 - RNA, 32 nt, Human
ugacucacaccuguaauuccagcacuuuggga

SEQ ID NO: 246183 - RNA, 21 nt, Human
ugacucacaccuguacuccca

SEQ ID NO: 246184 - RNA, 18 nt, Human
ugacucacacugauccca

SEQ ID NO: 246185 - RNA, 21 nt, Human
ugacucacacuuguaauccca

SEQ ID NO: 246186 - RNA, 32 nt, Human
ugacucacagcccuauucaggcaggagcugcu

SEQ ID NO: 246187 - RNA, 21 nt, Human
ugacucacagccguaauccca

SEQ ID NO: 246188 - RNA, 19 nt, Human
ugacucacaucuguaaucc

SEQ ID NO: 246189 - RNA, 21 nt, Human
ugacucacaucuguaauccca

SEQ ID NO: 246190 - RNA, 32 nt, Human
ugacucaccaacaaauguacagcaauaacacc

SEQ ID NO: 246191 - RNA, 19 nt, Human
ugacucaccagaugggguc

SEQ ID NO: 246192 - RNA, 21 nt, Human
ugacucacgccuauaauccca

SEQ ID NO: 246193 - RNA, 32 nt, Human
ugacucacgccuauaaucccagcacuuuggga

SEQ ID NO: 246194 - RNA, 21 nt, Human
ugacucacgccuauaaucuca

SEQ ID NO: 246195 - RNA, 21 nt, Human
ugacucacgccuguaacccca

SEQ ID NO: 246196 - RNA, 23 nt, Human
ugacucacgccuguaaccccagc

SEQ ID NO: 246197 - RNA, 32 nt, Human
ugacucacgccuguaaccccagcacuuuggga

SEQ ID NO: 246198 - RNA, 21 nt, Human
ugacucacgccuguaauccca

SEQ ID NO: 246199 - RNA, 23 nt, Human
ugacucacgccuguaaucccagc

SEQ ID NO: 246200 - RNA, 32 nt, Human
ugacucacgccuguaaucccagcacuuuagga

SEQ ID NO: 246201 - RNA, 32 nt, Human
ugacucacgccuguaaucccagcacuuuggga

SEQ ID NO: 246202 - RNA, 32 nt, Human
ugacucacguacuguaguuugcacuggacgcc

SEQ ID NO: 246203 - RNA, 21 nt, Human
ugacucacgucuguaauccca

SEQ ID NO: 246204 - RNA, 23 nt, Human
ugacucacgucuguaaucccagc

SEQ ID NO: 246205 - RNA, 32 nt, Human
ugacucacgucuguaaucccagcacuuuggga

SEQ ID NO: 246206 - RNA, 32 nt, Human
ugacucacuacaaccuccgccucccagguuca

SEQ ID NO: 246207 - RNA, 32 nt, Human
ugacucacuacagccucugccucccagguuca

SEQ ID NO: 246208 - RNA, 32 nt, Human
ugacucacugagacuggcucaauaucgacuuc

SEQ ID NO: 246209 - RNA, 32 nt, Human
ugacucacugaugaaggcccuggugaggagaa

SEQ ID NO: 246210 - RNA, 32 nt, Human
ugacucacugcaacaucugccucccggguuca

SEQ ID NO: 246211 - RNA, 32 nt, Human
ugacucacugcaaccuccaccucccagguuca

SEQ ID NO: 246212 - RNA, 32 nt, Human
ugacucacugcaaccuccgccucacagcuuca

SEQ ID NO: 246213 - RNA, 32 nt, Human
ugacucacugcaaccuccgccucccagguuca

SEQ ID NO: 246214 - RNA, 32 nt, Human
ugacucacugcaaccuccgccuccuggguuca

SEQ ID NO: 246215 - RNA, 32 nt, Human
ugacucacugcaaccucugccucccagguuua

SEQ ID NO: 246216 - RNA, 32 nt, Human
ugacucacugcaaccucugccucucggguucc

SEQ ID NO: 246217 - RNA, 32 nt, Human
ugacucacugcaacuucugccacccagguuca

SEQ ID NO: 246218 - RNA, 32 nt, Human
ugacucacugcaaucuccaccucccacagguu

SEQ ID NO: 246219 - RNA, 32 nt, Human
ugacucacugcaauucugccuccuggguucaa

SEQ ID NO: 246220 - RNA, 32 nt, Human
ugacucacugcagccucaaccucccaggcuca

SEQ ID NO: 246221 - RNA, 32 nt, Human
ugacucagaaucagagaggcagucauaucagu

SEQ ID NO: 246222 - RNA, 32 nt, Human
ugacucagaauggauuaacaugaaaguuaucc

SEQ ID NO: 246223 - RNA, 32 nt, Human
ugacucagcaagaauagauggauggggcugga

SEQ ID NO: 246224 - RNA, 32 nt, Human
ugacucagcagacucagcagggaugacucagc

SEQ ID NO: 246225 - RNA, 20 nt, Human
ugacucagcaguccuucccu

SEQ ID NO: 246226 - RNA, 32 nt, Human
ugacucagccucucaaguagcugggauuacaa

SEQ ID NO: 246227 - RNA, 32 nt, Human
ugacucaggaccccgccucuguccucacugug

SEQ ID NO: 246228 - RNA, 24 nt, Human
ugacucaggagccuccuagggcuu

SEQ ID NO: 246229 - RNA, 21 nt, Human
ugacucaggcagguaauccca

SEQ ID NO: 246230 - RNA, 20 nt, Human
ugacucaggccugagggcua

SEQ ID NO: 246231 - RNA, 32 nt, Human
ugacucaggccuggggcaucugggcauuguag

SEQ ID NO: 246232 - RNA, 21 nt, Human
ugacucaggccuguaauccca

SEQ ID NO: 246233 - RNA, 23 nt, Human
ugacucaggccuguaaucccagc

SEQ ID NO: 246234 - RNA, 32 nt, Human
ugacucaggccuguaaucccagcacuuuggga

SEQ ID NO: 246235 - RNA, 32 nt, Human
ugacucagggguggaggagccuaggaaugccu

SEQ ID NO: 246236 - RNA, 32 nt, Human
ugacucagucacagcaacccccuguuaucugc

SEQ ID NO: 246237 - RNA, 32 nt, Human
ugacucagucccaguaacccccuguuaucugc

SEQ ID NO: 246238 - RNA, 32 nt, Human
ugacucagugaugcagaaccuuucagaguuag

SEQ ID NO: 246239 - RNA, 32 nt, Human
ugacucagugcucccuuccucuccucuccuuc

SEQ ID NO: 246240 - RNA, 21 nt, Human
ugacucauaccuguaauccca

SEQ ID NO: 246241 - RNA, 18 nt, Human
ugacucauaccuguuucc

SEQ ID NO: 246242 - RNA, 22 nt, Human
ugacucauaccuguuuccggcu

SEQ ID NO: 246243 - RNA, 18 nt, Human
ugacucaucaaaauccca

SEQ ID NO: 246244 - RNA, 32 nt, Human
ugacucaucagaguguggggguugugaaagcu

SEQ ID NO: 246245 - RNA, 32 nt, Human
ugacucaucagggcacuuugugaagagugagg

SEQ ID NO: 246246 - RNA, 24 nt, Human
ugacucaucccuacccauauucuu

SEQ ID NO: 246247 - RNA, 32 nt, Human
ugacucaucgccaagauuugcuguaaugcagg

SEQ ID NO: 246248 - RNA, 32 nt, Human
ugacucaucuuucagaccuaaguccuccuguc

SEQ ID NO: 246249 - RNA, 20 nt, Human
ugacucaugacucaccccca

SEQ ID NO: 246250 - RNA, 19 nt, Human
ugacucaugccaucuuccc

SEQ ID NO: 246251 - RNA, 21 nt, Human
ugacucaugccuacaauccca

SEQ ID NO: 246252 - RNA, 23 nt, Human
ugacucaugccuacaaucccagc

SEQ ID NO: 246253 - RNA, 32 nt, Human
ugacucaugccuauaaucccagcacuuuggga

SEQ ID NO: 246254 - RNA, 32 nt, Human
ugacucaugccuguaaccccagcgcuuuggga

SEQ ID NO: 246255 - RNA, 21 nt, Human
ugacucaugccuguaauccca

SEQ ID NO: 246256 - RNA, 23 nt, Human
ugacucaugccuguaaucccagc

SEQ ID NO: 246257 - RNA, 32 nt, Human
ugacucaugccuguaaucccagcacguuggga

SEQ ID NO: 246258 - RNA, 32 nt, Human
ugacucaugccuguaaucccagcacuguggga

SEQ ID NO: 246259 - RNA, 32 nt, Human
ugacucaugccuguaaucccagcacuuuggga

SEQ ID NO: 246260 - RNA, 23 nt, Human
ugacucaugccuguaaucccagu

SEQ ID NO: 246261 - RNA, 32 nt, Human
ugacucaugccuguaaucccaguacucuggga

SEQ ID NO: 246262 - RNA, 32 nt, Human
ugacucaugccuguaaucccugcacuuuggga

SEQ ID NO: 246263 - RNA, 20 nt, Human
ugacucaugccuguaauccu

SEQ ID NO: 246264 - RNA, 21 nt, Human
ugacucaugccuguaauccua

SEQ ID NO: 246265 - RNA, 32 nt, Human
ugacucaugccuguaauccuagcacuuuggga

SEQ ID NO: 246266 - RNA, 23 nt, Human
ugacucaugccuguaauccuagu

SEQ ID NO: 246267 - RNA, 32 nt, Human
ugacucaugccuguaauccuaguacuuuggga

SEQ ID NO: 246268 - RNA, 23 nt, Human
ugacucaugccuguaauccuggc

SEQ ID NO: 246269 - RNA, 32 nt, Human
ugacucaugccuguaguaaucccagcacuuuu

SEQ ID NO: 246270 - RNA, 20 nt, Human
ugacucaugccugugauccc

SEQ ID NO: 246271 - RNA, 32 nt, Human
ugacucaugccuguuaucccaacacuuuggga

SEQ ID NO: 246272 - RNA, 17 nt, Human
ugacucaugcuucaccc

SEQ ID NO: 246273 - RNA, 20 nt, Human
ugacucaugcuugacacccc

SEQ ID NO: 246274 - RNA, 21 nt, Human
ugacucaugcuuguaauccca

SEQ ID NO: 246275 - RNA, 23 nt, Human
ugacucaugcuuguaaucccagc

SEQ ID NO: 246276 - RNA, 20 nt, Human
ugacucauggcagaaucgca

SEQ ID NO: 246277 - RNA, 20 nt, Human
ugacucauuacgugauccca

SEQ ID NO: 246278 - RNA, 32 nt, Human
ugacuccaaggagcacauacagggaugcgaca

SEQ ID NO: 246279 - RNA, 20 nt, Human
ugacuccacacccagcaugu

SEQ ID NO: 246280 - RNA, 18 nt, Human
ugacuccacacucagccu

SEQ ID NO: 246281 - RNA, 20 nt, Human
ugacuccacaucucacaucc

SEQ ID NO: 246282 - RNA, 32 nt, Human
ugacuccacuugaaaggugugcuugguuuggc

SEQ ID NO: 246283 - RNA, 32 nt, Human
ugacuccagagccuccagcaagaugcuacuga

SEQ ID NO: 246284 - RNA, 32 nt, Human
ugacuccagcagauucuggcccagggacagga

SEQ ID NO: 246285 - RNA, 32 nt, Human
ugacuccaggacuccacagaauggagcaagaa

SEQ ID NO: 246286 - RNA, 32 nt, Human
ugacuccaggaggcgcaggcugcagugagcuc

SEQ ID NO: 246287 - RNA, 32 nt, Human
ugacuccaugucugcagcucuacaggaugaac

SEQ ID NO: 246288 - RNA, 32 nt, Human
ugacucccaaagugcugaaauuacaggcauga

SEQ ID NO: 246289 - RNA, 32 nt, Human
ugacucccacugcacuccagcucggggaacag

SEQ ID NO: 246290 - RNA, 32 nt, Human
ugacucccagcccuguagguucucccaaacca

SEQ ID NO: 246291 - RNA, 32 nt, Human
ugacuccccugagcccucuucucuccaggcua

SEQ ID NO: 246292 - RNA, 24 nt, Human
ugacucccucagguugacacagca

SEQ ID NO: 246293 - RNA, 32 nt, Human
ugacucccugaacuccaaagcaaggguuggug

SEQ ID NO: 246294 - RNA, 20 nt, Human
ugacucccuggcugcuccuu

SEQ ID NO: 246295 - RNA, 32 nt, Human
ugacucccuuucucccuggacuugaucugcug

SEQ ID NO: 246296 - RNA, 32 nt, Human
ugacuccgccuggguuggggacagagagcaga

SEQ ID NO: 246297 - RNA, 32 nt, Human
ugacuccgcuggagguggggccuggagcaggc

SEQ ID NO: 246298 - RNA, 32 nt, Human
ugacuccucacacucagcgaugaccugugggg

SEQ ID NO: 246299 - RNA, 32 nt, Human
ugacuccuccaggaccagccaugguguggagg

SEQ ID NO: 246300 - RNA, 32 nt, Human
ugacuccugcccacccccagcccuuuacuaag

SEQ ID NO: 246301 - RNA, 31 nt, Human
ugacuccugccuguagcuccuguguccccau

SEQ ID NO: 246302 - RNA, 32 nt, Human
ugacuccugcugguaccugcccucuauuuauu

SEQ ID NO: 246303 - RNA, 32 nt, Human
ugacuccugcugugggggugcccuuucuaccc

SEQ ID NO: 246304 - RNA, 20 nt, Human
ugacuccuggcauuugccuu

SEQ ID NO: 246305 - RNA, 32 nt, Human
ugacuccuggcuuuggggucaggcagacgugg

SEQ ID NO: 246306 - RNA, 24 nt, Human
ugacuccugggcaucugugccuuc

SEQ ID NO: 246307 - RNA, 32 nt, Human
ugacuccuuccagggaaguaucagcuuaagaa

SEQ ID NO: 246308 - RNA, 32 nt, Human
ugacuccuuuaguacacugagaaaaaucuuau

SEQ ID NO: 246309 - RNA, 25 nt, Human
ugacucgaagugauccgcccaccuu

SEQ ID NO: 246310 - RNA, 32 nt, Human
ugacucgaucccuagacauuuguuacagauag

SEQ ID NO: 246311 - RNA, 21 nt, Human
ugacucgcaccuguaauccca

SEQ ID NO: 246312 - RNA, 32 nt, Human
ugacucgcaccuguaaucccagcacuuuggga

SEQ ID NO: 246313 - RNA, 32 nt, Human
ugacucgcagcaaccuccgccuccuggguuca

SEQ ID NO: 246314 - RNA, 32 nt, Human
ugacucgcugcagucuccaccuccaggauuca

SEQ ID NO: 246315 - RNA, 32 nt, Human
ugacucggcagcgggcagccaccccacgcucc

SEQ ID NO: 246316 - RNA, 32 nt, Human
ugacucggggcagaagucgggaaccggguuca

SEQ ID NO: 246317 - RNA, 32 nt, Human
ugacucgguuuauuagagacauaguguggcag

SEQ ID NO: 246318 - RNA, 32 nt, Human
ugacucgugccugcccaucccuguaauagaug

SEQ ID NO: 246319 - RNA, 22 nt, Human
ugacucgugcucuccaaccugu

SEQ ID NO: 246320 - RNA, 32 nt, Human
ugacucguggcgcgggagcugggagccaggcu

SEQ ID NO: 246321 - RNA, 25 nt, Human
ugacucuacugcugggacuuacaga

SEQ ID NO: 246322 - RNA, 32 nt, Human
ugacucuaggagagcaggagagaggcaggucu

SEQ ID NO: 246323 - RNA, 32 nt, Human
ugacucuaucaggagcuuuuuaaggaaaguaa

SEQ ID NO: 246324 - RNA, 32 nt, Human
ugacucucagcagcuaugguaggaacugcugg

SEQ ID NO: 246325 - RNA, 32 nt, Human
ugacucucccggcucugccacuguuuucugag

SEQ ID NO: 246326 - RNA, 32 nt, Human
ugacucucccuccacccugccuccucgggcuc

SEQ ID NO: 246327 - RNA, 32 nt, Human
ugacucuccugccucagccucccuaguagcug

SEQ ID NO: 246328 - RNA, 20 nt, Human
ugacucuccugucuguagca

SEQ ID NO: 246329 - RNA, 32 nt, Human
ugacucucugaccugguuugcugagauagucg

SEQ ID NO: 246330 - RNA, 32 nt, Human
ugacucugaacugucucucagucuccagaaag

SEQ ID NO: 246331 - RNA, 32 nt, Human
ugacucugaccuggaaccacagcccagaugug

SEQ ID NO: 246332 - RNA, 32 nt, Human
ugacucugacuccugaggaagaggccuguuug

SEQ ID NO: 246333 - RNA, 32 nt, Human
ugacucugccagaggcccagccccagaacuca

SEQ ID NO: 246334 - RNA, 32 nt, Human
ugacucugcccuuuauguauuauccacacgau

SEQ ID NO: 246335 - RNA, 32 nt, Human
ugacucugccuccaacuguggcucagagaaca

SEQ ID NO: 246336 - RNA, 32 nt, Human
ugacucugccugaggccagccugcccgaagcu

SEQ ID NO: 246337 - RNA, 21 nt, Human
ugacucugcucccugaccaca

SEQ ID NO: 246338 - RNA, 23 nt, Human
ugacucugcugccccaaccuuuc

SEQ ID NO: 246339 - RNA, 29 nt, Human
ugacucuggcugccaagauaccuucaugg

SEQ ID NO: 246340 - RNA, 32 nt, Human
ugacucugggcaccccucucaccagcuacaag

SEQ ID NO: 246341 - RNA, 24 nt, Human
ugacucugugacauuucuagcaua

SEQ ID NO: 246342 - RNA, 32 nt, Human
ugacucugugccaggcccuaaucagugugcug

SEQ ID NO: 246343 - RNA, 20 nt, Human
ugacucuguucccccggggg

SEQ ID NO: 246344 - RNA, 28 nt, Human
ugacucuuauauacugccucaucuugau

SEQ ID NO: 246345 - RNA, 28 nt, Human
ugacucuuaucuacugccucaucuugau

SEQ ID NO: 246346 - RNA, 32 nt, Human
ugacucuucagccucaaauccccaguuuuuga

SEQ ID NO: 246347 - RNA, 32 nt, Human
ugacucuucauacgugauucauuccacacaau

SEQ ID NO: 246348 - RNA, 17 nt, Human
ugacucuuccugcuccc

SEQ ID NO: 246349 - RNA, 18 nt, Human
ugacucuuccugcuuccu

SEQ ID NO: 246350 - RNA, 32 nt, Human
ugacucuucgauccucccucuuuguguccauu

SEQ ID NO: 246351 - RNA, 23 nt, Human
ugacucuucuaaucuugaaccaa

SEQ ID NO: 246352 - RNA, 32 nt, Human
ugacucuugaaucacaaauaaaagccaauugu

SEQ ID NO: 246353 - RNA, 32 nt, Human
ugacucuugcccaauccuugaccuugacuccu

SEQ ID NO: 246354 - RNA, 32 nt, Human
ugacucuugcccagugccugccugccucucuc

SEQ ID NO: 246355 - RNA, 32 nt, Human
ugacucuuggcucuugggcaugugggugagcu

SEQ ID NO: 246356 - RNA, 32 nt, Human
ugacucuuuaacgggugggcacuggaccaucu

SEQ ID NO: 246357 - RNA, 32 nt, Human
ugacucuuugaaaaucugagguauuuugaaaa

SEQ ID NO: 246358 - RNA, 23 nt, Human
ugacucuuuguaaagagaggcau

SEQ ID NO: 246359 - RNA, 32 nt, Human
ugacugaaaauuccaccccacacccacugagc

SEQ ID NO: 246360 - RNA, 32 nt, Human
ugacugaaagaaucccugucaaagggguguca

SEQ ID NO: 246361 - RNA, 32 nt, Human
ugacugaaagaugaaguucaagagaagggaca

SEQ ID NO: 246362 - RNA, 32 nt, Human
ugacugaagcauuggauauaaauauggugucc

SEQ ID NO: 246363 - RNA, 32 nt, Human
ugacugaagcgguccuaugaggcccuguucaa

SEQ ID NO: 246364 - RNA, 32 nt, Human
ugacugaagcuuaaugaugugaggcuucuagu

SEQ ID NO: 246365 - RNA, 32 nt, Human
ugacugaaugcagaacgguuuuuggaucuggc

SEQ ID NO: 246366 - RNA, 32 nt, Human
ugacugaauguguuucaaaugggugguggggu

SEQ ID NO: 246367 - RNA, 22 nt, Human
ugacugacauagaccugcagcu

SEQ ID NO: 246368 - RNA, 32 nt, Human
ugacugacauagaccugcagcugcaguucucc

SEQ ID NO: 246369 - RNA, 24 nt, Human
ugacugacauuccuuucugcaacu

SEQ ID NO: 246370 - RNA, 32 nt, Human
ugacugacauucucucggucaggaaaagagcu

SEQ ID NO: 246371 - RNA, 32 nt, Human
ugacugacccuuugccuuaucacacaugugcu

SEQ ID NO: 246372 - RNA, 32 nt, Human
ugacugaccgucuggggcucaggcuggugugg

SEQ ID NO: 246373 - RNA, 32 nt, Human
ugacugacguuggcuucaguuuggaauccaaa

SEQ ID NO: 246374 - RNA, 32 nt, Human
ugacugagaaauccucugcugaagaccccugg

SEQ ID NO: 246375 - RNA, 32 nt, Human
ugacugagaaguuaggguagaaaacaaaaagg

SEQ ID NO: 246376 - RNA, 32 nt, Human
ugacugagacacuccugugugguuucaggaga

SEQ ID NO: 246377 - RNA, 32 nt, Human
ugacugagaucuugagacugaaggaaacccaa

SEQ ID NO: 246378 - RNA, 31 nt, Human
ugacugagccacuucuuuaugccucaagaca

SEQ ID NO: 246379 - RNA, 32 nt, Human
ugacugagcuacuacaaaaagaaaaaucacug

SEQ ID NO: 246380 - RNA, 32 nt, Human
ugacugagcuccucuugcacucucacacacaa

SEQ ID NO: 246381 - RNA, 32 nt, Human
ugacugaggcggggcggggagcagggggacac

SEQ ID NO: 246382 - RNA, 32 nt, Human
ugacugagggagcuccuggugaaaugugccaa

SEQ ID NO: 246383 - RNA, 32 nt, Human
ugacugagggggcagaggcaguggcucuuuag

SEQ ID NO: 246384 - RNA, 32 nt, Human
ugacugagguuagggaggacgcccgagacccc

SEQ ID NO: 246385 - RNA, 32 nt, Human
ugacugagucaccacaccccucuccccugauc

SEQ ID NO: 246386 - RNA, 32 nt, Human
ugacugagugcuccauuucuuccuuuaccccc

SEQ ID NO: 246387 - RNA, 32 nt, Human
ugacugaguguuggccagugagaugaagucuc

SEQ ID NO: 246388 - RNA, 32 nt, Human
ugacugaguuccuuccuguggccacagggagg

SEQ ID NO: 246389 - RNA, 32 nt, Human
ugacugaucaaauguuuuggugccagugaaga

SEQ ID NO: 246390 - RNA, 21 nt, Human
ugacugaugccuguaauccca

SEQ ID NO: 246391 - RNA, 32 nt, Human
ugacugaugccuguaaucccaacacuuuguug

SEQ ID NO: 246392 - RNA, 32 nt, Human
ugacugauguuacaucacaguguuugcaaugg

SEQ ID NO: 246393 - RNA, 17 nt, Human
ugacugauguuguguua

SEQ ID NO: 246394 - RNA, 32 nt, Human
ugacugcaaauacaaacacccaggauccuuuc

SEQ ID NO: 246395 - RNA, 32 nt, Human
ugacugcaacuugccuuuuccauuacagaaau

SEQ ID NO: 246396 - RNA, 32 nt, Human
ugacugcaagccccacccuccuugagacugga

SEQ ID NO: 246397 - RNA, 32 nt, Human
ugacugcaaguuggccuggucaggucuugaug

SEQ ID NO: 246398 - RNA, 32 nt, Human
ugacugcaccacugcacagucugggcgacaga

SEQ ID NO: 246399 - RNA, 32 nt, Human
ugacugcaccacugcacuccacccugggcaga

SEQ ID NO: 246400 - RNA, 32 nt, Human
ugacugcaccucaggguugggcucagggcuug

SEQ ID NO: 246401 - RNA, 32 nt, Human
ugacugcagccaugagcagcaaugagugcuuc

SEQ ID NO: 246402 - RNA, 32 nt, Human
ugacugcagccuugaacuccugggcuuaagug

SEQ ID NO: 246403 - RNA, 32 nt, Human
ugacugcagcuccugaggaugggccugcccug

SEQ ID NO: 246404 - RNA, 32 nt, Human
ugacugcagcucucuucauucugccaaccuuu

SEQ ID NO: 246405 - RNA, 32 nt, Human
ugacugcaggggaaggauguacuuuccaaaca

SEQ ID NO: 246406 - RNA, 32 nt, Human
ugacugcauagggcuucauuucccaggcgugg

SEQ ID NO: 246407 - RNA, 32 nt, Human
ugacugcaucacugcacuccagccugggcaac

SEQ ID NO: 246408 - RNA, 32 nt, Human
ugacugcaucucccucuccucugucuucacau

SEQ ID NO: 246409 - RNA, 32 nt, Human
ugacugccaccccugccugccugcccggcccu

SEQ ID NO: 246410 - RNA, 32 nt, Human
ugacugccagcuccagccuggccccggggcag

SEQ ID NO: 246411 - RNA, 32 nt, Human
ugacugccauggggcccuccccugagcacaug

SEQ ID NO: 246412 - RNA, 32 nt, Human
ugacugccggcgucucuccgacugccucucgc

SEQ ID NO: 246413 - RNA, 32 nt, Human
ugacugccggugagcuggacggaacagagcca

SEQ ID NO: 246414 - RNA, 32 nt, Human
ugacugccugcuuucuggaggggagggucugg

SEQ ID NO: 246415 - RNA, 32 nt, Human
ugacugccugucagcuagucucuccaccuugg

SEQ ID NO: 246416 - RNA, 23 nt, Human
ugacugccuuccauccacucuca

SEQ ID NO: 246417 - RNA, 32 nt, Human
ugacugccuuuggaccagccuccaugaucagc

SEQ ID NO: 246418 - RNA, 32 nt, Human
ugacugcgaagcugugccuugccccucuccca

SEQ ID NO: 246419 - RNA, 32 nt, Human
ugacugcgccacugcacuccagucugggacaa

SEQ ID NO: 246420 - RNA, 20 nt, Human
ugacugcggagccugcucca

SEQ ID NO: 246421 - RNA, 31 nt, Human
ugacugcucaauaaauguugguuccugcuga

SEQ ID NO: 246422 - RNA, 32 nt, Human
ugacugcucacugcagccuccaccuccugggc

SEQ ID NO: 246423 - RNA, 32 nt, Human
ugacugcucagucccgcucuccuaccacaccc

SEQ ID NO: 246424 - RNA, 32 nt, Human
ugacugcuccaacuuccugcucucacacacac

SEQ ID NO: 246425 - RNA, 32 nt, Human
ugacugcuccaaugcagcaugugucuucucca

SEQ ID NO: 246426 - RNA, 32 nt, Human
ugacugcucggucaggagggugcaguaucucu

SEQ ID NO: 246427 - RNA, 32 nt, Human
ugacugcucugcccccuagaauguguguauuu

SEQ ID NO: 246428 - RNA, 32 nt, Human
ugacugcucuuuuuccucugucucuuaagugu

SEQ ID NO: 246429 - RNA, 32 nt, Human
ugacugcugcugaacagaggugggccccaggg

SEQ ID NO: 246430 - RNA, 32 nt, Human
ugacugcuucaaccaauggaguacgguggaag

SEQ ID NO: 246431 - RNA, 32 nt, Human
ugacugcuugaaauagucucucucccauggag

SEQ ID NO: 246432 - RNA, 32 nt, Human
ugacugcuuuuaccuuuuucucauguuuauau

SEQ ID NO: 246433 - RNA, 32 nt, Human
ugacuggaaccggggcgguggggugagggugg

SEQ ID NO: 246434 - RNA, 22 nt, Human
ugacuggaaucucuccaccuca

SEQ ID NO: 246435 - RNA, 32 nt, Human
ugacuggaccccaaguggcugcuauguaaauu

SEQ ID NO: 246436 - RNA, 32 nt, Human
ugacuggagccgcggcgacggcggcagcagcu

SEQ ID NO: 246437 - RNA, 32 nt, Human
ugacuggaggaaugugcucugaaggauggcua

SEQ ID NO: 246438 - RNA, 32 nt, Human
ugacuggaggccucgccccaacacuguccuuc

SEQ ID NO: 246439 - RNA, 19 nt, Human
ugacuggaggccuuccaag

SEQ ID NO: 246440 - RNA, 32 nt, Human
ugacuggaggcggagguugcagugagccgaga

SEQ ID NO: 246441 - RNA, 32 nt, Human
ugacuggaggggcaggagaugguccaaguguc

SEQ ID NO: 246442 - RNA, 32 nt, Human
ugacuggcaaauucacuuuuuacucauuuauu

SEQ ID NO: 246443 - RNA, 32 nt, Human
ugacuggcaacauuguacagaggggaaaacug

SEQ ID NO: 246444 - RNA, 32 nt, Human
ugacuggcacaucucagccuaaccaggagagg

SEQ ID NO: 246445 - RNA, 32 nt, Human
ugacuggcaggcaggugaggggcacagcaccc

SEQ ID NO: 246446 - RNA, 32 nt, Human
ugacuggcagggggagaaaguaaacagaguug

SEQ ID NO: 246447 - RNA, 32 nt, Human
ugacuggccugagacucuauaccgggagucuc

SEQ ID NO: 246448 - RNA, 32 nt, Human
ugacugggaaccagagagguugagcagaauuc

SEQ ID NO: 246449 - RNA, 32 nt, Human
ugacugggaagacagacguacccugagaagca

SEQ ID NO: 246450 - RNA, 32 nt, Human
ugacugggaagugccugcaggaaacaagcccu

SEQ ID NO: 246451 - RNA, 32 nt, Human
ugacugggagggcugcugacuccaggcucaga

SEQ ID NO: 246452 - RNA, 32 nt, Human
ugacugggcacugccucugcccccagcaccca

SEQ ID NO: 246453 - RNA, 32 nt, Human
ugacugggcagggcccuggaccccuuuauuug

SEQ ID NO: 246454 - RNA, 32 nt, Human
ugacugggcccacccucuagccacuuucccca

SEQ ID NO: 246455 - RNA, 32 nt, Human
ugacugggccuuucuuucuuuucuucuccucu

SEQ ID NO: 246456 - RNA, 32 nt, Human
ugacuggggaauggggacccuggggagggggc

SEQ ID NO: 246457 - RNA, 32 nt, Human
ugacuggggcagagggacagggaagccagguc

SEQ ID NO: 246458 - RNA, 32 nt, Human
ugacuggggcguccgacuggagcucagccgcg

SEQ ID NO: 246459 - RNA, 17 nt, Human
ugacuggggcugcuccu

SEQ ID NO: 246460 - RNA, 32 nt, Human
ugacugggggccucacgcuuaacugguagugc

SEQ ID NO: 246461 - RNA, 32 nt, Human
ugacuggggugaggcagggucaagugcuacgg

SEQ ID NO: 246462 - RNA, 32 nt, Human
ugacugggugguggcuucacugggcagugcuc

SEQ ID NO: 246463 - RNA, 32 nt, Human
ugacuggguguguguuguguguauguaauaca

SEQ ID NO: 246464 - RNA, 32 nt, Human
ugacuggguuccaaaguugaggccuagguuuu

SEQ ID NO: 246465 - RNA, 32 nt, Human
ugacugguagggcugcucagcauuccgaaaca

SEQ ID NO: 246466 - RNA, 32 nt, Human
ugacuggucaucuggaccaucguacuugcugu

SEQ ID NO: 246467 - RNA, 32 nt, Human
ugacuggucugccuggugccagggugagcgug

SEQ ID NO: 246468 - RNA, 32 nt, Human
ugacugguggaaggaaaaugcacuuagcagua

SEQ ID NO: 246469 - RNA, 32 nt, Human
ugacugguggguuugaaucugcacuuaucccc

SEQ ID NO: 246470 - RNA, 32 nt, Human
ugacugguucauuacccuccccuacucagacu

SEQ ID NO: 246471 - RNA, 32 nt, Human
ugacuguaacugcaccuguggagaguggagag

SEQ ID NO: 246472 - RNA, 32 nt, Human
ugacuguaauuuauaaacuaaaaauuuuuaca

SEQ ID NO: 246473 - RNA, 32 nt, Human
ugacuguagcauucaaggcuugaggcuggagg

SEQ ID NO: 246474 - RNA, 21 nt, Human
ugacuguagcucauaagaccc

SEQ ID NO: 246475 - RNA, 32 nt, Human
ugacuguauauacuauuuuguauccuuucaug

SEQ ID NO: 246476 - RNA, 32 nt, Human
ugacuguauggaggcagguggggagggauccc

SEQ ID NO: 246477 - RNA, 32 nt, Human
ugacuguauuauagcuauauuucugaggcuuu

SEQ ID NO: 246478 - RNA, 31 nt, Human
ugacuguauuucuuugcccuaccucacuaua

SEQ ID NO: 246479 - RNA, 23 nt, Human
ugacuguauuuuccaacuuguuc

SEQ ID NO: 246480 - RNA, 32 nt, Human
ugacugucacccaugagguauggaaggagcgg

SEQ ID NO: 246481 - RNA, 32 nt, Human
ugacugucacucuggcacuaggaggcugaucu

SEQ ID NO: 246482 - RNA, 25 nt, Human
ugacugucagaaccauucugcaacu

SEQ ID NO: 246483 - RNA, 32 nt, Human
ugacugucccauucuccacucacugcauuugg

SEQ ID NO: 246484 - RNA, 32 nt, Human
ugacuguccucucugaggcccagauucccuuu

SEQ ID NO: 246485 - RNA, 32 nt, Human
ugacuguccugaaaaccagaaaagcaaagaaa

SEQ ID NO: 246486 - RNA, 32 nt, Human
ugacugugagauugugugugggaaaauguauu

SEQ ID NO: 246487 - RNA, 32 nt, Human
ugacugugauuguaggggguugcuggguggcc

SEQ ID NO: 246488 - RNA, 32 nt, Human
ugacugugccacugcaccucuagucuggguga

SEQ ID NO: 246489 - RNA, 32 nt, Human
ugacugugccacugcacuccagccuggucaac

SEQ ID NO: 246490 - RNA, 32 nt, Human
ugacugugccaugugguaggacacaggacaca

SEQ ID NO: 246491 - RNA, 32 nt, Human
ugacugugcccuuuagggccuccuggaguuuc

SEQ ID NO: 246492 - RNA, 18 nt, Human
ugacugugcucugugaca

SEQ ID NO: 246493 - RNA, 32 nt, Human
ugacuguggccugcaaccacgagugccaugcu

SEQ ID NO: 246494 - RNA, 23 nt, Human
ugacuguggggaggagcauguca

SEQ ID NO: 246495 - RNA, 31 nt, Human
ugacugugggguccuagaugccaaagggguu

SEQ ID NO: 246496 - RNA, 21 nt, Human
ugacuguguuccucugucaca

SEQ ID NO: 246497 - RNA, 32 nt, Human
ugacuguguuucuccauuuccacagccaaaug

SEQ ID NO: 246498 - RNA, 32 nt, Human
ugacuguguuuuaaaauucucuuucuaaacac

SEQ ID NO: 246499 - RNA, 32 nt, Human
ugacuguuagccagcccugccucuccaggaua

SEQ ID NO: 246500 - RNA, 32 nt, Human
ugacuguuauuucuuuucuuccugcuuuccua

SEQ ID NO: 246501 - RNA, 32 nt, Human
ugacuguucccaaggagaugccacucugcucu

SEQ ID NO: 246502 - RNA, 32 nt, Human
ugacuguuccuuuugccccagcccucucagac

SEQ ID NO: 246503 - RNA, 32 nt, Human
ugacuguugcccaagcuggaaugcaguggcac

SEQ ID NO: 246504 - RNA, 32 nt, Human
ugacuguugcccaggcuggaguguaauggcgc

SEQ ID NO: 246505 - RNA, 32 nt, Human
ugacuguuuccuggcauauaugcaugaauaug

SEQ ID NO: 246506 - RNA, 32 nt, Human
ugacuguuucucuuccucucuuucuuccuuuu

SEQ ID NO: 246507 - RNA, 32 nt, Human
ugacuguuuuggaaggugaagggcuaucagaa

SEQ ID NO: 246508 - RNA, 18 nt, Human
ugacuuaaacuguaaucc

SEQ ID NO: 246509 - RNA, 32 nt, Human
ugacuuaaccaccugacauucacagugucuug

SEQ ID NO: 246510 - RNA, 21 nt, Human
ugacuuacgccuguaaucuca

SEQ ID NO: 246511 - RNA, 32 nt, Human
ugacuuacgccuguaaucucagcacuuuggga

SEQ ID NO: 246512 - RNA, 32 nt, Human
ugacuuacuacuugaaacuuuauuuauugcac

SEQ ID NO: 246513 - RNA, 32 nt, Human
ugacuuacugccucugagccuuggcuuucugu

SEQ ID NO: 246514 - RNA, 32 nt, Human
ugacuuacuguacaugaauuacacaauaauga

SEQ ID NO: 246515 - RNA, 32 nt, Human
ugacuuacuuccacggugacucuggcuguugc

SEQ ID NO: 246516 - RNA, 32 nt, Human
ugacuuaggaacaguuucagucugaccuuguc

SEQ ID NO: 246517 - RNA, 32 nt, Human
ugacuuaggaaucauuuuauguacuuguucua

SEQ ID NO: 246518 - RNA, 32 nt, Human
ugacuuaggcagaggagugcagaggagggucu

SEQ ID NO: 246519 - RNA, 32 nt, Human
ugacuuaguggaauugggucgaaggaguggag

SEQ ID NO: 246520 - RNA, 32 nt, Human
ugacuuauaaauaauugaagcugcaguauauu

SEQ ID NO: 246521 - RNA, 21 nt, Human
ugacuuauaccauaaugccca

SEQ ID NO: 246522 - RNA, 21 nt, Human
ugacuuaucgagcugcucccu

SEQ ID NO: 246523 - RNA, 32 nt, Human
ugacuuauuccagagugccucaguuaggggaa

SEQ ID NO: 246524 - RNA, 18 nt, Human
ugacuuauugcaauccca

SEQ ID NO: 246525 - RNA, 32 nt, Human
ugacuucaaaccugugugucaaugcagaaggu

SEQ ID NO: 246526 - RNA, 19 nt, Human
ugacuucaaacugagagca

SEQ ID NO: 246527 - RNA, 32 nt, Human
ugacuucaaagaaggaaggaaagaaucaggca

SEQ ID NO: 246528 - RNA, 32 nt, Human
ugacuucaaaggcagagaccgacaaaauagag

SEQ ID NO: 246529 - RNA, 19 nt, Human
ugacuucaaaggcagcagc

SEQ ID NO: 246530 - RNA, 32 nt, Human
ugacuucaaaguugccuggugaaggaagauaa

SEQ ID NO: 246531 - RNA, 19 nt, Human
ugacuucaagggucacagc

SEQ ID NO: 246532 - RNA, 26 nt, Human
ugacuucaagugauccacccgccuca

SEQ ID NO: 246533 - RNA, 26 nt, Human
ugacuucaagugauccaccugucuua

SEQ ID NO: 246534 - RNA, 32 nt, Human
ugacuucacagaaucccuaagcuccauaaauc

SEQ ID NO: 246535 - RNA, 32 nt, Human
ugacuucaccucaguuuugugauccguaaaau

SEQ ID NO: 246536 - RNA, 32 nt, Human
ugacuucaccucugcucaucucaguuuccuaa

SEQ ID NO: 246537 - RNA, 19 nt, Human
ugacuucacuggacacagc

SEQ ID NO: 246538 - RNA, 32 nt, Human
ugacuucagacacagaagucuguccauggcuc

SEQ ID NO: 246539 - RNA, 32 nt, Human
ugacuucagcaguggcagguguuuucagcuug

SEQ ID NO: 246540 - RNA, 19 nt, Human
ugacuucagcccaccagca

SEQ ID NO: 246541 - RNA, 32 nt, Human
ugacuucagccuggaaauugcuugccuuuuaa

SEQ ID NO: 246542 - RNA, 19 nt, Human
ugacuucagggacagagca

SEQ ID NO: 246543 - RNA, 25 nt, Human
ugacuucaggugacccacccgccuc

SEQ ID NO: 246544 - RNA, 25 nt, Human
ugacuucaggugauccacccgccuc

SEQ ID NO: 246545 - RNA, 25 nt, Human
ugacuucaggugauccgccuaccuu

SEQ ID NO: 246546 - RNA, 32 nt, Human
ugacuucauccugucauuccagccuggggucu

SEQ ID NO: 246547 - RNA, 23 nt, Human
ugacuucaugauccacccaccuc

SEQ ID NO: 246548 - RNA, 23 nt, Human
ugacuucaugauccacccaccuu

SEQ ID NO: 246549 - RNA, 32 nt, Human
ugacuucaugauuugcacauuuggagggcuua

SEQ ID NO: 246550 - RNA, 32 nt, Human
ugacuucauggaugaggaaccuggagaccaaa

SEQ ID NO: 246551 - RNA, 24 nt, Human
ugacuucaugguccgccugccuca

SEQ ID NO: 246552 - RNA, 25 nt, Human
ugacuucaugugauccgccagccuc

SEQ ID NO: 246553 - RNA, 22 nt, Human
ugacuuccauagacacacagca

SEQ ID NO: 246554 - RNA, 32 nt, Human
ugacuucccagaaugcagugggcugcugggca

SEQ ID NO: 246555 - RNA, 20 nt, Human
ugacuuccccacugcucucu

SEQ ID NO: 246556 - RNA, 32 nt, Human
ugacuuccuacagccaaauccccagaggccaa

SEQ ID NO: 246557 - RNA, 32 nt, Human
ugacuuccuagccuguggauaauuuacuauua

SEQ ID NO: 246558 - RNA, 32 nt, Human
ugacuuccucaccuacaacugccucacgaaug

SEQ ID NO: 246559 - RNA, 32 nt, Human
ugacuuccucgggcucuucaggagacugagac

SEQ ID NO: 246560 - RNA, 32 nt, Human
ugacuuccugaggugugaucuguccaccuuga

SEQ ID NO: 246561 - RNA, 32 nt, Human
ugacuucgaguaagccacccagcuuuucuugg

SEQ ID NO: 246562 - RNA, 23 nt, Human
ugacuucguuauccacccgccuc

SEQ ID NO: 246563 - RNA, 27 nt, Human
ugacuucuaccucccauguuugcucuc

SEQ ID NO: 246564 - RNA, 25 nt, Human
ugacuucucaggacugacaccuaca

SEQ ID NO: 246565 - RNA, 32 nt, Human
ugacuucucauccccgaguucuuucaggccaa

SEQ ID NO: 246566 - RNA, 32 nt, Human
ugacuucucccagcgcagaugagaggucaaaa

SEQ ID NO: 246567 - RNA, 23 nt, Human
ugacuucugaagaugacugccuc

SEQ ID NO: 246568 - RNA, 22 nt, Human
ugacuucugacauuccacuuuc

SEQ ID NO: 246569 - RNA, 19 nt, Human
ugacuucugaucuuugucu

SEQ ID NO: 246570 - RNA, 32 nt, Human
ugacuucugcucccaguaacccaucguuaggg

SEQ ID NO: 246571 - RNA, 32 nt, Human
ugacuucugcucccucacuagcuuuuccacca

SEQ ID NO: 246572 - RNA, 32 nt, Human
ugacuucugcucccucccuagcuuuuccacca

SEQ ID NO: 246573 - RNA, 32 nt, Human
ugacuucuggcuggccagaggcugcgguccgu

SEQ ID NO: 246574 - RNA, 32 nt, Human
ugacuucugggaacugcuuugcauuucuccua

SEQ ID NO: 246575 - RNA, 32 nt, Human
ugacuucugggaagccacccaggucucauucc

SEQ ID NO: 246576 - RNA, 23 nt, Human
ugacuucuguguuagccaucuua

SEQ ID NO: 246577 - RNA, 32 nt, Human
ugacuucuucuagcccugcacucugucacuua

SEQ ID NO: 246578 - RNA, 32 nt, Human
ugacuucuuguggcauuucacacacuguagau

SEQ ID NO: 246579 - RNA, 32 nt, Human
ugacuugaaaguuuucuuugguauaugugcau

SEQ ID NO: 246580 - RNA, 32 nt, Human
ugacuugaaauaguaacaccaaacaugauuau

SEQ ID NO: 246581 - RNA, 32 nt, Human
ugacuugacauguccaauuucauuucagaaua

SEQ ID NO: 246582 - RNA, 32 nt, Human
ugacuugacuccuguggcuucuggaccccucc

SEQ ID NO: 246583 - RNA, 32 nt, Human
ugacuugagcccaggaguuggaggccacagug

SEQ ID NO: 246584 - RNA, 31 nt, Human
ugacuugagguguugggaugggugagggagc

SEQ ID NO: 246585 - RNA, 21 nt, Human
ugacuugcaccuguaauccca

SEQ ID NO: 246586 - RNA, 32 nt, Human
ugacuugccuaagauuacacagcuaguuuaug

SEQ ID NO: 246587 - RNA, 32 nt, Human
ugacuugcucaaguucaccagcaugguagugg

SEQ ID NO: 246588 - RNA, 32 nt, Human
ugacuugcuuuuuccugccuccuuccucuccu

SEQ ID NO: 246589 - RNA, 32 nt, Human
ugacuuggaauugaaccaggaggacuuuucag

SEQ ID NO: 246590 - RNA, 30 nt, Human
ugacuuggacucuccauuccucugccugua

SEQ ID NO: 246591 - RNA, 32 nt, Human
ugacuuggaguuuccagcaggguggugugcac

SEQ ID NO: 246592 - RNA, 32 nt, Human
ugacuuggcagacugguguuguucaucgcagu

SEQ ID NO: 246593 - RNA, 32 nt, Human
ugacuuggcccccacagagagagguccuacag

SEQ ID NO: 246594 - RNA, 32 nt, Human
ugacuuggcgugggacacaggacaagaucacu

SEQ ID NO: 246595 - RNA, 32 nt, Human
ugacuuggcuuccugugaucugcauucaugaa

SEQ ID NO: 246596 - RNA, 32 nt, Human
ugacuugggaggcugaggcaggagaaucgcuu

SEQ ID NO: 246597 - RNA, 32 nt, Human
ugacuugggaugacauauuacaugcuguaguu

SEQ ID NO: 246598 - RNA, 17 nt, Human
ugacuugggcugauccc

SEQ ID NO: 246599 - RNA, 32 nt, Human
ugacuugguccugguggggcgugcugggacua

SEQ ID NO: 246600 - RNA, 32 nt, Human
ugacuugguggccaauaccugccuuccaaaga

SEQ ID NO: 246601 - RNA, 32 nt, Human
ugacuugguuaguaggaacuacccaggaaugu

SEQ ID NO: 246602 - RNA, 21 nt, Human
ugacuuguaacuguaauccca

SEQ ID NO: 246603 - RNA, 32 nt, Human
ugacuuguauuuuuaaaaauugcucacauaaa

SEQ ID NO: 246604 - RNA, 19 nt, Human
ugacuugucagugucugug

SEQ ID NO: 246605 - RNA, 32 nt, Human
ugacuugugagugggguuuauggggaaaggga

SEQ ID NO: 246606 - RNA, 32 nt, Human
ugacuugugugugcugauguguuuccauuugu

SEQ ID NO: 246607 - RNA, 32 nt, Human
ugacuuguuauagaagauuaaaacuagauuug

SEQ ID NO: 246608 - RNA, 32 nt, Human
ugacuuguucaguaaauuccaauaugaauaaa

SEQ ID NO: 246609 - RNA, 32 nt, Human
ugacuuuaaauugucaccaauugaaaaucuug

SEQ ID NO: 246610 - RNA, 32 nt, Human
ugacuuuaaucagcuugaacugccagugcacc

SEQ ID NO: 246611 - RNA, 32 nt, Human
ugacuuuaccauugaccaccagucuugcucuc

SEQ ID NO: 246612 - RNA, 32 nt, Human
ugacuuuaccugcacacaagcuuacaugugcc

SEQ ID NO: 246613 - RNA, 32 nt, Human
ugacuuuacuaaucaguuguucuaagugugaa

SEQ ID NO: 246614 - RNA, 32 nt, Human
ugacuuuagaaaaugcugauuugagaacaaaa

SEQ ID NO: 246615 - RNA, 25 nt, Human
ugacuuuagguaaucugcccgccuc

SEQ ID NO: 246616 - RNA, 26 nt, Human
ugacuuuaggugauccacacgccuca

SEQ ID NO: 246617 - RNA, 21 nt, Human
ugacuuuauauggcugcuccu

SEQ ID NO: 246618 - RNA, 32 nt, Human
ugacuuuaucuaggaguuuguuuuucauuuug

SEQ ID NO: 246619 - RNA, 26 nt, Human
ugacuuuaugcaagucacucaccuca

SEQ ID NO: 246620 - RNA, 32 nt, Human
ugacuuucacccaggaggaguggggccagcug

SEQ ID NO: 246621 - RNA, 20 nt, Human
ugacuuucacguccacagug

SEQ ID NO: 246622 - RNA, 24 nt, Human
ugacuuucagaacuucucaccuca

SEQ ID NO: 246623 - RNA, 21 nt, Human
ugacuuuccagccucuucaac

SEQ ID NO: 246624 - RNA, 32 nt, Human
ugacuuucccuaggcugagggcaguggacccu

SEQ ID NO: 246625 - RNA, 32 nt, Human
ugacuuucccuguccugaggcuugccuccacu

SEQ ID NO: 246626 - RNA, 32 nt, Human
ugacuuuccugagaucuacccggggcuuggcu

SEQ ID NO: 246627 - RNA, 32 nt, Human
ugacuuuccuucccuuucacaugaggaucugc

SEQ ID NO: 246628 - RNA, 32 nt, Human
ugacuuuccuuuuuauuuagucuuccagcucu

SEQ ID NO: 246629 - RNA, 32 nt, Human
ugacuuucucccaccaguaauugaaaugaggu

SEQ ID NO: 246630 - RNA, 32 nt, Human
ugacuuucuccuccaaccuccaucagucccag

SEQ ID NO: 246631 - RNA, 32 nt, Human
ugacuuucucucucgauucuuccauacucaga

SEQ ID NO: 246632 - RNA, 32 nt, Human
ugacuuucugaccaaggaggugaugguggaug

SEQ ID NO: 246633 - RNA, 22 nt, Human
ugacuuucugacccauccaccu

SEQ ID NO: 246634 - RNA, 32 nt, Human
ugacuuucugaggaguugacaaggucacugcc

SEQ ID NO: 246635 - RNA, 32 nt, Human
ugacuuucuuacuacuugcaguagccuguccc

SEQ ID NO: 246636 - RNA, 32 nt, Human
ugacuuugaaaaucaucucuuuuucucaagaa

SEQ ID NO: 246637 - RNA, 21 nt, Human
ugacuuugaggccuuaccuua

SEQ ID NO: 246638 - RNA, 21 nt, Human
ugacuuugcagggcucacaga

SEQ ID NO: 246639 - RNA, 20 nt, Human
ugacuuugcccauagaccaa

SEQ ID NO: 246640 - RNA, 22 nt, Human
ugacuuugcuucuucacuccca

SEQ ID NO: 246641 - RNA, 32 nt, Human
ugacuuuggaagggcaggcucuuguccaguuu

SEQ ID NO: 246642 - RNA, 24 nt, Human
ugacuuuggaguucacuccaauca

SEQ ID NO: 246643 - RNA, 24 nt, Human
ugacuuuggcagacccccauuuca

SEQ ID NO: 246644 - RNA, 32 nt, Human
ugacuuugggcagagggugggacagggaccuu

SEQ ID NO: 246645 - RNA, 32 nt, Human
ugacuuuggugggcaucaucagcuggggccug

SEQ ID NO: 246646 - RNA, 22 nt, Human
ugacuuuguacaugucaccuca

SEQ ID NO: 246647 - RNA, 25 nt, Human
ugacuuuguacugggcccacacuca

SEQ ID NO: 246648 - RNA, 21 nt, Human
ugacuuuguauauucaucuua

SEQ ID NO: 246649 - RNA, 22 nt, Human
ugacuuugucaggucagccuca

SEQ ID NO: 246650 - RNA, 22 nt, Human
ugacuuugugaccccuaguuua

SEQ ID NO: 246651 - RNA, 20 nt, Human
ugacuuugugccauauccca

SEQ ID NO: 246652 - RNA, 21 nt, Human
ugacuuuguuaaccguucccu

SEQ ID NO: 246653 - RNA, 32 nt, Human
ugacuuuuaaggcuccuccuauuaugagacuu

SEQ ID NO: 246654 - RNA, 32 nt, Human
ugacuuuucacucaaaucuauaugugccaguu

SEQ ID NO: 246655 - RNA, 32 nt, Human
ugacuuuucagccacaauuacaugucaucauu

SEQ ID NO: 246656 - RNA, 32 nt, Human
ugacuuuuccuucaaucucuucccaaggcuga

SEQ ID NO: 246657 - RNA, 22 nt, Human
ugacuuuucucucuuauaccaa

SEQ ID NO: 246658 - RNA, 32 nt, Human
ugacuuuucugaguuauuuauguacuuaaaau

SEQ ID NO: 246659 - RNA, 32 nt, Human
ugacuuuucuucauauuuugcaaagagaaauu

SEQ ID NO: 246660 - RNA, 20 nt, Human
ugacuuuucuucugcucucu

SEQ ID NO: 246661 - RNA, 32 nt, Human
ugacuuuugauaggccaugccuugccacuuua

SEQ ID NO: 246662 - RNA, 28 nt, Human
ugacuuuugcauauggucucuuaccuca

SEQ ID NO: 246663 - RNA, 32 nt, Human
ugacuuuuguaauccaggaauuuggaacuacu

SEQ ID NO: 246664 - RNA, 32 nt, Human
ugacuuuugugccuuucugcuccagucucaaa

SEQ ID NO: 246665 - RNA, 32 nt, Human
ugacuuuuucccccucucccuccccaauggcu

SEQ ID NO: 246666 - RNA, 32 nt, Human
ugacuuuuuccugccuacuaucuugauccuag

SEQ ID NO: 246667 - RNA, 32 nt, Human
ugacuuuuuccugguggagugugacggaggca

SEQ ID NO: 246668 - RNA, 32 nt, Human
ugacuuuuugcacuucuguauauagucaaaag

SEQ ID NO: 246669 - RNA, 32 nt, Human
ugagaaaaacauuugaucuuuuuaaagggaaa

SEQ ID NO: 246670 - RNA, 32 nt, Human
ugagaaaaaggagucgucuuaccgguuucugu

SEQ ID NO: 246671 - RNA, 32 nt, Human
ugagaaaaaggcagcccuccagauuuuguaga

SEQ ID NO: 246672 - RNA, 32 nt, Human
ugagaaaaagguccagggggccaaggugacug

SEQ ID NO: 246673 - RNA, 21 nt, Human
ugagaaaaauaaaggcguuca

SEQ ID NO: 246674 - RNA, 32 nt, Human
ugagaaaaaugguuccaccaaaguauucaaaa

SEQ ID NO: 246675 - RNA, 22 nt, Human
ugagaaaaccaagucuccaagg

SEQ ID NO: 246676 - RNA, 32 nt, Human
ugagaaaaccauuucagaagccuggauuaagg

SEQ ID NO: 246677 - RNA, 32 nt, Human
ugagaaaacucuuuggugcuucugccuuuagu

SEQ ID NO: 246678 - RNA, 32 nt, Human
ugagaaaacugagaggugaggugacuugccug

SEQ ID NO: 246679 - RNA, 32 nt, Human
ugagaaaagguuguaggaugugucacaagaga

SEQ ID NO: 246680 - RNA, 22 nt, Human
ugagaaaaucaguccauaaagg

SEQ ID NO: 246681 - RNA, 32 nt, Human
ugagaaaaugcacaaagcccugggagaugaca

SEQ ID NO: 246682 - RNA, 32 nt, Human
ugagaaacacuccaaaucuaaacacaccagga

SEQ ID NO: 246683 - RNA, 32 nt, Human
ugagaaacggaggaggaggaggguuugcuuga

SEQ ID NO: 246684 - RNA, 32 nt, Human
ugagaaacuucuagaaccucaggaagcugcag

SEQ ID NO: 246685 - RNA, 32 nt, Human
ugagaaagaaaaauuuuaaaaagggaggaaau

SEQ ID NO: 246686 - RNA, 32 nt, Human
ugagaaagaagaggaagauaaagaugacgaag

SEQ ID NO: 246687 - RNA, 23 nt, Human
ugagaaagaauggaucccugcag

SEQ ID NO: 246688 - RNA, 18 nt, Human
ugagaaagagucuugcuc

SEQ ID NO: 246689 - RNA, 31 nt, Human
ugagaaagcaagacaucaaggagggaccugu

SEQ ID NO: 246690 - RNA, 32 nt, Human
ugagaaagccuaggaucuuucuccccagagag

SEQ ID NO: 246691 - RNA, 32 nt, Human
ugagaaagccuucugccuucugucauuggaua

SEQ ID NO: 246692 - RNA, 32 nt, Human
ugagaaaggaacccgugggaagaaggagcacg

SEQ ID NO: 246693 - RNA, 32 nt, Human
ugagaaaggcaaagcauuugucugaaagcgaa

SEQ ID NO: 246694 - RNA, 21 nt, Human
ugagaaagggaggauggggag

SEQ ID NO: 246695 - RNA, 32 nt, Human
ugagaaaggugaaaugaaaacaagcucaaaac

SEQ ID NO: 246696 - RNA, 24 nt, Human
ugagaaagguuguuuuccaguaaa

SEQ ID NO: 246697 - RNA, 32 nt, Human
ugagaaagucacagauauauuucuccaagaaa

SEQ ID NO: 246698 - RNA, 21 nt, Human
ugagaaauaaucuugcucugu

SEQ ID NO: 246699 - RNA, 32 nt, Human
ugagaaauacaaaaauacucagauaagguaaa

SEQ ID NO: 246700 - RNA, 32 nt, Human
ugagaaauacgaccccacagacugcgagacug

SEQ ID NO: 246701 - RNA, 32 nt, Human
ugagaaaugaaagaaguagagagagaauuaaa

SEQ ID NO: 246702 - RNA, 32 nt, Human
ugagaaaugccuguucagcuacuuugcccaug

SEQ ID NO: 246703 - RNA, 21 nt, Human
ugagaaauguauuccuggagg

SEQ ID NO: 246704 - RNA, 32 nt, Human
ugagaaaugucuuuaguucagugagaagaaac

SEQ ID NO: 246705 - RNA, 32 nt, Human
ugagaaauuagacuguaccuguguacacuucu

SEQ ID NO: 246706 - RNA, 32 nt, Human
ugagaaauugcacccccagcuggcagagaaga

SEQ ID NO: 246707 - RNA, 32 nt, Human
ugagaaauuucugugcuuccaauccacaauga

SEQ ID NO: 246708 - RNA, 32 nt, Human
ugagaacaaaggagggaccugagguggagaga

SEQ ID NO: 246709 - RNA, 32 nt, Human
ugagaacaaauacccacccauuuccaccaugg

SEQ ID NO: 246710 - RNA, 32 nt, Human
ugagaacaaccaaagaaggccugcucuuugcu

SEQ ID NO: 246711 - RNA, 32 nt, Human
ugagaacaaccacaccaccaaaugucacaccu

SEQ ID NO: 246712 - RNA, 32 nt, Human
ugagaacacaagugagccaguccugguucuuc

SEQ ID NO: 246713 - RNA, 32 nt, Human
ugagaacacgccauugcacucaagccugggca

SEQ ID NO: 246714 - RNA, 32 nt, Human
ugagaacacuuaaaauugucucuuuuagaaau

SEQ ID NO: 246715 - RNA, 32 nt, Human
ugagaacagaaagagaggguggaggggcugua

SEQ ID NO: 246716 - RNA, 32 nt, Human
ugagaacagcaugggggacacugcccccauga

SEQ ID NO: 246717 - RNA, 32 nt, Human
ugagaacaggaaaaaggaagaggacacuggaa

SEQ ID NO: 246718 - RNA, 32 nt, Human
ugagaacaggcuuuugauaaacucacgaauuc

SEQ ID NO: 246719 - RNA, 32 nt, Human
ugagaacaggucauugcacucaagccugggca

SEQ ID NO: 246720 - RNA, 32 nt, Human
ugagaacaguaauggaaaaugguguugaagga

SEQ ID NO: 246721 - RNA, 32 nt, Human
ugagaacaucucugccuaauuuaccaaagcca

SEQ ID NO: 246722 - RNA, 31 nt, Human
ugagaacaugguucuuuacauauaaaucugc

SEQ ID NO: 246723 - RNA, 32 nt, Human
ugagaaccaaugaguuuuagggauguuugugc

SEQ ID NO: 246724 - RNA, 32 nt, Human
ugagaaccagaugcugucugguggguuagggc

SEQ ID NO: 246725 - RNA, 32 nt, Human
ugagaaccagccagaagcaugcagugacauug

SEQ ID NO: 246726 - RNA, 32 nt, Human
ugagaaccagggccgugacaccagaggggccu

SEQ ID NO: 246727 - RNA, 32 nt, Human
ugagaacccagccagucaggaagucgcuacuu

SEQ ID NO: 246728 - RNA, 32 nt, Human
ugagaacccauguauggguugcagugagccga

SEQ ID NO: 246729 - RNA, 32 nt, Human
ugagaacccauugggaccgagccuggggagca

SEQ ID NO: 246730 - RNA, 32 nt, Human
ugagaacccuccugcuguuacggaggcagcac

SEQ ID NO: 246731 - RNA, 32 nt, Human
ugagaacccucucucugcucacgaggcaggag

SEQ ID NO: 246732 - RNA, 32 nt, Human
ugagaaccucaaggaggaccuggucuaccuga

SEQ ID NO: 246733 - RNA, 32 nt, Human
ugagaaccucaaggaggagcuggccuaccuga

SEQ ID NO: 246734 - RNA, 32 nt, Human
ugagaaccugcagccauuucuuguuacaugaa

SEQ ID NO: 246735 - RNA, 32 nt, Human
ugagaacgggccaugugacaauggcgguuuug

SEQ ID NO: 246736 - RNA, 21 nt, Human
ugagaacgguuugucccugga

SEQ ID NO: 246737 - RNA, 32 nt, Human
ugagaacuagaguccucauccccaggcuugaa

SEQ ID NO: 246738 - RNA, 32 nt, Human
ugagaacuagcaccucugaaaaguaaaaugau

SEQ ID NO: 246739 - RNA, 32 nt, Human
ugagaacuagcccuagaccucugcgugagggu

SEQ ID NO: 246740 - RNA, 32 nt, Human
ugagaacuauguggagagaggcugcgagcccu

SEQ ID NO: 246741 - RNA, 32 nt, Human
ugagaacuauuuaaagacgcaaucccagguuc

SEQ ID NO: 246742 - RNA, 32 nt, Human
ugagaacucaaaggguuacaaguugcugccac

SEQ ID NO: 246743 - RNA, 32 nt, Human
ugagaacucaccauugcacuccagccuggaug

SEQ ID NO: 246744 - RNA, 32 nt, Human
ugagaacucaggcuggcacagggauucccagg

SEQ ID NO: 246745 - RNA, 32 nt, Human
ugagaacucauuuucuacccugccucgucuua

SEQ ID NO: 246746 - RNA, 32 nt, Human
ugagaacuccacugucagucuaauugucguua

SEQ ID NO: 246747 - RNA, 32 nt, Human
ugagaacuccuuccucccuuugaagaucuguc

SEQ ID NO: 246748 - RNA, 32 nt, Human
ugagaacucuccccuucuucccucucucaucc

SEQ ID NO: 246749 - RNA, 32 nt, Human
ugagaacugggcagacaccccuggagcucagc

SEQ ID NO: 246750 - RNA, 32 nt, Human
ugagaacuggggccuccugcucccagggagcu

SEQ ID NO: 246751 - RNA, 32 nt, Human
ugagaacugucuuuuaaaauugaucacaacga

SEQ ID NO: 246752 - RNA, 32 nt, Human
ugagaacuucuugggaauagagucuaggcccc

SEQ ID NO: 246753 - RNA, 32 nt, Human
ugagaacuugccaaccagggauuaaagcuauu

SEQ ID NO: 246754 - RNA, 32 nt, Human
ugagaacuuguuucuuuucuaaucucugggcc

SEQ ID NO: 246755 - RNA, 32 nt, Human
ugagaagaaagccagacuuaagggauguuggc

SEQ ID NO: 246756 - RNA, 32 nt, Human
ugagaagaaauccaaucucaguccuggauuga

SEQ ID NO: 246757 - RNA, 32 nt, Human
ugagaagaaauccuuggaucucuuuucuuaaa

SEQ ID NO: 246758 - RNA, 32 nt, Human
ugagaagaacacggugcugggcuuucggguuc

SEQ ID NO: 246759 - RNA, 32 nt, Human
ugagaagacaugaacguuuucucuucaccgcc

SEQ ID NO: 246760 - RNA, 32 nt, Human
ugagaagaccuaaacuccuggccaucaucucu

SEQ ID NO: 246761 - RNA, 32 nt, Human
ugagaagacuccugggcuucagccucucccac

SEQ ID NO: 246762 - RNA, 32 nt, Human
ugagaagagaugaccucaucugucucaugcuc

SEQ ID NO: 246763 - RNA, 32 nt, Human
ugagaagagcagagaugaagggugggaccuga

SEQ ID NO: 246764 - RNA, 32 nt, Human
ugagaagaggcagaggaagggcgaaacauggc

SEQ ID NO: 246765 - RNA, 32 nt, Human
ugagaagaucagugagcugggggcuggcaaug

SEQ ID NO: 246766 - RNA, 32 nt, Human
ugagaagaugcgguggcugccuauguucucag

SEQ ID NO: 246767 - RNA, 32 nt, Human
ugagaagauggacaagcucugcucagaacaaa

SEQ ID NO: 246768 - RNA, 32 nt, Human
ugagaagauggagaacacagaggcagagaaag

SEQ ID NO: 246769 - RNA, 32 nt, Human
ugagaagcaaucagcugccauccugcccucca

SEQ ID NO: 246770 - RNA, 32 nt, Human
ugagaagcaccugccagcaacagcuuccuucu

SEQ ID NO: 246771 - RNA, 22 nt, Human
ugagaagcacugcuccuggagg

SEQ ID NO: 246772 - RNA, 32 nt, Human
ugagaagcagagccagcaaagcccgggaccug

SEQ ID NO: 246773 - RNA, 32 nt, Human
ugagaagcaguuaacccagaggccaggagccu

SEQ ID NO: 246774 - RNA, 32 nt, Human
ugagaagccaaggacaccgagucagucauggc

SEQ ID NO: 246775 - RNA, 32 nt, Human
ugagaagccagcccguagugccucccgaagga

SEQ ID NO: 246776 - RNA, 32 nt, Human
ugagaagccagccucagaccuuagcuugaagc

SEQ ID NO: 246777 - RNA, 32 nt, Human
ugagaagcccugguuuccccaaagaagugacu

SEQ ID NO: 246778 - RNA, 32 nt, Human
ugagaagccguuucauuuuauuucucacugua

SEQ ID NO: 246779 - RNA, 32 nt, Human
ugagaagcuacugcuaucugcugcucugggaa

SEQ ID NO: 246780 - RNA, 32 nt, Human
ugagaagcucacuucacccucuccccaugcca

SEQ ID NO: 246781 - RNA, 32 nt, Human
ugagaagcucuucgaaacauuuuaugguaagg

SEQ ID NO: 246782 - RNA, 32 nt, Human
ugagaagcuggaggaggagggggaagaggagu

SEQ ID NO: 246783 - RNA, 32 nt, Human
ugagaagcugugcagcugccgcugggugcacc

SEQ ID NO: 246784 - RNA, 32 nt, Human
ugagaagcuucucuagacuuggcuccaaacau

SEQ ID NO: 246785 - RNA, 32 nt, Human
ugagaagcuuugaccuugaagggcuucuggga

SEQ ID NO: 246786 - RNA, 17 nt, Human
ugagaaggaacugugau

SEQ ID NO: 246787 - RNA, 32 nt, Human
ugagaaggaacuuccagguguuacuguaauuc

SEQ ID NO: 246788 - RNA, 32 nt, Human
ugagaaggagccaccagcuggaggaaaggggc

SEQ ID NO: 246789 - RNA, 32 nt, Human
ugagaaggagcugugguucugaccuucagggg

SEQ ID NO: 246790 - RNA, 32 nt, Human
ugagaaggagguuuaaggcaaguagacaacau

SEQ ID NO: 246791 - RNA, 21 nt, Human
ugagaaggagucucgcgcugu

SEQ ID NO: 246792 - RNA, 21 nt, Human
ugagaaggagucuugcucugu

SEQ ID NO: 246793 - RNA, 32 nt, Human
ugagaaggagucuugcucuguugcccacauug

SEQ ID NO: 246794 - RNA, 32 nt, Human
ugagaaggcagagagaagaaagcagacaggaa

SEQ ID NO: 246795 - RNA, 32 nt, Human
ugagaagggaaaaaggaaagaaaaauugaggg

SEQ ID NO: 246796 - RNA, 32 nt, Human
ugagaagggaaggcagaugggagaagccaaug

SEQ ID NO: 246797 - RNA, 32 nt, Human
ugagaagggagaagacagaggagaaugccaga

SEQ ID NO: 246798 - RNA, 32 nt, Human
ugagaagggagagagagcuagagggacaaaga

SEQ ID NO: 246799 - RNA, 32 nt, Human
ugagaagggcggcagaggcaguggggcuggcu

SEQ ID NO: 246800 - RNA, 32 nt, Human
ugagaaggggcagcacgauuggcgcuccagcu

SEQ ID NO: 246801 - RNA, 32 nt, Human
ugagaagguuugcaugcucagagcagagaagg

SEQ ID NO: 246802 - RNA, 32 nt, Human
ugagaagucaacacacugaggauggagagaaa

SEQ ID NO: 246803 - RNA, 32 nt, Human
ugagaagucacugcuuuggggagaccugaucu

SEQ ID NO: 246804 - RNA, 32 nt, Human
ugagaagucaguccaaggagguauguucuucc

SEQ ID NO: 246805 - RNA, 32 nt, Human
ugagaaguccaaggaaugagccuuggaccacu

SEQ ID NO: 246806 - RNA, 32 nt, Human
ugagaagucuaagagaagcucuaagacguuua

SEQ ID NO: 246807 - RNA, 32 nt, Human
ugagaagucugccaagucuaaggagauguccc

SEQ ID NO: 246808 - RNA, 32 nt, Human
ugagaagucuucgugcuucagauuuguuuacc

SEQ ID NO: 246809 - RNA, 32 nt, Human
ugagaauacuccuugguuuucucugaagccca

SEQ ID NO: 246810 - RNA, 32 nt, Human
ugagaauagaaggaaacuagcuuacaugagaa

SEQ ID NO: 246811 - RNA, 32 nt, Human
ugagaauaggaguucaagaccagccugggcaa

SEQ ID NO: 246812 - RNA, 32 nt, Human
ugagaauauuguugcugcucuuuuggagacaa

SEQ ID NO: 246813 - RNA, 20 nt, Human
ugagaaucagagagcauaau

SEQ ID NO: 246814 - RNA, 32 nt, Human
ugagaaucauacaagccccgcuacagacaaca

SEQ ID NO: 246815 - RNA, 32 nt, Human
ugagaauccaauuagucuucugaaccaccuuu

SEQ ID NO: 246816 - RNA, 24 nt, Human
ugagaaugaaagcuuaggcugcuu

SEQ ID NO: 246817 - RNA, 32 nt, Human
ugagaaugaaguauuaagauccaauuucuaua

SEQ ID NO: 246818 - RNA, 32 nt, Human
ugagaaugagcagcugcaggagcacugcgcca

SEQ ID NO: 246819 - RNA, 32 nt, Human
ugagaaugagcccagaggcuuguuuggggacu

SEQ ID NO: 246820 - RNA, 32 nt, Human
ugagaaugaguguggauguguacaguacacgc

SEQ ID NO: 246821 - RNA, 32 nt, Human
ugagaaugagugugugugagugaggcgguauc

SEQ ID NO: 246822 - RNA, 32 nt, Human
ugagaaugaugauacagucugagcuacuggca

SEQ ID NO: 246823 - RNA, 32 nt, Human
ugagaaugccagaucuguggcugucuucauuc

SEQ ID NO: 246824 - RNA, 32 nt, Human
ugagaaugccuagcaaaguccucaacuuacuu

SEQ ID NO: 246825 - RNA, 32 nt, Human
ugagaauggggucccagauggcucaggcugug

SEQ ID NO: 246826 - RNA, 32 nt, Human
ugagaauguuucucagccucccccuuuacaga

SEQ ID NO: 246827 - RNA, 32 nt, Human
ugagaauuaucaccaugacaccugccauaccg

SEQ ID NO: 246828 - RNA, 32 nt, Human
ugagaauucauuuugaucuguaucuacaccac

SEQ ID NO: 246829 - RNA, 32 nt, Human
ugagaauucuuuuguuuauaagcuaccagucu

SEQ ID NO: 246830 - RNA, 32 nt, Human
ugagaauugguaccuacaacagucuauuugcu

SEQ ID NO: 246831 - RNA, 32 nt, Human
ugagacaaaccugccuuugcagggaaaguguc

SEQ ID NO: 246832 - RNA, 32 nt, Human
ugagacaaaccugggagccuccugacacggag

SEQ ID NO: 246833 - RNA, 21 nt, Human
ugagacaaagucucgcacugu

SEQ ID NO: 246834 - RNA, 21 nt, Human
ugagacaaagucucgcucugu

SEQ ID NO: 246835 - RNA, 19 nt, Human
ugagacaaaguuucgcucu

SEQ ID NO: 246836 - RNA, 19 nt, Human
ugagacaaaguuuugcucu

SEQ ID NO: 246837 - RNA, 32 nt, Human
ugagacaacugcacuccagugugggcgugccu

SEQ ID NO: 246838 - RNA, 32 nt, Human
ugagacaagaggaucaauugagcccaggaguu

SEQ ID NO: 246839 - RNA, 22 nt, Human
ugagacaagagucucgcucugu

SEQ ID NO: 246840 - RNA, 32 nt, Human
ugagacaagauuucgccauguugcccaggcug

SEQ ID NO: 246841 - RNA, 32 nt, Human
ugagacaaggucucacuauguugcccaggcug

SEQ ID NO: 246842 - RNA, 21 nt, Human
ugagacaaggucuugcucugu

SEQ ID NO: 246843 - RNA, 32 nt, Human
ugagacaauaaugaguuaaauauuuuauugga

SEQ ID NO: 246844 - RNA, 32 nt, Human
ugagacacacaccuacccuccccagcuuucca

SEQ ID NO: 246845 - RNA, 32 nt, Human
ugagacacagccuugcucugucgcccaggcug

SEQ ID NO: 246846 - RNA, 21 nt, Human
ugagacacagucucgcucugu

SEQ ID NO: 246847 - RNA, 20 nt, Human
ugagacacaguuugcucugu

SEQ ID NO: 246848 - RNA, 32 nt, Human
ugagacacggcauggcauugaaugacaccaag

SEQ ID NO: 246849 - RNA, 32 nt, Human
ugagacacggcuugcagugggggugaacgcac

SEQ ID NO: 246850 - RNA, 32 nt, Human
ugagacacggucugacucugucacccaggcug

SEQ ID NO: 246851 - RNA, 21 nt, Human
ugagacacggucuugcucugu

SEQ ID NO: 246852 - RNA, 32 nt, Human
ugagacacucaccucucugccucgcaguuggg

SEQ ID NO: 246853 - RNA, 32 nt, Human
ugagacacuggguggcuguggagggagcucag

SEQ ID NO: 246854 - RNA, 32 nt, Human
ugagacacuguggcugucuaauguaauccuuu

SEQ ID NO: 246855 - RNA, 19 nt, Human
ugagacagaaucucacucu

SEQ ID NO: 246856 - RNA, 21 nt, Human
ugagacagaaucucacuuugu

SEQ ID NO: 246857 - RNA, 21 nt, Human
ugagacagaaucucagucugu

SEQ ID NO: 246858 - RNA, 21 nt, Human
ugagacagaaucucccucugu

SEQ ID NO: 246859 - RNA, 21 nt, Human
ugagacagaaucucgcucugu

SEQ ID NO: 246860 - RNA, 19 nt, Human
ugagacagaaucucucugu

SEQ ID NO: 246861 - RNA, 21 nt, Human
ugagacagaaucuugaucugu

SEQ ID NO: 246862 - RNA, 21 nt, Human
ugagacagaaucuugcucugu

SEQ ID NO: 246863 - RNA, 21 nt, Human
ugagacagaauuucacucuuc

SEQ ID NO: 246864 - RNA, 19 nt, Human
ugagacagaauuuugcucu

SEQ ID NO: 246865 - RNA, 32 nt, Human
ugagacagacacacagccucacgcccccagga

SEQ ID NO: 246866 - RNA, 32 nt, Human
ugagacagacagggaucaggagccggacuggg

SEQ ID NO: 246867 - RNA, 21 nt, Human
ugagacagacauggguucugu

SEQ ID NO: 246868 - RNA, 32 nt, Human
ugagacagagaagggaaguaggcccuuacuuc

SEQ ID NO: 246869 - RNA, 32 nt, Human
ugagacagagacucgcucugucacccaggcug

SEQ ID NO: 246870 - RNA, 21 nt, Human
ugagacagagacuugcuuugu

SEQ ID NO: 246871 - RNA, 32 nt, Human
ugagacagagauggaagccaggacaagggagc

SEQ ID NO: 246872 - RNA, 18 nt, Human
ugagacagagccucgcuc

SEQ ID NO: 246873 - RNA, 25 nt, Human
ugagacagagccucgcuugcucugu

SEQ ID NO: 246874 - RNA, 18 nt, Human
ugagacagagcucgccuc

SEQ ID NO: 246875 - RNA, 20 nt, Human
ugagacagagcugcccgugu

SEQ ID NO: 246876 - RNA, 20 nt, Human
ugagacagaggcugccccug

SEQ ID NO: 246877 - RNA, 20 nt, Human
ugagacagaguagcucucug

SEQ ID NO: 246878 - RNA, 17 nt, Human
ugagacagagucacugu

SEQ ID NO: 246879 - RNA, 21 nt, Human
ugagacagagucaugcucugu

SEQ ID NO: 246880 - RNA, 32 nt, Human
ugagacagagucaugcucugucacccgggcug

SEQ ID NO: 246881 - RNA, 21 nt, Human
ugagacagagucccacucugu

SEQ ID NO: 246882 - RNA, 32 nt, Human
ugagacagagucccacucugucacccaggcug

SEQ ID NO: 246883 - RNA, 32 nt, Human
ugagacagagucgcacucugucauccaggcug

SEQ ID NO: 246884 - RNA, 21 nt, Human
ugagacagagucucacacugu

SEQ ID NO: 246885 - RNA, 21 nt, Human
ugagacagagucucacccugu

SEQ ID NO: 246886 - RNA, 21 nt, Human
ugagacagagucucaccuugu

SEQ ID NO: 246887 - RNA, 19 nt, Human
ugagacagagucucacucu

SEQ ID NO: 246888 - RNA, 21 nt, Human
ugagacagagucucacucugu

SEQ ID NO: 246889 - RNA, 32 nt, Human
ugagacagagucucacucugucacccagacug

SEQ ID NO: 246890 - RNA, 32 nt, Human
ugagacagagucucacucugucacccaggcug

SEQ ID NO: 246891 - RNA, 32 nt, Human
ugagacagagucucacucugucacucaggcug

SEQ ID NO: 246892 - RNA, 21 nt, Human
ugagacagagucucacucuug

SEQ ID NO: 246893 - RNA, 19 nt, Human
ugagacagagucucacugu

SEQ ID NO: 246894 - RNA, 20 nt, Human
ugagacagagucucacuuug

SEQ ID NO: 246895 - RNA, 21 nt, Human
ugagacagagucucacuuugu

SEQ ID NO: 246896 - RNA, 21 nt, Human
ugagacagagucucaugcugu

SEQ ID NO: 246897 - RNA, 18 nt, Human
ugagacagagucucauuc

SEQ ID NO: 246898 - RNA, 21 nt, Human
ugagacagagucucauucugu

SEQ ID NO: 246899 - RNA, 32 nt, Human
ugagacagagucucauucugucacccaggcug

SEQ ID NO: 246900 - RNA, 21 nt, Human
ugagacagagucucccucugu

SEQ ID NO: 246901 - RNA, 32 nt, Human
ugagacagagucucccucugucaccaggcugg

SEQ ID NO: 246902 - RNA, 32 nt, Human
ugagacagagucucccucugucacccaggcua

SEQ ID NO: 246903 - RNA, 21 nt, Human
ugagacagagucucgcacugu

SEQ ID NO: 246904 - RNA, 21 nt, Human
ugagacagagucucgccuugu

SEQ ID NO: 246905 - RNA, 21 nt, Human
ugagacagagucucgcgcugu

SEQ ID NO: 246906 - RNA, 18 nt, Human
ugagacagagucucgcuc

SEQ ID NO: 246907 - RNA, 21 nt, Human
ugagacagagucucgcucugu

SEQ ID NO: 246908 - RNA, 32 nt, Human
ugagacagagucucgcucugucaccaggcugu

SEQ ID NO: 246909 - RNA, 32 nt, Human
ugagacagagucucgcucugucacccaggcug

SEQ ID NO: 246910 - RNA, 32 nt, Human
ugagacagagucucgcucugucgccaggcuag

SEQ ID NO: 246911 - RNA, 32 nt, Human
ugagacagagucucgcucugucgccaggcuga

SEQ ID NO: 246912 - RNA, 32 nt, Human
ugagacagagucucgcucugucgccagguugg

SEQ ID NO: 246913 - RNA, 32 nt, Human
ugagacagagucucgcucugucgcccagacua

SEQ ID NO: 246914 - RNA, 32 nt, Human
ugagacagagucucgcucugucgcccaggcug

SEQ ID NO: 246915 - RNA, 32 nt, Human
ugagacagagucucgcucugucgcucaggcug

SEQ ID NO: 246916 - RNA, 32 nt, Human
ugagacagagucucgcucugucguccaggcug

SEQ ID NO: 246917 - RNA, 21 nt, Human
ugagacagagucucgcuuugu

SEQ ID NO: 246918 - RNA, 21 nt, Human
ugagacagagucucguucugu

SEQ ID NO: 246919 - RNA, 19 nt, Human
ugagacagagucucucucu

SEQ ID NO: 246920 - RNA, 21 nt, Human
ugagacagagucucucucugu

SEQ ID NO: 246921 - RNA, 18 nt, Human
ugagacagagucucuguu

SEQ ID NO: 246922 - RNA, 21 nt, Human
ugagacagagucucuuucugu

SEQ ID NO: 246923 - RNA, 21 nt, Human
ugagacagagucuggcucugu

SEQ ID NO: 246924 - RNA, 32 nt, Human
ugagacagagucuggcucugucacccaggcug

SEQ ID NO: 246925 - RNA, 32 nt, Human
ugagacagagucuggcucugucauccaggcug

SEQ ID NO: 246926 - RNA, 32 nt, Human
ugagacagagucuggcucugucgcccaggcug

SEQ ID NO: 246927 - RNA, 21 nt, Human
ugagacagagucugguucugu

SEQ ID NO: 246928 - RNA, 21 nt, Human
ugagacagagucuuacucugu

SEQ ID NO: 246929 - RNA, 32 nt, Human
ugagacagagucuuacucugucacccaggcug

SEQ ID NO: 246930 - RNA, 21 nt, Human
ugagacagagucuuauucugu

SEQ ID NO: 246931 - RNA, 21 nt, Human
ugagacagagucuuccucugu

SEQ ID NO: 246932 - RNA, 19 nt, Human
ugagacagagucuugaucu

SEQ ID NO: 246933 - RNA, 21 nt, Human
ugagacagagucuugcccugu

SEQ ID NO: 246934 - RNA, 18 nt, Human
ugagacagagucuugcuc

SEQ ID NO: 246935 - RNA, 19 nt, Human
ugagacagagucuugcucu

SEQ ID NO: 246936 - RNA, 21 nt, Human
ugagacagagucuugcucugu

SEQ ID NO: 246937 - RNA, 32 nt, Human
ugagacagagucuugcucugucaccaggcugg

SEQ ID NO: 246938 - RNA, 32 nt, Human
ugagacagagucuugcucugucacccaggcug

SEQ ID NO: 246939 - RNA, 32 nt, Human
ugagacagagucuugcucugucacccagguug

SEQ ID NO: 246940 - RNA, 32 nt, Human
ugagacagagucuugcucugucacccgggcug

SEQ ID NO: 246941 - RNA, 32 nt, Human
ugagacagagucuugcucugucauccaaacug

SEQ ID NO: 246942 - RNA, 32 nt, Human
ugagacagagucuugcucugucgccaaggcug

SEQ ID NO: 246943 - RNA, 32 nt, Human
ugagacagagucuugcucugucgccaaguugg

SEQ ID NO: 246944 - RNA, 32 nt, Human
ugagacagagucuugcucugucgcccgggcug

SEQ ID NO: 246945 - RNA, 32 nt, Human
ugagacagagucuugcucugucgccgaggcug

SEQ ID NO: 246946 - RNA, 32 nt, Human
ugagacagagucuugcucugucggccaggcug

SEQ ID NO: 246947 - RNA, 32 nt, Human
ugagacagagucuugcucugucgucgaggcug

SEQ ID NO: 246948 - RNA, 32 nt, Human
ugagacagagucuugcucugugacccagguug

SEQ ID NO: 246949 - RNA, 32 nt, Human
ugagacagagucuugcucuguggcccaggcug

SEQ ID NO: 246950 - RNA, 32 nt, Human
ugagacagagucuugcucuguuacccaggcug

SEQ ID NO: 246951 - RNA, 32 nt, Human
ugagacagagucuugcucuguugcccaggcag

SEQ ID NO: 246952 - RNA, 32 nt, Human
ugagacagagucuugcucuguugcccaggcua

SEQ ID NO: 246953 - RNA, 32 nt, Human
ugagacagagucuugcucuguugcccaggcug

SEQ ID NO: 246954 - RNA, 21 nt, Human
ugagacagagucuugcuuugu

SEQ ID NO: 246955 - RNA, 32 nt, Human
ugagacagagucuugcuuuguugcccaggcug

SEQ ID NO: 246956 - RNA, 21 nt, Human
ugagacagagucuuggucugu

SEQ ID NO: 246957 - RNA, 20 nt, Human
ugagacagagucuuguuuug

SEQ ID NO: 246958 - RNA, 21 nt, Human
ugagacagagucuuucucugu

SEQ ID NO: 246959 - RNA, 32 nt, Human
ugagacagagucuuucucugucacccaggcug

SEQ ID NO: 246960 - RNA, 32 nt, Human
ugagacagagugccuaagagaaacccuugcac

SEQ ID NO: 246961 - RNA, 16 nt, Human
ugagacagaguggccu

SEQ ID NO: 246962 - RNA, 32 nt, Human
ugagacagagugucacuuugucacccaggcug

SEQ ID NO: 246963 - RNA, 19 nt, Human
ugagacagaguuucacucu

SEQ ID NO: 246964 - RNA, 21 nt, Human
ugagacagaguuucacucugu

SEQ ID NO: 246965 - RNA, 32 nt, Human
ugagacagaguuucacucugucacccaggcug

SEQ ID NO: 246966 - RNA, 19 nt, Human
ugagacagaguuucauucu

SEQ ID NO: 246967 - RNA, 19 nt, Human
ugagacagaguuucgaucu

SEQ ID NO: 246968 - RNA, 19 nt, Human
ugagacagaguuucgcucu

SEQ ID NO: 246969 - RNA, 19 nt, Human
ugagacagaguuucgcuuu

SEQ ID NO: 246970 - RNA, 21 nt, Human
ugagacagaguuucgcuuugu

SEQ ID NO: 246971 - RNA, 19 nt, Human
ugagacagaguuuggcucu

SEQ ID NO: 246972 - RNA, 20 nt, Human
ugagacagaguuuguuuucc

SEQ ID NO: 246973 - RNA, 20 nt, Human
ugagacagaguuuucacucu

SEQ ID NO: 246974 - RNA, 19 nt, Human
ugagacagaguuuugcccu

SEQ ID NO: 246975 - RNA, 19 nt, Human
ugagacagaguuuugcucu

SEQ ID NO: 246976 - RNA, 32 nt, Human
ugagacagaguuuugcucuguugcccaggcug

SEQ ID NO: 246977 - RNA, 19 nt, Human
ugagacagaguuuuugcuc

SEQ ID NO: 246978 - RNA, 18 nt, Human
ugagacagaucugggcuc

SEQ ID NO: 246979 - RNA, 20 nt, Human
ugagacagauuaucuucugu

SEQ ID NO: 246980 - RNA, 21 nt, Human
ugagacagauucuugcucugu

SEQ ID NO: 246981 - RNA, 32 nt, Human
ugagacagauucuugcucugucacccaggcug

SEQ ID NO: 246982 - RNA, 32 nt, Human
ugagacagcaacacaaacacucgagcuuccau

SEQ ID NO: 246983 - RNA, 21 nt, Human
ugagacagcaucuugcucugu

SEQ ID NO: 246984 - RNA, 19 nt, Human
ugagacagccucgcucugu

SEQ ID NO: 246985 - RNA, 19 nt, Human
ugagacagccuugcucugu

SEQ ID NO: 246986 - RNA, 19 nt, Human
ugagacagcucuuggucca

SEQ ID NO: 246987 - RNA, 21 nt, Human
ugagacagcuuccugcucugu

SEQ ID NO: 246988 - RNA, 32 nt, Human
ugagacaggagaaucacuugagcccaggaggc

SEQ ID NO: 246989 - RNA, 32 nt, Human
ugagacaggagaauggugugaacccccaaggc

SEQ ID NO: 246990 - RNA, 31 nt, Human
ugagacaggagaccuggcacuggaugcagaa

SEQ ID NO: 246991 - RNA, 32 nt, Human
ugagacaggaggaaguuucuguuuuucuccau

SEQ ID NO: 246992 - RNA, 32 nt, Human
ugagacaggaggaucacuugaggccaggaguu

SEQ ID NO: 246993 - RNA, 32 nt, Human
ugagacaggaggaucacuuuagcccaggaauu

SEQ ID NO: 246994 - RNA, 32 nt, Human
ugagacaggaggaucgcuugaacccaggaggc

SEQ ID NO: 246995 - RNA, 32 nt, Human
ugagacaggaggaucgguugagcccaggaggu

SEQ ID NO: 246996 - RNA, 32 nt, Human
ugagacaggaggucagcacaagauacacguca

SEQ ID NO: 246997 - RNA, 32 nt, Human
ugagacaggagguccguacaagauacagguca

SEQ ID NO: 246998 - RNA, 22 nt, Human
ugagacaggagucucgcucugu

SEQ ID NO: 246999 - RNA, 21 nt, Human
ugagacaggaucucauucugu

SEQ ID NO: 247000 - RNA, 21 nt, Human
ugagacaggaucuugcucugu

SEQ ID NO: 247001 - RNA, 32 nt, Human
ugagacaggaucuugcucugucgcccaauagc

SEQ ID NO: 247002 - RNA, 32 nt, Human
ugagacaggcagaucacuugaggucaggaguu

SEQ ID NO: 247003 - RNA, 21 nt, Human
ugagacaggcucucacucugu

SEQ ID NO: 247004 - RNA, 32 nt, Human
ugagacaggcuggcuuggaguuaguguaugag

SEQ ID NO: 247005 - RNA, 21 nt, Human
ugagacagggccucacucugu

SEQ ID NO: 247006 - RNA, 32 nt, Human
ugagacagggccucacucuguugcccagguug

SEQ ID NO: 247007 - RNA, 32 nt, Human
ugagacaggguccugcucugucgcccaggcug

SEQ ID NO: 247008 - RNA, 21 nt, Human
ugagacagggucucacacugu

SEQ ID NO: 247009 - RNA, 21 nt, Human
ugagacagggucucacuaugu

SEQ ID NO: 247010 - RNA, 32 nt, Human
ugagacagggucucacuauguugcccaggcug

SEQ ID NO: 247011 - RNA, 19 nt, Human
ugagacagggucucacucu

SEQ ID NO: 247012 - RNA, 21 nt, Human
ugagacagggucucacucugu

SEQ ID NO: 247013 - RNA, 32 nt, Human
ugagacagggucucacucugucacccaggcug

SEQ ID NO: 247014 - RNA, 32 nt, Human
ugagacagggucucacucugucacucaaucug

SEQ ID NO: 247015 - RNA, 32 nt, Human
ugagacagggucucacucuguugcccaggcug

SEQ ID NO: 247016 - RNA, 21 nt, Human
ugagacagggucucacugugu

SEQ ID NO: 247017 - RNA, 21 nt, Human
ugagacagggucuccgucugu

SEQ ID NO: 247018 - RNA, 21 nt, Human
ugagacagggucucgcucugu

SEQ ID NO: 247019 - RNA, 21 nt, Human
ugagacagggucucguucugu

SEQ ID NO: 247020 - RNA, 21 nt, Human
ugagacagggucugacucugu

SEQ ID NO: 247021 - RNA, 21 nt, Human
ugagacagggucuggcucugu

SEQ ID NO: 247022 - RNA, 21 nt, Human
ugagacagggucuuacucugu

SEQ ID NO: 247023 - RNA, 32 nt, Human
ugagacagggucuugcccuguugcccaggcug

SEQ ID NO: 247024 - RNA, 21 nt, Human
ugagacagggucuugcucugu

SEQ ID NO: 247025 - RNA, 32 nt, Human
ugagacagggucuugcucugucacccaagcug

SEQ ID NO: 247026 - RNA, 32 nt, Human
ugagacagggucuugcucugucacccagacug

SEQ ID NO: 247027 - RNA, 32 nt, Human
ugagacagggucuugcucugucacccaggcug

SEQ ID NO: 247028 - RNA, 32 nt, Human
ugagacagggucuugcucugucccccaggcug

SEQ ID NO: 247029 - RNA, 32 nt, Human
ugagacagggucuugcucugucgcccaggcug

SEQ ID NO: 247030 - RNA, 32 nt, Human
ugagacagggucuugcucugucgcccagguug

SEQ ID NO: 247031 - RNA, 32 nt, Human
ugagacagggucuugcucuguugcccaggcug

SEQ ID NO: 247032 - RNA, 32 nt, Human
ugagacagggucuugcucuugcccaggcagga

SEQ ID NO: 247033 - RNA, 32 nt, Human
ugagacagggucuugcuguguugcccaggcug

SEQ ID NO: 247034 - RNA, 32 nt, Human
ugagacagggucuugcuuugucacccaggcug

SEQ ID NO: 247035 - RNA, 32 nt, Human
ugagacagggucuugcuuugucacccagggug

SEQ ID NO: 247036 - RNA, 32 nt, Human
ugagacagggucuuucucugucacccaggaug

SEQ ID NO: 247037 - RNA, 21 nt, Human
ugagacagggugucacuuugu

SEQ ID NO: 247038 - RNA, 21 nt, Human
ugagacaggguuucacccugu

SEQ ID NO: 247039 - RNA, 32 nt, Human
ugagacaggguuucacccuguuucccagguug

SEQ ID NO: 247040 - RNA, 21 nt, Human
ugagacaggguuucacuacgu

SEQ ID NO: 247041 - RNA, 19 nt, Human
ugagacagguaaauucugu

SEQ ID NO: 247042 - RNA, 32 nt, Human
ugagacagguggaucacuugaggucaggaguu

SEQ ID NO: 247043 - RNA, 32 nt, Human
ugagacagguggaucacuugaggucgggaguu

SEQ ID NO: 247044 - RNA, 32 nt, Human
ugagacaggugggccacaugagcccagguauu

SEQ ID NO: 247045 - RNA, 32 nt, Human
ugagacaguaucuugcuauguugcccaggcug

SEQ ID NO: 247046 - RNA, 19 nt, Human
ugagacagucgugcugugu

SEQ ID NO: 247047 - RNA, 19 nt, Human
ugagacagucucacucugu

SEQ ID NO: 247048 - RNA, 19 nt, Human
ugagacagucucgcucugu

SEQ ID NO: 247049 - RNA, 21 nt, Human
ugagacagucucucgcucugu

SEQ ID NO: 247050 - RNA, 16 nt, Human
ugagacagucuugcuc

SEQ ID NO: 247051 - RNA, 17 nt, Human
ugagacagucuugcucu

SEQ ID NO: 247052 - RNA, 19 nt, Human
ugagacagucuugcucugu

SEQ ID NO: 247053 - RNA, 21 nt, Human
ugagacagugccucacucugu

SEQ ID NO: 247054 - RNA, 21 nt, Human
ugagacagugucucucucugu

SEQ ID NO: 247055 - RNA, 21 nt, Human
ugagacagugucuugcucugu

SEQ ID NO: 247056 - RNA, 19 nt, Human
ugagacaguguugcuacug

SEQ ID NO: 247057 - RNA, 19 nt, Human
ugagacaguuucgcucugu

SEQ ID NO: 247058 - RNA, 32 nt, Human
ugagacauccauccugaccccaccucaucagc

SEQ ID NO: 247059 - RNA, 32 nt, Human
ugagacauggccugagcccccugcugccauag

SEQ ID NO: 247060 - RNA, 32 nt, Human
ugagacauggucuugcucuauugcccaggcug

SEQ ID NO: 247061 - RNA, 32 nt, Human
ugagacauucugauuuggaugaugcuagagca

SEQ ID NO: 247062 - RNA, 32 nt, Human
ugagacauuuuucugugucacugugggaaagc

SEQ ID NO: 247063 - RNA, 32 nt, Human
ugagaccaagaguucaagaccagccuggccaa

SEQ ID NO: 247064 - RNA, 32 nt, Human
ugagaccaaugaaaucaccaaugccaacuccc

SEQ ID NO: 247065 - RNA, 32 nt, Human
ugagaccacaccacugcacuccauccugggca

SEQ ID NO: 247066 - RNA, 32 nt, Human
ugagaccacagcaacugcagaagcugaagaca

SEQ ID NO: 247067 - RNA, 32 nt, Human
ugagaccaccggugugggucacgaggacccug

SEQ ID NO: 247068 - RNA, 32 nt, Human
ugagaccaccuugccaugucaauucaggucuc

SEQ ID NO: 247069 - RNA, 32 nt, Human
ugagaccacggugaaacccugucucuacuaaa

SEQ ID NO: 247070 - RNA, 32 nt, Human
ugagaccagcacucucaaacacuggaacugga

SEQ ID NO: 247071 - RNA, 32 nt, Human
ugagaccagcaugggaaacagagcaagaaucu

SEQ ID NO: 247072 - RNA, 32 nt, Human
ugagaccagccucggcaacauggcaaaaucuu

SEQ ID NO: 247073 - RNA, 32 nt, Human
ugagaccagccuggccaagauggugaaacccc

SEQ ID NO: 247074 - RNA, 32 nt, Human
ugagaccagccuggccagcauggugaaacccc

SEQ ID NO: 247075 - RNA, 22 nt, Human
ugagaccagccugggcaacaua

SEQ ID NO: 247076 - RNA, 32 nt, Human
ugagaccagcuggucacugcugggccugcuag

SEQ ID NO: 247077 - RNA, 32 nt, Human
ugagaccaggaauucaagaccagccugggcaa

SEQ ID NO: 247078 - RNA, 32 nt, Human
ugagaccaggagaucaaggcugcagcgagcuc

SEQ ID NO: 247079 - RNA, 32 nt, Human
ugagaccaggaggucaagaccagccuggccaa

SEQ ID NO: 247080 - RNA, 32 nt, Human
ugagaccaggagguugaggcugcagugagccg

SEQ ID NO: 247081 - RNA, 32 nt, Human
ugagaccaggaguucaagaccagccugagaaa

SEQ ID NO: 247082 - RNA, 32 nt, Human
ugagaccaggaguucaagaccagccugggcaa

SEQ ID NO: 247083 - RNA, 32 nt, Human
ugagaccaggaguuugggaccaaccugagcaa

SEQ ID NO: 247084 - RNA, 32 nt, Human
ugagaccaggcguucaagaccagccuggccaa

SEQ ID NO: 247085 - RNA, 32 nt, Human
ugagaccagguguucaagaccagccucaucaa

SEQ ID NO: 247086 - RNA, 32 nt, Human
ugagaccaguccuggccaggguaguuaccagg

SEQ ID NO: 247087 - RNA, 32 nt, Human
ugagaccagucucaguuuauuuugccaagguu

SEQ ID NO: 247088 - RNA, 32 nt, Human
ugagaccauccauucuccucaguggcuucucc

SEQ ID NO: 247089 - RNA, 32 nt, Human
ugagaccauccuggcuaacacagugaacccug

SEQ ID NO: 247090 - RNA, 32 nt, Human
ugagaccaucuccuggggcaggguccuuuucu

SEQ ID NO: 247091 - RNA, 32 nt, Human
ugagaccaucuuagaagaagcgaaagugacug

SEQ ID NO: 247092 - RNA, 32 nt, Human
ugagaccaugccacugcacuccagccugggca

SEQ ID NO: 247093 - RNA, 32 nt, Human
ugagaccauguucuccacagugucuccagugg

SEQ ID NO: 247094 - RNA, 32 nt, Human
ugagacccacagugcaccagagcacagcugca

SEQ ID NO: 247095 - RNA, 32 nt, Human
ugagacccacugaccugcagaccucauagugg

SEQ ID NO: 247096 - RNA, 32 nt, Human
ugagacccagaaagguggaagcacuugucuaa

SEQ ID NO: 247097 - RNA, 32 nt, Human
ugagaccccaucucaaaaacaaaacaccaaac

SEQ ID NO: 247098 - RNA, 19 nt, Human
ugagaccccaucucuacua

SEQ ID NO: 247099 - RNA, 32 nt, Human
ugagacccccacuccugcccgccagagaacaa

SEQ ID NO: 247100 - RNA, 32 nt, Human
ugagaccccugaggcaacuagcuuugagggac

SEQ ID NO: 247101 - RNA, 32 nt, Human
ugagaccccuggcaguugccuacaccccugcu

SEQ ID NO: 247102 - RNA, 32 nt, Human
ugagacccucauuguucacuggcuccaucgca

SEQ ID NO: 247103 - RNA, 32 nt, Human
ugagacccuccuccucagacugcuggagcaac

SEQ ID NO: 247104 - RNA, 23 nt, Human
ugagacccucuuccauccauugg

SEQ ID NO: 247105 - RNA, 32 nt, Human
ugagacccuggauaugaaggcagaggagcccg

SEQ ID NO: 247106 - RNA, 32 nt, Human
ugagacccuuccccagugucugaggccacagc

SEQ ID NO: 247107 - RNA, 32 nt, Human
ugagaccgagucuugcucugucgcccaggcug

SEQ ID NO: 247108 - RNA, 32 nt, Human
ugagaccgagucuugcucuguuacccaggcug

SEQ ID NO: 247109 - RNA, 32 nt, Human
ugagaccuagagcagagaaacuagccaagauc

SEQ ID NO: 247110 - RNA, 32 nt, Human
ugagaccuagggcuggagugcaguugagcggu

SEQ ID NO: 247111 - RNA, 26 nt, Human
ugagaccucagagggccaccccuuga

SEQ ID NO: 247112 - RNA, 32 nt, Human
ugagaccucagccaugaggaguugcuguuugu

SEQ ID NO: 247113 - RNA, 32 nt, Human
ugagaccuccacuccacaucugcaucacucau

SEQ ID NO: 247114 - RNA, 32 nt, Human
ugagaccucuccccucuuucucgccaugugau

SEQ ID NO: 247115 - RNA, 32 nt, Human
ugagaccucucuggggaucaggaaccacacaa

SEQ ID NO: 247116 - RNA, 32 nt, Human
ugagaccugaaguuccgcuggccgguagugua

SEQ ID NO: 247117 - RNA, 32 nt, Human
ugagaccugcuuaugaucagugcaaugaaguu

SEQ ID NO: 247118 - RNA, 32 nt, Human
ugagaccuguggggaaaacaaccacaacaaac

SEQ ID NO: 247119 - RNA, 32 nt, Human
ugagaccuguucuuguauccuuguguccaucu

SEQ ID NO: 247120 - RNA, 32 nt, Human
ugagaccuugcuaagcacucuagaaaguuuua

SEQ ID NO: 247121 - RNA, 20 nt, Human
ugagacgagucucgcucugu

SEQ ID NO: 247122 - RNA, 32 nt, Human
ugagacgcaaggaucacuugagcccagaagcu

SEQ ID NO: 247123 - RNA, 32 nt, Human
ugagacgcuccauguccagucuggccccagca

SEQ ID NO: 247124 - RNA, 32 nt, Human
ugagacggacaggcagcaggggagcgacggga

SEQ ID NO: 247125 - RNA, 21 nt, Human
ugagacggacucucgcucugu

SEQ ID NO: 247126 - RNA, 21 nt, Human
ugagacggagacucacucugu

SEQ ID NO: 247127 - RNA, 32 nt, Human
ugagacggagacucacucuguugcccagacug

SEQ ID NO: 247128 - RNA, 32 nt, Human
ugagacggagauucgcucugucgccaggcugg

SEQ ID NO: 247129 - RNA, 21 nt, Human
ugagacggagccuugcucugu

SEQ ID NO: 247130 - RNA, 32 nt, Human
ugagacggagccuugcucugucgcccaggcug

SEQ ID NO: 247131 - RNA, 21 nt, Human
ugagacggagcgucgcucugu

SEQ ID NO: 247132 - RNA, 19 nt, Human
ugagacggagucacucugu

SEQ ID NO: 247133 - RNA, 19 nt, Human
ugagacggagucccacucu

SEQ ID NO: 247134 - RNA, 21 nt, Human
ugagacggagucucacucugu

SEQ ID NO: 247135 - RNA, 32 nt, Human
ugagacggagucucacucugucacacaggcug

SEQ ID NO: 247136 - RNA, 32 nt, Human
ugagacggagucucacucugucacccaggcug

SEQ ID NO: 247137 - RNA, 32 nt, Human
ugagacggagucucacucuguugcccaggcug

SEQ ID NO: 247138 - RNA, 32 nt, Human
ugagacggagucucacucuguugcccagggug

SEQ ID NO: 247139 - RNA, 21 nt, Human
ugagacggagucucagucugu

SEQ ID NO: 247140 - RNA, 21 nt, Human
ugagacggagucucgaucugu

SEQ ID NO: 247141 - RNA, 21 nt, Human
ugagacggagucucgcacugu

SEQ ID NO: 247142 - RNA, 32 nt, Human
ugagacggagucucgcacuguugcccaggcug

SEQ ID NO: 247143 - RNA, 32 nt, Human
ugagacggagucucgcaguguugcccgggcaa

SEQ ID NO: 247144 - RNA, 21 nt, Human
ugagacggagucucgcccugu

SEQ ID NO: 247145 - RNA, 32 nt, Human
ugagacggagucucgcccuguugcccaggcug

SEQ ID NO: 247146 - RNA, 19 nt, Human
ugagacggagucucgcucu

SEQ ID NO: 247147 - RNA, 20 nt, Human
ugagacggagucucgcucug

SEQ ID NO: 247148 - RNA, 21 nt, Human
ugagacggagucucgcucugu

SEQ ID NO: 247149 - RNA, 32 nt, Human
ugagacggagucucgcucugucacccaggcug

SEQ ID NO: 247150 - RNA, 32 nt, Human
ugagacggagucucgcucugucauccaggcug

SEQ ID NO: 247151 - RNA, 32 nt, Human
ugagacggagucucgcucugucgccaggcugg

SEQ ID NO: 247152 - RNA, 32 nt, Human
ugagacggagucucgcucugucgcccagccug

SEQ ID NO: 247153 - RNA, 32 nt, Human
ugagacggagucucgcucugucgcccaggcug

SEQ ID NO: 247154 - RNA, 32 nt, Human
ugagacggagucucgcucuguugcccaggcug

SEQ ID NO: 247155 - RNA, 21 nt, Human
ugagacggagucucgcuuugu

SEQ ID NO: 247156 - RNA, 21 nt, Human
ugagacggagucucggucugu

SEQ ID NO: 247157 - RNA, 21 nt, Human
ugagacggagucucguucugu

SEQ ID NO: 247158 - RNA, 21 nt, Human
ugagacggagucucucucugu

SEQ ID NO: 247159 - RNA, 21 nt, Human
ugagacggagucuggcucugu

SEQ ID NO: 247160 - RNA, 32 nt, Human
ugagacggagucuggcucugucacccaggcua

SEQ ID NO: 247161 - RNA, 32 nt, Human
ugagacggagucuggcucugucacccgggcug

SEQ ID NO: 247162 - RNA, 32 nt, Human
ugagacggagucuuacucuguugcccaggcug

SEQ ID NO: 247163 - RNA, 21 nt, Human
ugagacggagucuugcccugu

SEQ ID NO: 247164 - RNA, 32 nt, Human
ugagacggagucuugcccuguugcccaugcug

SEQ ID NO: 247165 - RNA, 32 nt, Human
ugagacggagucuugcuauguugcccaggcug

SEQ ID NO: 247166 - RNA, 32 nt, Human
ugagacggagucuugcucuauuacucaggcug

SEQ ID NO: 247167 - RNA, 20 nt, Human
ugagacggagucuugcucug

SEQ ID NO: 247168 - RNA, 32 nt, Human
ugagacggagucuugcucugccgcccaggcgg

SEQ ID NO: 247169 - RNA, 21 nt, Human
ugagacggagucuugcucugu

SEQ ID NO: 247170 - RNA, 32 nt, Human
ugagacggagucuugcucuguagcccaggcca

SEQ ID NO: 247171 - RNA, 32 nt, Human
ugagacggagucuugcucugucacccagacua

SEQ ID NO: 247172 - RNA, 32 nt, Human
ugagacggagucuugcucugucacccaggcug

SEQ ID NO: 247173 - RNA, 32 nt, Human
ugagacggagucuugcucugucgcccaggcug

SEQ ID NO: 247174 - RNA, 32 nt, Human
ugagacggagucuugcucugucgccuaggcug

SEQ ID NO: 247175 - RNA, 32 nt, Human
ugagacggagucuugcucuguugcccaggcug

SEQ ID NO: 247176 - RNA, 32 nt, Human
ugagacggagucuugcucuguugccuaggcug

SEQ ID NO: 247177 - RNA, 32 nt, Human
ugagacggagucuugcugugucaccaggcugg

SEQ ID NO: 247178 - RNA, 32 nt, Human
ugagacggagucuugcuguguuguccaggcug

SEQ ID NO: 247179 - RNA, 32 nt, Human
ugagacggaguguugcucugucacccaagcug

SEQ ID NO: 247180 - RNA, 32 nt, Human
ugagacggaguguugcucugucacccaggcug

SEQ ID NO: 247181 - RNA, 21 nt, Human
ugagacggaguuucacucugu

SEQ ID NO: 247182 - RNA, 32 nt, Human
ugagacggaguuucccucuguugcccaggcug

SEQ ID NO: 247183 - RNA, 21 nt, Human
ugagacggaguuucgcucugu

SEQ ID NO: 247184 - RNA, 32 nt, Human
ugagacggaguuucgcucugucgcccaggcug

SEQ ID NO: 247185 - RNA, 32 nt, Human
ugagacggaguuuugcucugucgcgcagggug

SEQ ID NO: 247186 - RNA, 32 nt, Human
ugagacgggaggaucacaugaggccaggaauu

SEQ ID NO: 247187 - RNA, 20 nt, Human
ugagacgggagucucgcucu

SEQ ID NO: 247188 - RNA, 32 nt, Human
ugagacgggaguuucucucuugucucccaggc

SEQ ID NO: 247189 - RNA, 23 nt, Human
ugagacgggccaggacgcccagc

SEQ ID NO: 247190 - RNA, 32 nt, Human
ugagacggggcaccuagcccugggcgagcgcc

SEQ ID NO: 247191 - RNA, 21 nt, Human
ugagacggggucucacucugu

SEQ ID NO: 247192 - RNA, 19 nt, Human
ugagacggggucucccugu

SEQ ID NO: 247193 - RNA, 21 nt, Human
ugagacggggucucgcucugu

SEQ ID NO: 247194 - RNA, 32 nt, Human
ugagacggggucucgcucugucacccaggcug

SEQ ID NO: 247195 - RNA, 32 nt, Human
ugagacggggucucgcucugucacucaggcug

SEQ ID NO: 247196 - RNA, 32 nt, Human
ugagacggggucucgcucugucgcccaggcug

SEQ ID NO: 247197 - RNA, 21 nt, Human
ugagacggggucuugcucugu

SEQ ID NO: 247198 - RNA, 32 nt, Human
ugagacggggucuugcucugucgcccaggcug

SEQ ID NO: 247199 - RNA, 32 nt, Human
ugagacggggucuugcucuguuguccaggcug

SEQ ID NO: 247200 - RNA, 32 nt, Human
ugagacggggucuuguugugucacccagguua

SEQ ID NO: 247201 - RNA, 32 nt, Human
ugagacgggguuucaccauguuggucaggcug

SEQ ID NO: 247202 - RNA, 32 nt, Human
ugagacgggguuucgcucuuguuguccaggcu

SEQ ID NO: 247203 - RNA, 19 nt, Human
ugagacggucucauucugu

SEQ ID NO: 247204 - RNA, 32 nt, Human
ugagacggugcucgcuucuccuccagguauuu

SEQ ID NO: 247205 - RNA, 32 nt, Human
ugagacggugucacugcacuccagccugggug

SEQ ID NO: 247206 - RNA, 21 nt, Human
ugagacggugucucgcucugu

SEQ ID NO: 247207 - RNA, 32 nt, Human
ugagacgugguguuuuacauggugacucacau

SEQ ID NO: 247208 - RNA, 32 nt, Human
ugagacuaaagugcuuagcacagaaccuggug

SEQ ID NO: 247209 - RNA, 32 nt, Human
ugagacuaauugcagagguuccaguugaccag

SEQ ID NO: 247210 - RNA, 32 nt, Human
ugagacuacaguagcuaugauggugccacuac

SEQ ID NO: 247211 - RNA, 31 nt, Human
ugagacuacuuaagauauuguugaaauaauu

SEQ ID NO: 247212 - RNA, 32 nt, Human
ugagacuaggaguucaagaucagccugggaaa

SEQ ID NO: 247213 - RNA, 21 nt, Human
ugagacuaggucuugcucugu

SEQ ID NO: 247214 - RNA, 21 nt, Human
ugagacucagucucgcucugu

SEQ ID NO: 247215 - RNA, 32 nt, Human
ugagacuccagccucuccuccuggggccaccc

SEQ ID NO: 247216 - RNA, 32 nt, Human
ugagacuccaucucaaaacaaaacaaaacaaa

SEQ ID NO: 247217 - RNA, 32 nt, Human
ugagacuccaucucaaaacaaaacaaaacaac

SEQ ID NO: 247218 - RNA, 32 nt, Human
ugagacuccaucucaaacaacaacaacaacaa

SEQ ID NO: 247219 - RNA, 32 nt, Human
ugagacuccaucucuauauaaaaacaaaaacc

SEQ ID NO: 247220 - RNA, 22 nt, Human
ugagacuccggagucucgcucu

SEQ ID NO: 247221 - RNA, 32 nt, Human
ugagacuccgucucaaaacaaaacaaaagugg

SEQ ID NO: 247222 - RNA, 32 nt, Human
ugagacuccugauguacacugugauauugacc

SEQ ID NO: 247223 - RNA, 32 nt, Human
ugagacuccuucucaaaacaaacaaacaaaca

SEQ ID NO: 247224 - RNA, 32 nt, Human
ugagacucuccagaaagagcaacaguaaugga

SEQ ID NO: 247225 - RNA, 32 nt, Human
ugagacucugucucaaaaacaaaacaaaacag

SEQ ID NO: 247226 - RNA, 32 nt, Human
ugagacucugucucaaaacaaacaaaacaaaa

SEQ ID NO: 247227 - RNA, 32 nt, Human
ugagacucugucucaaaacaaauaaacaacaa

SEQ ID NO: 247228 - RNA, 32 nt, Human
ugagacucuuaaacccccuccugaccuucaga

SEQ ID NO: 247229 - RNA, 32 nt, Human
ugagacugagguuucugcagccaguaagucac

SEQ ID NO: 247230 - RNA, 21 nt, Human
ugagacugagucucgcucugu

SEQ ID NO: 247231 - RNA, 32 nt, Human
ugagacugagucuugcucugucacucaggcug

SEQ ID NO: 247232 - RNA, 32 nt, Human
ugagacugagucuugcucugucaucaggcugg

SEQ ID NO: 247233 - RNA, 32 nt, Human
ugagacugcaccauugcauuccagccugggca

SEQ ID NO: 247234 - RNA, 32 nt, Human
ugagacugcaggagagagagcagcggagggcc

SEQ ID NO: 247235 - RNA, 32 nt, Human
ugagacugccauucuaacauguucccagggga

SEQ ID NO: 247236 - RNA, 32 nt, Human
ugagacugcgccacggcacuccagccugggcg

SEQ ID NO: 247237 - RNA, 32 nt, Human
ugagacugcgggagagcugagcuccagcuuaa

SEQ ID NO: 247238 - RNA, 32 nt, Human
ugagacugcuccaacaugcuugaagaucuaag

SEQ ID NO: 247239 - RNA, 32 nt, Human
ugagacugcuuugcauaaaacugggaagaaag

SEQ ID NO: 247240 - RNA, 32 nt, Human
ugagacugggagaaccugcugggcaccccugc

SEQ ID NO: 247241 - RNA, 32 nt, Human
ugagacugggaggcagagguugcagugaaccg

SEQ ID NO: 247242 - RNA, 32 nt, Human
ugagacugggccccaccagcaggucaagucag

SEQ ID NO: 247243 - RNA, 32 nt, Human
ugagacuggggcaggaggaucacuugaggcca

SEQ ID NO: 247244 - RNA, 32 nt, Human
ugagacuggggucugggcuguuccagacuuca

SEQ ID NO: 247245 - RNA, 32 nt, Human
ugagacuggggucugggcuguuccggacuuca

SEQ ID NO: 247246 - RNA, 32 nt, Human
ugagacuggguagaauguuacuugaguuguga

SEQ ID NO: 247247 - RNA, 21 nt, Human
ugagacugggucucgcuuugu

SEQ ID NO: 247248 - RNA, 32 nt, Human
ugagacugggucucgcuuuguugcccaggcug

SEQ ID NO: 247249 - RNA, 32 nt, Human
ugagacuguaaguuacaugaaggcagcagaau

SEQ ID NO: 247250 - RNA, 32 nt, Human
ugagacuguccagaucuagucuguaaacccag

SEQ ID NO: 247251 - RNA, 32 nt, Human
ugagacugugccacugcacuccagccugggug

SEQ ID NO: 247252 - RNA, 32 nt, Human
ugagacugugccacugcaguccagccugggug

SEQ ID NO: 247253 - RNA, 32 nt, Human
ugagacuguguugucgguggccgcgcugguuu

SEQ ID NO: 247254 - RNA, 32 nt, Human
ugagacuguguuugggaaggaggcugagugac

SEQ ID NO: 247255 - RNA, 32 nt, Human
ugagacuuaggcccuggcucugcauggggaau

SEQ ID NO: 247256 - RNA, 32 nt, Human
ugagacuuauucacuaccaugagaacagcaug

SEQ ID NO: 247257 - RNA, 32 nt, Human
ugagacuuauucacuaccaugagaacaguauc

SEQ ID NO: 247258 - RNA, 32 nt, Human
ugagacuucauaccuucauuucccugcuuucc

SEQ ID NO: 247259 - RNA, 23 nt, Human
ugagacuucgcaaaucucuggaa

SEQ ID NO: 247260 - RNA, 32 nt, Human
ugagacuucgucucaaaacaaacaaacaaaca

SEQ ID NO: 247261 - RNA, 32 nt, Human
ugagacuucuguaguuuuaaaaugccacaguc

SEQ ID NO: 247262 - RNA, 32 nt, Human
ugagacuucuucucaaacucggccaagaagcu

SEQ ID NO: 247263 - RNA, 32 nt, Human
ugagacuugccugaacccaggaggcagagguu

SEQ ID NO: 247264 - RNA, 32 nt, Human
ugagacuuggcggcgcggcugcuauccugaac

SEQ ID NO: 247265 - RNA, 20 nt, Human
ugagacuuggguggugggaa

SEQ ID NO: 247266 - RNA, 32 nt, Human
ugagacuuuguugaguucuuucugggacuugg

SEQ ID NO: 247267 - RNA, 32 nt, Human
ugagagaaaccagacaacguaagccaaugccc

SEQ ID NO: 247268 - RNA, 32 nt, Human
ugagagaaaccagcuggugauuuaugaagaga

SEQ ID NO: 247269 - RNA, 32 nt, Human
ugagagaaacgcagugggggaggcagggaguc

SEQ ID NO: 247270 - RNA, 18 nt, Human
ugagagaaaggagcccca

SEQ ID NO: 247271 - RNA, 27 nt, Human
ugagagaaauaaaggugagagcauuca

SEQ ID NO: 247272 - RNA, 32 nt, Human
ugagagaacaacugucugcuguggaaaguaac

SEQ ID NO: 247273 - RNA, 32 nt, Human
ugagagaagaaagagugagagaggaauugccu

SEQ ID NO: 247274 - RNA, 32 nt, Human
ugagagaagaagagaaagcagcagaauugcaa

SEQ ID NO: 247275 - RNA, 32 nt, Human
ugagagaagaggaccuauaugaaugguuuuau

SEQ ID NO: 247276 - RNA, 32 nt, Human
ugagagaaggcaaacagacaaaaagggugaua

SEQ ID NO: 247277 - RNA, 32 nt, Human
ugagagaaggggaucagcugcucaguacaacc

SEQ ID NO: 247278 - RNA, 22 nt, Human
ugagagaaguaaagguucauuc

SEQ ID NO: 247279 - RNA, 17 nt, Human
ugagagaauccaguaaa

SEQ ID NO: 247280 - RNA, 32 nt, Human
ugagagaauggaaaacagacucagguuguagu

SEQ ID NO: 247281 - RNA, 32 nt, Human
ugagagaauuccagggcuuccuugagaaaaca

SEQ ID NO: 247282 - RNA, 32 nt, Human
ugagagacaaagcagaccaccuggugaaugaa

SEQ ID NO: 247283 - RNA, 31 nt, Human
ugagagacaaugucuuccccuagccacaggu

SEQ ID NO: 247284 - RNA, 32 nt, Human
ugagagacacaaccgaaggaggcacacagauu

SEQ ID NO: 247285 - RNA, 32 nt, Human
ugagagacagaagccaacgaaggaggucauuc

SEQ ID NO: 247286 - RNA, 32 nt, Human
ugagagacagggaacaggcucuccuccagagc

SEQ ID NO: 247287 - RNA, 32 nt, Human
ugagagacauuaacucauuagacuggaacuug

SEQ ID NO: 247288 - RNA, 32 nt, Human
ugagagacccaggaugaagggaugcagugagg

SEQ ID NO: 247289 - RNA, 32 nt, Human
ugagagacgaguugggggaguccuccacgcau

SEQ ID NO: 247290 - RNA, 32 nt, Human
ugagagacucuggguucuacugcuaggcagac

SEQ ID NO: 247291 - RNA, 22 nt, Human
ugagagagaaggucccagcggg

SEQ ID NO: 247292 - RNA, 21 nt, Human
ugagagagaagguccgaguag

SEQ ID NO: 247293 - RNA, 32 nt, Human
ugagagagaccgucgggggcugaggggcaacg

SEQ ID NO: 247294 - RNA, 32 nt, Human
ugagagagacugagacaggagucuuccggagu

SEQ ID NO: 247295 - RNA, 32 nt, Human
ugagagagagcucucagauguaggggcugcag

SEQ ID NO: 247296 - RNA, 20 nt, Human
ugagagagagucuuacucug

SEQ ID NO: 247297 - RNA, 21 nt, Human
ugagagagagucuugcucugu

SEQ ID NO: 247298 - RNA, 32 nt, Human
ugagagagagugaaaaggagaggguaacagaa

SEQ ID NO: 247299 - RNA, 32 nt, Human
ugagagagagugaucuggcgagggccgaugaa

SEQ ID NO: 247300 - RNA, 32 nt, Human
ugagagagaugauggccucucugggccuuucc

SEQ ID NO: 247301 - RNA, 32 nt, Human
ugagagagcauggcccagacaagcagcugggu

SEQ ID NO: 247302 - RNA, 32 nt, Human
ugagagagccaguuccaggcagggccccucag

SEQ ID NO: 247303 - RNA, 32 nt, Human
ugagagaggaagagaaauuucucuaguaacac

SEQ ID NO: 247304 - RNA, 32 nt, Human
ugagagaggagaauagggaauuaggguaaaca

SEQ ID NO: 247305 - RNA, 32 nt, Human
ugagagaggaggaagagggagucuggcaugag

SEQ ID NO: 247306 - RNA, 31 nt, Human
ugagagaggagggagagggagucuggcauga

SEQ ID NO: 247307 - RNA, 32 nt, Human
ugagagaggagggagagggagucuggcaugag

SEQ ID NO: 247308 - RNA, 32 nt, Human
ugagagaguccuccaggcaggguggcuggugc

SEQ ID NO: 247309 - RNA, 32 nt, Human
ugagagaugguuugccuguccagacuugcucu

SEQ ID NO: 247310 - RNA, 32 nt, Human
ugagagcaagagccuucacuuguucuugcggu

SEQ ID NO: 247311 - RNA, 32 nt, Human
ugagagcaagaugccagcagauucaaugccuu

SEQ ID NO: 247312 - RNA, 32 nt, Human
ugagagcacaguagcccagccugcuggucagc

SEQ ID NO: 247313 - RNA, 32 nt, Human
ugagagcaccgcugcacucgcggccggcgaug

SEQ ID NO: 247314 - RNA, 32 nt, Human
ugagagcaccuuaguguugcucugccucagcc

SEQ ID NO: 247315 - RNA, 32 nt, Human
ugagagcacuuucuuuaaaaggaccaaaaaua

SEQ ID NO: 247316 - RNA, 32 nt, Human
ugagagcagaacuugcagcagagaugagcuuu

SEQ ID NO: 247317 - RNA, 32 nt, Human
ugagagcagcacuaaguccucuguguaacugc

SEQ ID NO: 247318 - RNA, 32 nt, Human
ugagagcagcagaucucagccagaugcugccg

SEQ ID NO: 247319 - RNA, 32 nt, Human
ugagagcagccugggcaacguggugaacccug

SEQ ID NO: 247320 - RNA, 32 nt, Human
ugagagcaggaaaaggaggcugugaggaaggg

SEQ ID NO: 247321 - RNA, 32 nt, Human
ugagagcagugcuucugauccugcugucaccc

SEQ ID NO: 247322 - RNA, 32 nt, Human
ugagagcauccgaacuccuggauuucaggaca

SEQ ID NO: 247323 - RNA, 32 nt, Human
ugagagccaaguagucaguggaagagaguaga

SEQ ID NO: 247324 - RNA, 32 nt, Human
ugagagccacagucaggucuguccucaggggu

SEQ ID NO: 247325 - RNA, 32 nt, Human
ugagagccaguggaauggggucugggcugcug

SEQ ID NO: 247326 - RNA, 32 nt, Human
ugagagccccagccugagccagucccagcugu

SEQ ID NO: 247327 - RNA, 32 nt, Human
ugagagcccccagugccggagcagaaaggacc

SEQ ID NO: 247328 - RNA, 32 nt, Human
ugagagcccuccugcugggacagagaauuggg

SEQ ID NO: 247329 - RNA, 32 nt, Human
ugagagcccucuccaccugcaaggugccagga

SEQ ID NO: 247330 - RNA, 32 nt, Human
ugagagcccugaggccuagacucugucuaccu

SEQ ID NO: 247331 - RNA, 17 nt, Human
ugagagcccuggagaga

SEQ ID NO: 247332 - RNA, 32 nt, Human
ugagagcccugggggugggaggcugugggagg

SEQ ID NO: 247333 - RNA, 32 nt, Human
ugagagcccuuucuuuucaaugggcuugaguc

SEQ ID NO: 247334 - RNA, 32 nt, Human
ugagagccgauggccccagcaucccccaggug

SEQ ID NO: 247335 - RNA, 32 nt, Human
ugagagccuccucuugggucuaucccaagguu

SEQ ID NO: 247336 - RNA, 32 nt, Human
ugagagccugaacccgggcuugagagccucgc

SEQ ID NO: 247337 - RNA, 32 nt, Human
ugagagccugcagccugccagagcagagagcc

SEQ ID NO: 247338 - RNA, 32 nt, Human
ugagagccugcagccugccagagcagagccac

SEQ ID NO: 247339 - RNA, 32 nt, Human
ugagagcgagagguggaucggggcggugugug

SEQ ID NO: 247340 - RNA, 32 nt, Human
ugagagcgccucucuuuugagcaaacaagcau

SEQ ID NO: 247341 - RNA, 21 nt, Human
ugagagcgcuccuugcucugu

SEQ ID NO: 247342 - RNA, 32 nt, Human
ugagagcggcucugcugucaucucaagcagcc

SEQ ID NO: 247343 - RNA, 32 nt, Human
ugagagcgggggagaagagacaagcaggggcg

SEQ ID NO: 247344 - RNA, 32 nt, Human
ugagagcuagauguccuaugggcaauuaggua

SEQ ID NO: 247345 - RNA, 32 nt, Human
ugagagcuauccacucuccugccugcauaucc

SEQ ID NO: 247346 - RNA, 32 nt, Human
ugagagcuccacccccacauaccugccaccca

SEQ ID NO: 247347 - RNA, 32 nt, Human
ugagagcugaaaccuguucccugagcugauca

SEQ ID NO: 247348 - RNA, 32 nt, Human
ugagagcugcacucuggcuggggaaggcauga

SEQ ID NO: 247349 - RNA, 32 nt, Human
ugagagcugccacucauuuaauauuucucauu

SEQ ID NO: 247350 - RNA, 32 nt, Human
ugagagcugccucugccucagugggaggccug

SEQ ID NO: 247351 - RNA, 32 nt, Human
ugagagcugggugggaccuagagcucucaaaa

SEQ ID NO: 247352 - RNA, 32 nt, Human
ugagagcuuuucuucauccagaauugcccucu

SEQ ID NO: 247353 - RNA, 32 nt, Human
ugagaggaaacgaggugagcagaggacuuccu

SEQ ID NO: 247354 - RNA, 32 nt, Human
ugagaggacacacgcagcugaagaugaauuug

SEQ ID NO: 247355 - RNA, 32 nt, Human
ugagaggacagagagaaauaagugcccucucc

SEQ ID NO: 247356 - RNA, 32 nt, Human
ugagaggagaaaggaaauguuggcaugggccu

SEQ ID NO: 247357 - RNA, 32 nt, Human
ugagaggagaacaguaggauugcuguggccua

SEQ ID NO: 247358 - RNA, 32 nt, Human
ugagaggagcagagaggaaggagaaagaggag

SEQ ID NO: 247359 - RNA, 32 nt, Human
ugagaggagcuggggagaaggaaggggagcaa

SEQ ID NO: 247360 - RNA, 32 nt, Human
ugagaggaggagguggagacuaucagugcacg

SEQ ID NO: 247361 - RNA, 32 nt, Human
ugagaggaggcggaggagagagccugcgaggu

SEQ ID NO: 247362 - RNA, 32 nt, Human
ugagaggagggaggcaggcugcagcuucagcc

SEQ ID NO: 247363 - RNA, 32 nt, Human
ugagaggauguuuucuggcacaguguuaugaa

SEQ ID NO: 247364 - RNA, 32 nt, Human
ugagaggcaugauggggagagaccagacugaa

SEQ ID NO: 247365 - RNA, 32 nt, Human
ugagaggccaucuaucccagccugggugaucc

SEQ ID NO: 247366 - RNA, 32 nt, Human
ugagaggcccagaacaaacuggagucuagccu

SEQ ID NO: 247367 - RNA, 32 nt, Human
ugagaggcccugggguucucccccuuucucuc

SEQ ID NO: 247368 - RNA, 32 nt, Human
ugagaggccucaauaaagacaucuggggcagc

SEQ ID NO: 247369 - RNA, 32 nt, Human
ugagaggccuggagcccacaaccuucggcucc

SEQ ID NO: 247370 - RNA, 32 nt, Human
ugagaggcgcagcucugucucacuggaaggca

SEQ ID NO: 247371 - RNA, 32 nt, Human
ugagaggcggugaggccagggcuuccagccuc

SEQ ID NO: 247372 - RNA, 32 nt, Human
ugagaggcucgcacgccuccagcccggccccg

SEQ ID NO: 247373 - RNA, 32 nt, Human
ugagaggcuggaaacucacccgccuccuuucc

SEQ ID NO: 247374 - RNA, 32 nt, Human
ugagaggcuguugccaauuguucuuuaggcau

SEQ ID NO: 247375 - RNA, 32 nt, Human
ugagagggaaauggaacucauuuggaacuccc

SEQ ID NO: 247376 - RNA, 32 nt, Human
ugagagggagacagaaagaaagacugaggugg

SEQ ID NO: 247377 - RNA, 32 nt, Human
ugagagggagacgcuccaagaggcuccucagu

SEQ ID NO: 247378 - RNA, 32 nt, Human
ugagagggagagacgacgugaggcgagaggaa

SEQ ID NO: 247379 - RNA, 32 nt, Human
ugagagggagcgagacaggcgaccaacacaga

SEQ ID NO: 247380 - RNA, 32 nt, Human
ugagagggagucucacucuguugcccaggcug

SEQ ID NO: 247381 - RNA, 21 nt, Human
ugagagggagucucgcacugu

SEQ ID NO: 247382 - RNA, 21 nt, Human
ugagagggagucucgcugugu

SEQ ID NO: 247383 - RNA, 32 nt, Human
ugagagggagucuuguucugucacccaggcug

SEQ ID NO: 247384 - RNA, 32 nt, Human
ugaggucgggcugaagcagggucacuggccag

SEQ ID NO: 247385 - RNA, 32 nt, Human
ugaggucgggguggaagaaacgggugauuccc

SEQ ID NO: 247386 - RNA, 32 nt, Human
ugaggucgugccacugcacuccagccugggca

SEQ ID NO: 247387 - RNA, 32 nt, Human
ugaggucgugccacugcacuucagccugggug

SEQ ID NO: 247388 - RNA, 32 nt, Human
ugaggucgugccacugcgcuccagccugggug

SEQ ID NO: 247389 - RNA, 32 nt, Human
ugaggucgugcuacugcacucccgccugggug

SEQ ID NO: 247390 - RNA, 32 nt, Human
ugaggucuaggcucacaugcagguaauuagaa

SEQ ID NO: 247391 - RNA, 32 nt, Human
ugaggucuccauuuucuugcuggcugucagcc

SEQ ID NO: 247392 - RNA, 32 nt, Human
ugaggucucuggggcucucgugagcuguccac

SEQ ID NO: 247393 - RNA, 32 nt, Human
ugaggucugcagccugucuccuaggcacuccc

SEQ ID NO: 247394 - RNA, 32 nt, Human
ugaggucuggacggcuaccacacccaccuacu

SEQ ID NO: 247395 - RNA, 32 nt, Human
ugaggucuggaguucaagaccagccuggccaa

SEQ ID NO: 247396 - RNA, 32 nt, Human
ugaggucugggaccuuucccucccaggagccc

SEQ ID NO: 247397 - RNA, 32 nt, Human
ugaggucugggcaggaaccaaagagagcuuca

SEQ ID NO: 247398 - RNA, 32 nt, Human
ugaggucugggcaggggcagggcaagcuugac

SEQ ID NO: 247399 - RNA, 32 nt, Human
ugaggucuggggcaauggaagucaagacaccc

SEQ ID NO: 247400 - RNA, 32 nt, Human
ugaggucugucccugaaugucucccucacccc

SEQ ID NO: 247401 - RNA, 32 nt, Human
ugaggucuucccaacagacucucccucuucca

SEQ ID NO: 247402 - RNA, 32 nt, Human
ugaggucuuccccauacccucuggguguugag

SEQ ID NO: 247403 - RNA, 20 nt, Human
ugaggucuuccugggcccuc

SEQ ID NO: 247404 - RNA, 32 nt, Human
ugaggugaaagcuucguccgagaaacgccagg

SEQ ID NO: 247405 - RNA, 32 nt, Human
ugaggugaaaggaucacuugagccugggaggu

SEQ ID NO: 247406 - RNA, 32 nt, Human
ugaggugaacaugggggugagacugaagccug

SEQ ID NO: 247407 - RNA, 32 nt, Human
ugaggugaagaucacugucaucuaaaagcagg

SEQ ID NO: 247408 - RNA, 32 nt, Human
ugaggugaagaucacugucaucuaaaagcugg

SEQ ID NO: 247409 - RNA, 32 nt, Human
ugaggugagaggagcaagugagcccaggaguu

SEQ ID NO: 247410 - RNA, 32 nt, Human
ugaggugagaggaucacuugagcccaagaguc

SEQ ID NO: 247411 - RNA, 32 nt, Human
ugaggugagaggaucacuugagcccagaaggc

SEQ ID NO: 247412 - RNA, 32 nt, Human
ugaggugagaggaucacuugagcccaggaggu

SEQ ID NO: 247413 - RNA, 32 nt, Human
ugaggugagaggaucacuugaggccaagaguu

SEQ ID NO: 247414 - RNA, 32 nt, Human
ugaggugagaggaucgcuugagcucaggaguu

SEQ ID NO: 247415 - RNA, 32 nt, Human
ugaggugagagggucacuugagcccaggaguu

SEQ ID NO: 247416 - RNA, 32 nt, Human
ugaggugagcgugugugcucucagggaagggc

SEQ ID NO: 247417 - RNA, 32 nt, Human
ugaggugaggaguucaagaccagccugcccaa

SEQ ID NO: 247418 - RNA, 32 nt, Human
ugaggugaggaguucaagaccagccuggccaa

SEQ ID NO: 247419 - RNA, 32 nt, Human
ugaggugaggcagggccugcagcggucucuga

SEQ ID NO: 247420 - RNA, 32 nt, Human
ugaggugaggcugagaaagaaaaagcccgcua

SEQ ID NO: 247421 - RNA, 32 nt, Human
ugaggugagguuucaccauguuggccaggcgg

SEQ ID NO: 247422 - RNA, 32 nt, Human
ugaggugaguggaucacuugaagucaggaguu

SEQ ID NO: 247423 - RNA, 32 nt, Human
ugaggugauauaaucauuguaguccaugacaa

SEQ ID NO: 247424 - RNA, 32 nt, Human
ugaggugaucuuucccuccucugaacuauuag

SEQ ID NO: 247425 - RNA, 32 nt, Human
ugaggugcaagacuucaggguggggugggcau

SEQ ID NO: 247426 - RNA, 32 nt, Human
ugaggugcagaggcccacccagcccccuaccu

SEQ ID NO: 247427 - RNA, 32 nt, Human
ugaggugcagcuuuuauuuauguuuucccuuu

SEQ ID NO: 247428 - RNA, 32 nt, Human
ugaggugcaguggcacgaucucagcucacugc

SEQ ID NO: 247429 - RNA, 25 nt, Human
ugaggugcaguggcucacgccugua

SEQ ID NO: 247430 - RNA, 32 nt, Human
ugaggugcaucucaccaaccauccuccugcag

SEQ ID NO: 247431 - RNA, 32 nt, Human
ugaggugccagguuucuuuuucaucuagagau

SEQ ID NO: 247432 - RNA, 32 nt, Human
ugaggugcccagcuagcugcagagccacccug

SEQ ID NO: 247433 - RNA, 32 nt, Human
ugaggugccuccgcugggcugucuccucaccc

SEQ ID NO: 247434 - RNA, 32 nt, Human
ugaggugccugccugcacuauugccccagagg

SEQ ID NO: 247435 - RNA, 32 nt, Human
ugaggugccugcuggcauccucucccccaugc

SEQ ID NO: 247436 - RNA, 32 nt, Human
ugaggugcuguugcugaaacgcugccgcugag

SEQ ID NO: 247437 - RNA, 32 nt, Human
ugagguggaaacagugguccugaaucauugug

SEQ ID NO: 247438 - RNA, 32 nt, Human
ugagguggaaggaucacuugagcacaggaguu

SEQ ID NO: 247439 - RNA, 32 nt, Human
ugagguggaaggaucacuugaggccaggaguu

SEQ ID NO: 247440 - RNA, 21 nt, Human
ugagguggagucucauucugu

SEQ ID NO: 247441 - RNA, 32 nt, Human
ugagguggagucucauucuguugcccaggcug

SEQ ID NO: 247442 - RNA, 21 nt, Human
ugagguggagucucgcucugu

SEQ ID NO: 247443 - RNA, 32 nt, Human
ugagguggagucucgcucuguugcccaggcug

SEQ ID NO: 247444 - RNA, 32 nt, Human
ugagguggagucuuccccuguugcccaggcug

SEQ ID NO: 247445 - RNA, 21 nt, Human
ugagguggagucuugcucugu

SEQ ID NO: 247446 - RNA, 32 nt, Human
ugagguggagucuugcucugucacccaggcug

SEQ ID NO: 247447 - RNA, 32 nt, Human
ugagguggagucuugcucugucgcccaggcug

SEQ ID NO: 247448 - RNA, 32 nt, Human
ugagguggccgguucuuggugggaucugagca

SEQ ID NO: 247449 - RNA, 32 nt, Human
ugagguggccugucugugccucuccuuuguuu

SEQ ID NO: 247450 - RNA, 20 nt, Human
ugagguggcgcagggcucuc

SEQ ID NO: 247451 - RNA, 32 nt, Human
ugagguggcgcgacccccucucccagggagcu

SEQ ID NO: 247452 - RNA, 32 nt, Human
ugagguggcucaccccuguaaucccaguacuu

SEQ ID NO: 247453 - RNA, 32 nt, Human
ugagguggcucacgccuauaaucccagcacuu

SEQ ID NO: 247454 - RNA, 32 nt, Human
ugagguggcucaggccuauaaucccaguacuu

SEQ ID NO: 247455 - RNA, 20 nt, Human
ugagguggcucaugccugua

SEQ ID NO: 247456 - RNA, 23 nt, Human
ugagguggcucaugccuguaauc

SEQ ID NO: 247457 - RNA, 32 nt, Human
ugagguggcucaugccuguaaucccagcacuu

SEQ ID NO: 247458 - RNA, 32 nt, Human
ugaggugggaaaaucacuugagcccaggaggu

SEQ ID NO: 247459 - RNA, 32 nt, Human
ugaggugggaaaaugacuugagcccaggagga

SEQ ID NO: 247460 - RNA, 32 nt, Human
ugaggugggagaaucaccugagcccaggaggu

SEQ ID NO: 247461 - RNA, 32 nt, Human
ugaggugggagaaucacuugaaccugggaggc

SEQ ID NO: 247462 - RNA, 32 nt, Human
ugaggugggagaaucacuugaacuugggaggc

SEQ ID NO: 247463 - RNA, 32 nt, Human
ugaggugggagaaucacuuggacuccagaggu

SEQ ID NO: 247464 - RNA, 32 nt, Human
ugaggugggagaaucgcuugagcucaggaguu

SEQ ID NO: 247465 - RNA, 32 nt, Human
ugaggugggagagagaagcagagcgagagaga

SEQ ID NO: 247466 - RNA, 32 nt, Human
ugaggugggagcaucacuugagaccaggaguu

SEQ ID NO: 247467 - RNA, 32 nt, Human
ugaggugggaggaaucccuugagccaaggagg

SEQ ID NO: 247468 - RNA, 32 nt, Human
ugaggugggaggacugcuuaagcucaggaguu

SEQ ID NO: 247469 - RNA, 32 nt, Human
ugaggugggaggaguacuugagcccaggaguu

SEQ ID NO: 247470 - RNA, 32 nt, Human
ugaggugggaggagugcuugaggccaggaguu

SEQ ID NO: 247471 - RNA, 32 nt, Human
ugaggugggaggauaacuugagcacaggaguu

SEQ ID NO: 247472 - RNA, 32 nt, Human
ugaggugggaggaucaccuaagccuggaaggu

SEQ ID NO: 247473 - RNA, 32 nt, Human
ugaggugggaggaucaccuaaggccaggaggu

SEQ ID NO: 247474 - RNA, 32 nt, Human
ugaggugggaggaucaccugagccuaagagga

SEQ ID NO: 247475 - RNA, 32 nt, Human
ugaggugggaggaucaccugaggucgaaaguu

SEQ ID NO: 247476 - RNA, 32 nt, Human
ugaggugggaggaucaccugaggucgggaguu

SEQ ID NO: 247477 - RNA, 32 nt, Human
ugaggugggaggaucacucaaaccugggaguu

SEQ ID NO: 247478 - RNA, 32 nt, Human
ugaggugggaggaucacuggaacccgggagca

SEQ ID NO: 247479 - RNA, 32 nt, Human
ugaggugggaggaucacuggagcccaggaggu

SEQ ID NO: 247480 - RNA, 32 nt, Human
ugaggugggaggaucacuucagcccaggaggu

SEQ ID NO: 247481 - RNA, 32 nt, Human
ugaggugggaggaucacuugaacccaggaggu

SEQ ID NO: 247482 - RNA, 32 nt, Human
ugaggugggaggaucacuugaaccccagaggu

SEQ ID NO: 247483 - RNA, 32 nt, Human
ugaggugggaggaucacuugaaccugggaggu

SEQ ID NO: 247484 - RNA, 32 nt, Human
ugaggugggaggaucacuugaacucaggaguu

SEQ ID NO: 247485 - RNA, 32 nt, Human
ugaggugggaggaucacuugagcccaauucaa

SEQ ID NO: 247486 - RNA, 32 nt, Human
ugaggugggaggaucacuugagcccagaagcu

SEQ ID NO: 247487 - RNA, 32 nt, Human
ugaggugggaggaucacuugagcccagaaguu

SEQ ID NO: 247488 - RNA, 32 nt, Human
ugaggugggaggaucacuugagcccaggaagu

SEQ ID NO: 247489 - RNA, 32 nt, Human
ugaggugggaggaucacuugagcccaggaggu

SEQ ID NO: 247490 - RNA, 32 nt, Human
ugaggugggaggaucacuugagcccaggaguc

SEQ ID NO: 247491 - RNA, 32 nt, Human
ugaggugggaggaucacuugagcccaggaguu

SEQ ID NO: 247492 - RNA, 32 nt, Human
ugaggugggaggaucacuugagccccagaggu

SEQ ID NO: 247493 - RNA, 32 nt, Human
ugaggugggaggaucacuugagccuggaaguu

SEQ ID NO: 247494 - RNA, 32 nt, Human
ugaggugggaggaucacuugagccugggggac

SEQ ID NO: 247495 - RNA, 32 nt, Human
ugaggugggaggaucacuugaguccaggaggc

SEQ ID NO: 247496 - RNA, 32 nt, Human
ugaggugggaggaucacuuggacuugggaggc

SEQ ID NO: 247497 - RNA, 32 nt, Human
ugaggugggaggaucacuuggguccaggaggu

SEQ ID NO: 247498 - RNA, 32 nt, Human
ugaggugggaggaucaguugagcccaaggagu

SEQ ID NO: 247499 - RNA, 32 nt, Human
ugaggugggaggaucaugaggucaagggaucg

SEQ ID NO: 247500 - RNA, 32 nt, Human
ugaggugggaggaucauuugagcccagaggua

SEQ ID NO: 247501 - RNA, 32 nt, Human
ugaggugggaggaucauuugagcccaggaggu

SEQ ID NO: 247502 - RNA, 32 nt, Human
ugaggugggaggaucauuugagcccaggaguu

SEQ ID NO: 247503 - RNA, 32 nt, Human
ugaggugggaggaucauuugagccuaggaggu

SEQ ID NO: 247504 - RNA, 32 nt, Human
ugaggugggaggaucauuugaggccaggaguu

SEQ ID NO: 247505 - RNA, 32 nt, Human
ugaggugggaggaucauuugagugcaggaguu

SEQ ID NO: 247506 - RNA, 32 nt, Human
ugaggugggaggauccacugagcccaggaguu

SEQ ID NO: 247507 - RNA, 32 nt, Human
ugaggugggaggaucccaggaguucaaauccu

SEQ ID NO: 247508 - RNA, 32 nt, Human
ugaggugggaggaucccgugagccugggaggu

SEQ ID NO: 247509 - RNA, 32 nt, Human
ugaggugggaggaucccuugagcccaggaguu

SEQ ID NO: 247510 - RNA, 32 nt, Human
ugaggugggaggaucccuugagccgaggaguu

SEQ ID NO: 247511 - RNA, 32 nt, Human
ugaggugggaggaucccuugagcuggggagau

SEQ ID NO: 247512 - RNA, 32 nt, Human
ugaggugggaggaucccuugaggccacaaguu

SEQ ID NO: 247513 - RNA, 32 nt, Human
ugaggugggaggaucccuugaucccaggaauu

SEQ ID NO: 247514 - RNA, 32 nt, Human
ugaggugggaggauccucugaucuggggaggc

SEQ ID NO: 247515 - RNA, 32 nt, Human
ugaggugggaggaucgccugaaccucagaggc

SEQ ID NO: 247516 - RNA, 32 nt, Human
ugaggugggaggaucgccugagcccaggaguu

SEQ ID NO: 247517 - RNA, 32 nt, Human
ugaggugggaggaucgccugagcccagggagg

SEQ ID NO: 247518 - RNA, 32 nt, Human
ugaggugggaggaucgccugagccugaggggg

SEQ ID NO: 247519 - RNA, 32 nt, Human
ugaggugggaggaucgcuggagccugggaagu

SEQ ID NO: 247520 - RNA, 32 nt, Human
ugaggugggaggaucgcuuaagcccaggagcu

SEQ ID NO: 247521 - RNA, 32 nt, Human
ugaggugggaggaucgcuugaacccaggaggu

SEQ ID NO: 247522 - RNA, 32 nt, Human
ugaggugggaggaucgcuugagcccaggaggu

SEQ ID NO: 247523 - RNA, 32 nt, Human
ugaggugggaggaucgcuugagcccaggaguu

SEQ ID NO: 247524 - RNA, 32 nt, Human
ugaggugggaggaucgcuugagcccaggcggu

SEQ ID NO: 247525 - RNA, 32 nt, Human
ugaggugggaggaucgcuugagccccggaggu

SEQ ID NO: 247526 - RNA, 32 nt, Human
ugaggugggaggaucgcuugagccucggaggc

SEQ ID NO: 247527 - RNA, 32 nt, Human
ugaggugggaggaucgcuugagccugggaggu

SEQ ID NO: 247528 - RNA, 32 nt, Human
ugaggugggaggaucgcuugaggcaaggaguu

SEQ ID NO: 247529 - RNA, 32 nt, Human
ugaggugggaggaucgcuugugccuuggaggu

SEQ ID NO: 247530 - RNA, 32 nt, Human
ugaggugggaggaucgguugagcccaggaguu

SEQ ID NO: 247531 - RNA, 32 nt, Human
ugaggugggaggaucgguugaggccaggaguu

SEQ ID NO: 247532 - RNA, 32 nt, Human
ugaggugggaggaucucuugagcccagcaguu

SEQ ID NO: 247533 - RNA, 32 nt, Human
ugaggugggaggaucucuugagccugggaggu

SEQ ID NO: 247534 - RNA, 32 nt, Human
ugaggugggaggaucucuugaggccagcaguu

SEQ ID NO: 247535 - RNA, 32 nt, Human
ugaggugggaggaucucuugaggcugggaggc

SEQ ID NO: 247536 - RNA, 32 nt, Human
ugaggugggaggaucuuuugaacccaggaguu

SEQ ID NO: 247537 - RNA, 32 nt, Human
ugaggugggaggaugacuugaacgcaggaggc

SEQ ID NO: 247538 - RNA, 32 nt, Human
ugaggugggaggauggcuugagcccaggaguu

SEQ ID NO: 247539 - RNA, 32 nt, Human
ugaggugggaggauggcuugaggcccggaauu

SEQ ID NO: 247540 - RNA, 32 nt, Human
ugaggugggaggauggcuugaguccagaaguu

SEQ ID NO: 247541 - RNA, 32 nt, Human
ugaggugggaggauggcuugcgcucaggaggc

SEQ ID NO: 247542 - RNA, 32 nt, Human
ugaggugggaggaugguuugagcucaggcauu

SEQ ID NO: 247543 - RNA, 32 nt, Human
ugaggugggaggaugguuugggccccggaggu

SEQ ID NO: 247544 - RNA, 32 nt, Human
ugaggugggaggauugauugagcucaggaggu

SEQ ID NO: 247545 - RNA, 32 nt, Human
ugaggugggaggauugccugagcccaggaguu

SEQ ID NO: 247546 - RNA, 32 nt, Human
ugaggugggaggauugcuagaagccaggaguu

SEQ ID NO: 247547 - RNA, 32 nt, Human
ugaggugggaggauugcuugagaccagccugg

SEQ ID NO: 247548 - RNA, 32 nt, Human
ugaggugggaggauugcuugagccaaggaauu

SEQ ID NO: 247549 - RNA, 32 nt, Human
ugaggugggaggauugcuugagcccagcaggu

SEQ ID NO: 247550 - RNA, 32 nt, Human
ugaggugggaggauugcuugagcccaggaagu

SEQ ID NO: 247551 - RNA, 32 nt, Human
ugaggugggaggauugcuugagcccaggagag

SEQ ID NO: 247552 - RNA, 32 nt, Human
ugaggugggaggauugcuugagcccaggaggc

SEQ ID NO: 247553 - RNA, 32 nt, Human
ugaggugggaggauugcuugagcccaggaguu

SEQ ID NO: 247554 - RNA, 32 nt, Human
ugaggugggaggauugcuugagccuaggaggu

SEQ ID NO: 247555 - RNA, 32 nt, Human
ugaggugggaggauugcuugagccugggaggu

SEQ ID NO: 247556 - RNA, 32 nt, Human
ugaggugggaggauugcuugagcucaggaauu

SEQ ID NO: 247557 - RNA, 32 nt, Human
ugaggugggaggauugcuugaguccaggaguu

SEQ ID NO: 247558 - RNA, 32 nt, Human
ugaggugggaggauugcuugggccugggaggu

SEQ ID NO: 247559 - RNA, 32 nt, Human
ugaggugggaggauuguuugagcccaggaggu

SEQ ID NO: 247560 - RNA, 32 nt, Human
ugaggugggaggauuguuugagcccaggaguu

SEQ ID NO: 247561 - RNA, 32 nt, Human
ugaggugggaggauuguuugagccugggaggu

SEQ ID NO: 247562 - RNA, 32 nt, Human
ugaggugggagggucacuugaagcuaggaguu

SEQ ID NO: 247563 - RNA, 32 nt, Human
ugaggugggagggucgcuugagcccaggaguu

SEQ ID NO: 247564 - RNA, 32 nt, Human
ugaggugggaugaucacuugaggccaggaguu

SEQ ID NO: 247565 - RNA, 32 nt, Human
ugaggugggcagauagcuugagcugaggaguu

SEQ ID NO: 247566 - RNA, 32 nt, Human
ugaggugggcagaucacuugagcugggaguuc

SEQ ID NO: 247567 - RNA, 32 nt, Human
ugaggugggcagaucacuugaggccaggaguu

SEQ ID NO: 247568 - RNA, 32 nt, Human
ugaggugggcagaucacuugaggucaggaguu

SEQ ID NO: 247569 - RNA, 32 nt, Human
ugaggugggcagaucacuugagguuagaaguu

SEQ ID NO: 247570 - RNA, 32 nt, Human
ugaggugggcagaucuccugagcucaggaguu

SEQ ID NO: 247571 - RNA, 32 nt, Human
ugaggugggcaggcgaggagcgggaagaccau

SEQ ID NO: 247572 - RNA, 32 nt, Human
ugaggugggcggaucacuugaggucaggaguu

SEQ ID NO: 247573 - RNA, 32 nt, Human
ugaggugggcggaucacuugaugccaggaguu

SEQ ID NO: 247574 - RNA, 32 nt, Human
ugaggugggcggauuacuugagcccaggaguu

SEQ ID NO: 247575 - RNA, 32 nt, Human
ugaggugggcugacugcuugagcucaggaguu

SEQ ID NO: 247576 - RNA, 32 nt, Human
ugagguggggaccaagugauagagcccugauc

SEQ ID NO: 247577 - RNA, 32 nt, Human
ugagguggggcuaaggguggcucagcacuggc

SEQ ID NO: 247578 - RNA, 32 nt, Human
ugagguggggcugagguacaaagggggauuga

SEQ ID NO: 247579 - RNA, 32 nt, Human
ugaggugggggaaucacuugagccuagggagg

SEQ ID NO: 247580 - RNA, 32 nt, Human
ugagguggggugagacagagugggagagauua

SEQ ID NO: 247581 - RNA, 32 nt, Human
ugagguggguagauuacuugagcccaggaauu

SEQ ID NO: 247582 - RNA, 32 nt, Human
ugagguggguggaccacuugaggccaggaguu

SEQ ID NO: 247583 - RNA, 32 nt, Human
ugagguggguggaucacuggaguuugagacca

SEQ ID NO: 247584 - RNA, 32 nt, Human
ugagguggguggaucacugggucaggaguuug

SEQ ID NO: 247585 - RNA, 32 nt, Human
ugagguggguggaucacuugacaucaguaguu

SEQ ID NO: 247586 - RNA, 32 nt, Human
ugagguggguggaucacuugacgucaggaguu

SEQ ID NO: 247587 - RNA, 32 nt, Human
ugagguggguggaucacuugaggccgggaguu

SEQ ID NO: 247588 - RNA, 32 nt, Human
ugagguggguggaucacuugaggucaggagcu

SEQ ID NO: 247589 - RNA, 32 nt, Human
ugagguggguggaucacuugaggucaggaguu

SEQ ID NO: 247590 - RNA, 32 nt, Human
ugagguggguggaucaugaggucgggaguuca

SEQ ID NO: 247591 - RNA, 32 nt, Human
ugagguggguggauugcuugagcccaggaguu

SEQ ID NO: 247592 - RNA, 32 nt, Human
ugagguggguggauugcuugagcccagggauu

SEQ ID NO: 247593 - RNA, 32 nt, Human
ugaggugggugggagaggaagaaaguuggggu

SEQ ID NO: 247594 - RNA, 32 nt, Human
ugagguggguguaucacuugaggucaggaguu

SEQ ID NO: 247595 - RNA, 31 nt, Human
ugaggugguacaaucucggcucacugcaacc

SEQ ID NO: 247596 - RNA, 32 nt, Human
ugaggugguaggaucaccugaggucaggaguu

SEQ ID NO: 247597 - RNA, 32 nt, Human
ugagguggucaccaggauugagcuuccucagc

SEQ ID NO: 247598 - RNA, 32 nt, Human
ugaggugguggaggcggcggaggcggcggcgg

SEQ ID NO: 247599 - RNA, 32 nt, Human
ugaggugguucaggcucccaggaaaggcaacu

SEQ ID NO: 247600 - RNA, 32 nt, Human
ugaggugguugcaggccuggggcagagccugg

SEQ ID NO: 247601 - RNA, 21 nt, Human
ugagguguaugcagggcccuc

SEQ ID NO: 247602 - RNA, 32 nt, Human
ugaggugucuaaggaacaccuucaaauaaagc

SEQ ID NO: 247603 - RNA, 32 nt, Human
ugaggugucucacaucuuuaaucccagcaauu

SEQ ID NO: 247604 - RNA, 32 nt, Human
ugaggugucucacaucuuuaaucccagcaguu

SEQ ID NO: 247605 - RNA, 32 nt, Human
ugaggugucuccugaaaaacuggaccuguaau

SEQ ID NO: 247606 - RNA, 20 nt, Human
ugaggugugauugggcccuc

SEQ ID NO: 247607 - RNA, 32 nt, Human
ugaggugugguggcucaugccuguaaucccag

SEQ ID NO: 247608 - RNA, 32 nt, Human
ugaggugugugaggacgagcuggaccugcagc

SEQ ID NO: 247609 - RNA, 32 nt, Human
ugaggugugugggcuugucaacacagaauuca

SEQ ID NO: 247610 - RNA, 32 nt, Human
ugagguguucccuuucggauggcuccaagguc

SEQ ID NO: 247611 - RNA, 32 nt, Human
ugagguguuggguuugggggacgcuggcagcu

SEQ ID NO: 247612 - RNA, 32 nt, Human
ugagguguuuauaucccagcucugucaggcau

SEQ ID NO: 247613 - RNA, 32 nt, Human
ugagguguuucccuggcucugaagggguaggu

SEQ ID NO: 247614 - RNA, 32 nt, Human
ugagguuaagaguucaagaccagccuggccaa

SEQ ID NO: 247615 - RNA, 32 nt, Human
ugagguuaggacuucaagaccagccuggccaa

SEQ ID NO: 247616 - RNA, 32 nt, Human
ugagguuaggaguucaagaccagcccagccaa

SEQ ID NO: 247617 - RNA, 32 nt, Human
ugagguuaggaguucaagaccagccugaucaa

SEQ ID NO: 247618 - RNA, 32 nt, Human
ugagguuaggaguucaagaccagccuggccaa

SEQ ID NO: 247619 - RNA, 32 nt, Human
ugagguuaggaguucaagaucagccuggccaa

SEQ ID NO: 247620 - RNA, 32 nt, Human
ugagguucauuuuaggaacuaaccucauuagc

SEQ ID NO: 247621 - RNA, 32 nt, Human
ugagguuccucuuccaccccuugucaccuugg

SEQ ID NO: 247622 - RNA, 32 nt, Human
ugagguucggcucacacugagaucggggcugg

SEQ ID NO: 247623 - RNA, 24 nt, Human
ugagguucucaaggucacaggccc

SEQ ID NO: 247624 - RNA, 32 nt, Human
ugagguucugccucuguggcuguguuugaaaa

SEQ ID NO: 247625 - RNA, 32 nt, Human
ugagguucuggccccugucauccucaugcugc

SEQ ID NO: 247626 - RNA, 32 nt, Human
ugagguucuuugucugcuggcagcuaggggcg

SEQ ID NO: 247627 - RNA, 32 nt, Human
ugagguugacuuagggaacaagcccugggauu

SEQ ID NO: 247628 - RNA, 32 nt, Human
ugagguugagccugguugcuauaaagacuuug

SEQ ID NO: 247629 - RNA, 32 nt, Human
ugagguugcgccacuacacuccagccugggug

SEQ ID NO: 247630 - RNA, 32 nt, Human
ugagguugcuggccucaaaaccaugcuugagu

SEQ ID NO: 247631 - RNA, 23 nt, Human
ugagguuggaaagaguugccaua

SEQ ID NO: 247632 - RNA, 32 nt, Human
ugagguuggaggaggaaagagaaggggagcag

SEQ ID NO: 247633 - RNA, 32 nt, Human
ugagguuggaggaucgcuugagccugggaggu

SEQ ID NO: 247634 - RNA, 32 nt, Human
ugagguugggaggaucaccugagcccaaggag

SEQ ID NO: 247635 - RNA, 32 nt, Human
ugagguugggaguucaagaccagccugaccaa

SEQ ID NO: 247636 - RNA, 32 nt, Human
ugagguugggaguucaagaccagccuggccaa

SEQ ID NO: 247637 - RNA, 32 nt, Human
ugagguugggaguucaagaccagccuggucaa

SEQ ID NO: 247638 - RNA, 32 nt, Human
ugagguugggaguucgagaccaaccugaccaa

SEQ ID NO: 247639 - RNA, 32 nt, Human
ugagguugggcugagacccugcuucucuuccc

SEQ ID NO: 247640 - RNA, 32 nt, Human
ugagguugucaccacucagacuucaccuauuc

SEQ ID NO: 247641 - RNA, 32 nt, Human
ugagguugugccacugcacuccagccugggug

SEQ ID NO: 247642 - RNA, 32 nt, Human
ugagguuguguaguuuagauaggucacagagu

SEQ ID NO: 247643 - RNA, 32 nt, Human
ugagguuguguugugucuucuaagcgugguac

SEQ ID NO: 247644 - RNA, 32 nt, Human
ugagguuguuaaaacagaaaagguucugaaua

SEQ ID NO: 247645 - RNA, 32 nt, Human
ugagguuuaggguucaaaaugauggaaggccg

SEQ ID NO: 247646 - RNA, 32 nt, Human
ugagguuuccuaaagaagauggaauucuccuu

SEQ ID NO: 247647 - RNA, 32 nt, Human
ugagguuugaagaugggucucaagugcuaagu

SEQ ID NO: 247648 - RNA, 32 nt, Human
ugagguuugugaggacuggagaucgaacaugu

SEQ ID NO: 247649 - RNA, 32 nt, Human
ugagguuuucuuuccaggacagccugguuucc

SEQ ID NO: 247650 - RNA, 32 nt, Human
ugaguaaagcgcuuuggucaaacacacaaaaa

SEQ ID NO: 247651 - RNA, 32 nt, Human
ugaguaacaggcaccuuugcagagagcaaaga

SEQ ID NO: 247652 - RNA, 32 nt, Human
ugaguaacauggugaaaccccaucucuacgaa

SEQ ID NO: 247653 - RNA, 32 nt, Human
ugaguaagaaucugaugauugugcacagugac

SEQ ID NO: 247654 - RNA, 32 nt, Human
ugaguaagaugacuuguugacugugaaaguga

SEQ ID NO: 247655 - RNA, 32 nt, Human
ugaguaaggacaccuccagccauacagaaacc

SEQ ID NO: 247656 - RNA, 32 nt, Human
ugaguaaggaugaagcuuugagccuccugccc

SEQ ID NO: 247657 - RNA, 32 nt, Human
ugaguaaggguaagggcgcauggaauggggcu

SEQ ID NO: 247658 - RNA, 32 nt, Human
ugaguaagucuacacucuuaagucgguaugaa

SEQ ID NO: 247659 - RNA, 32 nt, Human
ugaguaauacagccccaggggagggaggagac

SEQ ID NO: 247660 - RNA, 32 nt, Human
ugaguaaugcauucuaaacauccuaccccacu

SEQ ID NO: 247661 - RNA, 32 nt, Human
ugaguaauucacugaauugaugguuagcaaga

SEQ ID NO: 247662 - RNA, 32 nt, Human
ugaguaauuucuuuguucuuccuaccuggagg

SEQ ID NO: 247663 - RNA, 32 nt, Human
ugaguaauuuggaacccaaaagugaagaucuu

SEQ ID NO: 247664 - RNA, 32 nt, Human
ugaguacaacuugcauaugucaucccauauaa

SEQ ID NO: 247665 - RNA, 32 nt, Human
ugaguacaggaagagauucuguuauagcucag

SEQ ID NO: 247666 - RNA, 32 nt, Human
ugaguacaguacccagggguucuuggagaaga

SEQ ID NO: 247667 - RNA, 32 nt, Human
ugaguacauacagccuuggaacaaaaugagag

SEQ ID NO: 247668 - RNA, 32 nt, Human
ugaguacaugugcacacacgugugcacaaaug

SEQ ID NO: 247669 - RNA, 32 nt, Human
ugaguaccacuuuauauuuucucuuccauagu

SEQ ID NO: 247670 - RNA, 32 nt, Human
ugaguaccccuuuagugcuauauuugugccau

SEQ ID NO: 247671 - RNA, 32 nt, Human
ugaguaccugugcaugcaagacacuguccugg

SEQ ID NO: 247672 - RNA, 32 nt, Human
ugaguacggagggucuagccugggugaguacg

SEQ ID NO: 247673 - RNA, 32 nt, Human
ugaguacuguggauauuuaaaauaucacagua

SEQ ID NO: 247674 - RNA, 32 nt, Human
ugaguagaaaaugagaauacuaaaaaugugaa

SEQ ID NO: 247675 - RNA, 32 nt, Human
ugaguagacacaaacuccacuguccauccuga

SEQ ID NO: 247676 - RNA, 32 nt, Human
ugaguagagcaaaccaucaagcauuaauugac

SEQ ID NO: 247677 - RNA, 32 nt, Human
ugaguagagcccaugcaaaggaagggaugggg

SEQ ID NO: 247678 - RNA, 32 nt, Human
ugaguagcaggggcagcaccucucacaggggc

SEQ ID NO: 247679 - RNA, 32 nt, Human
ugaguagccacugcacuccagccugggcaacg

SEQ ID NO: 247680 - RNA, 32 nt, Human
ugaguagcucagacuugguuuugccaaaacuc

SEQ ID NO: 247681 - RNA, 32 nt, Human
ugaguagcugggacuacagauguaggcgaaua

SEQ ID NO: 247682 - RNA, 20 nt, Human
ugaguagcugggacuacagg

SEQ ID NO: 247683 - RNA, 32 nt, Human
ugaguagcugggacuucaggagacugaagcca

SEQ ID NO: 247684 - RNA, 32 nt, Human
ugaguagcugguagcugggacuauaggcacgu

SEQ ID NO: 247685 - RNA, 32 nt, Human
ugaguaggagccugaagagcuaggaguaucuu

SEQ ID NO: 247686 - RNA, 32 nt, Human
ugaguagggcugguuuacuauugcuucuugua

SEQ ID NO: 247687 - RNA, 32 nt, Human
ugaguaggugaggagauuaaaagggagccaua

SEQ ID NO: 247688 - RNA, 32 nt, Human
ugaguaggugcccugcaaaggugcaggggauc

SEQ ID NO: 247689 - RNA, 20 nt, Human
ugaguagguguaggaaggag

SEQ ID NO: 247690 - RNA, 32 nt, Human
ugaguaguuuuuaaacauuuuuccuguccuuu

SEQ ID NO: 247691 - RNA, 32 nt, Human
ugaguauacaaguauaucuccucuuuugcuau

SEQ ID NO: 247692 - RNA, 32 nt, Human
ugaguauagcaaaccaucaagcauuaauugac

SEQ ID NO: 247693 - RNA, 32 nt, Human
ugaguauagcaaaccaucaagcauuaauuggc

SEQ ID NO: 247694 - RNA, 32 nt, Human
ugaguauccaccaugugccaggcacagugcug

SEQ ID NO: 247695 - RNA, 32 nt, Human
ugaguaucccuuagaugagaugcuugggacca

SEQ ID NO: 247696 - RNA, 32 nt, Human
ugaguaugccgcugcacuccagccugggggac

SEQ ID NO: 247697 - RNA, 32 nt, Human
ugaguaugccugucccggacccuggugggcca

SEQ ID NO: 247698 - RNA, 32 nt, Human
ugaguaugugugcacacacgugugcauguucc

SEQ ID NO: 247699 - RNA, 32 nt, Human
ugaguauuccuggcagugagguucccaggccg

SEQ ID NO: 247700 - RNA, 32 nt, Human
ugaguauuucuucccagcuccuggccucacau

SEQ ID NO: 247701 - RNA, 19 nt, Human
ugagucaaaaugacacagc

SEQ ID NO: 247702 - RNA, 32 nt, Human
ugagucaaaccacugcaauccagccugggcaa

SEQ ID NO: 247703 - RNA, 32 nt, Human
ugagucaaaccucacccugaaaaccuuugcgc

SEQ ID NO: 247704 - RNA, 32 nt, Human
ugagucaagccaaguaaagcccagagaagauu

SEQ ID NO: 247705 - RNA, 24 nt, Human
ugagucaagugauccucccaccuu

SEQ ID NO: 247706 - RNA, 32 nt, Human
ugagucacacagaugggugagcaguguuuuau

SEQ ID NO: 247707 - RNA, 32 nt, Human
ugagucacacaggacagaggaggcagagcuuc

SEQ ID NO: 247708 - RNA, 32 nt, Human
ugagucacagcccaggugcccggaagcagccu

SEQ ID NO: 247709 - RNA, 32 nt, Human
ugagucacagcugaaugacugaagagcugaac

SEQ ID NO: 247710 - RNA, 32 nt, Human
ugagucacaggccggguguggaagaggaaagu

SEQ ID NO: 247711 - RNA, 32 nt, Human
ugagucacaucagaagcacauugcuccacccc

SEQ ID NO: 247712 - RNA, 32 nt, Human
ugagucaccacugacuguugcccugggcauag

SEQ ID NO: 247713 - RNA, 32 nt, Human
ugagucaccgcugagagcagcugcaguagcug

SEQ ID NO: 247714 - RNA, 32 nt, Human
ugagucacugaaugucaccaggagaggugggg

SEQ ID NO: 247715 - RNA, 32 nt, Human
ugagucacugaauucgaggaggguggggcagg

SEQ ID NO: 247716 - RNA, 32 nt, Human
ugagucacugguuucucaccugcaaaagaaag

SEQ ID NO: 247717 - RNA, 32 nt, Human
ugagucagacagagcaccagccuuggggaccc

SEQ ID NO: 247718 - RNA, 21 nt, Human
ugagucagagucucgcucugu

SEQ ID NO: 247719 - RNA, 32 nt, Human
ugagucagagucuugcucuguugcccgggcug

SEQ ID NO: 247720 - RNA, 32 nt, Human
ugagucagauacacaaggacccuucagguguu

SEQ ID NO: 247721 - RNA, 32 nt, Human
ugagucagaucgugccacugcacuccagccug

SEQ ID NO: 247722 - RNA, 32 nt, Human
ugagucagcacacaucuucccacucgguagac

SEQ ID NO: 247723 - RNA, 32 nt, Human
ugagucagcacucaccuggccugggggaauua

SEQ ID NO: 247724 - RNA, 32 nt, Human
ugagucagcaggaccuggaaucccagaugaga

SEQ ID NO: 247725 - RNA, 23 nt, Human
ugagucaggagaauugcuugaac

SEQ ID NO: 247726 - RNA, 32 nt, Human
ugagucaggaggaugacuugagcccaggaguu

SEQ ID NO: 247727 - RNA, 32 nt, Human
ugagucaggagguugaggcugcagugagcuau

SEQ ID NO: 247728 - RNA, 18 nt, Human
ugagucaggaguucgaga

SEQ ID NO: 247729 - RNA, 32 nt, Human
ugagucaggauuggaucaacagccuccucucu

SEQ ID NO: 247730 - RNA, 32 nt, Human
ugagucaggccuucugguuauauugugcaguu

SEQ ID NO: 247731 - RNA, 19 nt, Human
ugagucagugaguggugaa

SEQ ID NO: 247732 - RNA, 32 nt, Human
ugagucaguguacuuuauagugugaauccugu

SEQ ID NO: 247733 - RNA, 32 nt, Human
ugagucaguguggaagagaggugagggugugc

SEQ ID NO: 247734 - RNA, 32 nt, Human
ugagucaguuagguagucuggaagagagaauc

SEQ ID NO: 247735 - RNA, 32 nt, Human
ugagucaguucuguguggguggucacaggagg

SEQ ID NO: 247736 - RNA, 32 nt, Human
ugagucauagaucuuggcuuccuuuagaagcc

SEQ ID NO: 247737 - RNA, 32 nt, Human
ugagucauccccagggaucaggagccuccagc

SEQ ID NO: 247738 - RNA, 17 nt, Human
ugagucaucucaagucc

SEQ ID NO: 247739 - RNA, 32 nt, Human
ugagucaucugaaggcuuggaccccaaggaug

SEQ ID NO: 247740 - RNA, 32 nt, Human
ugagucaugggaaucacuugaaccugggaggc

SEQ ID NO: 247741 - RNA, 32 nt, Human
ugagucauucuuuccacccccuggccgcacgu

SEQ ID NO: 247742 - RNA, 32 nt, Human
ugaguccaagaguuugagacaagccugagcaa

SEQ ID NO: 247743 - RNA, 32 nt, Human
ugaguccaagaguuugagaccagccugagcaa

SEQ ID NO: 247744 - RNA, 32 nt, Human
ugaguccagaaaguggcaguugcagugagugg

SEQ ID NO: 247745 - RNA, 32 nt, Human
ugaguccagaagacugccucaguggcucauac

SEQ ID NO: 247746 - RNA, 32 nt, Human
ugaguccagaagcaagaccugugagagugcac

SEQ ID NO: 247747 - RNA, 32 nt, Human
ugaguccagagaaagugcucagugaugcuugu

SEQ ID NO: 247748 - RNA, 32 nt, Human
ugaguccagccucguggucuucuccaagaugc

SEQ ID NO: 247749 - RNA, 32 nt, Human
ugaguccaggaggcggaggcugcagugagcug

SEQ ID NO: 247750 - RNA, 32 nt, Human
ugaguccaggaggucgaggcugcagugagcca

SEQ ID NO: 247751 - RNA, 32 nt, Human
ugaguccaggagguugaggcugcagucagcuc

SEQ ID NO: 247752 - RNA, 32 nt, Human
ugaguccaggagguugaggcugcagugagcug

SEQ ID NO: 247753 - RNA, 32 nt, Human
ugaguccaggaguucaaggccagccugggcaa

SEQ ID NO: 247754 - RNA, 32 nt, Human
ugaguccagggauucaaggccaaccugggcaa

SEQ ID NO: 247755 - RNA, 32 nt, Human
ugaguccauacaggagaagaaagaucuguuuc

SEQ ID NO: 247756 - RNA, 32 nt, Human
ugaguccauccaugcuuuagcagcugcuccuc

SEQ ID NO: 247757 - RNA, 32 nt, Human
ugaguccaugagucuaaguauagccacugaug

SEQ ID NO: 247758 - RNA, 32 nt, Human
ugaguccaugggaacagccccacugcaaacaa

SEQ ID NO: 247759 - RNA, 32 nt, Human
ugagucccaggcugagccucagucucccuccc

SEQ ID NO: 247760 - RNA, 32 nt, Human
ugaguccccaugccaugggcaaggggcccaau

SEQ ID NO: 247761 - RNA, 32 nt, Human
ugagucccccuuccuuuuuaaucuucuucccc

SEQ ID NO: 247762 - RNA, 32 nt, Human
ugaguccccuaagucccuuucucaguuugcaa

SEQ ID NO: 247763 - RNA, 32 nt, Human
ugagucccgagcacagcaccuucccagucucc

SEQ ID NO: 247764 - RNA, 32 nt, Human
ugagucccuccuccucuucucccaugccuucc

SEQ ID NO: 247765 - RNA, 32 nt, Human
ugagucccucucagaaaacagagcuaagacaa

SEQ ID NO: 247766 - RNA, 32 nt, Human
ugagucccugcagcucugggucugguucuuca

SEQ ID NO: 247767 - RNA, 32 nt, Human
ugaguccgaccuggccugucugugaagagcaa

SEQ ID NO: 247768 - RNA, 32 nt, Human
ugaguccuaagacugcagucaaagccagaacu

SEQ ID NO: 247769 - RNA, 32 nt, Human
ugaguccucaaagaugacagagcuaggaaagg

SEQ ID NO: 247770 - RNA, 32 nt, Human
ugaguccuccacucgcaucucccuccccugcc

SEQ ID NO: 247771 - RNA, 32 nt, Human
ugaguccuggaccucagccuagauguaaccuu

SEQ ID NO: 247772 - RNA, 32 nt, Human
ugaguccuggacuggacugaacauccagaaag

SEQ ID NO: 247773 - RNA, 32 nt, Human
ugaguccuggaguuugagaccaacaugggcaa

SEQ ID NO: 247774 - RNA, 20 nt, Human
ugaguccuggccucugugga

SEQ ID NO: 247775 - RNA, 32 nt, Human
ugaguccugugcuguuggcaaagugccaggca

SEQ ID NO: 247776 - RNA, 32 nt, Human
ugaguccuuaagggcgguccaagccucccgau

SEQ ID NO: 247777 - RNA, 32 nt, Human
ugaguccuugcugugggaugugccaguguccc

SEQ ID NO: 247778 - RNA, 32 nt, Human
ugaguccuuguggacaaccacacacacgugcc

SEQ ID NO: 247779 - RNA, 32 nt, Human
ugagucgagaagaaggaaagagagggaugggg

SEQ ID NO: 247780 - RNA, 32 nt, Human
ugagucgagaucauugcacuccagccugggca

SEQ ID NO: 247781 - RNA, 32 nt, Human
ugagucgcugggccagggugaggaccugggcc

SEQ ID NO: 247782 - RNA, 32 nt, Human
ugagucggacuaauccaaacagugggugauuu

SEQ ID NO: 247783 - RNA, 32 nt, Human
ugagucggcugugauuccauucccucugcuuu

SEQ ID NO: 247784 - RNA, 32 nt, Human
ugagucgggaggauagcgugagcccaggaguu

SEQ ID NO: 247785 - RNA, 32 nt, Human
ugagucgggggagaggauggcagagacuuuau

SEQ ID NO: 247786 - RNA, 32 nt, Human
ugagucgugugccucuauuggaggauggcugu

SEQ ID NO: 247787 - RNA, 32 nt, Human
ugagucuagagaaaugaccaggguggugaaga

SEQ ID NO: 247788 - RNA, 32 nt, Human
ugagucuagccugggagccaggauacuggggu

SEQ ID NO: 247789 - RNA, 32 nt, Human
ugagucuaggaguucaagaccagccuggccaa

SEQ ID NO: 247790 - RNA, 32 nt, Human
ugagucuaugaguucaagaccagccugggcaa

SEQ ID NO: 247791 - RNA, 32 nt, Human
ugagucucacuccaucagccaggcuggagugc

SEQ ID NO: 247792 - RNA, 32 nt, Human
ugagucucauuucucuggauucccacggcagc

SEQ ID NO: 247793 - RNA, 32 nt, Human
ugagucuccacaaccuucuuuggaaagcucgg

SEQ ID NO: 247794 - RNA, 32 nt, Human
ugagucuccaggucuccagccagauccgggga

SEQ ID NO: 247795 - RNA, 32 nt, Human
ugagucuccugccucagccuccccaguagcug

SEQ ID NO: 247796 - RNA, 32 nt, Human
ugagucucgauguguaggccuuuccauuccau

SEQ ID NO: 247797 - RNA, 32 nt, Human
ugagucucgcucugcacuccagccuggcgacu

SEQ ID NO: 247798 - RNA, 32 nt, Human
ugagucucucccaccaugcaugcaggucacug

SEQ ID NO: 247799 - RNA, 32 nt, Human
ugagucucucccccuggaaucuucuaucuggg

SEQ ID NO: 247800 - RNA, 32 nt, Human
ugagucucuccucuucuccaucuucacuggcu

SEQ ID NO: 247801 - RNA, 32 nt, Human
ugagucucucucuguugcccaggcuggaguac

SEQ ID NO: 247802 - RNA, 32 nt, Human
ugagucucugaggaggugucaggcugggcuca

SEQ ID NO: 247803 - RNA, 32 nt, Human
ugagucucuguacaauuacuucagugccuuug

SEQ ID NO: 247804 - RNA, 32 nt, Human
ugagucucuuauuuaucugcagaaggaacuuu

SEQ ID NO: 247805 - RNA, 32 nt, Human
ugagucugaggcuuccauccggggacaauguc

SEQ ID NO: 247806 - RNA, 32 nt, Human
ugagucugaguccugucucugccugcggccca

SEQ ID NO: 247807 - RNA, 32 nt, Human
ugagucugcaccuccaggcaggcucugugcag

SEQ ID NO: 247808 - RNA, 31 nt, Human
ugagucugccucuugugcuuggugucuuuug

SEQ ID NO: 247809 - RNA, 32 nt, Human
ugagucugcgggagaagagcggcccuaugcau

SEQ ID NO: 247810 - RNA, 32 nt, Human
ugagucugcuccauccaugugucuguuugggg

SEQ ID NO: 247811 - RNA, 32 nt, Human
ugagucugcuucagucuggagcuguuuguggg

SEQ ID NO: 247812 - RNA, 32 nt, Human
ugagucugcuuccacguccucucccaggaaca

SEQ ID NO: 247813 - RNA, 32 nt, Human
ugagucugcuucuccccuuuggaguuaggaag

SEQ ID NO: 247814 - RNA, 32 nt, Human
ugagucuggcgugccuggcgggcacagccaua

SEQ ID NO: 247815 - RNA, 32 nt, Human
ugagucugggacugcccuggccuaagaugggc

SEQ ID NO: 247816 - RNA, 32 nt, Human
ugagucugggagaaggaggcuacagugagcug

SEQ ID NO: 247817 - RNA, 32 nt, Human
ugagucugggaggcggagguugcagugagcug

SEQ ID NO: 247818 - RNA, 32 nt, Human
ugagucugggagguggaggcugcagugagccg

SEQ ID NO: 247819 - RNA, 32 nt, Human
ugagucuguaggagcaagggcacaaacugcag

SEQ ID NO: 247820 - RNA, 32 nt, Human
ugagucuguggcuggagacaguggggucuaug

SEQ ID NO: 247821 - RNA, 21 nt, Human
ugagucuguuguguggaugug

SEQ ID NO: 247822 - RNA, 32 nt, Human
ugagucuuacccuucaugggcugcagaggccc

SEQ ID NO: 247823 - RNA, 32 nt, Human
ugagucuucaggagacggagacauauggaaug

SEQ ID NO: 247824 - RNA, 32 nt, Human
ugagucuuccaggaccgucccacccugcugac

SEQ ID NO: 247825 - RNA, 32 nt, Human
ugagucuugcagaaugaaaggcaucacaggag

SEQ ID NO: 247826 - RNA, 32 nt, Human
ugagucuugcccaaacauucuuucuuuuugug

SEQ ID NO: 247827 - RNA, 32 nt, Human
ugagucuugguauccagguauugcuucaaacu

SEQ ID NO: 247828 - RNA, 29 nt, Human
ugagucuuggugcuaucaaucaccgucug

SEQ ID NO: 247829 - RNA, 32 nt, Human
ugagucuugguggaaacagagucuugacauga

SEQ ID NO: 247830 - RNA, 32 nt, Human
ugagucuuguugugaauauuucuuugaugauu

SEQ ID NO: 247831 - RNA, 18 nt, Human
ugagucuuuaacaucuug

SEQ ID NO: 247832 - RNA, 32 nt, Human
ugagucuuuaguuuuagucaugggcuuucuuc

SEQ ID NO: 247833 - RNA, 32 nt, Human
ugagucuuugggcgcagaagacccggguuaau

SEQ ID NO: 247834 - RNA, 32 nt, Human
ugagucuuuuagggagggugacugggaggugc

SEQ ID NO: 247835 - RNA, 32 nt, Human
ugagugaaaccagcuagugugucaacagugaa

SEQ ID NO: 247836 - RNA, 24 nt, Human
ugagugaaauggaggcaacaggag

SEQ ID NO: 247837 - RNA, 32 nt, Human
ugagugaacagaaccauagcuuucuagguacu

SEQ ID NO: 247838 - RNA, 32 nt, Human
ugagugaacugcagccuggcaccaccacaccc

SEQ ID NO: 247839 - RNA, 32 nt, Human
ugagugaaguaagaacucugcuagagaggaaa

SEQ ID NO: 247840 - RNA, 32 nt, Human
ugagugaauuaaugugugugaggacacuaaga

SEQ ID NO: 247841 - RNA, 32 nt, Human
ugagugacagagaggaaggaggaggaaugaga

SEQ ID NO: 247842 - RNA, 32 nt, Human
ugagugaccagcucuguggcccugugucguca

SEQ ID NO: 247843 - RNA, 32 nt, Human
ugagugacccugguuucugagcuccagaaacu

SEQ ID NO: 247844 - RNA, 32 nt, Human
ugagugaccugcuuccugauugcgcagacuga

SEQ ID NO: 247845 - RNA, 32 nt, Human
ugagugacuggguugacugggacagggaaagg

SEQ ID NO: 247846 - RNA, 32 nt, Human
ugagugagagugaagaggaaccagcaggcuuc

SEQ ID NO: 247847 - RNA, 32 nt, Human
ugagugagagugcuccuggugccaugaacgga

SEQ ID NO: 247848 - RNA, 32 nt, Human
ugagugagauugcugguccucucccgggaucc

SEQ ID NO: 247849 - RNA, 32 nt, Human
ugagugagcacacccgugugcacacucauaca

SEQ ID NO: 247850 - RNA, 32 nt, Human
ugagugagcacuagcagaggaugggagcuaca

SEQ ID NO: 247851 - RNA, 32 nt, Human
ugagugaggagagaaaggggaaagaaauugaa

SEQ ID NO: 247852 - RNA, 32 nt, Human
ugagugaggagaguuggugggccaggucaggc

SEQ ID NO: 247853 - RNA, 32 nt, Human
ugagugaggaggaggagaggaagugggagaag

SEQ ID NO: 247854 - RNA, 32 nt, Human
ugagugaggaggaggaggaggagaaggaggag

SEQ ID NO: 247855 - RNA, 32 nt, Human
ugagugaggcaaggcaggagaauugcuggaac

SEQ ID NO: 247856 - RNA, 32 nt, Human
ugagugaggccuggugccagagcugugcggac

SEQ ID NO: 247857 - RNA, 32 nt, Human
ugagugaggggugacccaggaagaacguguca

SEQ ID NO: 247858 - RNA, 32 nt, Human
ugagugagggugcagaccccugccugugauca

SEQ ID NO: 247859 - RNA, 32 nt, Human
ugagugagguagauugcugucccguuaacaua

SEQ ID NO: 247860 - RNA, 32 nt, Human
ugagugaguaucuuggugaugacuccuccuga

SEQ ID NO: 247861 - RNA, 32 nt, Human
ugagugagugaauuuucauguggcuggguggg

SEQ ID NO: 247862 - RNA, 32 nt, Human
ugagugagugguaaaggccccguuuuuacucu

SEQ ID NO: 247863 - RNA, 32 nt, Human
ugagugaguuugcagaaagcagguggugagcu

SEQ ID NO: 247864 - RNA, 32 nt, Human
ugagugauccucccgccccagccuccugagua

SEQ ID NO: 247865 - RNA, 32 nt, Human
ugagugcaagaguucaagaucagacuggacaa

SEQ ID NO: 247866 - RNA, 32 nt, Human
ugagugcaccucagagcacaggggcccagagc

SEQ ID NO: 247867 - RNA, 32 nt, Human
ugagugcagagcugugggggcacccaaguccu

SEQ ID NO: 247868 - RNA, 32 nt, Human
ugagugcagcaucuuucccacauucaauauga

SEQ ID NO: 247869 - RNA, 32 nt, Human
ugagugcaggagggcagacacaacacucaguu

SEQ ID NO: 247870 - RNA, 32 nt, Human
ugagugcaggaguucaaggacagccuggguaa

SEQ ID NO: 247871 - RNA, 32 nt, Human
ugagugcaggugggcauaggugcagugagugc

SEQ ID NO: 247872 - RNA, 24 nt, Human
ugagugcaguggcucacgucugua

SEQ ID NO: 247873 - RNA, 32 nt, Human
ugagugcaguuugaacuugagauacagucaac

SEQ ID NO: 247874 - RNA, 32 nt, Human
ugagugcauagaguuggaaaggggagcgaaug

SEQ ID NO: 247875 - RNA, 32 nt, Human
ugagugccaccaaguucuaggaccugguucua

SEQ ID NO: 247876 - RNA, 32 nt, Human
ugagugccagccugagccugcauggugccgcc

SEQ ID NO: 247877 - RNA, 32 nt, Human
ugagugcccacggaggcccccagcacacccaa

SEQ ID NO: 247878 - RNA, 22 nt, Human
ugagugcccagacugauaggag

SEQ ID NO: 247879 - RNA, 32 nt, Human
ugagugccucggugccaccccaguggaugucc

SEQ ID NO: 247880 - RNA, 32 nt, Human
ugagugccugagucauccaaggccaguauugu

SEQ ID NO: 247881 - RNA, 32 nt, Human
ugagugccugcagcuauuguaaauguuaaagu

SEQ ID NO: 247882 - RNA, 32 nt, Human
ugagugccuggugugacgucucucaggaugcc

SEQ ID NO: 247883 - RNA, 32 nt, Human
ugagugccuguaaucccagcuacuugggaggc

SEQ ID NO: 247884 - RNA, 32 nt, Human
ugagugccuuugacccccuccccgucagcccu

SEQ ID NO: 247885 - RNA, 24 nt, Human
ugagugcgguggcuuacaccugua

SEQ ID NO: 247886 - RNA, 32 nt, Human
ugagugcgugggucagugucugcaugaagugg

SEQ ID NO: 247887 - RNA, 32 nt, Human
ugagugcuacacgaacacaaguagaaguauua

SEQ ID NO: 247888 - RNA, 29 nt, Human
ugagugcucaauaaauauaaacuaaugag

SEQ ID NO: 247889 - RNA, 32 nt, Human
ugagugcucaccaacgggugaccucagcaacg

SEQ ID NO: 247890 - RNA, 32 nt, Human
ugagugcuccgggccuugccccgcccuguguc

SEQ ID NO: 247891 - RNA, 25 nt, Human
ugagugcucgcagcucauaccugug

SEQ ID NO: 247892 - RNA, 32 nt, Human
ugagugcugaggguaguuugcauugcagaguu

SEQ ID NO: 247893 - RNA, 32 nt, Human
ugagugcugcugcagagggaagcuggggucca

SEQ ID NO: 247894 - RNA, 32 nt, Human
ugagugcuggccaggcuuuccugggcaucagg

SEQ ID NO: 247895 - RNA, 32 nt, Human
ugagugcuggcuucuagccucuccaguucccu

SEQ ID NO: 247896 - RNA, 24 nt, Human
ugagugcuguggcucacaccugua

SEQ ID NO: 247897 - RNA, 32 nt, Human
ugagugcugugggagcaucucaccguggcagc

SEQ ID NO: 247898 - RNA, 32 nt, Human
ugagugcuuaccaaauggcaagcauugugcug

SEQ ID NO: 247899 - RNA, 32 nt, Human
ugagugcuuagaguguuacaguucccacccau

SEQ ID NO: 247900 - RNA, 32 nt, Human
ugagugcuugcaugaacuccauuuuucuuuuc

SEQ ID NO: 247901 - RNA, 32 nt, Human
ugagugcuuuccucuucuucaacacucaaccc

SEQ ID NO: 247902 - RNA, 23 nt, Human
ugaguggaacagacagaugggug

SEQ ID NO: 247903 - RNA, 31 nt, Human
ugaguggaacaggagccgggcauucagagag

SEQ ID NO: 247904 - RNA, 32 nt, Human
ugaguggacauucuuggugaaauguuguauaa

SEQ ID NO: 247905 - RNA, 32 nt, Human
ugaguggacucugccagugccugguggaacug

SEQ ID NO: 247906 - RNA, 32 nt, Human
ugaguggagaggaggaggaggaugaagaaggu

SEQ ID NO: 247907 - RNA, 23 nt, Human
ugaguggauugcuugagccuagg

SEQ ID NO: 247908 - RNA, 32 nt, Human
ugaguggcagaucuuguuuuacacucccaugg

SEQ ID NO: 247909 - RNA, 32 nt, Human
ugaguggcagccgccucccuuaugcaggacau

SEQ ID NO: 247910 - RNA, 32 nt, Human
ugaguggccucuuguguccugcagagauuuaa

SEQ ID NO: 247911 - RNA, 31 nt, Human
ugaguggcuggacucucagccagccacuggg

SEQ ID NO: 247912 - RNA, 32 nt, Human
ugagugggaaggaagcugagagccuaugauua

SEQ ID NO: 247913 - RNA, 32 nt, Human
ugagugggaagugggugccuugcgggguuggg

SEQ ID NO: 247914 - RNA, 32 nt, Human
ugagugggacugcuccuauguucugccccgca

SEQ ID NO: 247915 - RNA, 32 nt, Human
ugagugggcagguuuggaggagcagccaggga

SEQ ID NO: 247916 - RNA, 32 nt, Human
ugagugggcaucuuccugggaugcaggggagu

SEQ ID NO: 247917 - RNA, 21 nt, Human
ugagugggcccugcccgggga

SEQ ID NO: 247918 - RNA, 32 nt, Human
ugagugggccgauccagcuauaucaagaaccu

SEQ ID NO: 247919 - RNA, 32 nt, Human
ugagugggcugguuguuagcagguuuguuuuu

SEQ ID NO: 247920 - RNA, 32 nt, Human
ugaguggggagagagaaggggaggaguagggu

SEQ ID NO: 247921 - RNA, 32 nt, Human
ugaguggggagagguugggcagugagugaggg

SEQ ID NO: 247922 - RNA, 32 nt, Human
ugaguggggcagagggacagggcagccagacc

SEQ ID NO: 247923 - RNA, 32 nt, Human
ugaguggggcagaucacuugaggucaggaguu

SEQ ID NO: 247924 - RNA, 32 nt, Human
ugagugggugaggugacccuugaccuccuggg

SEQ ID NO: 247925 - RNA, 32 nt, Human
ugaguggguuggggguguauguuugcaaggau

SEQ ID NO: 247926 - RNA, 32 nt, Human
ugaguggucacuggucagggcaguggccaagc

SEQ ID NO: 247927 - RNA, 32 nt, Human
ugaguggucuuugucugccuaaacccagaguu

SEQ ID NO: 247928 - RNA, 32 nt, Human
ugaguggugggcaggccaguggcagggccggc

SEQ ID NO: 247929 - RNA, 32 nt, Human
ugaguggugguggagggugggggugcacugca

SEQ ID NO: 247930 - RNA, 32 nt, Human
ugagugguuccuucaagcugggugucuuucca

SEQ ID NO: 247931 - RNA, 32 nt, Human
ugagugguuggcaaacuacagcccaaaggcca

SEQ ID NO: 247932 - RNA, 32 nt, Human
ugagugguugggugaugggcucugcugacgug

SEQ ID NO: 247933 - RNA, 32 nt, Human
ugagugguuguuuucuguguaaagagccguuu

SEQ ID NO: 247934 - RNA, 32 nt, Human
ugagugguuuacaugucuucucuccuuuaaca

SEQ ID NO: 247935 - RNA, 32 nt, Human
ugagugguuuauccucuccaaucugcuccuca

SEQ ID NO: 247936 - RNA, 32 nt, Human
ugaguguaaguucauguaggagaguguaugcg

SEQ ID NO: 247937 - RNA, 32 nt, Human
ugaguguacauauauacacauauacacaucua

SEQ ID NO: 247938 - RNA, 32 nt, Human
ugaguguagaggaggcugaaaggaggaagaga

SEQ ID NO: 247939 - RNA, 32 nt, Human
ugaguguagggagugugggagcagccuuggca

SEQ ID NO: 247940 - RNA, 32 nt, Human
ugaguguccaggagaugagggcugagaauggg

SEQ ID NO: 247941 - RNA, 32 nt, Human
ugaguguccuucaggucauuucuccucucuca

SEQ ID NO: 247942 - RNA, 32 nt, Human
ugagugucucagaggcccccugaguguucccc

SEQ ID NO: 247943 - RNA, 32 nt, Human
ugagugucucccagccugccucgguucucacc

SEQ ID NO: 247944 - RNA, 32 nt, Human
ugagugucuccucugugccagccacgugugaa

SEQ ID NO: 247945 - RNA, 32 nt, Human
ugagugucuccucuuucuugccuguguggggu

SEQ ID NO: 247946 - RNA, 32 nt, Human
ugagugucucucucuucuguucuuugccaucc

SEQ ID NO: 247947 - RNA, 32 nt, Human
ugagugucuuacucccucguacaugcacaaau

SEQ ID NO: 247948 - RNA, 32 nt, Human
ugagugucuugacauuuucacccaggcccucc

SEQ ID NO: 247949 - RNA, 32 nt, Human
ugagugugacggggguugggguggggcgggag

SEQ ID NO: 247950 - RNA, 32 nt, Human
ugagugugagccacacagcagucacacaacuc

SEQ ID NO: 247951 - RNA, 32 nt, Human
ugagugugagccaccuuggcaagugccugugc

SEQ ID NO: 247952 - RNA, 29 nt, Human
ugagugugagugugugugcauggaaguug

SEQ ID NO: 247953 - RNA, 29 nt, Human
ugagugugcauguguguggguggguguga

SEQ ID NO: 247954 - RNA, 20 nt, Human
ugagugugccuguaaucuca

SEQ ID NO: 247955 - RNA, 32 nt, Human
ugagugugccuguaaucucagcacuuugaggg

SEQ ID NO: 247956 - RNA, 32 nt, Human
ugagugugcuggaagccaccauaggaacaagc

SEQ ID NO: 247957 - RNA, 32 nt, Human
ugaguguggaaggcugcccggggcacuggcag

SEQ ID NO: 247958 - RNA, 32 nt, Human
ugaguguggaccaaguuuugggugacauggcc

SEQ ID NO: 247959 - RNA, 32 nt, Human
ugaguguggagcugagcaacugaaccugaaac

SEQ ID NO: 247960 - RNA, 32 nt, Human
ugaguguggcaaagccuuuggcaagcagucaa

SEQ ID NO: 247961 - RNA, 32 nt, Human
ugaguguggggagagcaagcugugagggcagg

SEQ ID NO: 247962 - RNA, 32 nt, Human
ugaguguggguaugacuuuacccuccugguug

SEQ ID NO: 247963 - RNA, 32 nt, Human
ugagugugguccuguaugaacuccuuucagug

SEQ ID NO: 247964 - RNA, 23 nt, Human
ugaguguggugcucacgccugua

SEQ ID NO: 247965 - RNA, 24 nt, Human
ugagugugguggcacaugccugug

SEQ ID NO: 247966 - RNA, 24 nt, Human
ugagugugguggcaggcgccugua

SEQ ID NO: 247967 - RNA, 24 nt, Human
ugagugugguggcgcaugccugua

SEQ ID NO: 247968 - RNA, 24 nt, Human
ugagugugguggcucacaccugua

SEQ ID NO: 247969 - RNA, 21 nt, Human
ugagugugguggcucacgccu

SEQ ID NO: 247970 - RNA, 24 nt, Human
ugagugugguggcucaugccugua

SEQ ID NO: 247971 - RNA, 31 nt, Human
ugaguguguaccugggccuguguuaucugca

SEQ ID NO: 247972 - RNA, 32 nt, Human
ugaguguguauccagagguaaguaugugguaa

SEQ ID NO: 247973 - RNA, 32 nt, Human
ugaguguguaugaauugcgaaacugucugguc

SEQ ID NO: 247974 - RNA, 29 nt, Human
ugaguguguaugugugugugggaguaugu

SEQ ID NO: 247975 - RNA, 32 nt, Human
ugagugugugaagacagggagagccaggcccc

SEQ ID NO: 247976 - RNA, 32 nt, Human
ugagugugugacugagaaugauugaagauagu

SEQ ID NO: 247977 - RNA, 32 nt, Human
ugaguguguuugugguaaggggagaggagccg

SEQ ID NO: 247978 - RNA, 32 nt, Human
ugaguguucucaggccucuccucaccccacca

SEQ ID NO: 247979 - RNA, 32 nt, Human
ugaguguucucuuccuauuccuuuuugauagu

SEQ ID NO: 247980 - RNA, 32 nt, Human
ugaguguuuccaggacccccucggggcccuga

SEQ ID NO: 247981 - RNA, 32 nt, Human
ugaguguuuucaucuugccugggaagcccagg

SEQ ID NO: 247982 - RNA, 32 nt, Human
ugaguuaaacuuuaggaaaaagguuucccuuu

SEQ ID NO: 247983 - RNA, 32 nt, Human
ugaguuaaaggcaguuccaaugccugaugguu

SEQ ID NO: 247984 - RNA, 32 nt, Human
ugaguuaauggccugcgugacacuagugugag

SEQ ID NO: 247985 - RNA, 32 nt, Human
ugaguuaccauagcaaccagcaacuccagggu

SEQ ID NO: 247986 - RNA, 20 nt, Human
ugaguuacccauaaagggaa

SEQ ID NO: 247987 - RNA, 32 nt, Human
ugaguuaccuacauuuuaaugcaccugaaugu

SEQ ID NO: 247988 - RNA, 32 nt, Human
ugaguuagaaacaaacuuaaaauuugggguau

SEQ ID NO: 247989 - RNA, 32 nt, Human
ugaguuagaagcuuuuuaucccuuccucucaa

SEQ ID NO: 247990 - RNA, 32 nt, Human
ugaguuagacccagaaaguauugaacuggaca

SEQ ID NO: 247991 - RNA, 32 nt, Human
ugaguuagauguggaggucagaguggaagcag

SEQ ID NO: 247992 - RNA, 32 nt, Human
ugaguuagcagucagaagacccucuaaguaca

SEQ ID NO: 247993 - RNA, 32 nt, Human
ugaguuagccacaugucucaccaggaauaauu

SEQ ID NO: 247994 - RNA, 32 nt, Human
ugaguuauggccucugcacuccagccugggug

SEQ ID NO: 247995 - RNA, 22 nt, Human
ugaguuauuaauguggauuuua

SEQ ID NO: 247996 - RNA, 32 nt, Human
ugaguuauugguaugacccuguggaaacacac

SEQ ID NO: 247997 - RNA, 32 nt, Human
ugaguuauuugugagaauaaaugagcuaugug

SEQ ID NO: 247998 - RNA, 32 nt, Human
ugaguucaagaaagcuaccuguggaaaaugga

SEQ ID NO: 247999 - RNA, 32 nt, Human
ugaguucaagccuuuauugacauucaaguguu

SEQ ID NO: 248000 - RNA, 32 nt, Human
ugaguucacagcccagucuggggacagcuggg

SEQ ID NO: 248001 - RNA, 31 nt, Human
ugaguucaccucucugggcaucaguguccuu

SEQ ID NO: 248002 - RNA, 32 nt, Human
ugaguucaccugcccuguguguuuccacguca

SEQ ID NO: 248003 - RNA, 32 nt, Human
ugaguucacugugccagcaugcuuccuccaca

SEQ ID NO: 248004 - RNA, 32 nt, Human
ugaguucagagaacuuccccuaccucccccau

SEQ ID NO: 248005 - RNA, 32 nt, Human
ugaguucagcugugacguuagcuucaguggcu

SEQ ID NO: 248006 - RNA, 32 nt, Human
ugaguucagcuuuuaccagccucaguguggag

SEQ ID NO: 248007 - RNA, 32 nt, Human
ugaguucaggaguucaaaaccagccuggacaa

SEQ ID NO: 248008 - RNA, 32 nt, Human
ugaguucaggaguucaagaccagccuggccaa

SEQ ID NO: 248009 - RNA, 32 nt, Human
ugaguucaggaguucaagaccggccugggcag

SEQ ID NO: 248010 - RNA, 19 nt, Human
ugaguucaggaguucgaga

SEQ ID NO: 248011 - RNA, 32 nt, Human
ugaguucaggaguuuuaagaccagccugacca

SEQ ID NO: 248012 - RNA, 32 nt, Human
ugaguucagggagcaacugugggcagaugaaa

SEQ ID NO: 248013 - RNA, 32 nt, Human
ugaguucagggugggaugacggaccgcuucug

SEQ ID NO: 248014 - RNA, 32 nt, Human
ugaguucauggagccuguauucugggaagucu

SEQ ID NO: 248015 - RNA, 32 nt, Human
ugaguucauuucccagcucugccacucaugau

SEQ ID NO: 248016 - RNA, 32 nt, Human
ugaguuccaguccuguggcugugugacuuuga

SEQ ID NO: 248017 - RNA, 21 nt, Human
ugaguucccagcaucaucuua

SEQ ID NO: 248018 - RNA, 32 nt, Human
ugaguucccuugauucaaauaacccugaauca

SEQ ID NO: 248019 - RNA, 26 nt, Human
ugaguuccuacaaaguguuacugucu

SEQ ID NO: 248020 - RNA, 32 nt, Human
ugaguuccucaaggaagcuucugucaugaaag

SEQ ID NO: 248021 - RNA, 32 nt, Human
ugaguuccuggacgggccggaucugugcuguu

SEQ ID NO: 248022 - RNA, 32 nt, Human
ugaguuccugggagcggaggcuggaaggccac

SEQ ID NO: 248023 - RNA, 32 nt, Human
ugaguucgggaguucaagaccagccugaccaa

SEQ ID NO: 248024 - RNA, 32 nt, Human
ugaguucuauagagccuucugaugucucuaaa

SEQ ID NO: 248025 - RNA, 21 nt, Human
ugaguucuccaguugcugccu

SEQ ID NO: 248026 - RNA, 32 nt, Human
ugaguucugcacauuuccccugguucaggcug

SEQ ID NO: 248027 - RNA, 32 nt, Human
ugaguucuucggccacaaugcgccacccgcug

SEQ ID NO: 248028 - RNA, 32 nt, Human
ugaguucuuugcucuucugaguucuugguggc

SEQ ID NO: 248029 - RNA, 32 nt, Human
ugaguugaaaguaucucugcugggcuuucugg

SEQ ID NO: 248030 - RNA, 32 nt, Human
ugaguugaaggagaaggagcugaugcgggccu

SEQ ID NO: 248031 - RNA, 32 nt, Human
ugaguugaggguggguggagggguuugcagug

SEQ ID NO: 248032 - RNA, 32 nt, Human
ugaguugaucacuaucucugcucugugcuccu

SEQ ID NO: 248033 - RNA, 32 nt, Human
ugaguugcacagcgguauucucaccaggcccu

SEQ ID NO: 248034 - RNA, 31 nt, Human
ugaguugcacuuuucuaauaacauaggaugg

SEQ ID NO: 248035 - RNA, 32 nt, Human
ugaguugcagccagggccagugggagggggac

SEQ ID NO: 248036 - RNA, 32 nt, Human
ugaguugcagccagggcuguggggaaggggca

SEQ ID NO: 248037 - RNA, 32 nt, Human
ugaguugccagccugcucuucgugguuuggug

SEQ ID NO: 248038 - RNA, 32 nt, Human
ugaguugcccuccaccuggcuggagagauggc

SEQ ID NO: 248039 - RNA, 32 nt, Human
ugaguugccuauauuugcuauucaaaauuuug

SEQ ID NO: 248040 - RNA, 32 nt, Human
ugaguugcucuaaaauguuuggaaaagagcug

SEQ ID NO: 248041 - RNA, 32 nt, Human
ugaguuggacuucagucuugccuaggcgauuu

SEQ ID NO: 248042 - RNA, 32 nt, Human
ugaguuggagaugucagagggagccauggccc

SEQ ID NO: 248043 - RNA, 21 nt, Human
ugaguuggagucucgcccugu

SEQ ID NO: 248044 - RNA, 32 nt, Human
ugaguuggagucucgcucugucaccaggcuug

SEQ ID NO: 248045 - RNA, 21 nt, Human
ugaguuggagucucgcugugu

SEQ ID NO: 248046 - RNA, 32 nt, Human
ugaguuggauccucugugcgccaccugaguug

SEQ ID NO: 248047 - RNA, 32 nt, Human
ugaguuggccaugcaaugaaugaauauuauaa

SEQ ID NO: 248048 - RNA, 32 nt, Human
ugaguugggaggauggcuugggcccaggaggu

SEQ ID NO: 248049 - RNA, 32 nt, Human
ugaguugggcggaucacuugaggucaggaauu

SEQ ID NO: 248050 - RNA, 32 nt, Human
ugaguuggguuugugacucuucccucucccug

SEQ ID NO: 248051 - RNA, 32 nt, Human
ugaguuguagcugcagacggggaccaguggcu

SEQ ID NO: 248052 - RNA, 32 nt, Human
ugaguuguagcugcagauggggaccagugacu

SEQ ID NO: 248053 - RNA, 32 nt, Human
ugaguuguagcugcagauggggaccaguggcu

SEQ ID NO: 248054 - RNA, 32 nt, Human
ugaguuguccaucuuaaagaaauaugaguaau

SEQ ID NO: 248055 - RNA, 32 nt, Human
ugaguugucucaggaccccgucacugcgacgu

SEQ ID NO: 248056 - RNA, 32 nt, Human
ugaguugucucucugcccuugugacugcugag

SEQ ID NO: 248057 - RNA, 32 nt, Human
ugaguugugcuuucacaaaaccuugucaaaga

SEQ ID NO: 248058 - RNA, 32 nt, Human
ugaguugugggaggggccacauggaaggccag

SEQ ID NO: 248059 - RNA, 32 nt, Human
ugaguugugucaggagauuugaggaacuucug

SEQ ID NO: 248060 - RNA, 32 nt, Human
ugaguuguuuaugggacucguuuauggaacgc

SEQ ID NO: 248061 - RNA, 21 nt, Human
ugaguuuaaagagaaaggcau

SEQ ID NO: 248062 - RNA, 32 nt, Human
ugaguuuaaaucaagauuaugaugaguaaaug

SEQ ID NO: 248063 - RNA, 32 nt, Human
ugaguuuaagaagcaguucuuccuccagaaag

SEQ ID NO: 248064 - RNA, 32 nt, Human
ugaguuuaggcuugguggagucaguggaacag

SEQ ID NO: 248065 - RNA, 32 nt, Human
ugaguuuaucauccuucuuaaagagcaucucu

SEQ ID NO: 248066 - RNA, 32 nt, Human
ugaguuucaguuugcauugcagcugggauuga

SEQ ID NO: 248067 - RNA, 32 nt, Human
ugaguuucauucuacuuuauaucacaugguga

SEQ ID NO: 248068 - RNA, 32 nt, Human
ugaguuuccacuaaggccagggggccuccaac

SEQ ID NO: 248069 - RNA, 32 nt, Human
ugaguuuccagccugcuagucugcccuaugga

SEQ ID NO: 248070 - RNA, 32 nt, Human
ugaguuuccugaaggaguucuuuguuccugau

SEQ ID NO: 248071 - RNA, 32 nt, Human
ugaguuucgauuguuaacguguuuuuguuugg

SEQ ID NO: 248072 - RNA, 22 nt, Human
ugaguuucguggcuuuaucuua

SEQ ID NO: 248073 - RNA, 23 nt, Human
ugaguuucuaaaaauggauguga

SEQ ID NO: 248074 - RNA, 32 nt, Human
ugaguuucucuuucucucuuuuuaacuuuauu

SEQ ID NO: 248075 - RNA, 32 nt, Human
ugaguuucugcugcagauagugguguuaacug

SEQ ID NO: 248076 - RNA, 32 nt, Human
ugaguuucuggccuaauugagggaaggaggaa

SEQ ID NO: 248077 - RNA, 32 nt, Human
ugaguuugagccugagcaccugggggcugaug

SEQ ID NO: 248078 - RNA, 32 nt, Human
ugaguuugauuugacaagaugccuucccaccc

SEQ ID NO: 248079 - RNA, 32 nt, Human
ugaguuugcaucacugcacuccagccugggca

SEQ ID NO: 248080 - RNA, 32 nt, Human
ugaguuugcgaaggaaacccuuggagguagcu

SEQ ID NO: 248081 - RNA, 32 nt, Human
ugaguuugcucaccggcuacugcagcacuuug

SEQ ID NO: 248082 - RNA, 32 nt, Human
ugaguuuggacaagcuccucuccagcuccucu

SEQ ID NO: 248083 - RNA, 31 nt, Human
ugaguuuggacaauuuuaucuaauuguaauu

SEQ ID NO: 248084 - RNA, 32 nt, Human
ugaguuugggguacccacuauaugagagagga

SEQ ID NO: 248085 - RNA, 24 nt, Human
ugaguuugucucagauggaaauga

SEQ ID NO: 248086 - RNA, 21 nt, Human
ugaguuuguucacuaauguga

SEQ ID NO: 248087 - RNA, 23 nt, Human
ugaguuuguugaagugcacaugu

SEQ ID NO: 248088 - RNA, 32 nt, Human
ugaguuuuacccagacucaaggaguugguaaa

SEQ ID NO: 248089 - RNA, 32 nt, Human
ugaguuuuaucuuaacagcaguagcuuaauaa

SEQ ID NO: 248090 - RNA, 22 nt, Human
ugaguuuuuagacuguaucuug

SEQ ID NO: 248091 - RNA, 32 nt, Human
ugaguuuuuauacagcuuuccucuuuuucauc

SEQ ID NO: 248092 - RNA, 20 nt, Human
ugaguuuuuguagcaucuua

SEQ ID NO: 248093 - RNA, 32 nt, Human
ugauaaaaacccucaacagauuaggcauugaa

SEQ ID NO: 248094 - RNA, 32 nt, Human
ugauaaaaagagagcugcuuucccuuuuaccu

SEQ ID NO: 248095 - RNA, 32 nt, Human
ugauaaaaaugcaaagucaaauaaaagguguc

SEQ ID NO: 248096 - RNA, 32 nt, Human
ugauaaaaccaaaauaucacugacucaucccu

SEQ ID NO: 248097 - RNA, 32 nt, Human
ugauaaacaagugaaacauucuuugguguggu

SEQ ID NO: 248098 - RNA, 32 nt, Human
ugauaaacccagacagcuucagccuugcagga

SEQ ID NO: 248099 - RNA, 32 nt, Human
ugauaaaccuggaagcuguucuugaagacuaa

SEQ ID NO: 248100 - RNA, 24 nt, Human
ugauaaagauggaaauggaagaga

SEQ ID NO: 248101 - RNA, 23 nt, Human
ugauaaagaugugaacugugaaa

SEQ ID NO: 248102 - RNA, 32 nt, Human
ugauaaagcauuugaaugguacaguagaugua

SEQ ID NO: 248103 - RNA, 32 nt, Human
ugauaaagcuaaauuauagucuuuugccagag

SEQ ID NO: 248104 - RNA, 32 nt, Human
ugauaaagcugcagaugggcuaaauaaaagcc

SEQ ID NO: 248105 - RNA, 32 nt, Human
ugauaaagcuguuaagaauugucuuuccuaag

SEQ ID NO: 248106 - RNA, 32 nt, Human
ugauaaaggagagguuaaagcaaaccagccuc

SEQ ID NO: 248107 - RNA, 32 nt, Human
ugauaaaggcauucucaccaccugcuuuguuu

SEQ ID NO: 248108 - RNA, 21 nt, Human
ugauaaaggccagauuacaaa

SEQ ID NO: 248109 - RNA, 32 nt, Human
ugauaaagguagaggcacaaagaggcaaacua

SEQ ID NO: 248110 - RNA, 32 nt, Human
ugauaaaguggggagaaggaaaauggacacuc

SEQ ID NO: 248111 - RNA, 32 nt, Human
ugauaaauaaagcccuugcugaagggaaagca

SEQ ID NO: 248112 - RNA, 32 nt, Human
ugauaaaucacagauauaacgaguuaagaggg

SEQ ID NO: 248113 - RNA, 32 nt, Human
ugauaaaugccuguagucccagccacugaagc

SEQ ID NO: 248114 - RNA, 32 nt, Human
ugauaaauggaacuauuccaucaauaggcaaa

SEQ ID NO: 248115 - RNA, 32 nt, Human
ugauaaauggugagauuugaaugugauaagca

SEQ ID NO: 248116 - RNA, 32 nt, Human
ugauaaauuccucucccuccucuccuuuccuc

SEQ ID NO: 248117 - RNA, 21 nt, Human
ugauaacaaaauagccaggca

SEQ ID NO: 248118 - RNA, 21 nt, Human
ugauaacaaagcagcaaggca

SEQ ID NO: 248119 - RNA, 21 nt, Human
ugauaacaauuuguucacuca

SEQ ID NO: 248120 - RNA, 32 nt, Human
ugauaacacaugcccaucaaggaaaagcugug

SEQ ID NO: 248121 - RNA, 32 nt, Human
ugauaacaccucagcuucugagcaucuauuuu

SEQ ID NO: 248122 - RNA, 19 nt, Human
ugauaaccacauggacaca

SEQ ID NO: 248123 - RNA, 32 nt, Human
ugauaaccaguuccuggaaugcccucuaagau

SEQ ID NO: 248124 - RNA, 32 nt, Human
ugauaacugcauuugguaggaagccugaggca

SEQ ID NO: 248125 - RNA, 32 nt, Human
ugauaacugggguguugagaccagcuuugucc

SEQ ID NO: 248126 - RNA, 32 nt, Human
ugauaacuuggggaggcaagagacugggagcc

SEQ ID NO: 248127 - RNA, 22 nt, Human
ugauaagaaaguaaguauucca

SEQ ID NO: 248128 - RNA, 32 nt, Human
ugauaagagaagguguaagguuuuuaucuuau

SEQ ID NO: 248129 - RNA, 32 nt, Human
ugauaagaugaggaaauaaugggaaagguuga

SEQ ID NO: 248130 - RNA, 32 nt, Human
ugauaagcacacuggcccaggcacucagccuu

SEQ ID NO: 248131 - RNA, 32 nt, Human
ugauaagcccagacagcuucagccuugcagga

SEQ ID NO: 248132 - RNA, 23 nt, Human
ugauaagcugcugcggcccaaga

SEQ ID NO: 248133 - RNA, 32 nt, Human
ugauaaggaauuaggucacaaaugggaaauaa

SEQ ID NO: 248134 - RNA, 32 nt, Human
ugauaaggacuuaacguccuaaccucaauugu

SEQ ID NO: 248135 - RNA, 32 nt, Human
ugauaaggcucacagcccugagcucuuuacgg

SEQ ID NO: 248136 - RNA, 32 nt, Human
ugauaaggcugagagagaaaaauaugugcagu

SEQ ID NO: 248137 - RNA, 32 nt, Human
ugauaagggcuagagagaaaaauaaaucagga

SEQ ID NO: 248138 - RNA, 32 nt, Human
ugauaagguucacaguuucucucacccaggug

SEQ ID NO: 248139 - RNA, 32 nt, Human
ugauaaguaggccuggagccucagcuucugua

SEQ ID NO: 248140 - RNA, 32 nt, Human
ugauaagugaucaugcagccagagccagccuu

SEQ ID NO: 248141 - RNA, 32 nt, Human
ugauaagugaucgugcagccagagccagccuu

SEQ ID NO: 248142 - RNA, 32 nt, Human
ugauaagugauugugcagccagagccagccuu

SEQ ID NO: 248143 - RNA, 32 nt, Human
ugauaaguguaccuucaccugcuccagugaug

SEQ ID NO: 248144 - RNA, 32 nt, Human
ugauaauaaagaugacauugccaguuuuguca

SEQ ID NO: 248145 - RNA, 32 nt, Human
ugauaaucaagaaacagcagcuaugaagccuu

SEQ ID NO: 248146 - RNA, 32 nt, Human
ugauaaucucacucuuguaagguuucaucguu

SEQ ID NO: 248147 - RNA, 32 nt, Human
ugauaaucucuuaagagcacccgagaagaaga

SEQ ID NO: 248148 - RNA, 32 nt, Human
ugauaaugaauucaaugugcaacuaugggcaa

SEQ ID NO: 248149 - RNA, 32 nt, Human
ugauaaugccuaguagaucacaugucaaugaa

SEQ ID NO: 248150 - RNA, 32 nt, Human
ugauaaugcuuccaaacuguagcugucacagg

SEQ ID NO: 248151 - RNA, 32 nt, Human
ugauaauuagccugaccagcaggaugaaugca

SEQ ID NO: 248152 - RNA, 32 nt, Human
ugauacaaaaugugagccaggaaacccaguuu

SEQ ID NO: 248153 - RNA, 32 nt, Human
ugauacaacagguagugaaacagcuuaagaau

SEQ ID NO: 248154 - RNA, 32 nt, Human
ugauacaagcaaguuuguuuacaucccugggg

SEQ ID NO: 248155 - RNA, 32 nt, Human
ugauacaaucaucacaauuggcauuaaauuau

SEQ ID NO: 248156 - RNA, 24 nt, Human
ugauacaaucuuggcucacugcag

SEQ ID NO: 248157 - RNA, 32 nt, Human
ugauacagagcuggaggagaagaggagugagg

SEQ ID NO: 248158 - RNA, 21 nt, Human
ugauacagagucucacucugu

SEQ ID NO: 248159 - RNA, 32 nt, Human
ugauacagcuuccaagguguucuugaguagca

SEQ ID NO: 248160 - RNA, 22 nt, Human
ugauacaucagguuucagcaca

SEQ ID NO: 248161 - RNA, 32 nt, Human
ugauacaucgcuacuucugcuucaccuaauca

SEQ ID NO: 248162 - RNA, 32 nt, Human
ugauacaugccuguaauccuggcuacuuggga

SEQ ID NO: 248163 - RNA, 32 nt, Human
ugauacaugccuguggucucagcuacucggga

SEQ ID NO: 248164 - RNA, 32 nt, Human
ugauacaugccuguggucucagcuacuuggga

SEQ ID NO: 248165 - RNA, 32 nt, Human
ugauacaugggcuggaaaaauguagaacguuu

SEQ ID NO: 248166 - RNA, 32 nt, Human
ugauacauuuuccccaaguaagguuuuuacca

SEQ ID NO: 248167 - RNA, 32 nt, Human
ugauaccaaauggcuaacauucaugaccucag

SEQ ID NO: 248168 - RNA, 32 nt, Human
ugauaccaccaucauguucagaccauuuuaua

SEQ ID NO: 248169 - RNA, 32 nt, Human
ugauaccaccaucuuuguaauauuguggugag

SEQ ID NO: 248170 - RNA, 32 nt, Human
ugauaccaccauugauaggcaagcgacugguu

SEQ ID NO: 248171 - RNA, 32 nt, Human
ugauaccagcuacuugggaggcugaggcagaa

SEQ ID NO: 248172 - RNA, 22 nt, Human
ugauaccagcucucuguggaaa

SEQ ID NO: 248173 - RNA, 32 nt, Human
ugauacccaccccaaaggccugccucaagguu

SEQ ID NO: 248174 - RNA, 32 nt, Human
ugauacccagccgccuccagcuugcagugguc

SEQ ID NO: 248175 - RNA, 32 nt, Human
ugauaccccacccuccuccacccucuacccuc

SEQ ID NO: 248176 - RNA, 32 nt, Human
ugauaccgguggaggagcuccaggaagcaggc

SEQ ID NO: 248177 - RNA, 32 nt, Human
ugauaccugcacuccggcuuccuagacucugg

SEQ ID NO: 248178 - RNA, 32 nt, Human
ugauaccugcagaauggacugcagaaaagucu

SEQ ID NO: 248179 - RNA, 32 nt, Human
ugauaccugcucuuuauuucaggaugagaggg

SEQ ID NO: 248180 - RNA, 32 nt, Human
ugauaccuggacauuaaagugcgauucccacu

SEQ ID NO: 248181 - RNA, 32 nt, Human
ugauaccuuauagagaaaagugugaauucagg

SEQ ID NO: 248182 - RNA, 18 nt, Human
ugauaccuucacagccca

SEQ ID NO: 248183 - RNA, 32 nt, Human
ugauaccuuucuaaaaagguggagucuuccgg

SEQ ID NO: 248184 - RNA, 32 nt, Human
ugauacgaucaugacucacugcagccucaaac

SEQ ID NO: 248185 - RNA, 32 nt, Human
ugauacgcuugucucauucacacucccaaagg

SEQ ID NO: 248186 - RNA, 32 nt, Human
ugauacggaacagcauuucccugcagcuaaug

SEQ ID NO: 248187 - RNA, 32 nt, Human
ugauacggagucucgcucuguugcccaggcug

SEQ ID NO: 248188 - RNA, 32 nt, Human
ugauacgggguccggcucugucgcccaggcug

SEQ ID NO: 248189 - RNA, 32 nt, Human
ugauacguggucuugcucugucacucaggcug

SEQ ID NO: 248190 - RNA, 32 nt, Human
ugauacguucccgucugugcacccauggagau

SEQ ID NO: 248191 - RNA, 32 nt, Human
ugauacuaaggagaggagagauuaugucauau

SEQ ID NO: 248192 - RNA, 32 nt, Human
ugauacuacuggggcuuuuccuauugauuugg

SEQ ID NO: 248193 - RNA, 32 nt, Human
ugauacuauuaccaccaccugcucacugguca

SEQ ID NO: 248194 - RNA, 32 nt, Human
ugauacucaucaugguuuugauuugcaauugc

SEQ ID NO: 248195 - RNA, 32 nt, Human
ugauacucccuuacacugaaucauguuaugau

SEQ ID NO: 248196 - RNA, 32 nt, Human
ugauacuccucucccuguaucaugucagcaca

SEQ ID NO: 248197 - RNA, 32 nt, Human
ugauacuccugccucagccuccugagaagcug

SEQ ID NO: 248198 - RNA, 32 nt, Human
ugauacuccugccucagccuccugaguagcug

SEQ ID NO: 248199 - RNA, 32 nt, Human
ugauacucugugguguucuguucauguucuau

SEQ ID NO: 248200 - RNA, 21 nt, Human
ugauacuguaauaauauuuuu

SEQ ID NO: 248201 - RNA, 32 nt, Human
ugauacuguaccagguacaaggcuuuuguaca

SEQ ID NO: 248202 - RNA, 32 nt, Human
ugauacuguacuccagccugagcaacagagca

SEQ ID NO: 248203 - RNA, 32 nt, Human
ugauacugugccauugcacuccaagccugggc

SEQ ID NO: 248204 - RNA, 32 nt, Human
ugauacuguugacauccuccagaauggccaga

SEQ ID NO: 248205 - RNA, 32 nt, Human
ugauacuucagcuguuuguuccugggagaauu

SEQ ID NO: 248206 - RNA, 32 nt, Human
ugauacuucccugaggucucuuuuccuuucaa

SEQ ID NO: 248207 - RNA, 32 nt, Human
ugauacuuucauuuugcacaucaugcacauca

SEQ ID NO: 248208 - RNA, 32 nt, Human
ugauacuuuuauuauucccuugcucauauaac

SEQ ID NO: 248209 - RNA, 32 nt, Human
ugauagaaaauuuggaaagugcaaauaagcaa

SEQ ID NO: 248210 - RNA, 32 nt, Human
ugauagaaagccagcaccagccucgggagcug

SEQ ID NO: 248211 - RNA, 32 nt, Human
ugauagaaaguuaagccagaaggacaaaggaa

SEQ ID NO: 248212 - RNA, 32 nt, Human
ugauagaacuacuuugaaaacaauucaguggu

SEQ ID NO: 248213 - RNA, 32 nt, Human
ugauagaagaaaacagucugggaggauagcgc

SEQ ID NO: 248214 - RNA, 32 nt, Human
ugauagaauccacccugccucugacagcaucc

SEQ ID NO: 248215 - RNA, 32 nt, Human
ugauagaauuucucugccagugcaguaagagu

SEQ ID NO: 248216 - RNA, 32 nt, Human
ugauagacacaaugaaauccacccucaaagag

SEQ ID NO: 248217 - RNA, 32 nt, Human
ugauagaccuuaaauaaguguccuaagucagu

SEQ ID NO: 248218 - RNA, 32 nt, Human
ugauagagaaauuggcccgcuuuguggcagaa

SEQ ID NO: 248219 - RNA, 32 nt, Human
ugauagagaaggaggucccaucaggccccugg

SEQ ID NO: 248220 - RNA, 32 nt, Human
ugauagagacggaguuucaccauguuggccag

SEQ ID NO: 248221 - RNA, 32 nt, Human
ugauagagcaugaggcugggcgugguggcuca

SEQ ID NO: 248222 - RNA, 32 nt, Human
ugauagaggcgggguuucgccauguuacacug

SEQ ID NO: 248223 - RNA, 30 nt, Human
ugauagagucggucccugcuccugugaggc

SEQ ID NO: 248224 - RNA, 32 nt, Human
ugauagaucucuggcuuccugcucuguuuguu

SEQ ID NO: 248225 - RNA, 32 nt, Human
ugauagauuugucccacauaaauguggcccug

SEQ ID NO: 248226 - RNA, 32 nt, Human
ugauagcaccacugcacuccagccugggcaac

SEQ ID NO: 248227 - RNA, 32 nt, Human
ugauagcaccacugcacuccagccugggugac

SEQ ID NO: 248228 - RNA, 32 nt, Human
ugauagcaccacugcaguccagccugggcgac

SEQ ID NO: 248229 - RNA, 32 nt, Human
ugauagcaccacugcgcuccagccugggugag

SEQ ID NO: 248230 - RNA, 30 nt, Human
ugauagcacuuaaacuaguucauuucaaaa

SEQ ID NO: 248231 - RNA, 28 nt, Human
ugauagccaagugcuuggccuggucgac

SEQ ID NO: 248232 - RNA, 32 nt, Human
ugauagccuucagcuacaaaaagauaggacug

SEQ ID NO: 248233 - RNA, 32 nt, Human
ugauagcgaaggauagcaauguggaaaauuug

SEQ ID NO: 248234 - RNA, 32 nt, Human
ugauagcugcuugcuaauuuggucuuagcuca

SEQ ID NO: 248235 - RNA, 32 nt, Human
ugauaggaacaucaaggaauaagucaucaucg

SEQ ID NO: 248236 - RNA, 32 nt, Human
ugauaggaaggaaacugucaucugcaggggcu

SEQ ID NO: 248237 - RNA, 32 nt, Human
ugauaggcacacgaggaugaguggcuuuguau

SEQ ID NO: 248238 - RNA, 32 nt, Human
ugauaggcugaggccagcugggaugcugggaa

SEQ ID NO: 248239 - RNA, 32 nt, Human
ugauagggagagguggcuguuaacagugggcu

SEQ ID NO: 248240 - RNA, 32 nt, Human
ugauagggcaggaagagaagaaaacggaggag

SEQ ID NO: 248241 - RNA, 32 nt, Human
ugauagggcccuggucuuucugcaccagcgug

SEQ ID NO: 248242 - RNA, 32 nt, Human
ugauagggucugaacccaguuggggagacaga

SEQ ID NO: 248243 - RNA, 32 nt, Human
ugauagguccugauuacuaaagaagcuucuuu

SEQ ID NO: 248244 - RNA, 32 nt, Human
ugauaggucucccaaaauguuugggguagggg

SEQ ID NO: 248245 - RNA, 32 nt, Human
ugauaguaaaaaggcaggugauggaaaucagu

SEQ ID NO: 248246 - RNA, 24 nt, Human
ugauaguaaaucuaguuuuugaca

SEQ ID NO: 248247 - RNA, 32 nt, Human
ugauaguaccacugcacuccagccugggcaac

SEQ ID NO: 248248 - RNA, 32 nt, Human
ugauaguaguuguguguuagugugaaugacug

SEQ ID NO: 248249 - RNA, 32 nt, Human
ugauaguaugaacaugguuuugcuuacgcugg

SEQ ID NO: 248250 - RNA, 32 nt, Human
ugauagucacugggcucccugugacuucugac

SEQ ID NO: 248251 - RNA, 30 nt, Human
ugauagugaauguaaucagaaacacacauc

SEQ ID NO: 248252 - RNA, 23 nt, Human
ugauagugcauccaccuacccca

SEQ ID NO: 248253 - RNA, 32 nt, Human
ugauagugccacugcaauucagccugggugac

SEQ ID NO: 248254 - RNA, 32 nt, Human
ugauagugccgcugcacuccauucugggcaag

SEQ ID NO: 248255 - RNA, 32 nt, Human
ugauaguucucuaggccauuguuuuguaacau

SEQ ID NO: 248256 - RNA, 32 nt, Human
ugauaguuuuggauauuugcuugcugugugaa

SEQ ID NO: 248257 - RNA, 32 nt, Human
ugauauaaaaugggauuuauaaaaauauuaga

SEQ ID NO: 248258 - RNA, 32 nt, Human
ugauauaaagagacacagggagaagauaguca

SEQ ID NO: 248259 - RNA, 32 nt, Human
ugauauaaauauggcucacugcagccucgaca

SEQ ID NO: 248260 - RNA, 32 nt, Human
ugauauaacacuuuccagccuauagcagaagc

SEQ ID NO: 248261 - RNA, 32 nt, Human
ugauauaacuaaauuugugguaauaagacugu

SEQ ID NO: 248262 - RNA, 32 nt, Human
ugauauaaucuuguucugcugauuuguuucuu

SEQ ID NO: 248263 - RNA, 32 nt, Human
ugauauaaugucagaaaugcaggaagcuauau

SEQ ID NO: 248264 - RNA, 32 nt, Human
ugauauaucuuucaguucaggcugcuugccug

SEQ ID NO: 248265 - RNA, 32 nt, Human
ugauauaugccuguagucccaacuacuuggaa

SEQ ID NO: 248266 - RNA, 31 nt, Human
ugauauauguacaauuugcucucauguuuuu

SEQ ID NO: 248267 - RNA, 32 nt, Human
ugauauauuaacaucacaaguccuugucaacu

SEQ ID NO: 248268 - RNA, 24 nt, Human
ugauauauuggggaacaaauacua

SEQ ID NO: 248269 - RNA, 23 nt, Human
ugauauauuuguugccaguucca

SEQ ID NO: 248270 - RNA, 32 nt, Human
ugauaucaagaguuugaggccagccuggccaa

SEQ ID NO: 248271 - RNA, 32 nt, Human
ugauaucacccaggcuggagugcaguggcgcg

SEQ ID NO: 248272 - RNA, 32 nt, Human
ugauaucagcaacuguucuggcuccaauucau

SEQ ID NO: 248273 - RNA, 32 nt, Human
ugauaucagccuucucugggccuugugugugg

SEQ ID NO: 248274 - RNA, 32 nt, Human
ugauaucaguccccuucacugcagagccuugc

SEQ ID NO: 248275 - RNA, 32 nt, Human
ugauaucauccagguaaguggcaccuagguga

SEQ ID NO: 248276 - RNA, 23 nt, Human
ugauauccaugaguacuuuagug

SEQ ID NO: 248277 - RNA, 32 nt, Human
ugauaucccugcccagggcuguuuucaaauac

SEQ ID NO: 248278 - RNA, 32 nt, Human
ugauauccuagggggaaaaggaaggccagggg

SEQ ID NO: 248279 - RNA, 32 nt, Human
ugauaucgcaccauuguacuccagccugugug

SEQ ID NO: 248280 - RNA, 32 nt, Human
ugauaucuauuucucagccgaauuccuuaaca

SEQ ID NO: 248281 - RNA, 32 nt, Human
ugauaucuccaccaaagccuugauguuuucuc

SEQ ID NO: 248282 - RNA, 32 nt, Human
ugauaucugugcuucucauaauuacugaaagc

SEQ ID NO: 248283 - RNA, 32 nt, Human
ugauaugagggagauugaggcugcagugagcu

SEQ ID NO: 248284 - RNA, 31 nt, Human
ugauaugaguuucucccugccaaggcaaaaa

SEQ ID NO: 248285 - RNA, 32 nt, Human
ugauaugauaaaagcacaacugcuauagauuc

SEQ ID NO: 248286 - RNA, 32 nt, Human
ugauaugccuguauguuggacuuugcuuuuga

SEQ ID NO: 248287 - RNA, 32 nt, Human
ugauauggcagaagacaccagagcagaugcag

SEQ ID NO: 248288 - RNA, 32 nt, Human
ugauaugguagcaaccaaagauuccaguguuu

SEQ ID NO: 248289 - RNA, 32 nt, Human
ugauaugguaguauuucacuaccauuuucuga

SEQ ID NO: 248290 - RNA, 32 nt, Human
ugauauguaacccaggcgggugggagccucag

SEQ ID NO: 248291 - RNA, 32 nt, Human
ugauaugugagagagaaaucuggaaccuucuu

SEQ ID NO: 248292 - RNA, 32 nt, Human
ugauauguuucaauacauuguugauggcauug

SEQ ID NO: 248293 - RNA, 32 nt, Human
ugauauuaaacaucaucugcauuuuacuugcc

SEQ ID NO: 248294 - RNA, 32 nt, Human
ugauauuacauagaaacggguauuccagacac

SEQ ID NO: 248295 - RNA, 32 nt, Human
ugauauuaggagguggggucuuugggagguga

SEQ ID NO: 248296 - RNA, 32 nt, Human
ugauauuaucaagcuagaaaauaaccaguuug

SEQ ID NO: 248297 - RNA, 32 nt, Human
ugauauucagcauuagaguagaaaagaaacua

SEQ ID NO: 248298 - RNA, 32 nt, Human
ugauauucaggaagaaggggugaggggugggu

SEQ ID NO: 248299 - RNA, 32 nt, Human
ugauauucauucuuuucugcuuuuccagaggg

SEQ ID NO: 248300 - RNA, 32 nt, Human
ugauauuccaccucccaggaaggaaaggaaac

SEQ ID NO: 248301 - RNA, 32 nt, Human
ugauauuccagcugcccuccagagcgccuagc

SEQ ID NO: 248302 - RNA, 32 nt, Human
ugauauuccucuucucacuuuugcaaucacgu

SEQ ID NO: 248303 - RNA, 32 nt, Human
ugauauuccuuugcucacccucaggccuuguu

SEQ ID NO: 248304 - RNA, 32 nt, Human
ugauauucuauguaauaucagaugguuaauac

SEQ ID NO: 248305 - RNA, 32 nt, Human
ugauauugaacaucuuucuaugugcuuacugc

SEQ ID NO: 248306 - RNA, 32 nt, Human
ugauauugaagaaaaauaaguaacuguauuag

SEQ ID NO: 248307 - RNA, 32 nt, Human
ugauauugaagucacuuuauuaauaacagcug

SEQ ID NO: 248308 - RNA, 32 nt, Human
ugauauugcccaggcugaauuugauguuauuu

SEQ ID NO: 248309 - RNA, 32 nt, Human
ugauauugugccacugcacuccagccugggcg

SEQ ID NO: 248310 - RNA, 32 nt, Human
ugauauuguguaacuauaauagagacucuuua

SEQ ID NO: 248311 - RNA, 32 nt, Human
ugauauuucagucugugaacuucuauuaugua

SEQ ID NO: 248312 - RNA, 32 nt, Human
ugauauuuccuaaauacuaauuagcuggaaau

SEQ ID NO: 248313 - RNA, 32 nt, Human
ugauauuugacagacauccuugcaguuuaaga

SEQ ID NO: 248314 - RNA, 20 nt, Human
ugauauuuuagcacuuuggu

SEQ ID NO: 248315 - RNA, 32 nt, Human
ugauauuuuccucugcuugauccauugugcug

SEQ ID NO: 248316 - RNA, 32 nt, Human
ugaucaaaacagagaaaccccaucucuacuaa

SEQ ID NO: 248317 - RNA, 32 nt, Human
ugaucaaaacauagaaaccccaucucuacuaa

SEQ ID NO: 248318 - RNA, 32 nt, Human
ugaucaaaagaaaagaagauggaugaggacac

SEQ ID NO: 248319 - RNA, 32 nt, Human
ugaucaaaagugguauagagggggcuggggcu

SEQ ID NO: 248320 - RNA, 32 nt, Human
ugaucaaaccacuguaguccagccugagugac

SEQ ID NO: 248321 - RNA, 32 nt, Human
ugaucaaauaucacucuccuacuuacaggacu

SEQ ID NO: 248322 - RNA, 32 nt, Human
ugaucaacauggugaaaccccgucucuacuaa

SEQ ID NO: 248323 - RNA, 32 nt, Human
ugaucaacauggugaaaccccgucuuuacuaa

SEQ ID NO: 248324 - RNA, 32 nt, Human
ugaucaacugguuuguguuuugcugcugcauu

SEQ ID NO: 248325 - RNA, 32 nt, Human
ugaucaagacggaguuucaccauguuggccag

SEQ ID NO: 248326 - RNA, 32 nt, Human
ugaucaagcuccggaagaugguggagggucau

SEQ ID NO: 248327 - RNA, 32 nt, Human
ugaucaagcuucagaccucccucccuccccag

SEQ ID NO: 248328 - RNA, 18 nt, Human
ugaucaaggcucccagca

SEQ ID NO: 248329 - RNA, 32 nt, Human
ugaucaaggugcagguguaugugagcggggag

SEQ ID NO: 248330 - RNA, 32 nt, Human
ugaucaagucacucucuggccuaaaaccuucc

SEQ ID NO: 248331 - RNA, 32 nt, Human
ugaucaaugagccccugucacucucaugacac

SEQ ID NO: 248332 - RNA, 32 nt, Human
ugaucaaugccuccuucucucucuuuagccuu

SEQ ID NO: 248333 - RNA, 32 nt, Human
ugaucaauugaauauggacccaagagucagcg

SEQ ID NO: 248334 - RNA, 32 nt, Human
ugaucacacaacugcacuccagccugggcaac

SEQ ID NO: 248335 - RNA, 31 nt, Human
ugaucacacagcuaauaaaagucagagcuca

SEQ ID NO: 248336 - RNA, 32 nt, Human
ugaucacacaucuguauuccagccugggcaau

SEQ ID NO: 248337 - RNA, 32 nt, Human
ugaucacaccaccacacuccagccugagcagc

SEQ ID NO: 248338 - RNA, 32 nt, Human
ugaucacaccaccucacuccagccugggcaac

SEQ ID NO: 248339 - RNA, 32 nt, Human
ugaucacaccacuacacuccagccuggacaac

SEQ ID NO: 248340 - RNA, 32 nt, Human
ugaucacaccacugcaauccagccucgguaac

SEQ ID NO: 248341 - RNA, 32 nt, Human
ugaucacaccacugcaccccagccugggugac

SEQ ID NO: 248342 - RNA, 32 nt, Human
ugaucacaccacugcacuccagccuggacgac

SEQ ID NO: 248343 - RNA, 32 nt, Human
ugaucacaccacugcacuccagccugggcaac

SEQ ID NO: 248344 - RNA, 32 nt, Human
ugaucacaccacugcacuccagccugggugac

SEQ ID NO: 248345 - RNA, 32 nt, Human
ugaucacaccacugcacuccagccuggguguc

SEQ ID NO: 248346 - RNA, 32 nt, Human
ugaucacaccacugcacuccagccuuggcgac

SEQ ID NO: 248347 - RNA, 32 nt, Human
ugaucacaccacugcacucuagccugggcaac

SEQ ID NO: 248348 - RNA, 32 nt, Human
ugaucacaccacugcauucuggccugggugac

SEQ ID NO: 248349 - RNA, 32 nt, Human
ugaucacaccacuguacuccagccugggcaac

SEQ ID NO: 248350 - RNA, 32 nt, Human
ugaucacaccauugcacuucagccugggcgac

SEQ ID NO: 248351 - RNA, 32 nt, Human
ugaucacaccugacugcacuccagccugggug

SEQ ID NO: 248352 - RNA, 32 nt, Human
ugaucacacugcugcacuccagccugugcaac

SEQ ID NO: 248353 - RNA, 32 nt, Human
ugaucacagcuacucgggaggcugaggcacga

SEQ ID NO: 248354 - RNA, 32 nt, Human
ugaucacauaugcagccucaaauguuacacag

SEQ ID NO: 248355 - RNA, 32 nt, Human
ugaucacaucacugcaguccagccugggugac

SEQ ID NO: 248356 - RNA, 32 nt, Human
ugaucaccaauucuugguggcuuggcugggga

SEQ ID NO: 248357 - RNA, 32 nt, Human
ugaucaccagugcccaaugagcuguucucugc

SEQ ID NO: 248358 - RNA, 32 nt, Human
ugaucacccaggcuagagugcaguggcgugau

SEQ ID NO: 248359 - RNA, 28 nt, Human
ugaucacccauggcugccucuccuauua

SEQ ID NO: 248360 - RNA, 32 nt, Human
ugaucacccuccucagccucccaaaaugcugg

SEQ ID NO: 248361 - RNA, 32 nt, Human
ugaucaccucacugcacgcuagccugggcaac

SEQ ID NO: 248362 - RNA, 32 nt, Human
ugaucaccucccccugcuuccugcugcugugg

SEQ ID NO: 248363 - RNA, 22 nt, Human
ugaucaccuuagugcuucagug

SEQ ID NO: 248364 - RNA, 32 nt, Human
ugaucacgauccugcacuccagccugggcaac

SEQ ID NO: 248365 - RNA, 32 nt, Human
ugaucacgccacugcaccccagccugggugac

SEQ ID NO: 248366 - RNA, 32 nt, Human
ugaucacgccacugcacuccagccugggcgac

SEQ ID NO: 248367 - RNA, 32 nt, Human
ugaucacgccacugcacuccagccuggguaac

SEQ ID NO: 248368 - RNA, 32 nt, Human
ugaucacgccacugcacuccagccugggugac

SEQ ID NO: 248369 - RNA, 32 nt, Human
ugaucacgccacugcgcuacagccugggcgac

SEQ ID NO: 248370 - RNA, 32 nt, Human
ugaucacgccauugcacuccagccugggugac

SEQ ID NO: 248371 - RNA, 32 nt, Human
ugaucacggaacgcacaggagcagagcucgag

SEQ ID NO: 248372 - RNA, 32 nt, Human
ugaucacuaacaaaagacaucuucuguuaacc

SEQ ID NO: 248373 - RNA, 32 nt, Human
ugaucacuccacugcacuccagccugggugac

SEQ ID NO: 248374 - RNA, 32 nt, Human
ugaucacucuggaggcuggucagucuacgcac

SEQ ID NO: 248375 - RNA, 25 nt, Human
ugaucacugcagccuccacuuccca

SEQ ID NO: 248376 - RNA, 32 nt, Human
ugaucacuucauuuuaaaugaaugagauaauu

SEQ ID NO: 248377 - RNA, 32 nt, Human
ugaucagaagaaccugccgaagagcacacccc

SEQ ID NO: 248378 - RNA, 32 nt, Human
ugaucagaaucuacugacaguucuuccugucu

SEQ ID NO: 248379 - RNA, 32 nt, Human
ugaucagacucccaggggcagccaccacaugu

SEQ ID NO: 248380 - RNA, 32 nt, Human
ugaucagagccauaccccucuucaccaauggg

SEQ ID NO: 248381 - RNA, 32 nt, Human
ugaucagaggaaaccauggaaggguucacgcu

SEQ ID NO: 248382 - RNA, 32 nt, Human
ugaucagauaagcuccagcccaaauggaaccu

SEQ ID NO: 248383 - RNA, 32 nt, Human
ugaucagaugccagcaccauguuuucauuuaa

SEQ ID NO: 248384 - RNA, 32 nt, Human
ugaucagcacauccaaaaacaccaagacaaac

SEQ ID NO: 248385 - RNA, 32 nt, Human
ugaucagcauuuucuccuucucuucacacucg

SEQ ID NO: 248386 - RNA, 32 nt, Human
ugaucagcuguggugugaggacuucucagaca

SEQ ID NO: 248387 - RNA, 22 nt, Human
ugaucagcuuagaagcauccua

SEQ ID NO: 248388 - RNA, 32 nt, Human
ugaucagcuuugacuggaccucagcucacacg

SEQ ID NO: 248389 - RNA, 32 nt, Human
ugaucaggcagucugcucagauacauugagug

SEQ ID NO: 248390 - RNA, 32 nt, Human
ugaucaggcuccucagccuccaccauccccca

SEQ ID NO: 248391 - RNA, 32 nt, Human
ugaucagggaggcauagcagugagagccauag

SEQ ID NO: 248392 - RNA, 32 nt, Human
ugaucagucucuacugauuaucuugcugcuua

SEQ ID NO: 248393 - RNA, 32 nt, Human
ugaucaguuguacuucauccuauaucagcaca

SEQ ID NO: 248394 - RNA, 32 nt, Human
ugaucauaccacugcacuccagccugggcgac

SEQ ID NO: 248395 - RNA, 32 nt, Human
ugaucauaccacugcacuccagccugggugac

SEQ ID NO: 248396 - RNA, 32 nt, Human
ugaucauaccacugcacuccagucugggcaac

SEQ ID NO: 248397 - RNA, 32 nt, Human
ugaucauaccacugcacuuaacuuggcaacag

SEQ ID NO: 248398 - RNA, 32 nt, Human
ugaucauagcucacuccagccugaagcaagcc

SEQ ID NO: 248399 - RNA, 32 nt, Human
ugaucauagcucacugcacccucaaccuccug

SEQ ID NO: 248400 - RNA, 32 nt, Human
ugaucaucaacaaagacccacacuacuggaca

SEQ ID NO: 248401 - RNA, 32 nt, Human
ugaucaucagaaacuaaauggcagccaggcau

SEQ ID NO: 248402 - RNA, 32 nt, Human
ugaucaucauaacucuguaucugagcagugau

SEQ ID NO: 248403 - RNA, 32 nt, Human
ugaucaucauuucucucaccucucaucuuugg

SEQ ID NO: 248404 - RNA, 32 nt, Human
ugaucaucccagagggaguacccuuuugcaau

SEQ ID NO: 248405 - RNA, 32 nt, Human
ugaucauccuuuucccuauuacugaacauuca

SEQ ID NO: 248406 - RNA, 32 nt, Human
ugaucaucuaaccuuaccuggguccucagcua

SEQ ID NO: 248407 - RNA, 32 nt, Human
ugaucaucuccucaccccaucucccaccuugu

SEQ ID NO: 248408 - RNA, 32 nt, Human
ugaucaucugguucuccucucauuaagcaucc

SEQ ID NO: 248409 - RNA, 32 nt, Human
ugaucaucuuccucauccccuaccuugugaaa

SEQ ID NO: 248410 - RNA, 32 nt, Human
ugaucaugaauaggagcccaugcuagaaguac

SEQ ID NO: 248411 - RNA, 31 nt, Human
ugaucaugacuucuccuuuccagaguuuugg

SEQ ID NO: 248412 - RNA, 32 nt, Human
ugaucaugccaccgcacuuccagccuggguga

SEQ ID NO: 248413 - RNA, 32 nt, Human
ugaucaugccacugcacuccaaccugggcaac

SEQ ID NO: 248414 - RNA, 32 nt, Human
ugaucaugccacugcacuccagcaugcaugac

SEQ ID NO: 248415 - RNA, 32 nt, Human
ugaucaugccacugcacuccagcaugggugau

SEQ ID NO: 248416 - RNA, 32 nt, Human
ugaucaugccacugcacuccagccuggaugac

SEQ ID NO: 248417 - RNA, 32 nt, Human
ugaucaugccacugcacuccagccugggcaac

SEQ ID NO: 248418 - RNA, 32 nt, Human
ugaucaugccacugcacuccagccugggugac

SEQ ID NO: 248419 - RNA, 32 nt, Human
ugaucaugccacugcacuccagcuugggugag

SEQ ID NO: 248420 - RNA, 32 nt, Human
ugaucaugccacugcacuccagucuggaugac

SEQ ID NO: 248421 - RNA, 32 nt, Human
ugaucaugccacugcacuccagucugggugac

SEQ ID NO: 248422 - RNA, 32 nt, Human
ugaucaugccacugcacuccauccugggugac

SEQ ID NO: 248423 - RNA, 32 nt, Human
ugaucaugccacugcacuccuccgugggugac

SEQ ID NO: 248424 - RNA, 32 nt, Human
ugaucaugccacugcacucuagccuaggcuac

SEQ ID NO: 248425 - RNA, 32 nt, Human
ugaucaugccacugcacucugggcuggguaac

SEQ ID NO: 248426 - RNA, 32 nt, Human
ugaucaugccacugcacuuccagccuggguga

SEQ ID NO: 248427 - RNA, 32 nt, Human
ugaucaugccacugcacuuuagccugggcaac

SEQ ID NO: 248428 - RNA, 32 nt, Human
ugaucaugccacugcauuccagccugggcaac

SEQ ID NO: 248429 - RNA, 32 nt, Human
ugaucaugccacugcauuccagccugggcgac

SEQ ID NO: 248430 - RNA, 32 nt, Human
ugaucaugccacugcauuccagccugugugau

SEQ ID NO: 248431 - RNA, 32 nt, Human
ugaucaugccacuguacuccagccugggcgac

SEQ ID NO: 248432 - RNA, 32 nt, Human
ugaucaugccauugcacuccagccugggugac

SEQ ID NO: 248433 - RNA, 32 nt, Human
ugaucaugccauugucuuccagccugaguguc

SEQ ID NO: 248434 - RNA, 31 nt, Human
ugaucaugccucucggccucuugguuucuuu

SEQ ID NO: 248435 - RNA, 32 nt, Human
ugaucaugccucucuacuccagccugggcaau

SEQ ID NO: 248436 - RNA, 32 nt, Human
ugaucaugccucugcauuccagccuuggugac

SEQ ID NO: 248437 - RNA, 32 nt, Human
ugaucaugcuacugcacuccagccuaggugac

SEQ ID NO: 248438 - RNA, 32 nt, Human
ugaucauggcacugcacuccagccugggcaac

SEQ ID NO: 248439 - RNA, 32 nt, Human
ugaucaugggcacauucuccugccauuuguaa

SEQ ID NO: 248440 - RNA, 32 nt, Human
ugaucaugguaaggucuucaguucagccaacg

SEQ ID NO: 248441 - RNA, 32 nt, Human
ugaucauguccuuacacuccagccuggauaac

SEQ ID NO: 248442 - RNA, 32 nt, Human
ugaucauuacacauugcauacauguaccagaa

SEQ ID NO: 248443 - RNA, 32 nt, Human
ugaucauuacauggagauguuugcucauggcu

SEQ ID NO: 248444 - RNA, 32 nt, Human
ugaucauucaggccagcaaggaagggacucug

SEQ ID NO: 248445 - RNA, 32 nt, Human
ugaucauuccacugcauuucagccugggggau

SEQ ID NO: 248446 - RNA, 32 nt, Human
ugaucauuuugaggcugggugcaguggcucac

SEQ ID NO: 248447 - RNA, 32 nt, Human
ugauccacccaccucagccuccaaaagugcug

SEQ ID NO: 248448 - RNA, 24 nt, Human
ugauccacccaccucagccuucca

SEQ ID NO: 248449 - RNA, 32 nt, Human
ugauccacccaccuuggccuuacaaagugcug

SEQ ID NO: 248450 - RNA, 24 nt, Human
ugauccacccacuucagccuccca

SEQ ID NO: 248451 - RNA, 32 nt, Human
ugauccacccgccucggccucccagagugcug

SEQ ID NO: 248452 - RNA, 24 nt, Human
ugauccacccgccucggccuucca

SEQ ID NO: 248453 - RNA, 32 nt, Human
ugauccacccgccuuggccuccugggugcugg

SEQ ID NO: 248454 - RNA, 24 nt, Human
ugauccacccgcuucagcuuccca

SEQ ID NO: 248455 - RNA, 32 nt, Human
ugauccaccgagcuccccacuaggugaagcau

SEQ ID NO: 248456 - RNA, 32 nt, Human
ugauccaccucaaauucacuccugcuuguggu

SEQ ID NO: 248457 - RNA, 32 nt, Human
ugauccaccucagggcacgggcaaacacauag

SEQ ID NO: 248458 - RNA, 24 nt, Human
ugauccaccugccucagccuucca

SEQ ID NO: 248459 - RNA, 32 nt, Human
ugauccaccugccucggccucccacagugcug

SEQ ID NO: 248460 - RNA, 32 nt, Human
ugauccaccugccucggccucccgaaaugcug

SEQ ID NO: 248461 - RNA, 24 nt, Human
ugauccaccugccucggccuucca

SEQ ID NO: 248462 - RNA, 32 nt, Human
ugauccaccugccucguccucccaagugcugg

SEQ ID NO: 248463 - RNA, 32 nt, Human
ugauccaccugccucugccucccaaagugcug

SEQ ID NO: 248464 - RNA, 24 nt, Human
ugauccaccugcuucggccuccca

SEQ ID NO: 248465 - RNA, 32 nt, Human
ugauccacuugcauuccaggggaguuuucuuu

SEQ ID NO: 248466 - RNA, 32 nt, Human
ugauccagaccagcucugugaucagaaggaaa

SEQ ID NO: 248467 - RNA, 32 nt, Human
ugauccagagcagaguuuacgggucuuaggau

SEQ ID NO: 248468 - RNA, 32 nt, Human
ugauccagaugaucaucugauagaagagguga

SEQ ID NO: 248469 - RNA, 32 nt, Human
ugauccagcucuuucagcaucuugguugaacu

SEQ ID NO: 248470 - RNA, 32 nt, Human
ugauccaggagaaaauuagaacagaaaaauaa

SEQ ID NO: 248471 - RNA, 32 nt, Human
ugauccaggcagcccccucugcagagaaaagg

SEQ ID NO: 248472 - RNA, 32 nt, Human
ugauccaucuuaacugaggcucaggccacaua

SEQ ID NO: 248473 - RNA, 32 nt, Human
ugaucccaaaguggccagagugcaaggugcuu

SEQ ID NO: 248474 - RNA, 32 nt, Human
ugaucccaacacucggggagguugaggcuaca

SEQ ID NO: 248475 - RNA, 32 nt, Human
ugaucccaccacugcuccucaacgugcggccu

SEQ ID NO: 248476 - RNA, 23 nt, Human
ugaucccacuccaccccaccuca

SEQ ID NO: 248477 - RNA, 32 nt, Human
ugaucccacugaccuacucuugccugcuggag

SEQ ID NO: 248478 - RNA, 32 nt, Human
ugaucccagcaaccacugucccugccugaaua

SEQ ID NO: 248479 - RNA, 32 nt, Human
ugaucccagcacuuugggaggccgaggcaggu

SEQ ID NO: 248480 - RNA, 32 nt, Human
ugaucccagcacuuugggaggccgaggcgggc

SEQ ID NO: 248481 - RNA, 32 nt, Human
ugaucccagcacuuugggaggcugaggcaggu

SEQ ID NO: 248482 - RNA, 32 nt, Human
ugaucccagcacuuugggaggcugaggcgggu

SEQ ID NO: 248483 - RNA, 32 nt, Human
ugaucccagcacuuugggaggcugagguagga

SEQ ID NO: 248484 - RNA, 32 nt, Human
ugaucccagcacuuugggaggcugaggugggu

SEQ ID NO: 248485 - RNA, 32 nt, Human
ugaucccagcacuuugggaugcugagguggga

SEQ ID NO: 248486 - RNA, 32 nt, Human
ugaucccagcacuuuggguggcugagguggac

SEQ ID NO: 248487 - RNA, 32 nt, Human
ugaucccagcccacacuagccugggugcaucu

SEQ ID NO: 248488 - RNA, 32 nt, Human
ugaucccagcuaccugggaggcugaggaagga

SEQ ID NO: 248489 - RNA, 32 nt, Human
ugaucccagcuacucaggaggcugagacagga

SEQ ID NO: 248490 - RNA, 32 nt, Human
ugaucccagcuacucaggaggcugaggcagga

SEQ ID NO: 248491 - RNA, 32 nt, Human
ugaucccagcuacucgggaggcugaggcagga

SEQ ID NO: 248492 - RNA, 32 nt, Human
ugaucccagcuacugaggaggcugaggcagga

SEQ ID NO: 248493 - RNA, 32 nt, Human
ugaucccagcuacuggagaggcugaggcagga

SEQ ID NO: 248494 - RNA, 32 nt, Human
ugaucccagcuacuggggaggcugaggcagga

SEQ ID NO: 248495 - RNA, 32 nt, Human
ugaucccagcuacuugagaggcugagguggga

SEQ ID NO: 248496 - RNA, 32 nt, Human
ugaucccagcuacuuggaaggcugaggugaga

SEQ ID NO: 248497 - RNA, 32 nt, Human
ugaucccagcuacuugggaggcugaggcagga

SEQ ID NO: 248498 - RNA, 32 nt, Human
ugaucccagcuacuugggaggcugagguagaa

SEQ ID NO: 248499 - RNA, 32 nt, Human
ugaucccagcuacuugggaggcugagguggga

SEQ ID NO: 248500 - RNA, 32 nt, Human
ugaucccagcugcucaggaggcugaggcagga

SEQ ID NO: 248501 - RNA, 32 nt, Human
ugaucccagcuuccugggaggcugaggcaaga

SEQ ID NO: 248502 - RNA, 32 nt, Human
ugaucccaggaauuugagguugcaguaagcua

SEQ ID NO: 248503 - RNA, 32 nt, Human
ugaucccaggaggcggagguugcagugaguug

SEQ ID NO: 248504 - RNA, 32 nt, Human
ugaucccagggaggaaguguuggggcuucaug

SEQ ID NO: 248505 - RNA, 32 nt, Human
ugaucccaggguggcgaguggcggcgaccgag

SEQ ID NO: 248506 - RNA, 32 nt, Human
ugaucccauccuggaagggaaggugcaucgcc

SEQ ID NO: 248507 - RNA, 32 nt, Human
ugaucccaucucuuuucccuucuuuccuccug

SEQ ID NO: 248508 - RNA, 32 nt, Human
ugaucccaugcucccagccucuguuggcggcu

SEQ ID NO: 248509 - RNA, 32 nt, Human
ugaucccauggggcggagguccccaguggcug

SEQ ID NO: 248510 - RNA, 32 nt, Human
ugaucccauuucuccccacccuggggcucuuc

SEQ ID NO: 248511 - RNA, 28 nt, Human
ugauccccaaguguuucuugagcaucug

SEQ ID NO: 248512 - RNA, 32 nt, Human
ugauccccagccacagcacacaggaccaggcu

SEQ ID NO: 248513 - RNA, 32 nt, Human
ugaucccccguuacuuccuagcauuuucuccu

SEQ ID NO: 248514 - RNA, 32 nt, Human
ugaucccccugccucggccucccaaagugcug

SEQ ID NO: 248515 - RNA, 32 nt, Human
ugaucccccugccucggccucccagagugcug

SEQ ID NO: 248516 - RNA, 32 nt, Human
ugauccccgccuggcccuggagguguacuuug

SEQ ID NO: 248517 - RNA, 32 nt, Human
ugauccccucagacauucucaggauuuuacaa

SEQ ID NO: 248518 - RNA, 32 nt, Human
ugauccccuccagcgcccuuccuggagaaucu

SEQ ID NO: 248519 - RNA, 32 nt, Human
ugauccccuccccuccccaugcucuccucccu

SEQ ID NO: 248520 - RNA, 32 nt, Human
ugaucccgaugacucugaaacaugcuuggccu

SEQ ID NO: 248521 - RNA, 32 nt, Human
ugaucccuaacauacuguacuacuugcuuuua

SEQ ID NO: 248522 - RNA, 32 nt, Human
ugaucccuggagccaccaugcccagcaaauuu

SEQ ID NO: 248523 - RNA, 32 nt, Human
ugaucccuguugcaaagccuacccugacucca

SEQ ID NO: 248524 - RNA, 32 nt, Human
ugaucccuuaauucaggcucaggcugaagaac

SEQ ID NO: 248525 - RNA, 32 nt, Human
ugauccgagcacccaaacccucggcggacagc

SEQ ID NO: 248526 - RNA, 32 nt, Human
ugauccgccagccucggccucccgaggugccg

SEQ ID NO: 248527 - RNA, 32 nt, Human
ugauccgccauuacacuccagccugggugaca

SEQ ID NO: 248528 - RNA, 24 nt, Human
ugauccgcccaauccgcccaccuc

SEQ ID NO: 248529 - RNA, 24 nt, Human
ugauccgcccaccucggccuucca

SEQ ID NO: 248530 - RNA, 24 nt, Human
ugauccgcccgccucagccuucua

SEQ ID NO: 248531 - RNA, 32 nt, Human
ugauccgcccgccuuguccuccaaagugcugg

SEQ ID NO: 248532 - RNA, 32 nt, Human
ugauccgccugccucagccucccacagugcug

SEQ ID NO: 248533 - RNA, 32 nt, Human
ugauccgccugccucuaccucccaaagugcug

SEQ ID NO: 248534 - RNA, 32 nt, Human
ugauccgccugccucugccucccaaagugcug

SEQ ID NO: 248535 - RNA, 32 nt, Human
ugauccgggauugggcaacagugcagaacugc

SEQ ID NO: 248536 - RNA, 32 nt, Human
ugauccgggcugggcuguucuccugcugcucu

SEQ ID NO: 248537 - RNA, 32 nt, Human
ugauccggggagguggaaguugcagugggcca

SEQ ID NO: 248538 - RNA, 24 nt, Human
ugauccguccgccucggccuucca

SEQ ID NO: 248539 - RNA, 24 nt, Human
ugauccgucugccucggccuccca

SEQ ID NO: 248540 - RNA, 32 nt, Human
ugauccuaacauggaaaaccugcucugcugau

SEQ ID NO: 248541 - RNA, 32 nt, Human
ugauccuaaccugcagcacggugguuuuacaa

SEQ ID NO: 248542 - RNA, 32 nt, Human
ugauccuaccacugcacuucagccuaggugac

SEQ ID NO: 248543 - RNA, 32 nt, Human
ugauccuaccuuacauccuuuugagguccugc

SEQ ID NO: 248544 - RNA, 32 nt, Human
ugauccuagcuacuugggaggcugagguggga

SEQ ID NO: 248545 - RNA, 32 nt, Human
ugauccuagcugcuggggaggcugagguagga

SEQ ID NO: 248546 - RNA, 32 nt, Human
ugauccuaggagaggguagaugugagccagcc

SEQ ID NO: 248547 - RNA, 32 nt, Human
ugauccuauuccauucccuccugcugcgguuu

SEQ ID NO: 248548 - RNA, 32 nt, Human
ugauccucaaagcccagccagcuccagcaagc

SEQ ID NO: 248549 - RNA, 32 nt, Human
ugauccuccaucuuaaagaagaucagacagag

SEQ ID NO: 248550 - RNA, 32 nt, Human
ugauccucccagggcccugccagguuguuuug

SEQ ID NO: 248551 - RNA, 19 nt, Human
ugauccucccgccccagcc

SEQ ID NO: 248552 - RNA, 24 nt, Human
ugauccucccgccucagccuucca

SEQ ID NO: 248553 - RNA, 24 nt, Human
ugauccucccgcuucagccucuca

SEQ ID NO: 248554 - RNA, 24 nt, Human
ugauccuccuauuucagccuccca

SEQ ID NO: 248555 - RNA, 32 nt, Human
ugauccuccugccucagccccugaguagcugg

SEQ ID NO: 248556 - RNA, 32 nt, Human
ugauccuccugccucagccucccaaugugcug

SEQ ID NO: 248557 - RNA, 32 nt, Human
ugauccuccugccucagccucccgaguagcua

SEQ ID NO: 248558 - RNA, 32 nt, Human
ugauccuccugccucagccucccgaguggcug

SEQ ID NO: 248559 - RNA, 32 nt, Human
ugauccuccugccucagccuccuaagugcugg

SEQ ID NO: 248560 - RNA, 32 nt, Human
ugauccuccugccucagccuccuuaguagcug

SEQ ID NO: 248561 - RNA, 22 nt, Human
ugauccuccugccucagccuuc

SEQ ID NO: 248562 - RNA, 32 nt, Human
ugauccuccugccucagucuccugaguagcug

SEQ ID NO: 248563 - RNA, 32 nt, Human
ugauccuccugccucagucuuccaagcagcug

SEQ ID NO: 248564 - RNA, 32 nt, Human
ugauccuccugccucggccuccuaaagugcug

SEQ ID NO: 248565 - RNA, 23 nt, Human
ugauccuccugcuucagccuccg

SEQ ID NO: 248566 - RNA, 24 nt, Human
ugauccuccugcuucagccucuca

SEQ ID NO: 248567 - RNA, 32 nt, Human
ugauccucuccucucuugaguuaaccccugau

SEQ ID NO: 248568 - RNA, 32 nt, Human
ugauccugaaacucaggaagcaaauggcaauc

SEQ ID NO: 248569 - RNA, 32 nt, Human
ugauccugagccaaggaggugaggagcagagc

SEQ ID NO: 248570 - RNA, 32 nt, Human
ugauccugauuccaguuugccucucucuuuuu

SEQ ID NO: 248571 - RNA, 32 nt, Human
ugauccugccacugcacuccagccugggcgac

SEQ ID NO: 248572 - RNA, 32 nt, Human
ugauccuggaaagugaacugggugaccuagga

SEQ ID NO: 248573 - RNA, 32 nt, Human
ugauccuggaguguggaggcagcagcggcacc

SEQ ID NO: 248574 - RNA, 32 nt, Human
ugauccuggcuacuucagaggcugagguggaa

SEQ ID NO: 248575 - RNA, 32 nt, Human
ugauccugggaaggccuggaugaccaagcuug

SEQ ID NO: 248576 - RNA, 32 nt, Human
ugauccugggagaggugaagagggccaggaug

SEQ ID NO: 248577 - RNA, 32 nt, Human
ugauccugggaggcagagguuguagugagccg

SEQ ID NO: 248578 - RNA, 32 nt, Human
ugauccugggcaagucacuuaaccucuuuagg

SEQ ID NO: 248579 - RNA, 17 nt, Human
ugauccugggccugaga

SEQ ID NO: 248580 - RNA, 32 nt, Human
ugauccugguuuccaccuccagcccugggaaa

SEQ ID NO: 248581 - RNA, 32 nt, Human
ugauccuguacucagaagguuuugccauuucg

SEQ ID NO: 248582 - RNA, 32 nt, Human
ugauccuguggcugguuucucagaaaucaguu

SEQ ID NO: 248583 - RNA, 32 nt, Human
ugauccuuccagagccaucccaaaaagucagc

SEQ ID NO: 248584 - RNA, 32 nt, Human
ugauccuuccuacuuugcuucucuccacccau

SEQ ID NO: 248585 - RNA, 32 nt, Human
ugauccuucuuagagaaggcucagccuuggaa

SEQ ID NO: 248586 - RNA, 32 nt, Human
ugauccuugcagaacuucugugcacaugacau

SEQ ID NO: 248587 - RNA, 32 nt, Human
ugauccuuuacagaaaaaguuugcuaacccuu

SEQ ID NO: 248588 - RNA, 32 nt, Human
ugauccuuucccuccucucacccuccagugug

SEQ ID NO: 248589 - RNA, 32 nt, Human
ugaucgagccacugcacuccagccugggcaac

SEQ ID NO: 248590 - RNA, 32 nt, Human
ugaucgaguuacugcacuccagccugggugac

SEQ ID NO: 248591 - RNA, 32 nt, Human
ugaucgaguuguugcccacagcuguaugauuc

SEQ ID NO: 248592 - RNA, 32 nt, Human
ugaucgcaccacugcacccaaaccuggggaga

SEQ ID NO: 248593 - RNA, 32 nt, Human
ugaucgcaccacugcacuccagccuaggcgac

SEQ ID NO: 248594 - RNA, 32 nt, Human
ugaucgcaccacugcacuccagccugggugac

SEQ ID NO: 248595 - RNA, 32 nt, Human
ugaucgcaccacugcacuccagcucgggugac

SEQ ID NO: 248596 - RNA, 32 nt, Human
ugaucgcaccacugcacuccagcuugguucau

SEQ ID NO: 248597 - RNA, 32 nt, Human
ugaucgcaccacugcacucuagccugggugac

SEQ ID NO: 248598 - RNA, 32 nt, Human
ugaucgcaccacugcauucagccugagcaaca

SEQ ID NO: 248599 - RNA, 32 nt, Human
ugaucgcaccacugcauuccagaccccaucuc

SEQ ID NO: 248600 - RNA, 32 nt, Human
ugaucgcaccacuguacuccagccugggugac

SEQ ID NO: 248601 - RNA, 32 nt, Human
ugaucgcaccacuguauccagcucgggcaaca

SEQ ID NO: 248602 - RNA, 32 nt, Human
ugaucgcaccacuguauuccagccuggaugac

SEQ ID NO: 248603 - RNA, 32 nt, Human
ugaucgcaccauugcacuccagccugagugac

SEQ ID NO: 248604 - RNA, 32 nt, Human
ugaucgcaucaguccacuccagccugagcaac

SEQ ID NO: 248605 - RNA, 32 nt, Human
ugaucgccuggcccagcaggagcugcuucagc

SEQ ID NO: 248606 - RNA, 32 nt, Human
ugaucgcgacacugcacuccagccugggugac

SEQ ID NO: 248607 - RNA, 32 nt, Human
ugaucgcgccacuacacuccagccugagcaac

SEQ ID NO: 248608 - RNA, 32 nt, Human
ugaucgcgccacugcacuccagcccgggugac

SEQ ID NO: 248609 - RNA, 32 nt, Human
ugaucgcgccacugcacuccaggcugggcaac

SEQ ID NO: 248610 - RNA, 32 nt, Human
ugaucgcgccacugcacuccugccugggcaac

SEQ ID NO: 248611 - RNA, 32 nt, Human
ugaucgcugcugucuaggauuuuguuucuuuu

SEQ ID NO: 248612 - RNA, 32 nt, Human
ugaucggccaacugccagcugccuuaaaaagg

SEQ ID NO: 248613 - RNA, 32 nt, Human
ugaucgguaauuccagcuucauacuggcuaca

SEQ ID NO: 248614 - RNA, 32 nt, Human
ugaucgguuuuuaagaggcagugcuuuucagc

SEQ ID NO: 248615 - RNA, 32 nt, Human
ugaucguaccacugcacuccagccuaggugac

SEQ ID NO: 248616 - RNA, 32 nt, Human
ugaucgucauuucucucaccucucaucuuugg

SEQ ID NO: 248617 - RNA, 32 nt, Human
ugaucgugacauggccuccagccugggugacc

SEQ ID NO: 248618 - RNA, 32 nt, Human
ugaucgugccacuacacuccagccugggugac

SEQ ID NO: 248619 - RNA, 32 nt, Human
ugaucgugccacugaccuccagccugggggac

SEQ ID NO: 248620 - RNA, 32 nt, Human
ugaucgugccacugcacuacaaccugggugau

SEQ ID NO: 248621 - RNA, 32 nt, Human
ugaucgugccacugcacuccaaccugagugac

SEQ ID NO: 248622 - RNA, 32 nt, Human
ugaucgugccacugcacuccagccugggcaac

SEQ ID NO: 248623 - RNA, 32 nt, Human
ugaucgugccacugcacuccagccugggggac

SEQ ID NO: 248624 - RNA, 32 nt, Human
ugaucgugccacugcauuccagccugggagag

SEQ ID NO: 248625 - RNA, 32 nt, Human
ugaucgugcuacugcacuccagccugggcaac

SEQ ID NO: 248626 - RNA, 32 nt, Human
ugaucguguacugcaggaccuggguagacaga

SEQ ID NO: 248627 - RNA, 32 nt, Human
ugaucguuguguuguuuugcugcacuuuuuac

SEQ ID NO: 248628 - RNA, 32 nt, Human
ugaucuaaccaggaggccaucacuggaugguc

SEQ ID NO: 248629 - RNA, 32 nt, Human
ugaucuaaggguaguccagccuccuuccaaga

SEQ ID NO: 248630 - RNA, 32 nt, Human
ugaucuacaauccaguaagguggccuuuugcc

SEQ ID NO: 248631 - RNA, 32 nt, Human
ugaucuaccaacaugccacagagaaucacaau

SEQ ID NO: 248632 - RNA, 24 nt, Human
ugaucuacccaccucagccuccca

SEQ ID NO: 248633 - RNA, 24 nt, Human
ugaucuacccaccucggccuccca

SEQ ID NO: 248634 - RNA, 24 nt, Human
ugaucuacccacuggcagucccca

SEQ ID NO: 248635 - RNA, 24 nt, Human
ugaucuacccgccucagccuccca

SEQ ID NO: 248636 - RNA, 23 nt, Human
ugaucuacccgccucggcaucuc

SEQ ID NO: 248637 - RNA, 24 nt, Human
ugaucuacccgccucggccuccca

SEQ ID NO: 248638 - RNA, 24 nt, Human
ugaucuacccgccuggaccucuca

SEQ ID NO: 248639 - RNA, 23 nt, Human
ugaucuacccgccuuggccuccc

SEQ ID NO: 248640 - RNA, 24 nt, Human
ugaucuacccgccuuggccuccca

SEQ ID NO: 248641 - RNA, 24 nt, Human
ugaucuacccuccucggccuccca

SEQ ID NO: 248642 - RNA, 24 nt, Human
ugaucuaccggccucagccucuca

SEQ ID NO: 248643 - RNA, 24 nt, Human
ugaucuaccugccucagccuccca

SEQ ID NO: 248644 - RNA, 32 nt, Human
ugaucuaccuuuucugaauuacuugaaaaggc

SEQ ID NO: 248645 - RNA, 32 nt, Human
ugaucuacuaaacuggaaacacucugaacccu

SEQ ID NO: 248646 - RNA, 32 nt, Human
ugaucuacuguaccuauuuccuccugguggac

SEQ ID NO: 248647 - RNA, 22 nt, Human
ugaucuagcagauacauggcaa

SEQ ID NO: 248648 - RNA, 32 nt, Human
ugaucuaggaagagacugcggccuuaucaccg

SEQ ID NO: 248649 - RNA, 26 nt, Human
ugaucucaagugaucugcccaccuca

SEQ ID NO: 248650 - RNA, 32 nt, Human
ugaucucaccacuacacuccagccugggugac

SEQ ID NO: 248651 - RNA, 32 nt, Human
ugaucucaccacuguacuccagccugggugac

SEQ ID NO: 248652 - RNA, 32 nt, Human
ugaucucaccaugcacuccagccuagacaaca

SEQ ID NO: 248653 - RNA, 32 nt, Human
ugaucucaccccugcacuccagccugggcaac

SEQ ID NO: 248654 - RNA, 32 nt, Human
ugaucucacugcaaccuccaucuccugucuca

SEQ ID NO: 248655 - RNA, 32 nt, Human
ugaucucacugcacacagccuagggccccacc

SEQ ID NO: 248656 - RNA, 32 nt, Human
ugaucucagaguuuagaaucagcagagcacag

SEQ ID NO: 248657 - RNA, 32 nt, Human
ugaucucagcuacccaggaggcugagguggga

SEQ ID NO: 248658 - RNA, 32 nt, Human
ugaucucaggagguugaggcugcagugaauua

SEQ ID NO: 248659 - RNA, 26 nt, Human
ugaucucaggcaauccacccaccuca

SEQ ID NO: 248660 - RNA, 25 nt, Human
ugaucucaggugaccugcccaccuc

SEQ ID NO: 248661 - RNA, 25 nt, Human
ugaucucaggugauccgcccgucuc

SEQ ID NO: 248662 - RNA, 25 nt, Human
ugaucucaggugaucugcccaccuu

SEQ ID NO: 248663 - RNA, 32 nt, Human
ugaucucaucacagacauagccagcucuucag

SEQ ID NO: 248664 - RNA, 24 nt, Human
ugaucucaugauccgcccaucuca

SEQ ID NO: 248665 - RNA, 22 nt, Human
ugaucuccauguaguccauaua

SEQ ID NO: 248666 - RNA, 22 nt, Human
ugaucucccacuucagccuccc

SEQ ID NO: 248667 - RNA, 32 nt, Human
ugaucuccgcucacugccaccuccgccucucu

SEQ ID NO: 248668 - RNA, 32 nt, Human
ugaucuccuccaccuuucuccaaugacagaag

SEQ ID NO: 248669 - RNA, 32 nt, Human
ugaucuccuccacuuccuucagcgccagcagc

SEQ ID NO: 248670 - RNA, 32 nt, Human
ugaucucggcacaccacaaccuucaccucccc

SEQ ID NO: 248671 - RNA, 32 nt, Human
ugaucucggcucacugcaaccuccagcuccca

SEQ ID NO: 248672 - RNA, 23 nt, Human
ugaucucgugauccgccugccuc

SEQ ID NO: 248673 - RNA, 32 nt, Human
ugaucucuaaaacccuuccugcccuuaauauu

SEQ ID NO: 248674 - RNA, 32 nt, Human
ugaucucuaagggcaccaaaucugguauucua

SEQ ID NO: 248675 - RNA, 32 nt, Human
ugaucucuacuuccagcuguguucuguggagg

SEQ ID NO: 248676 - RNA, 32 nt, Human
ugaucucuagcacagacagagauucuggccuc

SEQ ID NO: 248677 - RNA, 32 nt, Human
ugaucucucugaauccuaagggcuggucucug

SEQ ID NO: 248678 - RNA, 21 nt, Human
ugaucucugaucuccaccuca

SEQ ID NO: 248679 - RNA, 32 nt, Human
ugaucucugcucccugcaaccuccaccucccg

SEQ ID NO: 248680 - RNA, 32 nt, Human
ugaucucugggaaggaggauggguggcaggau

SEQ ID NO: 248681 - RNA, 32 nt, Human
ugaucucuugcuguuucaucaggggaaagcac

SEQ ID NO: 248682 - RNA, 32 nt, Human
ugaucucuugugauggggccaaugagucaauu

SEQ ID NO: 248683 - RNA, 20 nt, Human
ugaucugaagcucugugaca

SEQ ID NO: 248684 - RNA, 32 nt, Human
ugaucugaaugagauggagagaagaaugaaga

SEQ ID NO: 248685 - RNA, 32 nt, Human
ugaucugaaugagauggagagaagaaugaagg

SEQ ID NO: 248686 - RNA, 32 nt, Human
ugaucugacuccugcagacucuuccagauuuu

SEQ ID NO: 248687 - RNA, 32 nt, Human
ugaucugagaaugagcccagaggcuuguuugg

SEQ ID NO: 248688 - RNA, 32 nt, Human
ugaucugaucuuuaccuucccuuccuuggauc

SEQ ID NO: 248689 - RNA, 32 nt, Human
ugaucugcaaaccugggcaguauuccacacug

SEQ ID NO: 248690 - RNA, 32 nt, Human
ugaucugcaauacaaggauccauucguaaucu

SEQ ID NO: 248691 - RNA, 24 nt, Human
ugaucugcccaccucaaccuccca

SEQ ID NO: 248692 - RNA, 24 nt, Human
ugaucugcccaccucagccuccca

SEQ ID NO: 248693 - RNA, 24 nt, Human
ugaucugcccaccucggccuccca

SEQ ID NO: 248694 - RNA, 24 nt, Human
ugaucugcccaccucugccuccca

SEQ ID NO: 248695 - RNA, 24 nt, Human
ugaucugcccacuucggccuccca

SEQ ID NO: 248696 - RNA, 24 nt, Human
ugaucugcccacuuuagccuccca

SEQ ID NO: 248697 - RNA, 24 nt, Human
ugaucugcccaucucagccuccca

SEQ ID NO: 248698 - RNA, 24 nt, Human
ugaucugccccccucagccuccca

SEQ ID NO: 248699 - RNA, 32 nt, Human
ugaucugccccuggcguauuuguuaagcacaa

SEQ ID NO: 248700 - RNA, 24 nt, Human
ugaucugcccgccccggccuccca

SEQ ID NO: 248701 - RNA, 24 nt, Human
ugaucugcccgccucagccuccca

SEQ ID NO: 248702 - RNA, 24 nt, Human
ugaucugcccgccucagucuccca

SEQ ID NO: 248703 - RNA, 24 nt, Human
ugaucugcccgccuccaccuccca

SEQ ID NO: 248704 - RNA, 24 nt, Human
ugaucugcccgccucggccuccca

SEQ ID NO: 248705 - RNA, 24 nt, Human
ugaucugcccgccuuagccuccca

SEQ ID NO: 248706 - RNA, 24 nt, Human
ugaucugcccuccucagccuccca

SEQ ID NO: 248707 - RNA, 32 nt, Human
ugaucugcccugcacugagcacucaguggaua

SEQ ID NO: 248708 - RNA, 24 nt, Human
ugaucugccugccccgaccuccca

SEQ ID NO: 248709 - RNA, 22 nt, Human
ugaucugccugccucagccucc

SEQ ID NO: 248710 - RNA, 24 nt, Human
ugaucugccugccucagccuccca

SEQ ID NO: 248711 - RNA, 24 nt, Human
ugaucugccugccucagccucuca

SEQ ID NO: 248712 - RNA, 24 nt, Human
ugaucugccugccucggccuccca

SEQ ID NO: 248713 - RNA, 24 nt, Human
ugaucugccugccucugccuccca

SEQ ID NO: 248714 - RNA, 24 nt, Human
ugaucugccuggcucagccuccca

SEQ ID NO: 248715 - RNA, 24 nt, Human
ugaucugccugucucagccuccca

SEQ ID NO: 248716 - RNA, 22 nt, Human
ugaucugcgcccccagccccca

SEQ ID NO: 248717 - RNA, 32 nt, Human
ugaucugcgcuagguggcaucuccucucacgg

SEQ ID NO: 248718 - RNA, 24 nt, Human
ugaucugcuccccucagccuccca

SEQ ID NO: 248719 - RNA, 24 nt, Human
ugaucugcucgccucggccuccca

SEQ ID NO: 248720 - RNA, 32 nt, Human
ugaucugcugcuuccaaguugugugaccuugg

SEQ ID NO: 248721 - RNA, 24 nt, Human
ugaucugcuugccucagccucuca

SEQ ID NO: 248722 - RNA, 32 nt, Human
ugaucuggaaacauagaggagguugcuugaaa

SEQ ID NO: 248723 - RNA, 32 nt, Human
ugaucuggaaagaauucuucauuuuucauuug

SEQ ID NO: 248724 - RNA, 32 nt, Human
ugaucuggaaccucuugagcagcagaagcagc

SEQ ID NO: 248725 - RNA, 32 nt, Human
ugaucuggagccaaugcagaaagaaaucuaaa

SEQ ID NO: 248726 - RNA, 32 nt, Human
ugaucugggaccccaggccucacaccagaacu

SEQ ID NO: 248727 - RNA, 32 nt, Human
ugaucugggcucaagugaugcuccugucucag

SEQ ID NO: 248728 - RNA, 32 nt, Human
ugaucuggggaggcagaggugacagugagcug

SEQ ID NO: 248729 - RNA, 32 nt, Human
ugaucugguccagccagggccuggcuugucag

SEQ ID NO: 248730 - RNA, 32 nt, Human
ugaucuggucucacugcaaccucuaccuccca

SEQ ID NO: 248731 - RNA, 19 nt, Human
ugaucuguagacucuuccu

SEQ ID NO: 248732 - RNA, 24 nt, Human
ugaucuguccacuucagccgucca

SEQ ID NO: 248733 - RNA, 24 nt, Human
ugaucuguccgccccggccuccca

SEQ ID NO: 248734 - RNA, 32 nt, Human
ugaucugucgcccaggcuggagugcaguagcg

SEQ ID NO: 248735 - RNA, 24 nt, Human
ugaucugucugccucggccuccca

SEQ ID NO: 248736 - RNA, 32 nt, Human
ugaucugugacaguaagcccuccugggauguc

SEQ ID NO: 248737 - RNA, 32 nt, Human
ugaucugugaucuagcauuuauugagagaggu

SEQ ID NO: 248738 - RNA, 32 nt, Human
ugaucuguggcuacucucacaccacaacagag

SEQ ID NO: 248739 - RNA, 32 nt, Human
ugaucuguggugaggccaaauggcagccuuuc

SEQ ID NO: 248740 - RNA, 32 nt, Human
ugaucugugguuuaacacugugcagggcugug

SEQ ID NO: 248741 - RNA, 24 nt, Human
ugaucugugugccccagccuccca

SEQ ID NO: 248742 - RNA, 32 nt, Human
ugaucuguuacccaggcuggagugcaguggca

SEQ ID NO: 248743 - RNA, 24 nt, Human
ugaucuguucgccucggccuccca

SEQ ID NO: 248744 - RNA, 32 nt, Human
ugaucuguugaauauuugcuaaagaccaguuc

SEQ ID NO: 248745 - RNA, 32 nt, Human
ugaucuguugaaugaacccuagacaguucugu

SEQ ID NO: 248746 - RNA, 32 nt, Human
ugaucuguugaaugaauccuagacacuucugu

SEQ ID NO: 248747 - RNA, 32 nt, Human
ugaucuguuuuaacuggacaugguggcacacg

SEQ ID NO: 248748 - RNA, 22 nt, Human
ugaucuguuuuucaccacuuca

SEQ ID NO: 248749 - RNA, 32 nt, Human
ugaucuuaccaaaauuccacauuuaagaguac

SEQ ID NO: 248750 - RNA, 32 nt, Human
ugaucuucagcuuugcaaacuggaugaacuag

SEQ ID NO: 248751 - RNA, 24 nt, Human
ugaucuucccacuucagccuccca

SEQ ID NO: 248752 - RNA, 32 nt, Human
ugaucuuccucccuuccucccuuucuuaccac

SEQ ID NO: 248753 - RNA, 32 nt, Human
ugaucuuccucuucucccuugccagccagcac

SEQ ID NO: 248754 - RNA, 32 nt, Human
ugaucuuccuggcccugcuccauaugcauccu

SEQ ID NO: 248755 - RNA, 32 nt, Human
ugaucuuccuuugaaagagaaugaaagacccu

SEQ ID NO: 248756 - RNA, 32 nt, Human
ugaucuucuccaagaggaagcccuauccgccc

SEQ ID NO: 248757 - RNA, 32 nt, Human
ugaucuugaaaccuccagacacaagaaaacuu

SEQ ID NO: 248758 - RNA, 32 nt, Human
ugaucuugaacuuuccagccuccaggauugug

SEQ ID NO: 248759 - RNA, 32 nt, Human
ugaucuugaagauguuucugcacagaaaugag

SEQ ID NO: 248760 - RNA, 21 nt, Human
ugaucuugauccuuaugcaaa

SEQ ID NO: 248761 - RNA, 32 nt, Human
ugaucuugcacucccagccucaggugauccac

SEQ ID NO: 248762 - RNA, 32 nt, Human
ugaucuugccacugcucuacagccuggaagac

SEQ ID NO: 248763 - RNA, 21 nt, Human
ugaucuugccauugcacucca

SEQ ID NO: 248764 - RNA, 20 nt, Human
ugaucuugccauugcuccau

SEQ ID NO: 248765 - RNA, 32 nt, Human
ugaucuuggauuauggggugaagaggaguaca

SEQ ID NO: 248766 - RNA, 22 nt, Human
ugaucuuggccaagucacuuca

SEQ ID NO: 248767 - RNA, 32 nt, Human
ugaucuuggcccacugcaaccucugcuuccua

SEQ ID NO: 248768 - RNA, 19 nt, Human
ugaucuuggcucacugcag

SEQ ID NO: 248769 - RNA, 32 nt, Human
ugaucuugguguuguggcuccuggagacacga

SEQ ID NO: 248770 - RNA, 32 nt, Human
ugaucuugugucuuagagaagcccccauaccu

SEQ ID NO: 248771 - RNA, 32 nt, Human
ugaucuugugugaccuccuggagaguggauga

SEQ ID NO: 248772 - RNA, 32 nt, Human
ugaucuuuacugaaauauguugccaaaauuua

SEQ ID NO: 248773 - RNA, 32 nt, Human
ugaucuuuccucuccuccuucccaagucauug

SEQ ID NO: 248774 - RNA, 19 nt, Human
ugaucuuucuuuucagcua

SEQ ID NO: 248775 - RNA, 32 nt, Human
ugaucuuuggacuuagcaaagcagagauuauc

SEQ ID NO: 248776 - RNA, 32 nt, Human
ugaucuuuuucuuugcagaugguacaaacucu

SEQ ID NO: 248777 - RNA, 18 nt, Human
ugaugaaaccccaucucu

SEQ ID NO: 248778 - RNA, 32 nt, Human
ugaugaaagcauguacccuccacccuuuuccu

SEQ ID NO: 248779 - RNA, 32 nt, Human
ugaugaaagggaccuucgugcaacuguaguca

SEQ ID NO: 248780 - RNA, 32 nt, Human
ugaugaaauuuccagacagaaagagcccuuuu

SEQ ID NO: 248781 - RNA, 32 nt, Human
ugaugaacaccuggcauccuuuggacaacuuu

SEQ ID NO: 248782 - RNA, 32 nt, Human
ugaugaacaggcugaaaucaguacuucagguu

SEQ ID NO: 248783 - RNA, 32 nt, Human
ugaugaacauggagaaaccccgucucuacuaa

SEQ ID NO: 248784 - RNA, 32 nt, Human
ugaugaacucacaaacuugaacuggcuucaug

SEQ ID NO: 248785 - RNA, 32 nt, Human
ugaugaacuggcagggauaacaaagaaccuaa

SEQ ID NO: 248786 - RNA, 32 nt, Human
ugaugaagacagugcagcagaacauugaaguc

SEQ ID NO: 248787 - RNA, 32 nt, Human
ugaugaagacuucaaaauucaccaagaaucuu

SEQ ID NO: 248788 - RNA, 32 nt, Human
ugaugaagagaaugaauggaagguauuggaag

SEQ ID NO: 248789 - RNA, 32 nt, Human
ugaugaagaggagcaugcuggggugagacugg

SEQ ID NO: 248790 - RNA, 32 nt, Human
ugaugaagaugcuagugcaaugcugaaagaag

SEQ ID NO: 248791 - RNA, 32 nt, Human
ugaugaagcgagacccaccacccuccaucuag

SEQ ID NO: 248792 - RNA, 32 nt, Human
ugaugaaguagagcagagggccugggugucug

SEQ ID NO: 248793 - RNA, 32 nt, Human
ugaugaaguagaucaugcagugacauacaaag

SEQ ID NO: 248794 - RNA, 32 nt, Human
ugaugaagucacugcacccuccacuaccucua

SEQ ID NO: 248795 - RNA, 32 nt, Human
ugaugaaucucuuccuagggagaagcaggaua

SEQ ID NO: 248796 - RNA, 32 nt, Human
ugaugaaucuuccuuucucugccuucugagca

SEQ ID NO: 248797 - RNA, 32 nt, Human
ugaugaaugauuuuauugguggcagcugggug

SEQ ID NO: 248798 - RNA, 32 nt, Human
ugaugaaugcuggccggcaucccugugaggaa

SEQ ID NO: 248799 - RNA, 32 nt, Human
ugaugaauuuaagaagcuacugaauaaauaug

SEQ ID NO: 248800 - RNA, 32 nt, Human
ugaugacaaaccugucaccaguguagcaacaa

SEQ ID NO: 248801 - RNA, 32 nt, Human
ugaugacaaauacacuacucuccucacagaua

SEQ ID NO: 248802 - RNA, 32 nt, Human
ugaugacaccacugcacuccaaccuagguaac

SEQ ID NO: 248803 - RNA, 32 nt, Human
ugaugacacgguggagcucggccacaccaggc

SEQ ID NO: 248804 - RNA, 32 nt, Human
ugaugacacuauuucuaaaagacagacauaau

SEQ ID NO: 248805 - RNA, 32 nt, Human
ugaugacagcccugucccucccugccuccgcc

SEQ ID NO: 248806 - RNA, 32 nt, Human
ugaugacagguguggugguuggaaagggccgg

SEQ ID NO: 248807 - RNA, 32 nt, Human
ugaugacaucucccugcugaagugggaggccc

SEQ ID NO: 248808 - RNA, 32 nt, Human
ugaugacaugcuguuugccuuauggugugggg

SEQ ID NO: 248809 - RNA, 32 nt, Human
ugaugacauguuugcaaccuuugcccaaaucc

SEQ ID NO: 248810 - RNA, 32 nt, Human
ugaugaccagugccagccuuggaguugccagu

SEQ ID NO: 248811 - RNA, 32 nt, Human
ugaugaccauccucauagcucagaucuccuuu

SEQ ID NO: 248812 - RNA, 32 nt, Human
ugaugacccacuggggaacaccaguguuccag

SEQ ID NO: 248813 - RNA, 21 nt, Human
ugaugaccccaggacccagga

SEQ ID NO: 248814 - RNA, 32 nt, Human
ugaugacgccugucugugugcaucauguuucu

SEQ ID NO: 248815 - RNA, 32 nt, Human
ugaugacugacgcggguuugggugauaccccu

SEQ ID NO: 248816 - RNA, 32 nt, Human
ugaugacugcacugccaucgugggcagaugca

SEQ ID NO: 248817 - RNA, 32 nt, Human
ugaugacuggccuggguauucauaugugcacu

SEQ ID NO: 248818 - RNA, 32 nt, Human
ugaugacuuccucuucccagugcaauuuuucc

SEQ ID NO: 248819 - RNA, 32 nt, Human
ugaugacuuugauguaaccucauucucauuaa

SEQ ID NO: 248820 - RNA, 32 nt, Human
ugaugagaaaccuuucuauguaaagaaugugg

SEQ ID NO: 248821 - RNA, 23 nt, Human
ugaugagaaaucuacuuuuucca

SEQ ID NO: 248822 - RNA, 32 nt, Human
ugaugagaaaugaacugagagcauuaagcaga

SEQ ID NO: 248823 - RNA, 32 nt, Human
ugaugagaaauggauguguuauucuugcccuc

SEQ ID NO: 248824 - RNA, 32 nt, Human
ugaugagaagaaaaggcucaggggugaggugg

SEQ ID NO: 248825 - RNA, 32 nt, Human
ugaugagaagcagaacauggugaccuuucacg

SEQ ID NO: 248826 - RNA, 32 nt, Human
ugaugagaagcagaacguggugaccuuucacg

SEQ ID NO: 248827 - RNA, 32 nt, Human
ugaugagaagcagaauguggugaccuuucacg

SEQ ID NO: 248828 - RNA, 23 nt, Human
ugaugagaccuuaguguucucca

SEQ ID NO: 248829 - RNA, 32 nt, Human
ugaugagacgcugggcaucucuccucuguggc

SEQ ID NO: 248830 - RNA, 32 nt, Human
ugaugagagcaaugaacaggagaaggagggag

SEQ ID NO: 248831 - RNA, 32 nt, Human
ugaugagagccaggugcugcagccugaggggc

SEQ ID NO: 248832 - RNA, 32 nt, Human
ugaugagaggaagggaaaccuuacaguaugcu

SEQ ID NO: 248833 - RNA, 32 nt, Human
ugaugagaggaucuugagguucuuggaauugg

SEQ ID NO: 248834 - RNA, 32 nt, Human
ugaugagagggaaaagauugacuggggagggc

SEQ ID NO: 248835 - RNA, 32 nt, Human
ugaugagagucaaacacccugccuacaaggag

SEQ ID NO: 248836 - RNA, 32 nt, Human
ugaugagauauacaucuucuuccuuuugguuu

SEQ ID NO: 248837 - RNA, 32 nt, Human
ugaugagauggaaaaucaacccuuacaggaag

SEQ ID NO: 248838 - RNA, 32 nt, Human
ugaugagauuuuagccuuucuccagaacuaag

SEQ ID NO: 248839 - RNA, 32 nt, Human
ugaugagcauugaggcaccugggaaaugaggc

SEQ ID NO: 248840 - RNA, 32 nt, Human
ugaugagccagccugaugccgacaggucuugu

SEQ ID NO: 248841 - RNA, 32 nt, Human
ugaugagccgaugggcccuggaggcagcccau

SEQ ID NO: 248842 - RNA, 32 nt, Human
ugaugagcgagcucuguaccagcccuugucau

SEQ ID NO: 248843 - RNA, 23 nt, Human
ugaugagcucauggaacuugaga

SEQ ID NO: 248844 - RNA, 32 nt, Human
ugaugagcucugacaaagcuauucccuggugu

SEQ ID NO: 248845 - RNA, 24 nt, Human
ugaugagcugguggcaugcauuga

SEQ ID NO: 248846 - RNA, 32 nt, Human
ugaugaggaaacugaggcuacacagaguuaag

SEQ ID NO: 248847 - RNA, 32 nt, Human
ugaugaggaagaggauaaaauggaagaucaaa

SEQ ID NO: 248848 - RNA, 32 nt, Human
ugaugaggaagugggagcucagggaggacccc

SEQ ID NO: 248849 - RNA, 25 nt, Human
ugaugaggaaucugagaacuggaga

SEQ ID NO: 248850 - RNA, 32 nt, Human
ugaugaggacaugggaaacccacgcucuggca

SEQ ID NO: 248851 - RNA, 32 nt, Human
ugaugaggacuuaagguugcaagaaugaagau

SEQ ID NO: 248852 - RNA, 32 nt, Human
ugaugaggacuuguggaauucagucuacugga

SEQ ID NO: 248853 - RNA, 32 nt, Human
ugaugaggaggaagaagagggcuguggucaua

SEQ ID NO: 248854 - RNA, 32 nt, Human
ugaugaggagguggacagcgagcugggcaccu

SEQ ID NO: 248855 - RNA, 32 nt, Human
ugaugaggcugcacccuugguggagggaacag

SEQ ID NO: 248856 - RNA, 32 nt, Human
ugaugagggaacauuugaaagaacugcaaauu

SEQ ID NO: 248857 - RNA, 22 nt, Human
ugaugagggccauguaguucuu

SEQ ID NO: 248858 - RNA, 32 nt, Human
ugaugagggcugcucccacuucauccgcagga

SEQ ID NO: 248859 - RNA, 32 nt, Human
ugaugaggucaugguaucauauaugggauuuu

SEQ ID NO: 248860 - RNA, 32 nt, Human
ugaugaguagcacugcacugucaccugaugau

SEQ ID NO: 248861 - RNA, 22 nt, Human
ugaugaguaugccuuaaacaaa

SEQ ID NO: 248862 - RNA, 32 nt, Human
ugaugagucuguggcuggagacaguggggucu

SEQ ID NO: 248863 - RNA, 28 nt, Human
ugaugagugacuccugccucauccauug

SEQ ID NO: 248864 - RNA, 32 nt, Human
ugaugagugagacucaggaggcacgacaugag

SEQ ID NO: 248865 - RNA, 32 nt, Human
ugaugagugccuguaguccaagcuacucaaga

SEQ ID NO: 248866 - RNA, 32 nt, Human
ugaugaguucugcggcccagcauauagaaaug

SEQ ID NO: 248867 - RNA, 32 nt, Human
ugaugaguuuccagcagcagagcuuuagguau

SEQ ID NO: 248868 - RNA, 22 nt, Human
ugaugaguuucugaaacuggag

SEQ ID NO: 248869 - RNA, 32 nt, Human
ugaugauaaaaaccacgacccaaccaggcaca

SEQ ID NO: 248870 - RNA, 32 nt, Human
ugaugauaccaccaccaccugccuacccaugg

SEQ ID NO: 248871 - RNA, 32 nt, Human
ugaugauauugaauuuaaaaacugcacaacug

SEQ ID NO: 248872 - RNA, 32 nt, Human
ugaugaucccugguggguaaauugcagacauc

SEQ ID NO: 248873 - RNA, 32 nt, Human
ugaugauccucaaggaaauacaaccuagggug

SEQ ID NO: 248874 - RNA, 32 nt, Human
ugaugauccuggggcucuuggcuuccauacgu

SEQ ID NO: 248875 - RNA, 32 nt, Human
ugaugaugaagaggaggaaggauuagaagaua

SEQ ID NO: 248876 - RNA, 32 nt, Human
ugaugaugacaaccuccagagagaugccauca

SEQ ID NO: 248877 - RNA, 32 nt, Human
ugaugaugauaccucuuucuucccugagugua

SEQ ID NO: 248878 - RNA, 32 nt, Human
ugaugaugaugauaacuagaacuccagguuuu

SEQ ID NO: 248879 - RNA, 32 nt, Human
ugaugaugaugauaucuagaacuccagguuuu

SEQ ID NO: 248880 - RNA, 32 nt, Human
ugaugaugccucagugggaaaaggauuuagca

SEQ ID NO: 248881 - RNA, 32 nt, Human
ugaugauggcgguggagguggugguuguagug

SEQ ID NO: 248882 - RNA, 32 nt, Human
ugaugaugggaaggaaggaaugaagagaaucu

SEQ ID NO: 248883 - RNA, 32 nt, Human
ugaugauggucauuggggugguugucauguga

SEQ ID NO: 248884 - RNA, 32 nt, Human
ugaugaugucacuucucucaagccugaugugu

SEQ ID NO: 248885 - RNA, 32 nt, Human
ugaugaugugccuggguggacauggccccugu

SEQ ID NO: 248886 - RNA, 32 nt, Human
ugaugaugugguugcuauggaaacagaaaagg

SEQ ID NO: 248887 - RNA, 32 nt, Human
ugaugauuacagucuagaguuacuugaaaugg

SEQ ID NO: 248888 - RNA, 32 nt, Human
ugaugauugugaggccucugcagccacgugga

SEQ ID NO: 248889 - RNA, 32 nt, Human
ugaugcaaaacaauuccugccuccuguucccu

SEQ ID NO: 248890 - RNA, 32 nt, Human
ugaugcaaucacggcucacugcagccucgacc

SEQ ID NO: 248891 - RNA, 32 nt, Human
ugaugcaaucauggcucacugcagccuccacc

SEQ ID NO: 248892 - RNA, 23 nt, Human
ugaugcaaucucggcucacugca

SEQ ID NO: 248893 - RNA, 24 nt, Human
ugaugcaaucuuggcucaccgcag

SEQ ID NO: 248894 - RNA, 23 nt, Human
ugaugcaaucuuggcucacugca

SEQ ID NO: 248895 - RNA, 21 nt, Human
ugaugcacaccuguaauccca

SEQ ID NO: 248896 - RNA, 32 nt, Human
ugaugcacagucucccugcucaugcccuucag

SEQ ID NO: 248897 - RNA, 18 nt, Human
ugaugcacaucgcucugu

SEQ ID NO: 248898 - RNA, 32 nt, Human
ugaugcaccacguguuuagacacagcacaguc

SEQ ID NO: 248899 - RNA, 32 nt, Human
ugaugcacgccgucaaggagguguucaaggcu

SEQ ID NO: 248900 - RNA, 32 nt, Human
ugaugcacuggguguggagcugagcagagagg

SEQ ID NO: 248901 - RNA, 32 nt, Human
ugaugcacugugcccagccauuccaggauuuu

SEQ ID NO: 248902 - RNA, 32 nt, Human
ugaugcagacaaaaucucaccuggcaggccca

SEQ ID NO: 248903 - RNA, 32 nt, Human
ugaugcagacccugccuuuuagauccacgguc

SEQ ID NO: 248904 - RNA, 32 nt, Human
ugaugcagauauuugcacaaugguuuggcaaa

SEQ ID NO: 248905 - RNA, 32 nt, Human
ugaugcagaucuuauaaauuugggaauuauaa

SEQ ID NO: 248906 - RNA, 32 nt, Human
ugaugcaggaaaccuucaggaaccuggcuucu

SEQ ID NO: 248907 - RNA, 32 nt, Human
ugaugcaggauggacucagcaccccgccgaag

SEQ ID NO: 248908 - RNA, 23 nt, Human
ugaugcaggcugcagacccaaga

SEQ ID NO: 248909 - RNA, 32 nt, Human
ugaugcaggggagcaggaaagccauccuaaac

SEQ ID NO: 248910 - RNA, 32 nt, Human
ugaugcagguacagugcgcccauuccaacugg

SEQ ID NO: 248911 - RNA, 32 nt, Human
ugaugcaggugccaccuccacccugcacuugc

SEQ ID NO: 248912 - RNA, 32 nt, Human
ugaugcagugccuaggcucacucugggaccag

SEQ ID NO: 248913 - RNA, 32 nt, Human
ugaugcaguguggaugugaagauaugguaccu

SEQ ID NO: 248914 - RNA, 21 nt, Human
ugaugcauaccuauaauccca

SEQ ID NO: 248915 - RNA, 32 nt, Human
ugaugcauaccuauaaucccagcacuugggga

SEQ ID NO: 248916 - RNA, 32 nt, Human
ugaugcauagcaccucuuuucauggaguagag

SEQ ID NO: 248917 - RNA, 21 nt, Human
ugaugcaugccuguaauccca

SEQ ID NO: 248918 - RNA, 32 nt, Human
ugaugcaugccuguaaucccagcuacucggga

SEQ ID NO: 248919 - RNA, 32 nt, Human
ugaugcaugccuguggucccaguuacuuggga

SEQ ID NO: 248920 - RNA, 32 nt, Human
ugaugcauggccaaguucaguguuuacagaua

SEQ ID NO: 248921 - RNA, 32 nt, Human
ugaugcaugggaccccaaauucucccuagacc

SEQ ID NO: 248922 - RNA, 32 nt, Human
ugaugcauguacaguggacuuuguuauuucaa

SEQ ID NO: 248923 - RNA, 32 nt, Human
ugaugcaugugagcccugcccuugggaagcuu

SEQ ID NO: 248924 - RNA, 23 nt, Human
ugaugcauuuaauuucuaaagua

SEQ ID NO: 248925 - RNA, 32 nt, Human
ugaugccaaaagcugccacugugugguauucg

SEQ ID NO: 248926 - RNA, 32 nt, Human
ugaugccaaggggcagagguuagaagugcuaa

SEQ ID NO: 248927 - RNA, 32 nt, Human
ugaugccacugcacuccagccugggcuacaga

SEQ ID NO: 248928 - RNA, 32 nt, Human
ugaugccacuggagcuggaguggcuggaugug

SEQ ID NO: 248929 - RNA, 32 nt, Human
ugaugccacuggccacuguaucugcuuuugua

SEQ ID NO: 248930 - RNA, 32 nt, Human
ugaugccacuguacugcaaccugggacagagu

SEQ ID NO: 248931 - RNA, 32 nt, Human
ugaugccagcagaaagcuauuuugauuuguga

SEQ ID NO: 248932 - RNA, 32 nt, Human
ugaugccagcugcuugggaggcugagguggga

SEQ ID NO: 248933 - RNA, 32 nt, Human
ugaugccaggaccagucccagagcaggaaugg

SEQ ID NO: 248934 - RNA, 32 nt, Human
ugaugccaggaguggagccagggugugcagga

SEQ ID NO: 248935 - RNA, 32 nt, Human
ugaugccaggaguucaagaccagccugggcaa

SEQ ID NO: 248936 - RNA, 32 nt, Human
ugaugccaucuucucccccauccccuucucug

SEQ ID NO: 248937 - RNA, 32 nt, Human
ugaugccaugaagacaguccaguagacuuggu

SEQ ID NO: 248938 - RNA, 32 nt, Human
ugaugccauugcacuccagccugggcaacaag

SEQ ID NO: 248939 - RNA, 32 nt, Human
ugaugcccacaggggagccaggcuggcugccg

SEQ ID NO: 248940 - RNA, 32 nt, Human
ugaugcccagcaggcuagagugcgauggcgcg

SEQ ID NO: 248941 - RNA, 32 nt, Human
ugaugcccaggcugaagagcccucagcauucc

SEQ ID NO: 248942 - RNA, 32 nt, Human
ugaugcccaugcuaaugguagccacccugguu

SEQ ID NO: 248943 - RNA, 32 nt, Human
ugaugccccacucaccuccugacugucccagu

SEQ ID NO: 248944 - RNA, 32 nt, Human
ugaugccccaggagaguccuaaucuagggaau

SEQ ID NO: 248945 - RNA, 32 nt, Human
ugaugccccugccucagccucccgaguagcug

SEQ ID NO: 248946 - RNA, 27 nt, Human
ugaugccccuucugccuuucucucacu

SEQ ID NO: 248947 - RNA, 32 nt, Human
ugaugcccgugccugugaagcuggcaucagcg

SEQ ID NO: 248948 - RNA, 27 nt, Human
ugaugcccuauguauucuccuucaaaa

SEQ ID NO: 248949 - RNA, 32 nt, Human
ugaugcccucggauuaucagcacuccaguucu

SEQ ID NO: 248950 - RNA, 32 nt, Human
ugaugcccugcuccacucucuggucugcccgu

SEQ ID NO: 248951 - RNA, 32 nt, Human
ugaugcccugguuucccuaucuguaaaauggg

SEQ ID NO: 248952 - RNA, 32 nt, Human
ugaugcccuuugucccauuauuuggagcagaa

SEQ ID NO: 248953 - RNA, 32 nt, Human
ugaugccguaucuuuccccugcccucagggca

SEQ ID NO: 248954 - RNA, 32 nt, Human
ugaugccuccacugcugugugccccauguugu

SEQ ID NO: 248955 - RNA, 25 nt, Human
ugaugccucuaugaaagagaggcau

SEQ ID NO: 248956 - RNA, 32 nt, Human
ugaugccuguaaucccaacacuuuguugggag

SEQ ID NO: 248957 - RNA, 32 nt, Human
ugaugccuguaaucccagcacuuugggaggcc

SEQ ID NO: 248958 - RNA, 32 nt, Human
ugaugccuucuuuggggcucugcaguuccugc

SEQ ID NO: 248959 - RNA, 32 nt, Human
ugaugccuuuaaaucauaaggcuggcuuccau

SEQ ID NO: 248960 - RNA, 32 nt, Human
ugaugccuuugacuccaggcugggcgauuccg

SEQ ID NO: 248961 - RNA, 32 nt, Human
ugaugccuuuuugugcccagacuguuuuccuc

SEQ ID NO: 248962 - RNA, 32 nt, Human
ugaugcgaaugaacuucacguucuccaaagca

SEQ ID NO: 248963 - RNA, 23 nt, Human
ugaugcgaucucagcucacugca

SEQ ID NO: 248964 - RNA, 23 nt, Human
ugaugcgaucucggcucucugca

SEQ ID NO: 248965 - RNA, 32 nt, Human
ugaugcgcacaaaugucuucugccucucucuc

SEQ ID NO: 248966 - RNA, 32 nt, Human
ugaugcgcugggaucugauugaggauaaaaag

SEQ ID NO: 248967 - RNA, 32 nt, Human
ugaugcgugccuguaaucccagcuacccagga

SEQ ID NO: 248968 - RNA, 21 nt, Human
ugaugcuaaaagaagaggcau

SEQ ID NO: 248969 - RNA, 32 nt, Human
ugaugcuccuugggugcugcugcuacucagac

SEQ ID NO: 248970 - RNA, 32 nt, Human
ugaugcucgggcagggaggagcuguacaccgu

SEQ ID NO: 248971 - RNA, 32 nt, Human
ugaugcucugggggcagcaucuccccaccgag

SEQ ID NO: 248972 - RNA, 32 nt, Human
ugaugcucuugccuugucaucaugccugaaac

SEQ ID NO: 248973 - RNA, 32 nt, Human
ugaugcucuuggagggaugaaaggaggcaacg

SEQ ID NO: 248974 - RNA, 20 nt, Human
ugaugcugaaaacagcacag

SEQ ID NO: 248975 - RNA, 32 nt, Human
ugaugcugacaucaguaagugaucucucaaca

SEQ ID NO: 248976 - RNA, 32 nt, Human
ugaugcugagucuguggaaugauacuucugaa

SEQ ID NO: 248977 - RNA, 32 nt, Human
ugaugcugcagaacugccaccuccuggucaag

SEQ ID NO: 248978 - RNA, 32 nt, Human
ugaugcugccacaggacacagagcagcaggcc

SEQ ID NO: 248979 - RNA, 31 nt, Human
ugaugcugccucuccucucuguguugucugg

SEQ ID NO: 248980 - RNA, 32 nt, Human
ugaugcugcuaugauaccacgccuuaaaaauu

SEQ ID NO: 248981 - RNA, 32 nt, Human
ugaugcugcucauuuagaaauaaaucaucugg

SEQ ID NO: 248982 - RNA, 32 nt, Human
ugaugcuggaagcaagaagaagccagggagca

SEQ ID NO: 248983 - RNA, 32 nt, Human
ugaugcuggagagguuaaggugcaauaagaau

SEQ ID NO: 248984 - RNA, 32 nt, Human
ugaugcuggaugaccuuggccugacccugguc

SEQ ID NO: 248985 - RNA, 32 nt, Human
ugaugcuggcccggaaggcagaaagaggcagc

SEQ ID NO: 248986 - RNA, 32 nt, Human
ugaugcugggggcagagacagaggagaagcug

SEQ ID NO: 248987 - RNA, 22 nt, Human
ugaugcuguauaaauuggauua

SEQ ID NO: 248988 - RNA, 32 nt, Human
ugaugcugucagccacagcuuccugccguaga

SEQ ID NO: 248989 - RNA, 32 nt, Human
ugaugcugucugcagugaaggcucgucuagaa

SEQ ID NO: 248990 - RNA, 32 nt, Human
ugaugcugugaccucaccucucuggcuuuggg

SEQ ID NO: 248991 - RNA, 32 nt, Human
ugaugcugugugacccacugggcacucuggug

SEQ ID NO: 248992 - RNA, 32 nt, Human
ugaugcuuaagccuggugagguuuguacucua

SEQ ID NO: 248993 - RNA, 32 nt, Human
ugaugcuuaauggagaacagagaagaucuugu

SEQ ID NO: 248994 - RNA, 32 nt, Human
ugaugcuuauccuuucaucugugugauuguuu

SEQ ID NO: 248995 - RNA, 20 nt, Human
ugaugcuuauucaaaaggca

SEQ ID NO: 248996 - RNA, 32 nt, Human
ugaugcuucaacaacauggauucuacaaagug

SEQ ID NO: 248997 - RNA, 22 nt, Human
ugaugcuucuaaagaaagccau

SEQ ID NO: 248998 - RNA, 32 nt, Human
ugaugcuucugcccuggccugcucuggguggu

SEQ ID NO: 248999 - RNA, 32 nt, Human
ugaugcuugggguguuccguguugacucccag

SEQ ID NO: 249000 - RNA, 32 nt, Human
ugauggaaaagauauaugacugcuucaugaca

SEQ ID NO: 249001 - RNA, 32 nt, Human
ugauggaaacacacaaacaccaagcuaauaau

SEQ ID NO: 249002 - RNA, 32 nt, Human
ugauggaacagcuugcaaggcuugugagcagu

SEQ ID NO: 249003 - RNA, 32 nt, Human
ugauggaacuuaacagcaaggccagaugcaca

SEQ ID NO: 249004 - RNA, 32 nt, Human
ugauggaacuuccauucuguggggaagagacu

SEQ ID NO: 249005 - RNA, 32 nt, Human
ugauggaagaggcggagguggaggcgaccgag

SEQ ID NO: 249006 - RNA, 19 nt, Human
ugauggaagaugagcccca

SEQ ID NO: 249007 - RNA, 32 nt, Human
ugauggaagccuugcuuucacaucagcagggg

SEQ ID NO: 249008 - RNA, 32 nt, Human
ugauggaaggaagagaguagggccagugaagg

SEQ ID NO: 249009 - RNA, 32 nt, Human
ugauggaaggaggaaguagaaagugguaaaga

SEQ ID NO: 249010 - RNA, 32 nt, Human
ugauggaaucagauuuuaacagcucucuucaa

SEQ ID NO: 249011 - RNA, 32 nt, Human
ugauggacaaaguggcacauccaguggagcgg

SEQ ID NO: 249012 - RNA, 32 nt, Human
ugauggacacccuugggucugcaaggagccag

SEQ ID NO: 249013 - RNA, 32 nt, Human
ugauggacacugcaccagcuuccuucagguuc

SEQ ID NO: 249014 - RNA, 32 nt, Human
ugauggacggauggcuacauggaugugaugga

SEQ ID NO: 249015 - RNA, 32 nt, Human
ugauggacgucccaccgggcaggaugaaggca

SEQ ID NO: 249016 - RNA, 32 nt, Human
ugauggacuccacccuuuacuaccuugaacuu

SEQ ID NO: 249017 - RNA, 32 nt, Human
ugauggagaagguguuaauaaugcagauuaga

SEQ ID NO: 249018 - RNA, 32 nt, Human
ugauggagacccagcagagggaggcagaaggg

SEQ ID NO: 249019 - RNA, 32 nt, Human
ugauggagaggacagagcaggggcuccagcac

SEQ ID NO: 249020 - RNA, 32 nt, Human
ugauggagcagucuguaagcacgaucaaauaa

SEQ ID NO: 249021 - RNA, 32 nt, Human
ugauggagcucagcccuccaccuccacagcuc

SEQ ID NO: 249022 - RNA, 32 nt, Human
ugauggaggaaggauggauuugguuaccagau

SEQ ID NO: 249023 - RNA, 32 nt, Human
ugauggaggaauuacguuauacauucauauuu

SEQ ID NO: 249024 - RNA, 32 nt, Human
ugauggaggagggagaugccuggggaggggcu

SEQ ID NO: 249025 - RNA, 32 nt, Human
ugauggagggagacaccucuucauagacggca

SEQ ID NO: 249026 - RNA, 32 nt, Human
ugauggagggcggccgccagcccagggccugc

SEQ ID NO: 249027 - RNA, 32 nt, Human
ugauggaggggagaagggagggcaaagaaguu

SEQ ID NO: 249028 - RNA, 32 nt, Human
ugauggagucuggccaaggcccuccugagccu

SEQ ID NO: 249029 - RNA, 32 nt, Human
ugauggaucaaaucacuuuccucagaacaaaa

SEQ ID NO: 249030 - RNA, 32 nt, Human
ugauggaucucaguacugagcugggcauuucu

SEQ ID NO: 249031 - RNA, 19 nt, Human
ugauggaugagcugguaga

SEQ ID NO: 249032 - RNA, 32 nt, Human
ugauggaugcagaggagcgccugacauggaug

SEQ ID NO: 249033 - RNA, 32 nt, Human
ugauggaugcauggggcucugggggaaugcug

SEQ ID NO: 249034 - RNA, 32 nt, Human
ugauggaugggucucaucucaauuauagaagg

SEQ ID NO: 249035 - RNA, 32 nt, Human
ugauggauuaacauauagccuuuguuuucuaa

SEQ ID NO: 249036 - RNA, 32 nt, Human
ugauggcaaaccugccgcagguggccaccccg

SEQ ID NO: 249037 - RNA, 32 nt, Human
ugauggcaacacugaaggaacaguuacccugc

SEQ ID NO: 249038 - RNA, 22 nt, Human
ugauggcaagaucaccaaucca

SEQ ID NO: 249039 - RNA, 32 nt, Human
ugauggcaccacugcacuccagccugggagac

SEQ ID NO: 249040 - RNA, 32 nt, Human
ugauggcaccacugcacuccagccugggcaac

SEQ ID NO: 249041 - RNA, 32 nt, Human
ugauggcaccacugcacuucagccugggugac

SEQ ID NO: 249042 - RNA, 32 nt, Human
ugauggcaccacuguacuccagccugggugac

SEQ ID NO: 249043 - RNA, 32 nt, Human
ugauggcaccgcugcacuccaaccugggcaac

SEQ ID NO: 249044 - RNA, 32 nt, Human
ugauggcaccugcuggaggaaaggggcacggc

SEQ ID NO: 249045 - RNA, 32 nt, Human
ugauggcacugcugcacuccagccugcgggac

SEQ ID NO: 249046 - RNA, 32 nt, Human
ugauggcaggagacuguuucacacacaggaga

SEQ ID NO: 249047 - RNA, 32 nt, Human
ugauggcagugcuugacggggugcagggaaca

SEQ ID NO: 249048 - RNA, 25 nt, Human
ugauggcaucacaugaaagcauuga

SEQ ID NO: 249049 - RNA, 32 nt, Human
ugauggcaucugcagacucuguuuccaaauaa

SEQ ID NO: 249050 - RNA, 32 nt, Human
ugauggccagcagugaggaaucuguguguucu

SEQ ID NO: 249051 - RNA, 32 nt, Human
ugauggccaggggaaagagcaucguauaggcu

SEQ ID NO: 249052 - RNA, 27 nt, Human
ugauggccaggugcuucagccuggugu

SEQ ID NO: 249053 - RNA, 32 nt, Human
ugauggcccugagcacuggccucuuccauggg

SEQ ID NO: 249054 - RNA, 32 nt, Human
ugauggccugugagccacaggccacaucagga

SEQ ID NO: 249055 - RNA, 32 nt, Human
ugauggcgccacugcacuccagucugggcaac

SEQ ID NO: 249056 - RNA, 32 nt, Human
ugauggcgccacugcacuucagccuuggagac

SEQ ID NO: 249057 - RNA, 32 nt, Human
ugauggcgccacuucacugcagccuggguggc

SEQ ID NO: 249058 - RNA, 32 nt, Human
ugauggcgguggagguggugguuguaguguga

SEQ ID NO: 249059 - RNA, 32 nt, Human
ugauggcgucaguguucuccagccugggcaac

SEQ ID NO: 249060 - RNA, 32 nt, Human
ugauggcuacagccauaccuugagucaaggca

SEQ ID NO: 249061 - RNA, 23 nt, Human
ugauggcucaggguggucaucca

SEQ ID NO: 249062 - RNA, 32 nt, Human
ugauggcucaugggagugcaggggacauugau

SEQ ID NO: 249063 - RNA, 32 nt, Human
ugauggcucauuuacacucagcugcucugcaa

SEQ ID NO: 249064 - RNA, 32 nt, Human
ugauggcucauuuccacccaaccccaggauuu

SEQ ID NO: 249065 - RNA, 32 nt, Human
ugauggcucauuuccacccagccccaggauuu

SEQ ID NO: 249066 - RNA, 22 nt, Human
ugauggcucccagcuucaucca

SEQ ID NO: 249067 - RNA, 32 nt, Human
ugauggcucugggaucugaaaucuuuccuucc

SEQ ID NO: 249068 - RNA, 32 nt, Human
ugauggcugggcugagcagccugagcagcggc

SEQ ID NO: 249069 - RNA, 32 nt, Human
ugauggcugugagggaggaaugaggauagaca

SEQ ID NO: 249070 - RNA, 32 nt, Human
ugauggcuguguuuagagaaguuuagaccuaa

SEQ ID NO: 249071 - RNA, 32 nt, Human
ugauggcuuauggaaggcuguuaaauuaauau

SEQ ID NO: 249072 - RNA, 32 nt, Human
ugauggcuuuacucacaugccuggcaucuuga

SEQ ID NO: 249073 - RNA, 23 nt, Human
ugaugggaacaagggcccgccca

SEQ ID NO: 249074 - RNA, 32 nt, Human
ugaugggaacggcagaggcuggcaggugacug

SEQ ID NO: 249075 - RNA, 32 nt, Human
ugaugggaagauuacagucugagggccaaacg

SEQ ID NO: 249076 - RNA, 32 nt, Human
ugaugggaagccggggaaggccaggguggaag

SEQ ID NO: 249077 - RNA, 21 nt, Human
ugaugggaagggcccagcgaa

SEQ ID NO: 249078 - RNA, 32 nt, Human
ugaugggacagaauuggauacauacaccagca

SEQ ID NO: 249079 - RNA, 21 nt, Human
ugaugggacgguacugagaua

SEQ ID NO: 249080 - RNA, 32 nt, Human
ugaugggacucuccucuuucuccuggaaccug

SEQ ID NO: 249081 - RNA, 32 nt, Human
ugaugggacugaggacauggaugagaaggagg

SEQ ID NO: 249082 - RNA, 32 nt, Human
ugaugggagagggugaggaaaucagcugaaug

SEQ ID NO: 249083 - RNA, 32 nt, Human
ugaugggaggagagacgaggcauucgggccgg

SEQ ID NO: 249084 - RNA, 32 nt, Human
ugaugggagugggacugccaggaggaggagag

SEQ ID NO: 249085 - RNA, 32 nt, Human
ugaugggauccagcaauguacaagaaagaggc

SEQ ID NO: 249086 - RNA, 32 nt, Human
ugaugggaucuauccucuuccucucuccaugc

SEQ ID NO: 249087 - RNA, 32 nt, Human
ugaugggauuacaggcaugagccaccgugccc

SEQ ID NO: 249088 - RNA, 32 nt, Human
ugaugggcaaaccaaacuccuacugagguguc

SEQ ID NO: 249089 - RNA, 32 nt, Human
ugaugggccccuguaaucccagcuacuuggga

SEQ ID NO: 249090 - RNA, 32 nt, Human
ugaugggcccucacgccugaagcgggcaggaa

SEQ ID NO: 249091 - RNA, 32 nt, Human
ugaugggcuucugggcccagccccagacaaac

SEQ ID NO: 249092 - RNA, 32 nt, Human
ugaugggcuuucucccacccuggagucuuccg

SEQ ID NO: 249093 - RNA, 32 nt, Human
ugauggggaagaaaggaagucggagggcucag

SEQ ID NO: 249094 - RNA, 32 nt, Human
ugauggggagaaggugaggaagggucacccuc

SEQ ID NO: 249095 - RNA, 32 nt, Human
ugauggggagagaaguguugcaucgcggauag

SEQ ID NO: 249096 - RNA, 32 nt, Human
ugauggggaggagggauuaaaagagucaggaa

SEQ ID NO: 249097 - RNA, 32 nt, Human
ugauggggccuggagugcaggaggggcagcuc

SEQ ID NO: 249098 - RNA, 19 nt, Human
ugauggggccuuugaggca

SEQ ID NO: 249099 - RNA, 32 nt, Human
ugauggggcugaacuggaaggagccagaaaag

SEQ ID NO: 249100 - RNA, 32 nt, Human
ugauggggcuugaugcaguagggaagagacga

SEQ ID NO: 249101 - RNA, 32 nt, Human
ugaugggggaggaggagggaaauuuuagcggg

SEQ ID NO: 249102 - RNA, 32 nt, Human
ugaugggggaggcaagagagggcaaagaguaa

SEQ ID NO: 249103 - RNA, 32 nt, Human
ugaugggggagguuuggggugcggugaggggg

SEQ ID NO: 249104 - RNA, 32 nt, Human
ugaugggggauucaguucuggaaaagaauuug

SEQ ID NO: 249105 - RNA, 32 nt, Human
ugaugggggugaggagacuguugggcccuuau

SEQ ID NO: 249106 - RNA, 32 nt, Human
ugaugggguaugaaccugugucuccuuuguau

SEQ ID NO: 249107 - RNA, 32 nt, Human
ugaugggugacaaagugucacaggugugaugc

SEQ ID NO: 249108 - RNA, 32 nt, Human
ugaugggugccuguaaucccagcuacguggga

SEQ ID NO: 249109 - RNA, 32 nt, Human
ugauggguucccaggggccauuggagucccug

SEQ ID NO: 249110 - RNA, 32 nt, Human
ugauggguugacaggugcagcaaaccaccaug

SEQ ID NO: 249111 - RNA, 32 nt, Human
ugauggguugccccacccucuggcaggcguaa

SEQ ID NO: 249112 - RNA, 32 nt, Human
ugauggguuuaugauucaguuuauacugacuu

SEQ ID NO: 249113 - RNA, 27 nt, Human
ugaugguacaaggacgaguucagcagc

SEQ ID NO: 249114 - RNA, 32 nt, Human
ugaugguaccacugcacuccagccugggugac

SEQ ID NO: 249115 - RNA, 32 nt, Human
ugaugguaccccugcacuccagcccagguuac

SEQ ID NO: 249116 - RNA, 32 nt, Human
ugaugguaggggacaggaccaugaugggggug

SEQ ID NO: 249117 - RNA, 32 nt, Human
ugaugguauagaacacuguauuagagacaugg

SEQ ID NO: 249118 - RNA, 32 nt, Human
ugauggucagacacaaacaaacaagcuaggug

SEQ ID NO: 249119 - RNA, 32 nt, Human
ugauggucagccagggccgggauggauacccg

SEQ ID NO: 249120 - RNA, 32 nt, Human
ugauggucauuuuucuaaacagaggcccugcu

SEQ ID NO: 249121 - RNA, 32 nt, Human
ugaugguccagaccaggucucuggaagaauug

SEQ ID NO: 249122 - RNA, 32 nt, Human
ugauggucuuggauugucugaccucaguagcu

SEQ ID NO: 249123 - RNA, 21 nt, Human
ugauggugacagcagcaguga

SEQ ID NO: 249124 - RNA, 32 nt, Human
ugauggugacuuccucgccucucccaccccau

SEQ ID NO: 249125 - RNA, 32 nt, Human
ugauggugccacuacacuccagccuggguaaa

SEQ ID NO: 249126 - RNA, 32 nt, Human
ugauggugccacugcacuccagccugggggac

SEQ ID NO: 249127 - RNA, 32 nt, Human
ugauggugccacugcacuccagccuggguggc

SEQ ID NO: 249128 - RNA, 32 nt, Human
ugauggugccacugcacuccaguauggaugac

SEQ ID NO: 249129 - RNA, 32 nt, Human
ugauggugccacugcauuccagccugggugac

SEQ ID NO: 249130 - RNA, 32 nt, Human
ugauggugccugcugguuugacguggagcuau

SEQ ID NO: 249131 - RNA, 32 nt, Human
ugauggugcucugcaucagugguucagagccu

SEQ ID NO: 249132 - RNA, 32 nt, Human
ugaugguggcccugaaccucauucugguuccc

SEQ ID NO: 249133 - RNA, 32 nt, Human
ugaugguggcugucccgggaacuuggucgucu

SEQ ID NO: 249134 - RNA, 32 nt, Human
ugaugguggggaggggaggauggggaagcuuu

SEQ ID NO: 249135 - RNA, 32 nt, Human
ugaugguguccccagggcugagcaccacccca

SEQ ID NO: 249136 - RNA, 32 nt, Human
ugaugguguugaagcaggucacugcugguuua

SEQ ID NO: 249137 - RNA, 32 nt, Human
ugaugguucagguugucugucuuacuaccuac

SEQ ID NO: 249138 - RNA, 32 nt, Human
ugaugguucagguugucugucuuacuaucuac

SEQ ID NO: 249139 - RNA, 32 nt, Human
ugaugguuccagcaagccugcggugcuggcgg

SEQ ID NO: 249140 - RNA, 32 nt, Human
ugaugguucucucuugauuggcugccagaauu

SEQ ID NO: 249141 - RNA, 31 nt, Human
ugauguaaggacuucuuuuccuuuggguaga

SEQ ID NO: 249142 - RNA, 32 nt, Human
ugauguaauauuccaggaugcugcugcagguc

SEQ ID NO: 249143 - RNA, 32 nt, Human
ugauguacauuugagauuuuuggcaauuauga

SEQ ID NO: 249144 - RNA, 32 nt, Human
ugauguaccagcaagccagaaaagcaagccag

SEQ ID NO: 249145 - RNA, 31 nt, Human
ugauguagaugaaccuguucacuggaaaauu

SEQ ID NO: 249146 - RNA, 21 nt, Human
ugauguaggaggggcacacag

SEQ ID NO: 249147 - RNA, 32 nt, Human
ugauguaucugggucuccucuggagcacucug

SEQ ID NO: 249148 - RNA, 32 nt, Human
ugauguaugucaggaggccacagggagcggag

SEQ ID NO: 249149 - RNA, 31 nt, Human
ugauguauguuuggaaagaugugugaauacu

SEQ ID NO: 249150 - RNA, 32 nt, Human
ugauguauguuuggaaagaugugugaauacuu

SEQ ID NO: 249151 - RNA, 32 nt, Human
ugauguauucaugucagcaccugagucacagc

SEQ ID NO: 249152 - RNA, 32 nt, Human
ugauguauugaauaucaagauaaagaaaaaug

SEQ ID NO: 249153 - RNA, 32 nt, Human
ugauguauugcuagagccaggagugccuuggg

SEQ ID NO: 249154 - RNA, 19 nt, Human
ugaugucaaaaacuucaau

SEQ ID NO: 249155 - RNA, 32 nt, Human
ugaugucaaagcuuccacuggaaaauccagua

SEQ ID NO: 249156 - RNA, 32 nt, Human
ugaugucaagguccccaaagaccagguuaagu

SEQ ID NO: 249157 - RNA, 32 nt, Human
ugaugucaauugguucuugucuugagucgacu

SEQ ID NO: 249158 - RNA, 31 nt, Human
ugaugucacagcugcaggugguacagagcca

SEQ ID NO: 249159 - RNA, 32 nt, Human
ugaugucagaaacuuuaaauuuuuaaaaggcu

SEQ ID NO: 249160 - RNA, 32 nt, Human
ugaugucaggaguucaagaccagccuggccaa

SEQ ID NO: 249161 - RNA, 32 nt, Human
ugaugucaggcuguggccauagguagcaugag

SEQ ID NO: 249162 - RNA, 32 nt, Human
ugaugucaucauuuuuggcaggauuuacauag

SEQ ID NO: 249163 - RNA, 32 nt, Human
ugaugucauuucuuucaaguugcccacaguau

SEQ ID NO: 249164 - RNA, 32 nt, Human
ugauguccauaggcucaaaguaaaagaaugga

SEQ ID NO: 249165 - RNA, 32 nt, Human
ugaugucccauuauuauccacccugagccacc

SEQ ID NO: 249166 - RNA, 29 nt, Human
ugaugucggcugcuagcuuccuucagaug

SEQ ID NO: 249167 - RNA, 32 nt, Human
ugaugucuccccugagccugagguuugguuca

SEQ ID NO: 249168 - RNA, 32 nt, Human
ugaugucugggaaccugaucaccagcuucucu

SEQ ID NO: 249169 - RNA, 32 nt, Human
ugaugucuggguacacggcagucuuagagaag

SEQ ID NO: 249170 - RNA, 32 nt, Human
ugaugucuguaaccacuggggagcacugccaa

SEQ ID NO: 249171 - RNA, 32 nt, Human
ugaugucugucuggcugaggauuucaagccug

SEQ ID NO: 249172 - RNA, 32 nt, Human
ugaugugaccgggaucccacucugauugcauc

SEQ ID NO: 249173 - RNA, 32 nt, Human
ugaugugagaggaucacuugagccagggaggu

SEQ ID NO: 249174 - RNA, 32 nt, Human
ugaugugagagugcacaugacugugugcacau

SEQ ID NO: 249175 - RNA, 32 nt, Human
ugaugugagcaaguuaccuauaccugaauaug

SEQ ID NO: 249176 - RNA, 32 nt, Human
ugaugugagcaucuccuccuuaucccucgaug

SEQ ID NO: 249177 - RNA, 32 nt, Human
ugaugugaggccauggaugcaggcaguaaggu

SEQ ID NO: 249178 - RNA, 32 nt, Human
ugaugugauagagugacagagcugaaaaacuc

SEQ ID NO: 249179 - RNA, 32 nt, Human
ugaugugauugcagcuccugagguggccugcu

SEQ ID NO: 249180 - RNA, 32 nt, Human
ugaugugcaaaguguuuucucacuggauuugc

SEQ ID NO: 249181 - RNA, 32 nt, Human
ugaugugcaggcacagaagaaaggcacagcuc

SEQ ID NO: 249182 - RNA, 24 nt, Human
ugaugugcccacuucggccuucca

SEQ ID NO: 249183 - RNA, 32 nt, Human
ugaugugccucggggcccucuugccuuggagc

SEQ ID NO: 249184 - RNA, 24 nt, Human
ugaugugccugcuucagccuccca

SEQ ID NO: 249185 - RNA, 32 nt, Human
ugaugugccuugguguauuuuuccuugguuuc

SEQ ID NO: 249186 - RNA, 31 nt, Human
ugaugugcgcuucucccgcacuaagggaaac

SEQ ID NO: 249187 - RNA, 32 nt, Human
ugaugugcugagccaccauuucagacugaguc

SEQ ID NO: 249188 - RNA, 32 nt, Human
ugauguggaaagacaggagguguggggaagga

SEQ ID NO: 249189 - RNA, 32 nt, Human
ugauguggaaggaggggaagcacugugaccuc

SEQ ID NO: 249190 - RNA, 32 nt, Human
ugaugugggaaaccuucaggaaccuggccacu

SEQ ID NO: 249191 - RNA, 19 nt, Human
ugaugugggcuggggccag

SEQ ID NO: 249192 - RNA, 32 nt, Human
ugaugugguacgucccuccacccccggaccca

SEQ ID NO: 249193 - RNA, 32 nt, Human
ugaugugguagaguugggagguuucaggguuu

SEQ ID NO: 249194 - RNA, 32 nt, Human
ugaugugguuugcagguugcugugccugauuc

SEQ ID NO: 249195 - RNA, 32 nt, Human
ugaugugguuuucaucuuucauucuguucaag

SEQ ID NO: 249196 - RNA, 32 nt, Human
ugauguguaaacugaggcauguggagauggaa

SEQ ID NO: 249197 - RNA, 32 nt, Human
ugauguguaauacggaauuacuucacaguagc

SEQ ID NO: 249198 - RNA, 32 nt, Human
ugauguguagacugaagagcuagcagccugca

SEQ ID NO: 249199 - RNA, 32 nt, Human
ugauguguagucuugugguagauuugugcaua

SEQ ID NO: 249200 - RNA, 32 nt, Human
ugauguguccccaucucuggcagagccucugc

SEQ ID NO: 249201 - RNA, 32 nt, Human
ugaugugugaauguccucuaggaacaagccuu

SEQ ID NO: 249202 - RNA, 32 nt, Human
ugaugugugccuguaaucccaccuacuuggga

SEQ ID NO: 249203 - RNA, 32 nt, Human
ugauguguguuauaacccaucugagcccccug

SEQ ID NO: 249204 - RNA, 32 nt, Human
ugauguguguuauaacccaucugagccuccug

SEQ ID NO: 249205 - RNA, 32 nt, Human
ugauguguuacccaggaugcagcaggugugug

SEQ ID NO: 249206 - RNA, 32 nt, Human
ugauguguuguucacuuguuaguaacugauuu

SEQ ID NO: 249207 - RNA, 32 nt, Human
ugauguuagcccagaagcuccugcucuggcca

SEQ ID NO: 249208 - RNA, 24 nt, Human
ugauguuaguagcuucaauuuaca

SEQ ID NO: 249209 - RNA, 32 nt, Human
ugauguuauaaauagagaaaaaguguguguga

SEQ ID NO: 249210 - RNA, 32 nt, Human
ugauguuaucuagccuagaaaugacacagaac

SEQ ID NO: 249211 - RNA, 32 nt, Human
ugauguuaucugcaauacccuagaaggauguu

SEQ ID NO: 249212 - RNA, 32 nt, Human
ugauguuauuagccugcaguuggcuagguuuu

SEQ ID NO: 249213 - RNA, 32 nt, Human
ugauguucggcucacauauuguuugcagacac

SEQ ID NO: 249214 - RNA, 32 nt, Human
ugauguucgugccucagagcuaaaacuaugag

SEQ ID NO: 249215 - RNA, 32 nt, Human
ugauguucuaaggcucugagagucuagauucu

SEQ ID NO: 249216 - RNA, 32 nt, Human
ugauguucuugcuuuguguuguguucugguaa

SEQ ID NO: 249217 - RNA, 32 nt, Human
ugauguugagcaccugcugaauacugagcacu

SEQ ID NO: 249218 - RNA, 32 nt, Human
ugauguugcaacuuuuggguucuuuuaaacug

SEQ ID NO: 249219 - RNA, 32 nt, Human
ugauguugcccaggcuagagugcaguggcaca

SEQ ID NO: 249220 - RNA, 32 nt, Human
ugauguuggcuuccuguaggaggcuggcgggc

SEQ ID NO: 249221 - RNA, 32 nt, Human
ugauguuggcuugucuccagaaugacaaaaag

SEQ ID NO: 249222 - RNA, 32 nt, Human
ugauguuggggaagggacauggagggagguga

SEQ ID NO: 249223 - RNA, 31 nt, Human
ugauguuggguggaugaaucugugagugaau

SEQ ID NO: 249224 - RNA, 32 nt, Human
ugauguuguaaucuaaacaagugccuuauguu

SEQ ID NO: 249225 - RNA, 32 nt, Human
ugauguuguccguggccagcucuccccaggga

SEQ ID NO: 249226 - RNA, 32 nt, Human
ugauguuuaauuuugcacacuuauuuguaaug

SEQ ID NO: 249227 - RNA, 31 nt, Human
ugauguuuacucucugggcacuguuguaaga

SEQ ID NO: 249228 - RNA, 32 nt, Human
ugauguuuccaaugcugaaugccuguuagcau

SEQ ID NO: 249229 - RNA, 32 nt, Human
ugauguuuuguauauuuuaauagacugauagg

SEQ ID NO: 249230 - RNA, 32 nt, Human
ugauguuuuuaagaggugauucagaaugauag

SEQ ID NO: 249231 - RNA, 32 nt, Human
ugauuaaaaagaauaaacacaguguuuccuga

SEQ ID NO: 249232 - RNA, 32 nt, Human
ugauuaaaaguaacagugguccguugauguug

SEQ ID NO: 249233 - RNA, 32 nt, Human
ugauuaaacauaaaucacauucuuacauugcu

SEQ ID NO: 249234 - RNA, 32 nt, Human
ugauuaaaccaaggcacuccagccugggugac

SEQ ID NO: 249235 - RNA, 32 nt, Human
ugauuaaaggugccccugucuccaguuuuucu

SEQ ID NO: 249236 - RNA, 32 nt, Human
ugauuaaaguaucuccgcuuucuugggaggga

SEQ ID NO: 249237 - RNA, 32 nt, Human
ugauuaaauacugugccuuaggagacuggaag

SEQ ID NO: 249238 - RNA, 32 nt, Human
ugauuaacauucucuuuggaacuagguaagag

SEQ ID NO: 249239 - RNA, 32 nt, Human
ugauuaaccugccucgacugugcugagggcaa

SEQ ID NO: 249240 - RNA, 32 nt, Human
ugauuaacuuggcaaggcuuccuuccguguuu

SEQ ID NO: 249241 - RNA, 32 nt, Human
ugauuaagucuuauaugcagagaggacagagc

SEQ ID NO: 249242 - RNA, 32 nt, Human
ugauuaagugaaccaaacuaguucucagaauu

SEQ ID NO: 249243 - RNA, 32 nt, Human
ugauuaaucuggggaagaacagagccagggaa

SEQ ID NO: 249244 - RNA, 32 nt, Human
ugauuaauugaacuggcuaguauuccaucuca

SEQ ID NO: 249245 - RNA, 32 nt, Human
ugauuaauugcccggcaucacaguuuacuaga

SEQ ID NO: 249246 - RNA, 32 nt, Human
ugauuacaaacagucuccacauugcaguucca

SEQ ID NO: 249247 - RNA, 32 nt, Human
ugauuacaauugccaguagaguuguuguuugg

SEQ ID NO: 249248 - RNA, 32 nt, Human
ugauuacacaugcacaccaacaugcaugccgc

SEQ ID NO: 249249 - RNA, 32 nt, Human
ugauuacaccacugcacuucagucugugugac

SEQ ID NO: 249250 - RNA, 32 nt, Human
ugauuacaccacugcacuugagccugggcagc

SEQ ID NO: 249251 - RNA, 32 nt, Human
ugauuacaccccugcacuccagccugggcggc

SEQ ID NO: 249252 - RNA, 32 nt, Human
ugauuacacggccuggggucucugccuucucc

SEQ ID NO: 249253 - RNA, 32 nt, Human
ugauuacagaauaacugguacacuucauuugu

SEQ ID NO: 249254 - RNA, 32 nt, Human
ugauuacaggcaaugagagcugugagugggga

SEQ ID NO: 249255 - RNA, 32 nt, Human
ugauuacaggcacgugccaccaugcccacaua

SEQ ID NO: 249256 - RNA, 32 nt, Human
ugauuacaggccucagccaccaugcccagccc

SEQ ID NO: 249257 - RNA, 32 nt, Human
ugauuacaggcgugcaccaccacgcccggcua

SEQ ID NO: 249258 - RNA, 32 nt, Human
ugauuacaggugugaaccaccaugcccagcca

SEQ ID NO: 249259 - RNA, 32 nt, Human
ugauuacaucaucuuucugacaucauuguuaa

SEQ ID NO: 249260 - RNA, 32 nt, Human
ugauuaccucacugcauuccagccugggcaac

SEQ ID NO: 249261 - RNA, 32 nt, Human
ugauuaccucacugcauuccggccugggcaac

SEQ ID NO: 249262 - RNA, 32 nt, Human
ugauuacgccacugcauuguagccugggcaac

SEQ ID NO: 249263 - RNA, 32 nt, Human
ugauuacucacaccuggugauuucugcucaau

SEQ ID NO: 249264 - RNA, 32 nt, Human
ugauuacucacucaccagccucccucuuuugu

SEQ ID NO: 249265 - RNA, 32 nt, Human
ugauuacuccacugcacuccagccugggcaac

SEQ ID NO: 249266 - RNA, 32 nt, Human
ugauuacuguguaucaguucuuuguuaggcau

SEQ ID NO: 249267 - RNA, 32 nt, Human
ugauuagaaugcuguucgaguauaccuacccu

SEQ ID NO: 249268 - RNA, 32 nt, Human
ugauuagcaaagcaggccuuucacauuuacag

SEQ ID NO: 249269 - RNA, 32 nt, Human
ugauuagcagaauauaguuuggaguuuggcuu

SEQ ID NO: 249270 - RNA, 32 nt, Human
ugauuagccugaggaccuuccugaggaggaau

SEQ ID NO: 249271 - RNA, 32 nt, Human
ugauuaggaaaacucauuuucuuuucaagccu

SEQ ID NO: 249272 - RNA, 32 nt, Human
ugauuagugaugucugccacgggcagggaugg

SEQ ID NO: 249273 - RNA, 32 nt, Human
ugauuaguuguuuagagaaugagaaauggaac

SEQ ID NO: 249274 - RNA, 32 nt, Human
ugauuauaccacugcacuccagccugggugac

SEQ ID NO: 249275 - RNA, 32 nt, Human
ugauuauacucacgaggaauggccuuucuaca

SEQ ID NO: 249276 - RNA, 32 nt, Human
ugauuauagcugugaaccaccaugcccggcca

SEQ ID NO: 249277 - RNA, 32 nt, Human
ugauuauauuagccaaauuuaauuaccagguu

SEQ ID NO: 249278 - RNA, 32 nt, Human
ugauuauccaaagaauugaaacuccuagcaca

SEQ ID NO: 249279 - RNA, 32 nt, Human
ugauuaucucaaaucaaaucacuuugauggag

SEQ ID NO: 249280 - RNA, 32 nt, Human
ugauuaucucagaaauaaaaagagaugcagca

SEQ ID NO: 249281 - RNA, 32 nt, Human
ugauuaucuucagcccaggcuuuugcuagaug

SEQ ID NO: 249282 - RNA, 32 nt, Human
ugauuaugaaaggugaaguugagugagaggag

SEQ ID NO: 249283 - RNA, 32 nt, Human
ugauuaugaucucaucaucaucgguggugguu

SEQ ID NO: 249284 - RNA, 32 nt, Human
ugauuaugccacugcuuuccagccugggcaac

SEQ ID NO: 249285 - RNA, 32 nt, Human
ugauuaugccauuacacuccagccugggcaac

SEQ ID NO: 249286 - RNA, 32 nt, Human
ugauuaugccauugcacuccagccugggugac

SEQ ID NO: 249287 - RNA, 32 nt, Human
ugauuaugccccugcacaucagccugggugau

SEQ ID NO: 249288 - RNA, 32 nt, Human
ugauuaugcugcugcacuccagccuggacaac

SEQ ID NO: 249289 - RNA, 32 nt, Human
ugauuauguagcaaaauacaugacauuuauuu

SEQ ID NO: 249290 - RNA, 32 nt, Human
ugauuauguuagaaggaaaacauugcucgugu

SEQ ID NO: 249291 - RNA, 32 nt, Human
ugauuauguucucuguaaaacucuucaagacu

SEQ ID NO: 249292 - RNA, 32 nt, Human
ugauuauucugugccauuuacaguuucuaaua

SEQ ID NO: 249293 - RNA, 32 nt, Human
ugauuauuucagguugaaaaguagaaguucca

SEQ ID NO: 249294 - RNA, 32 nt, Human
ugauuauuugcagcugcgauggauguuuacag

SEQ ID NO: 249295 - RNA, 32 nt, Human
ugauucaaacaacauguagucacucagacaua

SEQ ID NO: 249296 - RNA, 18 nt, Human
ugauucaaacuguucccu

SEQ ID NO: 249297 - RNA, 21 nt, Human
ugauucaagugagccaggaaa

SEQ ID NO: 249298 - RNA, 32 nt, Human
ugauucaaucugcaugccagccuggaggagga

SEQ ID NO: 249299 - RNA, 32 nt, Human
ugauucaauuccaccuagcaagaaggagauuc

SEQ ID NO: 249300 - RNA, 32 nt, Human
ugauucacagcacugcacugcagccuggguga

SEQ ID NO: 249301 - RNA, 32 nt, Human
ugauucacagcccaggcaggacagagcagauc

SEQ ID NO: 249302 - RNA, 32 nt, Human
ugauucacaggcacuuuguaguuugagaagca

SEQ ID NO: 249303 - RNA, 21 nt, Human
ugauucacgccuguaauccca

SEQ ID NO: 249304 - RNA, 32 nt, Human
ugauucacgccuguaaucccagaacucuggga

SEQ ID NO: 249305 - RNA, 32 nt, Human
ugauucacgccuguaaucccagcacuuugaga

SEQ ID NO: 249306 - RNA, 32 nt, Human
ugauucacgccuguaaucccagcacuuuggga

SEQ ID NO: 249307 - RNA, 32 nt, Human
ugauucacugcacuuggaaccagaugauguug

SEQ ID NO: 249308 - RNA, 21 nt, Human
ugauucagaaacaaaacaaua

SEQ ID NO: 249309 - RNA, 32 nt, Human
ugauucagucacacaguggcccugugagcucu

SEQ ID NO: 249310 - RNA, 32 nt, Human
ugauucagugguuuguuccuucuuauuucuga

SEQ ID NO: 249311 - RNA, 32 nt, Human
ugauucauauccucuuuccuuuauggagaccc

SEQ ID NO: 249312 - RNA, 32 nt, Human
ugauucauccccaggcuggagucaggcucagc

SEQ ID NO: 249313 - RNA, 32 nt, Human
ugauucaugccugaaaucccacuacuuuggga

SEQ ID NO: 249314 - RNA, 32 nt, Human
ugauucauggcucugugaauuugaggugaaug

SEQ ID NO: 249315 - RNA, 32 nt, Human
ugauucauguucaucaauaccugcugagagua

SEQ ID NO: 249316 - RNA, 32 nt, Human
ugauuccaagcaaaaaccagacaauguaauaa

SEQ ID NO: 249317 - RNA, 32 nt, Human
ugauuccaccauugcacuccagucugggcaac

SEQ ID NO: 249318 - RNA, 32 nt, Human
ugauuccacuuagaaauucuuaaaaccagauu

SEQ ID NO: 249319 - RNA, 32 nt, Human
ugauuccagcacacacugaguuugagagccac

SEQ ID NO: 249320 - RNA, 32 nt, Human
ugauuccaggagauuggauuugcugugacuag

SEQ ID NO: 249321 - RNA, 32 nt, Human
ugauuccaguauugggggugcagagaaggcac

SEQ ID NO: 249322 - RNA, 32 nt, Human
ugauuccauaucuuugcuaaugugaauagugc

SEQ ID NO: 249323 - RNA, 32 nt, Human
ugauuccauuccauggaaauaaaaaguauguu

SEQ ID NO: 249324 - RNA, 32 nt, Human
ugauucccaagcucugcuccucuccccagcaa

SEQ ID NO: 249325 - RNA, 32 nt, Human
ugauuccccacucaaugacaucauguuagucu

SEQ ID NO: 249326 - RNA, 32 nt, Human
ugauuccccugccucagccuccccaguagcug

SEQ ID NO: 249327 - RNA, 32 nt, Human
ugauuccccugccucagccucgcgaguagcua

SEQ ID NO: 249328 - RNA, 32 nt, Human
ugauuccccugccuuagccuccuaaguagcug

SEQ ID NO: 249329 - RNA, 32 nt, Human
ugauuccgagagggugugguggcacugccagc

SEQ ID NO: 249330 - RNA, 32 nt, Human
ugauuccggcuacuugggaggcugagguggga

SEQ ID NO: 249331 - RNA, 32 nt, Human
ugauuccuaaagauugccauugcuuuguauaa

SEQ ID NO: 249332 - RNA, 32 nt, Human
ugauuccuccaggcucugccuggccugacccu

SEQ ID NO: 249333 - RNA, 32 nt, Human
ugauuccucccaggaggugcuugaggccccga

SEQ ID NO: 249334 - RNA, 32 nt, Human
ugauuccugacaccugcugccugcaggcauuc

SEQ ID NO: 249335 - RNA, 32 nt, Human
ugauuccugagauaagaaaguggauuugaucc

SEQ ID NO: 249336 - RNA, 32 nt, Human
ugauuccuguuguuauggaaacuguugccaga

SEQ ID NO: 249337 - RNA, 32 nt, Human
ugauuccuguuuugucaucugaugcaauuugc

SEQ ID NO: 249338 - RNA, 32 nt, Human
ugauuccuuaucuuugcuauugugaacagugc

SEQ ID NO: 249339 - RNA, 32 nt, Human
ugauucgcccaacacagccucucaaagugcug

SEQ ID NO: 249340 - RNA, 32 nt, Human
ugauucuaaagcaucuuuaaucugccaggcgg

SEQ ID NO: 249341 - RNA, 32 nt, Human
ugauucuacuccugcuauugcucacaacccuc

SEQ ID NO: 249342 - RNA, 32 nt, Human
ugauucuagaaaagucccuccugcuuuggcug

SEQ ID NO: 249343 - RNA, 32 nt, Human
ugauucuagugcuucugccuuaccguguuucc

SEQ ID NO: 249344 - RNA, 32 nt, Human
ugauucuauggaugaucauuuguaucauguug

SEQ ID NO: 249345 - RNA, 21 nt, Human
ugauucuauuuuucuauagca

SEQ ID NO: 249346 - RNA, 32 nt, Human
ugauucucacacaucaaaccaccaagauuccu

SEQ ID NO: 249347 - RNA, 32 nt, Human
ugauucucaccuuuacuccucaguaaucagga

SEQ ID NO: 249348 - RNA, 32 nt, Human
ugauucucaguuuugcuggaggccgcaaccag

SEQ ID NO: 249349 - RNA, 32 nt, Human
ugauucuccagccauggucagacaggucaccc

SEQ ID NO: 249350 - RNA, 32 nt, Human
ugauucuccagccucagccuccugaguagcug

SEQ ID NO: 249351 - RNA, 32 nt, Human
ugauucuccagccugggcaacggagugagacu

SEQ ID NO: 249352 - RNA, 32 nt, Human
ugauucuccaguauuccuguuuccauccaguu

SEQ ID NO: 249353 - RNA, 32 nt, Human
ugauucuccugccucagacuccugaguagcug

SEQ ID NO: 249354 - RNA, 32 nt, Human
ugauucuccugccucagccucacgaguagcug

SEQ ID NO: 249355 - RNA, 32 nt, Human
ugauucuccugccucagccuccccaguagcug

SEQ ID NO: 249356 - RNA, 32 nt, Human
ugauucuccugccucagccucccgaguagcua

SEQ ID NO: 249357 - RNA, 32 nt, Human
ugauucuccugccucagccucccgaguagcug

SEQ ID NO: 249358 - RNA, 32 nt, Human
ugauucuccugccucagccucccgaguugcug

SEQ ID NO: 249359 - RNA, 32 nt, Human
ugauucuccugccucagccucccggguagcug

SEQ ID NO: 249360 - RNA, 32 nt, Human
ugauucuccugccucagccucccuaguagcug

SEQ ID NO: 249361 - RNA, 32 nt, Human
ugauucuccugccucagccucccuaguugcua

SEQ ID NO: 249362 - RNA, 32 nt, Human
ugauucuccugccucagccucccucgcaagua

SEQ ID NO: 249363 - RNA, 32 nt, Human
ugauucuccugccucagccuccugaauagcug

SEQ ID NO: 249364 - RNA, 32 nt, Human
ugauucuccugccucagccuccugaauaucug

SEQ ID NO: 249365 - RNA, 32 nt, Human
ugauucuccugccucagccuccugagcagcug

SEQ ID NO: 249366 - RNA, 32 nt, Human
ugauucuccugccucagccuccugaggagcug

SEQ ID NO: 249367 - RNA, 32 nt, Human
ugauucuccugccucagccuccugaguagcua

SEQ ID NO: 249368 - RNA, 32 nt, Human
ugauucuccugccucagccuccugaguagcug

SEQ ID NO: 249369 - RNA, 32 nt, Human
ugauucuccugccucagccuccugagucgcug

SEQ ID NO: 249370 - RNA, 32 nt, Human
ugauucuccugccucagccucgugaguagcug

SEQ ID NO: 249371 - RNA, 32 nt, Human
ugauucuccugccucagccucugaguagcugg

SEQ ID NO: 249372 - RNA, 32 nt, Human
ugauucuccugccucagccucuuuagcuggga

SEQ ID NO: 249373 - RNA, 32 nt, Human
ugauucuccugccucagccugcugaguagcug

SEQ ID NO: 249374 - RNA, 24 nt, Human
ugauucuccugccucagccuucca

SEQ ID NO: 249375 - RNA, 32 nt, Human
ugauucuccugccucagucuccugaguagcug

SEQ ID NO: 249376 - RNA, 32 nt, Human
ugauucuccugccucauccuccugaguagcug

SEQ ID NO: 249377 - RNA, 32 nt, Human
ugauucuccugccuccgccucccgaguagcug

SEQ ID NO: 249378 - RNA, 32 nt, Human
ugauucuccugccucggccuccugaguagcug

SEQ ID NO: 249379 - RNA, 32 nt, Human
ugauucuccugccucugccuccugaguagcug

SEQ ID NO: 249380 - RNA, 24 nt, Human
ugauucuccugcuucagccuccca

SEQ ID NO: 249381 - RNA, 32 nt, Human
ugauucucuccaccuggugcucauaugaaggu

SEQ ID NO: 249382 - RNA, 32 nt, Human
ugauucucucucccucuccgcguccagugcug

SEQ ID NO: 249383 - RNA, 32 nt, Human
ugauucucuucgucccucccucggcuucucug

SEQ ID NO: 249384 - RNA, 32 nt, Human
ugauucucuuucuccuucucucagggcuuuua

SEQ ID NO: 249385 - RNA, 18 nt, Human
ugauucugcacuuuguaa

SEQ ID NO: 249386 - RNA, 32 nt, Human
ugauucugcagccucagcuccagcaucccuca

SEQ ID NO: 249387 - RNA, 32 nt, Human
ugauucugccaccauauagugaacacgauuaa

SEQ ID NO: 249388 - RNA, 32 nt, Human
ugauucugccacuuacccacacugucucuagu

SEQ ID NO: 249389 - RNA, 18 nt, Human
ugauucugcccacuguaa

SEQ ID NO: 249390 - RNA, 32 nt, Human
ugauucugccugaauagcugagagguuccagc

SEQ ID NO: 249391 - RNA, 20 nt, Human
ugauucugccuguaauccca

SEQ ID NO: 249392 - RNA, 32 nt, Human
ugauucugccuguaaucccagaauuuugggag

SEQ ID NO: 249393 - RNA, 18 nt, Human
ugauucugcugaugaaca

SEQ ID NO: 249394 - RNA, 32 nt, Human
ugauucuggaaacccucuugacacuguguuaa

SEQ ID NO: 249395 - RNA, 32 nt, Human
ugauucuggagcucuguguucugagaucaugc

SEQ ID NO: 249396 - RNA, 19 nt, Human
ugauucuggauucuaaaca

SEQ ID NO: 249397 - RNA, 32 nt, Human
ugauucuggggacaggacuaaagccugagagg

SEQ ID NO: 249398 - RNA, 32 nt, Human
ugauucuggggucuccuuagaggcucaggcca

SEQ ID NO: 249399 - RNA, 21 nt, Human
ugauucugucauucuguuaca

SEQ ID NO: 249400 - RNA, 32 nt, Human
ugauucuguuucucaguaguccuuuuagaggc

SEQ ID NO: 249401 - RNA, 32 nt, Human
ugauucuuaaauuuuaacuaccuucacuuaau

SEQ ID NO: 249402 - RNA, 32 nt, Human
ugauucuuaagcuucaucagcaccagaacacu

SEQ ID NO: 249403 - RNA, 32 nt, Human
ugauucuuauggaaaucucuguuauuaagaua

SEQ ID NO: 249404 - RNA, 32 nt, Human
ugauucuuauggaaaucucuguuauuaaguca

SEQ ID NO: 249405 - RNA, 32 nt, Human
ugauucuuauuguauuacaaaggaaccaugaa

SEQ ID NO: 249406 - RNA, 32 nt, Human
ugauucuucugccucagccucucaaguaacug

SEQ ID NO: 249407 - RNA, 24 nt, Human
ugauucuucugcuucagccuccca

SEQ ID NO: 249408 - RNA, 32 nt, Human
ugauucuugacaccagaugcaggauggugucc

SEQ ID NO: 249409 - RNA, 32 nt, Human
ugauucuugcuaguucccagcucacaguuugg

SEQ ID NO: 249410 - RNA, 32 nt, Human
ugauucuugucagaaacauuuccccaggcaga

SEQ ID NO: 249411 - RNA, 32 nt, Human
ugauucuugugccauuuuuguauauguaauug

SEQ ID NO: 249412 - RNA, 19 nt, Human
ugauucuuugacugugaca

SEQ ID NO: 249413 - RNA, 32 nt, Human
ugauugaaaguguuugcaguuccucuuccgua

SEQ ID NO: 249414 - RNA, 32 nt, Human
ugauugaagaccuauugggagugaagacuuga

SEQ ID NO: 249415 - RNA, 32 nt, Human
ugauugaagagucacugucugaaagaagcaaa

SEQ ID NO: 249416 - RNA, 32 nt, Human
ugauugaaggaagguuuucuccacuuuguugg

SEQ ID NO: 249417 - RNA, 32 nt, Human
ugauugacacauauuuuuaaauaaauauaaua

SEQ ID NO: 249418 - RNA, 32 nt, Human
ugauugacaggcagauuucccuaccgggauuu

SEQ ID NO: 249419 - RNA, 32 nt, Human
ugauugacgcuugcaaacugucugaauuugcc

SEQ ID NO: 249420 - RNA, 32 nt, Human
ugauugacucaaucuuugccuaauccaaugag

SEQ ID NO: 249421 - RNA, 32 nt, Human
ugauugacuuacaagugaaacugucuuauaau

SEQ ID NO: 249422 - RNA, 32 nt, Human
ugauugagaaccaccaguuuagcuagucaaua

SEQ ID NO: 249423 - RNA, 32 nt, Human
ugauugagccaauauacaaauaccucaucugu

SEQ ID NO: 249424 - RNA, 32 nt, Human
ugauugagccaccacacuccaaccuaggugac

SEQ ID NO: 249425 - RNA, 32 nt, Human
ugauugagccacugcacuccaaucugggugac

SEQ ID NO: 249426 - RNA, 32 nt, Human
ugauugagccacugcacuccagccucggccac

SEQ ID NO: 249427 - RNA, 32 nt, Human
ugauugagggaggaggaggaggaagagguaug

SEQ ID NO: 249428 - RNA, 32 nt, Human
ugauugagucuauuuuucacugaucucagcaa

SEQ ID NO: 249429 - RNA, 32 nt, Human
ugauugauaagaaccuuuugagugccuuacac

SEQ ID NO: 249430 - RNA, 32 nt, Human
ugauugauacaguuuguacuuauuucaucaag

SEQ ID NO: 249431 - RNA, 32 nt, Human
ugauugauggccugagccugggguccugguag

SEQ ID NO: 249432 - RNA, 32 nt, Human
ugauugauugugcaaacuacuuuuuaugacaa

SEQ ID NO: 249433 - RNA, 32 nt, Human
ugauugcacagcugcacuccagccugugcuga

SEQ ID NO: 249434 - RNA, 32 nt, Human
ugauugcaccaccacacuccagccugggugac

SEQ ID NO: 249435 - RNA, 32 nt, Human
ugauugcaccacugcacucaagccugggcaac

SEQ ID NO: 249436 - RNA, 32 nt, Human
ugauugcaccacugcacuccaaccugggcaac

SEQ ID NO: 249437 - RNA, 32 nt, Human
ugauugcaccacugcacuccaaccugggugac

SEQ ID NO: 249438 - RNA, 32 nt, Human
ugauugcaccacugcacuccagccugagugac

SEQ ID NO: 249439 - RNA, 32 nt, Human
ugauugcaccacugcacuccagccuggaaaac

SEQ ID NO: 249440 - RNA, 32 nt, Human
ugauugcaccacugcacuccagccugggcaac

SEQ ID NO: 249441 - RNA, 32 nt, Human
ugauugcaccacugcacuccagccugggcgac

SEQ ID NO: 249442 - RNA, 32 nt, Human
ugauugcaccacugcacuccagccugggugac

SEQ ID NO: 249443 - RNA, 32 nt, Human
ugauugcaccacugcacuccagccugggugau

SEQ ID NO: 249444 - RNA, 32 nt, Human
ugauugcaccacugcacuccagccuggguguc

SEQ ID NO: 249445 - RNA, 32 nt, Human
ugauugcaccacugcacuccaggcuggguaac

SEQ ID NO: 249446 - RNA, 32 nt, Human
ugauugcaccacugcacuccagucugguugag

SEQ ID NO: 249447 - RNA, 32 nt, Human
ugauugcaccacugcacucuaacuugggcaac

SEQ ID NO: 249448 - RNA, 32 nt, Human
ugauugcaccacugcacucuacucugggugac

SEQ ID NO: 249449 - RNA, 32 nt, Human
ugauugcaccacugcacucuagccugcgugac

SEQ ID NO: 249450 - RNA, 32 nt, Human
ugauugcaccacugcacucuagccuggggaac

SEQ ID NO: 249451 - RNA, 32 nt, Human
ugauugcaccacugcacuucagcuugggcaac

SEQ ID NO: 249452 - RNA, 32 nt, Human
ugauugcaccacugcacuuuagucugggugac

SEQ ID NO: 249453 - RNA, 32 nt, Human
ugauugcaccacuggacgccagccuaggcaac

SEQ ID NO: 249454 - RNA, 32 nt, Human
ugauugcaccacuguacuccagacuggauaac

SEQ ID NO: 249455 - RNA, 32 nt, Human
ugauugcaccacuguacuccagccugggcaac

SEQ ID NO: 249456 - RNA, 32 nt, Human
ugauugcaccacuguacuccagccugggugac

SEQ ID NO: 249457 - RNA, 32 nt, Human
ugauugcaccacuuguaacuccagccugggca

SEQ ID NO: 249458 - RNA, 32 nt, Human
ugauugcaccauugcaccuccagccugggcaa

SEQ ID NO: 249459 - RNA, 32 nt, Human
ugauugcaccccugcacuccagccugggugac

SEQ ID NO: 249460 - RNA, 32 nt, Human
ugauugcaccgugacacuccagccugggcaac

SEQ ID NO: 249461 - RNA, 32 nt, Human
ugauugcacgacugcacuccagccugggcaau

SEQ ID NO: 249462 - RNA, 32 nt, Human
ugauugcacugucgcacuccagccuggaugau

SEQ ID NO: 249463 - RNA, 32 nt, Human
ugauugcaggaauaucuggaugugaguuaguu

SEQ ID NO: 249464 - RNA, 32 nt, Human
ugauugcagugagcugagauagcaccacugca

SEQ ID NO: 249465 - RNA, 32 nt, Human
ugauugcaucacugcacugcagccugggcaac

SEQ ID NO: 249466 - RNA, 32 nt, Human
ugauugccacagugcaagaccccaucucaaaa

SEQ ID NO: 249467 - RNA, 32 nt, Human
ugauugccagaacucgagaucacuacacaugg

SEQ ID NO: 249468 - RNA, 32 nt, Human
ugauugccgggggaggagaagcucccagaucc

SEQ ID NO: 249469 - RNA, 32 nt, Human
ugauugccggggugaaggcaagagaugaauug

SEQ ID NO: 249470 - RNA, 32 nt, Human
ugauugccucuucucaucaggagccaggagag

SEQ ID NO: 249471 - RNA, 32 nt, Human
ugauugcgccacagcauuccagccugggcgau

SEQ ID NO: 249472 - RNA, 32 nt, Human
ugauugcgccacugcacuccagccugggcagc

SEQ ID NO: 249473 - RNA, 32 nt, Human
ugauugcgccacugcauuccagcuugggcgac

SEQ ID NO: 249474 - RNA, 32 nt, Human
ugauugcgccgcugcacuccagccugggcaac

SEQ ID NO: 249475 - RNA, 32 nt, Human
ugauugcucacaccaaagccuuggaccccucc

SEQ ID NO: 249476 - RNA, 32 nt, Human
ugauugcucacugaaagacucagcacccccaa

SEQ ID NO: 249477 - RNA, 32 nt, Human
ugauugcucagggagugcuggggagaaugagg

SEQ ID NO: 249478 - RNA, 32 nt, Human
ugauugcucccaggaucuccugccagcccagc

SEQ ID NO: 249479 - RNA, 32 nt, Human
ugauugcugauaguagugaccaaaacuacuuu

SEQ ID NO: 249480 - RNA, 32 nt, Human
ugauugcugcuuggcuggaagauuaucaauuc

SEQ ID NO: 249481 - RNA, 32 nt, Human
ugauugcuugagcucaggaguuugagaccagg

SEQ ID NO: 249482 - RNA, 32 nt, Human
ugauugcuuugaccaacagaauguggcagaag

SEQ ID NO: 249483 - RNA, 32 nt, Human
ugauuggaccacuauacuccagccuggcaaca

SEQ ID NO: 249484 - RNA, 32 nt, Human
ugauuggaucauaggagcggauuucccccuug

SEQ ID NO: 249485 - RNA, 32 nt, Human
ugauuggcagccggagucacugccuggaguug

SEQ ID NO: 249486 - RNA, 32 nt, Human
ugauuggcaucugcuuuucucuuuucuuugcu

SEQ ID NO: 249487 - RNA, 32 nt, Human
ugauugggaucuacugugauguugucuucaaa

SEQ ID NO: 249488 - RNA, 32 nt, Human
ugauugggcuuccugaggaagugagaacgccu

SEQ ID NO: 249489 - RNA, 32 nt, Human
ugauuggguccaggcugggcugucagggaagc

SEQ ID NO: 249490 - RNA, 19 nt, Human
ugauugguccguuuuacag

SEQ ID NO: 249491 - RNA, 20 nt, Human
ugauugguccguuuugacag

SEQ ID NO: 249492 - RNA, 24 nt, Human
ugauugguccguuuugacagagug

SEQ ID NO: 249493 - RNA, 32 nt, Human
ugauuggugagcugaagucuguccuugcacca

SEQ ID NO: 249494 - RNA, 32 nt, Human
ugauuggugcucccugggccucccggguggau

SEQ ID NO: 249495 - RNA, 32 nt, Human
ugauugguuaagugaaaaccagaacucaaaau

SEQ ID NO: 249496 - RNA, 32 nt, Human
ugauugguuagcaauguugacuacccacguag

SEQ ID NO: 249497 - RNA, 32 nt, Human
ugauugguuccccaaagaaggucuggaacucc

SEQ ID NO: 249498 - RNA, 32 nt, Human
ugauugguuuuccuguaggcuggaaguaaaaa

SEQ ID NO: 249499 - RNA, 32 nt, Human
ugauuguaaugauuuugagcugcagcagcuuu

SEQ ID NO: 249500 - RNA, 32 nt, Human
ugauuguaccacugcacuccagccugggcaac

SEQ ID NO: 249501 - RNA, 32 nt, Human
ugauuguaccacugcacuccagccugggugac

SEQ ID NO: 249502 - RNA, 32 nt, Human
ugauuguaccacugcacuccagcucggggaac

SEQ ID NO: 249503 - RNA, 32 nt, Human
ugauuguaccacuguauuccagccuggacgac

SEQ ID NO: 249504 - RNA, 32 nt, Human
ugauuguagggucucauuuucucaccgauauu

SEQ ID NO: 249505 - RNA, 32 nt, Human
ugauuguaugacugcacuccagccugggugac

SEQ ID NO: 249506 - RNA, 32 nt, Human
ugauugucagggaggugccaguuacagcaggu

SEQ ID NO: 249507 - RNA, 32 nt, Human
ugauuguccaagcagcuuuagauguguuuagg

SEQ ID NO: 249508 - RNA, 32 nt, Human
ugauugucucugcuuuagcgucucuaaauccg

SEQ ID NO: 249509 - RNA, 32 nt, Human
ugauugucugagugagugaaacuacaagaggu

SEQ ID NO: 249510 - RNA, 32 nt, Human
ugauugugacacugcccuccagccugggugac

SEQ ID NO: 249511 - RNA, 31 nt, Human
ugauugugacuucuaguucuuuucuagagga

SEQ ID NO: 249512 - RNA, 32 nt, Human
ugauugugaggccuccccagccacuuggaacu

SEQ ID NO: 249513 - RNA, 32 nt, Human
ugauugugauggaagccccugcccuuccugug

SEQ ID NO: 249514 - RNA, 32 nt, Human
ugauugugcacagugaccuggcuguucacuuc

SEQ ID NO: 249515 - RNA, 32 nt, Human
ugauugugccaauguacuccagccuaggugac

SEQ ID NO: 249516 - RNA, 32 nt, Human
ugauugugccacacacuccagccuggguggca

SEQ ID NO: 249517 - RNA, 32 nt, Human
ugauugugccaccgcacuccagcaugggugac

SEQ ID NO: 249518 - RNA, 32 nt, Human
ugauugugccacugcacucauccuggaagaca

SEQ ID NO: 249519 - RNA, 32 nt, Human
ugauugugccacugcacuccagccugggcaac

SEQ ID NO: 249520 - RNA, 32 nt, Human
ugauugugccacugcacuccagccugggcacc

SEQ ID NO: 249521 - RNA, 32 nt, Human
ugauugugccacugcacuccagccugggccac

SEQ ID NO: 249522 - RNA, 32 nt, Human
ugauugugccacugcacuccagccugggcgac

SEQ ID NO: 249523 - RNA, 32 nt, Human
ugauugugccacugcacuccagccuggguaac

SEQ ID NO: 249524 - RNA, 32 nt, Human
ugauugugccacugcacuccagccuggguggc

SEQ ID NO: 249525 - RNA, 32 nt, Human
ugauugugccacugcacuccagccuggguuac

SEQ ID NO: 249526 - RNA, 32 nt, Human
ugauugugccacugcacuccagccuuggcaac

SEQ ID NO: 249527 - RNA, 32 nt, Human
ugauugugccacugcacuccagcuuggugaca

SEQ ID NO: 249528 - RNA, 32 nt, Human
ugauugugccacugcacuccagucuggacaac

SEQ ID NO: 249529 - RNA, 32 nt, Human
ugauugugccacugcauaccagccuaggugac

SEQ ID NO: 249530 - RNA, 32 nt, Human
ugauugugccacuguacuccagccugggagau

SEQ ID NO: 249531 - RNA, 32 nt, Human
ugauugugccacuguacuccagccugggugac

SEQ ID NO: 249532 - RNA, 32 nt, Human
ugauugugccacuguuuuccagccugggcaau

SEQ ID NO: 249533 - RNA, 32 nt, Human
ugauugugccacuucccuccagccugggcaau

SEQ ID NO: 249534 - RNA, 32 nt, Human
ugauugugccagugcacuccaggcuggacgac

SEQ ID NO: 249535 - RNA, 32 nt, Human
ugauugugccagugcacuccggccugggugac

SEQ ID NO: 249536 - RNA, 32 nt, Human
ugauugugccauuccaaagugcaucagaacug

SEQ ID NO: 249537 - RNA, 32 nt, Human
ugauugugccauugcacuccagccuggacaac

SEQ ID NO: 249538 - RNA, 32 nt, Human
ugauugugccauugcacuccagccugggugac

SEQ ID NO: 249539 - RNA, 32 nt, Human
ugauugugccauuguacuccagccugggcgac

SEQ ID NO: 249540 - RNA, 32 nt, Human
ugauugugcuacugcacuccaaucuggcaaca

SEQ ID NO: 249541 - RNA, 32 nt, Human
ugauugugcuuauuacauucauuaucacgaug

SEQ ID NO: 249542 - RNA, 32 nt, Human
ugauuguggcauugcacuccagccuggguggu

SEQ ID NO: 249543 - RNA, 32 nt, Human
ugauugugucacugcacuccagccugggcaac

SEQ ID NO: 249544 - RNA, 32 nt, Human
ugauugugucacugcacuccagcuugggugac

SEQ ID NO: 249545 - RNA, 32 nt, Human
ugauugugugggcugcacaggcugaagguuag

SEQ ID NO: 249546 - RNA, 32 nt, Human
ugauuguuagcuuucagaaagcuaaugauugu

SEQ ID NO: 249547 - RNA, 32 nt, Human
ugauuguucagccuuuuguuuuguuagcuugu

SEQ ID NO: 249548 - RNA, 32 nt, Human
ugauuguuguacuucugggucaaaacucaaau

SEQ ID NO: 249549 - RNA, 17 nt, Human
ugauuguuguugucauc

SEQ ID NO: 249550 - RNA, 32 nt, Human
ugauuguuucaaggaagugacaguucuacuuu

SEQ ID NO: 249551 - RNA, 32 nt, Human
ugauuguuucuucuucaugcuuuugcuugcaa

SEQ ID NO: 249552 - RNA, 20 nt, Human
ugauuguuuuguaaauaucu

SEQ ID NO: 249553 - RNA, 32 nt, Human
ugauuuaaaacuuuuaacauuuuguuuggcug

SEQ ID NO: 249554 - RNA, 32 nt, Human
ugauuuaaccauuguauuuaauuucccaccuu

SEQ ID NO: 249555 - RNA, 19 nt, Human
ugauuuaaccucuguaaua

SEQ ID NO: 249556 - RNA, 32 nt, Human
ugauuuaacuauuccauauuguauccacaauu

SEQ ID NO: 249557 - RNA, 32 nt, Human
ugauuuaagaaguggcuggauuggaacuuuua

SEQ ID NO: 249558 - RNA, 32 nt, Human
ugauuuacaaguccuaauuguuggagcucagu

SEQ ID NO: 249559 - RNA, 32 nt, Human
ugauuuacacuucuguuuucugcuacaaacuu

SEQ ID NO: 249560 - RNA, 32 nt, Human
ugauuuacaggugagcaaacaggcucagagac

SEQ ID NO: 249561 - RNA, 32 nt, Human
ugauuuaccucaaggugcaaaauaauuaaacc

SEQ ID NO: 249562 - RNA, 32 nt, Human
ugauuuacucuuagagaugauucagaggucac

SEQ ID NO: 249563 - RNA, 32 nt, Human
ugauuuagagagaagagagcagcuccuagcag

SEQ ID NO: 249564 - RNA, 32 nt, Human
ugauuuagcugcugccuccagccucuggcuug

SEQ ID NO: 249565 - RNA, 32 nt, Human
ugauuuagggaaacuguggcagaugaguggga

SEQ ID NO: 249566 - RNA, 32 nt, Human
ugauuuauaauuagagcauguuuaauaaguuu

SEQ ID NO: 249567 - RNA, 32 nt, Human
ugauuuauauugauugcacuugccugccauga

SEQ ID NO: 249568 - RNA, 32 nt, Human
ugauuuaucaaauuaaugugcugaugauaaua

SEQ ID NO: 249569 - RNA, 31 nt, Human
ugauuuaugcaaagggcuggcauucugaugc

SEQ ID NO: 249570 - RNA, 32 nt, Human
ugauuuauggaauuugaaaaagauaauuauaa

SEQ ID NO: 249571 - RNA, 32 nt, Human
ugauuucaaaaauguccugccaguuuaagggu

SEQ ID NO: 249572 - RNA, 32 nt, Human
ugauuucaaaagguuucacaauuccccaagac

SEQ ID NO: 249573 - RNA, 32 nt, Human
ugauuucaacagccaagccaaguuucaugaau

SEQ ID NO: 249574 - RNA, 20 nt, Human
ugauuucaaggagucuggca

SEQ ID NO: 249575 - RNA, 32 nt, Human
ugauuucaccaccacuccagccugggugagaa

SEQ ID NO: 249576 - RNA, 32 nt, Human
ugauuucaccacugcauucuagccugggcaac

SEQ ID NO: 249577 - RNA, 32 nt, Human
ugauuucacccuugcauuccagccugugaaau

SEQ ID NO: 249578 - RNA, 32 nt, Human
ugauuucacuguguggucucaggggaagcugg

SEQ ID NO: 249579 - RNA, 32 nt, Human
ugauuucagaaggagaaggaaaaagaaaguaa

SEQ ID NO: 249580 - RNA, 32 nt, Human
ugauuucagacucccgcucucccagcuguccu

SEQ ID NO: 249581 - RNA, 32 nt, Human
ugauuucaggcagcaggggcugcugugaugcc

SEQ ID NO: 249582 - RNA, 32 nt, Human
ugauuucaguguucaagacagaagaagacugg

SEQ ID NO: 249583 - RNA, 32 nt, Human
ugauuucauacaggcggccggucuccagcacc

SEQ ID NO: 249584 - RNA, 32 nt, Human
ugauuucauauucgcccucuggcuucaggcac

SEQ ID NO: 249585 - RNA, 32 nt, Human
ugauuucauccagcagccaagacaguaaguga

SEQ ID NO: 249586 - RNA, 32 nt, Human
ugauuucauggugucuuuccaggcucuugaua

SEQ ID NO: 249587 - RNA, 32 nt, Human
ugauuucauucugccguguugcuaacccccuc

SEQ ID NO: 249588 - RNA, 32 nt, Human
ugauuucauugagcuucauugcagccugaaau

SEQ ID NO: 249589 - RNA, 32 nt, Human
ugauuuccaaccaacaugaaaugacuauaaac

SEQ ID NO: 249590 - RNA, 32 nt, Human
ugauuucccacugcacuccagccugagugaca

SEQ ID NO: 249591 - RNA, 32 nt, Human
ugauuuccuggcuggccaacugguggccagug

SEQ ID NO: 249592 - RNA, 20 nt, Human
ugauuucgcccacccaccuc

SEQ ID NO: 249593 - RNA, 32 nt, Human
ugauuucuacuacccucucagucaccauguug

SEQ ID NO: 249594 - RNA, 24 nt, Human
ugauuucuagaacuauccaccuca

SEQ ID NO: 249595 - RNA, 32 nt, Human
ugauuucuaggguccaaaaguugacaaaacca

SEQ ID NO: 249596 - RNA, 32 nt, Human
ugauuucucccaaagaauaacuuggagguuga

SEQ ID NO: 249597 - RNA, 32 nt, Human
ugauuucucugggcuuccuucaucucaauucu

SEQ ID NO: 249598 - RNA, 24 nt, Human
ugauuucugugucaccuacuguca

SEQ ID NO: 249599 - RNA, 32 nt, Human
ugauuucuuauuacccccuuuccucuugggcu

SEQ ID NO: 249600 - RNA, 32 nt, Human
ugauuucuuccauccagaaagacagaaagcca

SEQ ID NO: 249601 - RNA, 32 nt, Human
ugauuucuuccuccucuucagugugguagaug

SEQ ID NO: 249602 - RNA, 32 nt, Human
ugauuucuucuuuuccuauugaccaguacaga

SEQ ID NO: 249603 - RNA, 32 nt, Human
ugauuucuuggagccugaaaagaaggagcagc

SEQ ID NO: 249604 - RNA, 32 nt, Human
ugauuucuugucucccuguggcuuguuccacu

SEQ ID NO: 249605 - RNA, 32 nt, Human
ugauuugagaaaagggaggaggggaagacagu

SEQ ID NO: 249606 - RNA, 32 nt, Human
ugauuugagaaaagggaggaggggaagauagu

SEQ ID NO: 249607 - RNA, 32 nt, Human
ugauuugagucuguccuaacugcuccauugag

SEQ ID NO: 249608 - RNA, 32 nt, Human
ugauuugauuuauccuuguacucuccaagcuc

SEQ ID NO: 249609 - RNA, 32 nt, Human
ugauuugcaaacauuucuauagccgaacuugu

SEQ ID NO: 249610 - RNA, 32 nt, Human
ugauuugcaacaggucuuccacuggcucgagg

SEQ ID NO: 249611 - RNA, 32 nt, Human
ugauuugcaacuuuucuuguugaugucguguu

SEQ ID NO: 249612 - RNA, 32 nt, Human
ugauuugcauaaauggagauaaaacuuguauu

SEQ ID NO: 249613 - RNA, 24 nt, Human
ugauuugcccgccucagccuccca

SEQ ID NO: 249614 - RNA, 32 nt, Human
ugauuugcuauuuuugacauuuccucgucucu

SEQ ID NO: 249615 - RNA, 32 nt, Human
ugauuugcugugguguuggguggcuccuaucu

SEQ ID NO: 249616 - RNA, 22 nt, Human
ugauuugcuucccuuccugcca

SEQ ID NO: 249617 - RNA, 32 nt, Human
ugauuugcuuccuaacagcucuguucccuccu

SEQ ID NO: 249618 - RNA, 32 nt, Human
ugauuuggcuuuuugugccuaauggacauaca

SEQ ID NO: 249619 - RNA, 32 nt, Human
ugauuugggcuacucauuuaaccuuuuugugc

SEQ ID NO: 249620 - RNA, 32 nt, Human
ugauuugggcuucauuucguguguaggagcac

SEQ ID NO: 249621 - RNA, 32 nt, Human
ugauuugggugagggacgggaaggggagaauu

SEQ ID NO: 249622 - RNA, 19 nt, Human
ugauuugguuugcugcauc

SEQ ID NO: 249623 - RNA, 32 nt, Human
ugauuuguacuuggaagcauucacaaaguagc

SEQ ID NO: 249624 - RNA, 32 nt, Human
ugauuuguauccuuuugcuauaauaaacugua

SEQ ID NO: 249625 - RNA, 32 nt, Human
ugauuuguauuuuucuaugcacugggcaucuu

SEQ ID NO: 249626 - RNA, 32 nt, Human
ugauuugucagagaaccuguugaaaugugaau

SEQ ID NO: 249627 - RNA, 32 nt, Human
ugauuugucauugcuuuauagacuguaagaag

SEQ ID NO: 249628 - RNA, 32 nt, Human
ugauuugugguuuguuuucuuucacuuuguac

SEQ ID NO: 249629 - RNA, 32 nt, Human
ugauuuguguagugagccuuugaaaaugguua

SEQ ID NO: 249630 - RNA, 32 nt, Human
ugauuuguguuuucaguguguggggaagcugu

SEQ ID NO: 249631 - RNA, 32 nt, Human
ugauuuguuuuuaaaaauuuuuacacuucuug

SEQ ID NO: 249632 - RNA, 22 nt, Human
ugauuuguuuuuguuuuguuuu

SEQ ID NO: 249633 - RNA, 20 nt, Human
ugauuuuaacccgcugcaca

SEQ ID NO: 249634 - RNA, 32 nt, Human
ugauuuuaauugcuugaaacaacuuucagggu

SEQ ID NO: 249635 - RNA, 32 nt, Human
ugauuuuaccacugcacuccagcuugggcgac

SEQ ID NO: 249636 - RNA, 32 nt, Human
ugauuuuaccucuucagcuuuauuuacuaugc

SEQ ID NO: 249637 - RNA, 32 nt, Human
ugauuuuacugaaauaaagaugagcuacuucu

SEQ ID NO: 249638 - RNA, 32 nt, Human
ugauuuuacugagguuucaucacaagaaggga

SEQ ID NO: 249639 - RNA, 32 nt, Human
ugauuuuacuucagaaaccaaaucagucuucu

SEQ ID NO: 249640 - RNA, 32 nt, Human
ugauuuuaguacaucuuaaaugauaucuuauu

SEQ ID NO: 249641 - RNA, 32 nt, Human
ugauuuuagugguauuuuuggcacccuuauau

SEQ ID NO: 249642 - RNA, 32 nt, Human
ugauuuuaguguguuagacuugcugaguccua

SEQ ID NO: 249643 - RNA, 32 nt, Human
ugauuuuauauacuuaugcuuucauacauaaa

SEQ ID NO: 249644 - RNA, 21 nt, Human
ugauuuuauauccaccuaccu

SEQ ID NO: 249645 - RNA, 32 nt, Human
ugauuuuaucucuucuuucuguaucuauaggu

SEQ ID NO: 249646 - RNA, 32 nt, Human
ugauuuuauggaagugggcgaaaacaaucaaa

SEQ ID NO: 249647 - RNA, 32 nt, Human
ugauuuucaaacccauaugcuucuaaccacua

SEQ ID NO: 249648 - RNA, 32 nt, Human
ugauuuucacacaaauacuauaugaaauuuuu

SEQ ID NO: 249649 - RNA, 32 nt, Human
ugauuuucacugcaacucugccuuugugugua

SEQ ID NO: 249650 - RNA, 32 nt, Human
ugauuuucaguuauaauaauguguacuggcau

SEQ ID NO: 249651 - RNA, 32 nt, Human
ugauuuucauauuuucacacaugguauguuau

SEQ ID NO: 249652 - RNA, 32 nt, Human
ugauuuuccaauaaacugcuaucacaauguca

SEQ ID NO: 249653 - RNA, 32 nt, Human
ugauuuuccucaccugaguacaugaaaagaaa

SEQ ID NO: 249654 - RNA, 32 nt, Human
ugauuuuccuggaggauuaggguauuuagcag

SEQ ID NO: 249655 - RNA, 32 nt, Human
ugauuuucucuaauguaacuuccucuuaggau

SEQ ID NO: 249656 - RNA, 32 nt, Human
ugauuuucugaaagcaccugcuaacaccuuga

SEQ ID NO: 249657 - RNA, 24 nt, Human
ugauuuucuggauuccccaucuca

SEQ ID NO: 249658 - RNA, 32 nt, Human
ugauuuucuucuggauguggucuuugguuuuc

SEQ ID NO: 249659 - RNA, 32 nt, Human
ugauuuucuuucuccucugauuucaguucacu

SEQ ID NO: 249660 - RNA, 32 nt, Human
ugauuuugaaaccaugaagagauuuuucauga

SEQ ID NO: 249661 - RNA, 18 nt, Human
ugauuuugaccuccucuu

SEQ ID NO: 249662 - RNA, 32 nt, Human
ugauuuugaugggcaugaaugagacccagcug

SEQ ID NO: 249663 - RNA, 20 nt, Human
ugauuuugcagguugucuuc

SEQ ID NO: 249664 - RNA, 32 nt, Human
ugauuuugccacugcacuccugccugggugac

SEQ ID NO: 249665 - RNA, 32 nt, Human
ugauuuugcccgaaguugugagacugaaacca

SEQ ID NO: 249666 - RNA, 18 nt, Human
ugauuuugcccuuguuau

SEQ ID NO: 249667 - RNA, 32 nt, Human
ugauuuugccuagagcugaucuuuaauggaca

SEQ ID NO: 249668 - RNA, 32 nt, Human
ugauuuugcuacccaugaaauacaguucggcc

SEQ ID NO: 249669 - RNA, 32 nt, Human
ugauuuuggaaagauauaauuucuugaaaauc

SEQ ID NO: 249670 - RNA, 32 nt, Human
ugauuuuggaaauuuuaaaaaucagauuuaau

SEQ ID NO: 249671 - RNA, 32 nt, Human
ugauuuuggagauggagcaggacaagugggga

SEQ ID NO: 249672 - RNA, 20 nt, Human
ugauuuuggugacccacuuc

SEQ ID NO: 249673 - RNA, 23 nt, Human
ugauuuuguaucccccuguagca

SEQ ID NO: 249674 - RNA, 19 nt, Human
ugauuuugucacugacauc

SEQ ID NO: 249675 - RNA, 32 nt, Human
ugauuuuguugcucccucucuccuggaaccua

SEQ ID NO: 249676 - RNA, 32 nt, Human
ugauuuuuaaaaccagcacaagcaaaugagua

SEQ ID NO: 249677 - RNA, 22 nt, Human
ugauuuuuaaaccugguuuaca

SEQ ID NO: 249678 - RNA, 20 nt, Human
ugauuuuuaccucuguaaca

SEQ ID NO: 249679 - RNA, 32 nt, Human
ugauuuuuacucuguuugcuguaguaguuuua

SEQ ID NO: 249680 - RNA, 32 nt, Human
ugauuuuuagugggcagaugggagaaggaaag

SEQ ID NO: 249681 - RNA, 32 nt, Human
ugauuuuuaucuguuuacaaucaugucacacu

SEQ ID NO: 249682 - RNA, 16 nt, Human
ugauuuuucugucauc

SEQ ID NO: 249683 - RNA, 32 nt, Human
ugauuuuucuuuaaaaucagugagauuugaaa

SEQ ID NO: 249684 - RNA, 21 nt, Human
ugcaaaaaagguuuuguguca

SEQ ID NO: 249685 - RNA, 32 nt, Human
ugcaaaaacccaaagccuccaaaacuaaccag

SEQ ID NO: 249686 - RNA, 27 nt, Human
ugcaaaaaggaaaacacacacaaccaa

SEQ ID NO: 249687 - RNA, 32 nt, Human
ugcaaaaaguuagccaggcaugguggugggca

SEQ ID NO: 249688 - RNA, 22 nt, Human
ugcaaaacaaggaaaucacaca

SEQ ID NO: 249689 - RNA, 32 nt, Human
ugcaaaacagccagacuugagcugugcucugg

SEQ ID NO: 249690 - RNA, 18 nt, Human
ugcaaaacccuuccuggg

SEQ ID NO: 249691 - RNA, 32 nt, Human
ugcaaaacugugucacaguuucaggcuuuuau

SEQ ID NO: 249692 - RNA, 32 nt, Human
ugcaaaacuuccuggaguucagcccagcaagg

SEQ ID NO: 249693 - RNA, 32 nt, Human
ugcaaaagagaaccagagcaucagagccuuca

SEQ ID NO: 249694 - RNA, 32 nt, Human
ugcaaaagcagccugagcaacauagugagacc

SEQ ID NO: 249695 - RNA, 32 nt, Human
ugcaaaagcuguggcugccaggucugggccac

SEQ ID NO: 249696 - RNA, 32 nt, Human
ugcaaaagcuguucuauaugcaaacaugaugu

SEQ ID NO: 249697 - RNA, 32 nt, Human
ugcaaaaggaaggcauuuuaauuccuuucuau

SEQ ID NO: 249698 - RNA, 18 nt, Human
ugcaaaaguaauuguggu

SEQ ID NO: 249699 - RNA, 32 nt, Human
ugcaaaauacaaaaauuagccgggcuuggugg

SEQ ID NO: 249700 - RNA, 32 nt, Human
ugcaaaaucacugcaccuuguccaacuccauu

SEQ ID NO: 249701 - RNA, 32 nt, Human
ugcaaaaucagauuaaacugcacuccaaaaca

SEQ ID NO: 249702 - RNA, 32 nt, Human
ugcaaaaucccaauggcccgguccuuuucuuu

SEQ ID NO: 249703 - RNA, 32 nt, Human
ugcaaaauggagagaauacaauaacuacuaca

SEQ ID NO: 249704 - RNA, 32 nt, Human
ugcaaaauuaacaugguagccauuguuugaau

SEQ ID NO: 249705 - RNA, 32 nt, Human
ugcaaacaaacugcuuaacaacugacaagaca

SEQ ID NO: 249706 - RNA, 32 nt, Human
ugcaaacacaggcacacacaugcacacaccca

SEQ ID NO: 249707 - RNA, 32 nt, Human
ugcaaacaccugggagguacccagaaaacagc

SEQ ID NO: 249708 - RNA, 32 nt, Human
ugcaaacauagcucauugcagcuuugaccucc

SEQ ID NO: 249709 - RNA, 32 nt, Human
ugcaaacaugggguuggcugggcccagaaggu

SEQ ID NO: 249710 - RNA, 32 nt, Human
ugcaaaccagccugggcaauagagugagaccc

SEQ ID NO: 249711 - RNA, 32 nt, Human
ugcaaaccauucugucucccagccuuucuucu

SEQ ID NO: 249712 - RNA, 32 nt, Human
ugcaaaccuaguaccugccauuuuuacuaauu

SEQ ID NO: 249713 - RNA, 32 nt, Human
ugcaaaccugcuugcugaccucaggcuuggcc

SEQ ID NO: 249714 - RNA, 32 nt, Human
ugcaaaccuuccugggaggacaggcaggccag

SEQ ID NO: 249715 - RNA, 32 nt, Human
ugcaaacgaccugcuuucuuucugaucccggg

SEQ ID NO: 249716 - RNA, 32 nt, Human
ugcaaacggggaggcagagggaggagggaagg

SEQ ID NO: 249717 - RNA, 32 nt, Human
ugcaaacucugccucccgaauucaagugauuc

SEQ ID NO: 249718 - RNA, 32 nt, Human
ugcaaacugcagcuuucacauuuauggcauuu

SEQ ID NO: 249719 - RNA, 32 nt, Human
ugcaaacuguguaaacagggccucuuauuuuu

SEQ ID NO: 249720 - RNA, 32 nt, Human
ugcaaacuuccaucccugucaugucuucaguu

SEQ ID NO: 249721 - RNA, 23 nt, Human
ugcaaagaaaguccaacauggug

SEQ ID NO: 249722 - RNA, 31 nt, Human
ugcaaagaaauuugccagucacuggaaguua

SEQ ID NO: 249723 - RNA, 32 nt, Human
ugcaaagacaaaacaauuaggucacaggauac

SEQ ID NO: 249724 - RNA, 23 nt, Human
ugcaaagagaggcacagacaugg

SEQ ID NO: 249725 - RNA, 32 nt, Human
ugcaaagauaaauaagaaaguugcuuugggca

SEQ ID NO: 249726 - RNA, 32 nt, Human
ugcaaagaugugccacuuuaucuaugaaaugg

SEQ ID NO: 249727 - RNA, 32 nt, Human
ugcaaagauguucuuccucuuccccgacccac

SEQ ID NO: 249728 - RNA, 32 nt, Human
ugcaaagauugaugguagagagcuugacuuuu

SEQ ID NO: 249729 - RNA, 32 nt, Human
ugcaaagcacccaaaccacuaacacauccaac

SEQ ID NO: 249730 - RNA, 32 nt, Human
ugcaaagcaccuggagauguuugcugggagau

SEQ ID NO: 249731 - RNA, 24 nt, Human
ugcaaagcagaaagaaaucaaaca

SEQ ID NO: 249732 - RNA, 18 nt, Human
ugcaaagcauccaggcgg

SEQ ID NO: 249733 - RNA, 32 nt, Human
ugcaaagcaucucuguagcccagauuuugugg

SEQ ID NO: 249734 - RNA, 32 nt, Human
ugcaaagcauuaugauaggcaccguggggaaa

SEQ ID NO: 249735 - RNA, 32 nt, Human
ugcaaagccacagcauuaaggagcucaauauu

SEQ ID NO: 249736 - RNA, 32 nt, Human
ugcaaagccagccaucacccuccggccagagc

SEQ ID NO: 249737 - RNA, 32 nt, Human
ugcaaagcccaauccaagacuggcauggcuca

SEQ ID NO: 249738 - RNA, 32 nt, Human
ugcaaagccugcuguuucaggcugucaggaag

SEQ ID NO: 249739 - RNA, 32 nt, Human
ugcaaagcuccucaugcuaugauaucuucuug

SEQ ID NO: 249740 - RNA, 32 nt, Human
ugcaaagcugacucaugaaaggagacaaggca

SEQ ID NO: 249741 - RNA, 32 nt, Human
ugcaaagcugggacucgucuuugaaggaaaaa

SEQ ID NO: 249742 - RNA, 32 nt, Human
ugcaaagcuguauguaguuagaugaugugaca

SEQ ID NO: 249743 - RNA, 32 nt, Human
ugcaaagcuguugccaugcuguggaagcucug

SEQ ID NO: 249744 - RNA, 32 nt, Human
ugcaaagcuucucaagugaggacagggcuacc

SEQ ID NO: 249745 - RNA, 32 nt, Human
ugcaaaggaaauggacaaaaaugagaaugaag

SEQ ID NO: 249746 - RNA, 32 nt, Human
ugcaaaggaaccagauauugugcucgcgguuc

SEQ ID NO: 249747 - RNA, 32 nt, Human
ugcaaaggacuaugcauucugaaaugcauagg

SEQ ID NO: 249748 - RNA, 32 nt, Human
ugcaaaggagaaaugaggaaaggugaagcugg

SEQ ID NO: 249749 - RNA, 32 nt, Human
ugcaaaggagacagaagaaggaagagagacgg

SEQ ID NO: 249750 - RNA, 27 nt, Human
ugcaaaggcugacagauucuguggcca

SEQ ID NO: 249751 - RNA, 32 nt, Human
ugcaaagggaaucucuugccugcuccaucuca

SEQ ID NO: 249752 - RNA, 32 nt, Human
ugcaaagggcaggugggcucggccuuucaagc

SEQ ID NO: 249753 - RNA, 32 nt, Human
ugcaaagggcccuuucaucuugaaguuuuucc

SEQ ID NO: 249754 - RNA, 32 nt, Human
ugcaaagggcuggcauucugaugcuuuucagg

SEQ ID NO: 249755 - RNA, 32 nt, Human
ugcaaaggguuggcacagggagagggagcuug

SEQ ID NO: 249756 - RNA, 32 nt, Human
ugcaaagguacugaugcuguaaagucaaaaca

SEQ ID NO: 249757 - RNA, 32 nt, Human
ugcaaaggucaggaacucucuccacugcauga

SEQ ID NO: 249758 - RNA, 32 nt, Human
ugcaaaggucugcaacuucacuucugaggcca

SEQ ID NO: 249759 - RNA, 32 nt, Human
ugcaaaguagaaggggccuggccacucauaga

SEQ ID NO: 249760 - RNA, 32 nt, Human
ugcaaaguccagaguggcauuuugcuacucug

SEQ ID NO: 249761 - RNA, 32 nt, Human
ugcaaagucucugaagagaacucucucuuccc

SEQ ID NO: 249762 - RNA, 32 nt, Human
ugcaaagucugucccuccuccuggagccucag

SEQ ID NO: 249763 - RNA, 32 nt, Human
ugcaaagugacccccuuugucacuggaaacaa

SEQ ID NO: 249764 - RNA, 32 nt, Human
ugcaaagugauccagcccuaccugucuuccca

SEQ ID NO: 249765 - RNA, 32 nt, Human
ugcaaagugcaaauacuccaagcuucaaguga

SEQ ID NO: 249766 - RNA, 31 nt, Human
ugcaaaguuggccauguuucacagggaaacu

SEQ ID NO: 249767 - RNA, 32 nt, Human
ugcaaaguuuugucuagcuuggccuccaaggc

SEQ ID NO: 249768 - RNA, 24 nt, Human
ugcaaauaagccugagaucagcuu

SEQ ID NO: 249769 - RNA, 32 nt, Human
ugcaaauaagcuccaccucccugcacuuguag

SEQ ID NO: 249770 - RNA, 32 nt, Human
ugcaaauaaguccugcauacggacccuggaac

SEQ ID NO: 249771 - RNA, 32 nt, Human
ugcaaauacacacuucuuuccccaaauaucau

SEQ ID NO: 249772 - RNA, 32 nt, Human
ugcaaauacagucgguguuucucucuaagugu

SEQ ID NO: 249773 - RNA, 32 nt, Human
ugcaaauagaaaucagcacauuccuccuacuu

SEQ ID NO: 249774 - RNA, 32 nt, Human
ugcaaauaggggauaaucagcccugcacggcc

SEQ ID NO: 249775 - RNA, 32 nt, Human
ugcaaauauagcugcauuuauaccucagaggg

SEQ ID NO: 249776 - RNA, 32 nt, Human
ugcaaauauauguacauauacauguauauaca

SEQ ID NO: 249777 - RNA, 32 nt, Human
ugcaaauaucccccacccaauaccuuugaggu

SEQ ID NO: 249778 - RNA, 32 nt, Human
ugcaaauaugaaucccugccucagguuagggu

SEQ ID NO: 249779 - RNA, 32 nt, Human
ugcaaaucaguaaacugaagcaagagaggcug

SEQ ID NO: 249780 - RNA, 32 nt, Human
ugcaaauccugcaguccauccauuugugcugu

SEQ ID NO: 249781 - RNA, 32 nt, Human
ugcaaaucuccccugugccugaucuguguguu

SEQ ID NO: 249782 - RNA, 18 nt, Human
ugcaaaugaacuugcucc

SEQ ID NO: 249783 - RNA, 32 nt, Human
ugcaaaugaaggaggaggauguccuuaagcuc

SEQ ID NO: 249784 - RNA, 32 nt, Human
ugcaaaugaaggaggaggauguccuuaaguuc

SEQ ID NO: 249785 - RNA, 32 nt, Human
ugcaaaugaggagagagaagaugagguuggac

SEQ ID NO: 249786 - RNA, 32 nt, Human
ugcaaaugagucgcuuaacccuugacaagguc

SEQ ID NO: 249787 - RNA, 32 nt, Human
ugcaaaugccaguuugacaagcacugcccaga

SEQ ID NO: 249788 - RNA, 32 nt, Human
ugcaaauggauucauguucucacuacaggcaa

SEQ ID NO: 249789 - RNA, 32 nt, Human
ugcaaaugggucagugacuggaagaggcggac

SEQ ID NO: 249790 - RNA, 32 nt, Human
ugcaaaugguucccuucuuguguccuuucaau

SEQ ID NO: 249791 - RNA, 23 nt, Human
ugcaaauuccaagguugcugcua

SEQ ID NO: 249792 - RNA, 24 nt, Human
ugcaaauucccagauuugaagaca

SEQ ID NO: 249793 - RNA, 32 nt, Human
ugcaaauugccacccuguguaccuccuccaug

SEQ ID NO: 249794 - RNA, 32 nt, Human
ugcaaauugccuucagggucucagccagaagg

SEQ ID NO: 249795 - RNA, 32 nt, Human
ugcaaauuguacacaaacaaacaaaaaggugg

SEQ ID NO: 249796 - RNA, 32 nt, Human
ugcaaauuguccuugccagcucuugggauccu

SEQ ID NO: 249797 - RNA, 21 nt, Human
ugcaaauuuccagggcuggcu

SEQ ID NO: 249798 - RNA, 22 nt, Human
ugcaaauuugauuuucuugcca

SEQ ID NO: 249799 - RNA, 32 nt, Human
ugcaacaaaacaccauggcacacauauaccua

SEQ ID NO: 249800 - RNA, 32 nt, Human
ugcaacaaaauggaugacuuaguggagaugga

SEQ ID NO: 249801 - RNA, 32 nt, Human
ugcaacaaaauguagaauauucagacaaaaug

SEQ ID NO: 249802 - RNA, 32 nt, Human
ugcaacaaaggugacucugucccuggacacug

SEQ ID NO: 249803 - RNA, 32 nt, Human
ugcaacaacagcaggcucuccaggcagcaaga

SEQ ID NO: 249804 - RNA, 32 nt, Human
ugcaacaaccaccaccuuauacaucacuuccu

SEQ ID NO: 249805 - RNA, 32 nt, Human
ugcaacaagacuagccaacaccuggccaugaa

SEQ ID NO: 249806 - RNA, 32 nt, Human
ugcaacacaaaagauuuuaucuguaaacacaa

SEQ ID NO: 249807 - RNA, 32 nt, Human
ugcaacacaacaacauggcacauguauacaua

SEQ ID NO: 249808 - RNA, 32 nt, Human
ugcaacacaggcuucagauucauguauuugaa

SEQ ID NO: 249809 - RNA, 16 nt, Human
ugcaacacucuccuca

SEQ ID NO: 249810 - RNA, 32 nt, Human
ugcaacacugccacuccagccugggugacaga

SEQ ID NO: 249811 - RNA, 32 nt, Human
ugcaacacuguacuccagccugggcaacagag

SEQ ID NO: 249812 - RNA, 32 nt, Human
ugcaacagaagggagagaagcggccccaagug

SEQ ID NO: 249813 - RNA, 32 nt, Human
ugcaacagaauagauguggccuuugcaaccag

SEQ ID NO: 249814 - RNA, 32 nt, Human
ugcaacagaguuuccauuguucagcucugugc

SEQ ID NO: 249815 - RNA, 32 nt, Human
ugcaacagcagaaaaguuucagauggaaaacc

SEQ ID NO: 249816 - RNA, 32 nt, Human
ugcaacagccuguuugggaggcuggaguggaa

SEQ ID NO: 249817 - RNA, 21 nt, Human
ugcaacaggcauugcugaggu

SEQ ID NO: 249818 - RNA, 32 nt, Human
ugcaacaggcugggcuucaguggcagcugcuu

SEQ ID NO: 249819 - RNA, 32 nt, Human
ugcaacagguccaggcugcuguggaagcugcu

SEQ ID NO: 249820 - RNA, 19 nt, Human
ugcaacagucuucuuccca

SEQ ID NO: 249821 - RNA, 32 nt, Human
ugcaacagugccugguacacaguugauccuca

SEQ ID NO: 249822 - RNA, 32 nt, Human
ugcaacaguuuuucacugagcaugucaagaaa

SEQ ID NO: 249823 - RNA, 20 nt, Human
ugcaacaucacaucucccca

SEQ ID NO: 249824 - RNA, 32 nt, Human
ugcaacaucccaauggcccuguccuuuucuuu

SEQ ID NO: 249825 - RNA, 32 nt, Human
ugcaacauccuucaagacaccaugaagcucca

SEQ ID NO: 249826 - RNA, 24 nt, Human
ugcaacaucugccucccggguuca

SEQ ID NO: 249827 - RNA, 31 nt, Human
ugcaacauggccaggggcugccucugcugcu

SEQ ID NO: 249828 - RNA, 21 nt, Human
ugcaacauuacugcacaccaa

SEQ ID NO: 249829 - RNA, 25 nt, Human
ugcaaccaaccugcggucucggucc

SEQ ID NO: 249830 - RNA, 32 nt, Human
ugcaaccacucucuauuacauuucucaacacc

SEQ ID NO: 249831 - RNA, 24 nt, Human
ugcaaccacugccucccaggcuca

SEQ ID NO: 249832 - RNA, 32 nt, Human
ugcaaccagcucuccgugaaucauuuccauuc

SEQ ID NO: 249833 - RNA, 26 nt, Human
ugcaaccagucccagauauugugcca

SEQ ID NO: 249834 - RNA, 28 nt, Human
ugcaacccaaguggccuuauccgugcag

SEQ ID NO: 249835 - RNA, 32 nt, Human
ugcaacccaaguggccuuauccgugcaguggu

SEQ ID NO: 249836 - RNA, 32 nt, Human
ugcaaccccagcuccacuccagccuggcgucc

SEQ ID NO: 249837 - RNA, 24 nt, Human
ugcaacccccaccucccagguuca

SEQ ID NO: 249838 - RNA, 24 nt, Human
ugcaacccccaucucccagguuca

SEQ ID NO: 249839 - RNA, 24 nt, Human
ugcaacccccgccucccggguuca

SEQ ID NO: 249840 - RNA, 24 nt, Human
ugcaacccccgucucccggguuca

SEQ ID NO: 249841 - RNA, 23 nt, Human
ugcaaccccgccucccagguuca

SEQ ID NO: 249842 - RNA, 32 nt, Human
ugcaacccugcaaccucugccuaccggguuca

SEQ ID NO: 249843 - RNA, 32 nt, Human
ugcaacccugcucuaugcugacccuugucacu

SEQ ID NO: 249844 - RNA, 32 nt, Human
ugcaaccgcuggugagggcagcgaccuuuggg

SEQ ID NO: 249845 - RNA, 24 nt, Human
ugcaaccucaaacuccugggcuca

SEQ ID NO: 249846 - RNA, 32 nt, Human
ugcaaccucaaaggagcaagccuugaaacagu

SEQ ID NO: 249847 - RNA, 24 nt, Human
ugcaaccucaaauuccugggcuca

SEQ ID NO: 249848 - RNA, 22 nt, Human
ugcaaccucaauccugggcuca

SEQ ID NO: 249849 - RNA, 23 nt, Human
ugcaaccucaccucccggguuca

SEQ ID NO: 249850 - RNA, 24 nt, Human
ugcaaccucagccucccagguuca

SEQ ID NO: 249851 - RNA, 24 nt, Human
ugcaaccucagccuccugggcuca

SEQ ID NO: 249852 - RNA, 24 nt, Human
ugcaaccuccacauccuggguuca

SEQ ID NO: 249853 - RNA, 23 nt, Human
ugcaaccuccacccauggguuca

SEQ ID NO: 249854 - RNA, 24 nt, Human
ugcaaccuccaccccccagguuca

SEQ ID NO: 249855 - RNA, 24 nt, Human
ugcaaccuccacccccggggauca

SEQ ID NO: 249856 - RNA, 23 nt, Human
ugcaaccuccacccccugaguuc

SEQ ID NO: 249857 - RNA, 24 nt, Human
ugcaaccuccacccgccggguuca

SEQ ID NO: 249858 - RNA, 24 nt, Human
ugcaaccuccacccugcagguuca

SEQ ID NO: 249859 - RNA, 24 nt, Human
ugcaaccuccaccucacagguuca

SEQ ID NO: 249860 - RNA, 24 nt, Human
ugcaaccuccaccuccaggguuca

SEQ ID NO: 249861 - RNA, 23 nt, Human
ugcaaccuccaccuccagguuca

SEQ ID NO: 249862 - RNA, 24 nt, Human
ugcaaccuccaccucccagacuca

SEQ ID NO: 249863 - RNA, 24 nt, Human
ugcaaccuccaccucccaggauca

SEQ ID NO: 249864 - RNA, 27 nt, Human
ugcauacccucaucaaaaacacucuca

SEQ ID NO: 249865 - RNA, 21 nt, Human
ugcauacccuccuccugcuuc

SEQ ID NO: 249866 - RNA, 32 nt, Human
ugcauaccuccagggacagagagcuuacuacc

SEQ ID NO: 249867 - RNA, 32 nt, Human
ugcauacgcuguuuucuccaccugccacguuc

SEQ ID NO: 249868 - RNA, 32 nt, Human
ugcauacucuugggaagcagcuuccugggaga

SEQ ID NO: 249869 - RNA, 32 nt, Human
ugcauacuguccaaagauuaggguugguggug

SEQ ID NO: 249870 - RNA, 32 nt, Human
ugcauacuguugaaguugagugcuguuuugcu

SEQ ID NO: 249871 - RNA, 32 nt, Human
ugcauacuuccuuugugcgcccaguguugugu

SEQ ID NO: 249872 - RNA, 32 nt, Human
ugcauagacuuauacccagcccugcacuguua

SEQ ID NO: 249873 - RNA, 32 nt, Human
ugcauagaguccguggcuuacagugagaacuu

SEQ ID NO: 249874 - RNA, 32 nt, Human
ugcauagcaccucuuuucauggaguagaguca

SEQ ID NO: 249875 - RNA, 32 nt, Human
ugcauagcagcgagagagucacuguuaccaca

SEQ ID NO: 249876 - RNA, 32 nt, Human
ugcauagcccuucucuauguaagcagccaugg

SEQ ID NO: 249877 - RNA, 16 nt, Human
ugcauaggaauggcca

SEQ ID NO: 249878 - RNA, 32 nt, Human
ugcauaggagugaaugagacagaaagcaagac

SEQ ID NO: 249879 - RNA, 23 nt, Human
ugcauaggcacaagugggccagg

SEQ ID NO: 249880 - RNA, 32 nt, Human
ugcauaggcuccuuccuguggguggggcuucu

SEQ ID NO: 249881 - RNA, 32 nt, Human
ugcauaggugaucucauuuaauccucucaacc

SEQ ID NO: 249882 - RNA, 32 nt, Human
ugcauaguagcuaaggccuggcuguagcaguu

SEQ ID NO: 249883 - RNA, 32 nt, Human
ugcauauacacacaugcauacaugagccucca

SEQ ID NO: 249884 - RNA, 32 nt, Human
ugcauauacuauauacagccaguaaauacaug

SEQ ID NO: 249885 - RNA, 32 nt, Human
ugcauauaucauugaacacacauaccagagau

SEQ ID NO: 249886 - RNA, 32 nt, Human
ugcauaugaaaauguccauuucuggugugugc

SEQ ID NO: 249887 - RNA, 32 nt, Human
ugcauaugccaaggaaaugucacuaaucccaa

SEQ ID NO: 249888 - RNA, 32 nt, Human
ugcauaugcuucuguuucaucuacuugggcau

SEQ ID NO: 249889 - RNA, 32 nt, Human
ugcauauggaaagauugugaaagagugugucu

SEQ ID NO: 249890 - RNA, 32 nt, Human
ugcauauggagguaggcugaaaagaauguaau

SEQ ID NO: 249891 - RNA, 23 nt, Human
ugcauaugucgaaagagcuggcu

SEQ ID NO: 249892 - RNA, 32 nt, Human
ugcauaugugaaagagaaugaugcauuaacug

SEQ ID NO: 249893 - RNA, 16 nt, Human
ugcauauuaccuacuc

SEQ ID NO: 249894 - RNA, 32 nt, Human
ugcauauuacucugccuaaucuugugcauguu

SEQ ID NO: 249895 - RNA, 32 nt, Human
ugcauauucacacauggucaacugggacaugu

SEQ ID NO: 249896 - RNA, 18 nt, Human
ugcauauucagggugcuc

SEQ ID NO: 249897 - RNA, 19 nt, Human
ugcauauucauccugcuuc

SEQ ID NO: 249898 - RNA, 17 nt, Human
ugcauauuccaugacuc

SEQ ID NO: 249899 - RNA, 18 nt, Human
ugcauauucucauguucc

SEQ ID NO: 249900 - RNA, 20 nt, Human
ugcauauucuccuuucaucc

SEQ ID NO: 249901 - RNA, 20 nt, Human
ugcauauucugcugagcuuc

SEQ ID NO: 249902 - RNA, 21 nt, Human
ugcauauuguuuaucugcucu

SEQ ID NO: 249903 - RNA, 32 nt, Human
ugcauauuuauaggugugucucugugcaugug

SEQ ID NO: 249904 - RNA, 32 nt, Human
ugcauauuuauauaaucucugacuuguaaugg

SEQ ID NO: 249905 - RNA, 20 nt, Human
ugcauauuuauguccucucc

SEQ ID NO: 249906 - RNA, 17 nt, Human
ugcauauuucaaugucc

SEQ ID NO: 249907 - RNA, 18 nt, Human
ugcauauuucauucccca

SEQ ID NO: 249908 - RNA, 32 nt, Human
ugcauauuucauugaauaaaaaugccaaagcu

SEQ ID NO: 249909 - RNA, 20 nt, Human
ugcauauuuguuacugcugc

SEQ ID NO: 249910 - RNA, 19 nt, Human
ugcauauuuguuucgcucu

SEQ ID NO: 249911 - RNA, 32 nt, Human
ugcaucaacuccauucaacaccuacugugugc

SEQ ID NO: 249912 - RNA, 32 nt, Human
ugcaucaaguuuaugaauaaagaaccauuuaa

SEQ ID NO: 249913 - RNA, 32 nt, Human
ugcaucaauggagcacauacagggagcuugga

SEQ ID NO: 249914 - RNA, 32 nt, Human
ugcaucacaaaugacagacagugcagagauuu

SEQ ID NO: 249915 - RNA, 32 nt, Human
ugcaucacaccuguaaucccagcacuuuggga

SEQ ID NO: 249916 - RNA, 32 nt, Human
ugcaucacaugucagcauacuggagcauagug

SEQ ID NO: 249917 - RNA, 32 nt, Human
ugcaucaccauaugugggugguggaggaaccg

SEQ ID NO: 249918 - RNA, 32 nt, Human
ugcaucaccucugcuuuccuccacugccauca

SEQ ID NO: 249919 - RNA, 32 nt, Human
ugcaucaccucuggccucucaucccccacucu

SEQ ID NO: 249920 - RNA, 20 nt, Human
ugcaucaccucugggccaag

SEQ ID NO: 249921 - RNA, 32 nt, Human
ugcaucacuccccuccucucccuuccugugug

SEQ ID NO: 249922 - RNA, 32 nt, Human
ugcaucacucucccuucugccuccuucaacuu

SEQ ID NO: 249923 - RNA, 32 nt, Human
ugcaucacugcacuccaaccugggcaacagag

SEQ ID NO: 249924 - RNA, 32 nt, Human
ugcaucacugcacuccagccugggcaacacag

SEQ ID NO: 249925 - RNA, 32 nt, Human
ugcaucacugcacuccagccugggcaacagag

SEQ ID NO: 249926 - RNA, 32 nt, Human
ugcaucacugcacuccagccugggcagcagag

SEQ ID NO: 249927 - RNA, 32 nt, Human
ugcaucacugcacuccagccugggcgauggag

SEQ ID NO: 249928 - RNA, 32 nt, Human
ugcaucacugcacuccagccugggugacagag

SEQ ID NO: 249929 - RNA, 32 nt, Human
ugcaucacugcacuccagcuugggugacagag

SEQ ID NO: 249930 - RNA, 32 nt, Human
ugcaucacugcacugcagccugggcaacauag

SEQ ID NO: 249931 - RNA, 17 nt, Human
ugcaucagaccuguucc

SEQ ID NO: 249932 - RNA, 32 nt, Human
ugcaucagcccaaacucacuggcguuguguuu

SEQ ID NO: 249933 - RNA, 32 nt, Human
ugcaucagccucucaaguagcugggacuacag

SEQ ID NO: 249934 - RNA, 32 nt, Human
ugcaucagccuucaagguuccugcaccuaaaa

SEQ ID NO: 249935 - RNA, 32 nt, Human
ugcaucaggaggucuggggcggugacacgauu

SEQ ID NO: 249936 - RNA, 32 nt, Human
ugcaucagggaacaggaggaggaagaggguca

SEQ ID NO: 249937 - RNA, 32 nt, Human
ugcaucagggcaggacggggucucagcccacc

SEQ ID NO: 249938 - RNA, 32 nt, Human
ugcaucauaccugcaagccaacaguucagugu

SEQ ID NO: 249939 - RNA, 22 nt, Human
ugcaucauagcccacuuucucc

SEQ ID NO: 249940 - RNA, 32 nt, Human
ugcaucaucccccagccagguccccaccaggc

SEQ ID NO: 249941 - RNA, 25 nt, Human
ugcaucauccuucugcuuguuuaca

SEQ ID NO: 249942 - RNA, 32 nt, Human
ugcaucaucuuugucaccuccacccccauaaa

SEQ ID NO: 249943 - RNA, 32 nt, Human
ugcaucauugcacuccagccugggcaacaaga

SEQ ID NO: 249944 - RNA, 32 nt, Human
ugcaucauugcacuccagccugggcaacagag

SEQ ID NO: 249945 - RNA, 32 nt, Human
ugcaucauugcacuccagccugggugacagag

SEQ ID NO: 249946 - RNA, 32 nt, Human
ugcauccaaucagaugauacaggauuuugauu

SEQ ID NO: 249947 - RNA, 24 nt, Human
ugcauccacccaggcccccgaccc

SEQ ID NO: 249948 - RNA, 32 nt, Human
ugcauccaccucugaagguacaucccagcuuc

SEQ ID NO: 249949 - RNA, 32 nt, Human
ugcauccagagaccugcccuucuaccuuccuc

SEQ ID NO: 249950 - RNA, 32 nt, Human
ugcauccagagaugccucccucaggggugugg

SEQ ID NO: 249951 - RNA, 23 nt, Human
ugcauccagcucccggguucuca

SEQ ID NO: 249952 - RNA, 32 nt, Human
ugcauccagcuggggaguacagccccuuccgc

SEQ ID NO: 249953 - RNA, 32 nt, Human
ugcauccaggagauagaaguugcagugagcug

SEQ ID NO: 249954 - RNA, 32 nt, Human
ugcauccaggagauggaaguugcugugagcug

SEQ ID NO: 249955 - RNA, 23 nt, Human
ugcauccauuccucagggacaga

SEQ ID NO: 249956 - RNA, 32 nt, Human
ugcaucccaaagaaggcgcagaacagcacgug

SEQ ID NO: 249957 - RNA, 32 nt, Human
ugcaucccagcccuucaggaagccugugaaaa

SEQ ID NO: 249958 - RNA, 32 nt, Human
ugcaucccuauaaacccaucauaaagucaaaa

SEQ ID NO: 249959 - RNA, 32 nt, Human
ugcaucccuccaccccaguaucccugcaccuc

SEQ ID NO: 249960 - RNA, 32 nt, Human
ugcaucccucccccacuggagugauuucagug

SEQ ID NO: 249961 - RNA, 32 nt, Human
ugcaucccuccccuguccaccuuuguccagug

SEQ ID NO: 249962 - RNA, 22 nt, Human
ugcauccgcuaaaaauguuaaa

SEQ ID NO: 249963 - RNA, 32 nt, Human
ugcauccggcuuuccaccuuaaacugguuucu

SEQ ID NO: 249964 - RNA, 32 nt, Human
ugcauccguccaaguucacugccuuuauuuuc

SEQ ID NO: 249965 - RNA, 22 nt, Human
ugcauccguguugguucuuuua

SEQ ID NO: 249966 - RNA, 32 nt, Human
ugcauccucauagcuuagcucccacuuaaaag

SEQ ID NO: 249967 - RNA, 24 nt, Human
ugcauccuccaccuccuggguuca

SEQ ID NO: 249968 - RNA, 32 nt, Human
ugcauccuggaggugaagguugcagugagcca

SEQ ID NO: 249969 - RNA, 32 nt, Human
ugcauccuguaaucauagcuacuugggagguu

SEQ ID NO: 249970 - RNA, 32 nt, Human
ugcaucgagcccugggccucaggcuucaaugu

SEQ ID NO: 249971 - RNA, 32 nt, Human
ugcaucgcccacccugcgguccugauuucagc

SEQ ID NO: 249972 - RNA, 32 nt, Human
ugcaucgcggagccucgacuccggacacgcgc

SEQ ID NO: 249973 - RNA, 21 nt, Human
ugcaucggaaaguggcuguga

SEQ ID NO: 249974 - RNA, 18 nt, Human
ugcaucggccugccugug

SEQ ID NO: 249975 - RNA, 32 nt, Human
ugcaucgguugcagauacaauagaagaaaaau

SEQ ID NO: 249976 - RNA, 32 nt, Human
ugcaucuaccuccucuuccuccaucuuuggcu

SEQ ID NO: 249977 - RNA, 32 nt, Human
ugcaucuaccuucccccaguucaucaaagccu

SEQ ID NO: 249978 - RNA, 32 nt, Human
ugcaucuaccuuuaucccugacugccuugaag

SEQ ID NO: 249979 - RNA, 32 nt, Human
ugcaucuauagucccugcuauuugagaggcug

SEQ ID NO: 249980 - RNA, 32 nt, Human
ugcaucuaucucuucgcucugucuuccacaaa

SEQ ID NO: 249981 - RNA, 32 nt, Human
ugcaucucacuggagacugaacacuagucccu

SEQ ID NO: 249982 - RNA, 32 nt, Human
ugcaucucaguguuaaggggugcagucucccc

SEQ ID NO: 249983 - RNA, 32 nt, Human
ugcaucucauuuuuauagagcuacucauccuu

SEQ ID NO: 249984 - RNA, 18 nt, Human
ugcaucuccaccugcucc

SEQ ID NO: 249985 - RNA, 32 nt, Human
ugcaucucccagaagggaugagucuuuguccc

SEQ ID NO: 249986 - RNA, 32 nt, Human
ugcaucuccucccaggauuccacaacaaaauu

SEQ ID NO: 249987 - RNA, 32 nt, Human
ugcaucuccugggguguguccucgucuguccc

SEQ ID NO: 249988 - RNA, 32 nt, Human
ugcaucuccuucuccucucugccugccuccuc

SEQ ID NO: 249989 - RNA, 32 nt, Human
ugcaucugaaucugcaugauuuccaaacccug

SEQ ID NO: 249990 - RNA, 32 nt, Human
ugcaucugacucugaaaguuccucccucucgc

SEQ ID NO: 249991 - RNA, 32 nt, Human
ugcaucugaggcggacgccgcaguguagggca

SEQ ID NO: 249992 - RNA, 32 nt, Human
ugcaucugcacccagggucccagccuggccac

SEQ ID NO: 249993 - RNA, 32 nt, Human
ugcaucugcaccugacuuuggggccacgugcc

SEQ ID NO: 249994 - RNA, 32 nt, Human
ugcaucugcacugucaccaugugcccagagcc

SEQ ID NO: 249995 - RNA, 32 nt, Human
ugcaucugccacugcuuuuauaaauggcucug

SEQ ID NO: 249996 - RNA, 32 nt, Human
ugcaucugcccacgauggcagugcagucauca

SEQ ID NO: 249997 - RNA, 32 nt, Human
ugcaucugccccaacccauccagccugcaugu

SEQ ID NO: 249998 - RNA, 32 nt, Human
ugcaucuggaacacacuuguccucagcuuacc

SEQ ID NO: 249999 - RNA, 32 nt, Human
ugcaucugggaggugguaggccacaguccuga

SEQ ID NO: 250000 - RNA, 32 nt, Human
ugcaucugguucugaaaaaguauagcauguag

SEQ ID NO: 250001 - RNA, 32 nt, Human
ugcaucuguaaucccagcuacuugggaggcug

SEQ ID NO: 250002 - RNA, 32 nt, Human
ugcaucuguagucccaccuauucaggagauua

SEQ ID NO: 250003 - RNA, 32 nt, Human
ugcaucuguagucccagcuacucgggaggcug

SEQ ID NO: 250004 - RNA, 32 nt, Human
ugcaucuguagucccagcuacuugggaggcug

SEQ ID NO: 250005 - RNA, 32 nt, Human
ugcaucugugccaggcugaccugccccaugcc

SEQ ID NO: 250006 - RNA, 32 nt, Human
ugcaucuguggauagaacgccacccagccgcc

SEQ ID NO: 250007 - RNA, 32 nt, Human
ugcaucuguugggccucacaaggaccagggcc

SEQ ID NO: 250008 - RNA, 32 nt, Human
ugcaucuuaauucaauauaaagccugacaaua

SEQ ID NO: 250009 - RNA, 32 nt, Human
ugcaucuuccucuccuuucccaaggcauccuc

SEQ ID NO: 250010 - RNA, 31 nt, Human
ugcaucuuccucucuggguuucaguuuuccu

SEQ ID NO: 250011 - RNA, 32 nt, Human
ugcaucuucugggcccuucucuccuuuaggcc

SEQ ID NO: 250012 - RNA, 32 nt, Human
ugcaucuuucuuucucuuugguuccugcacau

SEQ ID NO: 250013 - RNA, 32 nt, Human
ugcaucuuugcaggaagguucucuccauguga

SEQ ID NO: 250014 - RNA, 32 nt, Human
ugcaucuuuuuaucuucugguuucuagggaua

SEQ ID NO: 250015 - RNA, 18 nt, Human
ugcaugaaagcucuaccc

SEQ ID NO: 250016 - RNA, 32 nt, Human
ugcaugaccccuucaugaauaaucauguaaaa

SEQ ID NO: 250017 - RNA, 28 nt, Human
ugcaugacccuccggcggcgcggggaga

SEQ ID NO: 250018 - RNA, 32 nt, Human
ugcaugagacacacaccuacccuccccagcuu

SEQ ID NO: 250019 - RNA, 32 nt, Human
ugcaugagagguuacccuucaggaugacagag

SEQ ID NO: 250020 - RNA, 32 nt, Human
ugcaugagcaaggaguugggagguugcuuacu

SEQ ID NO: 250021 - RNA, 32 nt, Human
ugcaugagccacugugcugggcuucauuuaca

SEQ ID NO: 250022 - RNA, 32 nt, Human
ugcaugagcucuccuucccagagaccaacucu

SEQ ID NO: 250023 - RNA, 32 nt, Human
ugcaugaggcucauggaccagcucugauccca

SEQ ID NO: 250024 - RNA, 32 nt, Human
ugcaugaugccucugaauucaggaauugcagg

SEQ ID NO: 250025 - RNA, 32 nt, Human
ugcaugauucacacccagucccugccacagac

SEQ ID NO: 250026 - RNA, 32 nt, Human
ugcaugauugccuuuuucucuucuuuuuaaaa

SEQ ID NO: 250027 - RNA, 32 nt, Human
ugcaugauuuuuaaaagcaguacuccuaggga

SEQ ID NO: 250028 - RNA, 32 nt, Human
ugcaugcacaccuuccuccacccuccacccug

SEQ ID NO: 250029 - RNA, 32 nt, Human
ugcaugcagagaggaggagguggagcaggagu

SEQ ID NO: 250030 - RNA, 32 nt, Human
ugcaugcagccccagcaggcugcguguuuaag

SEQ ID NO: 250031 - RNA, 32 nt, Human
ugcaugcagucaggcuggcaguggcgcgguac

SEQ ID NO: 250032 - RNA, 32 nt, Human
ugcaugcaugugacuugcuucuuuuugcauug

SEQ ID NO: 250033 - RNA, 32 nt, Human
ugcaugcauucacacacacauauguacaugca

SEQ ID NO: 250034 - RNA, 32 nt, Human
ugcaugcauugagcugccuccagccugguggc

SEQ ID NO: 250035 - RNA, 32 nt, Human
ugcaugccagagacuucaguuucugcucugca

SEQ ID NO: 250036 - RNA, 21 nt, Human
ugcaugccagcccacugcuca

SEQ ID NO: 250037 - RNA, 32 nt, Human
ugcaugccagccugggcaacaagagugaaacu

SEQ ID NO: 250038 - RNA, 20 nt, Human
ugcaugccaggugggccgag

SEQ ID NO: 250039 - RNA, 32 nt, Human
ugcaugcccaggagcacaggagugccugccuu

SEQ ID NO: 250040 - RNA, 32 nt, Human
ugcaugcccaggcuugugagccaaggugcuuu

SEQ ID NO: 250041 - RNA, 19 nt, Human
ugcaugcccuccccacuuc

SEQ ID NO: 250042 - RNA, 32 nt, Human
ugcaugccggcuugagacuggagccccgcggu

SEQ ID NO: 250043 - RNA, 32 nt, Human
ugcaugccuaucuccucaucucccccucccuu

SEQ ID NO: 250044 - RNA, 32 nt, Human
ugcaugccuguaauccagcuacuugggaggcu

SEQ ID NO: 250045 - RNA, 32 nt, Human
ugcaugccuguaaucccagcauuuugggaggc

SEQ ID NO: 250046 - RNA, 32 nt, Human
ugcaugccuguaaucccagcuacucuggaggc

SEQ ID NO: 250047 - RNA, 32 nt, Human
ugcaugccuguaaucccagcuacuuggaaggc

SEQ ID NO: 250048 - RNA, 32 nt, Human
ugcaugccuguaaucccagcuacuugggaggc

SEQ ID NO: 250049 - RNA, 32 nt, Human
ugcaugccuguaaucccagcugcuugggaggc

SEQ ID NO: 250050 - RNA, 32 nt, Human
ugcaugccuguaaucccugcuacuugggagac

SEQ ID NO: 250051 - RNA, 32 nt, Human
ugcaugccuguaauccuagcuacucaggagcc

SEQ ID NO: 250052 - RNA, 32 nt, Human
ugcaugccuguaauccuagcuacucgggaggc

SEQ ID NO: 250053 - RNA, 32 nt, Human
ugcaugccuguaauccuagcugcuugggugcu

SEQ ID NO: 250054 - RNA, 32 nt, Human
ugcaugccuguaaucucagcuacuugggaggc

SEQ ID NO: 250055 - RNA, 32 nt, Human
ugcaugccuguaucccagcuacuugggaggcu

SEQ ID NO: 250056 - RNA, 32 nt, Human
ugcaugccuguauuccaggugcucaggaggcu

SEQ ID NO: 250057 - RNA, 32 nt, Human
ugcaugccugugauccuagcugcuggggaggc

SEQ ID NO: 250058 - RNA, 32 nt, Human
ugcaugccuuucccaggcucuccccaggcgga

SEQ ID NO: 250059 - RNA, 32 nt, Human
ugcaugcuacauauguguacgcucagaccaca

SEQ ID NO: 250060 - RNA, 22 nt, Human
ugcaugcuacuguucucuuuca

SEQ ID NO: 250061 - RNA, 32 nt, Human
ugcaugcuauuccauuuugcagccagaccgau

SEQ ID NO: 250062 - RNA, 32 nt, Human
ugcaugcugccgucauggaauguggcccacag

SEQ ID NO: 250063 - RNA, 32 nt, Human
ugcaugcugggagggaggaugugugcauuuug

SEQ ID NO: 250064 - RNA, 32 nt, Human
ugcaugcuuguaaucccagcuacuugggaggc

SEQ ID NO: 250065 - RNA, 32 nt, Human
ugcauggaaagggagccugggagccagcagcc

SEQ ID NO: 250066 - RNA, 32 nt, Human
ugcauggaacaugcuuaaucuaaacaaugauu

SEQ ID NO: 250067 - RNA, 32 nt, Human
ugcauggaagaaacaguaaucggauggcuacc

SEQ ID NO: 250068 - RNA, 17 nt, Human
ugcauggacaccugcuc

SEQ ID NO: 250069 - RNA, 18 nt, Human
ugcauggacccggugcaa

SEQ ID NO: 250070 - RNA, 32 nt, Human
ugcauggacucugcccucagggugccugucca

SEQ ID NO: 250071 - RNA, 21 nt, Human
ugcauggacugugaaaccuca

SEQ ID NO: 250072 - RNA, 32 nt, Human
ugcauggagagggaaacaugagcaugcagcag

SEQ ID NO: 250073 - RNA, 32 nt, Human
ugcauggagcuucucauuugucuucaggauuc

SEQ ID NO: 250074 - RNA, 19 nt, Human
ugcauggaucugggucaag

SEQ ID NO: 250075 - RNA, 17 nt, Human
ugcauggcaccugcucu

SEQ ID NO: 250076 - RNA, 32 nt, Human
ugcauggccaaguucaguguuuacagauaaaa

SEQ ID NO: 250077 - RNA, 32 nt, Human
ugcauggccacagccaccuccacccccaagaa

SEQ ID NO: 250078 - RNA, 32 nt, Human
ugcauggccaggcagagucagcagcugcagug

SEQ ID NO: 250079 - RNA, 17 nt, Human
ugcauggccaucucccc

SEQ ID NO: 250080 - RNA, 32 nt, Human
ugcauggccaucucccccucccuuuuuccuuc

SEQ ID NO: 250081 - RNA, 32 nt, Human
ugcauggcugcacucuagccugggugacagug

SEQ ID NO: 250082 - RNA, 28 nt, Human
ugcauggcuggguggggacugguggaug

SEQ ID NO: 250083 - RNA, 32 nt, Human
ugcaugggaggaauucaucuucagucuaccag

SEQ ID NO: 250084 - RNA, 32 nt, Human
ugcaugggaucuggugccccucuucuccugga

SEQ ID NO: 250085 - RNA, 32 nt, Human
ugcaugggcauggugaccccaguuuugcccgu

SEQ ID NO: 250086 - RNA, 32 nt, Human
ugcaugggcugagucccugggcucagaccuag

SEQ ID NO: 250087 - RNA, 32 nt, Human
ugcauggggaggcggcggcagcggguggaccc

SEQ ID NO: 250088 - RNA, 32 nt, Human
ugcauggggccccucccuucuuccacacccac

SEQ ID NO: 250089 - RNA, 32 nt, Human
ugcaugggggccugagggccuguggguuugau

SEQ ID NO: 250090 - RNA, 32 nt, Human
ugcaugggguggagaacagggaaggagaaaaa

SEQ ID NO: 250091 - RNA, 32 nt, Human
ugcaugggguggucuuuauuuuucccuuucaa

SEQ ID NO: 250092 - RNA, 32 nt, Human
ugcaugggugcagaggauggaggcugagaaag

SEQ ID NO: 250093 - RNA, 32 nt, Human
ugcaugguacuccaaggagaaaaguuucuauu

SEQ ID NO: 250094 - RNA, 32 nt, Human
ugcauggucaaguggugcuaacccaagacugu

SEQ ID NO: 250095 - RNA, 18 nt, Human
ugcauguaccuacugcuc

SEQ ID NO: 250096 - RNA, 32 nt, Human
ugcauguaguugacgaaaacaaaaaugaaucc

SEQ ID NO: 250097 - RNA, 32 nt, Human
ugcauguaguuggguauaauuuuuauccaguc

SEQ ID NO: 250098 - RNA, 32 nt, Human
ugcauguaguugucacuugcagcuccauuucc

SEQ ID NO: 250099 - RNA, 32 nt, Human
ugcauguauacaaacgaauagcagauaaugau

SEQ ID NO: 250100 - RNA, 18 nt, Human
ugcauguauaccugcacc

SEQ ID NO: 250101 - RNA, 32 nt, Human
ugcauguaugucuuugucucucuugucuaaua

SEQ ID NO: 250102 - RNA, 32 nt, Human
ugcaugucaaaucacauugaagccugaagauu

SEQ ID NO: 250103 - RNA, 32 nt, Human
ugcaugucaguaguugguucuuuuuauugcug

SEQ ID NO: 250104 - RNA, 32 nt, Human
ugcaugucccccacccuccacagucuuccuug

SEQ ID NO: 250105 - RNA, 18 nt, Human
ugcauguccuucucccca

SEQ ID NO: 250106 - RNA, 32 nt, Human
ugcaugucucucucacccccauguccaaucag

SEQ ID NO: 250107 - RNA, 32 nt, Human
ugcaugugacggggugggagggggagguuucu

SEQ ID NO: 250108 - RNA, 24 nt, Human
ugcaugugcagccgccgccgccac

SEQ ID NO: 250109 - RNA, 32 nt, Human
ugcaugugccuguaaucccagcuacucaggag

SEQ ID NO: 250110 - RNA, 32 nt, Human
ugcaugugcuacugcugcuacaggccugucua

SEQ ID NO: 250111 - RNA, 32 nt, Human
ugcaugugcucaugugaacacacacgugcguc

SEQ ID NO: 250112 - RNA, 31 nt, Human
ugcauguggacaauacucugagaacaugucu

SEQ ID NO: 250113 - RNA, 32 nt, Human
ugcauguggcccaggacaguuuugaaugcagu

SEQ ID NO: 250114 - RNA, 32 nt, Human
ugcauguggcuuggcaaugucacagacagcaa

SEQ ID NO: 250115 - RNA, 32 nt, Human
ugcaugugggaagggagcaggagggccuggcu

SEQ ID NO: 250116 - RNA, 32 nt, Human
ugcauguggguagaggauguacugggacuugg

SEQ ID NO: 250117 - RNA, 32 nt, Human
ugcaugugggugggggagagcauauuggcuau

SEQ ID NO: 250118 - RNA, 32 nt, Human
ugcauguguagccugugcauguaugucuugga

SEQ ID NO: 250119 - RNA, 29 nt, Human
ugcaugugucuguguguguggaacuuuug

SEQ ID NO: 250120 - RNA, 32 nt, Human
ugcaugugucuguguguguggaacuuuuguac

SEQ ID NO: 250121 - RNA, 32 nt, Human
ugcauguguuggugcugaccuccaggccgaga

SEQ ID NO: 250122 - RNA, 32 nt, Human
ugcauguuaguccacagaguugcccagaaccc

SEQ ID NO: 250123 - RNA, 16 nt, Human
ugcauguucacugccc

SEQ ID NO: 250124 - RNA, 32 nt, Human
ugcauguuccuguuucagccucugccuuucca

SEQ ID NO: 250125 - RNA, 32 nt, Human
ugcauguuccuuggacaccugccucagugugc

SEQ ID NO: 250126 - RNA, 32 nt, Human
ugcauguucuauagagggccagagagugaaua

SEQ ID NO: 250127 - RNA, 32 nt, Human
ugcauguuuagucccagcuacacagcagggag

SEQ ID NO: 250128 - RNA, 32 nt, Human
ugcauguuugugugugcgugcauauguguaug

SEQ ID NO: 250129 - RNA, 32 nt, Human
ugcauuaaaauggguuucacugugaaugcgug

SEQ ID NO: 250130 - RNA, 32 nt, Human
ugcauuaagcuugaaacaugaggcagagaaag

SEQ ID NO: 250131 - RNA, 32 nt, Human
ugcauuacgcucggaacacauucuccaggggc

SEQ ID NO: 250132 - RNA, 32 nt, Human
ugcauuacuguaugucuucugccuccacacuu

SEQ ID NO: 250133 - RNA, 32 nt, Human
ugcauuagauaggauccucacaucccauucag

SEQ ID NO: 250134 - RNA, 32 nt, Human
ugcauuaucugaggucacagggccuggggaga

SEQ ID NO: 250135 - RNA, 32 nt, Human
ugcauuauuuuuaacaaaugguauuggcuuaa

SEQ ID NO: 250136 - RNA, 32 nt, Human
ugcauucaacaaacacuuaugagugccuggag

SEQ ID NO: 250137 - RNA, 32 nt, Human
ugcauucaccaccuuuuaaauuuuggucacug

SEQ ID NO: 250138 - RNA, 32 nt, Human
ugcauucaccuaggccaagaaacaguguugua

SEQ ID NO: 250139 - RNA, 32 nt, Human
ugcauucaucacuuuaaacaucauguuucagg

SEQ ID NO: 250140 - RNA, 32 nt, Human
ugcauucauccagcucaccccagcaaggacgg

SEQ ID NO: 250141 - RNA, 32 nt, Human
ugcauucauccccuccuccucaucucucccuu

SEQ ID NO: 250142 - RNA, 32 nt, Human
ugcauuccaccacauauccacccuugagaagu

SEQ ID NO: 250143 - RNA, 32 nt, Human
ugcauuccagagaugcacuccgcucuggaacu

SEQ ID NO: 250144 - RNA, 32 nt, Human
ugcauuccagccugagcaacagagcaagacac

SEQ ID NO: 250145 - RNA, 32 nt, Human
ugcauuccagccugagcgacagaguaagacuc

SEQ ID NO: 250146 - RNA, 32 nt, Human
ugcauuccagccuggauaauagagugagaccc

SEQ ID NO: 250147 - RNA, 32 nt, Human
ugcauuccagccuggcgacagagugagacucc

SEQ ID NO: 250148 - RNA, 32 nt, Human
ugcauuccagccugggcaacaagagugaaacu

SEQ ID NO: 250149 - RNA, 32 nt, Human
ugcauuccagccugggcaacagagcaagaccc

SEQ ID NO: 250150 - RNA, 32 nt, Human
ugcauuccagccugggcaacagagcaagaccu

SEQ ID NO: 250151 - RNA, 32 nt, Human
ugcauuccagccugggcaacagagcaagacug

SEQ ID NO: 250152 - RNA, 32 nt, Human
ugcauuccagccugggcaacagcgugagacuu

SEQ ID NO: 250153 - RNA, 32 nt, Human
ugcauuccagccugggcacuagagugagacuc

SEQ ID NO: 250154 - RNA, 32 nt, Human
ugcauuccagccugggcgacagagugagaccc

SEQ ID NO: 250155 - RNA, 32 nt, Human
ugcauuccagccugggugacagagugagaccc

SEQ ID NO: 250156 - RNA, 32 nt, Human
ugcauuccagccugggugacagagugagacuc

SEQ ID NO: 250157 - RNA, 32 nt, Human
ugcauuccagccugggugacagagugagaucc

SEQ ID NO: 250158 - RNA, 32 nt, Human
ugcauuccagccuggguggacagaacaaggcc

SEQ ID NO: 250159 - RNA, 32 nt, Human
ugcauuccagccugguugacagagugagacuc

SEQ ID NO: 250160 - RNA, 32 nt, Human
ugcauuccauuuuaacucuucuugagcuaaaa

SEQ ID NO: 250161 - RNA, 32 nt, Human
ugcauucccaggagguuaagacauucuaaguc

SEQ ID NO: 250162 - RNA, 32 nt, Human
ugcauucccugaaucugugccugcacugagag

SEQ ID NO: 250163 - RNA, 32 nt, Human
ugcauuccuauguaaaugcccuccauaaaaac

SEQ ID NO: 250164 - RNA, 32 nt, Human
ugcauuccucccacccuggccucccagagugc

SEQ ID NO: 250165 - RNA, 32 nt, Human
ugcauuccugaccggcaccuggcgaggcucau

SEQ ID NO: 250166 - RNA, 32 nt, Human
ugcauuccugccuuccgugaaggagugcccag

SEQ ID NO: 250167 - RNA, 32 nt, Human
ugcauuccugggggcuggaggguggggugcca

SEQ ID NO: 250168 - RNA, 18 nt, Human
ugcauucgacucucccca

SEQ ID NO: 250169 - RNA, 32 nt, Human
ugcauucgagacugguggagggugggcugggc

SEQ ID NO: 250170 - RNA, 32 nt, Human
ugcauucuacugucacccaucuggagcagcuu

SEQ ID NO: 250171 - RNA, 32 nt, Human
ugcauucuccaccccuccgccaauggcuucca

SEQ ID NO: 250172 - RNA, 32 nt, Human
ugcauucuccauccucauccucugcccuccca

SEQ ID NO: 250173 - RNA, 32 nt, Human
ugcauucucuccugccccaaagugccaagcca

SEQ ID NO: 250174 - RNA, 32 nt, Human
ugcauucugccaccccucacacagccaaaccc

SEQ ID NO: 250175 - RNA, 32 nt, Human
ugcauucuggaaagcucucccaggaggaagca

SEQ ID NO: 250176 - RNA, 32 nt, Human
ugcauucugggcacuggugcagcugcuggcca

SEQ ID NO: 250177 - RNA, 32 nt, Human
ugcauucugucuguccuuuuccuccuuggagc

SEQ ID NO: 250178 - RNA, 32 nt, Human
ugcauucuugagaucuuuuauuuuggaaugau

SEQ ID NO: 250179 - RNA, 32 nt, Human
ugcauucuugucgugccguccugggccucagg

SEQ ID NO: 250180 - RNA, 32 nt, Human
ugcauucuuuuaacuucuaccuccuggcucua

SEQ ID NO: 250181 - RNA, 32 nt, Human
ugcauugagaacacaggaacaggugaucguuu

SEQ ID NO: 250182 - RNA, 32 nt, Human
ugcauugagccaagaucacaccgcugcacuca

SEQ ID NO: 250183 - RNA, 32 nt, Human
ugcauugagccaagaucacgccacugcauucc

SEQ ID NO: 250184 - RNA, 32 nt, Human
ugcauugagcugccuccagccugguggcccag

SEQ ID NO: 250185 - RNA, 32 nt, Human
ugcauugaggaacccuuuuucuccccgcugug

SEQ ID NO: 250186 - RNA, 32 nt, Human
ugcauugccgcuucugucuguguuguuggugu

SEQ ID NO: 250187 - RNA, 32 nt, Human
ugcauugccugggacuagaggcuggggaggcu

SEQ ID NO: 250188 - RNA, 32 nt, Human
ugcauugccuguagucccagcuacuugggagg

SEQ ID NO: 250189 - RNA, 20 nt, Human
ugcauugcugugaauuagcu

SEQ ID NO: 250190 - RNA, 32 nt, Human
ugcauugcuuugacuucccucuccuugguuaa

SEQ ID NO: 250191 - RNA, 32 nt, Human
ugcauuggaaagacuggcaaagucuuuuggau

SEQ ID NO: 250192 - RNA, 32 nt, Human
ugcauuggagagaaaggcgccgggacagaaaa

SEQ ID NO: 250193 - RNA, 32 nt, Human
ugcauuggagcagcagucccucacuuugaaac

SEQ ID NO: 250194 - RNA, 32 nt, Human
ugcauuggagucagagguacagaucuauuguu

SEQ ID NO: 250195 - RNA, 31 nt, Human
ugcauuggcacaaucucggcucauggcaagc

SEQ ID NO: 250196 - RNA, 32 nt, Human
ugcauuggcaccccuccagccuggaggccagg

SEQ ID NO: 250197 - RNA, 31 nt, Human
ugcauuggcaugaucucagcucacuacaacc

SEQ ID NO: 250198 - RNA, 32 nt, Human
ugcauuggccuggagcuggagaguaaggcugu

SEQ ID NO: 250199 - RNA, 32 nt, Human
ugcauuggcucaauacaugaauuggaucaauu

SEQ ID NO: 250200 - RNA, 21 nt, Human
ugcauuggcugggugcagugg

SEQ ID NO: 250201 - RNA, 32 nt, Human
ugcauugggaggagaaggcagggugagggauc

SEQ ID NO: 250202 - RNA, 32 nt, Human
ugcauugguucaugccuauaaucccagcgcuu

SEQ ID NO: 250203 - RNA, 32 nt, Human
ugcauuguaggagcaaacaaggcuucauauuc

SEQ ID NO: 250204 - RNA, 32 nt, Human
ugcauuguaggaugcugagcagcaucccgggc

SEQ ID NO: 250205 - RNA, 32 nt, Human
ugcauugucuugucacaccucccucacagucu

SEQ ID NO: 250206 - RNA, 32 nt, Human
ugcauugugauggaagacagagaagaaaagca

SEQ ID NO: 250207 - RNA, 32 nt, Human
ugcauugugauggucugcgagcagccggaggu

SEQ ID NO: 250208 - RNA, 22 nt, Human
ugcauuguuuugugcucaacuu

SEQ ID NO: 250209 - RNA, 22 nt, Human
ugcauuguuuuuagcucagguu

SEQ ID NO: 250210 - RNA, 32 nt, Human
ugcauuuaaccaacauggcacauguauacaua

SEQ ID NO: 250211 - RNA, 32 nt, Human
ugcauuuaagcaggaguaaggaagaaagugac

SEQ ID NO: 250212 - RNA, 32 nt, Human
ugcauuuaaguuguuugaaggcauguauuuug

SEQ ID NO: 250213 - RNA, 32 nt, Human
ugcauuuaaucaagacuucugugucucacaca

SEQ ID NO: 250214 - RNA, 22 nt, Human
ugcauuuaauucugaaaucagu

SEQ ID NO: 250215 - RNA, 32 nt, Human
ugcauuuauaagccuuaauauaauauacauaa

SEQ ID NO: 250216 - RNA, 32 nt, Human
ugcauuuauggugaaaacagucuuugcucauu

SEQ ID NO: 250217 - RNA, 32 nt, Human
ugcauuuauucaucaccccuguccucucaucc

SEQ ID NO: 250218 - RNA, 22 nt, Human
ugcauuucaaucagaagcaaag

SEQ ID NO: 250219 - RNA, 32 nt, Human
ugcauuucagugagccggguccugaccugccg

SEQ ID NO: 250220 - RNA, 32 nt, Human
ugcauuucauaaaaggcaaaguuuacagaacc

SEQ ID NO: 250221 - RNA, 32 nt, Human
ugcauuucauuuccugcucucuugcuaccacc

SEQ ID NO: 250222 - RNA, 32 nt, Human
ugcauuucauuucuucaguuaaagccuucaga

SEQ ID NO: 250223 - RNA, 32 nt, Human
ugcauuuccaagaaaagacuucuaagagugcu

SEQ ID NO: 250224 - RNA, 32 nt, Human
ugcauuuccaccauagacuuguucacaugcac

SEQ ID NO: 250225 - RNA, 32 nt, Human
ugcauuuccagccccagcaucuugcuggagcc

SEQ ID NO: 250226 - RNA, 32 nt, Human
ugcauuuccagcugcugccagccuuccugcag

SEQ ID NO: 250227 - RNA, 17 nt, Human
ugcauuuccucucccca

SEQ ID NO: 250228 - RNA, 32 nt, Human
ugcauuuccugacagaaggacucagguugucu

SEQ ID NO: 250229 - RNA, 32 nt, Human
ugcauuuccuggaacucugccaccucauuuca

SEQ ID NO: 250230 - RNA, 32 nt, Human
ugcauuuccuggcugaggaaggguggucaucc

SEQ ID NO: 250231 - RNA, 32 nt, Human
ugcauuucgugagcccugcaaaggugauggug

SEQ ID NO: 250232 - RNA, 32 nt, Human
ugcauuucuagauaaaaguauuuuucagaaaa

SEQ ID NO: 250233 - RNA, 32 nt, Human
ugcauuucucaauugucaucagccuggugggg

SEQ ID NO: 250234 - RNA, 32 nt, Human
ugcauuucuccuagcuuuucaucaggaaaucc

SEQ ID NO: 250235 - RNA, 32 nt, Human
ugcauuucuggcuucucucaauggcuuguguu

SEQ ID NO: 250236 - RNA, 32 nt, Human
ugcauuucuuuccaaaaucuaauuauuaauag

SEQ ID NO: 250237 - RNA, 32 nt, Human
ugcauuucuuuuugugggaaugugggaggaga

SEQ ID NO: 250238 - RNA, 17 nt, Human
ugcauuugaccugcucu

SEQ ID NO: 250239 - RNA, 32 nt, Human
ugcauuugagaaggcaggcuuucauaugcugu

SEQ ID NO: 250240 - RNA, 32 nt, Human
ugcauuugcaagagcuugucuccugaggugga

SEQ ID NO: 250241 - RNA, 32 nt, Human
ugcauuugcaccagaugaauguuugugcuaug

SEQ ID NO: 250242 - RNA, 32 nt, Human
ugcauuugcggguggucugccuguguauuuug

SEQ ID NO: 250243 - RNA, 32 nt, Human
ugcauuuggcugcuucucuugugaccacaauu

SEQ ID NO: 250244 - RNA, 32 nt, Human
ugcauuugguaggaagccugaggcaaaaacug

SEQ ID NO: 250245 - RNA, 32 nt, Human
ugcauuuggucuucucuguuuugacucuuuca

SEQ ID NO: 250246 - RNA, 32 nt, Human
ugcauuuguagcucuguaauccuugaauacgg

SEQ ID NO: 250247 - RNA, 32 nt, Human
ugcauuuguauaaaaauauauguguguaauua

SEQ ID NO: 250248 - RNA, 32 nt, Human
ugcauuuguccaccuuugauuugaggcuuuag

SEQ ID NO: 250249 - RNA, 32 nt, Human
ugcauuugugcacaaggagcaggcaagcaggc

SEQ ID NO: 250250 - RNA, 32 nt, Human
ugcauuuguucaauaaauauuuaacugaaaaa

SEQ ID NO: 250251 - RNA, 32 nt, Human
ugcauuuucaccucaagaaugccaucauguuu

SEQ ID NO: 250252 - RNA, 32 nt, Human
ugcauuuucgaucaugggcuacaugccgagug

SEQ ID NO: 250253 - RNA, 32 nt, Human
ugcauuuucuaaacagagaugaggugguaucu

SEQ ID NO: 250254 - RNA, 32 nt, Human
ugcauuuucuagauccacaccuggauacugcc

SEQ ID NO: 250255 - RNA, 32 nt, Human
ugcauuuucucagcuccuggggauggaaaugg

SEQ ID NO: 250256 - RNA, 32 nt, Human
ugcauuuucucucuacguuagucucagguccu

SEQ ID NO: 250257 - RNA, 32 nt, Human
ugcauuuucucuuccaaaaaggaaagguucuu

SEQ ID NO: 250258 - RNA, 32 nt, Human
ugcauuuucuggcccggaguugccugcaucca

SEQ ID NO: 250259 - RNA, 32 nt, Human
ugcauuuuggugguaauuuuaaaggucuugau

SEQ ID NO: 250260 - RNA, 32 nt, Human
ugcauuuuucaguucagccacuggggagcaua

SEQ ID NO: 250261 - RNA, 32 nt, Human
ugcauuuuugugaaaugaaaacauguaauaaa

SEQ ID NO: 250262 - RNA, 32 nt, Human
ugccaaaaacaacaaauagccacagaacguag

SEQ ID NO: 250263 - RNA, 32 nt, Human
ugccaaaaaccagcacaaggagacaaagcaga

SEQ ID NO: 250264 - RNA, 23 nt, Human
ugccaaaaacuuggagugaagga

SEQ ID NO: 250265 - RNA, 32 nt, Human
ugccaaaaagggacaggaggcaugggauagca

SEQ ID NO: 250266 - RNA, 32 nt, Human
ugccaaaagagcauaguuacaaccccuaggag

SEQ ID NO: 250267 - RNA, 32 nt, Human
ugccaaacacagugccuucuacauugcaggcg

SEQ ID NO: 250268 - RNA, 32 nt, Human
ugccaaacacccugcucagggcuggaaaugca

SEQ ID NO: 250269 - RNA, 32 nt, Human
ugccaaacaugggaacagccuugaauaggaua

SEQ ID NO: 250270 - RNA, 32 nt, Human
ugccaaaccccaguucugauggggcuccaaca

SEQ ID NO: 250271 - RNA, 22 nt, Human
ugccaaaccucugacugccaca

SEQ ID NO: 250272 - RNA, 32 nt, Human
ugccaaacucaaggcuccucuggcccagcuug

SEQ ID NO: 250273 - RNA, 32 nt, Human
ugccaaacucagaacuauuccaugcaggugcc

SEQ ID NO: 250274 - RNA, 32 nt, Human
ugccaaacucagccaaggagcagccccagugg

SEQ ID NO: 250275 - RNA, 32 nt, Human
ugccaaacugaaaugaagaauggccaaguuuu

SEQ ID NO: 250276 - RNA, 32 nt, Human
ugccaaacugauuucaguuguguaacuaguuu

SEQ ID NO: 250277 - RNA, 32 nt, Human
ugccaaacuguacaguuucuuccccaagagcu

SEQ ID NO: 250278 - RNA, 32 nt, Human
ugccaaagacaagcugugugauuuugugaaug

SEQ ID NO: 250279 - RNA, 32 nt, Human
ugccaaagauggagaagagugccagggacccc

SEQ ID NO: 250280 - RNA, 32 nt, Human
ugccaaagccaagaacugccggggccagggcu

SEQ ID NO: 250281 - RNA, 32 nt, Human
ugccaaaggaaggggccagcuucucugugugu

SEQ ID NO: 250282 - RNA, 32 nt, Human
ugccaaaggacagcccucagcaguuggaacuc

SEQ ID NO: 250283 - RNA, 32 nt, Human
ugccaaaguagaagaaauaguaguaccauaug

SEQ ID NO: 250284 - RNA, 32 nt, Human
ugccaaauagccccagacugggcccaggcagg

SEQ ID NO: 250285 - RNA, 32 nt, Human
ugccaaaucguacuuauuucagaugaugcagc

SEQ ID NO: 250286 - RNA, 32 nt, Human
ugccaaaugcaagcccuuuuuaauuuaguuug

SEQ ID NO: 250287 - RNA, 32 nt, Human
ugccaaaugcuucccaccucugucuguccugu

SEQ ID NO: 250288 - RNA, 32 nt, Human
ugccaaauuuagauuugugugcaucaggcuuu

SEQ ID NO: 250289 - RNA, 32 nt, Human
ugccaacaagcagggugaucucccacagugug

SEQ ID NO: 250290 - RNA, 32 nt, Human
ugccaacaagccauggccuaccuugacacuug

SEQ ID NO: 250291 - RNA, 32 nt, Human
ugccaacaagcugaaaccccaucuccacuaaa

SEQ ID NO: 250292 - RNA, 32 nt, Human
ugccaacacagugaaacccugucucuacuaaa

SEQ ID NO: 250293 - RNA, 32 nt, Human
ugccaacaccugcuggucagaugucccccuac

SEQ ID NO: 250294 - RNA, 32 nt, Human
ugccaacauagugaaacccugucuuuacuaaa

SEQ ID NO: 250295 - RNA, 32 nt, Human
ugccaacaucuucaucacaguuggcuguuagg

SEQ ID NO: 250296 - RNA, 32 nt, Human
ugccaacauggugaaaccccaucucuacuaaa

SEQ ID NO: 250297 - RNA, 32 nt, Human
ugccaacauggugaaacccugucucuacuaaa

SEQ ID NO: 250298 - RNA, 32 nt, Human
ugccaacauggugaaacccugucucugcuaaa

SEQ ID NO: 250299 - RNA, 32 nt, Human
ugccaacauggugaaacuccaucucuacugaa

SEQ ID NO: 250300 - RNA, 22 nt, Human
ugccaaccagauguuacugguc

SEQ ID NO: 250301 - RNA, 32 nt, Human
ugccaaccccaaagcuuccacccuucuccccu

SEQ ID NO: 250302 - RNA, 32 nt, Human
ugccaaccucacugacacagggucauagugua

SEQ ID NO: 250303 - RNA, 32 nt, Human
ugccaaccuccuccucuccugccagccuccuc

SEQ ID NO: 250304 - RNA, 32 nt, Human
ugccaaccuccuccucuccugccagccuccug

SEQ ID NO: 250305 - RNA, 32 nt, Human
ugccaacgcaugcaccagccugcguggucccc

SEQ ID NO: 250306 - RNA, 32 nt, Human
ugccaacucaagagggaaguuggaguaugucu

SEQ ID NO: 250307 - RNA, 32 nt, Human
ugccaacucccgucagcagauccggaagcuga

SEQ ID NO: 250308 - RNA, 32 nt, Human
ugccaacucucugcauucccugaucuccaucc

SEQ ID NO: 250309 - RNA, 32 nt, Human
ugccaacugcagcucgcgcugccuccugcucg

SEQ ID NO: 250310 - RNA, 32 nt, Human
ugccaacuggcucauuggugggagacacagua

SEQ ID NO: 250311 - RNA, 32 nt, Human
ugccaacuuaacugagauucugagugugcaag

SEQ ID NO: 250312 - RNA, 32 nt, Human
ugccaacuuagagccucguaccaaucucucug

SEQ ID NO: 250313 - RNA, 32 nt, Human
ugccaacuuuccaauuaaagguugacauuccu

SEQ ID NO: 250314 - RNA, 32 nt, Human
ugccaagaagacgcccucugaagccauguccu

SEQ ID NO: 250315 - RNA, 32 nt, Human
ugccaagaagcuguccucugagaagccauggc

SEQ ID NO: 250316 - RNA, 32 nt, Human
ugccaagaaguagauauaaccaauaccuuagc

SEQ ID NO: 250317 - RNA, 24 nt, Human
ugccaagaauuuuagaugugauca

SEQ ID NO: 250318 - RNA, 32 nt, Human
ugccaagagcccgucugcuccugcgaggcuau

SEQ ID NO: 250319 - RNA, 32 nt, Human
ugccaagagccugagugacagagcaagacccc

SEQ ID NO: 250320 - RNA, 32 nt, Human
ugccaagagucacaucccugcccaggggcacc

SEQ ID NO: 250321 - RNA, 32 nt, Human
ugccaagaguccaagccaucuggcccaacaua

SEQ ID NO: 250322 - RNA, 19 nt, Human
ugccaagauucuuugaaua

SEQ ID NO: 250323 - RNA, 32 nt, Human
ugccaagauugccugugccugccugacaaagg

SEQ ID NO: 250324 - RNA, 31 nt, Human
ugccaagcacuuuucuaggcaaaggaaaugc

SEQ ID NO: 250325 - RNA, 22 nt, Human
ugccaagccgcggcucugcgga

SEQ ID NO: 250326 - RNA, 32 nt, Human
ugccaagccuggugccuuuccaaaggacuagc

SEQ ID NO: 250327 - RNA, 32 nt, Human
ugccaagcucucagauugaaugcuaguucucu

SEQ ID NO: 250328 - RNA, 32 nt, Human
ugccaagcugccugugcacuggcccugcgggg

SEQ ID NO: 250329 - RNA, 32 nt, Human
ugccaagcuggagcagcuggccagcagaagca

SEQ ID NO: 250330 - RNA, 32 nt, Human
ugccaaggaagugggcuccaggugaaggccag

SEQ ID NO: 250331 - RNA, 32 nt, Human
ugccaaggagaaaaauggccaguuaggaucaa

SEQ ID NO: 250332 - RNA, 32 nt, Human
ugccaaggagccgggacccaggagagggcugc

SEQ ID NO: 250333 - RNA, 32 nt, Human
ugccaaggaguaaauugcugggcugcuuucua

SEQ ID NO: 250334 - RNA, 32 nt, Human
ugccaaggaguagggugggggucaguggauug

SEQ ID NO: 250335 - RNA, 21 nt, Human
ugccaaggccaggugcagugg

SEQ ID NO: 250336 - RNA, 32 nt, Human
ugccaaggccagucugaaauccugggcucaag

SEQ ID NO: 250337 - RNA, 32 nt, Human
ugccaaggcugcuugugcuaccaguuuguugg

SEQ ID NO: 250338 - RNA, 21 nt, Human
ugccaaggcuggaaugcagug

SEQ ID NO: 250339 - RNA, 21 nt, Human
ugccaaggcuggagugcagug

SEQ ID NO: 250340 - RNA, 32 nt, Human
ugccaagggcagcaggugauccgggcagagcu

SEQ ID NO: 250341 - RNA, 32 nt, Human
ugccaagggcuggaggcccugccgcuggccuu

SEQ ID NO: 250342 - RNA, 32 nt, Human
ugccaaggggcugcuggcacugggcagcagca

SEQ ID NO: 250343 - RNA, 32 nt, Human
ugccaagguguuuucuguguauacauggauau

SEQ ID NO: 250344 - RNA, 32 nt, Human
ugccaaguagaucuccuccuccuucaugcagc

SEQ ID NO: 250345 - RNA, 23 nt, Human
ugccaagucaccuaaacucugga

SEQ ID NO: 250346 - RNA, 32 nt, Human
ugccaaguccucccccugcccauucucauggg

SEQ ID NO: 250347 - RNA, 32 nt, Human
ugccaaguccucccggaccagaucucccaucc

SEQ ID NO: 250348 - RNA, 21 nt, Human
ugccaaguccuggcccuggcc

SEQ ID NO: 250349 - RNA, 25 nt, Human
ugccaagugcugcguccuccuggug

SEQ ID NO: 250350 - RNA, 23 nt, Human
ugccaaguucccccagucccuca

SEQ ID NO: 250351 - RNA, 32 nt, Human
ugccaaguugcacgcgcuuagaacggaguacu

SEQ ID NO: 250352 - RNA, 32 nt, Human
ugccaaguugcacgcgcuuagaacggagucua

SEQ ID NO: 250353 - RNA, 32 nt, Human
ugccaaguuugacggugaagugaucugugaac

SEQ ID NO: 250354 - RNA, 32 nt, Human
ugccaauaaaaauuuaugguccaagggaaaaa

SEQ ID NO: 250355 - RNA, 32 nt, Human
ugccaauaccaccaccagauucuucuuugaag

SEQ ID NO: 250356 - RNA, 31 nt, Human
ugccaauaucuugacaccugccaaagcuucc

SEQ ID NO: 250357 - RNA, 32 nt, Human
ugccaaucauuuuuagagggaggaaucagugu

SEQ ID NO: 250358 - RNA, 21 nt, Human
ugccaaucugcugggcugguc

SEQ ID NO: 250359 - RNA, 32 nt, Human
ugccaaucuucugccaucaauuuugggaaacc

SEQ ID NO: 250360 - RNA, 32 nt, Human
ugccaaucuuucacugcaugugaaaaugugac

SEQ ID NO: 250361 - RNA, 32 nt, Human
ugccaaugaagauuuaaagacagagcaggagc

SEQ ID NO: 250362 - RNA, 32 nt, Human
ugccaaugagcauggcaagaaaaugcucgagc

SEQ ID NO: 250363 - RNA, 32 nt, Human
ugccaaugagcuagauauuugcugcagaucuu

SEQ ID NO: 250364 - RNA, 32 nt, Human
ugccaaugcacgcacacaucagugcacacgga

SEQ ID NO: 250365 - RNA, 32 nt, Human
ugccaaugcacuccagucugggcaacagagug

SEQ ID NO: 250366 - RNA, 32 nt, Human
ugccaaugcacuccauccugggcaaaaagagc

SEQ ID NO: 250367 - RNA, 32 nt, Human
ugccaaugcauuccagccuggaugauggagcg

SEQ ID NO: 250368 - RNA, 32 nt, Human
ugccaaugccuguacauuaacagauuuuuaaa

SEQ ID NO: 250369 - RNA, 32 nt, Human
ugccaaugcuccagcugucgucugacucuggg

SEQ ID NO: 250370 - RNA, 32 nt, Human
ugccaauguacuccagccuaggugacagagug

SEQ ID NO: 250371 - RNA, 32 nt, Human
ugccaauguauuccagucugggugacagagug

SEQ ID NO: 250372 - RNA, 32 nt, Human
ugccaauguccaaguugcagauuuccccuuuu

SEQ ID NO: 250373 - RNA, 32 nt, Human
ugccaauuccagcaaggugucuugagauuguu

SEQ ID NO: 250374 - RNA, 32 nt, Human
ugccaauuccuuccuucucuucuguacagcag

SEQ ID NO: 250375 - RNA, 32 nt, Human
ugccaauugucauuaaaaggcuuuucauggcu

SEQ ID NO: 250376 - RNA, 32 nt, Human
ugccaauuucucuaguguaauaacucccaacc

SEQ ID NO: 250377 - RNA, 32 nt, Human
ugccacaaaggauggcauggcccgggagugcc

SEQ ID NO: 250378 - RNA, 32 nt, Human
ugccacaaccgcgcguccucagagccagcccg

SEQ ID NO: 250379 - RNA, 32 nt, Human
ugccacacacccagccugaaguucuaaaagaa

SEQ ID NO: 250380 - RNA, 32 nt, Human
ugccacacagcaaguuccgagaccauggauuc

SEQ ID NO: 250381 - RNA, 32 nt, Human
ugccacacauccuuucccuccuggccugcccu

SEQ ID NO: 250382 - RNA, 21 nt, Human
ugccacacccacccgcugcca

SEQ ID NO: 250383 - RNA, 32 nt, Human
ugccacaccccaccaugcaccuccaguccucc

SEQ ID NO: 250384 - RNA, 32 nt, Human
ugccacaccguacuccagccugggcgacaucu

SEQ ID NO: 250385 - RNA, 32 nt, Human
ugccacaccucgcucucagucucuccacauuu

SEQ ID NO: 250386 - RNA, 32 nt, Human
ugccacacggaacccuguauuuugcacacagc

SEQ ID NO: 250387 - RNA, 18 nt, Human
ugccacacggugcugguc

SEQ ID NO: 250388 - RNA, 32 nt, Human
ugccacacuagacagccaggagcccagcagaa

SEQ ID NO: 250389 - RNA, 32 nt, Human
ugccacacucacaaccgcagaccucggugagg

SEQ ID NO: 250390 - RNA, 32 nt, Human
ugccacacucuccugguuugggcccugcucau

SEQ ID NO: 250391 - RNA, 25 nt, Human
ugccacacuguauguuucuaacaua

SEQ ID NO: 250392 - RNA, 32 nt, Human
ugccacacugucuuccacaaugguugaacuaa

SEQ ID NO: 250393 - RNA, 32 nt, Human
ugccacagacucgaguaagaaaauguucucuu

SEQ ID NO: 250394 - RNA, 32 nt, Human
ugccacagagcucagaaagcuaaagcaauguu

SEQ ID NO: 250395 - RNA, 32 nt, Human
ugccacagagguuucuggcuggcaaaucgaca

SEQ ID NO: 250396 - RNA, 32 nt, Human
ugccacagaguucauugcucucaguauaagau

SEQ ID NO: 250397 - RNA, 32 nt, Human
ugccacagaucugucccaccucccaggcucca

SEQ ID NO: 250398 - RNA, 32 nt, Human
ugccacagccuccugaguaccugagauuacag

SEQ ID NO: 250399 - RNA, 32 nt, Human
ugccacagccuccugaguagcugggauuacag

SEQ ID NO: 250400 - RNA, 32 nt, Human
ugccacagccucucccccagucccugucuccg

SEQ ID NO: 250401 - RNA, 32 nt, Human
ugccacagccucuuuccgucccucucuuucug

SEQ ID NO: 250402 - RNA, 32 nt, Human
ugccacagccuucucaaguccuuccugcagag

SEQ ID NO: 250403 - RNA, 32 nt, Human
ugccacagccuucugacaaaguuuacaguuau

SEQ ID NO: 250404 - RNA, 32 nt, Human
ugccacagcucuccagccugggcgacagagug

SEQ ID NO: 250405 - RNA, 32 nt, Human
ugccacagcuggaagcagaggccuucguaggu

SEQ ID NO: 250406 - RNA, 32 nt, Human
ugccacaggaagcugggccgggcugcugugcc

SEQ ID NO: 250407 - RNA, 32 nt, Human
ugccacaggaggaggaggaggacaugggguuu

SEQ ID NO: 250408 - RNA, 32 nt, Human
ugccacaggaggagugggaggagaagcuguug

SEQ ID NO: 250409 - RNA, 32 nt, Human
ugccacaggcacuggggaucucaccagaaagg

SEQ ID NO: 250410 - RNA, 32 nt, Human
ugccacaggcauucccgccgucagugccuucu

SEQ ID NO: 250411 - RNA, 32 nt, Human
ugccacaggccagcaaaagcacuucagaguca

SEQ ID NO: 250412 - RNA, 21 nt, Human
ugccacaggcuuagggacagg

SEQ ID NO: 250413 - RNA, 32 nt, Human
ugccacagggguagacaggggucugggggaga

SEQ ID NO: 250414 - RNA, 32 nt, Human
ugccacaguaccacugccaccaugcugcucac

SEQ ID NO: 250415 - RNA, 32 nt, Human
ugccacaguccagagaaggccaccucuaaugg

SEQ ID NO: 250416 - RNA, 32 nt, Human
ugccacauacugcggaccaagggacuccaauc

SEQ ID NO: 250417 - RNA, 32 nt, Human
ugccacauagcuggcugaccuuugccaaguua

SEQ ID NO: 250418 - RNA, 32 nt, Human
ugccacaucaauaacauccuuccccagcacau

SEQ ID NO: 250419 - RNA, 32 nt, Human
ugccacaucacuccagccugggcaacagaaca

SEQ ID NO: 250420 - RNA, 32 nt, Human
ugccacaugccuguaauuccagcuacuuggga

SEQ ID NO: 250421 - RNA, 32 nt, Human
ugccacaugccuguagucccagcuacuuggga

SEQ ID NO: 250422 - RNA, 32 nt, Human
ugccacauugcccaggcuggucucaaacuccu

SEQ ID NO: 250423 - RNA, 32 nt, Human
ugccaccaaaggacuugaucugaguugggagu

SEQ ID NO: 250424 - RNA, 32 nt, Human
ugccaccaacucccacuguccagggcuucugg

SEQ ID NO: 250425 - RNA, 32 nt, Human
ugccaccaagcccucaagaaguugugcccuuc

SEQ ID NO: 250426 - RNA, 32 nt, Human
ugccaccacacuccagccugggcgacagaaug

SEQ ID NO: 250427 - RNA, 24 nt, Human
ugccaccaccaacgccgccgccau

SEQ ID NO: 250428 - RNA, 20 nt, Human
ugccaccaccaagucauuga

SEQ ID NO: 250429 - RNA, 18 nt, Human
ugccaccaccaugccuga

SEQ ID NO: 250430 - RNA, 19 nt, Human
ugccaccaccuuugucuga

SEQ ID NO: 250431 - RNA, 32 nt, Human
ugccaccacgcauggcuaaucuuuuuguguuu

SEQ ID NO: 250432 - RNA, 32 nt, Human
ugccaccacgccugggcaacauggugaaaccc

SEQ ID NO: 250433 - RNA, 32 nt, Human
ugccaccacucagaaguuuauucuuccagacg

SEQ ID NO: 250434 - RNA, 32 nt, Human
ugccaccacucccuauacuucucccuccuucu

SEQ ID NO: 250435 - RNA, 32 nt, Human
ugccaccacucugcucccugcuugccuccacu

SEQ ID NO: 250436 - RNA, 32 nt, Human
ugccaccacugcaagcaaaagucuggagaagu

SEQ ID NO: 250437 - RNA, 32 nt, Human
ugccaccagcaaugcccugccuugcugccuuc

SEQ ID NO: 250438 - RNA, 32 nt, Human
ugccaccagcugggggagcuccuggccggcca

SEQ ID NO: 250439 - RNA, 32 nt, Human
ugccaccaggccuggccaaguuuuguaguuuu

SEQ ID NO: 250440 - RNA, 20 nt, Human
ugccaccaggcugccuggca

SEQ ID NO: 250441 - RNA, 32 nt, Human
ugccaccagggagggguggaggggcuuucuuu

SEQ ID NO: 250442 - RNA, 24 nt, Human
ugccaccaguagauaccggccaca

SEQ ID NO: 250443 - RNA, 23 nt, Human
ugccaccaguccccagcugcaga

SEQ ID NO: 250444 - RNA, 32 nt, Human
ugccaccaucccgcgggggccugggugaggca

SEQ ID NO: 250445 - RNA, 32 nt, Human
ugccaccaugaggaacauuuucaagaggaacc

SEQ ID NO: 250446 - RNA, 32 nt, Human
ugccaccaugccacugcacuccagccugggug

SEQ ID NO: 250447 - RNA, 32 nt, Human
ugccaccauggccaugcagcaggcuaugaugg

SEQ ID NO: 250448 - RNA, 32 nt, Human
ugccaccauucauuuaagugcuguuuguucuu

SEQ ID NO: 250449 - RNA, 32 nt, Human
ugccacccaagaaggacaugaaggaacaggag

SEQ ID NO: 250450 - RNA, 24 nt, Human
ugccacccaagcuggagugcagug

SEQ ID NO: 250451 - RNA, 32 nt, Human
ugccacccacagugaaaccagaucccauuaau

SEQ ID NO: 250452 - RNA, 32 nt, Human
ugccacccaccagcaggaaggaggaccuggaa

SEQ ID NO: 250453 - RNA, 32 nt, Human
ugccacccacugcacuggggccagcugggaag

SEQ ID NO: 250454 - RNA, 21 nt, Human
ugccacccagaucagaucaca

SEQ ID NO: 250455 - RNA, 19 nt, Human
ugccacccaggcuggagua

SEQ ID NO: 250456 - RNA, 24 nt, Human
ugccacccaggcuggaguacagug

SEQ ID NO: 250457 - RNA, 24 nt, Human
ugccacccaggcuggaguccagug

SEQ ID NO: 250458 - RNA, 21 nt, Human
ugccacccagggcccugcaca

SEQ ID NO: 250459 - RNA, 23 nt, Human
ugccacccaggugaggugcugug

SEQ ID NO: 250460 - RNA, 32 nt, Human
ugccacccagugaguguccagaccauugucuu

SEQ ID NO: 250461 - RNA, 32 nt, Human
ugccacccaugccucuucaggcuggaaauaau

SEQ ID NO: 250462 - RNA, 32 nt, Human
ugccacccccagguuagcaacaugguggccaa

SEQ ID NO: 250463 - RNA, 32 nt, Human
ugccacccccuucccuguccuuccccaacucc

SEQ ID NO: 250464 - RNA, 32 nt, Human
ugccaccccucagcccaggacuaccgcuauua

SEQ ID NO: 250465 - RNA, 32 nt, Human
ugccaccccucucucccuuucucccucgcucc

SEQ ID NO: 250466 - RNA, 32 nt, Human
ugccaccccugccccgugugugccccgggugu

SEQ ID NO: 250467 - RNA, 32 nt, Human
ugccaccccugcccugauuccacggcugccuc

SEQ ID NO: 250468 - RNA, 32 nt, Human
ugccaccccugcuucucgccuggaccucuugg

SEQ ID NO: 250469 - RNA, 32 nt, Human
ugccacccucauuccuccagagcuugaccccu

SEQ ID NO: 250470 - RNA, 32 nt, Human
ugccacccucccccuucaaugcaccucuggug

SEQ ID NO: 250471 - RNA, 32 nt, Human
ugccacccucuucuuucuccccagccuucuca

SEQ ID NO: 250472 - RNA, 32 nt, Human
ugccacccugcaacccacccucccagccaagg

SEQ ID NO: 250473 - RNA, 20 nt, Human
ugccacccugcugccgccac

SEQ ID NO: 250474 - RNA, 32 nt, Human
ugccacccugggugccagucucuccuucugua

SEQ ID NO: 250475 - RNA, 16 nt, Human
ugccacccugugccau

SEQ ID NO: 250476 - RNA, 32 nt, Human
ugccaccgagacaccagccucugauggcucag

SEQ ID NO: 250477 - RNA, 24 nt, Human
ugccaccgaggcuggagugcagug

SEQ ID NO: 250478 - RNA, 32 nt, Human
ugccaccgcacuccagcaugggugacagagug

SEQ ID NO: 250479 - RNA, 32 nt, Human
ugccaccgcacuucagccugggugacagagaa

SEQ ID NO: 250480 - RNA, 32 nt, Human
ugccaccgcacuuccagccugggugacagagu

SEQ ID NO: 250481 - RNA, 21 nt, Human
ugccaccgccgccgccgucac

SEQ ID NO: 250482 - RNA, 21 nt, Human
ugccaccgccgccgcguccac

SEQ ID NO: 250483 - RNA, 32 nt, Human
ugccaccggcuucucugauucuccagcuugca

SEQ ID NO: 250484 - RNA, 32 nt, Human
ugccaccguacucuagccugggcgacagagca

SEQ ID NO: 250485 - RNA, 32 nt, Human
ugccaccgugugaagaaaaaugaaagcacaga

SEQ ID NO: 250486 - RNA, 32 nt, Human
ugccaccuacacuccagccugggugacagagc

SEQ ID NO: 250487 - RNA, 20 nt, Human
ugccaccuaccaaacucugg

SEQ ID NO: 250488 - RNA, 21 nt, Human
ugccaccuaccaaacucugga

SEQ ID NO: 250489 - RNA, 32 nt, Human
ugccaccuacuucccguccaguuccugccaga

SEQ ID NO: 250490 - RNA, 32 nt, Human
ugccaccuacuuccuggagcugucuuugcugg

SEQ ID NO: 250491 - RNA, 32 nt, Human
ugccaccucagcccccuccagacuuugggcac

SEQ ID NO: 250492 - RNA, 32 nt, Human
ugccaccucauguucacaccuaucuuucucac

SEQ ID NO: 250493 - RNA, 24 nt, Human
ugccaccuccaccucccgaguuca

SEQ ID NO: 250494 - RNA, 24 nt, Human
ugccaccuccaccuccuggguuca

SEQ ID NO: 250495 - RNA, 32 nt, Human
ugccaccuccagcagaccucagggaggguugg

SEQ ID NO: 250496 - RNA, 32 nt, Human
ugccaccuccccauucaggccugguggcagga

SEQ ID NO: 250497 - RNA, 32 nt, Human
ugccaccuccccucuguccucgaggcccacag

SEQ ID NO: 250498 - RNA, 32 nt, Human
ugccaccuccucccaucaccuccugcggcaga

SEQ ID NO: 250499 - RNA, 32 nt, Human
ugccaccucggcccccuccagacuuugggcag

SEQ ID NO: 250500 - RNA, 32 nt, Human
ugccaccugagaggagcuucuguuuggcauuc

SEQ ID NO: 250501 - RNA, 32 nt, Human
ugccaccugcugcugcuaucuguccuuacuug

SEQ ID NO: 250502 - RNA, 32 nt, Human
ugccaccugcuguggguccagcagguuuuuac

SEQ ID NO: 250503 - RNA, 23 nt, Human
ugccaccuguuugaugugcagug

SEQ ID NO: 250504 - RNA, 19 nt, Human
ugccaccuucaaguucugg

SEQ ID NO: 250505 - RNA, 32 nt, Human
ugccaccuucauccuugccucccuuccugcag

SEQ ID NO: 250506 - RNA, 32 nt, Human
ugccaccuucuuucaugcacauuccucuuugg

SEQ ID NO: 250507 - RNA, 32 nt, Human
ugccaccuugucuucuucugcaagaacugaau

SEQ ID NO: 250508 - RNA, 24 nt, Human
ugccacgaucuuggcucccugcag

SEQ ID NO: 250509 - RNA, 32 nt, Human
ugccacgcacugcaaccugggugacagagcga

SEQ ID NO: 250510 - RNA, 32 nt, Human
ugccacgcccggcucauuuuuguguuuuagua

SEQ ID NO: 250511 - RNA, 32 nt, Human
ugccacgccggggccuccaccgccugggccug

SEQ ID NO: 250512 - RNA, 32 nt, Human
ugccacgcugccuuccgcuccuccuggucuuu

SEQ ID NO: 250513 - RNA, 32 nt, Human
ugccacggcacuccagccugggcagcagagug

SEQ ID NO: 250514 - RNA, 32 nt, Human
ugccacgggagggggcccccaaacuuucuucc

SEQ ID NO: 250515 - RNA, 20 nt, Human
ugccacguccauaguucuga

SEQ ID NO: 250516 - RNA, 32 nt, Human
ugccacuaaccuuccaaaaauuacuuaguauu

SEQ ID NO: 250517 - RNA, 32 nt, Human
ugccacuaagagaaggcagagaggucccuagu

SEQ ID NO: 250518 - RNA, 32 nt, Human
ugccacuaagccccauggcccuuggggccugu

SEQ ID NO: 250519 - RNA, 32 nt, Human
ugccacuacacuccagccuggccgacagagca

SEQ ID NO: 250520 - RNA, 32 nt, Human
ugccacuacacuccagccugggcaaaagagug

SEQ ID NO: 250521 - RNA, 32 nt, Human
ugccacuacacuccagccugggcaacagagug

SEQ ID NO: 250522 - RNA, 32 nt, Human
ugccacuacacuccagccugggggacagagag

SEQ ID NO: 250523 - RNA, 32 nt, Human
ugccacuacacuccagccugggugacaaagcg

SEQ ID NO: 250524 - RNA, 32 nt, Human
ugccacuacacuccagccugggugacagagug

SEQ ID NO: 250525 - RNA, 32 nt, Human
ugccacuacccgcccauguccuggaagauggc

SEQ ID NO: 250526 - RNA, 32 nt, Human
ugccacuacugcccagaacuccucugggacuc

SEQ ID NO: 250527 - RNA, 32 nt, Human
ugccacuacuguacucuagccugggcagcaga

SEQ ID NO: 250528 - RNA, 32 nt, Human
ugccacuaguacuccagccugggugacagagc

SEQ ID NO: 250529 - RNA, 21 nt, Human
ugccacucaacuucagaugca

SEQ ID NO: 250530 - RNA, 32 nt, Human
ugccacucacuggggugaggcugggggucagc

SEQ ID NO: 250531 - RNA, 32 nt, Human
ugccacuccacuccagccugggcaacagugug

SEQ ID NO: 250532 - RNA, 32 nt, Human
ugccacuccacuccagucugggcgacagagca

SEQ ID NO: 250533 - RNA, 32 nt, Human
ugccacuccagccuggccucacugucccaccc

SEQ ID NO: 250534 - RNA, 32 nt, Human
ugccacuccaucucccuccgugcuccagccac

SEQ ID NO: 250535 - RNA, 32 nt, Human
ugccacuccccauagaagcuugaaguuacaca

SEQ ID NO: 250536 - RNA, 32 nt, Human
ugccacucuacuccagccugggcaacacagca

SEQ ID NO: 250537 - RNA, 32 nt, Human
ugccacucuccaacuucuaaaccucccaaacc

SEQ ID NO: 250538 - RNA, 32 nt, Human
ugccacucugauuccuccuuucuuuuggucac

SEQ ID NO: 250539 - RNA, 32 nt, Human
ugccacucugggcaaaugcucuuccuugagcc

SEQ ID NO: 250540 - RNA, 32 nt, Human
ugccacucugggcagucuuuugugucaguguc

SEQ ID NO: 250541 - RNA, 32 nt, Human
ugccacugaacuccagccugggcaacagagug

SEQ ID NO: 250542 - RNA, 32 nt, Human
ugccacugaacuccagccugggugacagagca

SEQ ID NO: 250543 - RNA, 32 nt, Human
ugccacugaacucuagccuggguaacagagug

SEQ ID NO: 250544 - RNA, 32 nt, Human
ugccacugacccaccgccaccuccgcggagag

SEQ ID NO: 250545 - RNA, 32 nt, Human
ugccacugaccuccagccugggggacagagca

SEQ ID NO: 250546 - RNA, 32 nt, Human
ugccacugcaauccagccugggcaacagagcg

SEQ ID NO: 250547 - RNA, 32 nt, Human
ugccacugcaaucuagccugggugacagagca

SEQ ID NO: 250548 - RNA, 32 nt, Human
ugccacugcaauucagccugggugacauagag

SEQ ID NO: 250549 - RNA, 32 nt, Human
ugccacugcacaccagccugggugacagagcg

SEQ ID NO: 250550 - RNA, 32 nt, Human
ugccacugcacaccggccugggugacagcaug

SEQ ID NO: 250551 - RNA, 32 nt, Human
ugccacugcacacuccaaucugggugaaagac

SEQ ID NO: 250552 - RNA, 32 nt, Human
ugccacugcaccacuccagccugggcaacaag

SEQ ID NO: 250553 - RNA, 32 nt, Human
ugccacugcaccccagccugggcaacagagua

SEQ ID NO: 250554 - RNA, 32 nt, Human
ugccacugcaccguagccugggugauaagagu

SEQ ID NO: 250555 - RNA, 32 nt, Human
ugccacugcacgcacuccagccugggcgacag

SEQ ID NO: 250556 - RNA, 32 nt, Human
ugccacugcacuacaaccugggugauagagca

SEQ ID NO: 250557 - RNA, 32 nt, Human
ugccacugcacuacagccugggcgacaaagug

SEQ ID NO: 250558 - RNA, 32 nt, Human
ugccacugcacucaaaccuggcggacagagug

SEQ ID NO: 250559 - RNA, 32 nt, Human
ugccacugcacucaagccugggugacagagcg

SEQ ID NO: 250560 - RNA, 32 nt, Human
ugccacugcacucaagccugggugacgaguga

SEQ ID NO: 250561 - RNA, 32 nt, Human
ugccacugcacucaagccuggugacagagcga

SEQ ID NO: 250562 - RNA, 32 nt, Human
ugccacugcacuccaaccugagugacagcaag

SEQ ID NO: 250563 - RNA, 32 nt, Human
ugccacugcacuccaaccugggcaacagaaug

SEQ ID NO: 250564 - RNA, 32 nt, Human
ugccacugcacuccaaccugggcagcagagca

SEQ ID NO: 250565 - RNA, 32 nt, Human
ugccacugcacuccaaccugggcgacagagug

SEQ ID NO: 250566 - RNA, 32 nt, Human
ugccacugcacuccaaccugggggacagagga

SEQ ID NO: 250567 - RNA, 32 nt, Human
ugccacugcacuccaaccugggugacagagcg

SEQ ID NO: 250568 - RNA, 32 nt, Human
ugccacugcacuccaaccugggugacagagug

SEQ ID NO: 250569 - RNA, 32 nt, Human
ugccacugcacuccaaccugggugagagagcg

SEQ ID NO: 250570 - RNA, 32 nt, Human
ugccacugcacuccacucugggcaacagaaug

SEQ ID NO: 250571 - RNA, 32 nt, Human
ugccacugcacuccagacugggugacacagcg

SEQ ID NO: 250572 - RNA, 32 nt, Human
ugccacugcacuccagacuuggugacagagca

SEQ ID NO: 250573 - RNA, 32 nt, Human
ugccacugcacuccagagccugggcgacagag

SEQ ID NO: 250574 - RNA, 32 nt, Human
ugccacugcacuccagcaugcaugacagagug

SEQ ID NO: 250575 - RNA, 32 nt, Human
ugccacugcacuccagcaugggugauggagag

SEQ ID NO: 250576 - RNA, 32 nt, Human
ugccacugcacuccagcccaggcaacagagua

SEQ ID NO: 250577 - RNA, 32 nt, Human
ugccacugcacuccagcccaggugacagaggg

SEQ ID NO: 250578 - RNA, 32 nt, Human
ugccacugcacuccagccggggugacagaaga

SEQ ID NO: 250579 - RNA, 32 nt, Human
ugccacugcacuccagccuaagcaaauagcaa

SEQ ID NO: 250580 - RNA, 32 nt, Human
ugccacugcacuccagccuaggugacaaagag

SEQ ID NO: 250581 - RNA, 32 nt, Human
ugccacugcacuccagccuaggugacagagca

SEQ ID NO: 250582 - RNA, 32 nt, Human
ugccacugcacuccagccuaugugacuaguga

SEQ ID NO: 250583 - RNA, 32 nt, Human
ugccacugcacuccagccugagcaacagagca

SEQ ID NO: 250584 - RNA, 32 nt, Human
ugccacugcacuccagccugagugacagagag

SEQ ID NO: 250585 - RNA, 32 nt, Human
ugccacugcacuccagccugccuggaugacag

SEQ ID NO: 250586 - RNA, 32 nt, Human
ugccacugcacuccagccugcgggacagagug

SEQ ID NO: 250587 - RNA, 32 nt, Human
ugccacugcacuccagccuggacaacagagca

SEQ ID NO: 250588 - RNA, 32 nt, Human
ugccacugcacuccagccuggacaacggagug

SEQ ID NO: 250589 - RNA, 32 nt, Human
ugccacugcacuccagccuggacgacagagca

SEQ ID NO: 250590 - RNA, 32 nt, Human
ugccacugcacuccagccuggaggacagagcg

SEQ ID NO: 250591 - RNA, 32 nt, Human
ugccacugcacuccagccuggaugacagagca

SEQ ID NO: 250592 - RNA, 32 nt, Human
ugccacugcacuccagccuggaugacagcgag

SEQ ID NO: 250593 - RNA, 32 nt, Human
ugccacugcacuccagccuggcaacagagcaa

SEQ ID NO: 250594 - RNA, 32 nt, Human
ugccacugcacuccagccuggcaacagaguga

SEQ ID NO: 250595 - RNA, 32 nt, Human
ugccacugcacuccagccuggccugggcaaca

SEQ ID NO: 250596 - RNA, 32 nt, Human
ugccacugcacuccagccuggcgacacaguga

SEQ ID NO: 250597 - RNA, 32 nt, Human
ugccacugcacuccagccugggagacagagca

SEQ ID NO: 250598 - RNA, 32 nt, Human
ugccacugcacuccagccugggagacagagcg

SEQ ID NO: 250599 - RNA, 32 nt, Human
ugccacugcacuccagccugggagacagagug

SEQ ID NO: 250600 - RNA, 32 nt, Human
ugccacugcacuccagccugggcaacaaaacg

SEQ ID NO: 250601 - RNA, 32 nt, Human
ugccacugcacuccagccugggcaacaagaac

SEQ ID NO: 250602 - RNA, 32 nt, Human
ugccacugcacuccagccugggcaacaagagc

SEQ ID NO: 250603 - RNA, 32 nt, Human
ugccacugcacuccagccugggcaacaagagu

SEQ ID NO: 250604 - RNA, 32 nt, Human
ugccacugcacuccagccugggcaacaagcga

SEQ ID NO: 250605 - RNA, 32 nt, Human
ugccacugcacuccagccugggcaacaagggc

SEQ ID NO: 250606 - RNA, 32 nt, Human
ugccacugcacuccagccugggcaacacaggg

SEQ ID NO: 250607 - RNA, 32 nt, Human
ugccacugcacuccagccugggcaacacagug

SEQ ID NO: 250608 - RNA, 32 nt, Human
ugccacugcacuccagccugggcaacagagua

SEQ ID NO: 250609 - RNA, 32 nt, Human
ugccacugcacuccagccugggcaacagagug

SEQ ID NO: 250610 - RNA, 32 nt, Human
ugccacugcacuccagccugggcaacagcaag

SEQ ID NO: 250611 - RNA, 32 nt, Human
ugccacugcacuccagccugggcaaccaggug

SEQ ID NO: 250612 - RNA, 32 nt, Human
ugccacugcacuccagccugggcaacugagca

SEQ ID NO: 250613 - RNA, 32 nt, Human
ugccacugcacuccagccugggcaauagagca

SEQ ID NO: 250614 - RNA, 32 nt, Human
ugccacugcacuccagccugggcaauagagug

SEQ ID NO: 250615 - RNA, 32 nt, Human
ugccacugcacuccagccugggcaauggagag

SEQ ID NO: 250616 - RNA, 32 nt, Human
ugccacugcacuccagccugggcaccaaugug

SEQ ID NO: 250617 - RNA, 32 nt, Human
ugccacugcacuccagccugggcaccacagca

SEQ ID NO: 250618 - RNA, 32 nt, Human
ugccacugcacuccagccugggcagcagagcg

SEQ ID NO: 250619 - RNA, 32 nt, Human
ugccacugcacuccagccugggcaugagacuc

SEQ ID NO: 250620 - RNA, 32 nt, Human
ugccacugcacuccagccugggcgaaagagcg

SEQ ID NO: 250621 - RNA, 32 nt, Human
ugccacugcacuccagccugggcgacaagagc

SEQ ID NO: 250622 - RNA, 32 nt, Human
ugccacugcacuccagccugggcgacagagac

SEQ ID NO: 250623 - RNA, 32 nt, Human
ugccacugcacuccagccugggcgacagagca

SEQ ID NO: 250624 - RNA, 32 nt, Human
ugccacugcacuccagccugggcgacagagcc

SEQ ID NO: 250625 - RNA, 32 nt, Human
ugccacugcacuccagccugggcgacagagcg

SEQ ID NO: 250626 - RNA, 32 nt, Human
ugccacugcacuccagccugggcgacagagug

SEQ ID NO: 250627 - RNA, 32 nt, Human
ugccacugcacuccagccugggcgacagcgug

SEQ ID NO: 250628 - RNA, 32 nt, Human
ugccacugcacuccagccugggcgacagugag

SEQ ID NO: 250629 - RNA, 32 nt, Human
ugccacugcacuccagccugggcgacgaguga

SEQ ID NO: 250630 - RNA, 32 nt, Human
ugccacugcacuccagccugggcgacggagug

SEQ ID NO: 250631 - RNA, 32 nt, Human
ugccacugcacuccagccugggcgauagagcu

SEQ ID NO: 250632 - RNA, 32 nt, Human
ugccacugcacuccagccugggcgauggagug

SEQ ID NO: 250633 - RNA, 32 nt, Human
ugccacugcacuccagccugggcggcagagca

SEQ ID NO: 250634 - RNA, 32 nt, Human
ugccacugcacuccagccuggggaacagagca

SEQ ID NO: 250635 - RNA, 32 nt, Human
ugccacugcacuccagccuggggcugacagag

SEQ ID NO: 250636 - RNA, 32 nt, Human
ugccacugcacuccagccugggggacagagca

SEQ ID NO: 250637 - RNA, 32 nt, Human
ugccacugcacuccagccugggggacagagcu

SEQ ID NO: 250638 - RNA, 32 nt, Human
ugccacugcacuccagccugggggacagagug

SEQ ID NO: 250639 - RNA, 32 nt, Human
ugccacugcacuccagccugggugaaagagcu

SEQ ID NO: 250640 - RNA, 32 nt, Human
ugccacugcacuccagccugggugacaaaagu

SEQ ID NO: 250641 - RNA, 32 nt, Human
ugccacugcacuccagccugggugacacagcg

SEQ ID NO: 250642 - RNA, 32 nt, Human
ugccacugcacuccagccugggugacagaaca

SEQ ID NO: 250643 - RNA, 32 nt, Human
ugccacugcacuccagccugggugacagagag

SEQ ID NO: 250644 - RNA, 32 nt, Human
ugccacugcacuccagccugggugacagagca

SEQ ID NO: 250645 - RNA, 32 nt, Human
ugccacugcacuccagccugggugacagagcc

SEQ ID NO: 250646 - RNA, 32 nt, Human
ugccacugcacuccagccugggugacagagcg

SEQ ID NO: 250647 - RNA, 32 nt, Human
ugccacugcacuccagccugggugacagagua

SEQ ID NO: 250648 - RNA, 32 nt, Human
ugccacugcacuccagccugggugacagaguc

SEQ ID NO: 250649 - RNA, 32 nt, Human
ugccacugcacuccagccugggugacagagug

SEQ ID NO: 250650 - RNA, 32 nt, Human
ugccacugcacuccagccugggugacagcgag

SEQ ID NO: 250651 - RNA, 32 nt, Human
ugccacugcacuccagccugggugacagggca

SEQ ID NO: 250652 - RNA, 32 nt, Human
ugccacugcacuccagccugggugacugagug

SEQ ID NO: 250653 - RNA, 32 nt, Human
ugccacugcacuccagccugggugauagagca

SEQ ID NO: 250654 - RNA, 32 nt, Human
ugccacugcacuccagccuggguggacagagc

SEQ ID NO: 250655 - RNA, 32 nt, Human
ugccacugcacuccagccuggguggcagagcc

SEQ ID NO: 250656 - RNA, 32 nt, Human
ugccacugcacuccagccuggguggcagagug

SEQ ID NO: 250657 - RNA, 32 nt, Human
ugccacugcacuccagccuggucaacaaagca

SEQ ID NO: 250658 - RNA, 32 nt, Human
ugccacugcacuccagccuggucaacagagca

SEQ ID NO: 250659 - RNA, 32 nt, Human
ugccacugcacuccagccuggugacagagcga

SEQ ID NO: 250660 - RNA, 32 nt, Human
ugccacugcacuccagccuggugacagaguga

SEQ ID NO: 250661 - RNA, 32 nt, Human
ugccacugcacuccagccuggugagagcaaga

SEQ ID NO: 250662 - RNA, 32 nt, Human
ugccacugcacuccagccugguugacagagca

SEQ ID NO: 250663 - RNA, 32 nt, Human
ugccacugcacuccagccuuggugacagagca

SEQ ID NO: 250664 - RNA, 32 nt, Human
ugccacugcacuccagcgugggcaacggagag

SEQ ID NO: 250665 - RNA, 32 nt, Human
ugccacugcacuccagcuggguggcagagacu

SEQ ID NO: 250666 - RNA, 32 nt, Human
ugccacugcacuccagcuuaggugacagagug

SEQ ID NO: 250667 - RNA, 32 nt, Human
ugccacugcacuccagcuugggcaacaaagug

SEQ ID NO: 250668 - RNA, 32 nt, Human
ugccacugcacuccagcuugggcgacagagcg

SEQ ID NO: 250669 - RNA, 32 nt, Human
ugccacugcacuccagcuugggugacagagug

SEQ ID NO: 250670 - RNA, 32 nt, Human
ugccacugcacuccagcuugggugagaguggg

SEQ ID NO: 250671 - RNA, 32 nt, Human
ugccacugcacuccagcuuggugacagaguga

SEQ ID NO: 250672 - RNA, 32 nt, Human
ugccacugcacuccaggcugggcgacagagug

SEQ ID NO: 250673 - RNA, 32 nt, Human
ugccacugcacuccaggcugggugacagagcg

SEQ ID NO: 250674 - RNA, 32 nt, Human
ugccacugcacuccaguauggaugacauagua

SEQ ID NO: 250675 - RNA, 32 nt, Human
ugccacugcacuccagucuggacaacagagca

SEQ ID NO: 250676 - RNA, 32 nt, Human
ugccacugcacuccagucuggaugacagagag

SEQ ID NO: 250677 - RNA, 32 nt, Human
ugccacugcacuccagucugggugacagagug

SEQ ID NO: 250678 - RNA, 32 nt, Human
ugccacugcacuccagucugggugacagcaag

SEQ ID NO: 250679 - RNA, 32 nt, Human
ugccacugcacuccauccuggacgacagagug

SEQ ID NO: 250680 - RNA, 32 nt, Human
ugccacugcacuccauccugggcaacaagaac

SEQ ID NO: 250681 - RNA, 32 nt, Human
ugccacugcacuccauccugggugacagcaag

SEQ ID NO: 250682 - RNA, 32 nt, Human
ugccacugcacucccagccugggcaacggagu

SEQ ID NO: 250683 - RNA, 32 nt, Human
ugccacugcacucccgccugggcgacagagcg

SEQ ID NO: 250684 - RNA, 32 nt, Human
ugccacugcacucccgccugggugacaaagca

SEQ ID NO: 250685 - RNA, 32 nt, Human
ugccacugcacuccggccuaggugacagaggg

SEQ ID NO: 250686 - RNA, 32 nt, Human
ugccacugcacuccggccugggugacaaagca

SEQ ID NO: 250687 - RNA, 32 nt, Human
ugccacugcacuccggccugggugauggagca

SEQ ID NO: 250688 - RNA, 32 nt, Human
ugccacugcacuccuccgugggugacagagcg

SEQ ID NO: 250689 - RNA, 32 nt, Human
ugccacugcacuccugccugggugacaaagug

SEQ ID NO: 250690 - RNA, 32 nt, Human
ugccacugcacuccugccugggugacagaaga

SEQ ID NO: 250691 - RNA, 32 nt, Human
ugccacugcacucgagccugggugacagagug

SEQ ID NO: 250692 - RNA, 32 nt, Human
ugccacugcacucuaaccugggcgacagagug

SEQ ID NO: 250693 - RNA, 32 nt, Human
ugccacugcacucuagccggggcgacagagcg

SEQ ID NO: 250694 - RNA, 32 nt, Human
ugccacugcacucuagccuaggcuacagagca

SEQ ID NO: 250695 - RNA, 32 nt, Human
ugccacugcacucuagccuagguggcugagcg

SEQ ID NO: 250696 - RNA, 32 nt, Human
ugccacugcacucuagccucggugacagagua

SEQ ID NO: 250697 - RNA, 32 nt, Human
ugccacugcacucuagccuggacagcagagca

SEQ ID NO: 250698 - RNA, 32 nt, Human
ugccacugcacucuagccugggcaauaagcaa

SEQ ID NO: 250699 - RNA, 32 nt, Human
ugccacugcacucuagccugggcgacagagca

SEQ ID NO: 250700 - RNA, 32 nt, Human
ugccacugcacucuagccugggcgacagagcg

SEQ ID NO: 250701 - RNA, 32 nt, Human
ugccacugcacucuagccugggugacaaagca

SEQ ID NO: 250702 - RNA, 32 nt, Human
ugccacugcacucuagccugggugacagagag

SEQ ID NO: 250703 - RNA, 32 nt, Human
ugccacugcacucuagccugggugacagagca

SEQ ID NO: 250704 - RNA, 32 nt, Human
ugccacugcacucuagccugggugacagagcg

SEQ ID NO: 250705 - RNA, 32 nt, Human
ugccacugcacucugggcuggguaacagagug

SEQ ID NO: 250706 - RNA, 32 nt, Human
ugccacugcacugcacuccagccugggugaca

SEQ ID NO: 250707 - RNA, 32 nt, Human
ugccacugcacugcagcccgggcgacagagag

SEQ ID NO: 250708 - RNA, 32 nt, Human
ugccacugcacugcagccugggcgacaauuug

SEQ ID NO: 250709 - RNA, 32 nt, Human
ugccacugcacugcagccugggcgacagagcg

SEQ ID NO: 250710 - RNA, 32 nt, Human
ugccacugcacugcagccugggcuacagagag

SEQ ID NO: 250711 - RNA, 32 nt, Human
ugccacugcacugcaggcugggugacagagug

SEQ ID NO: 250712 - RNA, 32 nt, Human
ugccacugcacuucagccugggcaacagagug

SEQ ID NO: 250713 - RNA, 32 nt, Human
ugccacugcacuucagccugggcgacagagug

SEQ ID NO: 250714 - RNA, 32 nt, Human
ugccacugcacuucagccugggugacagaaag

SEQ ID NO: 250715 - RNA, 32 nt, Human
ugccacugcacuucagccugggugacagagca

SEQ ID NO: 250716 - RNA, 32 nt, Human
ugccacugcacuucagccugggugacagagug

SEQ ID NO: 250717 - RNA, 32 nt, Human
ugccacugcacuuccagccugggugacacagu

SEQ ID NO: 250718 - RNA, 32 nt, Human
ugccacugcacuuccagccugggugacagagu

SEQ ID NO: 250719 - RNA, 32 nt, Human
ugccacugcacuuuagccugggcaacagauca

SEQ ID NO: 250720 - RNA, 32 nt, Human
ugccacugcacuuuagccugggugacagagcg

SEQ ID NO: 250721 - RNA, 32 nt, Human
ugccacugcacuuuucagccugggugccacag

SEQ ID NO: 250722 - RNA, 32 nt, Human
ugccacugcaggagacaggccccaugucagga

SEQ ID NO: 250723 - RNA, 32 nt, Human
ugccacugcaguccagccugggugacagagcc

SEQ ID NO: 250724 - RNA, 32 nt, Human
ugccacugcaugccagccugggcaacaagagu

SEQ ID NO: 250725 - RNA, 32 nt, Human
ugccacugcaugccagccugggcaacagaaca

SEQ ID NO: 250726 - RNA, 32 nt, Human
ugccacugcauuccagccugggcgacagagca

SEQ ID NO: 250727 - RNA, 32 nt, Human
ugccacugcauuccagccugggcgacagagug

SEQ ID NO: 250728 - RNA, 32 nt, Human
ugccacugcauuccagccugggugacagaaug

SEQ ID NO: 250729 - RNA, 32 nt, Human
ugccacugcauuccagccugguugacagagug

SEQ ID NO: 250730 - RNA, 32 nt, Human
ugccacugcauuccagccugugugauggagag

SEQ ID NO: 250731 - RNA, 32 nt, Human
ugccacugcauucuagccugggcaacagagua

SEQ ID NO: 250732 - RNA, 32 nt, Human
ugccacugcauucuagccugggcgauagagug

SEQ ID NO: 250733 - RNA, 32 nt, Human
ugccacugccagcaaccaaagaagccaccugg

SEQ ID NO: 250734 - RNA, 32 nt, Human
ugccacugccaggccucugcccugcagcugaa

SEQ ID NO: 250735 - RNA, 32 nt, Human
ugccacugccccacccugccccacugcugucu

SEQ ID NO: 250736 - RNA, 32 nt, Human
ugccacugcccuccagccugggugacagagug

SEQ ID NO: 250737 - RNA, 32 nt, Human
ugccacugccuugcucugggccuguggugcuc

SEQ ID NO: 250738 - RNA, 32 nt, Human
ugccacugccuuggacaacuugccuacuucca

SEQ ID NO: 250739 - RNA, 32 nt, Human
ugccacugcgcuccagccugggcgacagagug

SEQ ID NO: 250740 - RNA, 32 nt, Human
ugccacugcgcuccagccugggggagggggac

SEQ ID NO: 250741 - RNA, 32 nt, Human
ugccacugcgcuccagccugggugacagagug

SEQ ID NO: 250742 - RNA, 32 nt, Human
ugccacugcgcuccagccuggguggcagagag

SEQ ID NO: 250743 - RNA, 32 nt, Human
ugccacugcucuccagccugggaggcacagca

SEQ ID NO: 250744 - RNA, 32 nt, Human
ugccacugcucuccagccugggugacagagga

SEQ ID NO: 250745 - RNA, 32 nt, Human
ugccacugcuuuccagccugggcaacauagua

SEQ ID NO: 250746 - RNA, 32 nt, Human
ugccacugcuuugucuuucuguuacacauaca

SEQ ID NO: 250747 - RNA, 32 nt, Human
ugccacuggacuccagccugggugaaagagcg

SEQ ID NO: 250748 - RNA, 32 nt, Human
ugccacuggagugugaaugcagucaugaauaa

SEQ ID NO: 250749 - RNA, 32 nt, Human
ugccacugggacaacaugaggccucuaacagc

SEQ ID NO: 250750 - RNA, 32 nt, Human
ugccacugguaccgcggcccagccuggggccu

SEQ ID NO: 250751 - RNA, 32 nt, Human
ugccacuguacaccagccugggugacagagca

SEQ ID NO: 250752 - RNA, 32 nt, Human
ugccacuguacaucaccagccugggcgacaga

SEQ ID NO: 250753 - RNA, 32 nt, Human
ugccacuguacuccagccuaggugacagagca

SEQ ID NO: 250754 - RNA, 32 nt, Human
ugccacuguacuccagccugaagagcgagacu

SEQ ID NO: 250755 - RNA, 32 nt, Human
ugccacuguacuccagccugagcuacagagca

SEQ ID NO: 250756 - RNA, 32 nt, Human
ugccacuguacuccagccugggagauagagca

SEQ ID NO: 250757 - RNA, 32 nt, Human
ugccacuguacuccagccugggcagcagagca

SEQ ID NO: 250758 - RNA, 32 nt, Human
ugccacuguacuccagccugggcgacagaggg

SEQ ID NO: 250759 - RNA, 32 nt, Human
ugccacuguacuccagccugggcgacagcaag

SEQ ID NO: 250760 - RNA, 32 nt, Human
ugccacuguacuccagccugggugacagagcg

SEQ ID NO: 250761 - RNA, 32 nt, Human
ugccacuguacuccagccugggugacagagug

SEQ ID NO: 250762 - RNA, 32 nt, Human
ugccacuguacuccagccugggugauaggaug

SEQ ID NO: 250763 - RNA, 32 nt, Human
ugccacuguacuccagccuggugacagagcga

SEQ ID NO: 250764 - RNA, 32 nt, Human
ugccacuguacuccagcgugggugacagagug

SEQ ID NO: 250765 - RNA, 32 nt, Human
ugccacuguacucuagccuggaagacagagug

SEQ ID NO: 250766 - RNA, 32 nt, Human
ugccacuguacugcagccugggugacagaaug

SEQ ID NO: 250767 - RNA, 32 nt, Human
ugccacuguagucccagcuauucagaaggcug

SEQ ID NO: 250768 - RNA, 32 nt, Human
ugccacuguauuccagacugggugacagagug

SEQ ID NO: 250769 - RNA, 32 nt, Human
ugccacugucagcuuuucuccaaaaagcagcc

SEQ ID NO: 250770 - RNA, 32 nt, Human
ugccacugucugggccccaucugggauuccug

SEQ ID NO: 250771 - RNA, 32 nt, Human
ugccacugugcccagcucuggcccagagggua

SEQ ID NO: 250772 - RNA, 32 nt, Human
ugccacuguggcuccaggaggcccuugggagc

SEQ ID NO: 250773 - RNA, 32 nt, Human
ugccacuguggggcuucugccggccgguaguc

SEQ ID NO: 250774 - RNA, 32 nt, Human
ugccacuguuuuccagccugggcaauacagug

SEQ ID NO: 250775 - RNA, 32 nt, Human
ugccacuuaaagcaauccugaagaaccagaga

SEQ ID NO: 250776 - RNA, 32 nt, Human
ugccacuuacguuuuaaguuauuuaggaacac

SEQ ID NO: 250777 - RNA, 32 nt, Human
ugccacuucacuccagccugggugacaaagug

SEQ ID NO: 250778 - RNA, 32 nt, Human
ugccacuucauuccagccugggcgacagagca

SEQ ID NO: 250779 - RNA, 32 nt, Human
ugccacuucccaggguggagacaguggaaaag

SEQ ID NO: 250780 - RNA, 32 nt, Human
ugccacuucuuaccugcugaaggaucuugcuc

SEQ ID NO: 250781 - RNA, 23 nt, Human
ugccacuucuuccaggggacaga

SEQ ID NO: 250782 - RNA, 32 nt, Human
ugccacuugcccacccacuccccucagaucuc

SEQ ID NO: 250783 - RNA, 32 nt, Human
ugccacuugccuggccaugucaccuugaagcu

SEQ ID NO: 250784 - RNA, 32 nt, Human
ugccacuugcuagcugugagacuguggacaaa

SEQ ID NO: 250785 - RNA, 32 nt, Human
ugccacuugcugccaccaccucuuccuggggc

SEQ ID NO: 250786 - RNA, 32 nt, Human
ugccacuuguggauugucauuuugccaugacu

SEQ ID NO: 250787 - RNA, 21 nt, Human
ugccacuuuaacacuaaugca

SEQ ID NO: 250788 - RNA, 32 nt, Human
ugccacuuuaauccuuccacuaucauucccau

SEQ ID NO: 250789 - RNA, 32 nt, Human
ugccacuuucaucagguuugugucucaucucc

SEQ ID NO: 250790 - RNA, 32 nt, Human
ugccacuuuugcuugcccuccuggcuggggug

SEQ ID NO: 250791 - RNA, 32 nt, Human
ugccacuuuuggacuuucaucauccuccugaa

SEQ ID NO: 250792 - RNA, 32 nt, Human
ugccagaaagcuguacuugaguuaaacauagg

SEQ ID NO: 250793 - RNA, 32 nt, Human
ugccagaaaugagagauuaggagcugggagaa

SEQ ID NO: 250794 - RNA, 32 nt, Human
ugccagaaauuauaucuuugguugugauuuaa

SEQ ID NO: 250795 - RNA, 32 nt, Human
ugccagaagcagcauccuccacuuguucaggg

SEQ ID NO: 250796 - RNA, 32 nt, Human
ugccagaagccaggggaccaucaggggcuggu

SEQ ID NO: 250797 - RNA, 32 nt, Human
ugccagaagguaaucacucagauacacuuggg

SEQ ID NO: 250798 - RNA, 32 nt, Human
ugccagaaugaaguaggaaagaggagggaucc

SEQ ID NO: 250799 - RNA, 32 nt, Human
ugccagaauguaagaguugcaagugauuuugu

SEQ ID NO: 250800 - RNA, 32 nt, Human
ugccagaaugucucuuuagaacaagaguuaga

SEQ ID NO: 250801 - RNA, 32 nt, Human
ugccagaauuacaggcaugagccaccaugccu

SEQ ID NO: 250802 - RNA, 32 nt, Human
ugccagacaucaucugauuuacaaucaaaaau

SEQ ID NO: 250803 - RNA, 32 nt, Human
ugccagacccaggaguggagggcucugugagg

SEQ ID NO: 250804 - RNA, 32 nt, Human
ugccagacuucugagaagcaccugccagcaac

SEQ ID NO: 250805 - RNA, 32 nt, Human
ugccagagaaaccacccccacuccaugagaag

SEQ ID NO: 250806 - RNA, 32 nt, Human
ugccagagaaagcagagaugcugagagacauu

SEQ ID NO: 250807 - RNA, 32 nt, Human
ugccagagaagcaggaggaggauggagagaau

SEQ ID NO: 250808 - RNA, 32 nt, Human
ugccagagacgccucauuuucuuuccaucccc

SEQ ID NO: 250809 - RNA, 32 nt, Human
ugccagagauucaccaccuggggcccaggauc

SEQ ID NO: 250810 - RNA, 32 nt, Human
ugccagagcaagacucaaagaggcagagguuu

SEQ ID NO: 250811 - RNA, 22 nt, Human
ugccagagcccagccggcgcgg

SEQ ID NO: 250812 - RNA, 32 nt, Human
ugccagagccucuuccugugaggcggggguaa

SEQ ID NO: 250813 - RNA, 32 nt, Human
ugccagagccuugaucccucccuaggcccugc

SEQ ID NO: 250814 - RNA, 23 nt, Human
ugccagagcugauccucccuagg

SEQ ID NO: 250815 - RNA, 32 nt, Human
ugccagagcugggagcucugcagguaugaguc

SEQ ID NO: 250816 - RNA, 32 nt, Human
ugccagaggacgcaggaaauuagccagguugc

SEQ ID NO: 250817 - RNA, 32 nt, Human
ugccagaggaggcagcgggauuguaguggcgc

SEQ ID NO: 250818 - RNA, 31 nt, Human
ugccagaggagugcucccaugccagcuuccc

SEQ ID NO: 250819 - RNA, 32 nt, Human
ugccagagguucagggagaacagcugcguugc

SEQ ID NO: 250820 - RNA, 32 nt, Human
ugccagauaaaugaucagauauucuauagagu

SEQ ID NO: 250821 - RNA, 19 nt, Human
ugccagauaccgggcuaag

SEQ ID NO: 250822 - RNA, 32 nt, Human
ugccagaucuucucagagcuuuagcuuuucua

SEQ ID NO: 250823 - RNA, 32 nt, Human
ugccagaugccgggggcagucagcauuaauga

SEQ ID NO: 250824 - RNA, 32 nt, Human
ugccagaugugggcucagauccugggcaugau

SEQ ID NO: 250825 - RNA, 32 nt, Human
ugccagcaacaucucuauugcuggaugguccc

SEQ ID NO: 250826 - RNA, 32 nt, Human
ugccagcaacugcagaggaugcagccaccugc

SEQ ID NO: 250827 - RNA, 32 nt, Human
ugccagcaaggcagcaagacuuccugcuaucc

SEQ ID NO: 250828 - RNA, 23 nt, Human
ugccagcacaggccccucccugg

SEQ ID NO: 250829 - RNA, 32 nt, Human
ugccagcaccugcggggcagguguuuucugug

SEQ ID NO: 250830 - RNA, 32 nt, Human
ugccagcaccuugaucuugaacuucucagccu

SEQ ID NO: 250831 - RNA, 32 nt, Human
ugccagcaccuugccuggccccuccccaggcu

SEQ ID NO: 250832 - RNA, 32 nt, Human
ugccagcaccuugcuccccacugcccagggcu

SEQ ID NO: 250833 - RNA, 32 nt, Human
ugccagcaccuuggucuuggacuucccagccu

SEQ ID NO: 250834 - RNA, 32 nt, Human
ugccagcacgggaucccugaagugacucagcc

SEQ ID NO: 250835 - RNA, 24 nt, Human
ugccagcacucccccuucacccca

SEQ ID NO: 250836 - RNA, 32 nt, Human
ugccagcacuuaguacagccucaggccuauac

SEQ ID NO: 250837 - RNA, 23 nt, Human
ugccagcagaaggucccccaggu

SEQ ID NO: 250838 - RNA, 32 nt, Human
ugccagcagccccgucugcccaccauucccgg

SEQ ID NO: 250839 - RNA, 21 nt, Human
ugccagcagccuagacccugg

SEQ ID NO: 250840 - RNA, 18 nt, Human
ugccagcagcugagcugg

SEQ ID NO: 250841 - RNA, 20 nt, Human
ugccagcagcugcgccccgg

SEQ ID NO: 250842 - RNA, 24 nt, Human
ugccagcagcuguccucccuggug

SEQ ID NO: 250843 - RNA, 19 nt, Human
ugccagcagcuguuucugg

SEQ ID NO: 250844 - RNA, 21 nt, Human
ugccagcagcuuguacccagg

SEQ ID NO: 250845 - RNA, 32 nt, Human
ugccagcaggguguacggaguggaggguacag

SEQ ID NO: 250846 - RNA, 32 nt, Human
ugccagcaguagcagggcugcccacgccccuu

SEQ ID NO: 250847 - RNA, 32 nt, Human
ugccagcagugcccgcccccacccucaaagcu

SEQ ID NO: 250848 - RNA, 32 nt, Human
ugccagcauccagcaugagcagaugucgggga

SEQ ID NO: 250849 - RNA, 32 nt, Human
ugccagcauccagcgugagcagacgucgggga

SEQ ID NO: 250850 - RNA, 20 nt, Human
ugccagcauccccuccaggg

SEQ ID NO: 250851 - RNA, 32 nt, Human
ugccagcaugacaagcuccagcaucaguggag

SEQ ID NO: 250852 - RNA, 32 nt, Human
ugccagcaugccugccugcccaccucagagcc

SEQ ID NO: 250853 - RNA, 32 nt, Human
ugccagccaacaacaaaugccugaucuuccgg

SEQ ID NO: 250854 - RNA, 32 nt, Human
ugccagccacugcucuagagaugggaaaacag

SEQ ID NO: 250855 - RNA, 32 nt, Human
ugccagccagaggcgcugggugugcugggugc

SEQ ID NO: 250856 - RNA, 32 nt, Human
ugccagccagccugucccaccacagcgggcuc

SEQ ID NO: 250857 - RNA, 21 nt, Human
ugccagccagccuuggggaca

SEQ ID NO: 250858 - RNA, 23 nt, Human
ugccagccaggcuggagugcagu

SEQ ID NO: 250859 - RNA, 24 nt, Human
ugccagccaggcuggagugcagug

SEQ ID NO: 250860 - RNA, 23 nt, Human
ugccagccaggucagaacauccu

SEQ ID NO: 250861 - RNA, 21 nt, Human
ugccagccauaccuuccuggu

SEQ ID NO: 250862 - RNA, 32 nt, Human
ugccagccauuucucaaacccaccucggacca

SEQ ID NO: 250863 - RNA, 23 nt, Human
ugccagcccacccugcagcccug

SEQ ID NO: 250864 - RNA, 32 nt, Human
ugccagccccacccuccagucgguccggacgc

SEQ ID NO: 250865 - RNA, 32 nt, Human
ugccagccccacucaacuuucaguuggcucug

SEQ ID NO: 250866 - RNA, 32 nt, Human
ugccagccccagagacagaugugggcacagga

SEQ ID NO: 250867 - RNA, 32 nt, Human
ugccagccccagcuucagccccggcucagguc

SEQ ID NO: 250868 - RNA, 32 nt, Human
ugccagccccggaugaggccaucuggccucca

SEQ ID NO: 250869 - RNA, 32 nt, Human
ugccagccccucuccacugagaaguugggcug

SEQ ID NO: 250870 - RNA, 32 nt, Human
ugccagcccggccuggccacaggugaggucug

SEQ ID NO: 250871 - RNA, 32 nt, Human
ugccagcccugccuguucucucaccccgcuuc

SEQ ID NO: 250872 - RNA, 32 nt, Human
ugccagcccugcggaaccagagccucaggcug

SEQ ID NO: 250873 - RNA, 32 nt, Human
ugccagcccugcugcacagggugcaggcauug

SEQ ID NO: 250874 - RNA, 21 nt, Human
ugccagcccuggcccggcugc

SEQ ID NO: 250875 - RNA, 21 nt, Human
ugccagccgccgccgccgccg

SEQ ID NO: 250876 - RNA, 22 nt, Human
ugccagccgccgccgccgccgc

SEQ ID NO: 250877 - RNA, 32 nt, Human
ugccagccuccuugcugaccccaggucagccc

SEQ ID NO: 250878 - RNA, 32 nt, Human
ugccagccucgaagccucuuugcugaccugga

SEQ ID NO: 250879 - RNA, 32 nt, Human
ugccagccugcagcucuccugcuugacacuga

SEQ ID NO: 250880 - RNA, 32 nt, Human
ugccagccuggaggaggaaagggagccugcuc

SEQ ID NO: 250881 - RNA, 32 nt, Human
ugccagccuggcaacagagcaagacucugucu

SEQ ID NO: 250882 - RNA, 18 nt, Human
ugccagccuucuccccag

SEQ ID NO: 250883 - RNA, 32 nt, Human
ugccagccuuucuacuccuuugcccuuuuccc

SEQ ID NO: 250884 - RNA, 18 nt, Human
ugccagcgacucccagga

SEQ ID NO: 250885 - RNA, 32 nt, Human
ugccagcgacugucucagacugggcagggagg

SEQ ID NO: 250886 - RNA, 20 nt, Human
ugccagcgagagccgcggga

SEQ ID NO: 250887 - RNA, 21 nt, Human
ugccagcgagagggaccaggg

SEQ ID NO: 250888 - RNA, 22 nt, Human
ugccagcgagcccaacccgcga

SEQ ID NO: 250889 - RNA, 21 nt, Human
ugccagcgaguuaccacggga

SEQ ID NO: 250890 - RNA, 22 nt, Human
ugccagcgcaacgccucccugg

SEQ ID NO: 250891 - RNA, 32 nt, Human
ugccagcgcagcguucugggcuccucagucgc

SEQ ID NO: 250892 - RNA, 32 nt, Human
ugccagcgcagucugcugggacaugcacauau

SEQ ID NO: 250893 - RNA, 32 nt, Human
ugccagcggagcagugcccugguacuugcugu

SEQ ID NO: 250894 - RNA, 32 nt, Human
ugccagcggccucuguucccugcagucugugc

SEQ ID NO: 250895 - RNA, 32 nt, Human
ugccagcgggcucggcccuguccuccucacag

SEQ ID NO: 250896 - RNA, 32 nt, Human
ugccagcgugccucagagaccccacaccaaca

SEQ ID NO: 250897 - RNA, 32 nt, Human
ugccagcuacuuccuccuccccacuuguccgc

SEQ ID NO: 250898 - RNA, 32 nt, Human
ugccagcucacaaggggaggcugcaguggguu

SEQ ID NO: 250899 - RNA, 32 nt, Human
ugccagcucauuuccuucaauuuccuuugacc

SEQ ID NO: 250900 - RNA, 32 nt, Human
ugccagcuccaauguaccagcagcuggaaucu

SEQ ID NO: 250901 - RNA, 32 nt, Human
ugccagcuccacaagcccuggacuucagggag

SEQ ID NO: 250902 - RNA, 27 nt, Human
ugccagcucccaacacccuuccuggug

SEQ ID NO: 250903 - RNA, 21 nt, Human
ugccagcuccgagacccggga

SEQ ID NO: 250904 - RNA, 32 nt, Human
ugccagcucugcugccaccucugacaggugug

SEQ ID NO: 250905 - RNA, 32 nt, Human
ugccagcucugggccaugaucucuuggcacug

SEQ ID NO: 250906 - RNA, 32 nt, Human
ugccagcucuguucugauucaccagggguccg

SEQ ID NO: 250907 - RNA, 23 nt, Human
ugccagcucuuaauugcauccuu

SEQ ID NO: 250908 - RNA, 32 nt, Human
ugccagcugcaaccuccgcuagguacgauaca

SEQ ID NO: 250909 - RNA, 32 nt, Human
ugccagcugcaaccuccgguagguacgauaca

SEQ ID NO: 250910 - RNA, 32 nt, Human
ugccagcuggccuaccugacugugccaggggc

SEQ ID NO: 250911 - RNA, 32 nt, Human
ugccagcuggccuggggauucugagugguguc

SEQ ID NO: 250912 - RNA, 22 nt, Human
ugccagcugggaguccucccgg

SEQ ID NO: 250913 - RNA, 32 nt, Human
ugccagcugggcugaaggauccuguucccaug

SEQ ID NO: 250914 - RNA, 21 nt, Human
ugccagcuggggcccucccug

SEQ ID NO: 250915 - RNA, 32 nt, Human
ugccagcugggugggaggagcagccgagugaa

SEQ ID NO: 250916 - RNA, 32 nt, Human
ugccagcuugcaucugccaucauuugaugccc

SEQ ID NO: 250917 - RNA, 32 nt, Human
ugccaggaaaaucuacccccuuccuccagcac

SEQ ID NO: 250918 - RNA, 32 nt, Human
ugccaggaaaccagauguggcccagaugucca

SEQ ID NO: 250919 - RNA, 32 nt, Human
ugccaggaacacugagggcggagccaggggaa

SEQ ID NO: 250920 - RNA, 32 nt, Human
ugccaggaagagaagaaagggggugcagucug

SEQ ID NO: 250921 - RNA, 32 nt, Human
ugccaggaagccaaauuccaaaugucuaaacu

SEQ ID NO: 250922 - RNA, 32 nt, Human
ugccaggaauggcgggccugcccaacguguuu

SEQ ID NO: 250923 - RNA, 32 nt, Human
ugccaggacaccugccccagcgcggcuuggcc

SEQ ID NO: 250924 - RNA, 24 nt, Human
ugccaggacacuguccuggugccc

SEQ ID NO: 250925 - RNA, 18 nt, Human
ugccaggaccgggccgag

SEQ ID NO: 250926 - RNA, 32 nt, Human
ugccaggaccugcucccagcuccacgacgugu

SEQ ID NO: 250927 - RNA, 31 nt, Human
ugccaggacuccucugggcuugcagucgcuc

SEQ ID NO: 250928 - RNA, 23 nt, Human
ugccaggacucucuuucuuccac

SEQ ID NO: 250929 - RNA, 32 nt, Human
ugccaggacuugggaagcagucacugugaaau

SEQ ID NO: 250930 - RNA, 32 nt, Human
ugccaggagcagagacaggguggccgaagucc

SEQ ID NO: 250931 - RNA, 32 nt, Human
ugccaggagcccuucucccaaagauggagaaa

SEQ ID NO: 250932 - RNA, 32 nt, Human
ugccaggagccuuccugugcuccccauugccu

SEQ ID NO: 250933 - RNA, 32 nt, Human
ugccaggagcuaauggagccaggccugacacc

SEQ ID NO: 250934 - RNA, 23 nt, Human
ugccaggagcucagggcugagcu

SEQ ID NO: 250935 - RNA, 31 nt, Human
ugccaggaggugugagagugaucuguccugu

SEQ ID NO: 250936 - RNA, 32 nt, Human
ugccaggagugaugcauccagaaaagaaguca

SEQ ID NO: 250937 - RNA, 32 nt, Human
ugccaggauccuccgaggucagcugcuggguc

SEQ ID NO: 250938 - RNA, 23 nt, Human
ugccaggaucuguuuccgccaca

SEQ ID NO: 250939 - RNA, 19 nt, Human
ugccaggauggagugcagu

SEQ ID NO: 250940 - RNA, 20 nt, Human
ugccaggauggagugcagug

SEQ ID NO: 250941 - RNA, 21 nt, Human
ugccaggauggagugcagugg

SEQ ID NO: 250942 - RNA, 32 nt, Human
ugccaggauuacaggcaugagccacugugucc

SEQ ID NO: 250943 - RNA, 32 nt, Human
ugccaggcaacaggacuaaacuaccuccaaag

SEQ ID NO: 250944 - RNA, 32 nt, Human
ugccaggcagcacacccaggaggccggcccug

SEQ ID NO: 250945 - RNA, 32 nt, Human
ugccaggcagggacugucggguugacccugag

SEQ ID NO: 250946 - RNA, 32 nt, Human
ugccaggcauguccuaggcucugggugcagua

SEQ ID NO: 250947 - RNA, 32 nt, Human
ugccaggccacugaggaugggcaggggucucu

SEQ ID NO: 250948 - RNA, 20 nt, Human
ugccaggccagagugcagug

SEQ ID NO: 250949 - RNA, 32 nt, Human
ugccaggcccacacauccccaguuguugguuu

SEQ ID NO: 250950 - RNA, 32 nt, Human
ugccaggcccaggcccggucucagucccagag

SEQ ID NO: 250951 - RNA, 32 nt, Human
ugccaggccccaaauugaggaaguugacugcc

SEQ ID NO: 250952 - RNA, 32 nt, Human
ugccaggcccgccucuggcuccugggccuggg

SEQ ID NO: 250953 - RNA, 32 nt, Human
ugccaggcccgcugccaagagcuagagaggag

SEQ ID NO: 250954 - RNA, 22 nt, Human
ugccaggcccucuccugccaca

SEQ ID NO: 250955 - RNA, 21 nt, Human
ugccaggccuccaacucggga

SEQ ID NO: 250956 - RNA, 32 nt, Human
ugccaggccuccugggucugcagugagucugg

SEQ ID NO: 250957 - RNA, 32 nt, Human
ugccaggccuucucccccuccccaguguccuc

SEQ ID NO: 250958 - RNA, 32 nt, Human
ugccaggcucaagcaguucuccugccucagcc

SEQ ID NO: 250959 - RNA, 32 nt, Human
ugccaggcugcccuauacacugggggauucug

SEQ ID NO: 250960 - RNA, 18 nt, Human
ugccaggcugggugcagu

SEQ ID NO: 250961 - RNA, 19 nt, Human
ugccaggcugggugcagug

SEQ ID NO: 250962 - RNA, 20 nt, Human
ugccaggcugggugcagugg

SEQ ID NO: 250963 - RNA, 32 nt, Human
ugccaggcuggucucaaacuccuggguucaag

SEQ ID NO: 250964 - RNA, 32 nt, Human
ugccaggcuguuuucuguagccucagauugcc

SEQ ID NO: 250965 - RNA, 21 nt, Human
ugccaggcuuccuuuugggca

SEQ ID NO: 250966 - RNA, 32 nt, Human
ugccagggaagaagguuugaaagauacgguug

SEQ ID NO: 250967 - RNA, 32 nt, Human
ugccagggagggcuggccucaccaccaccguc

SEQ ID NO: 250968 - RNA, 32 nt, Human
ugccagggaugccgggaacacugucgaagaac

SEQ ID NO: 250969 - RNA, 32 nt, Human
ugccagggaugucuucacugagggcuauggau

SEQ ID NO: 250970 - RNA, 32 nt, Human
ugccagggccacugcaaagaguucugugucua

SEQ ID NO: 250971 - RNA, 32 nt, Human
ugccagggccuggaguggagguucaggaccaa

SEQ ID NO: 250972 - RNA, 32 nt, Human
ugccagggcucauuugaccucuacuucaucuu

SEQ ID NO: 250973 - RNA, 32 nt, Human
ugccagggcuccugccugcuccuccuguguua

SEQ ID NO: 250974 - RNA, 32 nt, Human
ugccagggcugcugccccgcucccuccuccuc

SEQ ID NO: 250975 - RNA, 31 nt, Human
ugccaggggagaccugggaccuggacggcca

SEQ ID NO: 250976 - RNA, 32 nt, Human
ugccaggggagagacagccacgguccucuuug

SEQ ID NO: 250977 - RNA, 32 nt, Human
ugccaggggaggaggagaagccagcaggcacc

SEQ ID NO: 250978 - RNA, 32 nt, Human
ugccaggggccugggggugggucucuugcugu

SEQ ID NO: 250979 - RNA, 32 nt, Human
ugccagggggaggcggcagugggcagggggug

SEQ ID NO: 250980 - RNA, 32 nt, Human
ugccagggucagaucucgccuccgaggaaggu

SEQ ID NO: 250981 - RNA, 32 nt, Human
ugccaggguccugguagcuuccucuucaacag

SEQ ID NO: 250982 - RNA, 32 nt, Human
ugccagguacaaauuuguuuauuccaggauca

SEQ ID NO: 250983 - RNA, 32 nt, Human
ugccagguacccagagaugucaucucucucca

SEQ ID NO: 250984 - RNA, 32 nt, Human
ugccagguaggcagcaggcggcaggggguuaa

SEQ ID NO: 250985 - RNA, 32 nt, Human
ugccaggucaucucugccagggcacaguucau

SEQ ID NO: 250986 - RNA, 32 nt, Human
ugccaggucccaggaacucaggcuucagguga

SEQ ID NO: 250987 - RNA, 32 nt, Human
ugccagguccuccuccucacucagcccugccg

SEQ ID NO: 250988 - RNA, 32 nt, Human
ugccaggugaccuugggcaagugucuuuacug

SEQ ID NO: 250989 - RNA, 32 nt, Human
ugccaggugagcugcccuggggguucacugga

SEQ ID NO: 250990 - RNA, 32 nt, Human
ugccagguggaggacucccaucaccuucucuc

SEQ ID NO: 250991 - RNA, 32 nt, Human
ugccagguggaggugauuagggggaggaugcu

SEQ ID NO: 250992 - RNA, 32 nt, Human
ugccaggugggagcugccuuccccagcccagu

SEQ ID NO: 250993 - RNA, 32 nt, Human
ugccagguggguccuacagcaggucacaaaug

SEQ ID NO: 250994 - RNA, 32 nt, Human
ugccagguuaccacggugugcacagggcagag

SEQ ID NO: 250995 - RNA, 23 nt, Human
ugccagguuuuacccucccuggu

SEQ ID NO: 250996 - RNA, 32 nt, Human
ugccagguuuuucugacuugauuucuguaauu

SEQ ID NO: 250997 - RNA, 32 nt, Human
ugccaguaagguucuacauaccacugaccauc

SEQ ID NO: 250998 - RNA, 19 nt, Human
ugccaguaagugacuggau

SEQ ID NO: 250999 - RNA, 32 nt, Human
ugccaguacugaugcccaguuugcauuuuaaa

SEQ ID NO: 251000 - RNA, 24 nt, Human
ugccaguagcacccccgcuagagc

SEQ ID NO: 251001 - RNA, 32 nt, Human
ugccaguaggacaucugggcucugggcugcau

SEQ ID NO: 251002 - RNA, 32 nt, Human
ugccaguauccagcaguaucuggaccacaggc

SEQ ID NO: 251003 - RNA, 32 nt, Human
ugccaguauguuccaaacccuccugggaaggc

SEQ ID NO: 251004 - RNA, 22 nt, Human
ugccagucacccuaaaaugcuu

SEQ ID NO: 251005 - RNA, 32 nt, Human
ugccagucagcccuuuugaguucccgccucac

SEQ ID NO: 251006 - RNA, 32 nt, Human
ugccaguccaggcuuucuuccuuguccuugcc

SEQ ID NO: 251007 - RNA, 32 nt, Human
ugccagucccugugccuggacugauuggaaca

SEQ ID NO: 251008 - RNA, 21 nt, Human
ugccagucggcucccugcuca

SEQ ID NO: 251009 - RNA, 32 nt, Human
ugccagucucacugcgcccucuccuccaaccu

SEQ ID NO: 251010 - RNA, 32 nt, Human
ugccagucucagccuccggucuccguuccccc

SEQ ID NO: 251011 - RNA, 32 nt, Human
ugccagucucugcugucucacccuuaugagca

SEQ ID NO: 251012 - RNA, 32 nt, Human
ugccagucuuucuccccugcagcuuccucugc

SEQ ID NO: 251013 - RNA, 32 nt, Human
ugccagugaagccaggccuggggaaggcuccu

SEQ ID NO: 251014 - RNA, 32 nt, Human
ugccagugagccacacuccuggacacucucua

SEQ ID NO: 251015 - RNA, 24 nt, Human
ugccagugagccacguccaugccc

SEQ ID NO: 251016 - RNA, 32 nt, Human
ugccagugaugaugcaguuagcugcucaguga

SEQ ID NO: 251017 - RNA, 32 nt, Human
ugccagugcacuccagccugggcaacagagua

SEQ ID NO: 251018 - RNA, 32 nt, Human
ugccagugcacuccagccugggugacagcgag

SEQ ID NO: 251019 - RNA, 32 nt, Human
ugccagugcacuccaggcuggacgacagagca

SEQ ID NO: 251020 - RNA, 32 nt, Human
ugccagugcacuccggccugggugacagagug

SEQ ID NO: 251021 - RNA, 32 nt, Human
ugccagugcagaaguuucuccagguggccucc

SEQ ID NO: 251022 - RNA, 32 nt, Human
ugccagugccacuuuuaagaagugaaucacua

SEQ ID NO: 251023 - RNA, 21 nt, Human
ugccagugccgcccgcagccc

SEQ ID NO: 251024 - RNA, 32 nt, Human
ugccagugcuuugcacacaagcucugcgccaa

SEQ ID NO: 251025 - RNA, 32 nt, Human
ugccaguggaagagagaaagcaggcgaguguu

SEQ ID NO: 251026 - RNA, 32 nt, Human
ugccaguggaggccucucacauccggagccca

SEQ ID NO: 251027 - RNA, 32 nt, Human
ugccaguggaggcugcggggcaccagggcggg

SEQ ID NO: 251028 - RNA, 32 nt, Human
ugccaguggccaccgcuagggucuccacaggc

SEQ ID NO: 251029 - RNA, 32 nt, Human
ugccaguggcccagggugugugcagggcagcu

SEQ ID NO: 251030 - RNA, 32 nt, Human
ugccaguggcuuagcuugaauuacaggguaaa

SEQ ID NO: 251031 - RNA, 32 nt, Human
ugccaguggugacugccaggaacguccuauga

SEQ ID NO: 251032 - RNA, 32 nt, Human
ugccagugucccuccgucccagggggcugugc

SEQ ID NO: 251033 - RNA, 32 nt, Human
ugccagugucuucaucucuucauaaaggugcc

SEQ ID NO: 251034 - RNA, 32 nt, Human
ugccagugugaccucacccucuccagucaccc

SEQ ID NO: 251035 - RNA, 32 nt, Human
ugccagugugggcaagggcucagccucucugc

SEQ ID NO: 251036 - RNA, 32 nt, Human
ugccaguguuacuccagcaggcaaccaagaag

SEQ ID NO: 251037 - RNA, 32 nt, Human
ugccaguuauagguggaugugccaagaugcug

SEQ ID NO: 251038 - RNA, 32 nt, Human
ugccaguuaucauaggcuguuuuaaguuagaa

SEQ ID NO: 251039 - RNA, 32 nt, Human
ugccaguuauccuggcuucccaacuggucaga

SEQ ID NO: 251040 - RNA, 32 nt, Human
ugccaguuccaaugcucccagauucuaaucuc

SEQ ID NO: 251041 - RNA, 32 nt, Human
ugccaguuccacagacuggagugagaacuuau

SEQ ID NO: 251042 - RNA, 32 nt, Human
ugccaguucccauccagcaccgaagaaaauca

SEQ ID NO: 251043 - RNA, 32 nt, Human
ugccaguuccuucccucuuuccuuccuuucuu

SEQ ID NO: 251044 - RNA, 32 nt, Human
ugccaguucucccuggaacuccuggccuuuug

SEQ ID NO: 251045 - RNA, 32 nt, Human
ugccaguugggcucgcacugcccacaugggac

SEQ ID NO: 251046 - RNA, 32 nt, Human
ugccaguuuucccuggaacuccuggccuuuug

SEQ ID NO: 251047 - RNA, 24 nt, Human
ugccaguuuucuuccuuguuuaca

SEQ ID NO: 251048 - RNA, 32 nt, Human
ugccaguuuugucaaagggaagguaaagccgu

SEQ ID NO: 251049 - RNA, 19 nt, Human
ugccauaacauccugcucc

SEQ ID NO: 251050 - RNA, 32 nt, Human
ugccauaauauacaaacuucuacuuucgucag

SEQ ID NO: 251051 - RNA, 32 nt, Human
ugccauaauguugaauaaaacucucuucuuau

SEQ ID NO: 251052 - RNA, 31 nt, Human
ugccauacaaaaacuuaacauuuaaaacuga

SEQ ID NO: 251053 - RNA, 32 nt, Human
ugccauacccugcucacccuagucucugcagg

SEQ ID NO: 251054 - RNA, 32 nt, Human
ugccauaggccauacauguuacuguaaucagu

SEQ ID NO: 251055 - RNA, 32 nt, Human
ugccauagggaaauggauuugguccugggggu

SEQ ID NO: 251056 - RNA, 24 nt, Human
ugccauaguucauugauuuuuaca

SEQ ID NO: 251057 - RNA, 32 nt, Human
ugccauauaaaggagauguuucucauucgccc

SEQ ID NO: 251058 - RNA, 32 nt, Human
ugccauauccuccccauuaucucccccuuguc

SEQ ID NO: 251059 - RNA, 32 nt, Human
ugccaucaacuuuguuuccucaucucaaauaa

SEQ ID NO: 251060 - RNA, 32 nt, Human
ugccaucaccacggcucacugcagccucagcg

SEQ ID NO: 251061 - RNA, 21 nt, Human
ugccaucaccggugaacagcu

SEQ ID NO: 251062 - RNA, 32 nt, Human
ugccaucacuggcucuuguccucucuuuacug

SEQ ID NO: 251063 - RNA, 32 nt, Human
ugccaucagcuccuuccuccccuguucauucu

SEQ ID NO: 251064 - RNA, 32 nt, Human
ugccaucaucugcuauuucugccacuucucuu

SEQ ID NO: 251065 - RNA, 32 nt, Human
ugccaucaugaggaaucaaugagagaucugug

SEQ ID NO: 251066 - RNA, 32 nt, Human
ugccaucauugcugucugcagccuugaacucu

SEQ ID NO: 251067 - RNA, 32 nt, Human
ugccaucauuguuuagaagucauagaaagaau

SEQ ID NO: 251068 - RNA, 32 nt, Human
ugccauccacguaagaugugacuugcaccucc

SEQ ID NO: 251069 - RNA, 32 nt, Human
ugccauccacugcagacgccuggagagggaca

SEQ ID NO: 251070 - RNA, 23 nt, Human
ugccauccagguuugagugcagu

SEQ ID NO: 251071 - RNA, 20 nt, Human
ugccauccagugagaacagc

SEQ ID NO: 251072 - RNA, 32 nt, Human
ugccaucccagccucacccugcauuuuauucg

SEQ ID NO: 251073 - RNA, 32 nt, Human
ugccauccccuggguuuugcccaaaccugaac

SEQ ID NO: 251074 - RNA, 32 nt, Human
ugccaucccugcacacagccuggggagaagcc

SEQ ID NO: 251075 - RNA, 32 nt, Human
ugccaucccugcagcccagcugguggugcugc

SEQ ID NO: 251076 - RNA, 32 nt, Human
ugccaucccugccugugccuagaucagagccc

SEQ ID NO: 251077 - RNA, 32 nt, Human
ugccaucccuggcagcccccaccgguguccug

SEQ ID NO: 251078 - RNA, 32 nt, Human
ugccaucccugucuccuccauccuggcugugc

SEQ ID NO: 251079 - RNA, 32 nt, Human
ugccauccgccuggccuucgucauuguguuug

SEQ ID NO: 251080 - RNA, 32 nt, Human
ugccauccuccagcaagaugcuagggucuuug

SEQ ID NO: 251081 - RNA, 32 nt, Human
ugccauccuccugccuccucuucacucagugc

SEQ ID NO: 251082 - RNA, 32 nt, Human
ugccauccucuccuauuuaucucugaggaucg

SEQ ID NO: 251083 - RNA, 32 nt, Human
ugccauccuucccucuuccugccugccagaag

SEQ ID NO: 251084 - RNA, 22 nt, Human
ugccauccuucucaaaagacuu

SEQ ID NO: 251085 - RNA, 32 nt, Human
ugccauccuuggcuggagugucuaaggcucca

SEQ ID NO: 251086 - RNA, 32 nt, Human
ugccaucgcacucuagccuggggaauagagug

SEQ ID NO: 251087 - RNA, 32 nt, Human
ugccaucgugguguguucuugacuccacccuc

SEQ ID NO: 251088 - RNA, 32 nt, Human
ugccaucguuguucuuguuacugguuuuauuu

SEQ ID NO: 251089 - RNA, 32 nt, Human
ugccaucuacagccacacugccaccuaugguu

SEQ ID NO: 251090 - RNA, 21 nt, Human
ugccaucuauccaccugccca

SEQ ID NO: 251091 - RNA, 32 nt, Human
ugccaucucagaccagaggaacagggaggggg

SEQ ID NO: 251092 - RNA, 32 nt, Human
ugccaucucaguugcugcagugcagugaauua

SEQ ID NO: 251093 - RNA, 32 nt, Human
ugccaucuccucaucccugagccaucucccug

SEQ ID NO: 251094 - RNA, 32 nt, Human
ugccaucucugagauacugaugacguuugccu

SEQ ID NO: 251095 - RNA, 32 nt, Human
ugccaucugcucugggaagcaccagggugucc

SEQ ID NO: 251096 - RNA, 32 nt, Human
ugccaucugcuuugaaaacgucucauucauuu

SEQ ID NO: 251097 - RNA, 32 nt, Human
ugccaucugggagucugugugcucagccuccg

SEQ ID NO: 251098 - RNA, 32 nt, Human
ugccaucugggcauacaaauaagaaguuuguc

SEQ ID NO: 251099 - RNA, 32 nt, Human
ugccaucuggggagggacaggcauaagccacu

SEQ ID NO: 251100 - RNA, 32 nt, Human
ugccaucuguagauucaaaaauccagagacua

SEQ ID NO: 251101 - RNA, 32 nt, Human
ugccaucugucagugucugccugcgccaccuc

SEQ ID NO: 251102 - RNA, 32 nt, Human
ugccaucuugcccaggcuggucucaaauuccu

SEQ ID NO: 251103 - RNA, 32 nt, Human
ugccaucuuuagcgcuggcuucauucucagac

SEQ ID NO: 251104 - RNA, 32 nt, Human
ugccaugaccaccacccauaccgcccguggaa

SEQ ID NO: 251105 - RNA, 29 nt, Human
ugccaugacgaccgcguccaccucgcagg

SEQ ID NO: 251106 - RNA, 32 nt, Human
ugccaugauccaggcugaaccaauauacagug

SEQ ID NO: 251107 - RNA, 32 nt, Human
ugccaugauggaaacagauagugaagaguuac

SEQ ID NO: 251108 - RNA, 32 nt, Human
ugccaugcacauagggaagggucaguaagaga

SEQ ID NO: 251109 - RNA, 32 nt, Human
ugccaugccaggugguuuggggaccaagaugu

SEQ ID NO: 251110 - RNA, 32 nt, Human
ugccaugccugcucccugucugugucccagcc

SEQ ID NO: 251111 - RNA, 32 nt, Human
ugccaugcgccgaggcacuuccaggcuucacu

SEQ ID NO: 251112 - RNA, 32 nt, Human
ugccaugcuaucugcucugcucagcgacugaa

SEQ ID NO: 251113 - RNA, 18 nt, Human
ugccaugcucugcugccu

SEQ ID NO: 251114 - RNA, 32 nt, Human
ugccaugcucuguaccaugugaccucacaauc

SEQ ID NO: 251115 - RNA, 29 nt, Human
ugccauggaaccuggcccugcucuggccu

SEQ ID NO: 251116 - RNA, 32 nt, Human
ugccauggaagaggcaggaugagcagcucagc

SEQ ID NO: 251117 - RNA, 32 nt, Human
ugccauggaagcuucccaucagucucccagcu

SEQ ID NO: 251118 - RNA, 32 nt, Human
ugccauggacacuucacccacccuccaggacc

SEQ ID NO: 251119 - RNA, 29 nt, Human
ugccauggagccagcacccccuagccagg

SEQ ID NO: 251120 - RNA, 32 nt, Human
ugccauggagcggcucugauuggaggcuugag

SEQ ID NO: 251121 - RNA, 32 nt, Human
ugccauggaggcacacagcugcagagacagag

SEQ ID NO: 251122 - RNA, 32 nt, Human
ugccauggagggaucuggugccuccagacaug

SEQ ID NO: 251123 - RNA, 32 nt, Human
ugccauggagggaucuggugccuccagacgug

SEQ ID NO: 251124 - RNA, 32 nt, Human
ugccauggagggcugaggagcacuuuggcuug

SEQ ID NO: 251125 - RNA, 32 nt, Human
ugccauggaucucuugggcccaggacuguuga

SEQ ID NO: 251126 - RNA, 31 nt, Human
ugccauggcaaagaaacagcguccagagcag

SEQ ID NO: 251127 - RNA, 32 nt, Human
ugccauggcacuccauccugggugacaaagug

SEQ ID NO: 251128 - RNA, 32 nt, Human
ugccauggcauauaagucaguguagacuggug

SEQ ID NO: 251129 - RNA, 21 nt, Human
ugccauggccgggugcagugg

SEQ ID NO: 251130 - RNA, 32 nt, Human
ugccauggccugaagcagccacagguuggcca

SEQ ID NO: 251131 - RNA, 32 nt, Human
ugccauggcucacaccuguaaucuuaacacug

SEQ ID NO: 251132 - RNA, 32 nt, Human
ugccauggcucacaucuguaaucccagcacuu

SEQ ID NO: 251133 - RNA, 32 nt, Human
ugccauggcucucucuacuucugccauucgag

SEQ ID NO: 251134 - RNA, 32 nt, Human
ugccauggcuuacaccuguaagcccagcacuu

SEQ ID NO: 251135 - RNA, 32 nt, Human
ugccaugggacccugcuccaaucuaacugccu

SEQ ID NO: 251136 - RNA, 32 nt, Human
ugccaugggcaggcccgcaggaagagccggua

SEQ ID NO: 251137 - RNA, 23 nt, Human
ugccaugggccacaggggcauug

SEQ ID NO: 251138 - RNA, 32 nt, Human
ugccaugggcugggugagaugaggggagacag

SEQ ID NO: 251139 - RNA, 32 nt, Human
ugccauggggcagaggaagggaggacccuagu

SEQ ID NO: 251140 - RNA, 32 nt, Human
ugccauggugacauaaaggggcgcggaggaag

SEQ ID NO: 251141 - RNA, 32 nt, Human
ugccaugguggaaaaguacuaucggaauaacu

SEQ ID NO: 251142 - RNA, 32 nt, Human
ugccaugguuggaagaugguaucagagggccu

SEQ ID NO: 251143 - RNA, 32 nt, Human
ugccauguaggaugguaugacaaggcaacacu

SEQ ID NO: 251144 - RNA, 32 nt, Human
ugccaugucaucugcuguggccccaucuggcc

SEQ ID NO: 251145 - RNA, 29 nt, Human
ugccauguccaaaagcuugaaaaagaaaa

SEQ ID NO: 251146 - RNA, 32 nt, Human
ugccauguccagccaggggcagagccauggcu

SEQ ID NO: 251147 - RNA, 32 nt, Human
ugccauguccauccuccacaggcagaacagga

SEQ ID NO: 251148 - RNA, 29 nt, Human
ugccaugucucucuccccaugccgggccc

SEQ ID NO: 251149 - RNA, 23 nt, Human
ugccaugucuuggcugggauuac

SEQ ID NO: 251150 - RNA, 32 nt, Human
ugccaugucuuuccaccacugccugcacauuu

SEQ ID NO: 251151 - RNA, 32 nt, Human
ugccaugugcugggugguagauuuccuccucc

SEQ ID NO: 251152 - RNA, 32 nt, Human
ugccaugugguaggacacaggacacaggaauu

SEQ ID NO: 251153 - RNA, 32 nt, Human
ugccauguuacccaggcuggucucaaacuccu

SEQ ID NO: 251154 - RNA, 32 nt, Human
ugccauguuacccaggcuggucucaacuccug

SEQ ID NO: 251155 - RNA, 32 nt, Human
ugccauguuagacaggcuggucuggaacaccu

SEQ ID NO: 251156 - RNA, 29 nt, Human
ugccauguucucucuuccaucccuccccu

SEQ ID NO: 251157 - RNA, 32 nt, Human
ugccauguugaccaggcuggucucaaacuccu

SEQ ID NO: 251158 - RNA, 21 nt, Human
ugccauguugacuccugggca

SEQ ID NO: 251159 - RNA, 32 nt, Human
ugccauguugcccaggcuggaagugucuaugu

SEQ ID NO: 251160 - RNA, 32 nt, Human
ugccauguugcccaggcuggucucgaauuccu

SEQ ID NO: 251161 - RNA, 32 nt, Human
ugccauguugcccaggcuggucugaagcugcu

SEQ ID NO: 251162 - RNA, 32 nt, Human
ugccauguugcucaggcuggucucaaacuccu

SEQ ID NO: 251163 - RNA, 32 nt, Human
ugccauguuggccaggcuggucucaaacuccu

SEQ ID NO: 251164 - RNA, 32 nt, Human
ugccauguuggccaggcuggucucgaacuccu

SEQ ID NO: 251165 - RNA, 32 nt, Human
ugccauguuggccaggcuggucucgaacucuu

SEQ ID NO: 251166 - RNA, 32 nt, Human
ugccauguuggccaggcuggucucgaagccug

SEQ ID NO: 251167 - RNA, 32 nt, Human
ugccauguuggccaggcuggucucgaauuccu

SEQ ID NO: 251168 - RNA, 32 nt, Human
ugccauguuggccaggcugguuucaaacuccu

SEQ ID NO: 251169 - RNA, 32 nt, Human
ugccauguuggccaggcugguuucgaacuccu

SEQ ID NO: 251170 - RNA, 32 nt, Human
ugccauguugggcuccucacacaugaucgugu

SEQ ID NO: 251171 - RNA, 32 nt, Human
ugccauguuguccaggcuggugucgaaauccu

SEQ ID NO: 251172 - RNA, 32 nt, Human
ugccauguuuauaguaccaauuuugggggcca

SEQ ID NO: 251173 - RNA, 32 nt, Human
ugccauuaaacuuguacagaaaauguuuuuau

SEQ ID NO: 251174 - RNA, 32 nt, Human
ugccauuaacaugcagguucacuccugugcca

SEQ ID NO: 251175 - RNA, 32 nt, Human
ugccauuacacuccagccugggcgacagaacg

SEQ ID NO: 251176 - RNA, 32 nt, Human
ugccauuacacuccagccugggugacagagug

SEQ ID NO: 251177 - RNA, 32 nt, Human
ugccauuacucacuccaaccagccagcuccug

SEQ ID NO: 251178 - RNA, 32 nt, Human
ugccauuaucucugugagggaggccagguagc

SEQ ID NO: 251179 - RNA, 32 nt, Human
ugccauucaaugauuaaugcaugauagggccu

SEQ ID NO: 251180 - RNA, 32 nt, Human
ugccauucagagcucauccccaagagcccagu

SEQ ID NO: 251181 - RNA, 17 nt, Human
ugccauucaucucucca

SEQ ID NO: 251182 - RNA, 32 nt, Human
ugccauuccacuccagccugagcaacacagug

SEQ ID NO: 251183 - RNA, 32 nt, Human
ugccauuccacuccagccugggcaacgagagg

SEQ ID NO: 251184 - RNA, 32 nt, Human
ugccauuccacugucuccuagcuuaaauugcu

SEQ ID NO: 251185 - RNA, 23 nt, Human
ugccauuccuccccuccaagagg

SEQ ID NO: 251186 - RNA, 32 nt, Human
ugccauuccugcugcccugccgcugccucccu

SEQ ID NO: 251187 - RNA, 32 nt, Human
ugccauucggcagugcauuccagccugcagaa

SEQ ID NO: 251188 - RNA, 32 nt, Human
ugccauucuccucucuguucagguaaauguca

SEQ ID NO: 251189 - RNA, 32 nt, Human
ugccauucugaccucuucucagagcaccuaau

SEQ ID NO: 251190 - RNA, 20 nt, Human
ugccauucuguuuuuauaag

SEQ ID NO: 251191 - RNA, 32 nt, Human
ugccauucuuccuauauccuggaauauaucuu

SEQ ID NO: 251192 - RNA, 31 nt, Human
ugccauucuuccucugggccuucaugcuuuu

SEQ ID NO: 251193 - RNA, 32 nt, Human
ugccauucuuguagccucucuugacccaucaa

SEQ ID NO: 251194 - RNA, 32 nt, Human
ugccauugagaaggggaaauuuuucaauaugu

SEQ ID NO: 251195 - RNA, 32 nt, Human
ugccauugcacagcagccugggugacagagcg

SEQ ID NO: 251196 - RNA, 32 nt, Human
ugccauugcacuacagccugggcaacaagagc

SEQ ID NO: 251197 - RNA, 32 nt, Human
ugccauugcacuacagccuggucaacagagca

SEQ ID NO: 251198 - RNA, 32 nt, Human
ugccauugcacuccaaccugggcaacaagagu

SEQ ID NO: 251199 - RNA, 32 nt, Human
ugccauugcacuccaaccugggugacagagug

SEQ ID NO: 251200 - RNA, 32 nt, Human
ugccauugcacuccaagccugggcaacagagu

SEQ ID NO: 251201 - RNA, 32 nt, Human
ugccauugcacuccagcccagguaacagagug

SEQ ID NO: 251202 - RNA, 32 nt, Human
ugccauugcacuccagcccggaugacagagca

SEQ ID NO: 251203 - RNA, 32 nt, Human
ugccauugcacuccagccuaggcaauaagagc

SEQ ID NO: 251204 - RNA, 32 nt, Human
ugccauugcacuccagccugagugacaagaga

SEQ ID NO: 251205 - RNA, 32 nt, Human
ugccauugcacuccagccuggacaacagagca

SEQ ID NO: 251206 - RNA, 32 nt, Human
ugccauugcacuccagccuggaugacaagagu

SEQ ID NO: 251207 - RNA, 32 nt, Human
ugccauugcacuccagccuggcgacagaguga

SEQ ID NO: 251208 - RNA, 32 nt, Human
ugccauugcacuccagccugggcaacaagaac

SEQ ID NO: 251209 - RNA, 32 nt, Human
ugccauugcacuccagccugggcaacaagaga

SEQ ID NO: 251210 - RNA, 32 nt, Human
ugccauugcacuccagccugggcaacaagagc

SEQ ID NO: 251211 - RNA, 32 nt, Human
ugccauugcacuccagccugggcaacaagagg

SEQ ID NO: 251212 - RNA, 32 nt, Human
ugccauugcacuccagccugggcaacaagagu

SEQ ID NO: 251213 - RNA, 32 nt, Human
ugccauugcacuccagccugggcaacagagug

SEQ ID NO: 251214 - RNA, 32 nt, Human
ugccauugcacuccagccugggcaacagggca

SEQ ID NO: 251215 - RNA, 32 nt, Human
ugccauugcacuccagccugggcaacgagcga

SEQ ID NO: 251216 - RNA, 32 nt, Human
ugccauugcacuccagccugggcaauagagug

SEQ ID NO: 251217 - RNA, 32 nt, Human
ugccauugcacuccagccugggcgacaagagc

SEQ ID NO: 251218 - RNA, 32 nt, Human
ugccauugcacuccagccugggcgacaagagu

SEQ ID NO: 251219 - RNA, 32 nt, Human
ugccauugcacuccagccugggcgacaagcga

SEQ ID NO: 251220 - RNA, 32 nt, Human
ugccauugcacuccagccugggcgacagagca

SEQ ID NO: 251221 - RNA, 32 nt, Human
ugccauugcacuccagccugggcgacagagcg

SEQ ID NO: 251222 - RNA, 32 nt, Human
ugccauugcacuccagccugggcgacagagga

SEQ ID NO: 251223 - RNA, 32 nt, Human
ugccauugcacuccagccugggcgacagagug

SEQ ID NO: 251224 - RNA, 32 nt, Human
ugccauugcacuccagccugggcgacagugca

SEQ ID NO: 251225 - RNA, 32 nt, Human
ugccauugcacuccagccugggugacaaagca

SEQ ID NO: 251226 - RNA, 32 nt, Human
ugccauugcacuccagccugggugacaagagc

SEQ ID NO: 251227 - RNA, 32 nt, Human
ugccauugcacuccagccugggugacaaggga

SEQ ID NO: 251228 - RNA, 32 nt, Human
ugccauugcacuccagccugggugacagagca

SEQ ID NO: 251229 - RNA, 32 nt, Human
ugccauugcacuccagccugggugacagagcg

SEQ ID NO: 251230 - RNA, 32 nt, Human
ugccauugcacuccagccugggugacagagua

SEQ ID NO: 251231 - RNA, 32 nt, Human
ugccauugcacuccagccugggugacagugag

SEQ ID NO: 251232 - RNA, 32 nt, Human
ugccauugcacuccagccugggugauaagagc

SEQ ID NO: 251233 - RNA, 32 nt, Human
ugccauugcacuccagcuugggugacagagug

SEQ ID NO: 251234 - RNA, 32 nt, Human
ugccauugcacuccagucggguuaacagagca

SEQ ID NO: 251235 - RNA, 32 nt, Human
ugccauugcacuccagucugggcgacaggagc

SEQ ID NO: 251236 - RNA, 32 nt, Human
ugccauugcacuccggccugggcaacaacagc

SEQ ID NO: 251237 - RNA, 32 nt, Human
ugccauugcacuccggccugggcaacagagga

SEQ ID NO: 251238 - RNA, 32 nt, Human
ugccauugcacucuagccugggcaacaggagc

SEQ ID NO: 251239 - RNA, 32 nt, Human
ugccauugcacugcaccugggcaacaagagug

SEQ ID NO: 251240 - RNA, 32 nt, Human
ugccauugcacugcagccuggaugacagagcg

SEQ ID NO: 251241 - RNA, 32 nt, Human
ugccauugcauuccagccuaggcaacacgagc

SEQ ID NO: 251242 - RNA, 21 nt, Human
ugccauugcccccuccaccca

SEQ ID NO: 251243 - RNA, 32 nt, Human
ugccauugcccuccagccugggcaagaacugg

SEQ ID NO: 251244 - RNA, 32 nt, Human
ugccauugcgcuccagccuaggugacagagca

SEQ ID NO: 251245 - RNA, 32 nt, Human
ugccauugcgcuccagccugggcaacaagagc

SEQ ID NO: 251246 - RNA, 32 nt, Human
ugccauugcucuccagccugggcgacaagagc

SEQ ID NO: 251247 - RNA, 32 nt, Human
ugccauuggaacuuggauuacugugaacauug

SEQ ID NO: 251248 - RNA, 32 nt, Human
ugccauuggacuccagccugggcaaaaagggc

SEQ ID NO: 251249 - RNA, 32 nt, Human
ugccauuggccaggaccacauggagcaggggg

SEQ ID NO: 251250 - RNA, 32 nt, Human
ugccauugggcagaggaguauaggacuggggu

SEQ ID NO: 251251 - RNA, 32 nt, Human
ugccauuguacuccagccugggcaacaagagc

SEQ ID NO: 251252 - RNA, 32 nt, Human
ugccauuguacuccagccugggcgacaaaagu

SEQ ID NO: 251253 - RNA, 32 nt, Human
ugccauuguacuccagcuugggcaacagagua

SEQ ID NO: 251254 - RNA, 32 nt, Human
ugccauuguagugcaaaagcagccauagacaa

SEQ ID NO: 251255 - RNA, 32 nt, Human
ugccauuguauaaggacaugaugucaagaagu

SEQ ID NO: 251256 - RNA, 32 nt, Human
ugccauuguauuccagccucggcaacacagca

SEQ ID NO: 251257 - RNA, 32 nt, Human
ugccauugugcuccagccugggcaacaagagu

SEQ ID NO: 251258 - RNA, 32 nt, Human
ugccauugugcuccagccugggcaacagagug

SEQ ID NO: 251259 - RNA, 32 nt, Human
ugccauuguuauuguccagcaguugccgaaua

SEQ ID NO: 251260 - RNA, 32 nt, Human
ugccauuuagagcucucagagcagggcagauu

SEQ ID NO: 251261 - RNA, 32 nt, Human
ugccauuuaguuauuauaccagcauagagaau

SEQ ID NO: 251262 - RNA, 32 nt, Human
ugccauuuauuuccucagcuguacaaauccuc

SEQ ID NO: 251263 - RNA, 32 nt, Human
ugccauuucacuccagccuggacaacaagagc

SEQ ID NO: 251264 - RNA, 21 nt, Human
ugccauuucaguggcuuccca

SEQ ID NO: 251265 - RNA, 32 nt, Human
ugccauuuccacccuccagucauuucucuaug

SEQ ID NO: 251266 - RNA, 32 nt, Human
ugccauuuccaucaaggacacuggaacaagag

SEQ ID NO: 251267 - RNA, 32 nt, Human
ugccauuucugcaucucccagaagggaugagu

SEQ ID NO: 251268 - RNA, 32 nt, Human
ugccauuucuugcacucagaccuguguaauau

SEQ ID NO: 251269 - RNA, 32 nt, Human
ugccauuugaugauuccaccacuccuuuucca

SEQ ID NO: 251270 - RNA, 32 nt, Human
ugccauuugcacccuccgccuucacuccggug

SEQ ID NO: 251271 - RNA, 32 nt, Human
ugccauuugcugcugccgccaggaccagagca

SEQ ID NO: 251272 - RNA, 32 nt, Human
ugccauuuggcugaagugugguguggcucugu

SEQ ID NO: 251273 - RNA, 32 nt, Human
ugccauuuuacaugauagcuucaaugcagaaa

SEQ ID NO: 251274 - RNA, 32 nt, Human
ugccauuuuccccaugacuuugguuuuguuua

SEQ ID NO: 251275 - RNA, 32 nt, Human
ugccauuuugggguggagaagguagaugugau

SEQ ID NO: 251276 - RNA, 32 nt, Human
ugccauuuugggguggagaagguggaugugau

SEQ ID NO: 251277 - RNA, 32 nt, Human
ugccauuuuguggaaacuggaguagauuaaau

SEQ ID NO: 251278 - RNA, 32 nt, Human
ugccauuuuguugcaguugacucacgauuaua

SEQ ID NO: 251279 - RNA, 32 nt, Human
ugccauuuuuacugaugcugggauuauaggug

SEQ ID NO: 251280 - RNA, 32 nt, Human
ugcccaaaagagaguguuuggucuugaacuuu

SEQ ID NO: 251281 - RNA, 32 nt, Human
ugcccaaaccucuacuguuugggacaguaagc

SEQ ID NO: 251282 - RNA, 32 nt, Human
ugcccaaagcaacaccagaaccaagaaggagc

SEQ ID NO: 251283 - RNA, 32 nt, Human
ugcccaaagucccccagcacugaagagcuggg

SEQ ID NO: 251284 - RNA, 32 nt, Human
ugcccaaagugcugggauuacaggcaagagcc

SEQ ID NO: 251285 - RNA, 32 nt, Human
ugcccaaaguucagaaagaugaaguuuccaga

SEQ ID NO: 251286 - RNA, 32 nt, Human
ugcccaaauggugaaaccccaucucuacuaaa

SEQ ID NO: 251287 - RNA, 32 nt, Human
ugcccaacauagugaaacuccgucucuaccaa

SEQ ID NO: 251288 - RNA, 32 nt, Human
ugcccaacaugcuggggguccagaagccaccu

SEQ ID NO: 251289 - RNA, 32 nt, Human
ugcccaacauggcaaaaccucgucucuacuaa

SEQ ID NO: 251290 - RNA, 32 nt, Human
ugcccaacccagauccagagacauugaaggaa

SEQ ID NO: 251291 - RNA, 32 nt, Human
ugcccaaccccagauagucaggugugcugggg

SEQ ID NO: 251292 - RNA, 23 nt, Human
ugcccaacccucucugggacaga

SEQ ID NO: 251293 - RNA, 21 nt, Human
ugcccaaccuggagugcaaug

SEQ ID NO: 251294 - RNA, 21 nt, Human
ugcccaaccuggagugcagug

SEQ ID NO: 251295 - RNA, 25 nt, Human
ugcccaacgguccugccuucugcca

SEQ ID NO: 251296 - RNA, 18 nt, Human
ugcccaacuccgccuugc

SEQ ID NO: 251297 - RNA, 32 nt, Human
ugcccaacucuugcacagcacaaguaccuaau

SEQ ID NO: 251298 - RNA, 32 nt, Human
ugcccaacuuacugucuucuucaugucaucaa

SEQ ID NO: 251299 - RNA, 19 nt, Human
ugcccaagaaggcucagca

SEQ ID NO: 251300 - RNA, 32 nt, Human
ugcccaagacuggccuggggugcccggcaccc

SEQ ID NO: 251301 - RNA, 32 nt, Human
ugcccaagcagagcuggagagagauggccuaa

SEQ ID NO: 251302 - RNA, 32 nt, Human
ugcccaagccaacccugugacugacauguacg

SEQ ID NO: 251303 - RNA, 30 nt, Human
ugcccaagccucuccugaugcauuuguaaa

SEQ ID NO: 251304 - RNA, 32 nt, Human
ugcccaagcggaggaggagaaaaaggaauaag

SEQ ID NO: 251305 - RNA, 21 nt, Human
ugcccaagcuggaguggcagu

SEQ ID NO: 251306 - RNA, 22 nt, Human
ugcccaagcuggaguggcagug

SEQ ID NO: 251307 - RNA, 32 nt, Human
ugcccaagcuugcagggaacaauaccugggca

SEQ ID NO: 251308 - RNA, 32 nt, Human
ugcccaaggacacuccugcagagccauuuuug

SEQ ID NO: 251309 - RNA, 23 nt, Human
ugcccaaggccuggccugccugc

SEQ ID NO: 251310 - RNA, 32 nt, Human
ugcccaagggcagccuggaggaggggaaggcc

SEQ ID NO: 251311 - RNA, 32 nt, Human
ugcccaaggggcaggguggaaguggcugcagg

SEQ ID NO: 251312 - RNA, 32 nt, Human
ugcccaaggucucucugcaccccaccauccac

SEQ ID NO: 251313 - RNA, 32 nt, Human
ugcccaagugcaccccucuggacuugccagcg

SEQ ID NO: 251314 - RNA, 32 nt, Human
ugcccaauacuuuucugcugugagaauguaag

SEQ ID NO: 251315 - RNA, 19 nt, Human
ugcccaauuucugcuucca

SEQ ID NO: 251316 - RNA, 28 nt, Human
ugcccacaagaucuagccucaucuggag

SEQ ID NO: 251317 - RNA, 32 nt, Human
ugcccacaagccccagcauccccguaggcauc

SEQ ID NO: 251318 - RNA, 32 nt, Human
ugcccacacaauacuuuccagcuacuuuaccc

SEQ ID NO: 251319 - RNA, 32 nt, Human
ugcccacacaugcacuacauaacacacuauau

SEQ ID NO: 251320 - RNA, 32 nt, Human
ugcccacaccacugcagcuggcaugcuuggcu

SEQ ID NO: 251321 - RNA, 32 nt, Human
ugcccacacuacaggccagggcugcggggcug

SEQ ID NO: 251322 - RNA, 21 nt, Human
ugcccacacuagagugcaaug

SEQ ID NO: 251323 - RNA, 32 nt, Human
ugcccacacugggguaugccugggugaugggc

SEQ ID NO: 251324 - RNA, 32 nt, Human
ugcccacagacaggaacagaagagcacagugg

SEQ ID NO: 251325 - RNA, 31 nt, Human
ugcccacagcaccagcaccugagcucaccuc

SEQ ID NO: 251326 - RNA, 32 nt, Human
ugcccacagcaggggcuggcccacguaggggg

SEQ ID NO: 251327 - RNA, 32 nt, Human
ugcccacaggaucagucugauucccaagcucu

SEQ ID NO: 251328 - RNA, 32 nt, Human
ugcccacaggcuuugcuucucucccaaugcaa

SEQ ID NO: 251329 - RNA, 32 nt, Human
ugcccacagggcuguguggauggaggaagcug

SEQ ID NO: 251330 - RNA, 32 nt, Human
ugcccacaucugcugguuuggggcuucagugg

SEQ ID NO: 251331 - RNA, 32 nt, Human
ugcccacaugccacuggaagggaagugggugu

SEQ ID NO: 251332 - RNA, 31 nt, Human
ugcccacauguguccaucccagcggcuggug

SEQ ID NO: 251333 - RNA, 21 nt, Human
ugcccacauuggagugcagug

SEQ ID NO: 251334 - RNA, 24 nt, Human
ugcccaccaacccagccacugcca

SEQ ID NO: 251335 - RNA, 32 nt, Human
ugcccaccaagcucuugauuuucucauuucuu

SEQ ID NO: 251336 - RNA, 21 nt, Human
ugcccaccacacauacccucu

SEQ ID NO: 251337 - RNA, 21 nt, Human
ugcccaccaccacccacugcc

SEQ ID NO: 251338 - RNA, 18 nt, Human
ugcccaccaccaccccug

SEQ ID NO: 251339 - RNA, 32 nt, Human
ugcccaccagcccucacuaucuacugcuugac

SEQ ID NO: 251340 - RNA, 23 nt, Human
ugcccaccagggugaucccccug

SEQ ID NO: 251341 - RNA, 32 nt, Human
ugcccacccaggccguggggccaggggccugc

SEQ ID NO: 251342 - RNA, 32 nt, Human
ugcccaccccacccacuguggucuguuguacc

SEQ ID NO: 251343 - RNA, 32 nt, Human
ugcccacccuccacucuccucuuccagggccc

SEQ ID NO: 251344 - RNA, 23 nt, Human
ugcccacccuccccacgcugcag

SEQ ID NO: 251345 - RNA, 32 nt, Human
ugcccacccuccugccuggaucccaaggccaa

SEQ ID NO: 251346 - RNA, 32 nt, Human
ugcccacccugacugaaaguagggggcuuucu

SEQ ID NO: 251347 - RNA, 32 nt, Human
ugcccacccuggacaacaaccagcacagugca

SEQ ID NO: 251348 - RNA, 32 nt, Human
ugcccacccuuguuucucauaagcgaugucug

SEQ ID NO: 251349 - RNA, 32 nt, Human
ugcccaccgaagcccccucuggcugcacugug

SEQ ID NO: 251350 - RNA, 32 nt, Human
ugcccaccgaccacagcugacugaaccacaga

SEQ ID NO: 251351 - RNA, 32 nt, Human
ugcccaccgaccugagccugaguaaguggcug

SEQ ID NO: 251352 - RNA, 32 nt, Human
ugcccaccgcugcuucagcugccuccucgccc

SEQ ID NO: 251353 - RNA, 19 nt, Human
ugcccaccuccagaagaga

SEQ ID NO: 251354 - RNA, 32 nt, Human
ugcccaccucggccuccugaagugcugggauu

SEQ ID NO: 251355 - RNA, 32 nt, Human
ugcccaccucucucucugguccuguucaucuc

SEQ ID NO: 251356 - RNA, 32 nt, Human
ugcccaccugaggugacaccuguccauuuuag

SEQ ID NO: 251357 - RNA, 32 nt, Human
ugcccaccugccaggcugcagggacaguuggg

SEQ ID NO: 251358 - RNA, 32 nt, Human
ugcccaccugccccugcccagaauuccuagcu

SEQ ID NO: 251359 - RNA, 32 nt, Human
ugcccaccugccuucccacacacucacuaucc

SEQ ID NO: 251360 - RNA, 20 nt, Human
ugcccaccugugccauggag

SEQ ID NO: 251361 - RNA, 32 nt, Human
ugcccaccugugugcugaccccagggccugag

SEQ ID NO: 251362 - RNA, 32 nt, Human
ugcccaccuuccacacugagguagccgagccu

SEQ ID NO: 251363 - RNA, 32 nt, Human
ugcccaccuucucucccuccucccgacccgcc

SEQ ID NO: 251364 - RNA, 32 nt, Human
ugcccaccuuggggcucuguuguuugaguugc

SEQ ID NO: 251365 - RNA, 21 nt, Human
ugcccacgcaggagugcagug

SEQ ID NO: 251366 - RNA, 23 nt, Human
ugcccacgcagugagugcucaug

SEQ ID NO: 251367 - RNA, 21 nt, Human
ugcccacgcuggagugcaaug

SEQ ID NO: 251368 - RNA, 21 nt, Human
ugcccacgcuggagugcagug

SEQ ID NO: 251369 - RNA, 32 nt, Human
ugcccacgggguccaccuucugcuccagccag

SEQ ID NO: 251370 - RNA, 32 nt, Human
ugcccacgugguauugcugggcuccuggcuag

SEQ ID NO: 251371 - RNA, 32 nt, Human
ugcccacuacaaccuccaccuccuggguuuga

SEQ ID NO: 251372 - RNA, 32 nt, Human
ugcccacuagaugacucugcuuuucccugcau

SEQ ID NO: 251373 - RNA, 32 nt, Human
ugcccacuagcccacaaccacauagcaagguc

SEQ ID NO: 251374 - RNA, 32 nt, Human
ugcccacucaggaugcaggcucuccccagggg

SEQ ID NO: 251375 - RNA, 21 nt, Human
ugcccacucccacuccagaug

SEQ ID NO: 251376 - RNA, 32 nt, Human
ugcccacucccgccagccccugccucgaggac

SEQ ID NO: 251377 - RNA, 32 nt, Human
ugcccacuccugggcagcuucuuagcugggug

SEQ ID NO: 251378 - RNA, 20 nt, Human
ugcccacucuccaucagaug

SEQ ID NO: 251379 - RNA, 32 nt, Human
ugcccacucuucugcuggucucauggaaggca

SEQ ID NO: 251380 - RNA, 21 nt, Human
ugcccacugaacaugcucaug

SEQ ID NO: 251381 - RNA, 25 nt, Human
ugcccacugacccacccacccaccu

SEQ ID NO: 251382 - RNA, 27 nt, Human
ugcccacugagccaagagcagcaggga

SEQ ID NO: 251383 - RNA, 32 nt, Human
ugcccacugaugaggacucccuggagagggac

SEQ ID NO: 251384 - RNA, 32 nt, Human
ugcccacugcacuccagccugggcaacagagc

SEQ ID NO: 251385 - RNA, 32 nt, Human
ugcccacugcacugccccagcccagccccagc

SEQ ID NO: 251386 - RNA, 32 nt, Human
ugcccacugcagcccuccagccucuggucccc

SEQ ID NO: 251387 - RNA, 32 nt, Human
ugcccacugcagcucucugcagucuccggcuc

SEQ ID NO: 251388 - RNA, 32 nt, Human
ugcccacugccagcucugcuccccaggcuauu

SEQ ID NO: 251389 - RNA, 32 nt, Human
ugcccacugccuccucuucagacucuuugcau

SEQ ID NO: 251390 - RNA, 32 nt, Human
ugcccacugcggcaaaccccuacuucugguuu

SEQ ID NO: 251391 - RNA, 32 nt, Human
ugcccacugcucaauacagccuccgauccuca

SEQ ID NO: 251392 - RNA, 32 nt, Human
ugcccacuggacuguccuguuugccuccagga

SEQ ID NO: 251393 - RNA, 18 nt, Human
ugcccacuguuaucuuca

SEQ ID NO: 251394 - RNA, 32 nt, Human
ugcccacuucccucccccugccgaggcugugg

SEQ ID NO: 251395 - RNA, 32 nt, Human
ugcccacuucggccuuccaaaguggccgcaaa

SEQ ID NO: 251396 - RNA, 32 nt, Human
ugcccagaaaaaucuguccuuuuugguaccaa

SEQ ID NO: 251397 - RNA, 20 nt, Human
ugcccagaaaaaugcuggag

SEQ ID NO: 251398 - RNA, 23 nt, Human
ugcccagaaaaugggacuggagu

SEQ ID NO: 251399 - RNA, 32 nt, Human
ugcccagaaaccucaacuguuccccagcuacu

SEQ ID NO: 251400 - RNA, 25 nt, Human
ugcccagaagaacuuugccuuaagu

SEQ ID NO: 251401 - RNA, 19 nt, Human
ugcccagaagacaacugga

SEQ ID NO: 251402 - RNA, 20 nt, Human
ugcccagaagagaggccggg

SEQ ID NO: 251403 - RNA, 32 nt, Human
ugcccagaagcagaaaugaguaaaguuuguuu

SEQ ID NO: 251404 - RNA, 32 nt, Human
ugcccagaagucagcccagaccuuccugucug

SEQ ID NO: 251405 - RNA, 32 nt, Human
ugcccagaccaacagagagagcugucccugag

SEQ ID NO: 251406 - RNA, 32 nt, Human
ugcccagaccuccccugcccaccugcuggagc

SEQ ID NO: 251407 - RNA, 24 nt, Human
ugcccagacuggagugcaauggca

SEQ ID NO: 251408 - RNA, 24 nt, Human
ugcccagacuggagugcaguggca

SEQ ID NO: 251409 - RNA, 32 nt, Human
ugcccagacuggucucaaacuccuggguucaa

SEQ ID NO: 251410 - RNA, 32 nt, Human
ugcccagacuggucucgaacuccugggcucaa

SEQ ID NO: 251411 - RNA, 32 nt, Human
ugcccagagacagggaaaagaaugccuggggg

SEQ ID NO: 251412 - RNA, 32 nt, Human
ugcccagagagcugcccuaacagaacacuuca

SEQ ID NO: 251413 - RNA, 32 nt, Human
ugcccagagccagagggauggugguagucacg

SEQ ID NO: 251414 - RNA, 32 nt, Human
ugcccagagcuccuaacugggguggggugcaa

SEQ ID NO: 251415 - RNA, 32 nt, Human
ugcccagaggaagcuuggaggcugcuaccucu

SEQ ID NO: 251416 - RNA, 32 nt, Human
ugcccagaggaguguguguggagcagcuggag

SEQ ID NO: 251417 - RNA, 20 nt, Human
ugcccagaggcccagcugcu

SEQ ID NO: 251418 - RNA, 21 nt, Human
ugcccagaggggcugcagcca

SEQ ID NO: 251419 - RNA, 32 nt, Human
ugcccagaguccagagagcagccucagcugag

SEQ ID NO: 251420 - RNA, 25 nt, Human
ugcccagauaaaguagcacaguggc

SEQ ID NO: 251421 - RNA, 32 nt, Human
ugcccagauguggcgauuucaugaaaaauauc

SEQ ID NO: 251422 - RNA, 32 nt, Human
ugcccagauugaauccagcaagaaaugacauu

SEQ ID NO: 251423 - RNA, 20 nt, Human
ugcccagcaaccugugcagc

SEQ ID NO: 251424 - RNA, 32 nt, Human
ugcccagcaaucacccuccucacuuccuuguc

SEQ ID NO: 251425 - RNA, 32 nt, Human
ugcccagcacagagccggagagcgucgggccu

SEQ ID NO: 251426 - RNA, 19 nt, Human
ugcccagcacagucugccc

SEQ ID NO: 251427 - RNA, 19 nt, Human
ugcccagcacaugugcugc

SEQ ID NO: 251428 - RNA, 32 nt, Human
ugcccagcaccuccucaggccagccuggugcc

SEQ ID NO: 251429 - RNA, 17 nt, Human
ugcccagcaccugugcu

SEQ ID NO: 251430 - RNA, 22 nt, Human
ugcccagcacggccugcacugu

SEQ ID NO: 251431 - RNA, 32 nt, Human
ugcccagcacuugaggcaguucuugaaagcuu

SEQ ID NO: 251432 - RNA, 32 nt, Human
ugcccagcagccgccccgucugagaagugagg

SEQ ID NO: 251433 - RNA, 21 nt, Human
ugcccagcaggcaguguaaug

SEQ ID NO: 251434 - RNA, 24 nt, Human
ugcccagcaggcuagagugcgaug

SEQ ID NO: 251435 - RNA, 32 nt, Human
ugcccagccaaaacaaacacagagcugcccag

SEQ ID NO: 251436 - RNA, 32 nt, Human
ugcccagccaccaggauuucugccuggagccc

SEQ ID NO: 251437 - RNA, 32 nt, Human
ugcccagccagccaggaagucuggcuuucaga

SEQ ID NO: 251438 - RNA, 32 nt, Human
ugcccagccagccugaacaucugcagugucgu

SEQ ID NO: 251439 - RNA, 32 nt, Human
ugcccagccagcugccuccuguccugggagga

SEQ ID NO: 251440 - RNA, 32 nt, Human
ugcccagccauccucccauccugcacuuuagc

SEQ ID NO: 251441 - RNA, 23 nt, Human
ugcccagccaugaaucgcuuggc

SEQ ID NO: 251442 - RNA, 25 nt, Human
ugcccagcccagauucuucuuugga

SEQ ID NO: 251443 - RNA, 24 nt, Human
ugcccagcccagcagcuucuguug

SEQ ID NO: 251444 - RNA, 18 nt, Human
ugcccagcccagcccugc

SEQ ID NO: 251445 - RNA, 32 nt, Human
ugcccagcccaggagagagugucucacuccca

SEQ ID NO: 251446 - RNA, 21 nt, Human
ugcccagcccaggcucuggga

SEQ ID NO: 251447 - RNA, 24 nt, Human
ugcccagcccaguccaggcugcug

SEQ ID NO: 251448 - RNA, 22 nt, Human
ugcccagcccauuugggcucug

SEQ ID NO: 251449 - RNA, 32 nt, Human
ugcccagccccagcuccuuaagaacgggcuuc

SEQ ID NO: 251450 - RNA, 32 nt, Human
ugcccagccccagcugcauggacucugagcug

SEQ ID NO: 251451 - RNA, 24 nt, Human
ugcccagcccucagauggcucucc

SEQ ID NO: 251452 - RNA, 24 nt, Human
ugcccagcccuuccuugucugcug

SEQ ID NO: 251453 - RNA, 21 nt, Human
ugcccagccgggcacaguggc

SEQ ID NO: 251454 - RNA, 24 nt, Human
ugcccagccggugcccggccacug

SEQ ID NO: 251455 - RNA, 24 nt, Human
ugcccagccuagcgauggccucug

SEQ ID NO: 251456 - RNA, 32 nt, Human
ugcccagccucagcaggcugucccagaagcgc

SEQ ID NO: 251457 - RNA, 32 nt, Human
ugcccagccuccaacuccagcugaguccuggg

SEQ ID NO: 251458 - RNA, 19 nt, Human
ugcccagccucccaccugu

SEQ ID NO: 251459 - RNA, 32 nt, Human
ugcccagccucgcaugccagagccuggggcau

SEQ ID NO: 251460 - RNA, 19 nt, Human
ugcccagccucgcugccgc

SEQ ID NO: 251461 - RNA, 32 nt, Human
ugcccagccucuccaccgucacuguccgcugc

SEQ ID NO: 251462 - RNA, 17 nt, Human
ugcccagccucugcugc

SEQ ID NO: 251463 - RNA, 24 nt, Human
ugcccagccugagcagggcagcug

SEQ ID NO: 251464 - RNA, 22 nt, Human
ugcccagccugagugcuggcug

SEQ ID NO: 251465 - RNA, 21 nt, Human
ugcccagccugauucucugcu

SEQ ID NO: 251466 - RNA, 32 nt, Human
ugcccagccugauucucugcucccaggagcca

SEQ ID NO: 251467 - RNA, 32 nt, Human
ugcccagccugccacaccgccuccaggaagca

SEQ ID NO: 251468 - RNA, 32 nt, Human
ugcccagccugccaccaccgggccaugcggau

SEQ ID NO: 251469 - RNA, 26 nt, Human
ugcccagccuggcucugucuacacug

SEQ ID NO: 251470 - RNA, 32 nt, Human
ugcccagcgaaugagggguagagccacucugg

SEQ ID NO: 251471 - RNA, 32 nt, Human
ugcccagcgaugcuuucgucuccuccauaaac

SEQ ID NO: 251472 - RNA, 20 nt, Human
ugcccagcgcuggagugcag

SEQ ID NO: 251473 - RNA, 32 nt, Human
ugcccagcgcuggagugcagcgugccacgagg

SEQ ID NO: 251474 - RNA, 18 nt, Human
ugcccagcggacaguggc

SEQ ID NO: 251475 - RNA, 22 nt, Human
ugcccagcguuuaccacugcug

SEQ ID NO: 251476 - RNA, 32 nt, Human
ugcccagcuagugcuguccucccaucuccugu

SEQ ID NO: 251477 - RNA, 22 nt, Human
ugcccagcucagcuagcucugc

SEQ ID NO: 251478 - RNA, 32 nt, Human
ugcccagcuccaaacugucccagggggaacug

SEQ ID NO: 251479 - RNA, 32 nt, Human
ugcccagcucccaggcagcuuauggucuugug

SEQ ID NO: 251480 - RNA, 23 nt, Human
ugcccagcuccugcccgcacucc

SEQ ID NO: 251481 - RNA, 32 nt, Human
ugcccagcugagugcuggcucugaggaagccc

SEQ ID NO: 251482 - RNA, 32 nt, Human
ugcccagcugcagaaccacauucuugucccau

SEQ ID NO: 251483 - RNA, 32 nt, Human
ugcccagcugcccaggcugaggcaagagaagg

SEQ ID NO: 251484 - RNA, 20 nt, Human
ugcccagcuggagugcagug

SEQ ID NO: 251485 - RNA, 23 nt, Human
ugcccagcuuauuuuguguuuuu

SEQ ID NO: 251486 - RNA, 22 nt, Human
ugcccagcuuccaugcugacug

SEQ ID NO: 251487 - RNA, 21 nt, Human
ugcccagcuuggaguugucug

SEQ ID NO: 251488 - RNA, 20 nt, Human
ugcccagcuuuauugcugcu

SEQ ID NO: 251489 - RNA, 20 nt, Human
ugcccagcuuuucugcugcu

SEQ ID NO: 251490 - RNA, 32 nt, Human
ugcccaggaaggagccugggaaagccagggca

SEQ ID NO: 251491 - RNA, 32 nt, Human
ugcccaggacaguaggagaauuggagccgccu

SEQ ID NO: 251492 - RNA, 32 nt, Human
ugcccaggaccggggcagucacccagcagaua

SEQ ID NO: 251493 - RNA, 32 nt, Human
ugcccaggacgggagcuggggagccagggcug

SEQ ID NO: 251494 - RNA, 32 nt, Human
ugcccaggaggaguaggagcaggagcagaagc

SEQ ID NO: 251495 - RNA, 17 nt, Human
ugcccaggaggcagugg

SEQ ID NO: 251496 - RNA, 32 nt, Human
ugcccaggagggcugaaggcaggggccacuca

SEQ ID NO: 251497 - RNA, 17 nt, Human
ugcccaggagugaguag

SEQ ID NO: 251498 - RNA, 32 nt, Human
ugcccaggaucguguguguggggcuugcgcug

SEQ ID NO: 251499 - RNA, 32 nt, Human
ugcccaggaucuuacaacacagcaaguagcau

SEQ ID NO: 251500 - RNA, 21 nt, Human
ugcccaggauggagugcagug

SEQ ID NO: 251501 - RNA, 32 nt, Human
ugcccaggauguuguuaaaugcagaucugaag

SEQ ID NO: 251502 - RNA, 19 nt, Human
ugcccaggcaaagucagug

SEQ ID NO: 251503 - RNA, 21 nt, Human
ugcccaggcaagagugcagug

SEQ ID NO: 251504 - RNA, 32 nt, Human
ugcccaggcacacgcuggacuccuguggggug

SEQ ID NO: 251505 - RNA, 32 nt, Human
ugcccaggcacugcaaaccgccaccucccuau

SEQ ID NO: 251506 - RNA, 20 nt, Human
ugcccaggcaggaguacagu

SEQ ID NO: 251507 - RNA, 32 nt, Human
ugcccaggcagugguaccagcaccagaguccc

SEQ ID NO: 251508 - RNA, 21 nt, Human
ugcccaggccacaccaguggc

SEQ ID NO: 251509 - RNA, 23 nt, Human
ugcccaggccagucucaaacucc

SEQ ID NO: 251510 - RNA, 32 nt, Human
ugcccaggcccaggugagacaggcaacgccag

SEQ ID NO: 251511 - RNA, 32 nt, Human
ugcccaggccccuugcacuguguuuggaaaag

SEQ ID NO: 251512 - RNA, 22 nt, Human
ugcccaggccgcccugcugcug

SEQ ID NO: 251513 - RNA, 20 nt, Human
ugcccaggccgcgccgccac

SEQ ID NO: 251514 - RNA, 21 nt, Human
ugcccaggccggagugcaaug

SEQ ID NO: 251515 - RNA, 32 nt, Human
ugcccaggccuggguggggaguugggugggcc

SEQ ID NO: 251516 - RNA, 20 nt, Human
ugcccaggcuacagugcagu

SEQ ID NO: 251517 - RNA, 21 nt, Human
ugcccaggcuacagugcagug

SEQ ID NO: 251518 - RNA, 22 nt, Human
ugcccaggcuacagugcagugg

SEQ ID NO: 251519 - RNA, 23 nt, Human
ugcccaggcuacagugcaguggc

SEQ ID NO: 251520 - RNA, 20 nt, Human
ugcccaggcuagagugcaau

SEQ ID NO: 251521 - RNA, 21 nt, Human
ugcccaggcuagagugcaaug

SEQ ID NO: 251522 - RNA, 22 nt, Human
ugcccaggcuagagugcaaugg

SEQ ID NO: 251523 - RNA, 23 nt, Human
ugcccaggcuagagugcaauggu

SEQ ID NO: 251524 - RNA, 21 nt, Human
ugcccaggcuagagugcagug

SEQ ID NO: 251525 - RNA, 22 nt, Human
ugcccaggcuagagugcagugg

SEQ ID NO: 251526 - RNA, 23 nt, Human
ugcccaggcuagagugcaguggc

SEQ ID NO: 251527 - RNA, 21 nt, Human
ugcccaggcuaggaggccggc

SEQ ID NO: 251528 - RNA, 21 nt, Human
ugcccaggcugaauggcagug

SEQ ID NO: 251529 - RNA, 23 nt, Human
ugcccaggcugaucucaaacucc

SEQ ID NO: 251530 - RNA, 21 nt, Human
ugcccaggcugcagugcagug

SEQ ID NO: 251531 - RNA, 32 nt, Human
ugcccaggcugccagccucacacagaucuucc

SEQ ID NO: 251532 - RNA, 24 nt, Human
ugcccaggcugcuggagugccgug

SEQ ID NO: 251533 - RNA, 22 nt, Human
ugcccaggcuggaauccaagag

SEQ ID NO: 251534 - RNA, 21 nt, Human
ugcccaggcuggacugcagug

SEQ ID NO: 251535 - RNA, 21 nt, Human
ugcccaggcuggagcauagug

SEQ ID NO: 251536 - RNA, 22 nt, Human
ugcccaggcuggagcauagugg

SEQ ID NO: 251537 - RNA, 23 nt, Human
ugcccaggcuggagcauaguggc

SEQ ID NO: 251538 - RNA, 21 nt, Human
ugcccaggcuggaguacaaug

SEQ ID NO: 251539 - RNA, 21 nt, Human
ugcccaggcuggaguacagug

SEQ ID NO: 251540 - RNA, 22 nt, Human
ugcccaggcuggaguacagugg

SEQ ID NO: 251541 - RNA, 23 nt, Human
ugcccaggcuggaguacaguggc

SEQ ID NO: 251542 - RNA, 18 nt, Human
ugcccaggcuggagugca

SEQ ID NO: 251543 - RNA, 20 nt, Human
ugcccaggcuggagugcaau

SEQ ID NO: 251544 - RNA, 21 nt, Human
ugcccaggcuggagugcaaug

SEQ ID NO: 251545 - RNA, 22 nt, Human
ugcccaggcuggagugcaaugg

SEQ ID NO: 251546 - RNA, 19 nt, Human
ugcccaggcuggagugcag

SEQ ID NO: 251547 - RNA, 20 nt, Human
ugcccaggcuggagugcagu

SEQ ID NO: 251548 - RNA, 21 nt, Human
ugcccaggcuggagugcagug

SEQ ID NO: 251549 - RNA, 22 nt, Human
ugcccaggcuggagugcagugg

SEQ ID NO: 251550 - RNA, 23 nt, Human
ugcccaggcuggagugcaguggc

SEQ ID NO: 251551 - RNA, 21 nt, Human
ugcccaggcuggagugcgaug

SEQ ID NO: 251552 - RNA, 21 nt, Human
ugcccaggcuggagugcggug

SEQ ID NO: 251553 - RNA, 22 nt, Human
ugcccaggcuggaguguggugg

SEQ ID NO: 251554 - RNA, 32 nt, Human
ugcccaggcuggauggagugcaguggcgugau

SEQ ID NO: 251555 - RNA, 19 nt, Human
ugcccaggcuggggugcag

SEQ ID NO: 251556 - RNA, 32 nt, Human
ugcccaggcuggucccgaacucauggacucaa

SEQ ID NO: 251557 - RNA, 32 nt, Human
ugcccaggcuggucuccaacuccugggcucaa

SEQ ID NO: 251558 - RNA, 23 nt, Human
ugcccaggcuggucucgagcucc

SEQ ID NO: 251559 - RNA, 32 nt, Human
ugcccaggcuggucuugaaccccuggccucaa

SEQ ID NO: 251560 - RNA, 23 nt, Human
ugcccaggcuggucuugaacucc

SEQ ID NO: 251561 - RNA, 32 nt, Human
ugcccaggcuggucuugacuccugggcucaaa

SEQ ID NO: 251562 - RNA, 32 nt, Human
ugcccaggcugguguguagugaucucagcuca

SEQ ID NO: 251563 - RNA, 21 nt, Human
ugcccaggcuguagugcagug

SEQ ID NO: 251564 - RNA, 32 nt, Human
ugcccaggcugucuuugaacuccugggaucaa

SEQ ID NO: 251565 - RNA, 19 nt, Human
ugcccaggcugugcagcgc

SEQ ID NO: 251566 - RNA, 32 nt, Human
ugcccaggcuguuccuucugccaggcaggccc

SEQ ID NO: 251567 - RNA, 32 nt, Human
ugcccaggcuguucucaaacuccugggcugaa

SEQ ID NO: 251568 - RNA, 32 nt, Human
ugcccaggcuguucuucaacuccugggcucaa

SEQ ID NO: 251569 - RNA, 32 nt, Human
ugcccagggaacaggcucccggcagcccccgc

SEQ ID NO: 251570 - RNA, 32 nt, Human
ugcccagggaccagggcaggcagaggucuucc

SEQ ID NO: 251571 - RNA, 32 nt, Human
ugcccagggacccccaucaccagcucuccagc

SEQ ID NO: 251572 - RNA, 32 nt, Human
ugcccagggagagagagggaguggagcccagg

SEQ ID NO: 251573 - RNA, 32 nt, Human
ugcccagggagcccacggagaggucaacaugg

SEQ ID NO: 251574 - RNA, 32 nt, Human
ugcccagggaggaacggaggaggacucgcgcu

SEQ ID NO: 251575 - RNA, 32 nt, Human
ugcccagggagggagaaggaagagggggagcu

SEQ ID NO: 251576 - RNA, 32 nt, Human
ugcccagggcacacccuauaccuccucaucug

SEQ ID NO: 251577 - RNA, 32 nt, Human
ugcccagggcacuuguauuccagccucgcugc

SEQ ID NO: 251578 - RNA, 32 nt, Human
ugcccagggcagaacccgcugguguugaugac

SEQ ID NO: 251579 - RNA, 32 nt, Human
ugcccagggcccuguccccugcuggggccucu

SEQ ID NO: 251580 - RNA, 32 nt, Human
ugcccagggccuggcccugcugcacaugcccu

SEQ ID NO: 251581 - RNA, 32 nt, Human
ugcccagggcuggaggggacgcuguuccuccc

SEQ ID NO: 251582 - RNA, 22 nt, Human
ugcccagggcuggagugcagug

SEQ ID NO: 251583 - RNA, 32 nt, Human
ugcccagggguugcaggcugcagugagcugug

SEQ ID NO: 251584 - RNA, 32 nt, Human
ugcccagggucggaggcccaacgcccccugag

SEQ ID NO: 251585 - RNA, 21 nt, Human
ugcccaggguggagugcagug

SEQ ID NO: 251586 - RNA, 32 nt, Human
ugcccagguacccacuacagagcuuaagaaaa

SEQ ID NO: 251587 - RNA, 22 nt, Human
ugcccagguagcuggagcugau

SEQ ID NO: 251588 - RNA, 32 nt, Human
ugcccaggugaggccaggcugacugaaaaaga

SEQ ID NO: 251589 - RNA, 32 nt, Human
ugcccagguggaggguccuggggacggcagag

SEQ ID NO: 251590 - RNA, 32 nt, Human
ugcccaggugugagucgcugcagaccuggucc

SEQ ID NO: 251591 - RNA, 18 nt, Human
ugcccagguuccuugcug

SEQ ID NO: 251592 - RNA, 17 nt, Human
ugcccagguugccgugg

SEQ ID NO: 251593 - RNA, 32 nt, Human
ugcccaguaugccuccuggacccuccaguucu

SEQ ID NO: 251594 - RNA, 32 nt, Human
ugcccagucaccaauauuuauaaugaggucua

SEQ ID NO: 251595 - RNA, 21 nt, Human
ugcccaguccuauuucugcca

SEQ ID NO: 251596 - RNA, 21 nt, Human
ugcccagucucugcccugcug

SEQ ID NO: 251597 - RNA, 20 nt, Human
ugcccagucuggccugcgcu

SEQ ID NO: 251598 - RNA, 32 nt, Human
ugcccagucuugucucaaacuccugggcucaa

SEQ ID NO: 251599 - RNA, 32 nt, Human
ugcccagugagccuccuugacaugcuuauucc

SEQ ID NO: 251600 - RNA, 22 nt, Human
ugcccagugccccuagcugcug

SEQ ID NO: 251601 - RNA, 22 nt, Human
ugcccagugccccuccucccca

SEQ ID NO: 251602 - RNA, 32 nt, Human
ugcccaguggugcuucaacugguaucuaugag

SEQ ID NO: 251603 - RNA, 20 nt, Human
ugcccaguguuaugccuaug

SEQ ID NO: 251604 - RNA, 32 nt, Human
ugcccaguucucuguccuuauccacaggcccc

SEQ ID NO: 251605 - RNA, 32 nt, Human
ugcccauaaccccuacuuuguucaagugucaa

SEQ ID NO: 251606 - RNA, 24 nt, Human
ugcccauagcacggagagaagggc

SEQ ID NO: 251607 - RNA, 32 nt, Human
ugcccauaggaagcccuuuugauugacaguau

SEQ ID NO: 251608 - RNA, 24 nt, Human
ugcccauagucccagcuacucagg

SEQ ID NO: 251609 - RNA, 32 nt, Human
ugcccauaguggccuauccucugugauuaugc

SEQ ID NO: 251610 - RNA, 21 nt, Human
ugcccauauggaaaagagggc

SEQ ID NO: 251611 - RNA, 32 nt, Human
ugcccauauuuugcucuuucuuugacuucuau

SEQ ID NO: 251612 - RNA, 32 nt, Human
ugcccaucacccaggugcucagucccuggugc

SEQ ID NO: 251613 - RNA, 32 nt, Human
ugcccaucaccucccucuccccaacaucccca

SEQ ID NO: 251614 - RNA, 22 nt, Human
ugcccaucagcagguucccaug

SEQ ID NO: 251615 - RNA, 32 nt, Human
ugcccaucauccccuuccugcucuggcgcuca

SEQ ID NO: 251616 - RNA, 22 nt, Human
ugcccaucccuggcugaagcuc

SEQ ID NO: 251617 - RNA, 32 nt, Human
ugcccauccugcucuccuccagccgagggacc

SEQ ID NO: 251618 - RNA, 32 nt, Human
ugcccauccuuccacugcaaagccgcugggac

SEQ ID NO: 251619 - RNA, 32 nt, Human
ugcccaucuacuuccaaucccucucucccuua

SEQ ID NO: 251620 - RNA, 32 nt, Human
ugcccaucuccauggugugcagucucuggguu

SEQ ID NO: 251621 - RNA, 32 nt, Human
ugcccaucuccccaacccagucacagagagau

SEQ ID NO: 251622 - RNA, 32 nt, Human
ugcccaucuccccugcucaacuucuccaccaa

SEQ ID NO: 251623 - RNA, 32 nt, Human
ugcccaucuguuucuccucgggugccagccag

SEQ ID NO: 251624 - RNA, 32 nt, Human
ugcccaucuuuguugccauucagugcuacgcg

SEQ ID NO: 251625 - RNA, 32 nt, Human
ugcccaugaacauuauucuauugauguguuua

SEQ ID NO: 251626 - RNA, 32 nt, Human
ugcccaugacaucucccugaaagaggacacca

SEQ ID NO: 251627 - RNA, 32 nt, Human
ugcccaugcaggcagggccugcaggaggggag

SEQ ID NO: 251628 - RNA, 21 nt, Human
ugcccaugcuggagugcaaug

SEQ ID NO: 251629 - RNA, 32 nt, Human
ugcccaugcugguucugaacuccugggcucaa

SEQ ID NO: 251630 - RNA, 30 nt, Human
ugcccauggaccaauccgcacacacuuccu

SEQ ID NO: 251631 - RNA, 32 nt, Human
ugcccaugggccuucucguugcagggaggcgg

SEQ ID NO: 251632 - RNA, 32 nt, Human
ugcccauggugggagcguggucacugugcagu

SEQ ID NO: 251633 - RNA, 32 nt, Human
ugcccauuccccagccucucuuccuaucccau

SEQ ID NO: 251634 - RNA, 32 nt, Human
ugcccauugcagagaaggggacugggaccaaa

SEQ ID NO: 251635 - RNA, 32 nt, Human
ugcccauuucacgacuccucugagacuaauug

SEQ ID NO: 251636 - RNA, 32 nt, Human
ugcccauuugggccugcauagugccaugauug

SEQ ID NO: 251637 - RNA, 32 nt, Human
ugcccauuuguaggugguaaaaucaauuguuu

SEQ ID NO: 251638 - RNA, 32 nt, Human
ugcccauuugucggcuuacagcucuuccggag

SEQ ID NO: 251639 - RNA, 32 nt, Human
ugccccaaagccccagagagcuccuuagacau

SEQ ID NO: 251640 - RNA, 32 nt, Human
ugccccaacaaaugcaaaugcacacaaaccca

SEQ ID NO: 251641 - RNA, 32 nt, Human
ugccccaaccaucuuggccacaugucaucagg

SEQ ID NO: 251642 - RNA, 20 nt, Human
ugccccaacucggcgcccga

SEQ ID NO: 251643 - RNA, 22 nt, Human
ugccccaacuucucggauguca

SEQ ID NO: 251644 - RNA, 24 nt, Human
ugccccaacuuuccuggagcccga

SEQ ID NO: 251645 - RNA, 32 nt, Human
ugccccaacuuugcuucuagaucucuggggug

SEQ ID NO: 251646 - RNA, 32 nt, Human
ugccccaagagcaggaggugccugaaagcugg

SEQ ID NO: 251647 - RNA, 32 nt, Human
ugccccaagcagcuggccaacauguguagaga

SEQ ID NO: 251648 - RNA, 32 nt, Human
ugccccaaggcucccgccgcugcuccagcgcg

SEQ ID NO: 251649 - RNA, 32 nt, Human
ugccccaaguaggaauauagcucugcauuuac

SEQ ID NO: 251650 - RNA, 32 nt, Human
ugccccaaguugcugucuccccuucccucacc

SEQ ID NO: 251651 - RNA, 32 nt, Human
ugccccaaguuuuaggaacauguuaggauaua

SEQ ID NO: 251652 - RNA, 26 nt, Human
ugccccaaucaucucgcuggaugcca

SEQ ID NO: 251653 - RNA, 32 nt, Human
ugccccacacuuuccuccuccccacugcagug

SEQ ID NO: 251654 - RNA, 32 nt, Human
ugccccacagcccugaggaaggcacauauuua

SEQ ID NO: 251655 - RNA, 32 nt, Human
ugccccacagggaccccagccuggguggucac

SEQ ID NO: 251656 - RNA, 32 nt, Human
ugccccacaguccucaggcuccagcuuucucg

SEQ ID NO: 251657 - RNA, 32 nt, Human
ugccccaccaugucagacgcagccguagacac

SEQ ID NO: 251658 - RNA, 32 nt, Human
ugccccaccaugucagacgcagccguagacgc

SEQ ID NO: 251659 - RNA, 21 nt, Human
ugccccacccacccagugccu

SEQ ID NO: 251660 - RNA, 32 nt, Human
ugccccacccacccuccugggcccaggcagca

SEQ ID NO: 251661 - RNA, 19 nt, Human
ugccccacccaucccugca

SEQ ID NO: 251662 - RNA, 31 nt, Human
ugccccaccccagccucuuccaggagagcac

SEQ ID NO: 251663 - RNA, 32 nt, Human
ugccccaccccagccucuuccaggagagcacc

SEQ ID NO: 251664 - RNA, 17 nt, Human
ugccccaccccaggaaa

SEQ ID NO: 251665 - RNA, 32 nt, Human
ugccccaccccauuccuuauauucagcaagca

SEQ ID NO: 251666 - RNA, 19 nt, Human
ugccccaccccucccugca

SEQ ID NO: 251667 - RNA, 32 nt, Human
ugccccacccuccaaucugcacuuugauuugc

SEQ ID NO: 251668 - RNA, 32 nt, Human
ugccccacccuccacaggcaggugaccuggag

SEQ ID NO: 251669 - RNA, 32 nt, Human
ugccccacccugcagagaaggaagaaagguga

SEQ ID NO: 251670 - RNA, 32 nt, Human
ugccccaccucuccccaauuaagugccuucac

SEQ ID NO: 251671 - RNA, 32 nt, Human
ugccccaccuggauuccugccugcuguaggua

SEQ ID NO: 251672 - RNA, 32 nt, Human
ugccccaccuuuccuuuccuuccugugggccc

SEQ ID NO: 251673 - RNA, 19 nt, Human
ugccccacguccguuugca

SEQ ID NO: 251674 - RNA, 32 nt, Human
ugccccacuccgaaggaaaccccacguacagg

SEQ ID NO: 251675 - RNA, 32 nt, Human
ugccccacugcacuccacccugggcaauggag

SEQ ID NO: 251676 - RNA, 32 nt, Human
ugccccacugcacuccagccuaggcaacagag

SEQ ID NO: 251677 - RNA, 32 nt, Human
ugccccacugcacuccagccugggcgacagaa

SEQ ID NO: 251678 - RNA, 32 nt, Human
ugccccacugcacuccagccugggugacagag

SEQ ID NO: 251679 - RNA, 32 nt, Human
ugccccacugucccaacuccucuccucuuaga

SEQ ID NO: 251680 - RNA, 32 nt, Human
ugccccacugugcuccugggccugugacccca

SEQ ID NO: 251681 - RNA, 32 nt, Human
ugccccacuucugcuuugugucucccucuguc

SEQ ID NO: 251682 - RNA, 32 nt, Human
ugccccagaaguuugagaccagccugggcaac

SEQ ID NO: 251683 - RNA, 32 nt, Human
ugccccagacagacuucaucauugugcuagcu

SEQ ID NO: 251684 - RNA, 32 nt, Human
ugccccagagacugaaggaaugcccaggagag

SEQ ID NO: 251685 - RNA, 22 nt, Human
ugccccagagccccgcagugag

SEQ ID NO: 251686 - RNA, 32 nt, Human
ugccccagagcccgaggccaggggacagggcu

SEQ ID NO: 251687 - RNA, 32 nt, Human
ugccccagaugccaccggaaaugucaucuucu

SEQ ID NO: 251688 - RNA, 22 nt, Human
ugccccagcaaguguaaccuug

SEQ ID NO: 251689 - RNA, 32 nt, Human
ugccccagccagauggacuccagccugccugg

SEQ ID NO: 251690 - RNA, 18 nt, Human
ugccccagccccauuccc

SEQ ID NO: 251691 - RNA, 32 nt, Human
ugccccagccuaucugauggcauggucccugg

SEQ ID NO: 251692 - RNA, 32 nt, Human
ugccccagccuccugaguagcugggauuacag

SEQ ID NO: 251693 - RNA, 32 nt, Human
ugccccagccuccugggccugcccuucccucu

SEQ ID NO: 251694 - RNA, 32 nt, Human
ugccccagccugacauguguccaggccccucc

SEQ ID NO: 251695 - RNA, 32 nt, Human
ugccccagccuggggugaggguaagggguagg

SEQ ID NO: 251696 - RNA, 32 nt, Human
ugccccagccuguguagcucuuccugcaugug

SEQ ID NO: 251697 - RNA, 32 nt, Human
ugccccagccuucuccaggacaaccugcugga

SEQ ID NO: 251698 - RNA, 32 nt, Human
ugccccagcugauacgcaaggugccagugugu

SEQ ID NO: 251699 - RNA, 21 nt, Human
ugccccagcugggaagagggc

SEQ ID NO: 251700 - RNA, 32 nt, Human
ugccccaggagcuaguggagggugaggucaau

SEQ ID NO: 251701 - RNA, 32 nt, Human
ugccccaggaggugagguuaaggaguuggggg

SEQ ID NO: 251702 - RNA, 24 nt, Human
ugccccaggcagcccacccacgcc

SEQ ID NO: 251703 - RNA, 32 nt, Human
ugccccaggcagcccacccacgcccagugcgg

SEQ ID NO: 251704 - RNA, 32 nt, Human
ugccccaggcagcccgggcacagugagcuuag

SEQ ID NO: 251705 - RNA, 32 nt, Human
ugccccaggccaucaucuccccaccucuccuc

SEQ ID NO: 251706 - RNA, 20 nt, Human
ugccccaggccaucccgccg

SEQ ID NO: 251707 - RNA, 32 nt, Human
ugccccaggccauuucucccaccuuuacucac

SEQ ID NO: 251708 - RNA, 22 nt, Human
ugccccaggcccacccaggggg

SEQ ID NO: 251709 - RNA, 32 nt, Human
ugccccaggcccugugcagacacaccaggccc

SEQ ID NO: 251710 - RNA, 32 nt, Human
ugccccaggccgggcucaguggcucacaccug

SEQ ID NO: 251711 - RNA, 32 nt, Human
ugccccaggccugaguccuuagcaaggguugg

SEQ ID NO: 251712 - RNA, 32 nt, Human
ugccccaggccugccuuccauucuuuaacagc

SEQ ID NO: 251713 - RNA, 32 nt, Human
ugccccaggcuggagugcaguggcgugaucuu

SEQ ID NO: 251714 - RNA, 32 nt, Human
ugccccaggcuggagugcaguggugugauccu

SEQ ID NO: 251715 - RNA, 26 nt, Human
ugccccaggcugggaggaacucugua

SEQ ID NO: 251716 - RNA, 32 nt, Human
ugccccagggcugaggccuccgcucaggcagc

SEQ ID NO: 251717 - RNA, 23 nt, Human
ugccccaggggcaccacgccuga

SEQ ID NO: 251718 - RNA, 32 nt, Human
ugccccagggggaucagggauccucacccucc

SEQ ID NO: 251719 - RNA, 32 nt, Human
ugccccagggugagaacgugcccagccacauc

SEQ ID NO: 251720 - RNA, 32 nt, Human
ugccccaguccggccaucaccaugcuccggac

SEQ ID NO: 251721 - RNA, 32 nt, Human
ugccccaguccuuuccuacuccagaaaugcuc

SEQ ID NO: 251722 - RNA, 22 nt, Human
ugccccagucuccucuccacca

SEQ ID NO: 251723 - RNA, 23 nt, Human
ugccccagucucucuguugagcc

SEQ ID NO: 251724 - RNA, 32 nt, Human
ugccccagugcuggauccacugggugaagcca

SEQ ID NO: 251725 - RNA, 32 nt, Human
ugccccaguggugcgggccaggucuggcgcca

SEQ ID NO: 251726 - RNA, 32 nt, Human
ugccccagugugcagccccugccagauguggg

SEQ ID NO: 251727 - RNA, 22 nt, Human
ugccccaguguuuuggauacca

SEQ ID NO: 251728 - RNA, 32 nt, Human
ugccccaguugcucauacaaacagaucagcau

SEQ ID NO: 251729 - RNA, 32 nt, Human
ugccccaguuuucuccuccucacuagucugug

SEQ ID NO: 251730 - RNA, 32 nt, Human
ugccccaucacaggcgagagugugcugagugc

SEQ ID NO: 251731 - RNA, 32 nt, Human
ugccccaucuucuggcacaggccaucccgagu

SEQ ID NO: 251732 - RNA, 32 nt, Human
ugccccaucuuucaaaucaucuggaagagacg

SEQ ID NO: 251733 - RNA, 23 nt, Human
ugccccaugaccccagaugccuc

SEQ ID NO: 251734 - RNA, 32 nt, Human
ugccccaugccuguccagccugggcagccagg

SEQ ID NO: 251735 - RNA, 31 nt, Human
ugccccaugguggcagugguggcggucagau

SEQ ID NO: 251736 - RNA, 32 nt, Human
ugccccauuuuagaagaagacagaguaguuga

SEQ ID NO: 251737 - RNA, 32 nt, Human
ugcccccaacccacccuccaccccguccccca

SEQ ID NO: 251738 - RNA, 32 nt, Human
ugcccccaaugccaccauugcaguggccauuu

SEQ ID NO: 251739 - RNA, 32 nt, Human
ugcccccaccaccaccacccccaucacugcuu

SEQ ID NO: 251740 - RNA, 32 nt, Human
ugcccccacccccucacagggucccucagauu

SEQ ID NO: 251741 - RNA, 21 nt, Human
ugcccccaccgcccaccaccu

SEQ ID NO: 251742 - RNA, 21 nt, Human
ugcccccaccucccaccgccu

SEQ ID NO: 251743 - RNA, 19 nt, Human
ugcccccacguccccuuca

SEQ ID NO: 251744 - RNA, 32 nt, Human
ugcccccagaaacuugccccgaguuucucugg

SEQ ID NO: 251745 - RNA, 21 nt, Human
ugcccccagcccaccccugcc

SEQ ID NO: 251746 - RNA, 32 nt, Human
ugcccccagccugugugcccuguuccuugccc

SEQ ID NO: 251747 - RNA, 32 nt, Human
ugcccccaggacuaguggagguucucugccca

SEQ ID NO: 251748 - RNA, 32 nt, Human
ugcccccaggagauggagggccugguggaugc

SEQ ID NO: 251749 - RNA, 32 nt, Human
ugcccccaguuccccucucugcccccacacuc

SEQ ID NO: 251750 - RNA, 32 nt, Human
ugcccccaucaucgugcaauaccucagugcag

SEQ ID NO: 251751 - RNA, 32 nt, Human
ugcccccaucucggacccucaggcuguugguu

SEQ ID NO: 251752 - RNA, 19 nt, Human
ugccccccacagaggcugg

SEQ ID NO: 251753 - RNA, 22 nt, Human
ugccccccgggcuuccugccca

SEQ ID NO: 251754 - RNA, 22 nt, Human
ugccccccgucccuccacccca

SEQ ID NO: 251755 - RNA, 16 nt, Human
ugccccccucaucuca

SEQ ID NO: 251756 - RNA, 23 nt, Human
ugccccccuuggacucccgccca

SEQ ID NO: 251757 - RNA, 23 nt, Human
ugccccccuugggcacccacuca

SEQ ID NO: 251758 - RNA, 32 nt, Human
ugcccccgagccaccaucaugccugggcacuu

SEQ ID NO: 251759 - RNA, 32 nt, Human
ugcccccgcuacacuccagccuggucgacaga

SEQ ID NO: 251760 - RNA, 32 nt, Human
ugcccccggaagagaaacaaagcagcaggaca

SEQ ID NO: 251761 - RNA, 32 nt, Human
ugcccccggacccggggguggggaggggagca

SEQ ID NO: 251762 - RNA, 23 nt, Human
ugcccccgucacaacucuguaga

SEQ ID NO: 251763 - RNA, 32 nt, Human
ugcccccgugagccucccucgccgccccuccc

SEQ ID NO: 251764 - RNA, 32 nt, Human
ugcccccguucccggguagccacuggacugac

SEQ ID NO: 251765 - RNA, 32 nt, Human
ugcccccuacagcagcagcccagauccucccc

SEQ ID NO: 251766 - RNA, 21 nt, Human
ugcccccuccaaggcugugca

SEQ ID NO: 251767 - RNA, 32 nt, Human
ugcccccuccaaugcuacccccggccccaggg

SEQ ID NO: 251768 - RNA, 21 nt, Human
ugcccccuccccacccucccu

SEQ ID NO: 251769 - RNA, 20 nt, Human
ugcccccuccccacccugcc

SEQ ID NO: 251770 - RNA, 23 nt, Human
ugcccccuccccgcccacugucu

SEQ ID NO: 251771 - RNA, 24 nt, Human
ugcccccuccgccaccgccgccgc

SEQ ID NO: 251772 - RNA, 32 nt, Human
ugcccccuccuggagcagcuccugggcugugc

SEQ ID NO: 251773 - RNA, 24 nt, Human
ugcccccuccuugcccaccugccu

SEQ ID NO: 251774 - RNA, 32 nt, Human
ugcccccuccuuuaucccagcagcagcgucuc

SEQ ID NO: 251775 - RNA, 22 nt, Human
ugcccccucgcggagugcgugg

SEQ ID NO: 251776 - RNA, 32 nt, Human
ugcccccucuauucuccucucucccccagggg

SEQ ID NO: 251777 - RNA, 32 nt, Human
ugcccccucuccccgcccccugcccggccaac

SEQ ID NO: 251778 - RNA, 32 nt, Human
ugcccccucugccuccaccccggcuccuggcc

SEQ ID NO: 251779 - RNA, 23 nt, Human
ugcccccugacccacaucugcug

SEQ ID NO: 251780 - RNA, 32 nt, Human
ugcccccugagcagcugggacuacaggcacac

SEQ ID NO: 251781 - RNA, 31 nt, Human
ugcccccugagcgccaggcuucgggcccggg

SEQ ID NO: 251782 - RNA, 32 nt, Human
ugcccccugcaaccuccuucaggggccucugg

SEQ ID NO: 251783 - RNA, 32 nt, Human
ugcccccugcagcugcugccauccccaccccu

SEQ ID NO: 251784 - RNA, 32 nt, Human
ugcccccugcaggaaggagcugccuggacccg

SEQ ID NO: 251785 - RNA, 31 nt, Human
ugcccccugcagucucccacagccagggccc

SEQ ID NO: 251786 - RNA, 32 nt, Human
ugcccccugccaggcugagggacagugacaca

SEQ ID NO: 251787 - RNA, 32 nt, Human
ugcccccugccugcugcuccugucacagacca

SEQ ID NO: 251788 - RNA, 32 nt, Human
ugcccccugugucauucuucuaauccaaugua

SEQ ID NO: 251789 - RNA, 20 nt, Human
ugcccccuuccagccuggag

SEQ ID NO: 251790 - RNA, 32 nt, Human
ugcccccuucgcuccuccucucaucauuugca

SEQ ID NO: 251791 - RNA, 24 nt, Human
ugcccccuucucuagccacagccu

SEQ ID NO: 251792 - RNA, 32 nt, Human
ugcccccuuucagaugucuucugccuguuaua

SEQ ID NO: 251793 - RNA, 32 nt, Human
ugcccccuuugcaaggccugcugcagucccca

SEQ ID NO: 251794 - RNA, 32 nt, Human
ugcccccuuuucugaggaggugcauggccuga

SEQ ID NO: 251795 - RNA, 18 nt, Human
ugccccgaccccgccugc

SEQ ID NO: 251796 - RNA, 32 nt, Human
ugccccgagccuuucuggggaagaacuccagg

SEQ ID NO: 251797 - RNA, 32 nt, Human
ugccccgagucugggucaggugccuccuguga

SEQ ID NO: 251798 - RNA, 32 nt, Human
ugccccgauacucaucuugcacggccagaacu

SEQ ID NO: 251799 - RNA, 32 nt, Human
ugccccgcagaagguguuuuugcgcugguuca

SEQ ID NO: 251800 - RNA, 32 nt, Human
ugccccgcagaggccacgccuauuuauucugu

SEQ ID NO: 251801 - RNA, 32 nt, Human
ugccccgcccuuccagcugaggacaggcuggc

SEQ ID NO: 251802 - RNA, 18 nt, Human
ugccccgccguccuccuu

SEQ ID NO: 251803 - RNA, 32 nt, Human
ugccccgccucagccccagcugcccuggcgug

SEQ ID NO: 251804 - RNA, 22 nt, Human
ugccccgcgcccgcugcugcug

SEQ ID NO: 251805 - RNA, 32 nt, Human
ugccccgcuggucccaggcuggauugccgugg

SEQ ID NO: 251806 - RNA, 32 nt, Human
ugccccggaauagcacuuuaauagucaaaaau

SEQ ID NO: 251807 - RNA, 32 nt, Human
ugccccggaggcccagcuagccccagacuucg

SEQ ID NO: 251808 - RNA, 32 nt, Human
ugccccggcaggccuggggucugcaguccucu

SEQ ID NO: 251809 - RNA, 19 nt, Human
ugccccggccaggccugca

SEQ ID NO: 251810 - RNA, 32 nt, Human
ugccccggccuccugaguaccugggauuauag

SEQ ID NO: 251811 - RNA, 32 nt, Human
ugccccggcugcaaccucucccacucaagaga

SEQ ID NO: 251812 - RNA, 23 nt, Human
ugccccgggcucaauggcuggau

SEQ ID NO: 251813 - RNA, 32 nt, Human
ugccccgggguucuguccaccggggaggaaag

SEQ ID NO: 251814 - RNA, 32 nt, Human
ugccccggucaccuagcaagcugccgaaccaa

SEQ ID NO: 251815 - RNA, 32 nt, Human
ugccccgguggugggaagcgccuggacagacc

SEQ ID NO: 251816 - RNA, 32 nt, Human
ugccccgucaugccaaagaggaaagugaccuu

SEQ ID NO: 251817 - RNA, 32 nt, Human
ugccccgucuuucugccgcagcccucgcagag

SEQ ID NO: 251818 - RNA, 32 nt, Human
ugccccgugccuggcagaggucuggugccagc

SEQ ID NO: 251819 - RNA, 32 nt, Human
ugccccuaaagccacagcagaagagccauuca

SEQ ID NO: 251820 - RNA, 32 nt, Human
ugccccuacaucucagcugaaucuccagggag

SEQ ID NO: 251821 - RNA, 32 nt, Human
ugccccuagaagggaaggggagagggaaacgu

SEQ ID NO: 251822 - RNA, 21 nt, Human
ugccccuagucugggugcccg

SEQ ID NO: 251823 - RNA, 32 nt, Human
ugccccuauggaacuggguuccuuccaugaca

SEQ ID NO: 251824 - RNA, 24 nt, Human
ugccccucaaagugcugggauuac

SEQ ID NO: 251825 - RNA, 32 nt, Human
ugccccucaaagugcugggauuacgugaucca

SEQ ID NO: 251826 - RNA, 32 nt, Human
ugccccucacaccuccacaucccagauaccca

SEQ ID NO: 251827 - RNA, 32 nt, Human
ugccccucagagacacagcugugggugccucu

SEQ ID NO: 251828 - RNA, 32 nt, Human
ugccccucagcccugcuggaacagggucugcc

SEQ ID NO: 251829 - RNA, 32 nt, Human
ugccccucagcgguuccagugcccucaaagca

SEQ ID NO: 251830 - RNA, 32 nt, Human
ugccccucauucuggccaguucuuuccaguag

SEQ ID NO: 251831 - RNA, 32 nt, Human
ugccccuccagcgccuaucauacgccugacac

SEQ ID NO: 251832 - RNA, 32 nt, Human
ugccccucccagucccguuucuccccucuagg

SEQ ID NO: 251833 - RNA, 32 nt, Human
ugccccucccuccagcccagcuccauucuuug

SEQ ID NO: 251834 - RNA, 22 nt, Human
ugccccuccuccgaugcauaca

SEQ ID NO: 251835 - RNA, 32 nt, Human
ugccccuccugaauuggaguuagcguccucuu

SEQ ID NO: 251836 - RNA, 32 nt, Human
ugccccuccugccccgaaagugcugacuaugg

SEQ ID NO: 251837 - RNA, 18 nt, Human
ugccccuccugcccugca

SEQ ID NO: 251838 - RNA, 32 nt, Human
ugccccucggccacuccuggguuggagcccga

SEQ ID NO: 251839 - RNA, 32 nt, Human
ugccccucuccuccucacuauucucaccaggc

SEQ ID NO: 251840 - RNA, 32 nt, Human
ugccccucucgccucuggaguggcugccugag

SEQ ID NO: 251841 - RNA, 32 nt, Human
ugccccucucuacaaggucuuuuugguuucac

SEQ ID NO: 251842 - RNA, 32 nt, Human
ugccccucucucccucugccccucucuccucu

SEQ ID NO: 251843 - RNA, 32 nt, Human
ugccccucugccuugcccuccugggcccuggg

SEQ ID NO: 251844 - RNA, 32 nt, Human
ugccccucugcuccggcccuugcccuuugacc

SEQ ID NO: 251845 - RNA, 32 nt, Human
ugccccucuggugaccaggucacagcucccuu

SEQ ID NO: 251846 - RNA, 32 nt, Human
ugccccucuuccacucugcucucggccacuug

SEQ ID NO: 251847 - RNA, 32 nt, Human
ugccccucuuccucccccuccucuucuuccuc

SEQ ID NO: 251848 - RNA, 32 nt, Human
ugccccugaagucuaucugcaggauggucuuc

SEQ ID NO: 251849 - RNA, 32 nt, Human
ugccccugacacugcacugagcacuuuaugag

SEQ ID NO: 251850 - RNA, 32 nt, Human
ugccccugaccccuccagucuuagcuccugcu

SEQ ID NO: 251851 - RNA, 32 nt, Human
ugccccugagccuucugcuccaaggaaccagc

SEQ ID NO: 251852 - RNA, 32 nt, Human
ugccccugagcuguaccccacuccaggacaag

SEQ ID NO: 251853 - RNA, 32 nt, Human
ugccccugcacagcagaauuucccugccagag

SEQ ID NO: 251854 - RNA, 32 nt, Human
ugccccugcacagcaggcugccagugccuggg

SEQ ID NO: 251855 - RNA, 32 nt, Human
ugccccugcacaucagccugggugauagauug

SEQ ID NO: 251856 - RNA, 32 nt, Human
ugccccugcacuccagccugagcgacagugag

SEQ ID NO: 251857 - RNA, 32 nt, Human
ugccccugcacugaagugugaggagcaggaau

SEQ ID NO: 251858 - RNA, 32 nt, Human
ugccccugcaugguaugggaucaaagaggaca

SEQ ID NO: 251859 - RNA, 32 nt, Human
ugccccugcauucuagccugggugacagugag

SEQ ID NO: 251860 - RNA, 32 nt, Human
ugccccugccaccacagcugcuuaugugugac

SEQ ID NO: 251861 - RNA, 32 nt, Human
ugccccugcccaccuccuccagccuagguugu

SEQ ID NO: 251862 - RNA, 32 nt, Human
ugccccugcccaggcugccaugugagggugug

SEQ ID NO: 251863 - RNA, 22 nt, Human
ugccccugcccccuccccgcca

SEQ ID NO: 251864 - RNA, 31 nt, Human
ugccccugccucucccugugucccuuccccu

SEQ ID NO: 251865 - RNA, 32 nt, Human
ugccccugccucucccugugucccuuccccug

SEQ ID NO: 251866 - RNA, 32 nt, Human
ugccccugcugccucagcccucaggcuccuaa

SEQ ID NO: 251867 - RNA, 32 nt, Human
ugccccugcugccuccccaacccugccccugc

SEQ ID NO: 251868 - RNA, 32 nt, Human
ugccccugcugcugccccgagggcugcccugc

SEQ ID NO: 251869 - RNA, 21 nt, Human
ugccccugcugugcugcucaa

SEQ ID NO: 251870 - RNA, 32 nt, Human
ugccccuggaaaccuuccugcaauggccccuu

SEQ ID NO: 251871 - RNA, 32 nt, Human
ugccccuggaggugggggcugcuggcugagga

SEQ ID NO: 251872 - RNA, 32 nt, Human
ugccccuggcccccacgcccucccucuccagu

SEQ ID NO: 251873 - RNA, 29 nt, Human
ugccccuggcugcugucgaucucuccacg

SEQ ID NO: 251874 - RNA, 32 nt, Human
ugccccuggcugcugucgaucucuccacggcg

SEQ ID NO: 251875 - RNA, 29 nt, Human
ugccccuggcugcuguuucccagccuuuc

SEQ ID NO: 251876 - RNA, 32 nt, Human
ugccccuggcuuucugggucugugccucucca

SEQ ID NO: 251877 - RNA, 32 nt, Human
ugccccugggagacgagugaaggagccccaga

SEQ ID NO: 251878 - RNA, 32 nt, Human
ugccccugggauucucaggccaaccugccaac

SEQ ID NO: 251879 - RNA, 32 nt, Human
ugccccugggcaaggaagcgaggcccucuggg

SEQ ID NO: 251880 - RNA, 32 nt, Human
ugccccugggccuguccuucugccugugaccc

SEQ ID NO: 251881 - RNA, 32 nt, Human
ugccccugggcuggugcuggcagugggagccg

SEQ ID NO: 251882 - RNA, 32 nt, Human
ugccccuguacuccagccugggugacagagca

SEQ ID NO: 251883 - RNA, 32 nt, Human
ugccccuguagucccagcuacuugggaggcug

SEQ ID NO: 251884 - RNA, 32 nt, Human
ugccccugucacugcacccagcuuggcauuua

SEQ ID NO: 251885 - RNA, 22 nt, Human
ugccccugucccaccccuaccu

SEQ ID NO: 251886 - RNA, 32 nt, Human
ugccccugucugcugcucccagucucucgcuc

SEQ ID NO: 251887 - RNA, 32 nt, Human
ugccccugugaagaaauguggccauguucauu

SEQ ID NO: 251888 - RNA, 32 nt, Human
ugccccugugcccagugguugaugauaccacc

SEQ ID NO: 251889 - RNA, 32 nt, Human
ugccccuguggugagucaugaaaccuccuugg

SEQ ID NO: 251890 - RNA, 32 nt, Human
ugccccuguucucuuccacucuccuugcuacc

SEQ ID NO: 251891 - RNA, 32 nt, Human
ugccccuguuucagucucaucuguacucacgg

SEQ ID NO: 251892 - RNA, 32 nt, Human
ugccccuuauguuuacguuugcagccugaagc

SEQ ID NO: 251893 - RNA, 32 nt, Human
ugccccuucacugcauguccccaaacucagca

SEQ ID NO: 251894 - RNA, 32 nt, Human
ugccccuuccaggccuccucugucaccagagg

SEQ ID NO: 251895 - RNA, 32 nt, Human
ugccccuuccuccuucaugccugggccugcag

SEQ ID NO: 251896 - RNA, 32 nt, Human
ugccccuuccuuguuuuuccuccuacuggucu

SEQ ID NO: 251897 - RNA, 18 nt, Human
ugccccuucuaccaggug

SEQ ID NO: 251898 - RNA, 17 nt, Human
ugccccuucuccaggau

SEQ ID NO: 251899 - RNA, 32 nt, Human
ugccccuucucgggggucaugaugggcagcaa

SEQ ID NO: 251900 - RNA, 17 nt, Human
ugccccuucucugggug

SEQ ID NO: 251901 - RNA, 23 nt, Human
ugccccuucugccccuccaccca

SEQ ID NO: 251902 - RNA, 32 nt, Human
ugccccuucuuucugcccuuccucaccgaaga

SEQ ID NO: 251903 - RNA, 32 nt, Human
ugccccuugccugccuuccucgccaguagcuu

SEQ ID NO: 251904 - RNA, 32 nt, Human
ugccccuugugauggaugaggaaagguaucca

SEQ ID NO: 251905 - RNA, 32 nt, Human
ugccccuuucuauccaugcuguguccaggagg

SEQ ID NO: 251906 - RNA, 32 nt, Human
ugccccuuuguccccaugucaggcggaggcgg

SEQ ID NO: 251907 - RNA, 32 nt, Human
ugccccuuuucuccuugcauuagcaagcuagg

SEQ ID NO: 251908 - RNA, 32 nt, Human
ugccccuuuugaugcccuugaauagccugaag

SEQ ID NO: 251909 - RNA, 18 nt, Human
ugccccuuuuuauccaga

SEQ ID NO: 251910 - RNA, 32 nt, Human
ugcccgaaccucaugccucuugcccccagauc

SEQ ID NO: 251911 - RNA, 17 nt, Human
ugcccgaccccaucuca

SEQ ID NO: 251912 - RNA, 32 nt, Human
ugcccgacugugcuuucaagagcucggccauc

SEQ ID NO: 251913 - RNA, 32 nt, Human
ugcccgacuuccucuuuggcaccuccauuccc

SEQ ID NO: 251914 - RNA, 32 nt, Human
ugcccgaggagaccagggaggcuuggacccca

SEQ ID NO: 251915 - RNA, 32 nt, Human
ugcccgagggucuccgcccaccccggccggac

SEQ ID NO: 251916 - RNA, 32 nt, Human
ugcccgaguagcugggacuacaggcaugugcc

SEQ ID NO: 251917 - RNA, 32 nt, Human
ugcccgaguuuucuuuauggaguacuucuuuc

SEQ ID NO: 251918 - RNA, 32 nt, Human
ugcccgcagcaaggcccagcugagguggugga

SEQ ID NO: 251919 - RNA, 21 nt, Human
ugcccgcagcccaggcuccug

SEQ ID NO: 251920 - RNA, 20 nt, Human
ugcccgcauccuccaggggg

SEQ ID NO: 251921 - RNA, 32 nt, Human
ugcccgcaucuucuguuccaugggugcccagc

SEQ ID NO: 251922 - RNA, 32 nt, Human
ugcccgccaccauuuugcacacugccuguuca

SEQ ID NO: 251923 - RNA, 32 nt, Human
ugcccgccagccugaccugugcccggcucgcg

SEQ ID NO: 251924 - RNA, 32 nt, Human
ugcccgccaggccagucuugaccugcaguggc

SEQ ID NO: 251925 - RNA, 31 nt, Human
ugcccgcccagcugcuccaugccaggaggag

SEQ ID NO: 251926 - RNA, 19 nt, Human
ugcccgcccccugcugcug

SEQ ID NO: 251927 - RNA, 21 nt, Human
ugcccgccccgccccauccca

SEQ ID NO: 251928 - RNA, 32 nt, Human
ugcccgcccgccagugucagugguguuggcau

SEQ ID NO: 251929 - RNA, 21 nt, Human
ugcccgccgccccuccaccca

SEQ ID NO: 251930 - RNA, 32 nt, Human
ugcccgccggcccgcggcuccugggccuccca

SEQ ID NO: 251931 - RNA, 32 nt, Human
ugcccgccuccuaucagccucugggaaggcca

SEQ ID NO: 251932 - RNA, 32 nt, Human
ugcccgccucugccgggagggagggaggcaca

SEQ ID NO: 251933 - RNA, 32 nt, Human
ugcccgccugcccccauccccuccaggccacg

SEQ ID NO: 251934 - RNA, 32 nt, Human
ugcccgccugcccgugggucauggccugccag

SEQ ID NO: 251935 - RNA, 22 nt, Human
ugcccgcgccacccgcagcccc

SEQ ID NO: 251936 - RNA, 21 nt, Human
ugcccgcuacucccacucuca

SEQ ID NO: 251937 - RNA, 32 nt, Human
ugcccgcuaugggcuguguccaugaccagagg

SEQ ID NO: 251938 - RNA, 21 nt, Human
ugcccgcucaccccacuccac

SEQ ID NO: 251939 - RNA, 32 nt, Human
ugcccgcucaccuggaugaccaugccucaccu

SEQ ID NO: 251940 - RNA, 32 nt, Human
ugcccgcuccagccucuccagugcugggagag

SEQ ID NO: 251941 - RNA, 32 nt, Human
ugcccgcugccucuugucuagcugcugucagg

SEQ ID NO: 251942 - RNA, 32 nt, Human
ugcccgcuggacagcacuaucucuaccagcgg

SEQ ID NO: 251943 - RNA, 32 nt, Human
ugcccgcuggagacaguguuugucgugggcgu

SEQ ID NO: 251944 - RNA, 32 nt, Human
ugcccgcuuccgcuguccugguguuuuacuac

SEQ ID NO: 251945 - RNA, 32 nt, Human
ugcccggaaguuggucuuccauggacaacaca

SEQ ID NO: 251946 - RNA, 32 nt, Human
ugcccggacccgacaccgccacccucgcuccc

SEQ ID NO: 251947 - RNA, 32 nt, Human
ugcccggagccccagccccaggggaccaugcc

SEQ ID NO: 251948 - RNA, 32 nt, Human
ugcccggagccuggaggagcugcugcuggacg

SEQ ID NO: 251949 - RNA, 17 nt, Human
ugcccggagcgcggcgg

SEQ ID NO: 251950 - RNA, 25 nt, Human
ugcccggagcuggccgugucuccca

SEQ ID NO: 251951 - RNA, 23 nt, Human
ugcccggccaaggccacgccggc

SEQ ID NO: 251952 - RNA, 32 nt, Human
ugcccggccagcugcgccacggaugccuccag

SEQ ID NO: 251953 - RNA, 32 nt, Human
ugcccggccaucauuccuuuuuacugcugacu

SEQ ID NO: 251954 - RNA, 24 nt, Human
ugcccggcccaccccuccaagggg

SEQ ID NO: 251955 - RNA, 32 nt, Human
ugcccggcccaggagcgcagcugcauuugggg

SEQ ID NO: 251956 - RNA, 22 nt, Human
ugcccggcccggcccucccugg

SEQ ID NO: 251957 - RNA, 32 nt, Human
ugcccggcccgguuuacccaggagaggauggg

SEQ ID NO: 251958 - RNA, 32 nt, Human
ugcccggcccuugagcuucuugcccacugucu

SEQ ID NO: 251959 - RNA, 32 nt, Human
ugcccggccuccguugagguucuugauggaga

SEQ ID NO: 251960 - RNA, 32 nt, Human
ugcccggccucugugccccaacugugcuuggu

SEQ ID NO: 251961 - RNA, 32 nt, Human
ugcccggccugauguuuuugaaugauuaugaa

SEQ ID NO: 251962 - RNA, 32 nt, Human
ugcccgggaccaccucaucagagaugcuuacu

SEQ ID NO: 251963 - RNA, 32 nt, Human
ugcccgggacgaggaggaggaggaggaagagg

SEQ ID NO: 251964 - RNA, 32 nt, Human
ugcccgggacgcccccucccaggggucaggcu

SEQ ID NO: 251965 - RNA, 24 nt, Human
ugcccgggacuuuuccagcucucc

SEQ ID NO: 251966 - RNA, 32 nt, Human
ugcccgggaggaacgccggcguccagcccgcu

SEQ ID NO: 251967 - RNA, 32 nt, Human
ugcccgggcacgacagccuggugcacagccga

SEQ ID NO: 251968 - RNA, 32 nt, Human
ugcccgggcaggcuucacuguggucacauccg

SEQ ID NO: 251969 - RNA, 32 nt, Human
ugcccgggccauggcgaccugcauuuggcugc

SEQ ID NO: 251970 - RNA, 32 nt, Human
ugcccgggcccaagcccugccccuccagaguc

SEQ ID NO: 251971 - RNA, 32 nt, Human
ugcccgggcugccucucccccgcuagggccug

SEQ ID NO: 251972 - RNA, 21 nt, Human
ugcccgggcuggaaugcaaug

SEQ ID NO: 251973 - RNA, 21 nt, Human
ugcccgggcuggagugcaaug

SEQ ID NO: 251974 - RNA, 32 nt, Human
ugcccggggagggagacggagcaguacuggcc

SEQ ID NO: 251975 - RNA, 32 nt, Human
ugcccggggagucccgccugaccugccuucau

SEQ ID NO: 251976 - RNA, 32 nt, Human
ugcccgggggcuggucacgcuggagucccugg

SEQ ID NO: 251977 - RNA, 32 nt, Human
ugcccgguacuaggaaggagugagguguguuc

SEQ ID NO: 251978 - RNA, 32 nt, Human
ugcccggucaccaugggggucagguuauuuuu

SEQ ID NO: 251979 - RNA, 32 nt, Human
ugcccggucaguacacaugcuguaccuccugc

SEQ ID NO: 251980 - RNA, 21 nt, Human
ugcccggugcccacccugcug

SEQ ID NO: 251981 - RNA, 32 nt, Human
ugcccgguguaucucaguggccaucugccaug

SEQ ID NO: 251982 - RNA, 22 nt, Human
ugcccgguucccccagggacag

SEQ ID NO: 251983 - RNA, 24 nt, Human
ugcccguaaucccagcuacucagg

SEQ ID NO: 251984 - RNA, 32 nt, Human
ugcccguagcuugccaggucuccuacccacac

SEQ ID NO: 251985 - RNA, 19 nt, Human
ugcccguauccagagugau

SEQ ID NO: 251986 - RNA, 32 nt, Human
ugcccgucacacuugaggacaccaaggcugug

SEQ ID NO: 251987 - RNA, 32 nt, Human
ugcccgucagcggggaguggaacucaucaggc

SEQ ID NO: 251988 - RNA, 32 nt, Human
ugcccguccgagaggcagagcugacaaggaag

SEQ ID NO: 251989 - RNA, 32 nt, Human
ugcccguccucgggaagaaguggacccaacca

SEQ ID NO: 251990 - RNA, 32 nt, Human
ugcccgucuccccuccuccaucagacacaccu

SEQ ID NO: 251991 - RNA, 32 nt, Human
ugcccgucucugagacagucucuguguggaau

SEQ ID NO: 251992 - RNA, 32 nt, Human
ugcccgugauggggucaucguucuccaugacc

SEQ ID NO: 251993 - RNA, 19 nt, Human
ugcccgugcacagcaucau

SEQ ID NO: 251994 - RNA, 18 nt, Human
ugcccgugcauagcucau

SEQ ID NO: 251995 - RNA, 32 nt, Human
ugcccguggagugcaggagcgaaggggcuggc

SEQ ID NO: 251996 - RNA, 32 nt, Human
ugcccguggcucugcugccgcccacucccugc

SEQ ID NO: 251997 - RNA, 32 nt, Human
ugcccgugggaggauguacuuaucucagaugc

SEQ ID NO: 251998 - RNA, 31 nt, Human
ugcccgugggugggaugggaguggaggguuc

SEQ ID NO: 251999 - RNA, 32 nt, Human
ugcccgugugacuccucuggccugugucuagu

SEQ ID NO: 252000 - RNA, 32 nt, Human
ugcccgugugccccagggcaggaaagcaucuc

SEQ ID NO: 252001 - RNA, 32 nt, Human
ugcccguuagacaaaggaaaggccccaagucc

SEQ ID NO: 252002 - RNA, 20 nt, Human
ugcccguuugccuguuccua

SEQ ID NO: 252003 - RNA, 32 nt, Human
ugcccuaauauuuaaaauuuacacuucuaaga

SEQ ID NO: 252004 - RNA, 32 nt, Human
ugcccuaauugagguauauuucugaauaguuu

SEQ ID NO: 252005 - RNA, 32 nt, Human
ugcccuacagggucucaugccauuccgaccuu

SEQ ID NO: 252006 - RNA, 32 nt, Human
ugcccuacgggaacuccacucucccagcccca

SEQ ID NO: 252007 - RNA, 32 nt, Human
ugcccuagaaauacauuuacaggcauguugaa

SEQ ID NO: 252008 - RNA, 32 nt, Human
ugcccuagacuggagugcaauggcgccaucuc

SEQ ID NO: 252009 - RNA, 20 nt, Human
ugcccuaugaaaacuuuaaa

SEQ ID NO: 252010 - RNA, 32 nt, Human
ugcccuauuccucuccuccuccuccuccuggg

SEQ ID NO: 252011 - RNA, 32 nt, Human
ugcccuauucuccucaucuccccaucauuggu

SEQ ID NO: 252012 - RNA, 32 nt, Human
ugcccucaagccccagagagccccucauccuu

SEQ ID NO: 252013 - RNA, 32 nt, Human
ugcccucaccucacccuuuuccaacuugccca

SEQ ID NO: 252014 - RNA, 23 nt, Human
ugcccucaccugacuuugugucc

SEQ ID NO: 252015 - RNA, 21 nt, Human
ugcccucagaccauccaggug

SEQ ID NO: 252016 - RNA, 32 nt, Human
ugcccucagccccacuucucagccugguacuu

SEQ ID NO: 252017 - RNA, 32 nt, Human
ugcccucagccuguugcccugccucccaaacc

SEQ ID NO: 252018 - RNA, 32 nt, Human
ugcccucaggaccugccugaccugccagugau

SEQ ID NO: 252019 - RNA, 20 nt, Human
ugcccucaggugguccacca

SEQ ID NO: 252020 - RNA, 32 nt, Human
ugcccucaguggcuggauugcagccacccaug

SEQ ID NO: 252021 - RNA, 32 nt, Human
ugcccucauaacuguugcucuggauggaccug

SEQ ID NO: 252022 - RNA, 32 nt, Human
ugcccucauccacaauguccccaaagccaucc

SEQ ID NO: 252023 - RNA, 32 nt, Human
ugcccuccacagccaccuggucagccaccagc

SEQ ID NO: 252024 - RNA, 32 nt, Human
ugcccuccaccuggcuggagagauggcacauc

SEQ ID NO: 252025 - RNA, 32 nt, Human
ugcccuccacgccuccaaucccccaccuccac

SEQ ID NO: 252026 - RNA, 32 nt, Human
ugcccuccagccuggaugacagagugagaucu

SEQ ID NO: 252027 - RNA, 32 nt, Human
ugcccuccagccugggcaauagagcaagacuc

SEQ ID NO: 252028 - RNA, 32 nt, Human
ugcccuccagccugggugacagagugagaccc

SEQ ID NO: 252029 - RNA, 32 nt, Human
ugcccuccagccugggugacagagugagauuc

SEQ ID NO: 252030 - RNA, 32 nt, Human
ugcccuccagguguacuuuaggccuguggagg

SEQ ID NO: 252031 - RNA, 32 nt, Human
ugcccuccaucccgccagguacggcgacagcc

SEQ ID NO: 252032 - RNA, 25 nt, Human
ugcccucccaaagugcugggauuac

SEQ ID NO: 252033 - RNA, 32 nt, Human
ugcccucccagugguugguaugugggaagccc

SEQ ID NO: 252034 - RNA, 32 nt, Human
ugcccucccccaggaacaugcacgcucacucu

SEQ ID NO: 252035 - RNA, 32 nt, Human
ugcccucccccuccucuccaccaucgucuucu

SEQ ID NO: 252036 - RNA, 32 nt, Human
ugcccucccccuuagcucacagugccugcggu

SEQ ID NO: 252037 - RNA, 22 nt, Human
ugcccuccccggccccggggug

SEQ ID NO: 252038 - RNA, 32 nt, Human
ugcccuccccuccaaaauuuuuauauugaaau

SEQ ID NO: 252039 - RNA, 32 nt, Human
ugcccuccccucucccccaggcucuuucucca

SEQ ID NO: 252040 - RNA, 32 nt, Human
ugcccuccccugucccccucucgccgcccgcc

SEQ ID NO: 252041 - RNA, 32 nt, Human
ugcccucccucagacccagggccauccucaga

SEQ ID NO: 252042 - RNA, 32 nt, Human
ugcccucccucuuacccugccucuguguuucg

SEQ ID NO: 252043 - RNA, 32 nt, Human
ugcccucccugacccuauagccccaggccuca

SEQ ID NO: 252044 - RNA, 21 nt, Human
ugcccucccugcccugggcag

SEQ ID NO: 252045 - RNA, 24 nt, Human
ugcccucccugccuuccccagggu

SEQ ID NO: 252046 - RNA, 32 nt, Human
ugcccuccgcaggccgggccuccugggcgccc

SEQ ID NO: 252047 - RNA, 23 nt, Human
ugcccuccgcucccuccggggug

SEQ ID NO: 252048 - RNA, 32 nt, Human
ugcccuccuacagcacuccaccuugggaccug

SEQ ID NO: 252049 - RNA, 32 nt, Human
ugcccuccucaccccaccucugcuguccuuuc

SEQ ID NO: 252050 - RNA, 32 nt, Human
ugcccuccucaccuguugccggcaugcgggua

SEQ ID NO: 252051 - RNA, 32 nt, Human
ugcccuccuccccucucagccuccucuuuagc

SEQ ID NO: 252052 - RNA, 32 nt, Human
ugcccuccuccucccaguuucucccucuuauu

SEQ ID NO: 252053 - RNA, 32 nt, Human
ugcccuccuccucgugcuguguuuucuagugc

SEQ ID NO: 252054 - RNA, 18 nt, Human
ugcccuccucucuccagg

SEQ ID NO: 252055 - RNA, 32 nt, Human
ugcccuccucuuccuuccucuuuauagggaga

SEQ ID NO: 252056 - RNA, 32 nt, Human
ugcccuccugagccuccgccuucccagcagcg

SEQ ID NO: 252057 - RNA, 32 nt, Human
ugcccuccugcccacccucccacccacccgac

SEQ ID NO: 252058 - RNA, 24 nt, Human
ugcccuccugcuccccccacccca

SEQ ID NO: 252059 - RNA, 32 nt, Human
ugcccuccugcucucccaugaggguuauugaa

SEQ ID NO: 252060 - RNA, 32 nt, Human
ugcccuccugugggcauggcucagguugugcg

SEQ ID NO: 252061 - RNA, 32 nt, Human
ugcccuccuucaccuaauagcuucuggacuaa

SEQ ID NO: 252062 - RNA, 32 nt, Human
ugcccuccuugcaaguagcuccagaaauaauu

SEQ ID NO: 252063 - RNA, 32 nt, Human
ugcccuccuugcacuccggacgugagcauucg

SEQ ID NO: 252064 - RNA, 21 nt, Human
ugcccucgccgccgccggcac

SEQ ID NO: 252065 - RNA, 32 nt, Human
ugcccucggaggccggcguggggaagauggcc

SEQ ID NO: 252066 - RNA, 32 nt, Human
ugcccucgucguuccuccuccuuccauuugac

SEQ ID NO: 252067 - RNA, 21 nt, Human
ugcccucuaacaucggacucc

SEQ ID NO: 252068 - RNA, 32 nt, Human
ugcccucuaccuaguuauuagugcaaauauuu

SEQ ID NO: 252069 - RNA, 32 nt, Human
ugcccucuagcaggccaggccucccaguggga

SEQ ID NO: 252070 - RNA, 32 nt, Human
ugcccucucaggccggcagccccagccugcua

SEQ ID NO: 252071 - RNA, 32 nt, Human
ugcccucuccccucagccucuccccugccugc

SEQ ID NO: 252072 - RNA, 32 nt, Human
ugcccucucccuuccuggcacucucauguugc

SEQ ID NO: 252073 - RNA, 32 nt, Human
ugcccucuccucacuccucuggacuuggcccu

SEQ ID NO: 252074 - RNA, 32 nt, Human
ugcccucuccucuauacuuucuuccaaugcag

SEQ ID NO: 252075 - RNA, 32 nt, Human
ugcccucuccuugccagcuucuccccaggcca

SEQ ID NO: 252076 - RNA, 32 nt, Human
ugcccucucgccaggcuggaguguaguggcac

SEQ ID NO: 252077 - RNA, 32 nt, Human
ugcccucucuccuaccuccaccuucucagaug

SEQ ID NO: 252078 - RNA, 32 nt, Human
ugcccucucuugacuccagccuagggaauggu

SEQ ID NO: 252079 - RNA, 20 nt, Human
ugcccucugccguccagaug

SEQ ID NO: 252080 - RNA, 32 nt, Human
ugcccucugccugggccucggucccuccugca

SEQ ID NO: 252081 - RNA, 32 nt, Human
ugcccucugcuccccagugcuaccucucucuu

SEQ ID NO: 252082 - RNA, 32 nt, Human
ugcccucuggauucucugggucuauguaggcc

SEQ ID NO: 252083 - RNA, 32 nt, Human
ugcccucugggcugagaaggaugcacuuugga

SEQ ID NO: 252084 - RNA, 32 nt, Human
ugcccucuggggacaugcggagugggggucuu

SEQ ID NO: 252085 - RNA, 32 nt, Human
ugcccucuuccuccucuuuccuggaagaagua

SEQ ID NO: 252086 - RNA, 32 nt, Human
ugcccucuugugagcagcaauaccucacuuuu

SEQ ID NO: 252087 - RNA, 32 nt, Human
ugcccucuuucagggguccuaagcccacaauc

SEQ ID NO: 252088 - RNA, 32 nt, Human
ugcccucuuuguuuccuuaucucccucagacg

SEQ ID NO: 252089 - RNA, 32 nt, Human
ugcccugaaaaggaaaggaaaagggaagcuuc

SEQ ID NO: 252090 - RNA, 32 nt, Human
ugcccugaaauuggacauauugccaagcaagc

SEQ ID NO: 252091 - RNA, 21 nt, Human
ugcccugaagcugacugcagu

SEQ ID NO: 252092 - RNA, 32 nt, Human
ugcccugaauguacccugccucugcuuucucc

SEQ ID NO: 252093 - RNA, 18 nt, Human
ugcccugaauuaggggga

SEQ ID NO: 252094 - RNA, 32 nt, Human
ugcccugaccccuuguucccuggaccagggug

SEQ ID NO: 252095 - RNA, 32 nt, Human
ugcccugagccacggccgucucugauucuccc

SEQ ID NO: 252096 - RNA, 32 nt, Human
ugcccugagccaggcucucgaggucccggccc

SEQ ID NO: 252097 - RNA, 21 nt, Human
ugcccugagcccacccugcug

SEQ ID NO: 252098 - RNA, 32 nt, Human
ugcccugagcccaggaguccaagggcagggug

SEQ ID NO: 252099 - RNA, 32 nt, Human
ugcccugaggagaaggcugaagacugaggaau

SEQ ID NO: 252100 - RNA, 32 nt, Human
ugcccugaggcagccucugccuaccuagaucu

SEQ ID NO: 252101 - RNA, 22 nt, Human
ugcccugaggcugggcacagug

SEQ ID NO: 252102 - RNA, 18 nt, Human
ugcccugagggggcgccu

SEQ ID NO: 252103 - RNA, 32 nt, Human
ugcccugauuaugcacgucugcuccugagugg

SEQ ID NO: 252104 - RNA, 32 nt, Human
ugcccugcaaagauggggcugaaggaaguccu

SEQ ID NO: 252105 - RNA, 21 nt, Human
ugcccugcacaccggugcccg

SEQ ID NO: 252106 - RNA, 32 nt, Human
ugcccugcacccuggggagaggaccagggaug

SEQ ID NO: 252107 - RNA, 32 nt, Human
ugcccugcagaggcgguuggcagugccgccug

SEQ ID NO: 252108 - RNA, 27 nt, Human
ugcccugcauagccgccugcgaccccg

SEQ ID NO: 252109 - RNA, 19 nt, Human
ugcccugccaagccuggag

SEQ ID NO: 252110 - RNA, 32 nt, Human
ugcccugccaucccgucugccugccaugggac

SEQ ID NO: 252111 - RNA, 32 nt, Human
ugcccugccauccugaccuccagagcccucac

SEQ ID NO: 252112 - RNA, 32 nt, Human
ugcccugcccgccgccacuggggaaggcccag

SEQ ID NO: 252113 - RNA, 32 nt, Human
ugcccugcccucucagcuugugagacaacaca

SEQ ID NO: 252114 - RNA, 32 nt, Human
ugcccugcccugcagugucugcucagcuccca

SEQ ID NO: 252115 - RNA, 32 nt, Human
ugcccugcccugcccuguuccgcaugagcugc

SEQ ID NO: 252116 - RNA, 32 nt, Human
ugcccugcccuugcugcccugccugucacgug

SEQ ID NO: 252117 - RNA, 32 nt, Human
ugcccugccucuccaucucucaccaaggcugc

SEQ ID NO: 252118 - RNA, 32 nt, Human
ugcccugccuguugagccccauucuacauccc

SEQ ID NO: 252119 - RNA, 21 nt, Human
ugcccugcgccucagcccgcg

SEQ ID NO: 252120 - RNA, 32 nt, Human
ugcccugcguggcugccagcuggcccaggauu

SEQ ID NO: 252121 - RNA, 32 nt, Human
ugcccugcuaucuccagcugcugagcagcuga

SEQ ID NO: 252122 - RNA, 32 nt, Human
ugcccugcuccugugugcaguugggguagggg

SEQ ID NO: 252123 - RNA, 22 nt, Human
ugcccugcucucuggggacaga

SEQ ID NO: 252124 - RNA, 32 nt, Human
ugcccugcugccugcacacugcaugccugccc

SEQ ID NO: 252125 - RNA, 29 nt, Human
ugcccugcuggccucucaucccccuucuu

SEQ ID NO: 252126 - RNA, 32 nt, Human
ugcccugcugucucuggacuucccaucggccc

SEQ ID NO: 252127 - RNA, 32 nt, Human
ugcccugcuugguguuuugcaggaugauggug

SEQ ID NO: 252128 - RNA, 32 nt, Human
ugcccuggaagccccuccccucucacacugac

SEQ ID NO: 252129 - RNA, 19 nt, Human
ugcccuggaccagccugga

SEQ ID NO: 252130 - RNA, 32 nt, Human
ugcccuggacugcucacucucuggucucaauu

SEQ ID NO: 252131 - RNA, 32 nt, Human
ugcccuggacugcucacucucuggucuuaauu

SEQ ID NO: 252132 - RNA, 32 nt, Human
ugcccuggagugaccccuaccaggggagaagc

SEQ ID NO: 252133 - RNA, 32 nt, Human
ugcccuggcacagcugcaugcacuucaagggc

SEQ ID NO: 252134 - RNA, 32 nt, Human
ugcccuggcccagccuggcugggucuuggagg

SEQ ID NO: 252135 - RNA, 20 nt, Human
ugcccuggcccuuucuuccu

SEQ ID NO: 252136 - RNA, 32 nt, Human
ugcccuggccugcuucccagcacacacuucuu

SEQ ID NO: 252137 - RNA, 18 nt, Human
ugcccuggccuucuugca

SEQ ID NO: 252138 - RNA, 32 nt, Human
ugcccuggcuacugcuggcuuucuucauggcc

SEQ ID NO: 252139 - RNA, 32 nt, Human
ugcccuggcucacgucccccuucaccacuggc

SEQ ID NO: 252140 - RNA, 32 nt, Human
ugcccuggcuccauggggcccagcacaagcuc

SEQ ID NO: 252141 - RNA, 32 nt, Human
ugcccuggcugaugaccacuaguggggagccg

SEQ ID NO: 252142 - RNA, 32 nt, Human
ugcccuggcugcagucagugcccagggcgagg

SEQ ID NO: 252143 - RNA, 32 nt, Human
ugcccugggaagggaaggagcacugauuuggg

SEQ ID NO: 252144 - RNA, 32 nt, Human
ugcccugggaccccgccuggacuccccagccu

SEQ ID NO: 252145 - RNA, 32 nt, Human
ugcccugggagaccuggggugggcagggaacc

SEQ ID NO: 252146 - RNA, 32 nt, Human
ugcccugggaggcagugauggguuaguggaug

SEQ ID NO: 252147 - RNA, 32 nt, Human
ugcccugggaugccuacccugcccaccuccgg

SEQ ID NO: 252148 - RNA, 32 nt, Human
ugcccugggccagccuuugugaagugggcccc

SEQ ID NO: 252149 - RNA, 21 nt, Human
ugcccugggcccaccacugcc

SEQ ID NO: 252150 - RNA, 32 nt, Human
ugcccugggcugaggccaggcugcuccagggg

SEQ ID NO: 252151 - RNA, 18 nt, Human
ugcccugggcugcugccu

SEQ ID NO: 252152 - RNA, 32 nt, Human
ugcccugggcuggcuggcgugaguugucugcg

SEQ ID NO: 252153 - RNA, 31 nt, Human
ugcccugggcuuuggccuugccagggaacuu

SEQ ID NO: 252154 - RNA, 23 nt, Human
ugcccuggugauccacccgccuc

SEQ ID NO: 252155 - RNA, 32 nt, Human
ugcccuggugcuguaucugcccccuuuucaca

SEQ ID NO: 252156 - RNA, 32 nt, Human
ugcccuggugcuguaucugcccucuuuucaca

SEQ ID NO: 252157 - RNA, 32 nt, Human
ugcccugguggcaguggcugaaguggcggcgg

SEQ ID NO: 252158 - RNA, 32 nt, Human
ugcccugguguguccuccucucuacugacuac

SEQ ID NO: 252159 - RNA, 32 nt, Human
ugcccuguagccugaagccuuggaggaagaaa

SEQ ID NO: 252160 - RNA, 32 nt, Human
ugcccugucacccaggcuggagugcaauggug

SEQ ID NO: 252161 - RNA, 32 nt, Human
ugcccugucacccaggcugggguacgguggca

SEQ ID NO: 252162 - RNA, 32 nt, Human
ugcccuguccuccagauaccacuggcucacug

SEQ ID NO: 252163 - RNA, 32 nt, Human
ugcccuguccuguccuguccugacuucaucuc

SEQ ID NO: 252164 - RNA, 32 nt, Human
ugcccugucgccuggcuggaguggaguggcac

SEQ ID NO: 252165 - RNA, 32 nt, Human
ugcccugucuccugggaucagaggguaguaca

SEQ ID NO: 252166 - RNA, 32 nt, Human
ugcccugugacuccgucauacucuccaaaggc

SEQ ID NO: 252167 - RNA, 32 nt, Human
ugcccugugcacugcaaggccaccuggugucg

SEQ ID NO: 252168 - RNA, 32 nt, Human
ugcccugugcuuccuguacagcugcggaaccg

SEQ ID NO: 252169 - RNA, 32 nt, Human
ugcccuguggagcugcucaccuaaguuccugc

SEQ ID NO: 252170 - RNA, 32 nt, Human
ugcccuguggaucaagucuagggggccucagg

SEQ ID NO: 252171 - RNA, 32 nt, Human
ugcccuguggcaccccagcucacugggagucu

SEQ ID NO: 252172 - RNA, 19 nt, Human
ugcccuguggcacccucug

SEQ ID NO: 252173 - RNA, 23 nt, Human
ugcccuguggcugccugcacccc

SEQ ID NO: 252174 - RNA, 32 nt, Human
ugcccuguggcugggcuggagugcaauggcgc

SEQ ID NO: 252175 - RNA, 32 nt, Human
ugcccugugguguuuggcaugugcccccuguc

SEQ ID NO: 252176 - RNA, 32 nt, Human
ugcccuguguguggacagccugugggagacuc

SEQ ID NO: 252177 - RNA, 32 nt, Human
ugcccuguuccccaccuccuggcuccagucca

SEQ ID NO: 252178 - RNA, 32 nt, Human
ugcccuguucccguuccucccugcugcucucu

SEQ ID NO: 252179 - RNA, 32 nt, Human
ugcccuguuccuugcccaccucaggccuggug

SEQ ID NO: 252180 - RNA, 23 nt, Human
ugcccuguucucucucagugcca

SEQ ID NO: 252181 - RNA, 32 nt, Human
ugcccuguugccaggcuggaaugcaguggcgu

SEQ ID NO: 252182 - RNA, 32 nt, Human
ugcccuguugcccaggcuggagagcaguggug

SEQ ID NO: 252183 - RNA, 32 nt, Human
ugcccuguugcccaggcuggaguauaguagug

SEQ ID NO: 252184 - RNA, 32 nt, Human
ugcccuguugcccaggcuggagugcaguggca

SEQ ID NO: 252185 - RNA, 32 nt, Human
ugcccuguugcccaugcuggagugcaauggca

SEQ ID NO: 252186 - RNA, 32 nt, Human
ugcccuguuggugaggagggucggaggggcga

SEQ ID NO: 252187 - RNA, 32 nt, Human
ugcccuuaaaacugggcccugaagacgguucc

SEQ ID NO: 252188 - RNA, 19 nt, Human
ugcccuuaaguacaguggu

SEQ ID NO: 252189 - RNA, 32 nt, Human
ugcccuuaauccucuacuacugccugcucuuc

SEQ ID NO: 252190 - RNA, 21 nt, Human
ugcccuuaggauucacugcuc

SEQ ID NO: 252191 - RNA, 32 nt, Human
ugcccuucaccaugagagggugcagugagaag

SEQ ID NO: 252192 - RNA, 32 nt, Human
ugcccuucaguuauuuauagcuggagcuggag

SEQ ID NO: 252193 - RNA, 32 nt, Human
ugcccuuccagccugaagaucugggggcacag

SEQ ID NO: 252194 - RNA, 32 nt, Human
ugcccuuccuaccccuuccucccuucagucag

SEQ ID NO: 252195 - RNA, 26 nt, Human
ugcccuuccucucuggcuauagcucu

SEQ ID NO: 252196 - RNA, 32 nt, Human
ugcccuuccucuucccccuuccacccucacau

SEQ ID NO: 252197 - RNA, 32 nt, Human
ugcccuuccuuccccuguccuuucauuucucu

SEQ ID NO: 252198 - RNA, 19 nt, Human
ugcccuuccuugccuugca

SEQ ID NO: 252199 - RNA, 21 nt, Human
ugcccuuccuuucccuggggu

SEQ ID NO: 252200 - RNA, 32 nt, Human
ugcccuucucaggccugcuccccacccucuau

SEQ ID NO: 252201 - RNA, 32 nt, Human
ugcccuucuccaggauggcagaggcggaauug

SEQ ID NO: 252202 - RNA, 32 nt, Human
ugcccuucucccaggcccccagacagaagaga

SEQ ID NO: 252203 - RNA, 32 nt, Human
ugcccuucucccucccgcuccugggcggaggc

SEQ ID NO: 252204 - RNA, 32 nt, Human
ugcccuucuccuccacaaaggucuggcugguu

SEQ ID NO: 252205 - RNA, 32 nt, Human
ugcccuucuccuccuuccuggcugggaaugaa

SEQ ID NO: 252206 - RNA, 32 nt, Human
ugcccuucucuucuuuauuccucucuccucuu

SEQ ID NO: 252207 - RNA, 32 nt, Human
ugcccuucucuugcugccuccugggcagggcc

SEQ ID NO: 252208 - RNA, 24 nt, Human
ugcccuucuuggccuguggcgcug

SEQ ID NO: 252209 - RNA, 32 nt, Human
ugcccuugaaagucaccugaggaaguuucccc

SEQ ID NO: 252210 - RNA, 32 nt, Human
ugcccuugaauuggaaggaauggagauuaggg

SEQ ID NO: 252211 - RNA, 32 nt, Human
ugcccuugaugucccucaauaggaucaggagu

SEQ ID NO: 252212 - RNA, 32 nt, Human
ugcccuugcagggugggugagcucucaggccg

SEQ ID NO: 252213 - RNA, 32 nt, Human
ugcccuugccauccucccaucgaugugccacg

SEQ ID NO: 252214 - RNA, 32 nt, Human
ugcccuugcccucccuucuccaugcucauuaa

SEQ ID NO: 252215 - RNA, 32 nt, Human
ugcccuugccugagguugcagucugcgguucc

SEQ ID NO: 252216 - RNA, 21 nt, Human
ugcccuugcucagucgugcug

SEQ ID NO: 252217 - RNA, 32 nt, Human
ugcccuugcucucuaacuucugagcccaccuc

SEQ ID NO: 252218 - RNA, 32 nt, Human
ugcccuuggcccguuccuuggcugccccggcu

SEQ ID NO: 252219 - RNA, 32 nt, Human
ugcccuuggcugccagccuacccugccugcac

SEQ ID NO: 252220 - RNA, 32 nt, Human
ugcccuugggagucgcuguugggagccggagc

SEQ ID NO: 252221 - RNA, 32 nt, Human
ugcccuuggggagggggagggaugaccagcuc

SEQ ID NO: 252222 - RNA, 21 nt, Human
ugcccuuggggcaccugcuca

SEQ ID NO: 252223 - RNA, 24 nt, Human
ugcccuugugauccacccaccuca

SEQ ID NO: 252224 - RNA, 32 nt, Human
ugcccuuguggaauauuggagucucuauggau

SEQ ID NO: 252225 - RNA, 32 nt, Human
ugcccuuguuccuggcagcagggacgacggga

SEQ ID NO: 252226 - RNA, 32 nt, Human
ugcccuuuaucucucuuccuccugguuauuaa

SEQ ID NO: 252227 - RNA, 32 nt, Human
ugcccuuuccuggaaugcaaagaagguggaag

SEQ ID NO: 252228 - RNA, 32 nt, Human
ugcccuuuccugggcaugcuuggugacucaga

SEQ ID NO: 252229 - RNA, 32 nt, Human
ugcccuuucuuuccuucuuugcucacuuuacu

SEQ ID NO: 252230 - RNA, 32 nt, Human
ugcccuuugagacucacaugacuuucugguuu

SEQ ID NO: 252231 - RNA, 25 nt, Human
ugcccuuugccucugcucugcacag

SEQ ID NO: 252232 - RNA, 32 nt, Human
ugcccuuuuaaucuuuacuaguuauugugaga

SEQ ID NO: 252233 - RNA, 32 nt, Human
ugcccuuuucggaguauugcaaaggagcuaaa

SEQ ID NO: 252234 - RNA, 32 nt, Human
ugcccuuuuugguagguggugauuuugaggcu

SEQ ID NO: 252235 - RNA, 32 nt, Human
ugccgaaaaccuuuggacaguccagugucaac

SEQ ID NO: 252236 - RNA, 32 nt, Human
ugccgaaaccaccaaagggcaugucugauggg

SEQ ID NO: 252237 - RNA, 32 nt, Human
ugccgaaccuauacccauucuucagugccuag

SEQ ID NO: 252238 - RNA, 32 nt, Human
ugccgaagguccucgccagcaggaugaaguua

SEQ ID NO: 252239 - RNA, 32 nt, Human
ugccgacacugcagcagaaucucuccgggugg

SEQ ID NO: 252240 - RNA, 32 nt, Human
ugccgacacuggcugguguggccgccacagag

SEQ ID NO: 252241 - RNA, 32 nt, Human
ugccgaccggcuucugcuucauggguuuucac

SEQ ID NO: 252242 - RNA, 32 nt, Human
ugccgacgcagggagcagagacuugccggcau

SEQ ID NO: 252243 - RNA, 32 nt, Human
ugccgacggacaccagcgaggggccaggccgg

SEQ ID NO: 252244 - RNA, 32 nt, Human
ugccgacuccuggguugagcuguugccucagu

SEQ ID NO: 252245 - RNA, 32 nt, Human
ugccgacuucuucuccccagagccuggcuuuu

SEQ ID NO: 252246 - RNA, 32 nt, Human
ugccgagaccucaagcccugaggggcaguccc

SEQ ID NO: 252247 - RNA, 32 nt, Human
ugccgagaggggcaggugccagccuccacugg

SEQ ID NO: 252248 - RNA, 32 nt, Human
ugccgagauggcccugagcgacgaaccggccg

SEQ ID NO: 252249 - RNA, 22 nt, Human
ugccgagauugccaaaaugcuu

SEQ ID NO: 252250 - RNA, 32 nt, Human
ugccgagcaagucccugcagcuggccagggac

SEQ ID NO: 252251 - RNA, 25 nt, Human
ugccgagcccaggacgcccccggcc

SEQ ID NO: 252252 - RNA, 17 nt, Human
ugccgagccucuuugga

SEQ ID NO: 252253 - RNA, 32 nt, Human
ugccgaggaagaaaauggaaaugugguuccug

SEQ ID NO: 252254 - RNA, 32 nt, Human
ugccgaggaaugaagagaggcggccgggcccc

SEQ ID NO: 252255 - RNA, 32 nt, Human
ugccgaggacaggcacugggcaugcagcccca

SEQ ID NO: 252256 - RNA, 32 nt, Human
ugccgaggacaguggggaggagaggagagggg

SEQ ID NO: 252257 - RNA, 32 nt, Human
ugccgaggccagccuuccuuccugcucugcuc

SEQ ID NO: 252258 - RNA, 32 nt, Human
ugccgaggcugaaggagucucgcucccacgag

SEQ ID NO: 252259 - RNA, 21 nt, Human
ugccgaggcuggagugcaaug

SEQ ID NO: 252260 - RNA, 32 nt, Human
ugccgagggaggaagagcaggauucgcacccc

SEQ ID NO: 252261 - RNA, 32 nt, Human
ugccgagggcuggccgggacugcugcucuccc

SEQ ID NO: 252262 - RNA, 32 nt, Human
ugccgagguggagguaguggaggaagcuaagu

SEQ ID NO: 252263 - RNA, 21 nt, Human
ugccgaguguccgcccaggcc

SEQ ID NO: 252264 - RNA, 32 nt, Human
ugccgaucaaggcucuggcauucagagaaccc

SEQ ID NO: 252265 - RNA, 32 nt, Human
ugccgcaagggcuuucugcucuggccuuaacu

SEQ ID NO: 252266 - RNA, 20 nt, Human
ugccgcacacgacuccugaa

SEQ ID NO: 252267 - RNA, 32 nt, Human
ugccgcacagcccagcaggagggaggcggaca

SEQ ID NO: 252268 - RNA, 32 nt, Human
ugccgcacagccgcaggugcaccuccaggcca

SEQ ID NO: 252269 - RNA, 32 nt, Human
ugccgcaccgcugcaguggcucagccacaggg

SEQ ID NO: 252270 - RNA, 32 nt, Human
ugccgcacucugcugcuaugagcuuccucaaa

SEQ ID NO: 252271 - RNA, 32 nt, Human
ugccgcagacucugcaaccuucaugcugcccg

SEQ ID NO: 252272 - RNA, 32 nt, Human
ugccgcagcugacggggaaacugaggcacgga

SEQ ID NO: 252273 - RNA, 32 nt, Human
ugccgcagcugccucccuucucucggaaccca

SEQ ID NO: 252274 - RNA, 32 nt, Human
ugccgcagggagggugcguggggaagaugcuu

SEQ ID NO: 252275 - RNA, 32 nt, Human
ugccgcagggauggggcagcugugcuggcugc

SEQ ID NO: 252276 - RNA, 32 nt, Human
ugccgcagucaccacaggguucugagaacauu

SEQ ID NO: 252277 - RNA, 32 nt, Human
ugccgcaguggagccagcacagcggauguuuu

SEQ ID NO: 252278 - RNA, 32 nt, Human
ugccgcaguucugccaccgucacugagaagcu

SEQ ID NO: 252279 - RNA, 32 nt, Human
ugccgcaucugccuggagccugggcagcaccu

SEQ ID NO: 252280 - RNA, 32 nt, Human
ugccgcaugccuguaaucccagcuacuugggu

SEQ ID NO: 252281 - RNA, 32 nt, Human
ugccgcauuccugcacucagaagucugcaggg

SEQ ID NO: 252282 - RNA, 21 nt, Human
ugccgccaccaccaccaccaa

SEQ ID NO: 252283 - RNA, 32 nt, Human
ugccgccaccgcaucgcgcagcucuuugccgu

SEQ ID NO: 252284 - RNA, 26 nt, Human
ugccgccaccgccgugccgccgccau

SEQ ID NO: 252285 - RNA, 32 nt, Human
ugccgccaccuucacaccgucugcccuggcca

SEQ ID NO: 252286 - RNA, 32 nt, Human
ugccgccacuggcugugccucccccgccaccu

SEQ ID NO: 252287 - RNA, 32 nt, Human
ugccgccagcugggcuguggucgggccgucgc

SEQ ID NO: 252288 - RNA, 32 nt, Human
ugccgccauaagaagacagagagaacugagua

SEQ ID NO: 252289 - RNA, 32 nt, Human
ugccgccaucucucccuuccugccucauuuca

SEQ ID NO: 252290 - RNA, 32 nt, Human
ugccgccaugcugccacucucaugccccugcg

SEQ ID NO: 252291 - RNA, 23 nt, Human
ugccgcccaaacuggagugcagu

SEQ ID NO: 252292 - RNA, 24 nt, Human
ugccgcccaaacuggagugcagug

SEQ ID NO: 252293 - RNA, 23 nt, Human
ugccgcccaggcgggagugcagu

SEQ ID NO: 252294 - RNA, 23 nt, Human
ugccgcccaggcuagagugcagu

SEQ ID NO: 252295 - RNA, 24 nt, Human
ugccgcccaggcuagagugcagug

SEQ ID NO: 252296 - RNA, 23 nt, Human
ugccgcccaggcuggacugcagu

SEQ ID NO: 252297 - RNA, 23 nt, Human
ugccgcccaggcuggagugcagu

SEQ ID NO: 252298 - RNA, 24 nt, Human
ugccgcccaggcuggagugcagug

SEQ ID NO: 252299 - RNA, 32 nt, Human
ugccgccccaacugcugccagaccaugugcug

SEQ ID NO: 252300 - RNA, 32 nt, Human
ugccgcccgugcccugcggcccugcacgcccc

SEQ ID NO: 252301 - RNA, 32 nt, Human
ugccgcccuucccaucgcucucuuccccuuca

SEQ ID NO: 252302 - RNA, 21 nt, Human
ugccgccgccaccgccaccac

SEQ ID NO: 252303 - RNA, 24 nt, Human
ugccgccgccaccgccgccgccgc

SEQ ID NO: 252304 - RNA, 23 nt, Human
ugccgccgcccuggggccgccgc

SEQ ID NO: 252305 - RNA, 32 nt, Human
ugccgccgccgccaccaccaucagcgcgcggg

SEQ ID NO: 252306 - RNA, 21 nt, Human
ugccgccgccgccacccccgc

SEQ ID NO: 252307 - RNA, 26 nt, Human
ugccgccgccgccaccgagccgccgc

SEQ ID NO: 252308 - RNA, 21 nt, Human
ugccgccgccgccaccgccac

SEQ ID NO: 252309 - RNA, 21 nt, Human
ugccgccgccgccgcccgccc

SEQ ID NO: 252310 - RNA, 22 nt, Human
ugccgccgccgccgcccgccgc

SEQ ID NO: 252311 - RNA, 19 nt, Human
ugccgccgccgccgccgcc

SEQ ID NO: 252312 - RNA, 20 nt, Human
ugccgccgccgccgccgcca

SEQ ID NO: 252313 - RNA, 21 nt, Human
ugccgccgccgccgccgccac

SEQ ID NO: 252314 - RNA, 20 nt, Human
ugccgccgccgccgccgccg

SEQ ID NO: 252315 - RNA, 21 nt, Human
ugccgccgccgccgccgccgc

SEQ ID NO: 252316 - RNA, 24 nt, Human
ugccgccgccgccgccgccgccgc

SEQ ID NO: 252317 - RNA, 18 nt, Human
ugccgccgccgccgcgcc

SEQ ID NO: 252318 - RNA, 21 nt, Human
ugccgccgccgccgcugccgc

SEQ ID NO: 252319 - RNA, 21 nt, Human
ugccgccgccgccuccaccau

SEQ ID NO: 252320 - RNA, 21 nt, Human
ugccgccgccgccugcgccgc

SEQ ID NO: 252321 - RNA, 19 nt, Human
ugccgccgccgcugccgcc

SEQ ID NO: 252322 - RNA, 24 nt, Human
ugccgccgccgcugccgccgccau

SEQ ID NO: 252323 - RNA, 30 nt, Human
ugccgccgccucuccaaguucuuguggccc

SEQ ID NO: 252324 - RNA, 20 nt, Human
ugccgccgcgccgccgccac

SEQ ID NO: 252325 - RNA, 24 nt, Human
ugccgccgcugccgccgccgccac

SEQ ID NO: 252326 - RNA, 32 nt, Human
ugccgccgcugccucugggcccucccagcaca

SEQ ID NO: 252327 - RNA, 32 nt, Human
ugccgccgggauuacaggcgugagccaccaug

SEQ ID NO: 252328 - RNA, 32 nt, Human
ugccgccuacuucuuccagcugggacuucagg

SEQ ID NO: 252329 - RNA, 32 nt, Human
ugccgccuccacccagccuccgccauggaccu

SEQ ID NO: 252330 - RNA, 32 nt, Human
ugccgccuccuccuagcgcuccugccucgccu

SEQ ID NO: 252331 - RNA, 32 nt, Human
ugccgccuccuucuucugcagcuccuggugcu

SEQ ID NO: 252332 - RNA, 32 nt, Human
ugccgccucgaaucaaccucucuccccaggca

SEQ ID NO: 252333 - RNA, 32 nt, Human
ugccgccugcacuccucagggcagccuccccc

SEQ ID NO: 252334 - RNA, 32 nt, Human
ugccgccugcacugcccuggggcacagacuag

SEQ ID NO: 252335 - RNA, 32 nt, Human
ugccgccugcuuccuguuccuggggacccgcu

SEQ ID NO: 252336 - RNA, 32 nt, Human
ugccgccuguaaucccagcuucucaggagucu

SEQ ID NO: 252337 - RNA, 32 nt, Human
ugccgccuguagucccagcuacucaggaggcu

SEQ ID NO: 252338 - RNA, 32 nt, Human
ugccgccuucucuccagccucugugccuuugu

SEQ ID NO: 252339 - RNA, 21 nt, Human
ugccgcgcaaggcucugugga

SEQ ID NO: 252340 - RNA, 32 nt, Human
ugccgcgcagccgccgcuccauccccagcccc

SEQ ID NO: 252341 - RNA, 32 nt, Human
ugccgcggagaauugcuuucugccauuguuau

SEQ ID NO: 252342 - RNA, 31 nt, Human
ugccgcgggacucugcaccuaccucacaggg

SEQ ID NO: 252343 - RNA, 32 nt, Human
ugccgcgggcggcaaagcccacggcaucugcc

SEQ ID NO: 252344 - RNA, 32 nt, Human
ugccgcggucaccccggccucugccucugucc

SEQ ID NO: 252345 - RNA, 21 nt, Human
ugccgcgucccugccccgacc

SEQ ID NO: 252346 - RNA, 32 nt, Human
ugccgcgugccuguaaucccagcuacuuggga

SEQ ID NO: 252347 - RNA, 22 nt, Human
ugccgcguuccgcgccccggcc

SEQ ID NO: 252348 - RNA, 32 nt, Human
ugccgcuacacuccagccugaugacagaccga

SEQ ID NO: 252349 - RNA, 32 nt, Human
ugccgcuagggagccgagacugccggaaagag

SEQ ID NO: 252350 - RNA, 32 nt, Human
ugccgcucagaggcuucagccugacuuccagc

SEQ ID NO: 252351 - RNA, 32 nt, Human
ugccgcucaggccucagaggcccugccgggca

SEQ ID NO: 252352 - RNA, 32 nt, Human
ugccgcuccgcccgcgccgccugcugccggcg

SEQ ID NO: 252353 - RNA, 32 nt, Human
ugccgcugcacuccagccugggagacugcauc

SEQ ID NO: 252354 - RNA, 32 nt, Human
ugccgcugcacuccagccugggggacagagca

SEQ ID NO: 252355 - RNA, 32 nt, Human
ugccgcugcacuccauucugggcaagagcuag

SEQ ID NO: 252356 - RNA, 32 nt, Human
ugccgcugcauccugcauccagcaccuaccuc

SEQ ID NO: 252357 - RNA, 32 nt, Human
ugccgcugcccagcagagcuggcuucuggguc

SEQ ID NO: 252358 - RNA, 32 nt, Human
ugccgcugcuaacccugccacuuuaaaaugac

SEQ ID NO: 252359 - RNA, 32 nt, Human
ugccgcuggggaagcaguugcgauuuagccau

SEQ ID NO: 252360 - RNA, 23 nt, Human
ugccgcugugccagguugaagua

SEQ ID NO: 252361 - RNA, 32 nt, Human
ugccgcuugccuggaagcugcguuaggagcga

SEQ ID NO: 252362 - RNA, 32 nt, Human
ugccggaagccgcgagaacagcggccgccuca

SEQ ID NO: 252363 - RNA, 32 nt, Human
ugccggaagggccgggcucaaagcuccgccuc

SEQ ID NO: 252364 - RNA, 32 nt, Human
ugccggacagaucccuuccucccuccgacuca

SEQ ID NO: 252365 - RNA, 32 nt, Human
ugccggacccuggggccucccaccccagccuc

SEQ ID NO: 252366 - RNA, 19 nt, Human
ugccggacgccagguguag

SEQ ID NO: 252367 - RNA, 32 nt, Human
ugccggacucggaggagcaggaggcgaggucc

SEQ ID NO: 252368 - RNA, 32 nt, Human
ugccggagaacagccaaguggcucagcugcca

SEQ ID NO: 252369 - RNA, 32 nt, Human
ugccggagccucccccuggaccccuggugccc

SEQ ID NO: 252370 - RNA, 32 nt, Human
ugccggaggauuccgcgggagaggaggagcag

SEQ ID NO: 252371 - RNA, 32 nt, Human
ugccggaggccuggcagcuccgcuaacuccau

SEQ ID NO: 252372 - RNA, 32 nt, Human
ugccggaguuguguucucaccacccacuuugu

SEQ ID NO: 252373 - RNA, 32 nt, Human
ugccggcaacaccagugccaggaaaaggccaa

SEQ ID NO: 252374 - RNA, 32 nt, Human
ugccggcaaucagccaugacugccuuugcacu

SEQ ID NO: 252375 - RNA, 32 nt, Human
ugccggcaccuugcugugagauuuccagcccc

SEQ ID NO: 252376 - RNA, 32 nt, Human
ugccggcagcagcuagcaaagccagaaagcaa

SEQ ID NO: 252377 - RNA, 32 nt, Human
ugccggcccacaguacacagcugcaguucuuc

SEQ ID NO: 252378 - RNA, 22 nt, Human
ugccggcccagccaccugcuca

SEQ ID NO: 252379 - RNA, 32 nt, Human
ugccggcccccuugaguaugcaucacccccac

SEQ ID NO: 252380 - RNA, 21 nt, Human
ugccggccccgccgccgccgc

SEQ ID NO: 252381 - RNA, 32 nt, Human
ugccggcccugagugccucccuugccucacuc

SEQ ID NO: 252382 - RNA, 32 nt, Human
ugccggcccugccuucuccaguauuucccaca

SEQ ID NO: 252383 - RNA, 32 nt, Human
ugccggccgcccagacaccacagacgccacug

SEQ ID NO: 252384 - RNA, 32 nt, Human
ugccggccggcacuucggcugcagaguuuugc

SEQ ID NO: 252385 - RNA, 32 nt, Human
ugccggcgaagaaggugagcgcagugcugugu

SEQ ID NO: 252386 - RNA, 32 nt, Human
ugccggcucacugcaaccucugucuucugggu

SEQ ID NO: 252387 - RNA, 32 nt, Human
ugccggcuggacccgccccgagcuccaugguu

SEQ ID NO: 252388 - RNA, 32 nt, Human
ugccgggagcccaggguggcagagcuguggug

SEQ ID NO: 252389 - RNA, 32 nt, Human
ugccgggaggcugaggcgggagaaucgcuuga

SEQ ID NO: 252390 - RNA, 32 nt, Human
ugccgggaggggcgaggcuggcugaucugcac

SEQ ID NO: 252391 - RNA, 32 nt, Human
ugccgggauccaggucuccgggguccgcuuug

SEQ ID NO: 252392 - RNA, 32 nt, Human
ugccgggaugacaggcaugagccaccgcgccu

SEQ ID NO: 252393 - RNA, 32 nt, Human
ugcucaauaucauuguauuuugugcuuuguaa

SEQ ID NO: 252394 - RNA, 32 nt, Human
ugcucaaucugaagacaauggacccauguuag

SEQ ID NO: 252395 - RNA, 24 nt, Human
ugcucaaugagaaacguugccuug

SEQ ID NO: 252396 - RNA, 32 nt, Human
ugcucaaugccaccugucugccugggcuccaa

SEQ ID NO: 252397 - RNA, 32 nt, Human
ugcucaauggugcccaggcuggagugcagugg

SEQ ID NO: 252398 - RNA, 32 nt, Human
ugcucaaugucaggaaaaccggaacuuguuga

SEQ ID NO: 252399 - RNA, 32 nt, Human
ugcucaauguugcccaggcuggagugcagugg

SEQ ID NO: 252400 - RNA, 32 nt, Human
ugcucaauuucuagguccuuugucuagaaagg

SEQ ID NO: 252401 - RNA, 31 nt, Human
ugcucaauuuugugagagaaagacuguacuc

SEQ ID NO: 252402 - RNA, 32 nt, Human
ugcucaauuuuuccucuucacuggcacaagua

SEQ ID NO: 252403 - RNA, 32 nt, Human
ugcucacaaaccugcagcuggaagcuagacuu

SEQ ID NO: 252404 - RNA, 32 nt, Human
ugcucacaaaccugcaggcauaucauuggcgu

SEQ ID NO: 252405 - RNA, 32 nt, Human
ugcucacacaauugcacuccauucuuccgccu

SEQ ID NO: 252406 - RNA, 32 nt, Human
ugcucacacacuugcccacacacucacuucuu

SEQ ID NO: 252407 - RNA, 32 nt, Human
ugcucacacaugcagacacaccugggcguccc

SEQ ID NO: 252408 - RNA, 32 nt, Human
ugcucacaccacugcacuccagccugggugac

SEQ ID NO: 252409 - RNA, 32 nt, Human
ugcucacaccacugcacuccauccugggcaac

SEQ ID NO: 252410 - RNA, 32 nt, Human
ugcucacaccacugcugcucgagucuccugca

SEQ ID NO: 252411 - RNA, 32 nt, Human
ugcucacaccgguaaucccagcacuuugggag

SEQ ID NO: 252412 - RNA, 32 nt, Human
ugcucacaccuguaaucccagcacuuugggag

SEQ ID NO: 252413 - RNA, 32 nt, Human
ugcucacaccuguaucccagcacuuugggaga

SEQ ID NO: 252414 - RNA, 32 nt, Human
ugcucacacuauauacagaugcaagcaagggg

SEQ ID NO: 252415 - RNA, 32 nt, Human
ugcucacagacaccagcaaagcaaugugcucc

SEQ ID NO: 252416 - RNA, 32 nt, Human
ugcucacagauggaggagaaggagcucuauag

SEQ ID NO: 252417 - RNA, 32 nt, Human
ugcucacagcuguaaucccagcacuuugaggu

SEQ ID NO: 252418 - RNA, 32 nt, Human
ugcucacaggaggcggcggcggcccuggcacu

SEQ ID NO: 252419 - RNA, 32 nt, Human
ugcucacaggcuguccccacucugccuguucc

SEQ ID NO: 252420 - RNA, 32 nt, Human
ugcucacaguggggugcugcuccaguauuaug

SEQ ID NO: 252421 - RNA, 32 nt, Human
ugcucacauaccgguccccacgcccagcggcc

SEQ ID NO: 252422 - RNA, 32 nt, Human
ugcucacaugcgcacacauggcucauugugua

SEQ ID NO: 252423 - RNA, 32 nt, Human
ugcucacauuaauuugcacuccuguuggaaag

SEQ ID NO: 252424 - RNA, 32 nt, Human
ugcucaccaagcucuugaccuucuuacacacu

SEQ ID NO: 252425 - RNA, 32 nt, Human
ugcucaccaagcuguuccacuucucuagagaa

SEQ ID NO: 252426 - RNA, 32 nt, Human
ugcucaccauccccuuaacauaugaaaauccu

SEQ ID NO: 252427 - RNA, 32 nt, Human
ugcucacccacuguccaaccagaugccuugcu

SEQ ID NO: 252428 - RNA, 32 nt, Human
ugcucacccagagacuggaauguggcacaugc

SEQ ID NO: 252429 - RNA, 32 nt, Human
ugcucacccaggaccucuggggguuguuggga

SEQ ID NO: 252430 - RNA, 32 nt, Human
ugcucacccaggcugagggugccuuuguggcu

SEQ ID NO: 252431 - RNA, 32 nt, Human
ugcucacccagugcccucuccccucagccucu

SEQ ID NO: 252432 - RNA, 32 nt, Human
ugcucaccccugggcugagggaagggagagga

SEQ ID NO: 252433 - RNA, 23 nt, Human
ugcucacccgacggcagcucaca

SEQ ID NO: 252434 - RNA, 32 nt, Human
ugcucacccuccacuuguccgucuaccucauu

SEQ ID NO: 252435 - RNA, 32 nt, Human
ugcucacccucuuccaucccucuaacccagcu

SEQ ID NO: 252436 - RNA, 32 nt, Human
ugcucacccugccuuuuucugggggcugagcc

SEQ ID NO: 252437 - RNA, 32 nt, Human
ugcucacccuuucccuuuauuccuugccugga

SEQ ID NO: 252438 - RNA, 32 nt, Human
ugcucaccgcaaccuccgccucccagguucaa

SEQ ID NO: 252439 - RNA, 32 nt, Human
ugcucaccgcaaccuccgccuuccagguucaa

SEQ ID NO: 252440 - RNA, 32 nt, Human
ugcucaccgucuuccuccuccuggucuucuac

SEQ ID NO: 252441 - RNA, 32 nt, Human
ugcucaccugccuccagcaucucucuaggccu

SEQ ID NO: 252442 - RNA, 32 nt, Human
ugcucaccugcucuggcugugaaccaccuggg

SEQ ID NO: 252443 - RNA, 32 nt, Human
ugcucaccuucccaaguucuguuauuucaaac

SEQ ID NO: 252444 - RNA, 32 nt, Human
ugcucacgcacauguucacacaugcacacuca

SEQ ID NO: 252445 - RNA, 32 nt, Human
ugcucacgccuguaauaccagcacuuugggag

SEQ ID NO: 252446 - RNA, 32 nt, Human
ugcucacgccuguaaucccagaacuuuaggag

SEQ ID NO: 252447 - RNA, 32 nt, Human
ugcucacgccuguaaucccagaauuuuaggag

SEQ ID NO: 252448 - RNA, 32 nt, Human
ugcucacgccuguaaucccagcacuuugggag

SEQ ID NO: 252449 - RNA, 32 nt, Human
ugcucacgccuguaaucccagcacuuugggga

SEQ ID NO: 252450 - RNA, 32 nt, Human
ugcucacgccuguaaucccagcacuuuucaga

SEQ ID NO: 252451 - RNA, 32 nt, Human
ugcucacgccuguaauccuagcacuuuuggga

SEQ ID NO: 252452 - RNA, 32 nt, Human
ugcucacgccuguaauuccagcacuuugggag

SEQ ID NO: 252453 - RNA, 32 nt, Human
ugcucacgccugucaucccagcacuuugggag

SEQ ID NO: 252454 - RNA, 32 nt, Human
ugcucacgccuuguaaucccagcacuuuggga

SEQ ID NO: 252455 - RNA, 32 nt, Human
ugcucacuaacacagguggaguagaaggcagg

SEQ ID NO: 252456 - RNA, 32 nt, Human
ugcucacuacaaccucugccucccagguucag

SEQ ID NO: 252457 - RNA, 32 nt, Human
ugcucacuacagcacccgcuucccagguugaa

SEQ ID NO: 252458 - RNA, 32 nt, Human
ugcucacuacagccucccaacucccaggcuca

SEQ ID NO: 252459 - RNA, 32 nt, Human
ugcucacucacugcccucccucccuccugggc

SEQ ID NO: 252460 - RNA, 32 nt, Human
ugcucacucagcugcccugggggcugcuuucc

SEQ ID NO: 252461 - RNA, 32 nt, Human
ugcucacuccaccccacccacaucugcccugu

SEQ ID NO: 252462 - RNA, 32 nt, Human
ugcucacucuucucucagccaaagccuccaaa

SEQ ID NO: 252463 - RNA, 32 nt, Human
ugcucacugaaagcuccgccucccggguucau

SEQ ID NO: 252464 - RNA, 32 nt, Human
ugcucacugcaacauccaccucaugggcucaa

SEQ ID NO: 252465 - RNA, 32 nt, Human
ugcucacugcaaccuccgccucccagguucaa

SEQ ID NO: 252466 - RNA, 32 nt, Human
ugcucacugcaaccuccgccucccggguucaa

SEQ ID NO: 252467 - RNA, 32 nt, Human
ugcucacugcaaccucugccacccggguucaa

SEQ ID NO: 252468 - RNA, 32 nt, Human
ugcucacugcaaccucugccuccuggguuuaa

SEQ ID NO: 252469 - RNA, 32 nt, Human
ugcucacugcaagcucagccucucggguucac

SEQ ID NO: 252470 - RNA, 32 nt, Human
ugcucacugcaagcuccgccaucuggguucaa

SEQ ID NO: 252471 - RNA, 32 nt, Human
ugcucacugcaagcuccgccucccggguucac

SEQ ID NO: 252472 - RNA, 32 nt, Human
ugcucacugcaagcuccgccuccuggguucau

SEQ ID NO: 252473 - RNA, 32 nt, Human
ugcucacugcagccuccaccuccugggcucaa

SEQ ID NO: 252474 - RNA, 32 nt, Human
ugcucacugcagccucgaccucccaaggccua

SEQ ID NO: 252475 - RNA, 32 nt, Human
ugcucacuguaaccucugccuccuggguucaa

SEQ ID NO: 252476 - RNA, 32 nt, Human
ugcucacuguucuccccauccuuguccuuccc

SEQ ID NO: 252477 - RNA, 32 nt, Human
ugcucacuugaagaagugugauuccagcaccg

SEQ ID NO: 252478 - RNA, 32 nt, Human
ugcucacuuggucugagcucagcugaaugcag

SEQ ID NO: 252479 - RNA, 23 nt, Human
ugcucagacuggagugcgagcua

SEQ ID NO: 252480 - RNA, 18 nt, Human
ugcucagagcacgguggc

SEQ ID NO: 252481 - RNA, 32 nt, Human
ugcucagagcucagaauucaguggggaccaga

SEQ ID NO: 252482 - RNA, 32 nt, Human
ugcucagagcuuuccacccacagggagaagca

SEQ ID NO: 252483 - RNA, 32 nt, Human
ugcucagaggaggcagagauggggugguggcu

SEQ ID NO: 252484 - RNA, 24 nt, Human
ugcucagaggucaggaacggcaug

SEQ ID NO: 252485 - RNA, 32 nt, Human
ugcucagagugggagcaagggagccagggaga

SEQ ID NO: 252486 - RNA, 32 nt, Human
ugcucagaucagaucgaugggauuggaauaca

SEQ ID NO: 252487 - RNA, 32 nt, Human
ugcucagauggaaccacuguucccucaguguc

SEQ ID NO: 252488 - RNA, 32 nt, Human
ugcucagauuuguguguucaaucaaugggcuu

SEQ ID NO: 252489 - RNA, 32 nt, Human
ugcucagcaaaugucagcagguccagaagcaa

SEQ ID NO: 252490 - RNA, 32 nt, Human
ugcucagcacacucuguaucuccuguccuuaa

SEQ ID NO: 252491 - RNA, 32 nt, Human
ugcucagcaccguuucuccaucaaugccguga

SEQ ID NO: 252492 - RNA, 18 nt, Human
ugcucagcagccccaccc

SEQ ID NO: 252493 - RNA, 32 nt, Human
ugcucagcauuuuugucaucccugcccuuggc

SEQ ID NO: 252494 - RNA, 22 nt, Human
ugcucagccaaggaacaccaug

SEQ ID NO: 252495 - RNA, 21 nt, Human
ugcucagccacauucccuugc

SEQ ID NO: 252496 - RNA, 21 nt, Human
ugcucagccacucugcccagc

SEQ ID NO: 252497 - RNA, 20 nt, Human
ugcucagccagaaaacuuag

SEQ ID NO: 252498 - RNA, 32 nt, Human
ugcucagccaggcuggaggcggcaggcggcag

SEQ ID NO: 252499 - RNA, 24 nt, Human
ugcucagcccagcccacguugcug

SEQ ID NO: 252500 - RNA, 32 nt, Human
ugcucagcccuagaggcaguugacuuacccuc

SEQ ID NO: 252501 - RNA, 32 nt, Human
ugcucagcccugcaccaugcugcuggggaaga

SEQ ID NO: 252502 - RNA, 32 nt, Human
ugcucagccucagauauccucugacaauugcu

SEQ ID NO: 252503 - RNA, 32 nt, Human
ugcucagcggccugggcucuugcccaaguucu

SEQ ID NO: 252504 - RNA, 30 nt, Human
ugcucagcugcugcucugcuccugucuccu

SEQ ID NO: 252505 - RNA, 32 nt, Human
ugcucagcuguggcuggaggagcuggccugug

SEQ ID NO: 252506 - RNA, 32 nt, Human
ugcucagcuucuccugugugauugacagcuuu

SEQ ID NO: 252507 - RNA, 32 nt, Human
ugcucagcuucuccuuguaaauuccuggugag

SEQ ID NO: 252508 - RNA, 32 nt, Human
ugcucagcuuuuccauaugauuaggugaguga

SEQ ID NO: 252509 - RNA, 32 nt, Human
ugcucaggaaguggguaucaaauugagguggg

SEQ ID NO: 252510 - RNA, 32 nt, Human
ugcucaggacacgcuccuauaggaccaagaug

SEQ ID NO: 252511 - RNA, 32 nt, Human
ugcucaggacagugguggagcugggucuugaa

SEQ ID NO: 252512 - RNA, 32 nt, Human
ugcucaggacucagaagccucugggucagugg

SEQ ID NO: 252513 - RNA, 32 nt, Human
ugcucaggauguccccgcugcccucgaggcuc

SEQ ID NO: 252514 - RNA, 32 nt, Human
ugcucaggcaucccugcccugcucuccuugag

SEQ ID NO: 252515 - RNA, 32 nt, Human
ugcucaggcccaggacaguggguggucaacag

SEQ ID NO: 252516 - RNA, 32 nt, Human
ugcucaggcccaggcuuugccagguccgaagc

SEQ ID NO: 252517 - RNA, 22 nt, Human
ugcucaggccgggcaucucaaa

SEQ ID NO: 252518 - RNA, 32 nt, Human
ugcucaggcucaggacccuaugggauugcaca

SEQ ID NO: 252519 - RNA, 32 nt, Human
ugcucaggcugacagggagggcaaagagugaa

SEQ ID NO: 252520 - RNA, 21 nt, Human
ugcucaggcuggaguacagug

SEQ ID NO: 252521 - RNA, 21 nt, Human
ugcucaggcuggagugcagug

SEQ ID NO: 252522 - RNA, 21 nt, Human
ugcucaggcuggauugcagug

SEQ ID NO: 252523 - RNA, 32 nt, Human
ugcucaggcuggccuugaacuccugggcucaa

SEQ ID NO: 252524 - RNA, 32 nt, Human
ugcucaggcuggucuggaaccccuaggcucaa

SEQ ID NO: 252525 - RNA, 32 nt, Human
ugcucaggcugguuuugaaccccuggguucaa

SEQ ID NO: 252526 - RNA, 32 nt, Human
ugcucagggaaaugaagacaggagaacugcug

SEQ ID NO: 252527 - RNA, 32 nt, Human
ugcucagggaaguccuuccagccucagaaacc

SEQ ID NO: 252528 - RNA, 32 nt, Human
ugcucagggcaaaggcaacuuggcuucacagg

SEQ ID NO: 252529 - RNA, 32 nt, Human
ugcucagggcuggagagaggguggcggggcug

SEQ ID NO: 252530 - RNA, 32 nt, Human
ugcucaggggacagagaggcagagggacuauc

SEQ ID NO: 252531 - RNA, 32 nt, Human
ugcucaggggcuccuucuggcugcaguaagcu

SEQ ID NO: 252532 - RNA, 32 nt, Human
ugcucaggggcugaagcagaggcauugccuuu

SEQ ID NO: 252533 - RNA, 32 nt, Human
ugcucaggugccuguuccagcccaggcagaga

SEQ ID NO: 252534 - RNA, 32 nt, Human
ugcucagguucacauaauggcuaucugugguc

SEQ ID NO: 252535 - RNA, 16 nt, Human
ugcucaguaacuguga

SEQ ID NO: 252536 - RNA, 32 nt, Human
ugcucagucacuaauccagcuugaguguccgu

SEQ ID NO: 252537 - RNA, 32 nt, Human
ugcucaguccuggcugcuuuggcuccaccuuc

SEQ ID NO: 252538 - RNA, 32 nt, Human
ugcucagucgcucaggcuggagugcaauggug

SEQ ID NO: 252539 - RNA, 32 nt, Human
ugcucagucugaagacauuggacccaaguuag

SEQ ID NO: 252540 - RNA, 32 nt, Human
ugcucagucugaagacguuggacccaaguuag

SEQ ID NO: 252541 - RNA, 32 nt, Human
ugcucagugcaaccucugccucccaggaucaa

SEQ ID NO: 252542 - RNA, 32 nt, Human
ugcucagugcuuugccccaggauugccucaaa

SEQ ID NO: 252543 - RNA, 32 nt, Human
ugcucaguguagaggacauuccugucauccau

SEQ ID NO: 252544 - RNA, 24 nt, Human
ugcucagugucuuuggccucagag

SEQ ID NO: 252545 - RNA, 21 nt, Human
ugcucaguugucacaucaaag

SEQ ID NO: 252546 - RNA, 32 nt, Human
ugcucauagcuaguccauggggagagggaaga

SEQ ID NO: 252547 - RNA, 32 nt, Human
ugcucauaucaauccuauaaggcacagggaac

SEQ ID NO: 252548 - RNA, 32 nt, Human
ugcucaucaaggaggugcuggacuacccuugc

SEQ ID NO: 252549 - RNA, 24 nt, Human
ugcucaucagaggugcuuuccuca

SEQ ID NO: 252550 - RNA, 24 nt, Human
ugcucaucagcuccuucugccucc

SEQ ID NO: 252551 - RNA, 32 nt, Human
ugcucaucccuaacuccuguuccuucaucugu

SEQ ID NO: 252552 - RNA, 32 nt, Human
ugcucauccucuucuuagugcugugcggcggg

SEQ ID NO: 252553 - RNA, 32 nt, Human
ugcucauccucuugguuuccccaaagaccggg

SEQ ID NO: 252554 - RNA, 21 nt, Human
ugcucaucuaaaguguuugcc

SEQ ID NO: 252555 - RNA, 32 nt, Human
ugcucaucuaugaucugagaucaugccgaagu

SEQ ID NO: 252556 - RNA, 32 nt, Human
ugcucaucucagaaggauggggaugcuugauu

SEQ ID NO: 252557 - RNA, 32 nt, Human
ugcucaucuucauugagguccacccagggaug

SEQ ID NO: 252558 - RNA, 32 nt, Human
ugcucaugagacaacucacugucaugaccauu

SEQ ID NO: 252559 - RNA, 22 nt, Human
ugcucaugccacuaacagcaug

SEQ ID NO: 252560 - RNA, 32 nt, Human
ugcucaugccuauaaucccagcacuuuaggag

SEQ ID NO: 252561 - RNA, 32 nt, Human
ugcucaugccuguagucccagcuacuugggag

SEQ ID NO: 252562 - RNA, 25 nt, Human
ugcucaugcugaaauuucuggcaua

SEQ ID NO: 252563 - RNA, 30 nt, Human
ugcucauggaggaaccaaggccuucgaagc

SEQ ID NO: 252564 - RNA, 32 nt, Human
ugcucauggaguugcaguucuugccuaacagg

SEQ ID NO: 252565 - RNA, 32 nt, Human
ugcucaugggagaaggcuguggucucugcccc

SEQ ID NO: 252566 - RNA, 32 nt, Human
ugcucaugggagaauggcagagggauccccaa

SEQ ID NO: 252567 - RNA, 32 nt, Human
ugcucaugguuaaugcaggcaggugugaacau

SEQ ID NO: 252568 - RNA, 32 nt, Human
ugcucauguccuccccuccacccgcacauggg

SEQ ID NO: 252569 - RNA, 32 nt, Human
ugcucauguucugugccccacacccaccaaua

SEQ ID NO: 252570 - RNA, 32 nt, Human
ugcucauuccuaacaguggauuuacuuguaag

SEQ ID NO: 252571 - RNA, 32 nt, Human
ugcucauucucauucugucuucucagugacac

SEQ ID NO: 252572 - RNA, 32 nt, Human
ugcucauugcaacugccgccucccggguucaa

SEQ ID NO: 252573 - RNA, 32 nt, Human
ugcucauuggcucccuuccaccugucauuccc

SEQ ID NO: 252574 - RNA, 32 nt, Human
ugcucauuucuuuccuuuucuccuuggguuaa

SEQ ID NO: 252575 - RNA, 32 nt, Human
ugcuccaaauuccuccucugcguccaggagag

SEQ ID NO: 252576 - RNA, 32 nt, Human
ugcuccaagaugacuugcaucauaccccaauu

SEQ ID NO: 252577 - RNA, 32 nt, Human
ugcuccacauccaggcagccugggugaccacu

SEQ ID NO: 252578 - RNA, 32 nt, Human
ugcuccaccaggggaaugcacuggcccuagac

SEQ ID NO: 252579 - RNA, 32 nt, Human
ugcuccaccugggacucugcugugcugcgggc

SEQ ID NO: 252580 - RNA, 32 nt, Human
ugcuccaccuggugccccaggccacagcugcu

SEQ ID NO: 252581 - RNA, 32 nt, Human
ugcuccacguucucuucugucuguugcagcgg

SEQ ID NO: 252582 - RNA, 32 nt, Human
ugcuccacugucugcagcccagauccuguugg

SEQ ID NO: 252583 - RNA, 32 nt, Human
ugcuccacuucucagcucuccccugcccugca

SEQ ID NO: 252584 - RNA, 32 nt, Human
ugcuccagacacagacaccauucacuccagau

SEQ ID NO: 252585 - RNA, 32 nt, Human
ugcuccagacauaaauagcucacugcaggaac

SEQ ID NO: 252586 - RNA, 18 nt, Human
ugcuccagagcgccugca

SEQ ID NO: 252587 - RNA, 32 nt, Human
ugcuccagaggugggugggaggugagcugggg

SEQ ID NO: 252588 - RNA, 21 nt, Human
ugcuccagaucuggaaugcca

SEQ ID NO: 252589 - RNA, 32 nt, Human
ugcuccagcaggcccugcagcucuggggagcc

SEQ ID NO: 252590 - RNA, 32 nt, Human
ugcuccagcccaggcuggagugcaguggcaug

SEQ ID NO: 252591 - RNA, 32 nt, Human
ugcuccagcccccauuucccugacggcccuug

SEQ ID NO: 252592 - RNA, 23 nt, Human
ugcuccagccucugccgcugcca

SEQ ID NO: 252593 - RNA, 32 nt, Human
ugcuccagccuggaugacggagccagauccug

SEQ ID NO: 252594 - RNA, 32 nt, Human
ugcuccagccugggcaacaaagugagacucug

SEQ ID NO: 252595 - RNA, 32 nt, Human
ugcuccagccugggcaacagagcaagacucca

SEQ ID NO: 252596 - RNA, 32 nt, Human
ugcuccagccugggcaacagagugagacuacg

SEQ ID NO: 252597 - RNA, 32 nt, Human
ugcuccagccugggcaacagagugagacucca

SEQ ID NO: 252598 - RNA, 32 nt, Human
ugcuccagccugggcgacagagcgagacuccg

SEQ ID NO: 252599 - RNA, 32 nt, Human
ugcuccagccugggugacaaagcaaggcccug

SEQ ID NO: 252600 - RNA, 32 nt, Human
ugcuccagcucauaaagcuuccuugaaacagu

SEQ ID NO: 252601 - RNA, 24 nt, Human
ugcuccagcucugcccaggugcca

SEQ ID NO: 252602 - RNA, 32 nt, Human
ugcuccagcugcagggccagggggugcaggug

SEQ ID NO: 252603 - RNA, 32 nt, Human
ugcuccaggaggucugggguaccagugggcuc

SEQ ID NO: 252604 - RNA, 32 nt, Human
ugcuccaggcagcguggucuguauggcuccgc

SEQ ID NO: 252605 - RNA, 32 nt, Human
ugcuccaggccaggcagcaggcuguggacacc

SEQ ID NO: 252606 - RNA, 22 nt, Human
ugcuccaggcuggcggcgcuca

SEQ ID NO: 252607 - RNA, 32 nt, Human
ugcuccagggacuauccuguguuuguagcugc

SEQ ID NO: 252608 - RNA, 18 nt, Human
ugcuccagggcgccugca

SEQ ID NO: 252609 - RNA, 32 nt, Human
ugcuccagggcugugggcuggggcaugacggc

SEQ ID NO: 252610 - RNA, 32 nt, Human
ugcuccaggugagcuggcuggggaggaggaug

SEQ ID NO: 252611 - RNA, 23 nt, Human
ugcuccagugggagacccuggua

SEQ ID NO: 252612 - RNA, 32 nt, Human
ugcuccaguguagcuuucuacaucccacauca

SEQ ID NO: 252613 - RNA, 32 nt, Human
ugcuccaguuguuucuggaguuggaggcagcu

SEQ ID NO: 252614 - RNA, 32 nt, Human
ugcuccaucacaaccuccuuccccaggaaaac

SEQ ID NO: 252615 - RNA, 32 nt, Human
ugcuccaucagcugccgcacccgccgccuccc

SEQ ID NO: 252616 - RNA, 32 nt, Human
ugcuccaucauccuauuuccauggcuauuucc

SEQ ID NO: 252617 - RNA, 32 nt, Human
ugcuccaucucaccucugcuccagaaauaaau

SEQ ID NO: 252618 - RNA, 32 nt, Human
ugcuccaucuugcagaggcuucauucuugguu

SEQ ID NO: 252619 - RNA, 32 nt, Human
ugcuccaugacuggcugucugccuguauuuuc

SEQ ID NO: 252620 - RNA, 32 nt, Human
ugcuccauuacucaagacacugaagacuccaa

SEQ ID NO: 252621 - RNA, 32 nt, Human
ugcuccauuacugaggcugugacgauccuggg

SEQ ID NO: 252622 - RNA, 32 nt, Human
ugcuccauucagaacaagacuggaugcuucug

SEQ ID NO: 252623 - RNA, 32 nt, Human
ugcuccauugcacuccagccugggcaacgagc

SEQ ID NO: 252624 - RNA, 32 nt, Human
ugcuccauugcacuccagccugggcgauagag

SEQ ID NO: 252625 - RNA, 32 nt, Human
ugcucccaaacuguccccagacuuccucucca

SEQ ID NO: 252626 - RNA, 32 nt, Human
ugcucccaaccaggaagccaucaugucuugcc

SEQ ID NO: 252627 - RNA, 32 nt, Human
ugcucccaaggcaagaagaaagagaugacaga

SEQ ID NO: 252628 - RNA, 32 nt, Human
ugcucccacaccccucuccucgucccuccugg

SEQ ID NO: 252629 - RNA, 19 nt, Human
ugcucccacaggccucuca

SEQ ID NO: 252630 - RNA, 32 nt, Human
ugcucccacauccugcuuauugccugccaccc

SEQ ID NO: 252631 - RNA, 32 nt, Human
ugcucccaccacugcacuccagccugggaagc

SEQ ID NO: 252632 - RNA, 32 nt, Human
ugcucccacccuccucccagcagcagacaccc

SEQ ID NO: 252633 - RNA, 32 nt, Human
ugcucccacguccugcacugcaauaccagucu

SEQ ID NO: 252634 - RNA, 32 nt, Human
ugcucccacuccagaagaacugcggcacgugc

SEQ ID NO: 252635 - RNA, 32 nt, Human
ugcucccacugucuguguucuccucacuguua

SEQ ID NO: 252636 - RNA, 32 nt, Human
ugcucccagagaaccuuauggaagaggacauc

SEQ ID NO: 252637 - RNA, 32 nt, Human
ugcucccagaggcugaagucacccugggaauc

SEQ ID NO: 252638 - RNA, 32 nt, Human
ugcucccagcaaccucuacauccaggaaugag

SEQ ID NO: 252639 - RNA, 32 nt, Human
ugcucccagcaccuccugacccuucccucuuu

SEQ ID NO: 252640 - RNA, 32 nt, Human
ugcucccagcacuuugggaggcugagguagga

SEQ ID NO: 252641 - RNA, 32 nt, Human
ugcucccagcagagguggggccggcagagaag

SEQ ID NO: 252642 - RNA, 32 nt, Human
ugcucccagcaucccuuccccuucucuccucc

SEQ ID NO: 252643 - RNA, 32 nt, Human
ugcucccagcuccucacgaggcugagguggaa

SEQ ID NO: 252644 - RNA, 32 nt, Human
ugcucccaggaccugccucuucccaggcuucc

SEQ ID NO: 252645 - RNA, 32 nt, Human
ugcucccaggagcuggcuauuagguaugucuu

SEQ ID NO: 252646 - RNA, 22 nt, Human
ugcucccagucucccagaacca

SEQ ID NO: 252647 - RNA, 32 nt, Human
ugcucccaucauuccuucuggccucugcugaa

SEQ ID NO: 252648 - RNA, 32 nt, Human
ugcucccaucuauuuucuucucuagaauccac

SEQ ID NO: 252649 - RNA, 32 nt, Human
ugcucccauguccagugcccugggucagggcu

SEQ ID NO: 252650 - RNA, 18 nt, Human
ugcucccauuucuguccu

SEQ ID NO: 252651 - RNA, 28 nt, Human
ugcuccccaagugggccugauuuagcag

SEQ ID NO: 252652 - RNA, 23 nt, Human
ugcuccccacagggccaggcugg

SEQ ID NO: 252653 - RNA, 32 nt, Human
ugcuccccaccagggcagcacgggacagaaac

SEQ ID NO: 252654 - RNA, 32 nt, Human
ugcuccccacccccuaccuccaccugagccuc

SEQ ID NO: 252655 - RNA, 19 nt, Human
ugcuccccacgucagcugg

SEQ ID NO: 252656 - RNA, 32 nt, Human
ugcuccccacguugggcaacuccagccaagau

SEQ ID NO: 252657 - RNA, 32 nt, Human
ugcuccccacuccuggugugcggucuugcgcc

SEQ ID NO: 252658 - RNA, 20 nt, Human
ugcuccccagaaccccgggg

SEQ ID NO: 252659 - RNA, 32 nt, Human
ugcuccccagagggcagggugagugcguggca

SEQ ID NO: 252660 - RNA, 32 nt, Human
ugcuccccagcaaacggugccucccaggcauu

SEQ ID NO: 252661 - RNA, 22 nt, Human
ugcuccccagcucucggauaca

SEQ ID NO: 252662 - RNA, 32 nt, Human
ugcucccccaacccagcgucaggcugggacac

SEQ ID NO: 252663 - RNA, 32 nt, Human
ugcucccccaggagacucaacacuaaauaaag

SEQ ID NO: 252664 - RNA, 32 nt, Human
ugcucccccgacccccuccacccagcaguaga

SEQ ID NO: 252665 - RNA, 32 nt, Human
ugcucccccugccucagacaucuacgcagcga

SEQ ID NO: 252666 - RNA, 32 nt, Human
ugcucccccugccuugucccaccagggaggca

SEQ ID NO: 252667 - RNA, 32 nt, Human
ugcuccccucaacccccucccaccccauccac

SEQ ID NO: 252668 - RNA, 32 nt, Human
ugcuccccuccaggauggagugggggucggca

SEQ ID NO: 252669 - RNA, 32 nt, Human
ugcuccccucccccacagccucuuccucccuu

SEQ ID NO: 252670 - RNA, 32 nt, Human
ugcuccccucccccugcaggucccccuccccu

SEQ ID NO: 252671 - RNA, 23 nt, Human
ugcuccccugagcgcugggcugg

SEQ ID NO: 252672 - RNA, 32 nt, Human
ugcuccccugcucccuguuguguuagggaugu

SEQ ID NO: 252673 - RNA, 32 nt, Human
ugcuccccuguucaaagaugcauuuugagugu

SEQ ID NO: 252674 - RNA, 32 nt, Human
ugcuccccuuacacuccuccagggaccccgga

SEQ ID NO: 252675 - RNA, 32 nt, Human
ugcuccccuucccaccaccacugccauauaaa

SEQ ID NO: 252676 - RNA, 32 nt, Human
ugcuccccuucccucccugaaccgggaguuuc

SEQ ID NO: 252677 - RNA, 21 nt, Human
ugcucccgccgccgccgccgc

SEQ ID NO: 252678 - RNA, 32 nt, Human
ugcucccgccuggaaucccagcacuuugggag

SEQ ID NO: 252679 - RNA, 32 nt, Human
ugcucccggggaggaaaggcuaaagcugcugg

SEQ ID NO: 252680 - RNA, 32 nt, Human
ugcucccgguggaagcaagggagcccagccgg

SEQ ID NO: 252681 - RNA, 32 nt, Human
ugcucccgucugucuguccugucugauucucu

SEQ ID NO: 252682 - RNA, 32 nt, Human
ugcucccgugaaggaaugcacuuugccuugua

SEQ ID NO: 252683 - RNA, 32 nt, Human
ugcucccguuguucucuuuccauuugccuccc

SEQ ID NO: 252684 - RNA, 32 nt, Human
ugcucccuauacucccuuguuccaucagaagc

SEQ ID NO: 252685 - RNA, 32 nt, Human
ugcucccucccccagcaucaaauuguuaucag

SEQ ID NO: 252686 - RNA, 32 nt, Human
ugcucccuccuaggaccucgcagccaggcaag

SEQ ID NO: 252687 - RNA, 32 nt, Human
ugcucccucgagcacuuguugugugcacuuua

SEQ ID NO: 252688 - RNA, 32 nt, Human
ugcucccucguccugugaacuuucucugagcu

SEQ ID NO: 252689 - RNA, 22 nt, Human
ugcucccucuaccucacugcca

SEQ ID NO: 252690 - RNA, 22 nt, Human
ugcucccucugaagugcagugg

SEQ ID NO: 252691 - RNA, 32 nt, Human
ugcucccugcaaccuccaccucccggguucaa

SEQ ID NO: 252692 - RNA, 32 nt, Human
ugcucccugcaagcuccgccucccggguucac

SEQ ID NO: 252693 - RNA, 32 nt, Human
ugcucccugcagcugccaucggcccgcuuugc

SEQ ID NO: 252694 - RNA, 25 nt, Human
ugcucccugccaggcgcgugcggga

SEQ ID NO: 252695 - RNA, 23 nt, Human
ugcucccugcccccucccugcua

SEQ ID NO: 252696 - RNA, 32 nt, Human
ugcucccugccuccugccuaugucuccucuau

SEQ ID NO: 252697 - RNA, 32 nt, Human
ugcucccugccugggcuccaugcugucgcggg

SEQ ID NO: 252698 - RNA, 32 nt, Human
ugcucccugcucuuucugccucugggcucaug

SEQ ID NO: 252699 - RNA, 32 nt, Human
ugcucccuggacugccuagcccugagugccac

SEQ ID NO: 252700 - RNA, 32 nt, Human
ugcucccugggaggcaggcuccagaagcaccc

SEQ ID NO: 252701 - RNA, 32 nt, Human
ugcucccuggucccuucccuguugccugagca

SEQ ID NO: 252702 - RNA, 32 nt, Human
ugcucccuguguccuuggacagcagauccaca

SEQ ID NO: 252703 - RNA, 32 nt, Human
ugcucccuuagcccagaagcccugccaggucc

SEQ ID NO: 252704 - RNA, 32 nt, Human
ugcucccuuccuauuccauggcuucaggugcc

SEQ ID NO: 252705 - RNA, 32 nt, Human
ugcucccuuccuucuucuguccuguuuccagc

SEQ ID NO: 252706 - RNA, 32 nt, Human
ugcucccuucuuccuuuccuuguuauucaccu

SEQ ID NO: 252707 - RNA, 32 nt, Human
ugcucccuuuccaaucuguauaccuuuuauuu

SEQ ID NO: 252708 - RNA, 32 nt, Human
ugcucccuuuccaguucuggcaucuccccagu

SEQ ID NO: 252709 - RNA, 32 nt, Human
ugcucccuuuuacauucuguguguaucuaaag

SEQ ID NO: 252710 - RNA, 32 nt, Human
ugcuccgaagacaaaccaaccuccguuucuuu

SEQ ID NO: 252711 - RNA, 32 nt, Human
ugcuccgagaagaggcugggucgagcugggcc

SEQ ID NO: 252712 - RNA, 32 nt, Human
ugcuccgaggagggguggacuccaccuuggac

SEQ ID NO: 252713 - RNA, 32 nt, Human
ugcuccgagguaguagcucucuugccuggagg

SEQ ID NO: 252714 - RNA, 32 nt, Human
ugcuccgccuguccugcccuugcucagaccac

SEQ ID NO: 252715 - RNA, 24 nt, Human
ugcuccgcgccgccucagccgccg

SEQ ID NO: 252716 - RNA, 32 nt, Human
ugcuccgcgccugagccaugcccagcagcccu

SEQ ID NO: 252717 - RNA, 21 nt, Human
ugcuccgcggcugcggccccg

SEQ ID NO: 252718 - RNA, 32 nt, Human
ugcuccggagggaagcauuuccugguaggcuu

SEQ ID NO: 252719 - RNA, 32 nt, Human
ugcuccggcccaggcgggggagucagugccca

SEQ ID NO: 252720 - RNA, 32 nt, Human
ugcuccggccuguacugaccagccugcgccuu

SEQ ID NO: 252721 - RNA, 25 nt, Human
ugcuccggcuucgcccgcagcuccg

SEQ ID NO: 252722 - RNA, 32 nt, Human
ugcuccgggagccaucacucuccaguuuucuc

SEQ ID NO: 252723 - RNA, 19 nt, Human
ugcuccgggccugccugca

SEQ ID NO: 252724 - RNA, 32 nt, Human
ugcuccgguagguuuggcgugcgcggguuucu

SEQ ID NO: 252725 - RNA, 32 nt, Human
ugcuccguacccugugcuguccugccucagau

SEQ ID NO: 252726 - RNA, 32 nt, Human
ugcuccgucauucccuuccccaccuccuugug

SEQ ID NO: 252727 - RNA, 32 nt, Human
ugcuccguccagauguugagggccagucuagg

SEQ ID NO: 252728 - RNA, 32 nt, Human
ugcuccgucgcccaggcuggcaugcaguugcg

SEQ ID NO: 252729 - RNA, 21 nt, Human
ugcuccgucucccuccccggg

SEQ ID NO: 252730 - RNA, 32 nt, Human
ugcuccgugaaccuuaugaaugcugcuuaaaa

SEQ ID NO: 252731 - RNA, 32 nt, Human
ugcuccgugaccccaccauguccucuccuacc

SEQ ID NO: 252732 - RNA, 32 nt, Human
ugcuccguggaacacgaggagcacacgaaacc

SEQ ID NO: 252733 - RNA, 32 nt, Human
ugcuccguugcccagguuggagugcaguggcc

SEQ ID NO: 252734 - RNA, 32 nt, Human
ugcuccguugccuagcuggagugcacgaucuc

SEQ ID NO: 252735 - RNA, 32 nt, Human
ugcuccuaaggguagaaaacuccagggucccc

SEQ ID NO: 252736 - RNA, 32 nt, Human
ugcuccuagcagccuccccaggaagggacugc

SEQ ID NO: 252737 - RNA, 32 nt, Human
ugcuccuauagucccagcuuggagauugaggu

SEQ ID NO: 252738 - RNA, 19 nt, Human
ugcuccucacccaggcugg

SEQ ID NO: 252739 - RNA, 32 nt, Human
ugcuccucacccaggcuggaaugcaguggugu

SEQ ID NO: 252740 - RNA, 32 nt, Human
ugcuccucacccuccucucacccuccacccuc

SEQ ID NO: 252741 - RNA, 32 nt, Human
ugcuccucacuuccucuucuucauugcaguua

SEQ ID NO: 252742 - RNA, 32 nt, Human
ugcuccucagcguccaguccuccugggcggcc

SEQ ID NO: 252743 - RNA, 32 nt, Human
ugcuccuccaccccuaaguuaaagcuaugaac

SEQ ID NO: 252744 - RNA, 32 nt, Human
ugcuccuccagccccagcugcccuggcuuccc

SEQ ID NO: 252745 - RNA, 32 nt, Human
ugcuccuccagccugcacugggccccagcccu

SEQ ID NO: 252746 - RNA, 32 nt, Human
ugcuccuccagcugcugcaccugccucuccgc

SEQ ID NO: 252747 - RNA, 32 nt, Human
ugcuccuccaggucucacucaggcucacucug

SEQ ID NO: 252748 - RNA, 20 nt, Human
ugcuccuccauuccuaacgc

SEQ ID NO: 252749 - RNA, 32 nt, Human
ugcuccuccauuugaaaugacagccccgagcu

SEQ ID NO: 252750 - RNA, 22 nt, Human
ugcuccuccccuuucacaggug

SEQ ID NO: 252751 - RNA, 24 nt, Human
ugcuccucccucccugcagccccg

SEQ ID NO: 252752 - RNA, 19 nt, Human
ugcuccucccuccuguccu

SEQ ID NO: 252753 - RNA, 32 nt, Human
ugcuccucccucugacccagacuccgccugag

SEQ ID NO: 252754 - RNA, 19 nt, Human
ugcuccucccucuucccgg

SEQ ID NO: 252755 - RNA, 32 nt, Human
ugcuccuccuacccuuccagugcccuaggccu

SEQ ID NO: 252756 - RNA, 23 nt, Human
ugcuccuccucccagccccggcc

SEQ ID NO: 252757 - RNA, 32 nt, Human
ugcuccuccucuucccuuuggggcuggugcug

SEQ ID NO: 252758 - RNA, 32 nt, Human
ugcuccuccucuuccuccuccuccuccaaacu

SEQ ID NO: 252759 - RNA, 32 nt, Human
ugcuccucucacugcccucugcaccagcaaca

SEQ ID NO: 252760 - RNA, 32 nt, Human
ugcuccucucccgugugagugcagagaagguc

SEQ ID NO: 252761 - RNA, 32 nt, Human
ugcuccucucccuccaccuccuggcuucaacu

SEQ ID NO: 252762 - RNA, 32 nt, Human
ugcuccucucggccccuccuccugggccgccu

SEQ ID NO: 252763 - RNA, 32 nt, Human
ugcuccucucucaguggccaucaugucuuuga

SEQ ID NO: 252764 - RNA, 32 nt, Human
ugcuccucugaccucccggucucccucugcag

SEQ ID NO: 252765 - RNA, 32 nt, Human
ugcuccucuggcagagagaaggagcucaaaag

SEQ ID NO: 252766 - RNA, 32 nt, Human
ugcuccucuguggccuuccugggcugcccucc

SEQ ID NO: 252767 - RNA, 32 nt, Human
ugcuccugagccuccacuaucucccugugacg

SEQ ID NO: 252768 - RNA, 32 nt, Human
ugcuccugaggaggcggcggcagcagcgccua

SEQ ID NO: 252769 - RNA, 32 nt, Human
ugcuccugaggcgaugaugggcaaggaagagg

SEQ ID NO: 252770 - RNA, 32 nt, Human
ugcuccugauuucccaggucuuaggccaccuu

SEQ ID NO: 252771 - RNA, 32 nt, Human
ugcuccugcacauguuggaguguggugccucc

SEQ ID NO: 252772 - RNA, 32 nt, Human
ugcuccugccaccucccaccucucugagggcu

SEQ ID NO: 252773 - RNA, 32 nt, Human
ugcuccugcccuccugucucucuugucccucg

SEQ ID NO: 252774 - RNA, 32 nt, Human
ugcuccugccgcccucugcccugccggagaca

SEQ ID NO: 252775 - RNA, 31 nt, Human
ugcuccugccucuagggugcaguguccguac

SEQ ID NO: 252776 - RNA, 32 nt, Human
ugcuccugcgguuggugagauuaccugggucu

SEQ ID NO: 252777 - RNA, 32 nt, Human
ugcuccugcugaggaccagcuguggcugggcc

SEQ ID NO: 252778 - RNA, 32 nt, Human
ugcuccugcuucuuucuacacacacaucuaaa

SEQ ID NO: 252779 - RNA, 32 nt, Human
ugcuccuggaccuggccaaugagguggacuau

SEQ ID NO: 252780 - RNA, 21 nt, Human
ugcuccuggagccuuugaaua

SEQ ID NO: 252781 - RNA, 32 nt, Human
ugcuccuggaucucccugagaugggcuuccca

SEQ ID NO: 252782 - RNA, 32 nt, Human
ugcuccuggccugggcucugauuucacugugu

SEQ ID NO: 252783 - RNA, 32 nt, Human
ugcuccuggccuugcugaccucagcgguugcc

SEQ ID NO: 252784 - RNA, 29 nt, Human
ugcuccuggcugccacucaccccugugag

SEQ ID NO: 252785 - RNA, 32 nt, Human
ugcuccugggagaagagaaggaucccaguauc

SEQ ID NO: 252786 - RNA, 32 nt, Human
ugcuccugggaggugagcgugcacaggugugu

SEQ ID NO: 252787 - RNA, 21 nt, Human
ugcuccugggccccagccccg

SEQ ID NO: 252788 - RNA, 32 nt, Human
ugcuccugguaguaaggagcacaaagacguuu

SEQ ID NO: 252789 - RNA, 32 nt, Human
ugcuccuggugagaggacgugggcagggaucc

SEQ ID NO: 252790 - RNA, 32 nt, Human
ugcuccugguggaagcaagggagcccagccga

SEQ ID NO: 252791 - RNA, 18 nt, Human
ugcuccuguaauugugau

SEQ ID NO: 252792 - RNA, 32 nt, Human
ugcuccuguaguacagaaggugcaguacaucu

SEQ ID NO: 252793 - RNA, 32 nt, Human
ugcuccugucauccuccacauuucugcuccaa

SEQ ID NO: 252794 - RNA, 32 nt, Human
ugcuccuguccccacucacaggcccacgcagc

SEQ ID NO: 252795 - RNA, 31 nt, Human
ugcuccugucucucuggcaggagugccugua

SEQ ID NO: 252796 - RNA, 32 nt, Human
ugcuccugugccacaggacuccuguggcucgg

SEQ ID NO: 252797 - RNA, 32 nt, Human
ugcuccuguggcugugaugugggguuaaguga

SEQ ID NO: 252798 - RNA, 32 nt, Human
ugcuccuguuggcaaaucgcaccuuaucugaa

SEQ ID NO: 252799 - RNA, 32 nt, Human
ugcuccuguuggucccuguccuugcugcccag

SEQ ID NO: 252800 - RNA, 32 nt, Human
ugcuccuuaccuccccacccugaugucauuuc

SEQ ID NO: 252801 - RNA, 32 nt, Human
ugcuccuuaccuggaagaugcagggaaccucc

SEQ ID NO: 252802 - RNA, 32 nt, Human
ugcuccuuagggcagagguuuuauugaauaga

SEQ ID NO: 252803 - RNA, 32 nt, Human
ugcuccuuaugggcugggguguaaugugcaga

SEQ ID NO: 252804 - RNA, 32 nt, Human
ugcuccuucaaggcccuuaaaacugugggcuc

SEQ ID NO: 252805 - RNA, 32 nt, Human
ugcuccuucagcauuugugcugucuaccucuc

SEQ ID NO: 252806 - RNA, 23 nt, Human
ugcuccuucagccuccuugcuca

SEQ ID NO: 252807 - RNA, 32 nt, Human
ugcuccuucagggauggaggcaauggcggcca

SEQ ID NO: 252808 - RNA, 32 nt, Human
ugcuccuucaucaccuuucccucucucuuuga

SEQ ID NO: 252809 - RNA, 32 nt, Human
ugcuccuuccacaagaagugcauagguccaua

SEQ ID NO: 252810 - RNA, 32 nt, Human
ugcuccuuccaggcaggggcugaggggacugu

SEQ ID NO: 252811 - RNA, 24 nt, Human
ugcuccuuccccaguggauggggu

SEQ ID NO: 252812 - RNA, 16 nt, Human
ugcuccuuccuguccu

SEQ ID NO: 252813 - RNA, 29 nt, Human
ugcuccuuccugugugugcucuggacccu

SEQ ID NO: 252814 - RNA, 32 nt, Human
ugcuccuucgacucugcagcucaggccugucc

SEQ ID NO: 252815 - RNA, 32 nt, Human
ugcuccuucuacuacacaacacugccuaguug

SEQ ID NO: 252816 - RNA, 32 nt, Human
ugcuccuucuucugccgccacgcccagcuccc

SEQ ID NO: 252817 - RNA, 32 nt, Human
ugcuccuugacugucucuccccaccgggguca

SEQ ID NO: 252818 - RNA, 32 nt, Human
ugcuccuuggagcuggugugcaguguccugac

SEQ ID NO: 252819 - RNA, 32 nt, Human
ugcuccuugggugcugcugcuacucagacuag

SEQ ID NO: 252820 - RNA, 32 nt, Human
ugcuccuuguccaucccuuggagcagauuuug

SEQ ID NO: 252821 - RNA, 32 nt, Human
ugcuccuugugggcgcucacacugcccccgga

SEQ ID NO: 252822 - RNA, 32 nt, Human
ugcuccuuugagagauuccuggaccacaaugg

SEQ ID NO: 252823 - RNA, 32 nt, Human
ugcucgccaccugguggccacgcguaccugca

SEQ ID NO: 252824 - RNA, 32 nt, Human
ugcucgccaugucuucucacaagacuuucagg

SEQ ID NO: 252825 - RNA, 32 nt, Human
ugcucgcccaggguggagugcaguggugugau

SEQ ID NO: 252826 - RNA, 32 nt, Human
ugcucgccuguaaucccagcuacuugggaggc

SEQ ID NO: 252827 - RNA, 32 nt, Human
ugcucgccuuggucauguacagcacugaaagg

SEQ ID NO: 252828 - RNA, 32 nt, Human
ugcucgcucaauaugcaaugugcuguuauucu

SEQ ID NO: 252829 - RNA, 32 nt, Human
ugcucgcucagugccauagccuuaccgcagcc

SEQ ID NO: 252830 - RNA, 32 nt, Human
ugcucgcugagcagaccuugggcuugugcugu

SEQ ID NO: 252831 - RNA, 32 nt, Human
ugcucgcugggcagacccaggucgcgcuccca

SEQ ID NO: 252832 - RNA, 32 nt, Human
ugcucgcuguccuacauaucacaauauagugu

SEQ ID NO: 252833 - RNA, 32 nt, Human
ugcucgcuucauuugccuuguuuacucauccu

SEQ ID NO: 252834 - RNA, 32 nt, Human
ugcucgcuugaggagcuucagaggaaucuuag

SEQ ID NO: 252835 - RNA, 32 nt, Human
ugcucggaacuauccauguauaagcacugcaa

SEQ ID NO: 252836 - RNA, 32 nt, Human
ugcucggaagagaccgagccccagggccgccg

SEQ ID NO: 252837 - RNA, 32 nt, Human
ugcucggagagggcggcugggcggcggcgggg

SEQ ID NO: 252838 - RNA, 32 nt, Human
ugcucggaggcagaggcagcaagaggcggcgg

SEQ ID NO: 252839 - RNA, 32 nt, Human
ugcucggaguccuggcuccaccucucacuagc

SEQ ID NO: 252840 - RNA, 32 nt, Human
ugcucggcacuucugcgucaagaggcacuggg

SEQ ID NO: 252841 - RNA, 32 nt, Human
ugcucggcccaaggcaggagaaucucuugaag

SEQ ID NO: 252842 - RNA, 32 nt, Human
ugcucggcguugagcuccugcagccgccgccg

SEQ ID NO: 252843 - RNA, 32 nt, Human
ugcucgggagagaagugagggaagccggcagu

SEQ ID NO: 252844 - RNA, 32 nt, Human
ugcucgggaggcagaggcaggagaauggcgug

SEQ ID NO: 252845 - RNA, 32 nt, Human
ugcucgggaggcagcagacagggagccaccag

SEQ ID NO: 252846 - RNA, 32 nt, Human
ugcucgggaggcuaaggcaggagaauugcuug

SEQ ID NO: 252847 - RNA, 32 nt, Human
ugcucgggaggcugaggcaggagaauagcaug

SEQ ID NO: 252848 - RNA, 32 nt, Human
ugcucgggaggcugaggcaggagaaucgcuug

SEQ ID NO: 252849 - RNA, 32 nt, Human
ugcucgggaggcugaggcaggagaauugcuug

SEQ ID NO: 252850 - RNA, 32 nt, Human
ugcucgggagggugaggcaggagaauggcaug

SEQ ID NO: 252851 - RNA, 22 nt, Human
ugcucgggccccagccccggcc

SEQ ID NO: 252852 - RNA, 32 nt, Human
ugcucgggggaugcagggaugagucaaaucca

SEQ ID NO: 252853 - RNA, 32 nt, Human
ugcucggucaccuaggcuggaguguaguggcg

SEQ ID NO: 252854 - RNA, 32 nt, Human
ugcucggucuccgcuggaggugauggccuccc

SEQ ID NO: 252855 - RNA, 21 nt, Human
ugcucggugcccuggcccgca

SEQ ID NO: 252856 - RNA, 32 nt, Human
ugcucgguggagggacagugauggccuuugac

SEQ ID NO: 252857 - RNA, 32 nt, Human
ugcucgguggugagaagguuagguccggcuca

SEQ ID NO: 252858 - RNA, 32 nt, Human
ugcucgguugcccagccuccugaaugaugcca

SEQ ID NO: 252859 - RNA, 32 nt, Human
ugcucgucaaugaucaguaucaacacagaaga

SEQ ID NO: 252860 - RNA, 32 nt, Human
ugcucgucacccaggcuggagugcaauugugc

SEQ ID NO: 252861 - RNA, 32 nt, Human
ugcucguccacgcaggugugugguguaaacau

SEQ ID NO: 252862 - RNA, 32 nt, Human
ugcucguccgccucggcuccagaagcuggggc

SEQ ID NO: 252863 - RNA, 32 nt, Human
ugcucgucuccaacuccugaccucagguaauc

SEQ ID NO: 252864 - RNA, 32 nt, Human
ugcucgucugcagucaggccacugccugaggg

SEQ ID NO: 252865 - RNA, 32 nt, Human
ugcucgugggcugugagcaagggaugcaaagg

SEQ ID NO: 252866 - RNA, 21 nt, Human
ugcucguugcucgcagccccg

SEQ ID NO: 252867 - RNA, 32 nt, Human
ugcucguuucuuuccuccuuuugacuaugugu

SEQ ID NO: 252868 - RNA, 32 nt, Human
ugcucuaaaaacaaaccacccagaauugauac

SEQ ID NO: 252869 - RNA, 20 nt, Human
ugcucuaauacuguacugug

SEQ ID NO: 252870 - RNA, 32 nt, Human
ugcucuaccacccaggcuggagugcaguggug

SEQ ID NO: 252871 - RNA, 32 nt, Human
ugcucuaccucucccugacauuuugcuccggg

SEQ ID NO: 252872 - RNA, 32 nt, Human
ugcucuacuacuaacaaacaggccugcugcua

SEQ ID NO: 252873 - RNA, 18 nt, Human
ugcucuagauuuucugaa

SEQ ID NO: 252874 - RNA, 32 nt, Human
ugcucuagccugggugacaaagugagacccug

SEQ ID NO: 252875 - RNA, 32 nt, Human
ugcucuagcuucagaaccacagaaccaccgcc

SEQ ID NO: 252876 - RNA, 32 nt, Human
ugcucuaggaagcagauacaguuauuaagucc

SEQ ID NO: 252877 - RNA, 21 nt, Human
ugcucuaggaguuccuggcca

SEQ ID NO: 252878 - RNA, 32 nt, Human
ugcucuagggaaaugcuugcugauugaaagga

SEQ ID NO: 252879 - RNA, 18 nt, Human
ugcucuagggucuggaua

SEQ ID NO: 252880 - RNA, 32 nt, Human
ugcucuaguccuugccacacaugcccuggggu

SEQ ID NO: 252881 - RNA, 32 nt, Human
ugcucuagugccugucaagaccacggauggcg

SEQ ID NO: 252882 - RNA, 32 nt, Human
ugcucuaucaccaggugggagugcaguggcac

SEQ ID NO: 252883 - RNA, 32 nt, Human
ugcucuaucacccaggcuggagugcaguggug

SEQ ID NO: 252884 - RNA, 32 nt, Human
ugcucuaucaccuaggcuggagugcagcggca

SEQ ID NO: 252885 - RNA, 32 nt, Human
ugcucuaucgcccaggcuggagugcaguggcg

SEQ ID NO: 252886 - RNA, 32 nt, Human
ugcucuaucuccagucugucucuguguacugg

SEQ ID NO: 252887 - RNA, 23 nt, Human
ugcucuaucuugcucuguaaucu

SEQ ID NO: 252888 - RNA, 32 nt, Human
ugcucuauggcugcuguaaugggggcagagaa

SEQ ID NO: 252889 - RNA, 22 nt, Human
ugcucuauguccuaguaacucu

SEQ ID NO: 252890 - RNA, 32 nt, Human
ugcucuauugcccaggcuggagugcaguggcu

SEQ ID NO: 252891 - RNA, 32 nt, Human
ugcucuauugcccaggcuggagugcaguggua

SEQ ID NO: 252892 - RNA, 32 nt, Human
ugcucuauuggccaggcuggaguguaguggca

SEQ ID NO: 252893 - RNA, 32 nt, Human
ugcucuauuguagcauuucuugauguugcuua

SEQ ID NO: 252894 - RNA, 32 nt, Human
ugcucucaagagcaaagguuaauuuaaggaca

SEQ ID NO: 252895 - RNA, 32 nt, Human
ugcucucaagaggcagcuagguuuuuggagcu

SEQ ID NO: 252896 - RNA, 32 nt, Human
ugcucucaccaugaccucgccuggugggcagc

SEQ ID NO: 252897 - RNA, 23 nt, Human
ugcucucaccccagggaugaaac

SEQ ID NO: 252898 - RNA, 32 nt, Human
ugcucucaccuguggguucuugcccaucaggg

SEQ ID NO: 252899 - RNA, 32 nt, Human
ugcucucagaagcaggggucacuggcgagagg

SEQ ID NO: 252900 - RNA, 32 nt, Human
ugcucucagacucugauuacugccuccccuuc

SEQ ID NO: 252901 - RNA, 32 nt, Human
ugcucucagaguucuucuguuucgugacccac

SEQ ID NO: 252902 - RNA, 32 nt, Human
ugcucucagccuguuugucgguaggcuucaga

SEQ ID NO: 252903 - RNA, 23 nt, Human
ugcucucagcuggcagugcaaug

SEQ ID NO: 252904 - RNA, 32 nt, Human
ugcucucaggaagugggucaagcccugggaac

SEQ ID NO: 252905 - RNA, 30 nt, Human
ugcucucaggccucucugcuccugucuuuu

SEQ ID NO: 252906 - RNA, 32 nt, Human
ugcucucaucucugaccagcagaauccacccg

SEQ ID NO: 252907 - RNA, 32 nt, Human
ugcucucaugggcucaccugggcccaaggcac

SEQ ID NO: 252908 - RNA, 32 nt, Human
ugcucucauuuuugucaucgucugacuugaag

SEQ ID NO: 252909 - RNA, 32 nt, Human
ugcucuccaaaccugcuugcuugcaccccucu

SEQ ID NO: 252910 - RNA, 32 nt, Human
ugcucuccagccugggaggcacagcaaacugu

SEQ ID NO: 252911 - RNA, 32 nt, Human
ugcucuccagccugggcaacagaguaaaacuc

SEQ ID NO: 252912 - RNA, 32 nt, Human
ugcucuccaucgcuaccacucuagccuguggc

SEQ ID NO: 252913 - RNA, 32 nt, Human
ugcucucccaccucuaccuccacccccaccgg

SEQ ID NO: 252914 - RNA, 32 nt, Human
ugcucucccagagggaaggucuugcuguuugg

SEQ ID NO: 252915 - RNA, 32 nt, Human
ugcucucccaggcuggagugcagugguguaau

SEQ ID NO: 252916 - RNA, 32 nt, Human
ugcucucccaugggugauggugauccagaggc

SEQ ID NO: 252917 - RNA, 32 nt, Human
ugcucuccccuccuugaagaagccgcggacac

SEQ ID NO: 252918 - RNA, 32 nt, Human
ugcucucccuccuuuccucucccuugagcuug

SEQ ID NO: 252919 - RNA, 32 nt, Human
ugcucucccugaagaccccuccagagagaaaa

SEQ ID NO: 252920 - RNA, 32 nt, Human
ugcucucccuggaaggaagaguguucucggau

SEQ ID NO: 252921 - RNA, 32 nt, Human
ugcucuccgccucuccccucgcggggccggcu

SEQ ID NO: 252922 - RNA, 32 nt, Human
ugcucuccucaaagacgcaaaacauuuuccaa

SEQ ID NO: 252923 - RNA, 32 nt, Human
ugcucuccucaaggguaucagacggucguagg

SEQ ID NO: 252924 - RNA, 32 nt, Human
ugcucuccuccagccgagggacccuggugggg

SEQ ID NO: 252925 - RNA, 32 nt, Human
ugcucuccugcacugacccuuuggaggggguc

SEQ ID NO: 252926 - RNA, 32 nt, Human
ugcucuccuuggccggggacagcuccagcagc

SEQ ID NO: 252927 - RNA, 32 nt, Human
ugcucucgagagcuccagcaggagaggcccuu

SEQ ID NO: 252928 - RNA, 32 nt, Human
ugcucucgcccaggcuggagugcagugggugg

SEQ ID NO: 252929 - RNA, 32 nt, Human
ugcucucggaacccuggcgucucuccaccagc

SEQ ID NO: 252930 - RNA, 32 nt, Human
ugcucucguggcuucacuggccacuuucucaa

SEQ ID NO: 252931 - RNA, 32 nt, Human
ugcucucuaccagauugcucagcuacuccuaa

SEQ ID NO: 252932 - RNA, 32 nt, Human
ugcucucuacccagcccaucuugccuccaugg

SEQ ID NO: 252933 - RNA, 32 nt, Human
ugcucucucaacaucacauacagcuucagcug

SEQ ID NO: 252934 - RNA, 32 nt, Human
ugcucucucacccaggcuggaguguaagugac

SEQ ID NO: 252935 - RNA, 32 nt, Human
ugcucucuccagggccagucucuguguguggg

SEQ ID NO: 252936 - RNA, 32 nt, Human
ugcucucugccuggcuccugaguccucugcca

SEQ ID NO: 252937 - RNA, 21 nt, Human
ugcucucuggagcugcccgcc

SEQ ID NO: 252938 - RNA, 32 nt, Human
ugcucucuggcaggcaggcuaggaagcucuag

SEQ ID NO: 252939 - RNA, 32 nt, Human
ugcucucuggccaagcccugggugggaggcca

SEQ ID NO: 252940 - RNA, 32 nt, Human
ugcucucugggagcccugaggaccgaguggcc

SEQ ID NO: 252941 - RNA, 32 nt, Human
ugcucucuguccgaucugugcauguuauuuuu

SEQ ID NO: 252942 - RNA, 32 nt, Human
ugcucucuuacccaagcuggagugcagugaca

SEQ ID NO: 252943 - RNA, 32 nt, Human
ugcucucuuccugguccucugcuucucuggau

SEQ ID NO: 252944 - RNA, 32 nt, Human
ugcucucuuuaaaucaaguccuuuaauuaaga

SEQ ID NO: 252945 - RNA, 32 nt, Human
ugcucugaaaguaacccagcuuguugcucuaa

SEQ ID NO: 252946 - RNA, 20 nt, Human
ugcucugaacccagggcaac

SEQ ID NO: 252947 - RNA, 32 nt, Human
ugcucugacagagaagucauggagucauugcc

SEQ ID NO: 252948 - RNA, 32 nt, Human
ugcucugacaggagucaggauucggucuguuu

SEQ ID NO: 252949 - RNA, 32 nt, Human
ugcucugaccacacuugaggagcccuucagcc

SEQ ID NO: 252950 - RNA, 32 nt, Human
ugcucugacggccucguuccccuagcaguugc

SEQ ID NO: 252951 - RNA, 19 nt, Human
ugcucugacucucugaaug

SEQ ID NO: 252952 - RNA, 32 nt, Human
ugcucugagagcagaccacucuugccuugaug

SEQ ID NO: 252953 - RNA, 32 nt, Human
ugcucugagauggggaacagaacacacaagua

SEQ ID NO: 252954 - RNA, 32 nt, Human
ugcucugagcaaccccagcucugccucacagg

SEQ ID NO: 252955 - RNA, 32 nt, Human
ugcucugagcaccuccacaccccacugccucu

SEQ ID NO: 252956 - RNA, 32 nt, Human
ugcucugagcagugaccucccuuuccuccgug

SEQ ID NO: 252957 - RNA, 32 nt, Human
ugcucugagcuucuucauauuucaccuucacc

SEQ ID NO: 252958 - RNA, 32 nt, Human
ugcucugaggggcaggaguuauccagauccca

SEQ ID NO: 252959 - RNA, 32 nt, Human
ugcucugaggguggguccaggcagacaugugg

SEQ ID NO: 252960 - RNA, 32 nt, Human
ugcucugauggggacaggcaggaaguccuucg

SEQ ID NO: 252961 - RNA, 32 nt, Human
ugcucugaugucccuccuaugaggggacucug

SEQ ID NO: 252962 - RNA, 32 nt, Human
ugcucugcaacaaguccugucugacccccaau

SEQ ID NO: 252963 - RNA, 32 nt, Human
ugcucugcacccggacacuugcucuguccccg

SEQ ID NO: 252964 - RNA, 32 nt, Human
ugcucugcagguucuucauacagcugccucug

SEQ ID NO: 252965 - RNA, 32 nt, Human
ugcucugcaucaacauggcccaugucagcccc

SEQ ID NO: 252966 - RNA, 32 nt, Human
ugcucugccacccaggcuggagugcaguggug

SEQ ID NO: 252967 - RNA, 32 nt, Human
ugcucugccacucuccugucauccaguuggcu

SEQ ID NO: 252968 - RNA, 31 nt, Human
ugcucugccauccuugucccugugucuccug

SEQ ID NO: 252969 - RNA, 32 nt, Human
ugcucugcccacuccaucaccaugaagccugg

SEQ ID NO: 252970 - RNA, 32 nt, Human
ugcucugcccagccucgcgugaccucagagag

SEQ ID NO: 252971 - RNA, 32 nt, Human
ugcucugcccaggagguggcguccagcagucc

SEQ ID NO: 252972 - RNA, 23 nt, Human
ugcucugcccccaacucccggag

SEQ ID NO: 252973 - RNA, 32 nt, Human
ugcucugccccuucugcucacugugaaggccg

SEQ ID NO: 252974 - RNA, 32 nt, Human
ugcucugccugggagggguggcuguaucccug

SEQ ID NO: 252975 - RNA, 32 nt, Human
ugcucugccugggauaaacacauuucaagagu

SEQ ID NO: 252976 - RNA, 32 nt, Human
ugcucugccuuuuagcuucuaaaaggaaagau

SEQ ID NO: 252977 - RNA, 32 nt, Human
ugcucugcgcccaggauggagugcaguggcau

SEQ ID NO: 252978 - RNA, 19 nt, Human
ugcucugcgggacaguccc

SEQ ID NO: 252979 - RNA, 32 nt, Human
ugcucugcuacuugagaugauggagagcaggu

SEQ ID NO: 252980 - RNA, 25 nt, Human
ugcucugcugcacccaccagccccg

SEQ ID NO: 252981 - RNA, 22 nt, Human
ugcucugcugccugcccggggu

SEQ ID NO: 252982 - RNA, 20 nt, Human
ugcucugcuggagugcggug

SEQ ID NO: 252983 - RNA, 32 nt, Human
ugcucugcugggucagcaucuccagccaccug

SEQ ID NO: 252984 - RNA, 32 nt, Human
ugcucugcuuguagacuggccaguguccauga

SEQ ID NO: 252985 - RNA, 32 nt, Human
ugcucuggagagguagggccagaggaaugcug

SEQ ID NO: 252986 - RNA, 32 nt, Human
ugcucuggaggaaguucuccagcuucagcuca

SEQ ID NO: 252987 - RNA, 19 nt, Human
ugcucuggaggcaggcugg

SEQ ID NO: 252988 - RNA, 32 nt, Human
ugcucuggaggcaggcugggcgguggcggccg

SEQ ID NO: 252989 - RNA, 32 nt, Human
ugcucuggagugggggagguugguggaccaug

SEQ ID NO: 252990 - RNA, 20 nt, Human
ugcucuggauuucuagcaca

SEQ ID NO: 252991 - RNA, 31 nt, Human
ugcucuggccucucugguucuguucuuggcc

SEQ ID NO: 252992 - RNA, 21 nt, Human
ugcucuggccugccuagcaca

SEQ ID NO: 252993 - RNA, 32 nt, Human
ugcucuggcgcccaggcuggaguacaguggca

SEQ ID NO: 252994 - RNA, 32 nt, Human
ugcucuggcggugguuguccaggcucugcaga

SEQ ID NO: 252995 - RNA, 32 nt, Human
ugcucugggauccuccugccucagcugggcuu

SEQ ID NO: 252996 - RNA, 32 nt, Human
ugcucugggaucugcuuuuccacaugugugua

SEQ ID NO: 252997 - RNA, 32 nt, Human
ugcucugggaucugguggauagaugccaagga

SEQ ID NO: 252998 - RNA, 32 nt, Human
ugcucugggcuucucuccuguuuuccccaaua

SEQ ID NO: 252999 - RNA, 32 nt, Human
ugcucuggggacucucgccggggaagaugggg

SEQ ID NO: 253000 - RNA, 32 nt, Human
ugcucuggggcccaugugcaagugaccugugc

SEQ ID NO: 253001 - RNA, 23 nt, Human
ugcucuggggccucgcagccccg

SEQ ID NO: 253002 - RNA, 21 nt, Human
ugcucugggguccuugacaca

SEQ ID NO: 253003 - RNA, 32 nt, Human
ugcucugguaugacagacuaucagagguucca

SEQ ID NO: 253004 - RNA, 32 nt, Human
ugcucugguccaccccguccugacccccucug

SEQ ID NO: 253005 - RNA, 32 nt, Human
ugcucugguggaggugggcauggggucuguuc

SEQ ID NO: 253006 - RNA, 32 nt, Human
ugcucugguggaguugggaagggauaggaccu

SEQ ID NO: 253007 - RNA, 32 nt, Human
ugcucugguucauuggaacagaaagaaaugga

SEQ ID NO: 253008 - RNA, 32 nt, Human
ugcucuguagggcugaaggccgcccgagguuc

SEQ ID NO: 253009 - RNA, 32 nt, Human
ugcucuguagucaugcagaucccagcuuuacc

SEQ ID NO: 253010 - RNA, 32 nt, Human
ugcucugucaccaaggcuggagugcagcggug

SEQ ID NO: 253011 - RNA, 32 nt, Human
ugcucugucaccaggccggagugcaguggugu

SEQ ID NO: 253012 - RNA, 32 nt, Human
ugcucugucaccaggcuggagggcaguggcgc

SEQ ID NO: 253013 - RNA, 32 nt, Human
ugcucugucaccaggcuggagugcagcggcgc

SEQ ID NO: 253014 - RNA, 32 nt, Human
ugcucugucaccaggcuggagugcaguggagg

SEQ ID NO: 253015 - RNA, 32 nt, Human
ugcucugucaccaggcuggagugcaguggcau

SEQ ID NO: 253016 - RNA, 32 nt, Human
ugcucugucaccaggcuggagugcgguggcau

SEQ ID NO: 253017 - RNA, 32 nt, Human
ugcucugucacccaagcuggagugcaguggca

SEQ ID NO: 253018 - RNA, 32 nt, Human
ugcucugucacccagacuggagugcaguggca

SEQ ID NO: 253019 - RNA, 32 nt, Human
ugcucugucacccagacuggagugcaguggug

SEQ ID NO: 253020 - RNA, 32 nt, Human
ugcucugucacccaggcuagagugcaauggca

SEQ ID NO: 253021 - RNA, 32 nt, Human
ugcucugucacccaggcuagagugcaguagca

SEQ ID NO: 253022 - RNA, 32 nt, Human
ugcucugucacccaggcuggaaugcagugcag

SEQ ID NO: 253023 - RNA, 32 nt, Human
ugcucugucacccaggcuggaaugcaguggca

SEQ ID NO: 253024 - RNA, 32 nt, Human
ugcucugucacccaggcuggagcguaauggca

SEQ ID NO: 253025 - RNA, 32 nt, Human
ugcucugucacccaggcuggaguacacuggca

SEQ ID NO: 253026 - RNA, 32 nt, Human
ugcucugucacccaggcuggaguacaguggcg

SEQ ID NO: 253027 - RNA, 32 nt, Human
ugcucugucacccaggcuggagugcaaugacg

SEQ ID NO: 253028 - RNA, 32 nt, Human
ugcucugucacccaggcuggagugcaaugggc

SEQ ID NO: 253029 - RNA, 32 nt, Human
ugcucugucacccaggcuggagugcaauggug

SEQ ID NO: 253030 - RNA, 32 nt, Human
ugcucugucacccaggcuggagugcaguagca

SEQ ID NO: 253031 - RNA, 32 nt, Human
ugcucugucacccaggcuggagugcagugaca

SEQ ID NO: 253032 - RNA, 32 nt, Human
ugcucugucacccaggcuggagugcagugcug

SEQ ID NO: 253033 - RNA, 32 nt, Human
ugcucugucacccaggcuggagugcaguggca

SEQ ID NO: 253034 - RNA, 32 nt, Human
ugcucugucacccaggcuggagugcaguggcg

SEQ ID NO: 253035 - RNA, 32 nt, Human
ugcucugucacccaggcuggagugcaguggua

SEQ ID NO: 253036 - RNA, 32 nt, Human
ugcucugucacccaggcuggagugcaguggug

SEQ ID NO: 253037 - RNA, 32 nt, Human
ugcucugucacccaggcuggagugccauggca

SEQ ID NO: 253038 - RNA, 32 nt, Human
ugcucugucacccaggcuggagugccguggca

SEQ ID NO: 253039 - RNA, 32 nt, Human
ugcucugucacccaggcuggagugcgauggcg

SEQ ID NO: 253040 - RNA, 32 nt, Human
ugcucugucacccaggcuggagugcgguggcg

SEQ ID NO: 253041 - RNA, 32 nt, Human
ugcucugucacccaggcuggagugcuauggcu

SEQ ID NO: 253042 - RNA, 32 nt, Human
ugcucugucacccaggcuggagugcuguggug

SEQ ID NO: 253043 - RNA, 32 nt, Human
ugcucugucacccaggcuggggcgcaauggca

SEQ ID NO: 253044 - RNA, 32 nt, Human
ugcucugucacccaggcugucguaaguggcaa

SEQ ID NO: 253045 - RNA, 32 nt, Human
ugcucugucacccaggcuugagugcaguggug

SEQ ID NO: 253046 - RNA, 32 nt, Human
ugcucugucacccagguuggagugcaguggug

SEQ ID NO: 253047 - RNA, 32 nt, Human
ugcucugucacccagguuggagugcauuggug

SEQ ID NO: 253048 - RNA, 32 nt, Human
ugcucugucacccagguuggagugccauggca

SEQ ID NO: 253049 - RNA, 32 nt, Human
ugcucugucacccagucuggagugcaguggca

SEQ ID NO: 253050 - RNA, 32 nt, Human
ugcucugucacccaguuuggagugcaguggug

SEQ ID NO: 253051 - RNA, 32 nt, Human
ugcucugucacccauccuggagugcaguagug

SEQ ID NO: 253052 - RNA, 32 nt, Human
ugcucugucacccgggcuggagugcaguggcg

SEQ ID NO: 253053 - RNA, 32 nt, Human
ugcucugucacccgggcuggagugcaguggug

SEQ ID NO: 253054 - RNA, 32 nt, Human
ugcucugucacccgggcuggagugcuguggcu

SEQ ID NO: 253055 - RNA, 32 nt, Human
ugcucugucaccuaggcuggagugcaguggca

SEQ ID NO: 253056 - RNA, 32 nt, Human
ugcucugucaccuaggcuggagugcagugggg

SEQ ID NO: 253057 - RNA, 32 nt, Human
ugcucugucacucaggcuggaaugcaguggcg

SEQ ID NO: 253058 - RNA, 32 nt, Human
ugcucugucacucaggcuggaguacaguggca

SEQ ID NO: 253059 - RNA, 32 nt, Human
ugcucugucacucaugcuggagugcaguggcg

SEQ ID NO: 253060 - RNA, 32 nt, Human
ugcucugucacugaggcuggagugcaguggcg

SEQ ID NO: 253061 - RNA, 32 nt, Human
ugcucugucacuuggguuggagugcaguugca

SEQ ID NO: 253062 - RNA, 32 nt, Human
ugcucugucaucaggcuggagugcaguggcgc

SEQ ID NO: 253063 - RNA, 32 nt, Human
ugcucugucaucaggcuggagugcaguggcuc

SEQ ID NO: 253064 - RNA, 32 nt, Human
ugcucugucauccaaacuggagugcaguggca

SEQ ID NO: 253065 - RNA, 32 nt, Human
ugcucugucauccaggcuggaggguaguggcg

SEQ ID NO: 253066 - RNA, 32 nt, Human
ugcucugucauccaggcuggagugcagugaug

SEQ ID NO: 253067 - RNA, 32 nt, Human
ugcucugucauccagguuggagugcaguggca

SEQ ID NO: 253068 - RNA, 18 nt, Human
ugcucugucaucucccua

SEQ ID NO: 253069 - RNA, 32 nt, Human
ugcucugucaugcaggcuggagugcgguggug

SEQ ID NO: 253070 - RNA, 32 nt, Human
ugcucugucauucaggcuggagugcaguggug

SEQ ID NO: 253071 - RNA, 23 nt, Human
ugcucuguccacuggccacacuc

SEQ ID NO: 253072 - RNA, 26 nt, Human
ugcucuguccagcuuuccccagggug

SEQ ID NO: 253073 - RNA, 32 nt, Human
ugcucuguccagggaggagcugccucagaacu

SEQ ID NO: 253074 - RNA, 28 nt, Human
ugcucuguccccacacguuccucacaua

SEQ ID NO: 253075 - RNA, 32 nt, Human
ugcucugucccccaggcuggagugcaguggca

SEQ ID NO: 253076 - RNA, 32 nt, Human
ugcucugucccccaugcuggagugcaguggca

SEQ ID NO: 253077 - RNA, 32 nt, Human
ugcucugucccucaggcuggagugcaguagcg

SEQ ID NO: 253078 - RNA, 32 nt, Human
ugcucugucgaccaggcuggagugcaggggca

SEQ ID NO: 253079 - RNA, 32 nt, Human
ugcucugucgccaagccagagugcaguggugu

SEQ ID NO: 253080 - RNA, 32 nt, Human
ugcucugucgccaaggcuggagggcaauggca

SEQ ID NO: 253081 - RNA, 32 nt, Human
ugcucugucgccaaguuggagcuugcagugag

SEQ ID NO: 253082 - RNA, 32 nt, Human
ugcucugucgccaaguuggagugcaauggugc

SEQ ID NO: 253083 - RNA, 32 nt, Human
ugcucugucgccagacuggagugcaguggcgc

SEQ ID NO: 253084 - RNA, 32 nt, Human
ugcucugucgccaggcuggagugcaauggcgu

SEQ ID NO: 253085 - RNA, 32 nt, Human
ugcucugucgccaggcuggagugcaguggcgc

SEQ ID NO: 253086 - RNA, 32 nt, Human
ugcucugucgcccacguuggagugcagugaug

SEQ ID NO: 253087 - RNA, 32 nt, Human
ugcucugucgcccagacuggagugcaauggug

SEQ ID NO: 253088 - RNA, 32 nt, Human
ugcucugucgcccaggauggagugcaguggcg

SEQ ID NO: 253089 - RNA, 32 nt, Human
ugcucugucgcccaggcuagagugcaguggua

SEQ ID NO: 253090 - RNA, 32 nt, Human
ugcucugucgcccaggcucgagugcaguggca

SEQ ID NO: 253091 - RNA, 32 nt, Human
ugcucugucgcccaggcugcagugcgguggug

SEQ ID NO: 253092 - RNA, 32 nt, Human
ugcucugucgcccaggcuggaaugcaguggcg

SEQ ID NO: 253093 - RNA, 32 nt, Human
ugcucugucgcccaggcuggaaugcaguggug

SEQ ID NO: 253094 - RNA, 32 nt, Human
ugcucugucgcccaggcuggaguacaguggug

SEQ ID NO: 253095 - RNA, 32 nt, Human
ugcucugucgcccaggcuggagugcagaggug

SEQ ID NO: 253096 - RNA, 32 nt, Human
ugcucugucgcccaggcuggagugcagucgug

SEQ ID NO: 253097 - RNA, 32 nt, Human
ugcucugucgcccaggcuggagugcagugaug

SEQ ID NO: 253098 - RNA, 32 nt, Human
ugcucugucgcccaggcuggagugcaguggca

SEQ ID NO: 253099 - RNA, 32 nt, Human
ugcucugucgcccaggcuggagugcaguggcc

SEQ ID NO: 253100 - RNA, 32 nt, Human
ugcucugucgcccaggcuggagugcaguggcg

SEQ ID NO: 253101 - RNA, 32 nt, Human
ugcucugucgcccaggcuggagugcaguggua

SEQ ID NO: 253102 - RNA, 32 nt, Human
ugcucugucgcccaggcuggagugcaguggug

SEQ ID NO: 253103 - RNA, 32 nt, Human
ugcucugucgcccaggcuggaguucaguggcg

SEQ ID NO: 253104 - RNA, 32 nt, Human
ugcucugucgcccaggcuguagugcaauggcg

SEQ ID NO: 253105 - RNA, 32 nt, Human
ugcucugucgcccagguuggagugcaguggca

SEQ ID NO: 253106 - RNA, 32 nt, Human
ugcucugucgcccagguuggagugcaguggcg

SEQ ID NO: 253107 - RNA, 32 nt, Human
ugcucugucgcccaugcuggagugcaguggcg

SEQ ID NO: 253108 - RNA, 32 nt, Human
ugcucugucgcgcaggguggagugcgguggca

SEQ ID NO: 253109 - RNA, 32 nt, Human
ugcucugucgcucaggcuggagagcgguggug

SEQ ID NO: 253110 - RNA, 32 nt, Human
ugcucugucgcucaggcuggagugcaguggcg

SEQ ID NO: 253111 - RNA, 32 nt, Human
ugcucugucgcucgcgcuggagugcaguggca

SEQ ID NO: 253112 - RNA, 32 nt, Human
ugcucugucgucgaggcuggaguguaguggug

SEQ ID NO: 253113 - RNA, 32 nt, Human
ugcucugucuccaggcuggaguacaguggugc

SEQ ID NO: 253114 - RNA, 32 nt, Human
ugcucugucucccaggcuagagugcaauggca

SEQ ID NO: 253115 - RNA, 32 nt, Human
ugcucugucucccaggcuggagcguaguaaug

SEQ ID NO: 253116 - RNA, 32 nt, Human
ugcucugucucccaggcuggaggucaguggca

SEQ ID NO: 253117 - RNA, 32 nt, Human
ugcucugucucccaggcuggagugcaggcuug

SEQ ID NO: 253118 - RNA, 32 nt, Human
ugcucugucucccaggcuggagugcagugaca

SEQ ID NO: 253119 - RNA, 32 nt, Human
ugcucugucucccaggcuggagugcaguggca

SEQ ID NO: 253120 - RNA, 32 nt, Human
ugcucugucucccaggcuggagugcuauggug

SEQ ID NO: 253121 - RNA, 32 nt, Human
ugcucugucuccccuguuucugaggggccuug

SEQ ID NO: 253122 - RNA, 32 nt, Human
ugcucugucucccgggcuggagugcaguggcg

SEQ ID NO: 253123 - RNA, 32 nt, Human
ugcucugucuccuaggcuggagcgcaguggug

SEQ ID NO: 253124 - RNA, 32 nt, Human
ugcucugucuccucccaccaguccaguuagcu

SEQ ID NO: 253125 - RNA, 23 nt, Human
ugcucugucucguucuuuacaca

SEQ ID NO: 253126 - RNA, 32 nt, Human
ugcucugucugucacccaggcuggaguacagu

SEQ ID NO: 253127 - RNA, 32 nt, Human
ugcucugugaccugaggguauuggacaauuug

SEQ ID NO: 253128 - RNA, 32 nt, Human
ugcucugugagacuagagacuguguccacgga

SEQ ID NO: 253129 - RNA, 27 nt, Human
ugcucugugagaggcauucacuaguau

SEQ ID NO: 253130 - RNA, 24 nt, Human
ugcucugugagccccacagcccug

SEQ ID NO: 253131 - RNA, 32 nt, Human
ugcucugugauacccaauaacuccuucaccua

SEQ ID NO: 253132 - RNA, 23 nt, Human
ugcucugugcauuuuuugagaca

SEQ ID NO: 253133 - RNA, 32 nt, Human
ugcucugugcccacccuccacucuccucuucc

SEQ ID NO: 253134 - RNA, 32 nt, Human
ugcucugugcuagacagaugugcggagggacu

SEQ ID NO: 253135 - RNA, 32 nt, Human
ugcucugugcucagcugcaaccacagccucgu

SEQ ID NO: 253136 - RNA, 32 nt, Human
ugcucugugcuccccacuccauuucucugucc

SEQ ID NO: 253137 - RNA, 32 nt, Human
ugcucuguggcccaggcuggagugcaguggca

SEQ ID NO: 253138 - RNA, 32 nt, Human
ugcucuguggcccaggcuggaguguaguggcg

SEQ ID NO: 253139 - RNA, 24 nt, Human
ugcucuguggcuuuucccaacaca

SEQ ID NO: 253140 - RNA, 32 nt, Human
ugcucugugguguuggacaucccuggaaaccu

SEQ ID NO: 253141 - RNA, 18 nt, Human
ugcucuguguacacugug

SEQ ID NO: 253142 - RNA, 32 nt, Human
ugcucuguguccucccugugguggggcucccu

SEQ ID NO: 253143 - RNA, 32 nt, Human
ugcucuguguuugggccucucuugcugucauu

SEQ ID NO: 253144 - RNA, 32 nt, Human
ugcucuguuacccaggcuggagugcagugggu

SEQ ID NO: 253145 - RNA, 32 nt, Human
ugcucuguuacccaggcuggagugcaguggug

SEQ ID NO: 253146 - RNA, 32 nt, Human
ugcucuguuacccaggcuggaguguaguggug

SEQ ID NO: 253147 - RNA, 32 nt, Human
ugcucuguuacccaugcuggaguacgguggcg

SEQ ID NO: 253148 - RNA, 22 nt, Human
ugcucuguuacuacuuugacca

SEQ ID NO: 253149 - RNA, 32 nt, Human
ugcucuguuauccaggcuggugugcagugaua

SEQ ID NO: 253150 - RNA, 32 nt, Human
ugcucuguucauuuucuguuguuuuucugcac

SEQ ID NO: 253151 - RNA, 20 nt, Human
ugcucuguuccauuuuaaca

SEQ ID NO: 253152 - RNA, 32 nt, Human
ugcucuguuccucagguggggcccagagcccu

SEQ ID NO: 253153 - RNA, 31 nt, Human
ugcucuguucucaaggauuguugagauggag

SEQ ID NO: 253154 - RNA, 32 nt, Human
ugcucuguugccaaguuaagugcagugguaug

SEQ ID NO: 253155 - RNA, 32 nt, Human
ugcucuguugccacugcacucuggccugggca

SEQ ID NO: 253156 - RNA, 32 nt, Human
ugcucuguugcccacauuggagugcaguggca

SEQ ID NO: 253157 - RNA, 32 nt, Human
ugcucuguugcccacgcaggagugcaguggca

SEQ ID NO: 253158 - RNA, 32 nt, Human
ugcucuguugcccagacuggagugcaguggcg

SEQ ID NO: 253159 - RNA, 32 nt, Human
ugcucuguugcccagcuggagugcaguggugu

SEQ ID NO: 253160 - RNA, 32 nt, Human
ugcucuguugcccaggcuagagugcaguggca

SEQ ID NO: 253161 - RNA, 32 nt, Human
ugcucuguugcccaggcuagagugcaguggug

SEQ ID NO: 253162 - RNA, 32 nt, Human
ugcucuguugcccaggcuccagugcaguggug

SEQ ID NO: 253163 - RNA, 32 nt, Human
ugcucuguugcccaggcuggaaugcaguggca

SEQ ID NO: 253164 - RNA, 32 nt, Human
ugcucuguugcccaggcuggaaugcaguggcg

SEQ ID NO: 253165 - RNA, 32 nt, Human
ugcucuguugcccaggcuggaguacagugguc

SEQ ID NO: 253166 - RNA, 32 nt, Human
ugcucuguugcccaggcuggaguacauuggug

SEQ ID NO: 253167 - RNA, 32 nt, Human
ugcucuguugcccaggcuggaguacauuugcc

SEQ ID NO: 253168 - RNA, 32 nt, Human
ugcucuguugcccaggcuggaguccaguggca

SEQ ID NO: 253169 - RNA, 32 nt, Human
ugcucuguugcccaggcuggagugcaauggca

SEQ ID NO: 253170 - RNA, 32 nt, Human
ugcucuguugcccaggcuggagugcacuggcu

SEQ ID NO: 253171 - RNA, 32 nt, Human
ugcucuguugcccaggcuggagugcagcggca

SEQ ID NO: 253172 - RNA, 32 nt, Human
ugcucuguugcccaggcuggagugcagggaca

SEQ ID NO: 253173 - RNA, 32 nt, Human
ugcucuguugcccaggcuggagugcaguagca

SEQ ID NO: 253174 - RNA, 32 nt, Human
ugcucuguugcccaggcuggagugcagucgca

SEQ ID NO: 253175 - RNA, 32 nt, Human
ugcucuguugcccaggcuggagugcagugacg

SEQ ID NO: 253176 - RNA, 32 nt, Human
ugcucuguugcccaggcuggagugcaguggca

SEQ ID NO: 253177 - RNA, 32 nt, Human
ugcucuguugcccaggcuggagugcaguggcg

SEQ ID NO: 253178 - RNA, 32 nt, Human
ugcucuguugcccaggcuggagugcaguggua

SEQ ID NO: 253179 - RNA, 32 nt, Human
ugcucuguugcccaggcuggagugcaguggug

SEQ ID NO: 253180 - RNA, 32 nt, Human
ugcucuguugcccaggcuggagugcgguggac

SEQ ID NO: 253181 - RNA, 32 nt, Human
ugcucuguugcccaggcuggaguguagagaca

SEQ ID NO: 253182 - RNA, 32 nt, Human
ugcucuguugcccaggcuggaguguaguggua

SEQ ID NO: 253183 - RNA, 32 nt, Human
ugcucuguugcccaggcuggaguguaguggug

SEQ ID NO: 253184 - RNA, 32 nt, Human
ugcucuguugcccaggcugggugcagcggugc

SEQ ID NO: 253185 - RNA, 32 nt, Human
ugcucuguugcccaggcugguguguagugauc

SEQ ID NO: 253186 - RNA, 32 nt, Human
ugcucuguugcccagguuggagugcaguggca

SEQ ID NO: 253187 - RNA, 32 nt, Human
ugcucuguugcccaugcuggagugcauuggca

SEQ ID NO: 253188 - RNA, 32 nt, Human
ugcucuguugcccgggcuggaguacaauggca

SEQ ID NO: 253189 - RNA, 32 nt, Human
ugcucuguugcccgggcuggagugcaguggug

SEQ ID NO: 253190 - RNA, 32 nt, Human
ugcucuguugccuaggcuggagugcaguggcg

SEQ ID NO: 253191 - RNA, 32 nt, Human
ugcucuguugccugggcuggagaacaguggca

SEQ ID NO: 253192 - RNA, 32 nt, Human
ugcucuguugccugggcuggagugcagugcca

SEQ ID NO: 253193 - RNA, 32 nt, Human
ugcucuguugcugaggcuggagugcagugaug

SEQ ID NO: 253194 - RNA, 32 nt, Human
ugcucuguuggccaggcuggaaugcaguggca

SEQ ID NO: 253195 - RNA, 32 nt, Human
ugcucuguuguccaggcuggagggcagugaca

SEQ ID NO: 253196 - RNA, 32 nt, Human
ugcucuguuguccaggcuggagugcaguggca

SEQ ID NO: 253197 - RNA, 25 nt, Human
ugcucuguuuacuuauuucugcaua

SEQ ID NO: 253198 - RNA, 20 nt, Human
ugcucuguuugcuugauaca

SEQ ID NO: 253199 - RNA, 22 nt, Human
ugcucuguuuguccuuuauaca

SEQ ID NO: 253200 - RNA, 18 nt, Human
ugcucuguuuuuaccaca

SEQ ID NO: 253201 - RNA, 22 nt, Human
ugcucuguuuuuuccuaaaaua

SEQ ID NO: 253202 - RNA, 32 nt, Human
ugcucuuacccaggcugagugcaguggcagaa

SEQ ID NO: 253203 - RNA, 32 nt, Human
ugcucuuagggagggcaaagguucgggggcag

SEQ ID NO: 253204 - RNA, 32 nt, Human
ugcucuuaguacugagggaugaaaguuccaga

SEQ ID NO: 253205 - RNA, 18 nt, Human
ugcucuucacucucccca

SEQ ID NO: 253206 - RNA, 32 nt, Human
ugcucuucagguagaaagcccugguugaacaa

SEQ ID NO: 253207 - RNA, 32 nt, Human
ugcucuucaguuccucacugccuucuugggau

SEQ ID NO: 253208 - RNA, 32 nt, Human
ugcucuucauagacacaucuugcagcauuuuu

SEQ ID NO: 253209 - RNA, 32 nt, Human
ugcucuucaucccauuccaggcagccucuguc

SEQ ID NO: 253210 - RNA, 32 nt, Human
ugcucuuccauggcuaacggggcagaacuguu

SEQ ID NO: 253211 - RNA, 32 nt, Human
ugcucuucccacggggcagacagcaggacaca

SEQ ID NO: 253212 - RNA, 32 nt, Human
ugcucuucccuugcuguuauucauacacacuu

SEQ ID NO: 253213 - RNA, 32 nt, Human
ugcucuuccucccucacucugccuuccgagcu

SEQ ID NO: 253214 - RNA, 32 nt, Human
ugcucuuccuucaccucuagucacuuucuauu

SEQ ID NO: 253215 - RNA, 32 nt, Human
ugcucuuccuucaucaaccaccuuccccaagc

SEQ ID NO: 253216 - RNA, 32 nt, Human
ugcucuuccuucaugauccuaacauucugcua

SEQ ID NO: 253217 - RNA, 32 nt, Human
ugcucuucuaucuccacaacgugagccuggaa

SEQ ID NO: 253218 - RNA, 32 nt, Human
ugcucuucucaccucucccuuaccccguuccc

SEQ ID NO: 253219 - RNA, 21 nt, Human
ugcucuucucccagcuggaug

SEQ ID NO: 253220 - RNA, 20 nt, Human
ugcucuucuccguccccagg

SEQ ID NO: 253221 - RNA, 32 nt, Human
ugcucuucucuaauggacaaacaaacaggcuc

SEQ ID NO: 253222 - RNA, 32 nt, Human
ugcucuucucucuaucuaugcuuaaugccuuu

SEQ ID NO: 253223 - RNA, 32 nt, Human
ugcucuucugaugaguuggagaggaggcagcc

SEQ ID NO: 253224 - RNA, 32 nt, Human
ugcucuucugcagccucaucucugccauucuu

SEQ ID NO: 253225 - RNA, 32 nt, Human
ugcucuucugcagucaggccacugccuggggg

SEQ ID NO: 253226 - RNA, 32 nt, Human
ugcucuucugcagucaggucacugccuacugc

SEQ ID NO: 253227 - RNA, 21 nt, Human
ugcucuucugugcccagggug

SEQ ID NO: 253228 - RNA, 32 nt, Human
ugcucuugacaucacuguacucccucucccuc

SEQ ID NO: 253229 - RNA, 32 nt, Human
ugcucuugauuccuugugucuccagucaugac

SEQ ID NO: 253230 - RNA, 32 nt, Human
ugcucuugcccaggcaggaguacaguagugca

SEQ ID NO: 253231 - RNA, 32 nt, Human
ugcucuugccgccccuuccuggguacagagcu

SEQ ID NO: 253232 - RNA, 22 nt, Human
ugcucuugcucucaaggggcug

SEQ ID NO: 253233 - RNA, 32 nt, Human
ugcucuugcuguagagagcagcugcuucugcc

SEQ ID NO: 253234 - RNA, 31 nt, Human
ugcucuuggguggaggagacgaggggagggc

SEQ ID NO: 253235 - RNA, 32 nt, Human
ugcucuuggugaggagagcaagaggaaccaaa

SEQ ID NO: 253236 - RNA, 32 nt, Human
ugcucuugguuuuucugccuucugauuucuuu

SEQ ID NO: 253237 - RNA, 22 nt, Human
ugcucuuguaagaaguuagcug

SEQ ID NO: 253238 - RNA, 32 nt, Human
ugcucuugucgccuccugacccauucuuuuua

SEQ ID NO: 253239 - RNA, 32 nt, Human
ugcucuuuacuuucuuuacuugcugauuccuu

SEQ ID NO: 253240 - RNA, 32 nt, Human
ugcucuuuagcagccaaacaggagcaaaaugu

SEQ ID NO: 253241 - RNA, 32 nt, Human
ugcucuuuaugaccugcuuggcugccacugug

SEQ ID NO: 253242 - RNA, 32 nt, Human
ugcucuuucaaugcagcacccuugccauccca

SEQ ID NO: 253243 - RNA, 32 nt, Human
ugcucuuucugguacuggaggguggguaccuu

SEQ ID NO: 253244 - RNA, 32 nt, Human
ugcucuuugcaaucccuaagcccucugguccu

SEQ ID NO: 253245 - RNA, 32 nt, Human
ugcucuuuggcaccaggcaggagaugcugcag

SEQ ID NO: 253246 - RNA, 32 nt, Human
ugcucuuuguugcccaggcuggagugcagugg

SEQ ID NO: 253247 - RNA, 20 nt, Human
ugcugaaaaaagugugguca

SEQ ID NO: 253248 - RNA, 32 nt, Human
ugcugaaaaccuuugaaccucacgguguccug

SEQ ID NO: 253249 - RNA, 32 nt, Human
ugcugaaaacucgaauuacacacuucaguugg

SEQ ID NO: 253250 - RNA, 20 nt, Human
ugcugaaaaguggcucagau

SEQ ID NO: 253251 - RNA, 32 nt, Human
ugcugaaaaguggcucagaugcagaguguucu

SEQ ID NO: 253252 - RNA, 19 nt, Human
ugcugaaacguacuguggu

SEQ ID NO: 253253 - RNA, 20 nt, Human
ugcugaaacguacugugguc

SEQ ID NO: 253254 - RNA, 32 nt, Human
ugcugaaacuuguuccaccucaguccccucau

SEQ ID NO: 253255 - RNA, 32 nt, Human
ugcugaacaucauagccgaucuugccuucaga

SEQ ID NO: 253256 - RNA, 32 nt, Human
ugcugaacaucccugucuagugcacaggacag

SEQ ID NO: 253257 - RNA, 32 nt, Human
ugcugaacaucuaaaaggagagagggcccggu

SEQ ID NO: 253258 - RNA, 31 nt, Human
ugcugaacgauggcgaacacagcagaauggg

SEQ ID NO: 253259 - RNA, 21 nt, Human
ugcugaacggcggcagcggug

SEQ ID NO: 253260 - RNA, 32 nt, Human
ugcugaacugccacuccuccauccuccauggc

SEQ ID NO: 253261 - RNA, 21 nt, Human
ugcugaacuuggcugugacca

SEQ ID NO: 253262 - RNA, 32 nt, Human
ugcugaagaugccuagcguggcccaguuugug

SEQ ID NO: 253263 - RNA, 32 nt, Human
ugcugaagaugccuugaggugaaaugggggca

SEQ ID NO: 253264 - RNA, 32 nt, Human
ugcugaagcaagaaaccgacagauguugagga

SEQ ID NO: 253265 - RNA, 32 nt, Human
ugcugaagccccuagcacacacugcaugccuu

SEQ ID NO: 253266 - RNA, 32 nt, Human
ugcugaaggaacagguugcagcuaccuggugc

SEQ ID NO: 253267 - RNA, 32 nt, Human
ugcugaaggaggagaggauagugaagaagauu

SEQ ID NO: 253268 - RNA, 21 nt, Human
ugcugaaggagguggcugugg

SEQ ID NO: 253269 - RNA, 32 nt, Human
ugcugaaggcuccagccagcuguccuggguuu

SEQ ID NO: 253270 - RNA, 32 nt, Human
ugcugaaggcuggaguggguguggcaauuccu

SEQ ID NO: 253271 - RNA, 32 nt, Human
ugcugaagggaagagagguugcagcugagcaa

SEQ ID NO: 253272 - RNA, 32 nt, Human
ugcugaaggggacccucaugcuggaugguugg

SEQ ID NO: 253273 - RNA, 32 nt, Human
ugcugaaguaugucagcaccuuuucucacccu

SEQ ID NO: 253274 - RNA, 31 nt, Human
ugcugaagugagaggaagagucugaguuguc

SEQ ID NO: 253275 - RNA, 32 nt, Human
ugcugaagugauaucuggucucagggauugcu

SEQ ID NO: 253276 - RNA, 32 nt, Human
ugcugaagugauuuccagaaggacucauuuga

SEQ ID NO: 253277 - RNA, 32 nt, Human
ugcugaaguggggccuuccugauucuggggac

SEQ ID NO: 253278 - RNA, 32 nt, Human
ugcugaagugugucugugggaggcaggagaug

SEQ ID NO: 253279 - RNA, 19 nt, Human
ugcugaaguuucccuuaga

SEQ ID NO: 253280 - RNA, 22 nt, Human
ugcugaauacaaacagaugcag

SEQ ID NO: 253281 - RNA, 32 nt, Human
ugcugaauaggcaguaguugggagagagccuc

SEQ ID NO: 253282 - RNA, 24 nt, Human
ugcugaauaugggaagcaggggug

SEQ ID NO: 253283 - RNA, 20 nt, Human
ugcugaaucacuguugcuga

SEQ ID NO: 253284 - RNA, 32 nt, Human
ugcugaaucuucccuguugccuagaagggcuc

SEQ ID NO: 253285 - RNA, 32 nt, Human
ugcugaaucuuucugauccugcgguuucuccu

SEQ ID NO: 253286 - RNA, 32 nt, Human
ugcugaaugccaccucugggccucugcuccug

SEQ ID NO: 253287 - RNA, 22 nt, Human
ugcugaauuauauccuuuauua

SEQ ID NO: 253288 - RNA, 32 nt, Human
ugcugaauucuuuugaacgaugaucuuaaagg

SEQ ID NO: 253289 - RNA, 32 nt, Human
ugcugaauuggcuucuuuucuuuugaacuuaa

SEQ ID NO: 253290 - RNA, 32 nt, Human
ugcugacaaauacauaacauaguccgggacga

SEQ ID NO: 253291 - RNA, 32 nt, Human
ugcugacaaauagaggaugugggacccugacu

SEQ ID NO: 253292 - RNA, 32 nt, Human
ugcugacaccaucacaguauguucccuucuca

SEQ ID NO: 253293 - RNA, 32 nt, Human
ugcugacagccauagaccuuccugggcuucuc

SEQ ID NO: 253294 - RNA, 32 nt, Human
ugcugacagcucuucacaguccuggacuccug

SEQ ID NO: 253295 - RNA, 32 nt, Human
ugcugacagcugaaauaggcucugccuaccag

SEQ ID NO: 253296 - RNA, 32 nt, Human
ugcugacagcugccaagaaaaugcuucacuca

SEQ ID NO: 253297 - RNA, 32 nt, Human
ugcugacaggagacccagagagcuagggcugg

SEQ ID NO: 253298 - RNA, 32 nt, Human
ugcugacaggcagaagcugagguccucaguca

SEQ ID NO: 253299 - RNA, 32 nt, Human
ugcugacaggguccccagggagaccgugucag

SEQ ID NO: 253300 - RNA, 32 nt, Human
ugcugacaguccugcccugccugcuccucguu

SEQ ID NO: 253301 - RNA, 20 nt, Human
ugcugacauaaaaccaggac

SEQ ID NO: 253302 - RNA, 32 nt, Human
ugcugacaugacuucuuugccacucgguguca

SEQ ID NO: 253303 - RNA, 32 nt, Human
ugcugaccacaagcucugugcuggggguaccu

SEQ ID NO: 253304 - RNA, 32 nt, Human
ugcugaccacacuccggcuccuaugucaccuu

SEQ ID NO: 253305 - RNA, 32 nt, Human
ugcugaccacagucacaucacccaucagcaca

SEQ ID NO: 253306 - RNA, 32 nt, Human
ugcugaccagccuggccggcuggcggagaaaa

SEQ ID NO: 253307 - RNA, 32 nt, Human
ugcugacccagaucgacagcgagcccgagugc

SEQ ID NO: 253308 - RNA, 32 nt, Human
ugcugacccaggaaguucugggaguugccguu

SEQ ID NO: 253309 - RNA, 32 nt, Human
ugcugacccccugcagccuggagccagcccgg

SEQ ID NO: 253310 - RNA, 32 nt, Human
ugcugacccugccucggguugugucugcuaag

SEQ ID NO: 253311 - RNA, 32 nt, Human
ugcugacccuguaacccaaaggaggaaacagc

SEQ ID NO: 253312 - RNA, 32 nt, Human
ugcugaccuaaccagagucaucaugccucuug

SEQ ID NO: 253313 - RNA, 32 nt, Human
ugcugaccucaagugauccucccaccucagcc

SEQ ID NO: 253314 - RNA, 32 nt, Human
ugcugaccucaagugaucugcccacuuuggcc

SEQ ID NO: 253315 - RNA, 32 nt, Human
ugcugaccuggggcuuuuuaccugguggucug

SEQ ID NO: 253316 - RNA, 32 nt, Human
ugcugacggggagggggacaggcagggaguua

SEQ ID NO: 253317 - RNA, 32 nt, Human
ugcugacuccaugugugcuguccucugaaggc

SEQ ID NO: 253318 - RNA, 32 nt, Human
ugcugacugagugacuggagacagggaugaug

SEQ ID NO: 253319 - RNA, 32 nt, Human
ugcugacuggacuguguuuuuccuaugcagug

SEQ ID NO: 253320 - RNA, 32 nt, Human
ugcugacuggagagcugggaauauggcauuug

SEQ ID NO: 253321 - RNA, 32 nt, Human
ugcugacuggcagggcuuugggcaguuggcca

SEQ ID NO: 253322 - RNA, 32 nt, Human
ugcugacuggcaucugugccugccuuucuggc

SEQ ID NO: 253323 - RNA, 31 nt, Human
ugcugacugggcacacucaugccaaguuuca

SEQ ID NO: 253324 - RNA, 32 nt, Human
ugcugacuggggacccagaccgggagcugagc

SEQ ID NO: 253325 - RNA, 32 nt, Human
ugcugacuggucucucugccuccagaggggau

SEQ ID NO: 253326 - RNA, 32 nt, Human
ugcugacuucccaagcccuggugaccagacca

SEQ ID NO: 253327 - RNA, 32 nt, Human
ugcugacuugcagugugacucgggcccauugu

SEQ ID NO: 253328 - RNA, 32 nt, Human
ugcugacuuucuccuguccucuuccaguuuag

SEQ ID NO: 253329 - RNA, 21 nt, Human
ugcugagaaaagcugccugug

SEQ ID NO: 253330 - RNA, 32 nt, Human
ugcugagaaacggaggaggaggaggguuugcu

SEQ ID NO: 253331 - RNA, 18 nt, Human
ugcugagaaagagcuuga

SEQ ID NO: 253332 - RNA, 20 nt, Human
ugcugagaaauaaguaauca

SEQ ID NO: 253333 - RNA, 18 nt, Human
ugcugagaacucuuggau

SEQ ID NO: 253334 - RNA, 32 nt, Human
ugcugagaagcaguauaagccuuuuuaaccuu

SEQ ID NO: 253335 - RNA, 20 nt, Human
ugcugagaaggagcuguggu

SEQ ID NO: 253336 - RNA, 16 nt, Human
ugcugagaaggcugug

SEQ ID NO: 253337 - RNA, 22 nt, Human
ugcugagaaguagacaaaauca

SEQ ID NO: 253338 - RNA, 32 nt, Human
ugcugagaaugaggccuuccagcuucauccac

SEQ ID NO: 253339 - RNA, 18 nt, Human
ugcugagaauucuauggu

SEQ ID NO: 253340 - RNA, 20 nt, Human
ugcugagaauucuaugguca

SEQ ID NO: 253341 - RNA, 28 nt, Human
ugcugagacacuuucuuuuguguuuaca

SEQ ID NO: 253342 - RNA, 17 nt, Human
ugcugagagagacugug

SEQ ID NO: 253343 - RNA, 22 nt, Human
ugcugagagcauagccagauca

SEQ ID NO: 253344 - RNA, 32 nt, Human
ugcugagagccaaacagagcccagggagacuc

SEQ ID NO: 253345 - RNA, 32 nt, Human
ugcugagagccuaguccagcagguuucugccc

SEQ ID NO: 253346 - RNA, 32 nt, Human
ugcugagagcguuguccccuucccagggccuc

SEQ ID NO: 253347 - RNA, 32 nt, Human
ugcugagaggccccuagagacaacacccuucc

SEQ ID NO: 253348 - RNA, 32 nt, Human
ugcugagaucaaggcucacugcagccuugaac

SEQ ID NO: 253349 - RNA, 17 nt, Human
ugcugagauggcuguga

SEQ ID NO: 253350 - RNA, 32 nt, Human
ugcugagaugugggucuugaagagaauagcca

SEQ ID NO: 253351 - RNA, 32 nt, Human
ugcugagauuacaggcaugaaccacugugccc

SEQ ID NO: 253352 - RNA, 32 nt, Human
ugcugagauuacaggcaugacccaccgcguca

SEQ ID NO: 253353 - RNA, 32 nt, Human
ugcugagauuacaggcaugagccaccacaccc

SEQ ID NO: 253354 - RNA, 32 nt, Human
ugcugagauuacaggcaugagccaccacgccc

SEQ ID NO: 253355 - RNA, 32 nt, Human
ugcugagauuacaggcaugagccaccaugccu

SEQ ID NO: 253356 - RNA, 32 nt, Human
ugcugagauuacaggcaugagccaccgcaccc

SEQ ID NO: 253357 - RNA, 32 nt, Human
ugcugagauuacaggcaugagcuaccacgccu

SEQ ID NO: 253358 - RNA, 32 nt, Human
ugcugagauuacaggcaugagucacuacgccc

SEQ ID NO: 253359 - RNA, 32 nt, Human
ugcugagauuacaggcaugggccaccacgccc

SEQ ID NO: 253360 - RNA, 21 nt, Human
ugcugagauuacaggugugag

SEQ ID NO: 253361 - RNA, 32 nt, Human
ugcugagcacagagcccacagcccaucugccu

SEQ ID NO: 253362 - RNA, 32 nt, Human
ugcugagcacagugccuggugcaaaggaaaug

SEQ ID NO: 253363 - RNA, 24 nt, Human
ugcugagccagagaagcccuggcc

SEQ ID NO: 253364 - RNA, 32 nt, Human
ugcugagccagcacccucagaugauuucccuc

SEQ ID NO: 253365 - RNA, 32 nt, Human
ugcugagccagccuguucuccgggccugaaug

SEQ ID NO: 253366 - RNA, 32 nt, Human
ugcugagccaucaugcccaccguggaugacau

SEQ ID NO: 253367 - RNA, 23 nt, Human
ugcugagccccaggcucccggcc

SEQ ID NO: 253368 - RNA, 20 nt, Human
ugcugagcccggggcagggg

SEQ ID NO: 253369 - RNA, 32 nt, Human
ugcugagcccucauccccuccuggggccaggc

SEQ ID NO: 253370 - RNA, 32 nt, Human
ugcugagcccugagggcagagaggauggcaug

SEQ ID NO: 253371 - RNA, 32 nt, Human
ugcugagccuccuugucuauccuuccuccccc

SEQ ID NO: 253372 - RNA, 32 nt, Human
ugcugagccugcaucugugccucccagccccc

SEQ ID NO: 253373 - RNA, 32 nt, Human
ugcugagccuuugcucucuuuccaaaugguua

SEQ ID NO: 253374 - RNA, 23 nt, Human
ugcugagcgugaaacagaagcaa

SEQ ID NO: 253375 - RNA, 32 nt, Human
ugcugagcucacugaaauaucucucccuuaug

SEQ ID NO: 253376 - RNA, 32 nt, Human
ugcugagcugaucgagcacccgcugaacauca

SEQ ID NO: 253377 - RNA, 32 nt, Human
ugcugagcugggaugaggcagguaagggugga

SEQ ID NO: 253378 - RNA, 32 nt, Human
ugcugaggaaaagguggcgaagaggcugccug

SEQ ID NO: 253379 - RNA, 17 nt, Human
ugcugaggaaaauguga

SEQ ID NO: 253380 - RNA, 32 nt, Human
ugcugaggaaacaccacaggcugaacggggga

SEQ ID NO: 253381 - RNA, 21 nt, Human
ugcugaggaaugaauguguca

SEQ ID NO: 253382 - RNA, 32 nt, Human
ugcugaggacucuugggcucucacuaucugcc

SEQ ID NO: 253383 - RNA, 32 nt, Human
ugcugaggagcagccccaggaggggaccagag

SEQ ID NO: 253384 - RNA, 22 nt, Human
ugcugaggagggggcaggguug

SEQ ID NO: 253385 - RNA, 18 nt, Human
ugcugaggaguugguggu

SEQ ID NO: 253386 - RNA, 32 nt, Human
ugcugaggccaaaucacucugcuucaaauaca

SEQ ID NO: 253387 - RNA, 32 nt, Human
ugcugaggccaaaucacucugcuucaaauacg

SEQ ID NO: 253388 - RNA, 17 nt, Human
ugcugaggccuuguggu

SEQ ID NO: 253389 - RNA, 32 nt, Human
ugcugaggcugauggagcugccuccagggcua

SEQ ID NO: 253390 - RNA, 32 nt, Human
ugcugaggcugcaguggugucguggguguuac

SEQ ID NO: 253391 - RNA, 21 nt, Human
ugcugaggcuggagugcagug

SEQ ID NO: 253392 - RNA, 32 nt, Human
ugcugaggcuggguuuggugcauguggguuga

SEQ ID NO: 253393 - RNA, 32 nt, Human
ugcugagggagguggggagagggaggagaaag

SEQ ID NO: 253394 - RNA, 32 nt, Human
ugcugagggcgcuggcucugcagaucagaaca

SEQ ID NO: 253395 - RNA, 32 nt, Human
ugcugagggcugggccacugaccaccuccccg

SEQ ID NO: 253396 - RNA, 32 nt, Human
ugcugagggggcccugaggcaggaccgcccuc

SEQ ID NO: 253397 - RNA, 32 nt, Human
ugcugagggucugggaucuguuuucuggaagu

SEQ ID NO: 253398 - RNA, 32 nt, Human
ugcugagggucuggggccgggacuguggccug

SEQ ID NO: 253399 - RNA, 32 nt, Human
ugcugagggugcaucaauuacaagcauugaau

SEQ ID NO: 253400 - RNA, 32 nt, Human
ugcugagguuuacuuccuugagaucacagaca

SEQ ID NO: 253401 - RNA, 20 nt, Human
ugcugaguaggcgcugugau

SEQ ID NO: 253402 - RNA, 21 nt, Human
ugcugagucacccacccagcc

SEQ ID NO: 253403 - RNA, 32 nt, Human
ugcugagucccaggcugagccucagucucccu

SEQ ID NO: 253404 - RNA, 21 nt, Human
ugcugaguccccuccccggcc

SEQ ID NO: 253405 - RNA, 22 nt, Human
ugcugagucccgauccccggcu

SEQ ID NO: 253406 - RNA, 20 nt, Human
ugcugagucccuuuguggcc

SEQ ID NO: 253407 - RNA, 32 nt, Human
ugcugaguccucagcacugagugcagugcgug

SEQ ID NO: 253408 - RNA, 22 nt, Human
ugcugagucucggacuccggcc

SEQ ID NO: 253409 - RNA, 32 nt, Human
ugcugagugaagccugaagaccaagcccccuc

SEQ ID NO: 253410 - RNA, 32 nt, Human
ugcugagugagguugaggggugucucgguaug

SEQ ID NO: 253411 - RNA, 32 nt, Human
ugcugagugcugccgccccuucccaggacagc

SEQ ID NO: 253412 - RNA, 32 nt, Human
ugcugagugcuggggauaaaggaacaaauaaa

SEQ ID NO: 253413 - RNA, 32 nt, Human
ugcugaguguccugcagcagcauuucauccca

SEQ ID NO: 253414 - RNA, 32 nt, Human
ugcugaguguucccacuggauccucuguagaa

SEQ ID NO: 253415 - RNA, 32 nt, Human
ugcugaguugcugccuuuccccgucauguauc

SEQ ID NO: 253416 - RNA, 32 nt, Human
ugcugauaucucuacaagauccugauuuuaau

SEQ ID NO: 253417 - RNA, 32 nt, Human
ugcugaucaccaccaccugcuugcuccaguug

SEQ ID NO: 253418 - RNA, 32 nt, Human
ugcugaucagagacuggagagguggagugaga

SEQ ID NO: 253419 - RNA, 32 nt, Human
ugcugauccaaccugaguggagucaggugagg

SEQ ID NO: 253420 - RNA, 32 nt, Human
ugcugaucccaggagugcccacgaggaguggg

SEQ ID NO: 253421 - RNA, 32 nt, Human
ugcugauccuccugccuuuaguucuaaauggu

SEQ ID NO: 253422 - RNA, 32 nt, Human
ugcugauccucucaguccccugcucaucaacu

SEQ ID NO: 253423 - RNA, 32 nt, Human
ugcugauccuuucugaacacuggaaaaugggg

SEQ ID NO: 253424 - RNA, 32 nt, Human
ugcugaucucacugcacacagccuagggcccc

SEQ ID NO: 253425 - RNA, 32 nt, Human
ugcugaucuuggaggcagaguggcugccugca

SEQ ID NO: 253426 - RNA, 31 nt, Human
ugcugaugacuucuuuaaugcuugaaguccg

SEQ ID NO: 253427 - RNA, 32 nt, Human
ugcugaugagcaccuccaggagccucaguuuc

SEQ ID NO: 253428 - RNA, 21 nt, Human
ugcugaugauauaaacuggcu

SEQ ID NO: 253429 - RNA, 30 nt, Human
ugcugaugcugaagccgagcgucacuucgg

SEQ ID NO: 253430 - RNA, 32 nt, Human
ugcugauggaaaugauccagaagagaaggaca

SEQ ID NO: 253431 - RNA, 32 nt, Human
ugcugauggccccuccagcacacacacauaag

SEQ ID NO: 253432 - RNA, 32 nt, Human
ugcugaugggcaggaggaugggagacaggaau

SEQ ID NO: 253433 - RNA, 23 nt, Human
ugcugaugucacccaccagggca

SEQ ID NO: 253434 - RNA, 32 nt, Human
ugcugaugugugugcaugagcuguauguacac

SEQ ID NO: 253435 - RNA, 32 nt, Human
ugcugauuaacaggaccccaaagguuugggug

SEQ ID NO: 253436 - RNA, 32 nt, Human
ugcugauuagaacauagcucucuccaggaagu

SEQ ID NO: 253437 - RNA, 32 nt, Human
ugcugauucaagaaacagaaguagaagaggag

SEQ ID NO: 253438 - RNA, 21 nt, Human
ugcugauucagccuggccauc

SEQ ID NO: 253439 - RNA, 32 nt, Human
ugcugauugggcagggaaaacauccuuucauu

SEQ ID NO: 253440 - RNA, 32 nt, Human
ugcugauuucuugaaggugaaguggcacaaug

SEQ ID NO: 253441 - RNA, 21 nt, Human
ugcugcaaaaguaauuguggu

SEQ ID NO: 253442 - RNA, 32 nt, Human
ugcugcaaaauacauuauucuucuuuauggcu

SEQ ID NO: 253443 - RNA, 32 nt, Human
ugcugcaaaguuggccauguuucacagggaaa

SEQ ID NO: 253444 - RNA, 32 nt, Human
ugcugcaaccaugcagcuacccugccaggggc

SEQ ID NO: 253445 - RNA, 32 nt, Human
ugcugcaacuucucuucucucuggacuucggu

SEQ ID NO: 253446 - RNA, 32 nt, Human
ugcugcaagcugacuccagccuuggggucagc

SEQ ID NO: 253447 - RNA, 32 nt, Human
ugcugcaaggugaggccugcugugcugcccgc

SEQ ID NO: 253448 - RNA, 32 nt, Human
ugcugcaagucaaccagcaugcagggggccuu

SEQ ID NO: 253449 - RNA, 32 nt, Human
ugcugcaauacucgcucugccugccuuugccc

SEQ ID NO: 253450 - RNA, 32 nt, Human
ugcugcaauacugcucccccagccucuccccu

SEQ ID NO: 253451 - RNA, 32 nt, Human
ugcugcaauuauauagcaucacagugcucugc

SEQ ID NO: 253452 - RNA, 32 nt, Human
ugcugcacaagccugggugcuccacgcuguca

SEQ ID NO: 253453 - RNA, 19 nt, Human
ugcugcacagagcuguggu

SEQ ID NO: 253454 - RNA, 32 nt, Human
ugcugcacagcccucucagacccuucuuggcc

SEQ ID NO: 253455 - RNA, 32 nt, Human
ugcugcacaucacaccagccccugccaagagc

SEQ ID NO: 253456 - RNA, 32 nt, Human
ugcugcaccacugcccugccuucgggcugcug

SEQ ID NO: 253457 - RNA, 19 nt, Human
ugcugcaccagaaggaggg

SEQ ID NO: 253458 - RNA, 32 nt, Human
ugcugcaccagcugcagaaccaacugcucaaa

SEQ ID NO: 253459 - RNA, 32 nt, Human
ugcugcaccauucccccagcugggcuggaagg

SEQ ID NO: 253460 - RNA, 32 nt, Human
ugcugcaccauuuuguauucccaugagcaggu

SEQ ID NO: 253461 - RNA, 32 nt, Human
ugcugcacccaccaacccaucaucuacauuag

SEQ ID NO: 253462 - RNA, 32 nt, Human
ugcugcaccccuggugucccugccuggcccuc

SEQ ID NO: 253463 - RNA, 32 nt, Human
ugcugcaccgaccucgacgucuugccuguguc

SEQ ID NO: 253464 - RNA, 32 nt, Human
ugcugcacgcccgccucaccauugcugagcac

SEQ ID NO: 253465 - RNA, 32 nt, Human
ugcugcacguagugccucaccagagccagauu

SEQ ID NO: 253466 - RNA, 22 nt, Human
ugcugcacguguguguauuuca

SEQ ID NO: 253467 - RNA, 32 nt, Human
ugcugcagacaggcccauggugaugcucaggc

SEQ ID NO: 253468 - RNA, 32 nt, Human
ugcugcagaccacgugugcugugcacagcggc

SEQ ID NO: 253469 - RNA, 32 nt, Human
ugcugcagaccgaggcugggccaagauggcgu

SEQ ID NO: 253470 - RNA, 32 nt, Human
ugcugcagaggacacgaggcggcgggcuggag

SEQ ID NO: 253471 - RNA, 32 nt, Human
ugcugcagaguugguggagaacagaaauccac

SEQ ID NO: 253472 - RNA, 32 nt, Human
ugcugcagaugggggaggagccauaagccucu

SEQ ID NO: 253473 - RNA, 32 nt, Human
ugcugcagauucaucugaugaagaggaggaac

SEQ ID NO: 253474 - RNA, 32 nt, Human
ugcugcagcccgggcgccuggagcugggcgac

SEQ ID NO: 253475 - RNA, 32 nt, Human
ugcugcagcuccaggaaguccccgcaaugucu

SEQ ID NO: 253476 - RNA, 32 nt, Human
ugcugcagcugcaugggugccugcugcugccu

SEQ ID NO: 253477 - RNA, 32 nt, Human
ugcugcagcugccgggagacucacgccuuagu

SEQ ID NO: 253478 - RNA, 32 nt, Human
ugcugcaggaccuggaggucaggugugaaugc

SEQ ID NO: 253479 - RNA, 32 nt, Human
ugcugcaggacuuugggcaagugaccugcccu

SEQ ID NO: 253480 - RNA, 32 nt, Human
ugcugcaggagguggguauuguguguguggga

SEQ ID NO: 253481 - RNA, 32 nt, Human
ugcugcaggcagcagaguaugucugaacucgg

SEQ ID NO: 253482 - RNA, 32 nt, Human
ugcugcaggccaugguggaggaggugcggcac

SEQ ID NO: 253483 - RNA, 32 nt, Human
ugcugcaggcucccccugaggccccucuccaa

SEQ ID NO: 253484 - RNA, 32 nt, Human
ugcugcaggcugucucgcacuugucauugguc

SEQ ID NO: 253485 - RNA, 32 nt, Human
ugcugcagggacagcccugacacuccuuucag

SEQ ID NO: 253486 - RNA, 32 nt, Human
ugcugcaggggacccucaugcuggaugguugg

SEQ ID NO: 253487 - RNA, 32 nt, Human
ugcugcaggucacacagcaaugcagcucagga

SEQ ID NO: 253488 - RNA, 32 nt, Human
ugcugcagguggcagguggccccaggccuguu

SEQ ID NO: 253489 - RNA, 19 nt, Human
ugcugcagugagcugugau

SEQ ID NO: 253490 - RNA, 32 nt, Human
ugcugcagugcagugaauuaccccagagccac

SEQ ID NO: 253491 - RNA, 32 nt, Human
ugcugcagugugacaugcagaaguaaagcugg

SEQ ID NO: 253492 - RNA, 32 nt, Human
ugcugcaguuaucuccugaaucaggcugaggg

SEQ ID NO: 253493 - RNA, 32 nt, Human
ugcugcaguucuguguccugugcuuggaugcu

SEQ ID NO: 253494 - RNA, 32 nt, Human
ugcugcaguuggagaagaaacugaauuugaaa

SEQ ID NO: 253495 - RNA, 32 nt, Human
ugcugcaguuuuuccgcgauaguuuggggcag

SEQ ID NO: 253496 - RNA, 32 nt, Human
ugcugcaucccuccaguguccucuauugacag

SEQ ID NO: 253497 - RNA, 32 nt, Human
ugcugcaugggacccaugucuccugggacaga

SEQ ID NO: 253498 - RNA, 32 nt, Human
ugcugcaugugggggccgaugggcaggggacc

SEQ ID NO: 253499 - RNA, 32 nt, Human
ugcugcauucauaggagaauugaauaauuucu

SEQ ID NO: 253500 - RNA, 32 nt, Human
ugcugcauuuuucuacaacaucaugccucuag

SEQ ID NO: 253501 - RNA, 32 nt, Human
ugcugccaagauaugaccuccaggaaggccca

SEQ ID NO: 253502 - RNA, 24 nt, Human
ugcugccaccaccgccgcugcuau

SEQ ID NO: 253503 - RNA, 32 nt, Human
ugcugccaccagcauccucuggaguccuucca

SEQ ID NO: 253504 - RNA, 32 nt, Human
ugcugccaccccggccucugaguaagacucgu

SEQ ID NO: 253505 - RNA, 32 nt, Human
ugcugccacgcccaaccucuuugggagaagua

SEQ ID NO: 253506 - RNA, 32 nt, Human
ugcugccacuguacuccaaccuggguaacaga

SEQ ID NO: 253507 - RNA, 32 nt, Human
ugcugccagaggaauuguuaauaaaagcaccu

SEQ ID NO: 253508 - RNA, 32 nt, Human
ugcugccagagucaucauccucaaaaaugaaa

SEQ ID NO: 253509 - RNA, 32 nt, Human
ugcugccagccugugucugugcagucccccug

SEQ ID NO: 253510 - RNA, 32 nt, Human
ugcugccagcuaccagccuggcuggcccuguc

SEQ ID NO: 253511 - RNA, 32 nt, Human
ugcugccaggauucagaucagcccuucccagg

SEQ ID NO: 253512 - RNA, 32 nt, Human
ugcugccaggggcagagccucugugcccaagu

SEQ ID NO: 253513 - RNA, 32 nt, Human
ugcugccagguguucaagagcuagaugaaggu

SEQ ID NO: 253514 - RNA, 32 nt, Human
ugcugccaguaucgacuucaugacauuugcca

SEQ ID NO: 253515 - RNA, 19 nt, Human
ugcugccagugacuguggu

SEQ ID NO: 253516 - RNA, 21 nt, Human
ugcugccaucgccgcugccac

SEQ ID NO: 253517 - RNA, 32 nt, Human
ugcugccaucuuccucaucauaaaguguggaa

SEQ ID NO: 253518 - RNA, 32 nt, Human
ugcugccaucuucuccgcgcuauggcugcguu

SEQ ID NO: 253519 - RNA, 32 nt, Human
ugcugccaucuucucuccccaccacccuuuca

SEQ ID NO: 253520 - RNA, 32 nt, Human
ugcugccauugcugcugccucugccucggaga

SEQ ID NO: 253521 - RNA, 32 nt, Human
ugcugcccaaccaugggccacugugaacagac

SEQ ID NO: 253522 - RNA, 24 nt, Human
ugcugcccaggcuagagugcaaug

SEQ ID NO: 253523 - RNA, 23 nt, Human
ugcugcccaggcuagagugcagu

SEQ ID NO: 253524 - RNA, 24 nt, Human
ugcugcccaggcuagagugcagug

SEQ ID NO: 253525 - RNA, 23 nt, Human
ugcugcccaggcuggaguacagu

SEQ ID NO: 253526 - RNA, 24 nt, Human
ugcugcccaggcuggaguacagug

SEQ ID NO: 253527 - RNA, 24 nt, Human
ugcugcccaggcuggagugcaaug

SEQ ID NO: 253528 - RNA, 23 nt, Human
ugcugcccaggcuggagugcagu

SEQ ID NO: 253529 - RNA, 24 nt, Human
ugcugcccaggcuggagugcagug

SEQ ID NO: 253530 - RNA, 32 nt, Human
ugcugccccacugugcugagucccaacaccca

SEQ ID NO: 253531 - RNA, 32 nt, Human
ugcugccccagccaggaucuggucgcugcccc

SEQ ID NO: 253532 - RNA, 32 nt, Human
ugcugccccagccaggguuggagucuuagccu

SEQ ID NO: 253533 - RNA, 32 nt, Human
ugcugccccagccugugucuguucuccucgag

SEQ ID NO: 253534 - RNA, 32 nt, Human
ugcugccccagcugccuccuacccauugccaa

SEQ ID NO: 253535 - RNA, 32 nt, Human
ugcugccccaggaagacuccucuaggcucucc

SEQ ID NO: 253536 - RNA, 32 nt, Human
ugcugccccaggaggacuguccucgggaauga

SEQ ID NO: 253537 - RNA, 32 nt, Human
ugcugccccguucugucacccagggcuccuag

SEQ ID NO: 253538 - RNA, 32 nt, Human
ugcugccccugccaggcccagcugccacaccc

SEQ ID NO: 253539 - RNA, 32 nt, Human
ugcugccccugccccuacucucagccucacgu

SEQ ID NO: 253540 - RNA, 32 nt, Human
ugcugccccugccuuggggucagguugacagg

SEQ ID NO: 253541 - RNA, 32 nt, Human
ugcugccccuucccagcugccugccugcccua

SEQ ID NO: 253542 - RNA, 32 nt, Human
ugcugcccguggaagccagggagggauggacc

SEQ ID NO: 253543 - RNA, 32 nt, Human
ugcugcccuccagcuuccuuagcauguggguc

SEQ ID NO: 253544 - RNA, 32 nt, Human
ugcugcccucccuucccugccucuugccugug

SEQ ID NO: 253545 - RNA, 32 nt, Human
ugcugcccuccucugccccaugccuuuggggu

SEQ ID NO: 253546 - RNA, 32 nt, Human
ugcugcccuccuggcccugcuccuuccgcagu

SEQ ID NO: 253547 - RNA, 32 nt, Human
ugcugcccucuccucaaccucucacgcucugc

SEQ ID NO: 253548 - RNA, 32 nt, Human
ugcugcccugccucucgugccggguguugcuu

SEQ ID NO: 253549 - RNA, 32 nt, Human
ugcugcccugcuggccccuugugcacggcagc

SEQ ID NO: 253550 - RNA, 32 nt, Human
ugcugccgcaggcagggagugagcugggggug

SEQ ID NO: 253551 - RNA, 21 nt, Human
ugcugccgccaccgcagugcu

SEQ ID NO: 253552 - RNA, 19 nt, Human
ugcugccgccaccgcccac

SEQ ID NO: 253553 - RNA, 23 nt, Human
ugcugccgccaccgccgcugcac

SEQ ID NO: 253554 - RNA, 20 nt, Human
ugcugccgccgccacccccc

SEQ ID NO: 253555 - RNA, 24 nt, Human
ugcugccgccgccaccgccaccac

SEQ ID NO: 253556 - RNA, 23 nt, Human
ugcugccgccgcccguggccgcc

SEQ ID NO: 253557 - RNA, 22 nt, Human
ugcugccgccgccgccacccgc

SEQ ID NO: 253558 - RNA, 23 nt, Human
ugcugccgccgccgccaccgccg

SEQ ID NO: 253559 - RNA, 19 nt, Human
ugcugccgccgccgcccgc

SEQ ID NO: 253560 - RNA, 23 nt, Human
ugcugccgccgccgccgccgccg

SEQ ID NO: 253561 - RNA, 24 nt, Human
ugcugccgccgccgccgccgccgc

SEQ ID NO: 253562 - RNA, 25 nt, Human
ugcugccgccgccgccgccggccgc

SEQ ID NO: 253563 - RNA, 24 nt, Human
ugcugccgccgccgccgccucuau

SEQ ID NO: 253564 - RNA, 24 nt, Human
ugcugccgccgccgccgcugccau

SEQ ID NO: 253565 - RNA, 24 nt, Human
ugcugccgccgccgccgcugcucc

SEQ ID NO: 253566 - RNA, 20 nt, Human
ugcugccgccgccgcgcccc

SEQ ID NO: 253567 - RNA, 25 nt, Human
ugcugccgccgccgcuccuggccac

SEQ ID NO: 253568 - RNA, 32 nt, Human
ugcugccgccgccucugcuuccacucggcucu

SEQ ID NO: 253569 - RNA, 24 nt, Human
ugcugccgccgcugccgccgccgc

SEQ ID NO: 253570 - RNA, 24 nt, Human
ugcugccgccgcuguugcagccac

SEQ ID NO: 253571 - RNA, 22 nt, Human
ugcugccgccuccccaccacca

SEQ ID NO: 253572 - RNA, 32 nt, Human
ugcugccggccacgccagaggcugcaacacca

SEQ ID NO: 253573 - RNA, 20 nt, Human
ugcugccggcgaagaaggug

SEQ ID NO: 253574 - RNA, 32 nt, Human
ugcugccgggaucaucagccuccagggaugug

SEQ ID NO: 253575 - RNA, 32 nt, Human
ugcugccggggacuguccuggguggacggcag

SEQ ID NO: 253576 - RNA, 24 nt, Human
ugcugccguagcugccgccgccgc

SEQ ID NO: 253577 - RNA, 32 nt, Human
ugcugccuaagcugccggcugcaggagccaga

SEQ ID NO: 253578 - RNA, 32 nt, Human
ugcugccuaccagaaaacaugucaguuucguc

SEQ ID NO: 253579 - RNA, 32 nt, Human
ugcugccuccacuaucgaugccuccugacugc

SEQ ID NO: 253580 - RNA, 32 nt, Human
ugcugccucccaaaaugguguucagaucuaug

SEQ ID NO: 253581 - RNA, 32 nt, Human
ugcugccucccucugcugucaccuugcucagc

SEQ ID NO: 253582 - RNA, 32 nt, Human
ugcugccuccuccuccuccaccugcucuccuc

SEQ ID NO: 253583 - RNA, 32 nt, Human
ugcugccucggccucugcucuguucaguuugc

SEQ ID NO: 253584 - RNA, 32 nt, Human
ugcugccucgucugaggggacaggaggaucac

SEQ ID NO: 253585 - RNA, 32 nt, Human
ugcugccugccuaggaaggaaaccugaagauu

SEQ ID NO: 253586 - RNA, 32 nt, Human
ugcugccugccugcccacccgccugggcuugc

SEQ ID NO: 253587 - RNA, 32 nt, Human
ugcugccugccuggacuugccccugccaccuc

SEQ ID NO: 253588 - RNA, 32 nt, Human
ugcugccugccugucugcugagguaagguggg

SEQ ID NO: 253589 - RNA, 32 nt, Human
ugcugccugccugucugucucuccaucuguuu

SEQ ID NO: 253590 - RNA, 32 nt, Human
ugcugccugcucuccugccaucauggauuuuc

SEQ ID NO: 253591 - RNA, 32 nt, Human
ugcugccuggacugggacuguuagagcugcuu

SEQ ID NO: 253592 - RNA, 32 nt, Human
ugcugccuggccaagccccacacccgcagacc

SEQ ID NO: 253593 - RNA, 32 nt, Human
ugcugccugggagccagggugagagucugggu

SEQ ID NO: 253594 - RNA, 32 nt, Human
ugcugccuggggcugugggaugaaucagucac

SEQ ID NO: 253595 - RNA, 32 nt, Human
ugcugccugugaagcagugagccaccuguccc

SEQ ID NO: 253596 - RNA, 32 nt, Human
ugcugccuucacccuuccccuguguggcuccc

SEQ ID NO: 253597 - RNA, 32 nt, Human
ugcugccuucaguuaaucaaccaaugaguggu

SEQ ID NO: 253598 - RNA, 32 nt, Human
ugcugccuucucccaggacggaggcuuuugga

SEQ ID NO: 253599 - RNA, 20 nt, Human
ugcugccuucucccuguccu

SEQ ID NO: 253600 - RNA, 32 nt, Human
ugcugccuuugcugcugacuugcagugugacu

SEQ ID NO: 253601 - RNA, 32 nt, Human
ugcugcgaggaugcugccugggcggcugugcu

SEQ ID NO: 253602 - RNA, 32 nt, Human
ugcugcgauccccagggaacaaggucagcgac

SEQ ID NO: 253603 - RNA, 32 nt, Human
ugcugcgauuacaggcaugagccaccgcgccu

SEQ ID NO: 253604 - RNA, 23 nt, Human
ugcugcgauuauauaggcgugag

SEQ ID NO: 253605 - RNA, 32 nt, Human
ugcugcgauuauauaggcgugagccaccacgc

SEQ ID NO: 253606 - RNA, 32 nt, Human
ugcugcgcggcgcaggucucucgguuuccuca

SEQ ID NO: 253607 - RNA, 32 nt, Human
ugcugcggaggcaggcugagggcgcaggggcu

SEQ ID NO: 253608 - RNA, 22 nt, Human
ugcugcggccgggcucugccga

SEQ ID NO: 253609 - RNA, 19 nt, Human
ugcugcggcguguuaggaa

SEQ ID NO: 253610 - RNA, 32 nt, Human
ugcugcgggaggcggcggcgguaggaagccgg

SEQ ID NO: 253611 - RNA, 32 nt, Human
ugcugcgggcgcccaccucgcccagccaugcc

SEQ ID NO: 253612 - RNA, 32 nt, Human
ugcugcgucaucugaaaucggcacauuccaug

SEQ ID NO: 253613 - RNA, 32 nt, Human
ugcugcgucucaggagucugugagcugauagu

SEQ ID NO: 253614 - RNA, 32 nt, Human
ugcugcgucucccaucuuaacucuuugccuuu

SEQ ID NO: 253615 - RNA, 32 nt, Human
ugcugcgucugccugguccugggagagagaaa

SEQ ID NO: 253616 - RNA, 32 nt, Human
ugcugcgugaagucugcccuucccaggcuaaa

SEQ ID NO: 253617 - RNA, 32 nt, Human
ugcugcguggacgcaggcucugucuccuaggc

SEQ ID NO: 253618 - RNA, 32 nt, Human
ugcugcguggccuggaugguuggaggcagagc

SEQ ID NO: 253619 - RNA, 32 nt, Human
ugcugcuaaaacuucuuaaaugguuguuucug

SEQ ID NO: 253620 - RNA, 32 nt, Human
ugcugcuaaacagggucaggugaacccacugc

SEQ ID NO: 253621 - RNA, 32 nt, Human
ugcugcuaacacugagguagcucucuucaucu

SEQ ID NO: 253622 - RNA, 32 nt, Human
ugcugcuaaccccacaccacccaggccuccac

SEQ ID NO: 253623 - RNA, 32 nt, Human
ugcugcuaagaguuugcuaaagugucaugaau

SEQ ID NO: 253624 - RNA, 32 nt, Human
ugcugcuaagucggcuccagcacacaggagcc

SEQ ID NO: 253625 - RNA, 32 nt, Human
ugcugcuaauaaacacauacccgagacugggu

SEQ ID NO: 253626 - RNA, 32 nt, Human
ugcugcuaauauauacauauauuguauaaaaa

SEQ ID NO: 253627 - RNA, 32 nt, Human
ugcugcuacaagauguuucuguuucuuagauu

SEQ ID NO: 253628 - RNA, 32 nt, Human
ugcugcuaccugcuuuccagagccuuucauca

SEQ ID NO: 253629 - RNA, 32 nt, Human
ugcugcuacuucuguggaaguagcuuugaacu

SEQ ID NO: 253630 - RNA, 32 nt, Human
ugcugcuagaggguguggaaaagaccaagaug

SEQ ID NO: 253631 - RNA, 32 nt, Human
ugcugcuaggucauaugucaauaggaguucua

SEQ ID NO: 253632 - RNA, 22 nt, Human
ugcugcucaacauggugaaaug

SEQ ID NO: 253633 - RNA, 18 nt, Human
ugcugcucagagugcagg

SEQ ID NO: 253634 - RNA, 32 nt, Human
ugcugcucagugugguucucaccccugcaagc

SEQ ID NO: 253635 - RNA, 32 nt, Human
ugcugcucaucccagggaaaucccggccccac

SEQ ID NO: 253636 - RNA, 17 nt, Human
ugcugcucaucucccua

SEQ ID NO: 253637 - RNA, 32 nt, Human
ugcugcucccagcccccuccuccuggggcccu

SEQ ID NO: 253638 - RNA, 32 nt, Human
ugcugcucccagucucucgcucugccugccug

SEQ ID NO: 253639 - RNA, 32 nt, Human
ugcugcucccagucuucuguccauaccauucc

SEQ ID NO: 253640 - RNA, 32 nt, Human
ugcugcucccuacugacucuagcuuacuuccc

SEQ ID NO: 253641 - RNA, 32 nt, Human
ugcugcuccuccagcuguaucugcaccugccu

SEQ ID NO: 253642 - RNA, 32 nt, Human
ugcugcuccucuuccugcccuuaucaaccugg

SEQ ID NO: 253643 - RNA, 32 nt, Human
ugcugcuccuggcugccacucaccccugugag

SEQ ID NO: 253644 - RNA, 32 nt, Human
ugcugcuccuuuggggcaacgacgguuucaaa

SEQ ID NO: 253645 - RNA, 32 nt, Human
ugcugcucuagggauacucagggggcuccugc

SEQ ID NO: 253646 - RNA, 32 nt, Human
ugcugcucucguacuaacugugccagugccca

SEQ ID NO: 253647 - RNA, 32 nt, Human
ugcugcucucugagggagaggcugugguggcu

SEQ ID NO: 253648 - RNA, 21 nt, Human
ugcugcucucuuagcugugau

SEQ ID NO: 253649 - RNA, 32 nt, Human
ugcugcucugacccuuggccucaggcuuggcc

SEQ ID NO: 253650 - RNA, 32 nt, Human
ugcugcucugggaaccaccucucugcucucca

SEQ ID NO: 253651 - RNA, 32 nt, Human
ugcugcucugggaggcuaaggcucaucucucu

SEQ ID NO: 253652 - RNA, 19 nt, Human
ugcugcucuuuccaccugc

SEQ ID NO: 253653 - RNA, 32 nt, Human
ugcugcugaaggaggagaggauagugaagaag

SEQ ID NO: 253654 - RNA, 32 nt, Human
ugcugcugacagccaccaugcucucacccaaa

SEQ ID NO: 253655 - RNA, 32 nt, Human
ugcugcugacgucacauggagcacagaaauca

SEQ ID NO: 253656 - RNA, 32 nt, Human
ugcugcugacugcugcaccuccuacaucucac

SEQ ID NO: 253657 - RNA, 32 nt, Human
ugcugcugagaggaggaggaggaugaagaguu

SEQ ID NO: 253658 - RNA, 32 nt, Human
ugcugcugagcuugugugaaaaucagaccuga

SEQ ID NO: 253659 - RNA, 32 nt, Human
ugcugcugaucugaauauggaaaccccauggu

SEQ ID NO: 253660 - RNA, 32 nt, Human
ugcugcugauggauacuuuucccucacugcca

SEQ ID NO: 253661 - RNA, 32 nt, Human
ugcugcugcacuccagccugggagacagagcg

SEQ ID NO: 253662 - RNA, 32 nt, Human
ugcugcugcacuccagccugggcaauagagug

SEQ ID NO: 253663 - RNA, 32 nt, Human
ugcugcugcacuccagccugggugaaaaagac

SEQ ID NO: 253664 - RNA, 32 nt, Human
ugcugcugccaccgccuccucaucuucugccc

SEQ ID NO: 253665 - RNA, 32 nt, Human
ugcugcugcccaggcuggagugcaguggcacg

SEQ ID NO: 253666 - RNA, 32 nt, Human
ugcugcugcccaggcuggagugcaguggugca

SEQ ID NO: 253667 - RNA, 32 nt, Human
ugcugcugccccuagccugccugcacggccgc

SEQ ID NO: 253668 - RNA, 32 nt, Human
ugcugcugcuaccagcgccaaauguucauccu

SEQ ID NO: 253669 - RNA, 32 nt, Human
ugcugcugcuacugcugccgcugcugcucugu

SEQ ID NO: 253670 - RNA, 32 nt, Human
ugcugcugcuacugcuguuuccaggggcugca

SEQ ID NO: 253671 - RNA, 32 nt, Human
ugcugcugcucaggaagagagacaaggaauau

SEQ ID NO: 253672 - RNA, 32 nt, Human
ugcugcugcuccugaaauacccaccccuuucc

SEQ ID NO: 253673 - RNA, 32 nt, Human
ugcugcugcuccugcucagcuccugggaccaa

SEQ ID NO: 253674 - RNA, 32 nt, Human
ugcugcugcugcacucacgcggcugggcuuuc

SEQ ID NO: 253675 - RNA, 21 nt, Human
ugcugcugcugccaccgccac

SEQ ID NO: 253676 - RNA, 32 nt, Human
ugcugcugcugccuccgccgccacugcugcug

SEQ ID NO: 253677 - RNA, 32 nt, Human
ugcugcugcuugcccaaauguuuucccauggg

SEQ ID NO: 253678 - RNA, 32 nt, Human
ugcugcugcuuguaguugggggagaggugccc

SEQ ID NO: 253679 - RNA, 32 nt, Human
ugcugcuggagcggagagccaaagggaagccu

SEQ ID NO: 253680 - RNA, 32 nt, Human
ugcugcuggaggauuaagagcagugggaaaac

SEQ ID NO: 253681 - RNA, 32 nt, Human
ugcugcuggagugcccgcugggcagugaacag

SEQ ID NO: 253682 - RNA, 32 nt, Human
ugcugcuggcagccugugccuuugucagcucu

SEQ ID NO: 253683 - RNA, 31 nt, Human
ugcugcuggcuuuucugguugcaggcuuucc

SEQ ID NO: 253684 - RNA, 32 nt, Human
ugcugcugggagcuccugccucccacaggauu

SEQ ID NO: 253685 - RNA, 32 nt, Human
ugcugcugggaggccagccuggaagaggcagc

SEQ ID NO: 253686 - RNA, 32 nt, Human
ugcugcugggauuacaggcgugagccaccacu

SEQ ID NO: 253687 - RNA, 32 nt, Human
ugcugcugggcaacaguguuggcuucuuuuaa

SEQ ID NO: 253688 - RNA, 32 nt, Human
ugcugcugggccucccuuuggcccucgcuucc

SEQ ID NO: 253689 - RNA, 32 nt, Human
ugcugcuggggcuggcagagcaguuggcugac

SEQ ID NO: 253690 - RNA, 32 nt, Human
ugcugcugggguaccuggaugagcacacagaa

SEQ ID NO: 253691 - RNA, 32 nt, Human
ugcugcugggucaugauuuccacaucaugagc

SEQ ID NO: 253692 - RNA, 32 nt, Human
ugcugcuggguguggaguggagagugacagga

SEQ ID NO: 253693 - RNA, 32 nt, Human
ugcugcuggugcuccucgccucuuggggccug

SEQ ID NO: 253694 - RNA, 32 nt, Human
ugcugcugucaugaguggcgagcuucuguuuc

SEQ ID NO: 253695 - RNA, 20 nt, Human
ugcugcuguccccaaggugu

SEQ ID NO: 253696 - RNA, 32 nt, Human
ugcugcuguccucugagacugccuguuccucc

SEQ ID NO: 253697 - RNA, 24 nt, Human
ugcugcugugaagaugagaaggug

SEQ ID NO: 253698 - RNA, 19 nt, Human
ugcugcugugcugagugug

SEQ ID NO: 253699 - RNA, 20 nt, Human
ugcugcuguggagcuaggug

SEQ ID NO: 253700 - RNA, 32 nt, Human
ugcugcugugugguuccccuguuggcuagggu

SEQ ID NO: 253701 - RNA, 20 nt, Human
ugcugcuguguguggaggug

SEQ ID NO: 253702 - RNA, 32 nt, Human
ugcugcuguuaguuuagagaaggagagauguc

SEQ ID NO: 253703 - RNA, 23 nt, Human
ugcugcuguuuuaauaagaugua

SEQ ID NO: 253704 - RNA, 32 nt, Human
ugcugcuuaaugauuugcucacaucuaguaaa

SEQ ID NO: 253705 - RNA, 32 nt, Human
ugcugcuucagccccuaucacauagcucacug

SEQ ID NO: 253706 - RNA, 32 nt, Human
ugcugcuucaucucucccccagccugccaugu

SEQ ID NO: 253707 - RNA, 32 nt, Human
ugcugcuuccauguucagucccuucccugcuu

SEQ ID NO: 253708 - RNA, 32 nt, Human
ugcugcuucccaagauccucagcagggauuaa

SEQ ID NO: 253709 - RNA, 32 nt, Human
ugcugcuucccacccagcugagaaugcccccu

SEQ ID NO: 253710 - RNA, 32 nt, Human
ugcugcuucccaucaccagcagcugcucgaca

SEQ ID NO: 253711 - RNA, 32 nt, Human
ugcugcuuccggacacagcugugggcggagcu

SEQ ID NO: 253712 - RNA, 32 nt, Human
ugcugcuuccuccacguuugcugugccaacag

SEQ ID NO: 253713 - RNA, 32 nt, Human
ugcugcuuccuugggcugccuuucugggggca

SEQ ID NO: 253714 - RNA, 22 nt, Human
ugcugcuucuaacagauggcca

SEQ ID NO: 253715 - RNA, 32 nt, Human
ugcugcuucucccaucguuagacaucugccag

SEQ ID NO: 253716 - RNA, 32 nt, Human
ugcugcuucucccugcucccaucucaucccca

SEQ ID NO: 253717 - RNA, 31 nt, Human
ugcugcuucucuauauaccugugaauaugug

SEQ ID NO: 253718 - RNA, 32 nt, Human
ugcugcuucuucuacuggacugucuuucacug

SEQ ID NO: 253719 - RNA, 32 nt, Human
ugcugcuugaauugccguguagacauuugcuu

SEQ ID NO: 253720 - RNA, 32 nt, Human
ugcugcuugcacauguugguucuugaaaccuu

SEQ ID NO: 253721 - RNA, 17 nt, Human
ugcugcuugcagucaua

SEQ ID NO: 253722 - RNA, 32 nt, Human
ugcugcuugcccacaccuucguccccuuugca

SEQ ID NO: 253723 - RNA, 32 nt, Human
ugcugcuugggaggcagaggcaggagaauugc

SEQ ID NO: 253724 - RNA, 32 nt, Human
ugcugcuugggccgguggaggauugcaagcug

SEQ ID NO: 253725 - RNA, 32 nt, Human
ugcugcuuuagagugcggcugaacccgggccu

SEQ ID NO: 253726 - RNA, 32 nt, Human
ugcugcuuucucuguuccugugaugcaugaau

SEQ ID NO: 253727 - RNA, 32 nt, Human
ugcugcuuugcauccucuccaggcucuggacu

SEQ ID NO: 253728 - RNA, 32 nt, Human
ugcugcuuuuacuuugaugugaucucauugau

SEQ ID NO: 253729 - RNA, 32 nt, Human
ugcugcuuuuucuccccaaggcaggccauaga

SEQ ID NO: 253730 - RNA, 32 nt, Human
ugcugcuuuuucucccuccuccucaaguuccu

SEQ ID NO: 253731 - RNA, 32 nt, Human
ugcuggaaaccagcccaggccucccagggaag

SEQ ID NO: 253732 - RNA, 32 nt, Human
ugcuggaaaugcagcccccacccucccacuca

SEQ ID NO: 253733 - RNA, 32 nt, Human
ugcuggaaaugcccccuccacaccccugguag

SEQ ID NO: 253734 - RNA, 23 nt, Human
ugcuggaacccaggagguggagg

SEQ ID NO: 253735 - RNA, 32 nt, Human
ugcuggaacccugcucucagccuggaggcugg

SEQ ID NO: 253736 - RNA, 32 nt, Human
ugcuggaaccucaggguauggagcucacauca

SEQ ID NO: 253737 - RNA, 32 nt, Human
ugcuggaacuacaggcacgcaccaccacgccc

SEQ ID NO: 253738 - RNA, 32 nt, Human
ugcuggaacuuagcacugucuugauuugaagc

SEQ ID NO: 253739 - RNA, 32 nt, Human
ugcuggaaggacgaaggugagugaagauggca

SEQ ID NO: 253740 - RNA, 32 nt, Human
ugcuggaaggcgcagagauuggagugcccugc

SEQ ID NO: 253741 - RNA, 32 nt, Human
ugcuggaagucccucacccagagaccagugcu

SEQ ID NO: 253742 - RNA, 32 nt, Human
ugcuggaaugaguuaagauuugggggacugua

SEQ ID NO: 253743 - RNA, 32 nt, Human
ugcuggaauuacaggcaugagccaccacaccc

SEQ ID NO: 253744 - RNA, 32 nt, Human
ugcuggaauuacaggcaugagccaccaugccu

SEQ ID NO: 253745 - RNA, 32 nt, Human
ugcuggaauuacaggcaugagccaccgcgccc

SEQ ID NO: 253746 - RNA, 32 nt, Human
ugcuggaauuacaggcauuagccaccaugccu

SEQ ID NO: 253747 - RNA, 32 nt, Human
ugcuggaauugcagacgugagccaccaugccc

SEQ ID NO: 253748 - RNA, 32 nt, Human
ugcuggaauugcaggcaugagccaccacuccc

SEQ ID NO: 253749 - RNA, 21 nt, Human
ugcuggacaccgggcaggggu

SEQ ID NO: 253750 - RNA, 32 nt, Human
ugcuggacacuggccucgggauagccaugggc

SEQ ID NO: 253751 - RNA, 32 nt, Human
ugcuggacaggaugguucaccugcugagucga

SEQ ID NO: 253752 - RNA, 32 nt, Human
ugcuggacagucagacccggagcccagaggca

SEQ ID NO: 253753 - RNA, 32 nt, Human
ugcuggacaguccuugacauguguucugugug

SEQ ID NO: 253754 - RNA, 32 nt, Human
ugcuggaccaaggcaucucucaagugggccgc

SEQ ID NO: 253755 - RNA, 32 nt, Human
ugcuggaccccacucucuggaucgucucugau

SEQ ID NO: 253756 - RNA, 32 nt, Human
ugcuggaccuaaaauacugacuuuaguuagua

SEQ ID NO: 253757 - RNA, 32 nt, Human
ugcuggaccuggucagagacugaugugccuua

SEQ ID NO: 253758 - RNA, 32 nt, Human
ugcuggacggccagugggagagcgaggccuga

SEQ ID NO: 253759 - RNA, 32 nt, Human
ugcuggacugacaccuauggcuggaagaugac

SEQ ID NO: 253760 - RNA, 21 nt, Human
ugcuggacugcuccuggcucu

SEQ ID NO: 253761 - RNA, 23 nt, Human
ugcuggacuggcccuccagaggg

SEQ ID NO: 253762 - RNA, 32 nt, Human
ugcuggacuuacccugggcugcaguccauugu

SEQ ID NO: 253763 - RNA, 32 nt, Human
ugcuggagaacagagacccuucaagaggugag

SEQ ID NO: 253764 - RNA, 21 nt, Human
ugcuggagagauaauguggug

SEQ ID NO: 253765 - RNA, 32 nt, Human
ugcuggagagugagaaugggggugagcaggcg

SEQ ID NO: 253766 - RNA, 32 nt, Human
ugcuggagaucuauagccaccuggucucaaug

SEQ ID NO: 253767 - RNA, 32 nt, Human
ugcuggagaugggguucuuaccaggaugggcu

SEQ ID NO: 253768 - RNA, 32 nt, Human
ugcuggagcaucuguucuacauguggauaucu

SEQ ID NO: 253769 - RNA, 32 nt, Human
ugcuggagcauuagaaugcaacagaaagagcc

SEQ ID NO: 253770 - RNA, 32 nt, Human
ugcuggagccaaagcuucuggcccaggggcag

SEQ ID NO: 253771 - RNA, 32 nt, Human
ugcuggagccacagggccagggccaugcagau

SEQ ID NO: 253772 - RNA, 23 nt, Human
ugcuggagcccaggaaauugagg

SEQ ID NO: 253773 - RNA, 32 nt, Human
ugcuggagccucuaguccacccucuccagugg

SEQ ID NO: 253774 - RNA, 32 nt, Human
ugcuggaggaagaggaagauuugugcagacca

SEQ ID NO: 253775 - RNA, 32 nt, Human
ugcuggaggaagaggauuccagccuguuggcc

SEQ ID NO: 253776 - RNA, 32 nt, Human
ugcuggaggagagguuuccuucagauugcuga

SEQ ID NO: 253777 - RNA, 32 nt, Human
ugcuggaggaggccaguguagagccagugaga

SEQ ID NO: 253778 - RNA, 32 nt, Human
ugcuggaggccugggauggaguucugggcuua

SEQ ID NO: 253779 - RNA, 21 nt, Human
ugcuggaggcuggaggcagug

SEQ ID NO: 253780 - RNA, 32 nt, Human
ugcuggagggcagacuggaggaaggggaaggc

SEQ ID NO: 253781 - RNA, 32 nt, Human
ugcuggagggcauccuggauggaauugaagug

SEQ ID NO: 253782 - RNA, 32 nt, Human
ugcuggagggcugugggcuccucugucucugg

SEQ ID NO: 253783 - RNA, 32 nt, Human
ugcuggaggggcuguccuccuuccugggaccc

SEQ ID NO: 253784 - RNA, 22 nt, Human
ugcuggagugggauccuuguua

SEQ ID NO: 253785 - RNA, 32 nt, Human
ugcuggaguguuuccagugcaccuguaggaac

SEQ ID NO: 253786 - RNA, 32 nt, Human
ugcuggaguuccugccaucggaggcuuccuga

SEQ ID NO: 253787 - RNA, 32 nt, Human
ugcuggauaaagaaaaggaauuuuagaaguga

SEQ ID NO: 253788 - RNA, 32 nt, Human
ugcuggauacuggaguuugagaggagggaggu

SEQ ID NO: 253789 - RNA, 32 nt, Human
ugcuggaucucaaagaugugccaagccaagga

SEQ ID NO: 253790 - RNA, 32 nt, Human
ugcuggaucucccagggcuacucacucaaguu

SEQ ID NO: 253791 - RNA, 32 nt, Human
ugcuggaugcuauacuguccagccaggacaca

SEQ ID NO: 253792 - RNA, 32 nt, Human
ugcuggauggacaccaaaccccaaggcccuca

SEQ ID NO: 253793 - RNA, 32 nt, Human
ugcuggaugucugccaauuuuugccuucauua

SEQ ID NO: 253794 - RNA, 32 nt, Human
ugcuggauuaggaaaggugacaugacacaggc

SEQ ID NO: 253795 - RNA, 32 nt, Human
ugcuggauuccagauucuggguccccaauccc

SEQ ID NO: 253796 - RNA, 32 nt, Human
ugcuggcaaauccuccuacccaaaaagggguc

SEQ ID NO: 253797 - RNA, 32 nt, Human
ugcuggcacagaacaguuccagaucuagacug

SEQ ID NO: 253798 - RNA, 18 nt, Human
ugcuggcacauuucccca

SEQ ID NO: 253799 - RNA, 18 nt, Human
ugcuggcaccaccaggca

SEQ ID NO: 253800 - RNA, 32 nt, Human
ugcuggcaccccggugcggaccacagagcaga

SEQ ID NO: 253801 - RNA, 32 nt, Human
ugcuggcaccuugaucuugaacuucccagccu

SEQ ID NO: 253802 - RNA, 32 nt, Human
ugcuggcaccuugaucuuggacuucccagccu

SEQ ID NO: 253803 - RNA, 32 nt, Human
ugcuggcacuucuccccucccuggcccuucuc

SEQ ID NO: 253804 - RNA, 32 nt, Human
ugcuggcagccugugccuuugucagcucuucu

SEQ ID NO: 253805 - RNA, 32 nt, Human
ugcuggcaggaaauaaaugaauguuuacugag

SEQ ID NO: 253806 - RNA, 32 nt, Human
ugcuggcaggaggcagacuugcagagcuuguu

SEQ ID NO: 253807 - RNA, 21 nt, Human
ugcuggcaggagggcggggug

SEQ ID NO: 253808 - RNA, 32 nt, Human
ugcuggcaggcaggcagggccaggaggguagg

SEQ ID NO: 253809 - RNA, 19 nt, Human
ugcuggcagguggcuggau

SEQ ID NO: 253810 - RNA, 32 nt, Human
ugcuggcaguugagcaauaauaucuuccuccu

SEQ ID NO: 253811 - RNA, 32 nt, Human
ugcuggcauaggaucugcccagaagagaaaau

SEQ ID NO: 253812 - RNA, 32 nt, Human
ugcuggcauccagcagauccccauggccagga

SEQ ID NO: 253813 - RNA, 32 nt, Human
ugcuggcauuacaggcaugagccaccacaccc

SEQ ID NO: 253814 - RNA, 21 nt, Human
ugcuggcauuacaggugugag

SEQ ID NO: 253815 - RNA, 31 nt, Human
ugcuggcauuuucagcagauccucauguguu

SEQ ID NO: 253816 - RNA, 32 nt, Human
ugcuggccaugaaucucugccucucccaggcu

SEQ ID NO: 253817 - RNA, 32 nt, Human
ugcuggccauggagccucauugcaaguuguuc

SEQ ID NO: 253818 - RNA, 32 nt, Human
ugcuggccauucugccuuucugacauuuccuu

SEQ ID NO: 253819 - RNA, 32 nt, Human
ugcuggcccacugugaccugacccgaccuugu

SEQ ID NO: 253820 - RNA, 32 nt, Human
ugcuggccccggcgagguagcuucuggaaggc

SEQ ID NO: 253821 - RNA, 32 nt, Human
ugcuggccccuggcuggaggggagggcagugg

SEQ ID NO: 253822 - RNA, 29 nt, Human
ugcuggccccugggugugccuggaggggg

SEQ ID NO: 253823 - RNA, 32 nt, Human
ugcuggcccucagaucaauggucguggcaggu

SEQ ID NO: 253824 - RNA, 32 nt, Human
ugcuggcccugagacauccagucuuccacacu

SEQ ID NO: 253825 - RNA, 32 nt, Human
ugcuggcccuggcuccgcagccuggauacuua

SEQ ID NO: 253826 - RNA, 32 nt, Human
ugcuggcccugggggcacucugugaguggggg

SEQ ID NO: 253827 - RNA, 32 nt, Human
ugcuggccucaaacuccugggcucuagcaauc

SEQ ID NO: 253828 - RNA, 32 nt, Human
ugcuggccucauuccuuccugaagggccuagg

SEQ ID NO: 253829 - RNA, 32 nt, Human
ugcuggccuccccuuacagugcuuguucgggg

SEQ ID NO: 253830 - RNA, 32 nt, Human
ugcuggccuuucuccuucgcaggaguccccca

SEQ ID NO: 253831 - RNA, 32 nt, Human
ugcuggcgcugggaucccgccucugccuggug

SEQ ID NO: 253832 - RNA, 32 nt, Human
ugcuggcuagggagggacagggcagggaggcu

SEQ ID NO: 253833 - RNA, 32 nt, Human
ugcuggcucaccuucuagcuguguggcccugg

SEQ ID NO: 253834 - RNA, 32 nt, Human
ugcuggcucacugcagccuccaccucccaggu

SEQ ID NO: 253835 - RNA, 21 nt, Human
ugcuggcucaugccuguaauc

SEQ ID NO: 253836 - RNA, 32 nt, Human
ugcuggcuccagccacagacuucaguuuucuu

SEQ ID NO: 253837 - RNA, 32 nt, Human
ugcuggcucccuuacuuuaccucucugucaug

SEQ ID NO: 253838 - RNA, 32 nt, Human
ugcuggcuccugcaucuucuucaagucugcuc

SEQ ID NO: 253839 - RNA, 32 nt, Human
ugcuggcucuggaggcuggaguucccgugcug

SEQ ID NO: 253840 - RNA, 23 nt, Human
ugcuggcucuucuucccuuugua

SEQ ID NO: 253841 - RNA, 32 nt, Human
ugcuggcugagcugcaagaggcucuauggcau

SEQ ID NO: 253842 - RNA, 32 nt, Human
ugcuggcugcagggucccaggugcaggagugg

SEQ ID NO: 253843 - RNA, 32 nt, Human
ugcuggcugcagguauuaaguccaaguuuauu

SEQ ID NO: 253844 - RNA, 32 nt, Human
ugcuggcugccucucugcuccaccuugugacc

SEQ ID NO: 253845 - RNA, 21 nt, Human
ugcuggcugcucccccuggug

SEQ ID NO: 253846 - RNA, 32 nt, Human
ugcuggcuggcgggacaggugggcaggacuga

SEQ ID NO: 253847 - RNA, 32 nt, Human
ugcuggcugggaaggaggagcaucagaccaca

SEQ ID NO: 253848 - RNA, 19 nt, Human
ugcuggcugggcgcagugg

SEQ ID NO: 253849 - RNA, 20 nt, Human
ugcuggcuguaaccagggca

SEQ ID NO: 253850 - RNA, 32 nt, Human
ugcuggcuuaccacucuucucucauggauccu

SEQ ID NO: 253851 - RNA, 32 nt, Human
ugcuggcuuggaggccgggugcaguggcucac

SEQ ID NO: 253852 - RNA, 22 nt, Human
ugcugggaaaagugacugcgau

SEQ ID NO: 253853 - RNA, 19 nt, Human
ugcugggaaccucagggua

SEQ ID NO: 253854 - RNA, 32 nt, Human
ugcugggaagaagagaccugggcuuggaagga

SEQ ID NO: 253855 - RNA, 18 nt, Human
ugcugggaagaucuggau

SEQ ID NO: 253856 - RNA, 32 nt, Human
ugcugggaagcaucugcgugugugagggggcu

SEQ ID NO: 253857 - RNA, 32 nt, Human
ugcugggaauacaggcaugagccaccgcacuc

SEQ ID NO: 253858 - RNA, 32 nt, Human
ugcugggaauacaggugugaaccaccacguuu

SEQ ID NO: 253859 - RNA, 32 nt, Human
ugcugggaccuccccugugaggggacagcgga

SEQ ID NO: 253860 - RNA, 32 nt, Human
ugcugggacuacaggcaucagccaccgugacc

SEQ ID NO: 253861 - RNA, 32 nt, Human
ugcugggacuacaggcaugagccaccacgccu

SEQ ID NO: 253862 - RNA, 32 nt, Human
ugcugggacuacaggcaugagccacugugccu

SEQ ID NO: 253863 - RNA, 32 nt, Human
ugcugggacuacaggugcaugcaaccacaccu

SEQ ID NO: 253864 - RNA, 32 nt, Human
ugcugggacuacaggugcaugcuacaaugccc

SEQ ID NO: 253865 - RNA, 32 nt, Human
ugcugggacugcaggcgugagccaccgcgccc

SEQ ID NO: 253866 - RNA, 19 nt, Human
ugcugggagaaguauguga

SEQ ID NO: 253867 - RNA, 20 nt, Human
ugcugggagaggaauuagau

SEQ ID NO: 253868 - RNA, 32 nt, Human
ugcugggagaggguugggggcagggggcaagg

SEQ ID NO: 253869 - RNA, 19 nt, Human
ugcugggagcaacuaguga

SEQ ID NO: 253870 - RNA, 32 nt, Human
ugcugggagcaucuccuugaugccuccaccau

SEQ ID NO: 253871 - RNA, 19 nt, Human
ugcugggagccaccaggca

SEQ ID NO: 253872 - RNA, 32 nt, Human
ugcugggagcucccccugccucuuuccccuac

SEQ ID NO: 253873 - RNA, 19 nt, Human
ugcugggaggcugcuggau

SEQ ID NO: 253874 - RNA, 32 nt, Human
ugcugggaggggcuggugaggcugcagcagag

SEQ ID NO: 253875 - RNA, 32 nt, Human
ugcugggaguucaccugccucuugcuuuuugu

SEQ ID NO: 253876 - RNA, 32 nt, Human
ugcugggaucacaggcaugaaccaccgcuccu

SEQ ID NO: 253877 - RNA, 32 nt, Human
ugcugggaucacaggcaugagccaccgaaccc

SEQ ID NO: 253878 - RNA, 32 nt, Human
ugcugggaucacaggcaugagccacugugccc

SEQ ID NO: 253879 - RNA, 32 nt, Human
ugcugggaugaaaggcacccuggaaguggaag

SEQ ID NO: 253880 - RNA, 32 nt, Human
ugcugggaugacaggcaugaaucacugugcuc

SEQ ID NO: 253881 - RNA, 32 nt, Human
ugcugggaugacaggcaugagccaccacgccu

SEQ ID NO: 253882 - RNA, 32 nt, Human
ugcugggaugacaggcaugagccaccgugccc

SEQ ID NO: 253883 - RNA, 20 nt, Human
ugcugggaugacaggcgugc

SEQ ID NO: 253884 - RNA, 32 nt, Human
ugcugggauuaauggcgugagccaccguaccu

SEQ ID NO: 253885 - RNA, 21 nt, Human
ugcugggauuacaagcgugag

SEQ ID NO: 253886 - RNA, 21 nt, Human
ugcugggauuacagaugugag

SEQ ID NO: 253887 - RNA, 21 nt, Human
ugcugggauuacaggagugag

SEQ ID NO: 253888 - RNA, 24 nt, Human
ugcugggauuacaggagugugcca

SEQ ID NO: 253889 - RNA, 32 nt, Human
ugcugggauuacaggcaagagccaccauacca

SEQ ID NO: 253890 - RNA, 32 nt, Human
ugcugggauuacaggcacgcgccaccacgccu

SEQ ID NO: 253891 - RNA, 32 nt, Human
ugcugggauuacaggcacgcucuaccacaccu

SEQ ID NO: 253892 - RNA, 18 nt, Human
ugcugggauuacaggcau

SEQ ID NO: 253893 - RNA, 32 nt, Human
ugcugggauuacaggcauaagacaccaugccu

SEQ ID NO: 253894 - RNA, 32 nt, Human
ugcugggauuacaggcauaagccaccgugccu

SEQ ID NO: 253895 - RNA, 32 nt, Human
ugcugggauuacaggcauaagcuaccacgcug

SEQ ID NO: 253896 - RNA, 32 nt, Human
ugcugggauuacaggcaucagccaccacaccc

SEQ ID NO: 253897 - RNA, 32 nt, Human
ugcugggauuacaggcaucagccaccaugccc

SEQ ID NO: 253898 - RNA, 32 nt, Human
ugcugggauuacaggcaucagccaccgcacca

SEQ ID NO: 253899 - RNA, 32 nt, Human
ugcugggauuacaggcaucagccacuaugccc

SEQ ID NO: 253900 - RNA, 32 nt, Human
ugcugggauuacaggcaucugccaccgcacuc

SEQ ID NO: 253901 - RNA, 32 nt, Human
ugcugggauuacaggcaugaaccaccacgccu

SEQ ID NO: 253902 - RNA, 32 nt, Human
ugcugggauuacaggcaugaaccaccaugccu

SEQ ID NO: 253903 - RNA, 32 nt, Human
ugcugggauuacaggcaugaaccaccgcuccc

SEQ ID NO: 253904 - RNA, 32 nt, Human
ugcugggauuacaggcaugaaccaccgugccc

SEQ ID NO: 253905 - RNA, 32 nt, Human
ugcugggauuacaggcaugaaccacugugccc

SEQ ID NO: 253906 - RNA, 32 nt, Human
ugcugggauuacaggcaugaaccaucauaccu

SEQ ID NO: 253907 - RNA, 32 nt, Human
ugcugggauuacaggcaugaaccgccaugccu

SEQ ID NO: 253908 - RNA, 32 nt, Human
ugcugggauuacaggcaugaaucaccacaacu

SEQ ID NO: 253909 - RNA, 32 nt, Human
ugcugggauuacaggcaugacccaccgcuccc

SEQ ID NO: 253910 - RNA, 21 nt, Human
ugcugggauuacaggcaugag

SEQ ID NO: 253911 - RNA, 32 nt, Human
ugcugggauuacaggcaugagccaccaaaccc

SEQ ID NO: 253912 - RNA, 32 nt, Human
ugcugggauuacaggcaugagccaccacaacc

SEQ ID NO: 253913 - RNA, 32 nt, Human
ugcugggauuacaggcaugagccaccacaccc

SEQ ID NO: 253914 - RNA, 32 nt, Human
ugcugggauuacaggcaugagccaccacaccu

SEQ ID NO: 253915 - RNA, 32 nt, Human
ugcugggauuacaggcaugagccaccacacug

SEQ ID NO: 253916 - RNA, 32 nt, Human
ugcugggauuacaggcaugagccaccacagcu

SEQ ID NO: 253917 - RNA, 32 nt, Human
ugcugggauuacaggcaugagccaccacaucu

SEQ ID NO: 253918 - RNA, 32 nt, Human
ugcugggauuacaggcaugagccaccacgccc

SEQ ID NO: 253919 - RNA, 32 nt, Human
ugcugggauuacaggcaugagccaccacgccu

SEQ ID NO: 253920 - RNA, 32 nt, Human
ugcugggauuacaggcaugagccaccacggcc

SEQ ID NO: 253921 - RNA, 32 nt, Human
ugcugggauuacaggcaugagccaccacuccu

SEQ ID NO: 253922 - RNA, 32 nt, Human
ugcugggauuacaggcaugagccaccaggccc

SEQ ID NO: 253923 - RNA, 32 nt, Human
ugcugggauuacaggcaugagccaccaucuuc

SEQ ID NO: 253924 - RNA, 32 nt, Human
ugcugggauuacaggcaugagccaccaugcca

SEQ ID NO: 253925 - RNA, 32 nt, Human
ugcugggauuacaggcaugagccaccaugccc

SEQ ID NO: 253926 - RNA, 32 nt, Human
ugcugggauuacaggcaugagccaccaugccu

SEQ ID NO: 253927 - RNA, 32 nt, Human
ugcugggauuacaggcaugagccaccaugucu

SEQ ID NO: 253928 - RNA, 32 nt, Human
ugcugggauuacaggcaugagccaccccgccc

SEQ ID NO: 253929 - RNA, 32 nt, Human
ugcugggauuacaggcaugagccaccccgccu

SEQ ID NO: 253930 - RNA, 27 nt, Human
ugcugggauuacaggcaugagccaccg

SEQ ID NO: 253931 - RNA, 32 nt, Human
ugcugggauuacaggcaugagccaccgagcuc

SEQ ID NO: 253932 - RNA, 32 nt, Human
ugcugggauuacaggcaugagccaccgcaccc

SEQ ID NO: 253933 - RNA, 32 nt, Human
ugcugggauuacaggcaugagccaccgcaccu

SEQ ID NO: 253934 - RNA, 32 nt, Human
ugcugggauuacaggcaugagccaccgcagcc

SEQ ID NO: 253935 - RNA, 32 nt, Human
ugcugggauuacaggcaugagccaccgcgcca

SEQ ID NO: 253936 - RNA, 32 nt, Human
ugcugggauuacaggcaugagccaccgcgccc

SEQ ID NO: 253937 - RNA, 32 nt, Human
ugcugggauuacaggcaugagccaccgcgccu

SEQ ID NO: 253938 - RNA, 32 nt, Human
ugcugggauuacaggcaugagccaccgcgcuu

SEQ ID NO: 253939 - RNA, 32 nt, Human
ugcugggauuacaggcaugagccaccgcucuc

SEQ ID NO: 253940 - RNA, 32 nt, Human
ugcugggauuacaggcaugagccaccgugccc

SEQ ID NO: 253941 - RNA, 32 nt, Human
ugcugggauuacaggcaugagccaccgugccu

SEQ ID NO: 253942 - RNA, 32 nt, Human
ugcugggauuacaggcaugagccaccgugcgg

SEQ ID NO: 253943 - RNA, 32 nt, Human
ugcugggauuacaggcaugagccaccguggcc

SEQ ID NO: 253944 - RNA, 32 nt, Human
ugcugggauuacaggcaugagccaccucaccc

SEQ ID NO: 253945 - RNA, 32 nt, Human
ugcugggauuacaggcaugagccaccucacuu

SEQ ID NO: 253946 - RNA, 32 nt, Human
ugcugggauuacaggcaugagccaccucgccu

SEQ ID NO: 253947 - RNA, 32 nt, Human
ugcugggauuacaggcaugagccaccugccca

SEQ ID NO: 253948 - RNA, 32 nt, Human
ugcugggauuacaggcaugagccacuacgccu

SEQ ID NO: 253949 - RNA, 32 nt, Human
ugcugggauuacaggcaugagccacugcaccc

SEQ ID NO: 253950 - RNA, 32 nt, Human
ugcugggauuacaggcaugagccacugcaccu

SEQ ID NO: 253951 - RNA, 32 nt, Human
ugcugggauuacaggcaugagccacugcaucc

SEQ ID NO: 253952 - RNA, 32 nt, Human
ugcugggauuacaggcaugagccacugcgcca

SEQ ID NO: 253953 - RNA, 32 nt, Human
ugcugggauuacaggcaugagccacugcgccc

SEQ ID NO: 253954 - RNA, 32 nt, Human
ugcugggauuacaggcaugagccacugcgccu

SEQ ID NO: 253955 - RNA, 32 nt, Human
ugcugggauuacaggcaugagccacugggcgc

SEQ ID NO: 253956 - RNA, 32 nt, Human
ugcugggauuacaggcaugagccacuguaccc

SEQ ID NO: 253957 - RNA, 32 nt, Human
ugcugggauuacaggcaugagccacugugccc

SEQ ID NO: 253958 - RNA, 32 nt, Human
ugcugggauuacaggcaugagccacugugccu

SEQ ID NO: 253959 - RNA, 32 nt, Human
ugcugggauuacaggcaugagccacugugcuc

SEQ ID NO: 253960 - RNA, 32 nt, Human
ugcugggauuacaggcaugagccacugugucc

SEQ ID NO: 253961 - RNA, 32 nt, Human
ugcugggauuacaggcaugagccacuguguuc

SEQ ID NO: 253962 - RNA, 32 nt, Human
ugcugggauuacaggcaugagccaucacaccu

SEQ ID NO: 253963 - RNA, 32 nt, Human
ugcugggauuacaggcaugagccaucgcccag

SEQ ID NO: 253964 - RNA, 32 nt, Human
ugcugggauuacaggcaugagccaucgcgccc

SEQ ID NO: 253965 - RNA, 32 nt, Human
ugcugggauuacaggcaugagcuaccacgccu

SEQ ID NO: 253966 - RNA, 32 nt, Human
ugcugggauuacaggcaugagcuaccgugccu

SEQ ID NO: 253967 - RNA, 32 nt, Human
ugcugggauuacaggcaugagcuacuaugccc

SEQ ID NO: 253968 - RNA, 32 nt, Human
ugcugggauuacaggcaugagggaccaagcuc

SEQ ID NO: 253969 - RNA, 32 nt, Human
ugcugggauuacaggcaugagucaccauaucc

SEQ ID NO: 253970 - RNA, 32 nt, Human
ugcugggauuacaggcauggagcaccgugccu

SEQ ID NO: 253971 - RNA, 32 nt, Human
ugcugggauuacaggcauggccaccacgccca

SEQ ID NO: 253972 - RNA, 32 nt, Human
ugcugggauuacaggcaugggccaccacgccu

SEQ ID NO: 253973 - RNA, 21 nt, Human
ugcugggauuacaggccugag

SEQ ID NO: 253974 - RNA, 18 nt, Human
ugcugggauuacaggcgu

SEQ ID NO: 253975 - RNA, 20 nt, Human
ugcugggauuacaggcguga

SEQ ID NO: 253976 - RNA, 21 nt, Human
ugcugggauuacaggcgugag

SEQ ID NO: 253977 - RNA, 32 nt, Human
ugcugggauuacaggcgugagccacccugacu

SEQ ID NO: 253978 - RNA, 32 nt, Human
ugcugggauuacaggcgugagccaccucaccc

SEQ ID NO: 253979 - RNA, 32 nt, Human
ugcugggauuacaggcgugagccaccucaccu

SEQ ID NO: 253980 - RNA, 32 nt, Human
ugcugggauuacaggcgugagccaccuugccc

SEQ ID NO: 253981 - RNA, 32 nt, Human
ugcugggauuacaggcgugagccacuccaccc

SEQ ID NO: 253982 - RNA, 32 nt, Human
ugcugggauuacaggcgugagccacucugccc

SEQ ID NO: 253983 - RNA, 32 nt, Human
ugcugggauuacaggcgugcaccacugagucc

SEQ ID NO: 253984 - RNA, 21 nt, Human
ugcugggauuacaggcguggg

SEQ ID NO: 253985 - RNA, 32 nt, Human
ugcugggauuacaggcgugugagccaccacgc

SEQ ID NO: 253986 - RNA, 32 nt, Human
ugcugggauuacaggcgugugccaccacccug

SEQ ID NO: 253987 - RNA, 32 nt, Human
ugcugggauuacaggcgugugccaccaugccu

SEQ ID NO: 253988 - RNA, 32 nt, Human
ugcugggauuacaggcuucagccaccacaccc

SEQ ID NO: 253989 - RNA, 21 nt, Human
ugcugggauuacaggcuugag

SEQ ID NO: 253990 - RNA, 21 nt, Human
ugcugggauuacaggggugag

SEQ ID NO: 253991 - RNA, 32 nt, Human
ugcugggauuacaggugcgagccaccgugccc

SEQ ID NO: 253992 - RNA, 18 nt, Human
ugcugggauuacaggugu

SEQ ID NO: 253993 - RNA, 21 nt, Human
ugcugggauuacaggugugag

SEQ ID NO: 253994 - RNA, 32 nt, Human
ugcugggauuacaggugugagcauccagccag

SEQ ID NO: 253995 - RNA, 22 nt, Human
ugcugggauuacaggugugcca

SEQ ID NO: 253996 - RNA, 21 nt, Human
ugcugggauuacaugcaugag

SEQ ID NO: 253997 - RNA, 21 nt, Human
ugcugggauuagaggugugag

SEQ ID NO: 253998 - RNA, 20 nt, Human
ugcugggauuauagcuguga

SEQ ID NO: 253999 - RNA, 18 nt, Human
ugcugggauuauaggcau

SEQ ID NO: 254000 - RNA, 32 nt, Human
ugcugggauuauaggcaugcgccaccaugccc

SEQ ID NO: 254001 - RNA, 32 nt, Human
ugcugggauuauaggcaugugccaccacaucu

SEQ ID NO: 254002 - RNA, 21 nt, Human
ugcugggauuauaggcgugag

SEQ ID NO: 254003 - RNA, 32 nt, Human
ugcugggauuauaggcuggguguggugagcca

SEQ ID NO: 254004 - RNA, 32 nt, Human
ugcugggauuauaggugugagccacccugcuc

SEQ ID NO: 254005 - RNA, 21 nt, Human
ugcugggauuccaggcaugag

SEQ ID NO: 254006 - RNA, 18 nt, Human
ugcugggauugcaggcau

SEQ ID NO: 254007 - RNA, 32 nt, Human
ugcugggauugcaggcaugagccaccaugccu

SEQ ID NO: 254008 - RNA, 32 nt, Human
ugcugggauugcaggcaugagccaccgcgccc

SEQ ID NO: 254009 - RNA, 32 nt, Human
ugcugggauugcaggcaugagccaccgugccc

SEQ ID NO: 254010 - RNA, 32 nt, Human
ugcugggauugcaggcgugagccacuuuccca

SEQ ID NO: 254011 - RNA, 22 nt, Human
ugcugggauuuacaggcaugag

SEQ ID NO: 254012 - RNA, 32 nt, Human
ugcugggcaaagcacgaucugcagcuuugaag

SEQ ID NO: 254013 - RNA, 32 nt, Human
ugcugggcacaacugggcucuaccuuugaguu

SEQ ID NO: 254014 - RNA, 21 nt, Human
ugcugggcacauagcugugau

SEQ ID NO: 254015 - RNA, 23 nt, Human
ugcugggcacauagcugugauca

SEQ ID NO: 254016 - RNA, 32 nt, Human
ugcugggcacuaugcuaagcacuuugggagca

SEQ ID NO: 254017 - RNA, 32 nt, Human
ugcugggcacuugcacugugacuuuggagugc

SEQ ID NO: 254018 - RNA, 32 nt, Human
ugcugggcagcaccuccuaacuucagggaaua

SEQ ID NO: 254019 - RNA, 32 nt, Human
ugcugggcaggcaaccugggguccagcucaaa

SEQ ID NO: 254020 - RNA, 32 nt, Human
ugcugggcaggcgggcaggcaggccuggggcu

SEQ ID NO: 254021 - RNA, 32 nt, Human
ugcugggcaugcuguguuaggcuccaagggaa

SEQ ID NO: 254022 - RNA, 32 nt, Human
ugcugggccagccccaccuggagcucaguaaa

SEQ ID NO: 254023 - RNA, 32 nt, Human
ugcugggcccagggcccuagguuugcucguca

SEQ ID NO: 254024 - RNA, 32 nt, Human
ugcugggccuccugccuggccgcccagggcug

SEQ ID NO: 254025 - RNA, 32 nt, Human
ugcugggccugaacauaauuucaagaggagga

SEQ ID NO: 254026 - RNA, 32 nt, Human
ugcugggccugagcugucugucucguuucugu

SEQ ID NO: 254027 - RNA, 32 nt, Human
ugcugggcuaaccagcccacagagcucacauu

SEQ ID NO: 254028 - RNA, 32 nt, Human
ugcugggcucaagcaauccucccaccucagcc

SEQ ID NO: 254029 - RNA, 32 nt, Human
ugcugggcucaaggaauccuccugccccagcc

SEQ ID NO: 254030 - RNA, 32 nt, Human
ugcugggcucaagugauccuccugccucagcc

SEQ ID NO: 254031 - RNA, 32 nt, Human
ugcugggcucucucacacagcacccggcccca

SEQ ID NO: 254032 - RNA, 32 nt, Human
ugcugggcugguggcucaucaggccugggccc

SEQ ID NO: 254033 - RNA, 32 nt, Human
ugcugggcuuaagugauccuccugccucagcc

SEQ ID NO: 254034 - RNA, 21 nt, Human
ugcuggggaaaguggcuuggu

SEQ ID NO: 254035 - RNA, 20 nt, Human
ugcuggggaaguucccugug

SEQ ID NO: 254036 - RNA, 20 nt, Human
ugcuggggaaguuuguuggu

SEQ ID NO: 254037 - RNA, 32 nt, Human
ugcuggggaaucaauaaaggaggcagagcaac

SEQ ID NO: 254038 - RNA, 20 nt, Human
ugcuggggacacuacaggca

SEQ ID NO: 254039 - RNA, 21 nt, Human
ugcuggggacagcagcugggu

SEQ ID NO: 254040 - RNA, 32 nt, Human
ugcuggggacaggacagaugaggcagaagggg

SEQ ID NO: 254041 - RNA, 32 nt, Human
ugcuggggagagaagccgggaggcucagccug

SEQ ID NO: 254042 - RNA, 19 nt, Human
ugcuggggagccaaaggca

SEQ ID NO: 254043 - RNA, 32 nt, Human
ugcuggggagccaaaggcauccaggccagggc

SEQ ID NO: 254044 - RNA, 32 nt, Human
ugcuggggaggcuaaagcaggaggauggcuuu

SEQ ID NO: 254045 - RNA, 32 nt, Human
ugcuggggaggcugaggcaggagaauggcugg

SEQ ID NO: 254046 - RNA, 32 nt, Human
ugcuggggagggggugaguggugaggaccagg

SEQ ID NO: 254047 - RNA, 20 nt, Human
ugcuggggagguaaccguga

SEQ ID NO: 254048 - RNA, 21 nt, Human
ugcuggggaguggggcaaggg

SEQ ID NO: 254049 - RNA, 19 nt, Human
ugcuggggaugccagagca

SEQ ID NO: 254050 - RNA, 21 nt, Human
ugcuggggcagaggcaggggu

SEQ ID NO: 254051 - RNA, 32 nt, Human
ugcuggggccagaaccccagcccugugccucc

SEQ ID NO: 254052 - RNA, 30 nt, Human
ugcuggggccucuccuugcugugugugagg

SEQ ID NO: 254053 - RNA, 24 nt, Human
ugcuggggccuuggggcaggagug

SEQ ID NO: 254054 - RNA, 32 nt, Human
ugcuggggcugaccauuagaacugagauggag

SEQ ID NO: 254055 - RNA, 32 nt, Human
ugcuggggcugcagcgcugccuccgagaccga

SEQ ID NO: 254056 - RNA, 32 nt, Human
ugcugggggaaagggaaaggaaaucagcaacu

SEQ ID NO: 254057 - RNA, 19 nt, Human
ugcugggggagagcugggu

SEQ ID NO: 254058 - RNA, 32 nt, Human
ugcugggggagcggcacuggggacuggaggcu

SEQ ID NO: 254059 - RNA, 32 nt, Human
ugcugggggagucaggcugcacuggcgggggu

SEQ ID NO: 254060 - RNA, 32 nt, Human
ugcugggggauggguggguacuagggagacug

SEQ ID NO: 254061 - RNA, 32 nt, Human
ugcugggggcagagacagaggagaagcuguuu

SEQ ID NO: 254062 - RNA, 32 nt, Human
ugcugggggcggggcuugguggugacugcugg

SEQ ID NO: 254063 - RNA, 20 nt, Human
ugcugggggcugggcagggg

SEQ ID NO: 254064 - RNA, 16 nt, Human
ugcugggggcuguggg

SEQ ID NO: 254065 - RNA, 32 nt, Human
ugcuggggguagaccgggccucaccagcuucc

SEQ ID NO: 254066 - RNA, 32 nt, Human
ugcugggggugagcuguacucuucugacugcc

SEQ ID NO: 254067 - RNA, 32 nt, Human
ugcugggggugcuaauuacauggcaggaagaa

SEQ ID NO: 254068 - RNA, 20 nt, Human
ugcugggggugggggcgggg

SEQ ID NO: 254069 - RNA, 32 nt, Human
ugcuggggguuaggacuuaagcacagaagauu

SEQ ID NO: 254070 - RNA, 32 nt, Human
ugcuggggucccauccuuucucccuggcugcc

SEQ ID NO: 254071 - RNA, 32 nt, Human
ugcugggguccugugugucgugcauuguugau

SEQ ID NO: 254072 - RNA, 26 nt, Human
ugcuggggugcuccggauuuugcggg

SEQ ID NO: 254073 - RNA, 32 nt, Human
ugcuggggugguaauaaaauguuaccugcaaa

SEQ ID NO: 254074 - RNA, 32 nt, Human
ugcugggguuacaggcaugagccaccacaccc

SEQ ID NO: 254075 - RNA, 32 nt, Human
ugcugggguuacaggugugugccaccacgccu

SEQ ID NO: 254076 - RNA, 23 nt, Human
ugcuggguacuccagaggugcca

SEQ ID NO: 254077 - RNA, 32 nt, Human
ugcuggguacuccagaggugccacugguggaa

SEQ ID NO: 254078 - RNA, 32 nt, Human
ugcuggguagagaagaaagcgagggugaggga

SEQ ID NO: 254079 - RNA, 22 nt, Human
ugcugggucaccagcagcgggu

SEQ ID NO: 254080 - RNA, 22 nt, Human
ugcugggucaccagcgggggug

SEQ ID NO: 254081 - RNA, 32 nt, Human
ugcugggucaccaggagaauggacccuuccuc

SEQ ID NO: 254082 - RNA, 32 nt, Human
ugcugggucaccaggagaauggacgcuuccuc

SEQ ID NO: 254083 - RNA, 32 nt, Human
ugcugggucaccaguagaauggacccuuccuc

SEQ ID NO: 254084 - RNA, 20 nt, Human
ugcugggucagaacguguca

SEQ ID NO: 254085 - RNA, 19 nt, Human
ugcugggucccgggaaggg

SEQ ID NO: 254086 - RNA, 23 nt, Human
ugcugggucgggccgacgugcca

SEQ ID NO: 254087 - RNA, 32 nt, Human
ugcugggucugaggccccugccuccaagauuu

SEQ ID NO: 254088 - RNA, 32 nt, Human
ugcugggucugucagcucucggaauagggaca

SEQ ID NO: 254089 - RNA, 28 nt, Human
ugcugggucuuguuuaguaaacuuguua

SEQ ID NO: 254090 - RNA, 32 nt, Human
ugcugggugauauagucaaaauuugcuuauuu

SEQ ID NO: 254091 - RNA, 32 nt, Human
ugcugggugaucucuaggacccaggagcagag

SEQ ID NO: 254092 - RNA, 32 nt, Human
ugcuggguggaaauauucagaugcugcuuaaa

SEQ ID NO: 254093 - RNA, 19 nt, Human
ugcuggguggaugcagugg

SEQ ID NO: 254094 - RNA, 32 nt, Human
ugcuggguggccuggcugaugcucagaggccu

SEQ ID NO: 254095 - RNA, 32 nt, Human
ugcugggugggaggaggagggugggauuugug

SEQ ID NO: 254096 - RNA, 32 nt, Human
ugcuggguggggugccacagggcgggguucag

SEQ ID NO: 254097 - RNA, 19 nt, Human
ugcuggguggugacuggau

SEQ ID NO: 254098 - RNA, 32 nt, Human
ugcuggguguucucaguccuugccaugaagua

SEQ ID NO: 254099 - RNA, 22 nt, Human
ugcuggguguuggagcagagug

SEQ ID NO: 254100 - RNA, 32 nt, Human
ugcuggguucaagcgauucuccugccucagcc

SEQ ID NO: 254101 - RNA, 22 nt, Human
ugcuggguucccacucccggcc

SEQ ID NO: 254102 - RNA, 20 nt, Human
ugcuggguugcaggggcagg

SEQ ID NO: 254103 - RNA, 32 nt, Human
ugcuggguugggggcgugggaggcagaagaca

SEQ ID NO: 254104 - RNA, 32 nt, Human
ugcuggguugguuaggucuggugacccuggag

SEQ ID NO: 254105 - RNA, 22 nt, Human
ugcuggguugucagugaugcca

SEQ ID NO: 254106 - RNA, 32 nt, Human
ugcuggguugucuuuuuccauguaacuuaagc

SEQ ID NO: 254107 - RNA, 21 nt, Human
ugcuggguuuacaggcaugag

SEQ ID NO: 254108 - RNA, 32 nt, Human
ugcuggguuuacaggcaugagccaccacaccc

SEQ ID NO: 254109 - RNA, 32 nt, Human
ugcuggguuuacaggcaugagccaccacgccc

SEQ ID NO: 254110 - RNA, 18 nt, Human
ugcuggguuucaacagac

SEQ ID NO: 254111 - RNA, 21 nt, Human
ugcuggguuucagggaguguc

SEQ ID NO: 254112 - RNA, 20 nt, Human
ugcuggguuucugaacugcu

SEQ ID NO: 254113 - RNA, 32 nt, Human
ugcugguaaucucccuguagcguaaacauagu

SEQ ID NO: 254114 - RNA, 32 nt, Human
ugcugguagagccacaucacccuuacauauac

SEQ ID NO: 254115 - RNA, 32 nt, Human
ugcugguaucaugggaacuccagccugcuauc

SEQ ID NO: 254116 - RNA, 32 nt, Human
ugcugguauucuccucuuuaccugguagggau

SEQ ID NO: 254117 - RNA, 31 nt, Human
ugcuggucaauaaaugugucagaaaaugagu

SEQ ID NO: 254118 - RNA, 32 nt, Human
ugcuggucacugcaaccucugccuccuggguu

SEQ ID NO: 254119 - RNA, 32 nt, Human
ugcugguccgggcuggccucucuaagacagug

SEQ ID NO: 254120 - RNA, 32 nt, Human
ugcugguccuggcuauuuuugugucauuuauu

SEQ ID NO: 254121 - RNA, 32 nt, Human
ugcugguccuucagacccugcccgaacuccca

SEQ ID NO: 254122 - RNA, 32 nt, Human
ugcuggucgauguccacuuucugcuuuucuuu

SEQ ID NO: 254123 - RNA, 32 nt, Human
ugcuggucucaaacucccaaccucaggugauc

SEQ ID NO: 254124 - RNA, 32 nt, Human
ugcuggucucaaacuccugaccucgggugauc

SEQ ID NO: 254125 - RNA, 32 nt, Human
ugcuggucucaaacuccugggcucaagcaauc

SEQ ID NO: 254126 - RNA, 32 nt, Human
ugcuggucuccugugugggcaggugugggggu

SEQ ID NO: 254127 - RNA, 32 nt, Human
ugcuggucucgaacuccugaccucagaugauu

SEQ ID NO: 254128 - RNA, 32 nt, Human
ugcuggucucgaacuccugaccucagguguuc

SEQ ID NO: 254129 - RNA, 32 nt, Human
ugcuggucucgaacuccugggcucaagcgauc

SEQ ID NO: 254130 - RNA, 32 nt, Human
ugcuggucucucucuuuaauacuucucaaauc

SEQ ID NO: 254131 - RNA, 32 nt, Human
ugcuggucucuucugguagggcagcagugucc

SEQ ID NO: 254132 - RNA, 32 nt, Human
ugcuggugaagcuccuggaagugauggaagga

SEQ ID NO: 254133 - RNA, 32 nt, Human
ugcuggugacccagcuuccuuuauaggcggac

SEQ ID NO: 254134 - RNA, 19 nt, Human
ugcuggugacgugcaggug

SEQ ID NO: 254135 - RNA, 32 nt, Human
ugcuggugagcagcagcaugcagaccagcugu

SEQ ID NO: 254136 - RNA, 32 nt, Human
ugcuggugagccaggugaccaucgccauguac

SEQ ID NO: 254137 - RNA, 32 nt, Human
ugcuggugaggguggucgcauguccauggauc

SEQ ID NO: 254138 - RNA, 32 nt, Human
ugcuggugaguggaaagcagagggugaucuuu

SEQ ID NO: 254139 - RNA, 32 nt, Human
ugcuggugccagugggagacugccgccuccuc

SEQ ID NO: 254140 - RNA, 32 nt, Human
ugcuggugcucccguuccccagacccuacccc

SEQ ID NO: 254141 - RNA, 32 nt, Human
ugcuggugcugguguaggcaagugcugcuuug

SEQ ID NO: 254142 - RNA, 19 nt, Human
ugcugguggaggcuguggu

SEQ ID NO: 254143 - RNA, 32 nt, Human
ugcugguggcucugaccugcuacuucuggaaa

SEQ ID NO: 254144 - RNA, 32 nt, Human
ugcuggugggcugggagucugagcccaucuug

SEQ ID NO: 254145 - RNA, 17 nt, Human
ugcuggugugccuggag

SEQ ID NO: 254146 - RNA, 29 nt, Human
ugcuggugugucuuggugccuggacuuga

SEQ ID NO: 254147 - RNA, 32 nt, Human
ugcugguguuaugauucaguauuaacucucaa

SEQ ID NO: 254148 - RNA, 32 nt, Human
ugcugguguuucccgcccagacagaucugcau

SEQ ID NO: 254149 - RNA, 32 nt, Human
ugcugguguuuggugaggaagcuccuaggaau

SEQ ID NO: 254150 - RNA, 32 nt, Human
ugcugguucauaaucagcugucugaccacguu

SEQ ID NO: 254151 - RNA, 32 nt, Human
ugcugguucuacauuaggguccauauuuaguu

SEQ ID NO: 254152 - RNA, 25 nt, Human
ugcugguucuguugccaccugggca

SEQ ID NO: 254153 - RNA, 32 nt, Human
ugcugguugggguugcucugauauacagcccu

SEQ ID NO: 254154 - RNA, 32 nt, Human
ugcugguuuucaucguaacacagaacgagguu

SEQ ID NO: 254155 - RNA, 32 nt, Human
ugcuguaaacuuaacuguucuuugccagaaca

SEQ ID NO: 254156 - RNA, 22 nt, Human
ugcuguaaccuaagaaacugcu

SEQ ID NO: 254157 - RNA, 32 nt, Human
ugcuguaacuuccuccccuuucugucaauugg

SEQ ID NO: 254158 - RNA, 32 nt, Human
ugcuguaaucccaucacuuugggaggccaggg

SEQ ID NO: 254159 - RNA, 32 nt, Human
ugcuguaauuggcagcagaaauccaaauuugu

SEQ ID NO: 254160 - RNA, 32 nt, Human
ugcuguacauacccuccuuuccuucuaccuau

SEQ ID NO: 254161 - RNA, 32 nt, Human
ugcuguaccagcuggcucacacgcugcccuuc

SEQ ID NO: 254162 - RNA, 32 nt, Human
ugcuguacuccaauuuucuuugcaaggccuua

SEQ ID NO: 254163 - RNA, 32 nt, Human
ugcuguagaagaggggaggaaacaagccagug

SEQ ID NO: 254164 - RNA, 32 nt, Human
ugcuguagacacugcccaugguccacuucgua

SEQ ID NO: 254165 - RNA, 32 nt, Human
ugcuguagagauagcccccacccaggggaugg

SEQ ID NO: 254166 - RNA, 32 nt, Human
ugcuguagagcucucccugccucucucucugg

SEQ ID NO: 254167 - RNA, 32 nt, Human
ugcuguagcaagagugucucucuagauuccuc

SEQ ID NO: 254168 - RNA, 32 nt, Human
ugcuguagccugggugacagugugagauucug

SEQ ID NO: 254169 - RNA, 24 nt, Human
ugcuguagcguagauagcugugau

SEQ ID NO: 254170 - RNA, 24 nt, Human
ugcuguagcguggauagcugugau

SEQ ID NO: 254171 - RNA, 32 nt, Human
ugcuguaggaguugaacaucuuugccagcucc

SEQ ID NO: 254172 - RNA, 32 nt, Human
ugcuguaggauggaacaggauauuguugaagc

SEQ ID NO: 254173 - RNA, 32 nt, Human
ugcuguaggcagcagagaagcauggaggaaaa

SEQ ID NO: 254174 - RNA, 24 nt, Human
ugcuguagucuuccccaguccuca

SEQ ID NO: 254175 - RNA, 32 nt, Human
ugcuguaucugugcuuugcccacaugcccuug

SEQ ID NO: 254176 - RNA, 32 nt, Human
ugcuguaugaagcacaaaagcagccauagaca

SEQ ID NO: 254177 - RNA, 32 nt, Human
ugcuguaugcugggcccugcgcugugcacguu

SEQ ID NO: 254178 - RNA, 32 nt, Human
ugcuguauggagucugcagguaaacaugccug

SEQ ID NO: 254179 - RNA, 32 nt, Human
ugcuguauuaacaucccuccccagacauccau

SEQ ID NO: 254180 - RNA, 32 nt, Human
ugcuguauugcccaggcuggagugugguggca

SEQ ID NO: 254181 - RNA, 32 nt, Human
ugcuguauuuguucaucucaaaccuagaugua

SEQ ID NO: 254182 - RNA, 32 nt, Human
ugcugucaagacuguguguguggauuucccac

SEQ ID NO: 254183 - RNA, 32 nt, Human
ugcugucacagaaggacaaaauauuccuagac

SEQ ID NO: 254184 - RNA, 32 nt, Human
ugcugucacccauuccagccuaaaugugacca

SEQ ID NO: 254185 - RNA, 32 nt, Human
ugcugucaccugcacuauccaauuaguauuuu

SEQ ID NO: 254186 - RNA, 32 nt, Human
ugcugucacgcccaaccucuuugggagaagua

SEQ ID NO: 254187 - RNA, 32 nt, Human
ugcugucacugucaaucugcuauauuuuucac

SEQ ID NO: 254188 - RNA, 32 nt, Human
ugcugucagaaagugggagugauuuugcaacu

SEQ ID NO: 254189 - RNA, 32 nt, Human
ugcugucagccaacaggugccaaaaaugcaaa

SEQ ID NO: 254190 - RNA, 32 nt, Human
ugcugucagccacccuuccuucauacacauag

SEQ ID NO: 254191 - RNA, 32 nt, Human
ugcugucagcccagggugggagcaggaaauga

SEQ ID NO: 254192 - RNA, 32 nt, Human
ugcugucagggagaggauggcagauggaggca

SEQ ID NO: 254193 - RNA, 32 nt, Human
ugcugucaggucugagucgguuggagucugac

SEQ ID NO: 254194 - RNA, 20 nt, Human
ugcugucagugccgcaggug

SEQ ID NO: 254195 - RNA, 32 nt, Human
ugcugucaguguccuugggagucaccagcacc

SEQ ID NO: 254196 - RNA, 32 nt, Human
ugcugucaucuuggugguauuucuuggcucac

SEQ ID NO: 254197 - RNA, 32 nt, Human
ugcugucauggguuaaucucucaggccuccag

SEQ ID NO: 254198 - RNA, 32 nt, Human
ugcugucauucaaagcuagauguaacuccuac

SEQ ID NO: 254199 - RNA, 32 nt, Human
ugcugucauucuauaugauauugcucaaugug

SEQ ID NO: 254200 - RNA, 32 nt, Human
ugcugucauuggagcggugggcacuguuaaga

SEQ ID NO: 254201 - RNA, 32 nt, Human
ugcuguccaaaccagcaaacuuccugggcaaa

SEQ ID NO: 254202 - RNA, 17 nt, Human
ugcuguccaccugcucc

SEQ ID NO: 254203 - RNA, 32 nt, Human
ugcuguccacgucaguucaugaggcaacgucg

SEQ ID NO: 254204 - RNA, 32 nt, Human
ugcuguccacuaagcacugcacaaacaagcaa

SEQ ID NO: 254205 - RNA, 17 nt, Human
ugcuguccaucuuccca

SEQ ID NO: 254206 - RNA, 32 nt, Human
ugcuguccaugcugggagaucagagcaacagc

SEQ ID NO: 254207 - RNA, 32 nt, Human
ugcugucccauggacgcuccagucucuuccgu

SEQ ID NO: 254208 - RNA, 32 nt, Human
ugcuguccccuccccucuguuuacaucucccc

SEQ ID NO: 254209 - RNA, 32 nt, Human
ugcuguccccucccucucccucagucuccucu

SEQ ID NO: 254210 - RNA, 32 nt, Human
ugcugucccugccuauuccccuucaugcuggc

SEQ ID NO: 254211 - RNA, 32 nt, Human
ugcuguccggacuaggaggccauguucaaugg

SEQ ID NO: 254212 - RNA, 32 nt, Human
ugcuguccuccccugcacugaccccacucgcc

SEQ ID NO: 254213 - RNA, 32 nt, Human
ugcuguccugaaacccagaagugauggagaga

SEQ ID NO: 254214 - RNA, 32 nt, Human
ugcuguccugagagacaacacugggguuagac

SEQ ID NO: 254215 - RNA, 32 nt, Human
ugcuguccugggaggugguguuggaggcccca

SEQ ID NO: 254216 - RNA, 32 nt, Human
ugcuguccuggggcgggcacucucaggcaacc

SEQ ID NO: 254217 - RNA, 32 nt, Human
ugcuguccugugccugccuccaccucuuuaac

SEQ ID NO: 254218 - RNA, 32 nt, Human
ugcuguccuucccagccgccucugcuccucgg

SEQ ID NO: 254219 - RNA, 32 nt, Human
ugcugucguuaagagcuuucgaggaaggagua

SEQ ID NO: 254220 - RNA, 32 nt, Human
ugcugucuauccucucuucucuccuugcagga

SEQ ID NO: 254221 - RNA, 32 nt, Human
ugcugucucacccaggcuggagugcaguggca

SEQ ID NO: 254222 - RNA, 32 nt, Human
ugcugucuccccggcuggagcgcaguggcacg

SEQ ID NO: 254223 - RNA, 27 nt, Human
ugcugucuccgaacuucucuguugcaa

SEQ ID NO: 254224 - RNA, 32 nt, Human
ugcugucucuaauugauucaagggccuagauu

SEQ ID NO: 254225 - RNA, 32 nt, Human
ugcugucucugccuccuuucugcugucaccac

SEQ ID NO: 254226 - RNA, 32 nt, Human
ugcugucucuuuccuuuugccuauucuggcaa

SEQ ID NO: 254227 - RNA, 32 nt, Human
ugcugucugaaggucacgaucauguuaccaua

SEQ ID NO: 254228 - RNA, 32 nt, Human
ugcugucuggacuuugcugucucugaacagua

SEQ ID NO: 254229 - RNA, 32 nt, Human
ugcugucuggcugacauuaauggccaauauuu

SEQ ID NO: 254230 - RNA, 23 nt, Human
ugcugucugucuccaccccagcc

SEQ ID NO: 254231 - RNA, 32 nt, Human
ugcugucuucaagaucuaccugucuacagcau

SEQ ID NO: 254232 - RNA, 32 nt, Human
ugcugucuuggaccugucuguuggguuuaguc

SEQ ID NO: 254233 - RNA, 32 nt, Human
ugcugucuuggucuccccuguggaaacccuuc

SEQ ID NO: 254234 - RNA, 32 nt, Human
ugcugucuuucuacuuuuuaauuuaaauaccc

SEQ ID NO: 254235 - RNA, 32 nt, Human
ugcugugaagagaguucuuuauaaagccugua

SEQ ID NO: 254236 - RNA, 32 nt, Human
ugcugugaccauagcccacugcagccuccacc

SEQ ID NO: 254237 - RNA, 32 nt, Human
ugcugugaccucgugcagccuuggggacccug

SEQ ID NO: 254238 - RNA, 32 nt, Human
ugcugugagauccuggacaagccauguaacuu

SEQ ID NO: 254239 - RNA, 32 nt, Human
ugcugugagccaccuccagccucggguggcug

SEQ ID NO: 254240 - RNA, 32 nt, Human
ugcugugagggaggggaaaagcauuuuucaau

SEQ ID NO: 254241 - RNA, 21 nt, Human
ugcugugaucauaacugugau

SEQ ID NO: 254242 - RNA, 32 nt, Human
ugcugugaucggccuggaaugucaggcuguga

SEQ ID NO: 254243 - RNA, 32 nt, Human
ugcugugaugugccuuucccugcaguccuucc

SEQ ID NO: 254244 - RNA, 32 nt, Human
ugcugugauucuguuuuaaguccauaccuugu

SEQ ID NO: 254245 - RNA, 32 nt, Human
ugcugugcacacugugugugaugaaucucgcc

SEQ ID NO: 254246 - RNA, 32 nt, Human
ugcugugcagccugcagaacugugagccaauu

SEQ ID NO: 254247 - RNA, 32 nt, Human
ugcugugcagggcucccggaggacaggaccuu

SEQ ID NO: 254248 - RNA, 32 nt, Human
ugcugugcauucacucuaagaugaggagaaca

SEQ ID NO: 254249 - RNA, 32 nt, Human
ugcugugccacauugucuuccccagaagcuca

SEQ ID NO: 254250 - RNA, 32 nt, Human
ugcugugccaugaccagcaguguugguggcca

SEQ ID NO: 254251 - RNA, 32 nt, Human
ugcugugccccaccacgucuggcucccugccc

SEQ ID NO: 254252 - RNA, 32 nt, Human
ugcugugccucugaagcaccugcucacagaag

SEQ ID NO: 254253 - RNA, 32 nt, Human
ugcugugccugggguccacagagccgggaggu

SEQ ID NO: 254254 - RNA, 32 nt, Human
ugcugugccuuagggcccuucucauagcuguu

SEQ ID NO: 254255 - RNA, 32 nt, Human
ugcugugcucacaacacuugugucugccacau

SEQ ID NO: 254256 - RNA, 32 nt, Human
ugcugugcuccuguggcagugauggggccugg

SEQ ID NO: 254257 - RNA, 32 nt, Human
ugcugugcugcugcuuuuccuacuucugcccu

SEQ ID NO: 254258 - RNA, 32 nt, Human
ugcugugcugggaaggccgaggaugggggccc

SEQ ID NO: 254259 - RNA, 32 nt, Human
ugcugugcuggggcagcuuccucugcuacgcc

SEQ ID NO: 254260 - RNA, 32 nt, Human
ugcugugcuguuucuuuuucuucuuccugcug

SEQ ID NO: 254261 - RNA, 32 nt, Human
ugcugugcuucaaagccuuaacugucaaaucu

SEQ ID NO: 254262 - RNA, 32 nt, Human
ugcugugcuuggcugggcucugcugugccccu

SEQ ID NO: 254263 - RNA, 32 nt, Human
ugcuguggacugcaucaggucucagugucccu

SEQ ID NO: 254264 - RNA, 32 nt, Human
ugcuguggacuucuuccagcagguuugaagau

SEQ ID NO: 254265 - RNA, 32 nt, Human
ugcuguggaggcagccucaaugcugaaaaugg

SEQ ID NO: 254266 - RNA, 32 nt, Human
ugcuguggaguucuuuacaaagggcuuaggcu

SEQ ID NO: 254267 - RNA, 32 nt, Human
ugcuguggauagucuuucccucuccccuccug

SEQ ID NO: 254268 - RNA, 31 nt, Human
ugcuguggcacgaucucagcucacugcaauc

SEQ ID NO: 254269 - RNA, 32 nt, Human
ugcuguggcaggcagauugggugguaguggga

SEQ ID NO: 254270 - RNA, 32 nt, Human
ugcuguggcccuggugauggcagagccuuggg

SEQ ID NO: 254271 - RNA, 32 nt, Human
ugcuguggcucacaccuguaaucccagcacuu

SEQ ID NO: 254272 - RNA, 32 nt, Human
ugcuguggcucacgccucuaaucccagcacuu

SEQ ID NO: 254273 - RNA, 32 nt, Human
ugcuguggcucacgccugcaaucccagcacuu

SEQ ID NO: 254274 - RNA, 32 nt, Human
ugcuguggcucacgccuguaaucccagcacuc

SEQ ID NO: 254275 - RNA, 32 nt, Human
ugcuguggcucacgccuguaaucccagcacuu

SEQ ID NO: 254276 - RNA, 32 nt, Human
ugcuguggcucaugccuguaaucccagcacuu

SEQ ID NO: 254277 - RNA, 21 nt, Human
ugcuguggcucuccccggggu

SEQ ID NO: 254278 - RNA, 32 nt, Human
ugcuguggcuguuccuuauccuaaugaugcgc

SEQ ID NO: 254279 - RNA, 32 nt, Human
ugcuguggcuuccucuugagagaggacaggga

SEQ ID NO: 254280 - RNA, 32 nt, Human
ugcugugggaagagagcagccguguggcaguu

SEQ ID NO: 254281 - RNA, 32 nt, Human
ugcugugggacuggcccugcuccuguacugcu

SEQ ID NO: 254282 - RNA, 32 nt, Human
ugcugugggaggcaugagcuggagaugggggc

SEQ ID NO: 254283 - RNA, 32 nt, Human
ugcugugggcccaggacaggaggcugagaagg

SEQ ID NO: 254284 - RNA, 31 nt, Human
ugcugugggccuggaagaugggaggaggggc

SEQ ID NO: 254285 - RNA, 30 nt, Human
ugcugugggcuccuuggcacaugaggccgg

SEQ ID NO: 254286 - RNA, 30 nt, Human
ugcugugggcuuucuggaacugcuggcugg

SEQ ID NO: 254287 - RNA, 32 nt, Human
ugcuguggggaggacuccauccaccucaucac

SEQ ID NO: 254288 - RNA, 32 nt, Human
ugcugugggugccaccaggcccagggacugca

SEQ ID NO: 254289 - RNA, 32 nt, Human
ugcuguggguggaagagggaguagcugauuuc

SEQ ID NO: 254290 - RNA, 32 nt, Human
ugcugugguggaagggccuagucugaaucugg

SEQ ID NO: 254291 - RNA, 32 nt, Human
ugcugugguggucccacccaggagagccugug

SEQ ID NO: 254292 - RNA, 32 nt, Human
ugcuguguacccaggccaggaaccugaccugc

SEQ ID NO: 254293 - RNA, 32 nt, Human
ugcuguguauaugggauuagagccacuacaua

SEQ ID NO: 254294 - RNA, 32 nt, Human
ugcuguguaugaggucacagggcccagcugug

SEQ ID NO: 254295 - RNA, 32 nt, Human
ugcugugucaccaaggcuggagggcaauagca

SEQ ID NO: 254296 - RNA, 32 nt, Human
ugcugugucaccaggauggagugcaguggcau

SEQ ID NO: 254297 - RNA, 32 nt, Human
ugcugugucaccaggcuggagcaguggcacga

SEQ ID NO: 254298 - RNA, 32 nt, Human
ugcugugucaccaucacuacucaagaccggag

SEQ ID NO: 254299 - RNA, 32 nt, Human
ugcugugucaccuaggcuggagugcaguggca

SEQ ID NO: 254300 - RNA, 32 nt, Human
ugcugugucaucugaaaucggcacauuccaug

SEQ ID NO: 254301 - RNA, 32 nt, Human
ugcuguguccuuuccagacuccagggcucccc

SEQ ID NO: 254302 - RNA, 32 nt, Human
ugcugugucgccuaggcuggagugcaguggcg

SEQ ID NO: 254303 - RNA, 32 nt, Human
ugcugugucgggaggaaggucagggcuccuga

SEQ ID NO: 254304 - RNA, 32 nt, Human
ugcugugugcacauguguacacacagcuaauu

SEQ ID NO: 254305 - RNA, 32 nt, Human
ugcugugugcucuggggagcugcaaaagggca

SEQ ID NO: 254306 - RNA, 32 nt, Human
ugcugugugcugaauuacuaugccaugugcua

SEQ ID NO: 254307 - RNA, 32 nt, Human
ugcugugugcuugugugcaugugccuaugugg

SEQ ID NO: 254308 - RNA, 23 nt, Human
ugcuguguggcacaaauguguua

SEQ ID NO: 254309 - RNA, 32 nt, Human
ugcuguguggcccaggcuggagugcaguggcg

SEQ ID NO: 254310 - RNA, 32 nt, Human
ugcuguguuacccaggguggauugcagcugau

SEQ ID NO: 254311 - RNA, 32 nt, Human
ugcuguguuagacugcaugcuugaguguuugg

SEQ ID NO: 254312 - RNA, 32 nt, Human
ugcuguguugcccaggcuagagugcagcagug

SEQ ID NO: 254313 - RNA, 32 nt, Human
ugcuguguugcccaggcuggacucaaauuccu

SEQ ID NO: 254314 - RNA, 32 nt, Human
ugcuguguugcccaggcuggagugcaguggcc

SEQ ID NO: 254315 - RNA, 32 nt, Human
ugcuguguugcccaggcuggagugcaguggug

SEQ ID NO: 254316 - RNA, 32 nt, Human
ugcuguguugcccaggcuggagugcgguggcu

SEQ ID NO: 254317 - RNA, 32 nt, Human
ugcuguguugcgggggaagcuguguggaagga

SEQ ID NO: 254318 - RNA, 32 nt, Human
ugcuguguugcucaggcuggucuggaaccccu

SEQ ID NO: 254319 - RNA, 32 nt, Human
ugcuguguuguccaggcuggagugcaauggug

SEQ ID NO: 254320 - RNA, 21 nt, Human
ugcuguuaauaaagucaacuu

SEQ ID NO: 254321 - RNA, 32 nt, Human
ugcuguuaauugauuaaaaucuggcaaaguua

SEQ ID NO: 254322 - RNA, 32 nt, Human
ugcuguuacguuugaagucugacaauccuuga

SEQ ID NO: 254323 - RNA, 32 nt, Human
ugcuguuagaagcaggaggugugcagggggug

SEQ ID NO: 254324 - RNA, 32 nt, Human
ugcuguuagauucuguucuccuuugagguagg

SEQ ID NO: 254325 - RNA, 17 nt, Human
ugcuguuaguaacugug

SEQ ID NO: 254326 - RNA, 32 nt, Human
ugcuguuauaucagccucuaccucucaggucc

SEQ ID NO: 254327 - RNA, 32 nt, Human
ugcuguuaucucacauuauaaauuucuaaauc

SEQ ID NO: 254328 - RNA, 32 nt, Human
ugcuguuauuuuuccaagucuuggggagaaaa

SEQ ID NO: 254329 - RNA, 32 nt, Human
ugcuguucagcccuuacacugccaagccaucc

SEQ ID NO: 254330 - RNA, 32 nt, Human
ugcuguucaggaccacuaaaugcugaaaugug

SEQ ID NO: 254331 - RNA, 32 nt, Human
ugcuguucaucacuuuuuccaucaagugaaau

SEQ ID NO: 254332 - RNA, 32 nt, Human
ugcuguuccaacgcugccugcacuacaacaga

SEQ ID NO: 254333 - RNA, 32 nt, Human
ugcuguuccaccuccccucagacuagcuuuca

SEQ ID NO: 254334 - RNA, 32 nt, Human
ugcuguuccaccuccccucagacuaucuuuca

SEQ ID NO: 254335 - RNA, 32 nt, Human
ugcuguuccaggagagcaacccuggggugcac

SEQ ID NO: 254336 - RNA, 32 nt, Human
ugcuguuccaguucuggucaagggccuugggg

SEQ ID NO: 254337 - RNA, 32 nt, Human
ugcuguucuagguacuggccugggugacagag

SEQ ID NO: 254338 - RNA, 32 nt, Human
ugcuguucucagcagccacuucccaggcugcc

SEQ ID NO: 254339 - RNA, 32 nt, Human
ugcuguucuccacuucucaccugccauccacg

SEQ ID NO: 254340 - RNA, 32 nt, Human
ugcuguucugggucucaggcugcuggacccca

SEQ ID NO: 254341 - RNA, 32 nt, Human
ugcuguugauuuucucugcucugcucuuagcu

SEQ ID NO: 254342 - RNA, 32 nt, Human
ugcuguugcccaggcuggagugcaguggugcg

SEQ ID NO: 254343 - RNA, 32 nt, Human
ugcuguugcccaggcuggagugcagugucccg

SEQ ID NO: 254344 - RNA, 32 nt, Human
ugcuguugcccuuuuaaacugcggcuugacgg

SEQ ID NO: 254345 - RNA, 32 nt, Human
ugcuguugcucuugcucucaccccuguugaca

SEQ ID NO: 254346 - RNA, 32 nt, Human
ugcuguugcuggcgugagaaggggcgacggag

SEQ ID NO: 254347 - RNA, 32 nt, Human
ugcuguuggaaaacauggaaaaugcauccuua

SEQ ID NO: 254348 - RNA, 32 nt, Human
ugcuguuggcaucuugcugcuaauccugaggc

SEQ ID NO: 254349 - RNA, 24 nt, Human
ugcuguugggauauagucaacuua

SEQ ID NO: 254350 - RNA, 32 nt, Human
ugcuguuguacuucugaaaucagaccugugug

SEQ ID NO: 254351 - RNA, 32 nt, Human
ugcuguugucauggagcugugggaguuggcac

SEQ ID NO: 254352 - RNA, 18 nt, Human
ugcuguugugcuuggaga

SEQ ID NO: 254353 - RNA, 32 nt, Human
ugcuguuguugcuggucuagagacuauuuuga

SEQ ID NO: 254354 - RNA, 23 nt, Human
ugcuguuguuucaugaaugugcc

SEQ ID NO: 254355 - RNA, 32 nt, Human
ugcuguuuacacaguucucaggaggcuguggu

SEQ ID NO: 254356 - RNA, 32 nt, Human
ugcuguuuagguaaauaaacuguuuauauaaa

SEQ ID NO: 254357 - RNA, 32 nt, Human
ugcuguuuaucugucaccuccacuugcucccc

SEQ ID NO: 254358 - RNA, 32 nt, Human
ugcuguuucaugccuucauuccuuccuauaca

SEQ ID NO: 254359 - RNA, 32 nt, Human
ugcuguuuccagccgcugaaucugcugagugu

SEQ ID NO: 254360 - RNA, 32 nt, Human
ugcuguuucccaaguuucccacccuccacccu

SEQ ID NO: 254361 - RNA, 32 nt, Human
ugcuguuucucaguauuaugacaugugacagg

SEQ ID NO: 254362 - RNA, 32 nt, Human
ugcuguuucucccauucuuuacagcucaccgg

SEQ ID NO: 254363 - RNA, 32 nt, Human
ugcuguuucucgccaacacuacccaggacucu

SEQ ID NO: 254364 - RNA, 22 nt, Human
ugcuguuucuuccacauauuca

SEQ ID NO: 254365 - RNA, 32 nt, Human
ugcuguuugguugcugaagggggucagugugu

SEQ ID NO: 254366 - RNA, 31 nt, Human
ugcuguuuguccucuugaccugugucugacu

SEQ ID NO: 254367 - RNA, 32 nt, Human
ugcuguuugucuacuuccuccugcuuccccgc

SEQ ID NO: 254368 - RNA, 32 nt, Human
ugcuuaaaacccuuuccuacaggaugaaguug

SEQ ID NO: 254369 - RNA, 21 nt, Human
ugcuuaaaaccucuuuuugga

SEQ ID NO: 254370 - RNA, 32 nt, Human
ugcuuaaaauuuuguaauuuguauuuauaagc

SEQ ID NO: 254371 - RNA, 32 nt, Human
ugcuuaaagcuucuuguccauggcuuuuguuu

SEQ ID NO: 254372 - RNA, 32 nt, Human
ugcuuaacucaaccagcagcagagccagggcc

SEQ ID NO: 254373 - RNA, 32 nt, Human
ugcuuaacugaggggcaugaugggggaggcgg

SEQ ID NO: 254374 - RNA, 32 nt, Human
ugcuuaagaggaaaaugaaaguguuccugggg

SEQ ID NO: 254375 - RNA, 32 nt, Human
ugcuuaagagguuuaucaugcauggcaagauu

SEQ ID NO: 254376 - RNA, 23 nt, Human
ugcuuaagcccaggaguuugaga

SEQ ID NO: 254377 - RNA, 32 nt, Human
ugcuuaagcucuggcccugcccuguauuccuc

SEQ ID NO: 254378 - RNA, 23 nt, Human
ugcuuaaguccaggaguucaaga

SEQ ID NO: 254379 - RNA, 32 nt, Human
ugcuuaagucugggagguugaggcugcaguga

SEQ ID NO: 254380 - RNA, 22 nt, Human
ugcuuaauaaaugucugcucaa

SEQ ID NO: 254381 - RNA, 32 nt, Human
ugcuuaaucaagagcuggaguucaaugagucc

SEQ ID NO: 254382 - RNA, 21 nt, Human
ugcuuaaucugaccccuggca

SEQ ID NO: 254383 - RNA, 32 nt, Human
ugcuuaauggagaacagagaagaucuuguugc

SEQ ID NO: 254384 - RNA, 32 nt, Human
ugcuuaauggugcugggaagccuagaggaauu

SEQ ID NO: 254385 - RNA, 32 nt, Human
ugcuuacaaacugguagacagaauguagcuua

SEQ ID NO: 254386 - RNA, 31 nt, Human
ugcuuacacagcuacagagccaccuccucac

SEQ ID NO: 254387 - RNA, 32 nt, Human
ugcuuacacaucucuccucagagcugucccuu

SEQ ID NO: 254388 - RNA, 32 nt, Human
ugcuuacaccuguaaucccagcacuuugggag

SEQ ID NO: 254389 - RNA, 32 nt, Human
ugcuuacacugacuuuucuucuuguaggacuc

SEQ ID NO: 254390 - RNA, 32 nt, Human
ugcuuaccaucccccacccccaaccaaguucu

SEQ ID NO: 254391 - RNA, 32 nt, Human
ugcuuacccacugccugcccagacuuucuauc

SEQ ID NO: 254392 - RNA, 32 nt, Human
ugcuuacccuagauuucuccaggauuuuggug

SEQ ID NO: 254393 - RNA, 19 nt, Human
ugcuuaccugcacucucug

SEQ ID NO: 254394 - RNA, 32 nt, Human
ugcuuaccugggaggcagaggguguuauggga

SEQ ID NO: 254395 - RNA, 32 nt, Human
ugcuuacuccacuucgcuucucugcuccaggu

SEQ ID NO: 254396 - RNA, 32 nt, Human
ugcuuacucucccacgugccaugcaguuccug

SEQ ID NO: 254397 - RNA, 18 nt, Human
ugcuuacugcugcaggug

SEQ ID NO: 254398 - RNA, 32 nt, Human
ugcuuagaaaagcagagggucagggaaaucua

SEQ ID NO: 254399 - RNA, 32 nt, Human
ugcuuagacagagaagagauuaacuucagugg

SEQ ID NO: 254400 - RNA, 32 nt, Human
ugcuuagagaaaacguguugccaucccaucau

SEQ ID NO: 254401 - RNA, 32 nt, Human
ugcuuagagagaucugcugucucccaaauaag

SEQ ID NO: 254402 - RNA, 32 nt, Human
ugcuuagagcacaggaagugacaacuuaggga

SEQ ID NO: 254403 - RNA, 32 nt, Human
ugcuuagaggccucuauaauuuaaacaugaac

SEQ ID NO: 254404 - RNA, 32 nt, Human
ugcuuagauaaauguaaucacuguaaacaucu

SEQ ID NO: 254405 - RNA, 32 nt, Human
ugcuuagaucacugcagcuucuaggacccggu

SEQ ID NO: 254406 - RNA, 32 nt, Human
ugcuuagcaugcaaguucccuccaucauugcc

SEQ ID NO: 254407 - RNA, 32 nt, Human
ugcuuagccaguaacccaggaggcucagaugc

SEQ ID NO: 254408 - RNA, 21 nt, Human
ugcuuagcccugcucugaaua

SEQ ID NO: 254409 - RNA, 32 nt, Human
ugcuuagcuaccugcgggugucauuggccccg

SEQ ID NO: 254410 - RNA, 32 nt, Human
ugcuuagcugggcuguaaagaugaaggcauca

SEQ ID NO: 254411 - RNA, 32 nt, Human
ugcuuaggcgcugagggggaaaaagaggggga

SEQ ID NO: 254412 - RNA, 32 nt, Human
ugcuuagucauuucuauguucauuccacuuug

SEQ ID NO: 254413 - RNA, 32 nt, Human
ugcuuagugggacugguggcccagagagggcu

SEQ ID NO: 254414 - RNA, 19 nt, Human
ugcuuaguuacucugaaua

SEQ ID NO: 254415 - RNA, 32 nt, Human
ugcuuauagugauguguucccaggcaaaugcu

SEQ ID NO: 254416 - RNA, 19 nt, Human
ugcuuauauugucugaaua

SEQ ID NO: 254417 - RNA, 32 nt, Human
ugcuuaucaguuaucaaaguaaggaagacuuu

SEQ ID NO: 254418 - RNA, 32 nt, Human
ugcuuaucauuaggauaggguaagugaaguuu

SEQ ID NO: 254419 - RNA, 32 nt, Human
ugcuuaucugggagguguugggcgcggacagu

SEQ ID NO: 254420 - RNA, 32 nt, Human
ugcuuaugacaccuccuugcugcaaaucauug

SEQ ID NO: 254421 - RNA, 32 nt, Human
ugcuuauggaaagggauccugauugauugaaa

SEQ ID NO: 254422 - RNA, 32 nt, Human
ugcuuauguguagcuuuuuacuuuuuauggug

SEQ ID NO: 254423 - RNA, 32 nt, Human
ugcuuauucauugcauuuccuuccucauugcu

SEQ ID NO: 254424 - RNA, 32 nt, Human
ugcuuauugcagccuucuugcuuuaagagcga

SEQ ID NO: 254425 - RNA, 32 nt, Human
ugcuuauugcagcuuugucuccucagcacucu

SEQ ID NO: 254426 - RNA, 32 nt, Human
ugcuuauuucaaggaggcccuuaccuggaagg

SEQ ID NO: 254427 - RNA, 32 nt, Human
ugcuuauuuuaaaagaaauauucugauucaua

SEQ ID NO: 254428 - RNA, 32 nt, Human
ugcuucaaaacaauauaaauggauaauaguug

SEQ ID NO: 254429 - RNA, 32 nt, Human
ugcuucaaacaugcugaagaacuaacaggaac

SEQ ID NO: 254430 - RNA, 32 nt, Human
ugcuucaaacugucuuaaacaauguuugucac

SEQ ID NO: 254431 - RNA, 32 nt, Human
ugcuucaagcugguagagaaggccccucccuc

SEQ ID NO: 254432 - RNA, 19 nt, Human
ugcuucaaggcagcuguga

SEQ ID NO: 254433 - RNA, 32 nt, Human
ugcuucaagguagaugaugcuguuaucuuugg

SEQ ID NO: 254434 - RNA, 32 nt, Human
ugcuucaauucugaguccucuggacuuccccu

SEQ ID NO: 254435 - RNA, 32 nt, Human
ugcuucacccugaccucucacuccaggacagc

SEQ ID NO: 254436 - RNA, 32 nt, Human
ugcuucacugguucagcucuguuguuuccuua

SEQ ID NO: 254437 - RNA, 32 nt, Human
ugcuucacuuccguuccagccucagcggcagc

SEQ ID NO: 254438 - RNA, 32 nt, Human
ugcuucacuuguacaagaaucggcucccagac

SEQ ID NO: 254439 - RNA, 23 nt, Human
ugcuucagauuguuugauuugua

SEQ ID NO: 254440 - RNA, 32 nt, Human
ugcuucagccuccugaguagcugggauuacag

SEQ ID NO: 254441 - RNA, 19 nt, Human
ugcuucagccuucugagua

SEQ ID NO: 254442 - RNA, 32 nt, Human
ugcuucagcucuguacaacgagggcaaagaug

SEQ ID NO: 254443 - RNA, 32 nt, Human
ugcuucagcugcagccugccugugcuggcugc

SEQ ID NO: 254444 - RNA, 32 nt, Human
ugcuucaggaugugcggcaccuccuuacugac

SEQ ID NO: 254445 - RNA, 32 nt, Human
ugcuucagguaaccucccuugaccuucaggag

SEQ ID NO: 254446 - RNA, 32 nt, Human
ugcuucaggugugauccagcacuuucccagcu

SEQ ID NO: 254447 - RNA, 32 nt, Human
ugcuucagguucugagcaacaguguauauuau

SEQ ID NO: 254448 - RNA, 32 nt, Human
ugcuucaguaaaauccaguaauggguaugcga

SEQ ID NO: 254449 - RNA, 22 nt, Human
ugcuucagucgagagcccugua

SEQ ID NO: 254450 - RNA, 30 nt, Human
ugcuucagugaugugguccauuauaagaua

SEQ ID NO: 254451 - RNA, 20 nt, Human
ugcuucaguggaagugugua

SEQ ID NO: 254452 - RNA, 24 nt, Human
ugcuucaguuuccucaucugugaa

SEQ ID NO: 254453 - RNA, 32 nt, Human
ugcuucaucacuguagcacuggggcuucacac

SEQ ID NO: 254454 - RNA, 32 nt, Human
ugcuucaucucuaaagguccuucuaggagaga

SEQ ID NO: 254455 - RNA, 32 nt, Human
ugcuucaucucuaguuuuccuucuuugugagg

SEQ ID NO: 254456 - RNA, 32 nt, Human
ugcuucaucugugggaugcugaaggagaugag

SEQ ID NO: 254457 - RNA, 32 nt, Human
ugcuucaugccuguaauccaagcacuuugaga

SEQ ID NO: 254458 - RNA, 32 nt, Human
ugcuucaugguuccugagcucuuucuccuguu

SEQ ID NO: 254459 - RNA, 32 nt, Human
ugcuucauuaggucugaagggggccaaggaau

SEQ ID NO: 254460 - RNA, 32 nt, Human
ugcuucauucacaaccuccauuuucagcaaca

SEQ ID NO: 254461 - RNA, 32 nt, Human
ugcuuccaagcugaccaaauucugagcugcug

SEQ ID NO: 254462 - RNA, 32 nt, Human
ugcuuccacagcuugcuaguucuguguuuacu

SEQ ID NO: 254463 - RNA, 32 nt, Human
ugcuuccacaucuagcuuccucccucuccucu

SEQ ID NO: 254464 - RNA, 30 nt, Human
ugcuuccacuuauuacccauccuuccucuu

SEQ ID NO: 254465 - RNA, 32 nt, Human
ugcuuccagaagcaagaaaaguuucuucucuc

SEQ ID NO: 254466 - RNA, 32 nt, Human
ugcuuccagagucccaagagcuucucugggau

SEQ ID NO: 254467 - RNA, 32 nt, Human
ugcuuccagcuccaguugcucaucugagaacu

SEQ ID NO: 254468 - RNA, 32 nt, Human
ugcuuccagcuuuugcccauucaguauuaugu

SEQ ID NO: 254469 - RNA, 32 nt, Human
ugcuuccaggcagaagcagccaaggaccgauu

SEQ ID NO: 254470 - RNA, 32 nt, Human
ugcuuccaucaucaguacuccuuguuuuucug

SEQ ID NO: 254471 - RNA, 32 nt, Human
ugcuuccauccaugggugggaagacuucagca

SEQ ID NO: 254472 - RNA, 32 nt, Human
ugcuuccaucucacuaaccacccaccccuacc

SEQ ID NO: 254473 - RNA, 32 nt, Human
ugcuuccauguguucuggguucagaggucaug

SEQ ID NO: 254474 - RNA, 32 nt, Human
ugcuucccaaggaccaugaaacuccugcugcu

SEQ ID NO: 254475 - RNA, 32 nt, Human
ugcuucccaccagcaaagaccacgacuggaga

SEQ ID NO: 254476 - RNA, 32 nt, Human
ugcuucccacguccaccaugcccagcugggcc

SEQ ID NO: 254477 - RNA, 32 nt, Human
ugcuucccagaaccuccucacuagggcugagc

SEQ ID NO: 254478 - RNA, 32 nt, Human
ugcuucccagaggagcagcucuccccaggcau

SEQ ID NO: 254479 - RNA, 32 nt, Human
ugcuucccagcccuagaaauucuaucauugcu

SEQ ID NO: 254480 - RNA, 32 nt, Human
ugcuucccagcuagaccugugugagagguguc

SEQ ID NO: 254481 - RNA, 24 nt, Human
ugcuucccaggcuggagugcagug

SEQ ID NO: 254482 - RNA, 32 nt, Human
ugcuucccaguaagaauccaggagcaagcuuu

SEQ ID NO: 254483 - RNA, 32 nt, Human
ugcuucccagugacccuggccuuggagggcag

SEQ ID NO: 254484 - RNA, 32 nt, Human
ugcuucccauuuccucuuucuagccguccuuu

SEQ ID NO: 254485 - RNA, 32 nt, Human
ugcuuccccaaaacagacucauggacauuaaa

SEQ ID NO: 254486 - RNA, 32 nt, Human
ugcuuccccagaacuucccuggcuccuggccu

SEQ ID NO: 254487 - RNA, 32 nt, Human
ugcuuccccagcaugcagccaaguguggccac

SEQ ID NO: 254488 - RNA, 32 nt, Human
ugcuucccccucccccuccugcugugcuggaa

SEQ ID NO: 254489 - RNA, 32 nt, Human
ugcuuccccuagaaggguucugaucaccggag

SEQ ID NO: 254490 - RNA, 32 nt, Human
ugcuuccccugccugguccagcccugguuggg

SEQ ID NO: 254491 - RNA, 32 nt, Human
ugcuuccccuuuuaccccuccucgcccccucu

SEQ ID NO: 254492 - RNA, 32 nt, Human
ugcuucccgggguggggaggaggcaggaggcg

SEQ ID NO: 254493 - RNA, 32 nt, Human
ugcuucccuagacuugcagcuuauguacgccc

SEQ ID NO: 254494 - RNA, 32 nt, Human
ugcuucccuccccugccucguuucucgucgcc

SEQ ID NO: 254495 - RNA, 32 nt, Human
ugcuucccuccuccucgugauccugguuccau

SEQ ID NO: 254496 - RNA, 32 nt, Human
ugcuucccugagcuuagggaaaguaggcccca

SEQ ID NO: 254497 - RNA, 32 nt, Human
ugcuucccugaugagcuguccucucugcagac

SEQ ID NO: 254498 - RNA, 32 nt, Human
ugcuucccuggggccuuggcucuugggccugc

SEQ ID NO: 254499 - RNA, 32 nt, Human
ugcuucccuugggacaagucccagaagaacua

SEQ ID NO: 254500 - RNA, 32 nt, Human
ugcuucccuuugaugcccauugagugccagcu

SEQ ID NO: 254501 - RNA, 32 nt, Human
ugcuuccgaugccaccauugcaacaguaaacu

SEQ ID NO: 254502 - RNA, 32 nt, Human
ugcuuccgcagccucaggccucccggugcgac

SEQ ID NO: 254503 - RNA, 32 nt, Human
ugcuuccggguaacaagcaaaagucaggccaa

SEQ ID NO: 254504 - RNA, 32 nt, Human
ugcuuccuacuaaaggacggacagagcauuug

SEQ ID NO: 254505 - RNA, 32 nt, Human
ugcuuccuagagcucuguccacacagcugucc

SEQ ID NO: 254506 - RNA, 32 nt, Human
ugcuuccuagccccaggcuugcagagaacaca

SEQ ID NO: 254507 - RNA, 32 nt, Human
ugcuuccucaaaggaggcuccccauggggccc

SEQ ID NO: 254508 - RNA, 32 nt, Human
ugcuuccucaucucagcccacucugaaaaugu

SEQ ID NO: 254509 - RNA, 32 nt, Human
ugcuuccucccccucacuaccuccuuuaauac

SEQ ID NO: 254510 - RNA, 32 nt, Human
ugcuuccuccuuggccccucaggcccuuggaa

SEQ ID NO: 254511 - RNA, 32 nt, Human
ugcuuccuccuugugguuccguugcaaacauu

SEQ ID NO: 254512 - RNA, 32 nt, Human
ugcuuccucugccucugaccucguggccacuc

SEQ ID NO: 254513 - RNA, 32 nt, Human
ugcuuccucuggaggccugggcugagacagug

SEQ ID NO: 254514 - RNA, 32 nt, Human
ugcuuccugaauaaaaaggagccaaaguugau

SEQ ID NO: 254515 - RNA, 32 nt, Human
ugcuuccugagaaacaacagauccacuuaaag

SEQ ID NO: 254516 - RNA, 32 nt, Human
ugcuuccugagccucuuugcucugccucuugg

SEQ ID NO: 254517 - RNA, 32 nt, Human
ugcuuccugauaguacuuucuagaguaaaaga

SEQ ID NO: 254518 - RNA, 32 nt, Human
ugcuuccugcaaccccuugcuggccuggggcc

SEQ ID NO: 254519 - RNA, 32 nt, Human
ugcuuccugcacgugcugggccugcuggagcu

SEQ ID NO: 254520 - RNA, 32 nt, Human
ugcuuccugcagcaccuccuacccugcuccgu

SEQ ID NO: 254521 - RNA, 32 nt, Human
ugcuuccugcagcuggccuagaugaugucagc

SEQ ID NO: 254522 - RNA, 32 nt, Human
ugcuuccugccucugcuucugccguaucccua

SEQ ID NO: 254523 - RNA, 32 nt, Human
ugcuuccugccugcaccugcggugacugugag

SEQ ID NO: 254524 - RNA, 32 nt, Human
ugcuuccugccuggccuucgucucgcuccacu

SEQ ID NO: 254525 - RNA, 32 nt, Human
ugcuuccuguaauucuggcuguuuuuccagac

SEQ ID NO: 254526 - RNA, 32 nt, Human
ugcuuccugucccuggaacucuuccagccuuu

SEQ ID NO: 254527 - RNA, 24 nt, Human
ugcuuccuguucgcagcugcggca

SEQ ID NO: 254528 - RNA, 32 nt, Human
ugcuuccuuccagagcagaguucccuauuccc

SEQ ID NO: 254529 - RNA, 32 nt, Human
ugcuuccuuccuuccccucugcugcugcugcc

SEQ ID NO: 254530 - RNA, 32 nt, Human
ugcuuccuucuccucaccaucuucccagacgg

SEQ ID NO: 254531 - RNA, 32 nt, Human
ugcuuccuucuugccagcucucccaacauacc

SEQ ID NO: 254532 - RNA, 23 nt, Human
ugcuuccuuuccaucuucuuccu

SEQ ID NO: 254533 - RNA, 21 nt, Human
ugcuucgaggguagcugagau

SEQ ID NO: 254534 - RNA, 32 nt, Human
ugcuucgcagaggcacugugcucacgguugga

SEQ ID NO: 254535 - RNA, 32 nt, Human
ugcuucgcaguaaaguuuccagccugggcccc

SEQ ID NO: 254536 - RNA, 32 nt, Human
ugcuucgucccacugcaccgccuggcugaggg

SEQ ID NO: 254537 - RNA, 32 nt, Human
ugcuucgucucuguuccugagagaccagaauu

SEQ ID NO: 254538 - RNA, 32 nt, Human
ugcuucuaaacauuggaaaaagcaaugaaaaa

SEQ ID NO: 254539 - RNA, 32 nt, Human
ugcuucuaccacccucacacuggugacccacc

SEQ ID NO: 254540 - RNA, 20 nt, Human
ugcuucuacuccuucuuccu

SEQ ID NO: 254541 - RNA, 32 nt, Human
ugcuucuaggaacccucaucauagcuccuuca

SEQ ID NO: 254542 - RNA, 20 nt, Human
ugcuucuagggcucugaaua

SEQ ID NO: 254543 - RNA, 21 nt, Human
ugcuucuagguauacuguggu

SEQ ID NO: 254544 - RNA, 32 nt, Human
ugcuucuaguguccugcauuuuauugacuggg

SEQ ID NO: 254545 - RNA, 24 nt, Human
ugcuucuauuccauagcuacggca

SEQ ID NO: 254546 - RNA, 21 nt, Human
ugcuucucaagggacacagug

SEQ ID NO: 254547 - RNA, 32 nt, Human
ugcuucucacuaccaccugugucuggacacau

SEQ ID NO: 254548 - RNA, 19 nt, Human
ugcuucucacuccauuccu

SEQ ID NO: 254549 - RNA, 18 nt, Human
ugcuucucacucucuucc

SEQ ID NO: 254550 - RNA, 27 nt, Human
ugcuucucaguuuacauuucugauaca

SEQ ID NO: 254551 - RNA, 25 nt, Human
ugcuucucauccccugguuguggua

SEQ ID NO: 254552 - RNA, 32 nt, Human
ugcuucucauucucugcagacucuucucagau

SEQ ID NO: 254553 - RNA, 32 nt, Human
ugcuucucauuuccuggaauuuaucuucccag

SEQ ID NO: 254554 - RNA, 32 nt, Human
ugcuucuccaaccugagaaacucaagacccau

SEQ ID NO: 254555 - RNA, 32 nt, Human
ugcuucuccacuccugcugcaaaggcugcugg

SEQ ID NO: 254556 - RNA, 32 nt, Human
ugcuucuccagccauccaggaguggcuguccu

SEQ ID NO: 254557 - RNA, 24 nt, Human
ugcuucuccagccucuucggccuc

SEQ ID NO: 254558 - RNA, 32 nt, Human
ugcuucuccagccucuucggccuccucgcccg

SEQ ID NO: 254559 - RNA, 32 nt, Human
ugcuucuccagccuuucucccauuucaguaag

SEQ ID NO: 254560 - RNA, 22 nt, Human
ugcuucuccaggccucuugccu

SEQ ID NO: 254561 - RNA, 21 nt, Human
ugcuucucccaucucucuccu

SEQ ID NO: 254562 - RNA, 21 nt, Human
ugcuucucccguuugccuccu

SEQ ID NO: 254563 - RNA, 32 nt, Human
ugcuucuccuccagugcugaucuugcugggcc

SEQ ID NO: 254564 - RNA, 32 nt, Human
ugcuucuccuccugccgcugaccagagcaugg

SEQ ID NO: 254565 - RNA, 32 nt, Human
ugcuucucgaccgcacuccucacuucagauuu

SEQ ID NO: 254566 - RNA, 22 nt, Human
ugcuucucucauuugucuuccu

SEQ ID NO: 254567 - RNA, 32 nt, Human
ugcuucucuccaagcaauucgugcagugggau

SEQ ID NO: 254568 - RNA, 32 nt, Human
ugcuucucuccucaucaucauucccaacaaca

SEQ ID NO: 254569 - RNA, 32 nt, Human
ugcuucucucucagacugccuuccugcuucug

SEQ ID NO: 254570 - RNA, 32 nt, Human
ugcuucucucuccuuuuccuuuacacacccac

SEQ ID NO: 254571 - RNA, 32 nt, Human
ugcuucucuuaugaucgccccaccucauuucc

SEQ ID NO: 254572 - RNA, 21 nt, Human
ugcuucucuugcccucuucuu

SEQ ID NO: 254573 - RNA, 32 nt, Human
ugcuucucuuucccccacccuacucccuccaa

SEQ ID NO: 254574 - RNA, 18 nt, Human
ugcuucugaaauauggua

SEQ ID NO: 254575 - RNA, 32 nt, Human
ugcuucugaacggccucggggagggagccugc

SEQ ID NO: 254576 - RNA, 32 nt, Human
ugcuucugacuggccagcccccuccccugcug

SEQ ID NO: 254577 - RNA, 32 nt, Human
ugcuucugagccagaccagcuguaagcugaaa

SEQ ID NO: 254578 - RNA, 32 nt, Human
ugcuucugagcuucagccugggagcaagcuug

SEQ ID NO: 254579 - RNA, 32 nt, Human
ugcuucugagguacauuuugaaugacagcaua

SEQ ID NO: 254580 - RNA, 32 nt, Human
ugcuucugagguuggcucuaacaucucugguc

SEQ ID NO: 254581 - RNA, 32 nt, Human
ugcuucugcauucacagcgccuccuggaccug

SEQ ID NO: 254582 - RNA, 32 nt, Human
ugcuucugccacuuccagcuguguggcuuuag

SEQ ID NO: 254583 - RNA, 32 nt, Human
ugcuucugcccaggccuggucugggggcagag

SEQ ID NO: 254584 - RNA, 21 nt, Human
ugcuucugccgcggcugcggc

SEQ ID NO: 254585 - RNA, 32 nt, Human
ugcuucugcuauagagaacauucuuccaagau

SEQ ID NO: 254586 - RNA, 32 nt, Human
ugcuucugcugccgcucugcagccuggaccug

SEQ ID NO: 254587 - RNA, 32 nt, Human
ugcuucuggaaaccucugccugcugcccuggc

SEQ ID NO: 254588 - RNA, 32 nt, Human
ugcuucuggaagugcuggaagcaucaccccaa

SEQ ID NO: 254589 - RNA, 32 nt, Human
ugcuucuggaccucacuccucacuucagacuu

SEQ ID NO: 254590 - RNA, 32 nt, Human
ugcuucuggaccucacuccucacuucagauuu

SEQ ID NO: 254591 - RNA, 32 nt, Human
ugcuucuggagacuuccugccuaggccucauc

SEQ ID NO: 254592 - RNA, 32 nt, Human
ugcuucuggagcuguggagcuuguaaagucac

SEQ ID NO: 254593 - RNA, 32 nt, Human
ugcuucuggcaggaaaaguucaguuugguuau

SEQ ID NO: 254594 - RNA, 32 nt, Human
ugcuucuggccaggaauccugggucugcaacu

SEQ ID NO: 254595 - RNA, 32 nt, Human
ugcuucuggccccugugugcucuguccugugu

SEQ ID NO: 254596 - RNA, 32 nt, Human
ugcuucugguaguaaggagcacaaagacguuu

SEQ ID NO: 254597 - RNA, 32 nt, Human
ugcuucuguaagcuugcuuuccccaccccaca

SEQ ID NO: 254598 - RNA, 23 nt, Human
ugcuucugucucccccaccccac

SEQ ID NO: 254599 - RNA, 32 nt, Human
ugcuucugucucuguuuugauucuccaaacug

SEQ ID NO: 254600 - RNA, 32 nt, Human
ugcuucuguucuguucuugcaauaacaaugac

SEQ ID NO: 254601 - RNA, 24 nt, Human
ugcuucuguuucaauaccugcggu

SEQ ID NO: 254602 - RNA, 32 nt, Human
ugcuucuuaccuggcccuaagccgggcgcuuc

SEQ ID NO: 254603 - RNA, 32 nt, Human
ugcuucuuagagcaucuuccacaucaacuccc

SEQ ID NO: 254604 - RNA, 32 nt, Human
ugcuucuuagaggggaaaugagagggcaugaa

SEQ ID NO: 254605 - RNA, 21 nt, Human
ugcuucuuagccagcuaccuc

SEQ ID NO: 254606 - RNA, 22 nt, Human
ugcuucuucaauggcaccuuca

SEQ ID NO: 254607 - RNA, 21 nt, Human
ugcuucuucaguccacacuca

SEQ ID NO: 254608 - RNA, 32 nt, Human
ugcuucuucauaccauucuccuugucccuugc

SEQ ID NO: 254609 - RNA, 32 nt, Human
ugcuucuuccagagaaauaaaguuaguuucua

SEQ ID NO: 254610 - RNA, 32 nt, Human
ugcuucuucccagagacagagcuguguaccug

SEQ ID NO: 254611 - RNA, 32 nt, Human
ugcuucuucucuucccacuugcagagccugcu

SEQ ID NO: 254612 - RNA, 32 nt, Human
ugcuucuuggacuaccuucacuggcauuucca

SEQ ID NO: 254613 - RNA, 32 nt, Human
ugcuucuuggaucagauccuggaacagaaaaa

SEQ ID NO: 254614 - RNA, 32 nt, Human
ugcuucuuggcuggggccacuaccuccuuucc

SEQ ID NO: 254615 - RNA, 32 nt, Human
ugcuucuuucauuuucuguuuguuuuauacaa

SEQ ID NO: 254616 - RNA, 32 nt, Human
ugcuucuuugcuuuaaaaaggauucuuaagua

SEQ ID NO: 254617 - RNA, 32 nt, Human
ugcuugaaacucauggcuucaagggaaacucc

SEQ ID NO: 254618 - RNA, 32 nt, Human
ugcuugaaagagacugcucuauuuauucugug

SEQ ID NO: 254619 - RNA, 32 nt, Human
ugcuugaaagugaaaagcaaucaauuauaccc

SEQ ID NO: 254620 - RNA, 32 nt, Human
ugcuugaaauaugcacuuagcacuuugguucc

SEQ ID NO: 254621 - RNA, 23 nt, Human
ugcuugaacccaggaguucaaga

SEQ ID NO: 254622 - RNA, 23 nt, Human
ugcuugaacccaggaguucgaga

SEQ ID NO: 254623 - RNA, 32 nt, Human
ugcuugaacccaggcaguggagguugcaguga

SEQ ID NO: 254624 - RNA, 32 nt, Human
ugcuugaacccagggcugugcugguguaggca

SEQ ID NO: 254625 - RNA, 32 nt, Human
ugcuugaacccgggggcagaggcugcagugag

SEQ ID NO: 254626 - RNA, 23 nt, Human
ugcuugaacucagaaguucaaga

SEQ ID NO: 254627 - RNA, 23 nt, Human
ugcuugaacucaggaguucaaga

SEQ ID NO: 254628 - RNA, 23 nt, Human
ugcuugaacucaggaguuggaga

SEQ ID NO: 254629 - RNA, 32 nt, Human
ugcuugaacucaugagacgguccaaaucucau

SEQ ID NO: 254630 - RNA, 32 nt, Human
ugcuugaagccucgugccacacuggcuuugag

SEQ ID NO: 254631 - RNA, 32 nt, Human
ugcuugaagcuguuuccuuuacucacauugaa

SEQ ID NO: 254632 - RNA, 32 nt, Human
ugcuugaaggaugguuugggaggcagggaauc

SEQ ID NO: 254633 - RNA, 32 nt, Human
ugcuugaagucagcgucuuccauuccagaaag

SEQ ID NO: 254634 - RNA, 32 nt, Human
ugcuugaaguccucucuuucugcugcuagccu

SEQ ID NO: 254635 - RNA, 32 nt, Human
ugcuugaaguuuaagaaagcugagcagaggug

SEQ ID NO: 254636 - RNA, 23 nt, Human
ugcuugaauccaggaguucaaga

SEQ ID NO: 254637 - RNA, 32 nt, Human
ugcuugaauguucuuggaggcuguuucuuaug

SEQ ID NO: 254638 - RNA, 32 nt, Human
ugcuugacaacaaccuaugcaccagguauuua

SEQ ID NO: 254639 - RNA, 32 nt, Human
ugcuugacccaggaggcagagguugcagugag

SEQ ID NO: 254640 - RNA, 32 nt, Human
ugcuugaccccagcagcccgagggacugucug

SEQ ID NO: 254641 - RNA, 32 nt, Human
ugcuugaccuccacuuuucaggagacuugggg

SEQ ID NO: 254642 - RNA, 32 nt, Human
ugcuugacucacugccaucugcuuugaaaacg

SEQ ID NO: 254643 - RNA, 32 nt, Human
ugcuugacuucacuccagggugagacuugacc

SEQ ID NO: 254644 - RNA, 32 nt, Human
ugcuugacuucaguuauugguggaaucuuuag

SEQ ID NO: 254645 - RNA, 18 nt, Human
ugcuugacuucucugaau

SEQ ID NO: 254646 - RNA, 32 nt, Human
ugcuugagaccagccugggugacacagcaaga

SEQ ID NO: 254647 - RNA, 19 nt, Human
ugcuugagaugacuguggu

SEQ ID NO: 254648 - RNA, 23 nt, Human
ugcuugagccaaggaauucgaga

SEQ ID NO: 254649 - RNA, 23 nt, Human
ugcuugagcccaagaguuggaga

SEQ ID NO: 254650 - RNA, 23 nt, Human
ugcuugagcccagaaguucaaga

SEQ ID NO: 254651 - RNA, 23 nt, Human
ugcuugagcccagaaguugaaga

SEQ ID NO: 254652 - RNA, 23 nt, Human
ugcuugagcccaggaauucgaga

SEQ ID NO: 254653 - RNA, 23 nt, Human
ugcuugagcccaggagcuggaga

SEQ ID NO: 254654 - RNA, 23 nt, Human
ugcuugagcccaggaguuagaga

SEQ ID NO: 254655 - RNA, 23 nt, Human
ugcuugagcccaggaguucaaga

SEQ ID NO: 254656 - RNA, 23 nt, Human
ugcuugagcccaggaguucgagg

SEQ ID NO: 254657 - RNA, 23 nt, Human
ugcuugagcccaggaguuugaga

SEQ ID NO: 254658 - RNA, 32 nt, Human
ugcuugagcccaggcugugugguucaccauaa

SEQ ID NO: 254659 - RNA, 32 nt, Human
ugcuugagcccaugaagucaggcugcagugag

SEQ ID NO: 254660 - RNA, 23 nt, Human
ugcuugagccuaggaguucgaga

SEQ ID NO: 254661 - RNA, 23 nt, Human
ugcuugagcucaggaguucaagg

SEQ ID NO: 254662 - RNA, 23 nt, Human
ugcuugagcucaggaguucgaga

SEQ ID NO: 254663 - RNA, 23 nt, Human
ugcuugagcucaggaguuugaga

SEQ ID NO: 254664 - RNA, 23 nt, Human
ugcuugagcucaugaguucaaga

SEQ ID NO: 254665 - RNA, 23 nt, Human
ugcuugagcugaggaguucgaga

SEQ ID NO: 254666 - RNA, 32 nt, Human
ugcuugaggaagcagaacacacagcuggaggc

SEQ ID NO: 254667 - RNA, 32 nt, Human
ugcuugaggccuggcagcugggccaagacaga

SEQ ID NO: 254668 - RNA, 17 nt, Human
ugcuugaguaacuguga

SEQ ID NO: 254669 - RNA, 23 nt, Human
ugcuugaguccaggaguucaaga

SEQ ID NO: 254670 - RNA, 23 nt, Human
ugcuugaguccaggaguucgaga

SEQ ID NO: 254671 - RNA, 32 nt, Human
ugcuugaguguggccccaccuccugggaccug

SEQ ID NO: 254672 - RNA, 32 nt, Human
ugcuugauaaucacucucagguguaaagcucc

SEQ ID NO: 254673 - RNA, 32 nt, Human
ugcuugaucacacuuauuugugcaaaauugau

SEQ ID NO: 254674 - RNA, 32 nt, Human
ugcuugaucaucuuugcacucugccuuaaaga

SEQ ID NO: 254675 - RNA, 32 nt, Human
ugcuugauccugggaggcagagguuguaguga

SEQ ID NO: 254676 - RNA, 32 nt, Human
ugcuugauugucuccccuucaagccccugccc

SEQ ID NO: 254677 - RNA, 32 nt, Human
ugcuugcagauggucugaguucuuguguccug

SEQ ID NO: 254678 - RNA, 32 nt, Human
ugcuugcagggagccgagaucgugccacugca

SEQ ID NO: 254679 - RNA, 32 nt, Human
ugcuugcagguaaaugugccacaaagaaagug

SEQ ID NO: 254680 - RNA, 32 nt, Human
ugcuugcagucacucgcauagcacagaggugg

SEQ ID NO: 254681 - RNA, 32 nt, Human
ugcuugcauguggggauacaggagaauucaga

SEQ ID NO: 254682 - RNA, 32 nt, Human
ugcuugccaccuggucaccagaccuccaaaua

SEQ ID NO: 254683 - RNA, 32 nt, Human
ugcuugccucaccagcucucugcucacauuuc

SEQ ID NO: 254684 - RNA, 32 nt, Human
ugcuugccuggagacguggaaccucugucuca

SEQ ID NO: 254685 - RNA, 32 nt, Human
ugcuugccuugcacuacgugccuggauaguuu

SEQ ID NO: 254686 - RNA, 32 nt, Human
ugcuugcgcugagggcucugcaguggcuggga

SEQ ID NO: 254687 - RNA, 32 nt, Human
ugcuugcuaaacuacaguggcagcagcuggga

SEQ ID NO: 254688 - RNA, 32 nt, Human
ugcuugcuaugucuguuaauacagcugagcuu

SEQ ID NO: 254689 - RNA, 18 nt, Human
ugcuugcucaucucccua

SEQ ID NO: 254690 - RNA, 32 nt, Human
ugcuugcucucuggcugugcuccugcuuaaag

SEQ ID NO: 254691 - RNA, 32 nt, Human
ugcuugcugccuggcucaggcagguccugugc

SEQ ID NO: 254692 - RNA, 32 nt, Human
ugcuugcugccugucugcuuuccuugguggcu

SEQ ID NO: 254693 - RNA, 32 nt, Human
ugcuugcugucucucagaauuguuuucuuacc

SEQ ID NO: 254694 - RNA, 32 nt, Human
ugcuugcugucugagaugaggguuccuaaacc

SEQ ID NO: 254695 - RNA, 32 nt, Human
ugcuugcugugucugagccucaguuuacucau

SEQ ID NO: 254696 - RNA, 32 nt, Human
ugcuugcuguuagagauguagcacuuuauccu

SEQ ID NO: 254697 - RNA, 32 nt, Human
ugcuugcuuccucccuuccccauuccuagcag

SEQ ID NO: 254698 - RNA, 32 nt, Human
ugcuugcuuucugccaaaccugugcuaugcau

SEQ ID NO: 254699 - RNA, 32 nt, Human
ugcuugcuuuugguuucucuuuacuuggaaua

SEQ ID NO: 254700 - RNA, 32 nt, Human
ugcuuggaaaucuagacaagaagagaauccau

SEQ ID NO: 254701 - RNA, 21 nt, Human
ugcuuggaauacuucugaaua

SEQ ID NO: 254702 - RNA, 32 nt, Human
ugcuuggaaugcugacagcaucaggcaacucu

SEQ ID NO: 254703 - RNA, 32 nt, Human
ugcuuggacaacccucagcaaugaacgaacca

SEQ ID NO: 254704 - RNA, 32 nt, Human
ugcuuggacagagaacuugaaauaaguggacc

SEQ ID NO: 254705 - RNA, 32 nt, Human
ugcuuggacuugcccaucuagcacuuuggaaa

SEQ ID NO: 254706 - RNA, 32 nt, Human
ugcuuggagaggggcgggaccuggagagaggc

SEQ ID NO: 254707 - RNA, 32 nt, Human
ugcuuggagcagcauuucauguucuuuugcug

SEQ ID NO: 254708 - RNA, 32 nt, Human
ugcuuggagccccugcuccugaacacgcauua

SEQ ID NO: 254709 - RNA, 32 nt, Human
ugcuuggaggaaggaaacccagcucuggucca

SEQ ID NO: 254710 - RNA, 32 nt, Human
ugcuuggaugagagccuggcugcaguacaugc

SEQ ID NO: 254711 - RNA, 32 nt, Human
ugcuuggauuacaggcaugaaccacugcaucu

SEQ ID NO: 254712 - RNA, 32 nt, Human
ugcuuggauuacaggcaugagccaccgcaccc

SEQ ID NO: 254713 - RNA, 32 nt, Human
ugcuuggcaacuucuaggauaaaucaguacuc

SEQ ID NO: 254714 - RNA, 32 nt, Human
ugcuuggcagaccuucaucuucugccucaacu

SEQ ID NO: 254715 - RNA, 32 nt, Human
ugcuuggcagcccagccuggaggagaaggcua

SEQ ID NO: 254716 - RNA, 26 nt, Human
ugcuuggcagguuccguggcugggca

SEQ ID NO: 254717 - RNA, 19 nt, Human
ugcuuggccacagaaccac

SEQ ID NO: 254718 - RNA, 32 nt, Human
ugcuuggcccccacuuuccagaccauuccagg

SEQ ID NO: 254719 - RNA, 32 nt, Human
ugcuuggcccugccaccuuccuccaggggagg

SEQ ID NO: 254720 - RNA, 21 nt, Human
ugcuuggcgcgacccugcggg

SEQ ID NO: 254721 - RNA, 21 nt, Human
ugcuuggcuauugucugaaua

SEQ ID NO: 254722 - RNA, 32 nt, Human
ugcuuggcucacugggaccaggaaagccuguc

SEQ ID NO: 254723 - RNA, 32 nt, Human
ugcuuggcugcccauuugccucuugagugggc

SEQ ID NO: 254724 - RNA, 32 nt, Human
ugcuuggcugcggugcucacacucaugaggag

SEQ ID NO: 254725 - RNA, 32 nt, Human
ugcuugggaaucugcccugcucucucagaaag

SEQ ID NO: 254726 - RNA, 32 nt, Human
ugcuugggacuugaaaucuguggccgaaggac

SEQ ID NO: 254727 - RNA, 32 nt, Human
ugcuugggaggcagaggcaggagaauugcuug

SEQ ID NO: 254728 - RNA, 32 nt, Human
ugcuugggaggcugaggcaggaagcucgcuug

SEQ ID NO: 254729 - RNA, 32 nt, Human
ugcuugggaggcugaggcaggagaaucgcuug

SEQ ID NO: 254730 - RNA, 32 nt, Human
ugcuugggaggcugagguugcaggaucgcuug

SEQ ID NO: 254731 - RNA, 32 nt, Human
ugcuugggagggugggggugggggagggucuu

SEQ ID NO: 254732 - RNA, 32 nt, Human
ugcuugggaggucgaggcugcagugagucaug

SEQ ID NO: 254733 - RNA, 32 nt, Human
ugcuugggcagacgagaccacacuggccuccc

SEQ ID NO: 254734 - RNA, 32 nt, Human
ugcuugggccccagcuggccagccuggcgaug

SEQ ID NO: 254735 - RNA, 32 nt, Human
ugcuugggcuuguucccagagacucagugaaa

SEQ ID NO: 254736 - RNA, 32 nt, Human
ugcuuggggaaaggggaaguaauuggcauucu

SEQ ID NO: 254737 - RNA, 32 nt, Human
ugcuuggggaaccucucagugaccucagguga

SEQ ID NO: 254738 - RNA, 25 nt, Human
ugcuuggggaccccaaguuugugga

SEQ ID NO: 254739 - RNA, 32 nt, Human
ugcuuggggaccccaccaccacccgcaacacu

SEQ ID NO: 254740 - RNA, 32 nt, Human
ugcuuggggagggggagcaucccacccacaug

SEQ ID NO: 254741 - RNA, 32 nt, Human
ugcuuggggugaggggcgggagaguggaauau

SEQ ID NO: 254742 - RNA, 32 nt, Human
ugcuuggguaaucccuuuuaauggugacugaa

SEQ ID NO: 254743 - RNA, 32 nt, Human
ugcuuggguuugccaugaugcgaggcugaguu

SEQ ID NO: 254744 - RNA, 32 nt, Human
ugcuuggucucuuccucuuuggccuaaucucu

SEQ ID NO: 254745 - RNA, 21 nt, Human
ugcuugguggcugugcugcug

SEQ ID NO: 254746 - RNA, 32 nt, Human
ugcuugguggugccagccccuuguccaccuuc

SEQ ID NO: 254747 - RNA, 22 nt, Human
ugcuugguugcauucuuggaca

SEQ ID NO: 254748 - RNA, 32 nt, Human
ugcuuguaaugcucacuuauguuuucucugua

SEQ ID NO: 254749 - RNA, 19 nt, Human
ugcuuguaccucuggcuga

SEQ ID NO: 254750 - RNA, 32 nt, Human
ugcuuguagaaaacaugguaggcuuccccaag

SEQ ID NO: 254751 - RNA, 32 nt, Human
ugcuuguagaaguaauaagaagaaagggaaca

SEQ ID NO: 254752 - RNA, 32 nt, Human
ugcuuguaggagagauggccaggguggcagcc

SEQ ID NO: 254753 - RNA, 32 nt, Human
ugcuuguaggcagcaaccauaugcuacaagaa

SEQ ID NO: 254754 - RNA, 32 nt, Human
ugcuuguauaugcucacagcagggcacaaaau

SEQ ID NO: 254755 - RNA, 32 nt, Human
ugcuugucacccaggcuggagugcaauggcau

SEQ ID NO: 254756 - RNA, 32 nt, Human
ugcuugucagccacauguaugucuucuuuuga

SEQ ID NO: 254757 - RNA, 32 nt, Human
ugcuugucagccugugugcguguggugcagga

SEQ ID NO: 254758 - RNA, 32 nt, Human
ugcuugucauccaagcuggaguacagugccau

SEQ ID NO: 254759 - RNA, 32 nt, Human
ugcuuguccaguuucaauuaaagcuggcuguu

SEQ ID NO: 254760 - RNA, 32 nt, Human
ugcuuguccuccccuggccuccagucuccccu

SEQ ID NO: 254761 - RNA, 32 nt, Human
ugcuugucucauccuccagagauucaccaaca

SEQ ID NO: 254762 - RNA, 32 nt, Human
ugcuugucugcagagucaugaccucuuuccgc

SEQ ID NO: 254763 - RNA, 32 nt, Human
ugcuugucugggugggagggagccugguccug

SEQ ID NO: 254764 - RNA, 32 nt, Human
ugcuugucuuguuuucuuguugacucuacucu

SEQ ID NO: 254765 - RNA, 32 nt, Human
ugcuugugaaaugcugagcuuugauggccaua

SEQ ID NO: 254766 - RNA, 32 nt, Human
ugcuugugagccuuuccucugggauucacaca

SEQ ID NO: 254767 - RNA, 32 nt, Human
ugcuugugauuccaguuuaucucugaaacuau

SEQ ID NO: 254768 - RNA, 32 nt, Human
ugcuugugccacuguacuccagccuggcccac

SEQ ID NO: 254769 - RNA, 32 nt, Human
ugcuugugcuucccacucuccccgacuucauu

SEQ ID NO: 254770 - RNA, 32 nt, Human
ugcuugugggggcaccugggaggucaaagguc

SEQ ID NO: 254771 - RNA, 32 nt, Human
ugcuuguguauccucagaccaaacugauucau

SEQ ID NO: 254772 - RNA, 32 nt, Human
ugcuugugugggcacgaggagcugguacucua

SEQ ID NO: 254773 - RNA, 32 nt, Human
ugcuugugugguuccugggacacuuaaccaau

SEQ ID NO: 254774 - RNA, 32 nt, Human
ugcuuguucucccauggauuccugucccaagc

SEQ ID NO: 254775 - RNA, 32 nt, Human
ugcuuguucuggaaggaugacaugggcccaga

SEQ ID NO: 254776 - RNA, 32 nt, Human
ugcuuguugaagucuugccagaacaaacugau

SEQ ID NO: 254777 - RNA, 32 nt, Human
ugcuuguugcccaggcuggagugcaguggugc

SEQ ID NO: 254778 - RNA, 32 nt, Human
ugcuuguuguguuugcuuggaggcgacaguug

SEQ ID NO: 254779 - RNA, 20 nt, Human
ugcuuguuguucuuggcaca

SEQ ID NO: 254780 - RNA, 32 nt, Human
ugcuuguuuagagaucagcagucuuggauggg

SEQ ID NO: 254781 - RNA, 32 nt, Human
ugcuuuaaagaaugcaugcccaaaacacuacu

SEQ ID NO: 254782 - RNA, 32 nt, Human
ugcuuuaaagaauguugguaaugccaugucau

SEQ ID NO: 254783 - RNA, 23 nt, Human
ugcuuuaaggaaaauguauuuca

SEQ ID NO: 254784 - RNA, 32 nt, Human
ugcuuuaaugaaauggaugugccuaaaagcuc

SEQ ID NO: 254785 - RNA, 32 nt, Human
ugcuuuaaugagugcaccugccuccaccagca

SEQ ID NO: 254786 - RNA, 32 nt, Human
ugcuuuacacucaugaguaaaagcacuccaga

SEQ ID NO: 254787 - RNA, 32 nt, Human
ugcuuuacagauguuggagcugccucaaggca

SEQ ID NO: 254788 - RNA, 32 nt, Human
ugcuuuacagccaucacacacaugcuaguuau

SEQ ID NO: 254789 - RNA, 32 nt, Human
ugcuuuacccacaacagacaaguaauugucua

SEQ ID NO: 254790 - RNA, 19 nt, Human
ugcuuuagaacugugaaua

SEQ ID NO: 254791 - RNA, 32 nt, Human
ugcuuuagaauagaauugguauuucugugauu

SEQ ID NO: 254792 - RNA, 16 nt, Human
ugcuuuagaaucugaa

SEQ ID NO: 254793 - RNA, 32 nt, Human
ugcuuuagaaugagaauuaugccugaaaucug

SEQ ID NO: 254794 - RNA, 17 nt, Human
ugcuuuagaguucugaa

SEQ ID NO: 254795 - RNA, 18 nt, Human
ugcuuuagaucuugaaua

SEQ ID NO: 254796 - RNA, 32 nt, Human
ugcuuuagccguuucucaccaugcaaugcaga

SEQ ID NO: 254797 - RNA, 19 nt, Human
ugcuuuagccucccgagua

SEQ ID NO: 254798 - RNA, 32 nt, Human
ugcuuuagccucucaaguagcugggauuacag

SEQ ID NO: 254799 - RNA, 32 nt, Human
ugcuuuaggaggccaaggcaggaggacugcuu

SEQ ID NO: 254800 - RNA, 32 nt, Human
ugcuuuagggucaucauuuucuaaagaaucag

SEQ ID NO: 254801 - RNA, 32 nt, Human
ugcuuuaggugcagggacaccacccacucagg

SEQ ID NO: 254802 - RNA, 16 nt, Human
ugcuuuagucccugaa

SEQ ID NO: 254803 - RNA, 32 nt, Human
ugcuuuagucguuccuccugcuaccaguagcg

SEQ ID NO: 254804 - RNA, 31 nt, Human
ugcuuuagugagaggacaauuucugauugau

SEQ ID NO: 254805 - RNA, 32 nt, Human
ugcuuuauauuugccaaaguccuaacugacua

SEQ ID NO: 254806 - RNA, 32 nt, Human
ugcuuuauccauuugugcaaagguaaacgcag

SEQ ID NO: 254807 - RNA, 32 nt, Human
ugcuuuaucugugggaugcugaaggagaugag

SEQ ID NO: 254808 - RNA, 32 nt, Human
ugcuuuaucuucagaaacuggaaagggucaaa

SEQ ID NO: 254809 - RNA, 32 nt, Human
ugcuuuauucauccuccaucucaaaaugaacu

SEQ ID NO: 254810 - RNA, 32 nt, Human
ugcuuucaauaugacggcugucaauguugccc

SEQ ID NO: 254811 - RNA, 32 nt, Human
ugcuuucaauaugcauuuuucugcugacuaau

SEQ ID NO: 254812 - RNA, 32 nt, Human
ugcuuucacagaauuauuccagaguuuauaug

SEQ ID NO: 254813 - RNA, 32 nt, Human
ugcuuucacagaauuauuccaggguuuaugug

SEQ ID NO: 254814 - RNA, 32 nt, Human
ugcuuucacuauaaugcugauaguaauaugga

SEQ ID NO: 254815 - RNA, 32 nt, Human
ugcuuucagaaaaccauuuucucugcaaagaa

SEQ ID NO: 254816 - RNA, 32 nt, Human
ugcuuucagaagugcccuuccugcugcgcagu

SEQ ID NO: 254817 - RNA, 32 nt, Human
ugcuuucagccccauuccccauccucuggggu

SEQ ID NO: 254818 - RNA, 32 nt, Human
ugcuuucagcuuugaggagacaagaguugcag

SEQ ID NO: 254819 - RNA, 32 nt, Human
ugcuuucaggagacauguaagcuuccugggug

SEQ ID NO: 254820 - RNA, 32 nt, Human
ugcuuucaguaggaagagcugaggcugccugg

SEQ ID NO: 254821 - RNA, 32 nt, Human
ugcuuucaucacagccugaaaauucacuggag

SEQ ID NO: 254822 - RNA, 21 nt, Human
ugcuuucauucuuucugaaua

SEQ ID NO: 254823 - RNA, 32 nt, Human
ugcuuuccaagacccuguucagucucuuucuc

SEQ ID NO: 254824 - RNA, 32 nt, Human
ugcuuuccaagugcaaaacuacagacacgcgc

SEQ ID NO: 254825 - RNA, 32 nt, Human
ugcuuuccacaccugcacugcugugcugugcc

SEQ ID NO: 254826 - RNA, 32 nt, Human
ugcuuuccagccugggcaacauaguaagaccc

SEQ ID NO: 254827 - RNA, 32 nt, Human
ugcuuucccagaggacaccuaaugucccgaug

SEQ ID NO: 254828 - RNA, 32 nt, Human
ugcuuuccccuuccuccucccucucucccuuu

SEQ ID NO: 254829 - RNA, 32 nt, Human
ugcuuucccuccccaaacccaucagacaggua

SEQ ID NO: 254830 - RNA, 28 nt, Human
ugcuuucccucuccugccucauuccuug

SEQ ID NO: 254831 - RNA, 32 nt, Human
ugcuuucccugagucccuuauucccgcucacu

SEQ ID NO: 254832 - RNA, 32 nt, Human
ugcuuuccuccacugccaucauuaaaccucag

SEQ ID NO: 254833 - RNA, 32 nt, Human
ugcuuuccugaaaggccagaaguucaaagaug

SEQ ID NO: 254834 - RNA, 32 nt, Human
ugcuuuccugucuguagugccugcuguuugga

SEQ ID NO: 254835 - RNA, 32 nt, Human
ugcuuuccuguucaugggguuuuugcccugga

SEQ ID NO: 254836 - RNA, 32 nt, Human
ugcuuuccuuguagcacugcugugaagauuca

SEQ ID NO: 254837 - RNA, 32 nt, Human
ugcuuucgccuguaaucccaacacuuugggag

SEQ ID NO: 254838 - RNA, 32 nt, Human
ugcuuucggaacgcccuugugauuggccgagc

SEQ ID NO: 254839 - RNA, 21 nt, Human
ugcuuucggaagugcuguggu

SEQ ID NO: 254840 - RNA, 32 nt, Human
ugcuuucgggcgcagcuccugcugcagccagg

SEQ ID NO: 254841 - RNA, 32 nt, Human
ugcuuucuaagugggaagaggaagggagaggc

SEQ ID NO: 254842 - RNA, 31 nt, Human
ugcuuucucagcuagaccagggugggcauca

SEQ ID NO: 254843 - RNA, 32 nt, Human
ugcuuucuccacccccacacucccugcucagc

SEQ ID NO: 254844 - RNA, 32 nt, Human
ugcuuucuccauuuucuuuuauguugucuuaa

SEQ ID NO: 254845 - RNA, 32 nt, Human
ugcuuucuccccucccuucuugacucucuguu

SEQ ID NO: 254846 - RNA, 32 nt, Human
ugcuuucuccucccuuuuccuccccacuccuu

SEQ ID NO: 254847 - RNA, 32 nt, Human
ugcuuucuccugggcccgcuuugccugcuuga

SEQ ID NO: 254848 - RNA, 32 nt, Human
ugcuuucucuggcuggaguguaggcuguaccc

SEQ ID NO: 254849 - RNA, 32 nt, Human
ugcuuucucuguuccugugaugcaugaauaac

SEQ ID NO: 254850 - RNA, 32 nt, Human
ugcuuucucuuccuuuuuagcauacaaaguuu

SEQ ID NO: 254851 - RNA, 32 nt, Human
ugcuuucucuuuccuagacucgcggugcucac

SEQ ID NO: 254852 - RNA, 32 nt, Human
ugcuuucucuuuccuuuuaggaauucucuucu

SEQ ID NO: 254853 - RNA, 32 nt, Human
ugcuuucugaaguggcugaaccagguuaugcu

SEQ ID NO: 254854 - RNA, 32 nt, Human
ugcuuucugaucuaugcccuccacaagaagac

SEQ ID NO: 254855 - RNA, 32 nt, Human
ugcuuucugccuccucuuccacacauccuggg

SEQ ID NO: 254856 - RNA, 32 nt, Human
ugcuuucugccuuuugaaaacuccugaaaacc

SEQ ID NO: 254857 - RNA, 32 nt, Human
ugcuuucugcugugcugugauccugcagucag

SEQ ID NO: 254858 - RNA, 25 nt, Human
ugcuuucugggaucuggcuacggca

SEQ ID NO: 254859 - RNA, 32 nt, Human
ugcuuucugucuuucucccucuccuuguauug

SEQ ID NO: 254860 - RNA, 32 nt, Human
ugcuuucuucucuauccaagagcaccaggcug

SEQ ID NO: 254861 - RNA, 32 nt, Human
ugcuuucuucuuuccuuuacuccuggcucaag

SEQ ID NO: 254862 - RNA, 32 nt, Human
ugcuuucuuucacaagcccuccaggaguugcu

SEQ ID NO: 254863 - RNA, 32 nt, Human
ugcuuucuuuccucaucuccccacuccccacu

SEQ ID NO: 254864 - RNA, 32 nt, Human
ugcuuucuuuccuggugaaaauuuugguuaca

SEQ ID NO: 254865 - RNA, 32 nt, Human
ugcuuucuuucggaucccgggcugcuuucgga

SEQ ID NO: 254866 - RNA, 32 nt, Human
ugcuuugaaagagaaccuagauucuauaguug

SEQ ID NO: 254867 - RNA, 32 nt, Human
ugcuuugaaaucugguugaaaugagaaaaagc

SEQ ID NO: 254868 - RNA, 32 nt, Human
ugcuuugaaaucuuagaagagagcccacuaau

SEQ ID NO: 254869 - RNA, 32 nt, Human
ugcuuugaagaaacauacuguccauuugucua

SEQ ID NO: 254870 - RNA, 19 nt, Human
ugcuuugaagaucucugaa

SEQ ID NO: 254871 - RNA, 32 nt, Human
ugcuuugaagccugaagccaugaaaaugcaga

SEQ ID NO: 254872 - RNA, 32 nt, Human
ugcuuugaggcccaagcacuaguagagaugcg

SEQ ID NO: 254873 - RNA, 32 nt, Human
ugcuuugauagcugcuaucaugaccccuuuuu

SEQ ID NO: 254874 - RNA, 32 nt, Human
ugcuuugaucggagcacccagcgcugcuugaa

SEQ ID NO: 254875 - RNA, 32 nt, Human
ugcuuugcaaaguggggccugagguagaagaa

SEQ ID NO: 254876 - RNA, 32 nt, Human
ugcuuugcacacaagcucugcgccaaucacag

SEQ ID NO: 254877 - RNA, 31 nt, Human
ugcuuugcacuuugguuugauauuaagaaac

SEQ ID NO: 254878 - RNA, 31 nt, Human
ugcuuugcacuuuuccguuucagcggaagac

SEQ ID NO: 254879 - RNA, 32 nt, Human
ugcuuugcauuugccucugccaucuaggaaag

SEQ ID NO: 254880 - RNA, 32 nt, Human
ugcuuugccaugacccuggucauccuccucgu

SEQ ID NO: 254881 - RNA, 32 nt, Human
ugcuuugccaugaggccacauucagcugcuau

SEQ ID NO: 254882 - RNA, 32 nt, Human
ugcuuugcccacugaaucaucaugcacugacc

SEQ ID NO: 254883 - RNA, 21 nt, Human
ugcuuugccccuuuucuuccu

SEQ ID NO: 254884 - RNA, 32 nt, Human
ugcuuugccgacuguccuuccaccucuaagug

SEQ ID NO: 254885 - RNA, 32 nt, Human
ugcuuugccuccagcugccucagucucuucau

SEQ ID NO: 254886 - RNA, 24 nt, Human
ugcuuugcgucuaaccuuuguggg

SEQ ID NO: 254887 - RNA, 32 nt, Human
ugcuuugcuccagcacagcagagaccagcagg

SEQ ID NO: 254888 - RNA, 32 nt, Human
ugcuuugcucucacaggaccucagcccgucgu

SEQ ID NO: 254889 - RNA, 32 nt, Human
ugcuuugcuguugccgagcacgaguaaagcuu

SEQ ID NO: 254890 - RNA, 32 nt, Human
ugcuuugcuucccuuauuuauaagggaaugcc

SEQ ID NO: 254891 - RNA, 17 nt, Human
ugcuuuggaaccugaau

SEQ ID NO: 254892 - RNA, 18 nt, Human
ugcuuuggcaucugaaua

SEQ ID NO: 254893 - RNA, 32 nt, Human
ugcuuuggcugcuggggagcucagaagggagc

SEQ ID NO: 254894 - RNA, 32 nt, Human
ugcuuugggaaacccuuccagggcucugguug

SEQ ID NO: 254895 - RNA, 32 nt, Human
ugcuuugggaccugggaaguggggaccugggc

SEQ ID NO: 254896 - RNA, 32 nt, Human
ugcuuugggagagaguagcaaggagagaagaa

SEQ ID NO: 254897 - RNA, 32 nt, Human
ugcuuugggaggauuucuugaggccaggaguu

SEQ ID NO: 254898 - RNA, 31 nt, Human
ugcuuugggaggccaagaugggaggaucauu

SEQ ID NO: 254899 - RNA, 32 nt, Human
ugcuuugggaggcugaggugggaggauugcuu

SEQ ID NO: 254900 - RNA, 32 nt, Human
ugcuuugggauuacgggugugagccgccgcgc

SEQ ID NO: 254901 - RNA, 32 nt, Human
ugcuuugggcaggacucgucacuguguccccc

SEQ ID NO: 254902 - RNA, 20 nt, Human
uggaguguaccguggggccu

SEQ ID NO: 254903 - RNA, 32 nt, Human
uggaguguacugugugguaacugugguagugc

SEQ ID NO: 254904 - RNA, 32 nt, Human
uggaguguaguggcaugaucucggcucacugc

SEQ ID NO: 254905 - RNA, 32 nt, Human
uggaguguaguggcaugaucucggcuuauugc

SEQ ID NO: 254906 - RNA, 32 nt, Human
uggaguguaguggcaugaucugggcucacugc

SEQ ID NO: 254907 - RNA, 32 nt, Human
uggaguguagugguaugaucauagcucaccac

SEQ ID NO: 254908 - RNA, 32 nt, Human
uggagugucggagaagagagcuugccgacgau

SEQ ID NO: 254909 - RNA, 32 nt, Human
uggagugugaagcccagggcaagaggaugcgg

SEQ ID NO: 254910 - RNA, 32 nt, Human
uggagugugacggaggcauggggccugugcuc

SEQ ID NO: 254911 - RNA, 32 nt, Human
uggagugugcgugcuucuucagagggacgggu

SEQ ID NO: 254912 - RNA, 32 nt, Human
uggagugugguggcaggaucauagcucacugu

SEQ ID NO: 254913 - RNA, 32 nt, Human
uggaguguguccuuggccuuggcuccacaggg

SEQ ID NO: 254914 - RNA, 32 nt, Human
uggaguguuaaccucagacucugggucccuuu

SEQ ID NO: 254915 - RNA, 32 nt, Human
uggaguguucucucagcuuaggucuggacagg

SEQ ID NO: 254916 - RNA, 32 nt, Human
uggaguguugguggaaaggaaacugaagguaa

SEQ ID NO: 254917 - RNA, 32 nt, Human
uggaguguuucauaagcagaaaagccaugaug

SEQ ID NO: 254918 - RNA, 19 nt, Human
uggaguguuuguggccuuc

SEQ ID NO: 254919 - RNA, 32 nt, Human
uggaguuaauguaugcuggagcugcucuaaag

SEQ ID NO: 254920 - RNA, 32 nt, Human
uggaguuacacaaaccuguguuaaaacaugua

SEQ ID NO: 254921 - RNA, 21 nt, Human
uggaguuacaggcaugagcca

SEQ ID NO: 254922 - RNA, 32 nt, Human
uggaguuagagcagaagaaaaugaaauuacau

SEQ ID NO: 254923 - RNA, 21 nt, Human
uggaguuagaucuggguuaug

SEQ ID NO: 254924 - RNA, 32 nt, Human
uggaguuaggggaauggccuacaacucugcau

SEQ ID NO: 254925 - RNA, 19 nt, Human
uggaguuagucuuaguaaa

SEQ ID NO: 254926 - RNA, 32 nt, Human
uggaguucaacagauguaaagacuucagugaa

SEQ ID NO: 254927 - RNA, 32 nt, Human
uggaguucaagaccagccuggccaacagggug

SEQ ID NO: 254928 - RNA, 32 nt, Human
uggaguucaagaccagccugugcaauuuagcu

SEQ ID NO: 254929 - RNA, 32 nt, Human
uggaguucaauaagcaggugugcauugcuaag

SEQ ID NO: 254930 - RNA, 32 nt, Human
uggaguucacaaugccucccuaccucuauucu

SEQ ID NO: 254931 - RNA, 32 nt, Human
uggaguucagccaguguacucagaaagggaac

SEQ ID NO: 254932 - RNA, 32 nt, Human
uggaguucauuugaacucuugaaccuuaguuu

SEQ ID NO: 254933 - RNA, 22 nt, Human
uggaguuccacuucuccccgca

SEQ ID NO: 254934 - RNA, 32 nt, Human
uggaguucgagaccagccuggccaacauagcg

SEQ ID NO: 254935 - RNA, 32 nt, Human
uggaguucggaagccauugcagcaaccuuccu

SEQ ID NO: 254936 - RNA, 20 nt, Human
uggaguucuagaaagcagca

SEQ ID NO: 254937 - RNA, 32 nt, Human
uggaguucuuacuugacuugaaugugcaccug

SEQ ID NO: 254938 - RNA, 22 nt, Human
uggaguugaagaggcucugaug

SEQ ID NO: 254939 - RNA, 32 nt, Human
uggaguugaagucuaauacaugauacaugugg

SEQ ID NO: 254940 - RNA, 32 nt, Human
uggaguugaauccuuucucugccacucuuuga

SEQ ID NO: 254941 - RNA, 32 nt, Human
uggaguugagccugaccuuggcacgaaggacu

SEQ ID NO: 254942 - RNA, 32 nt, Human
uggaguugaggugucagagaaaaugaauuuuu

SEQ ID NO: 254943 - RNA, 32 nt, Human
uggaguugauuucucuacuaaauaacagaaac

SEQ ID NO: 254944 - RNA, 32 nt, Human
uggaguugcccaggcccugugagcaaguggca

SEQ ID NO: 254945 - RNA, 32 nt, Human
uggaguugcuaccugucuucuccuggggccuu

SEQ ID NO: 254946 - RNA, 24 nt, Human
uggaguugcugaaauccuggcaaa

SEQ ID NO: 254947 - RNA, 32 nt, Human
uggaguugggauguggaaguggggcuggaaca

SEQ ID NO: 254948 - RNA, 32 nt, Human
uggaguuggggagaggucuggaagaggaccau

SEQ ID NO: 254949 - RNA, 32 nt, Human
uggaguuguguuuuauuuuccaaagggcucag

SEQ ID NO: 254950 - RNA, 32 nt, Human
uggaguuuacaugggccucugauggaagaaag

SEQ ID NO: 254951 - RNA, 32 nt, Human
uggaguuucacucuugucaccgaggcuggagu

SEQ ID NO: 254952 - RNA, 32 nt, Human
uggaguuucauuauacuuuucucuccacguuu

SEQ ID NO: 254953 - RNA, 20 nt, Human
uggaguuucauuccauccca

SEQ ID NO: 254954 - RNA, 18 nt, Human
uggaguuuccaacccagu

SEQ ID NO: 254955 - RNA, 21 nt, Human
uggaguuuccuugccccucug

SEQ ID NO: 254956 - RNA, 32 nt, Human
uggaguuugagaccagccuggccaacauggag

SEQ ID NO: 254957 - RNA, 32 nt, Human
uggaguuugagaccagccuggccaacauggug

SEQ ID NO: 254958 - RNA, 32 nt, Human
uggaguuugagaccagccugggcaacagagug

SEQ ID NO: 254959 - RNA, 32 nt, Human
uggaguuugaggaggaagaggaagaggaggaa

SEQ ID NO: 254960 - RNA, 32 nt, Human
uggaguuugcggucaacucagcagugcccaug

SEQ ID NO: 254961 - RNA, 32 nt, Human
uggaguuugggaccccagggagggagggugug

SEQ ID NO: 254962 - RNA, 32 nt, Human
uggaguuuucuauuuuaaagaggaaucugaaa

SEQ ID NO: 254963 - RNA, 23 nt, Human
uggaguuuucuugaaguacaacu

SEQ ID NO: 254964 - RNA, 32 nt, Human
uggaguuuugaagccuuuauuaauacuacuuu

SEQ ID NO: 254965 - RNA, 32 nt, Human
uggaguuuugcucuugcacuccauccuggaca

SEQ ID NO: 254966 - RNA, 32 nt, Human
uggaguuuuuaaaagaagcaaggaguuaaaug

SEQ ID NO: 254967 - RNA, 32 nt, Human
uggaguuuuucuuuagaaacagugccaagaau

SEQ ID NO: 254968 - RNA, 32 nt, Human
uggauaaaacagccacaguccuugcccuuugg

SEQ ID NO: 254969 - RNA, 32 nt, Human
uggauaaaaugcuggggagcaggacauugaca

SEQ ID NO: 254970 - RNA, 32 nt, Human
uggauaaacacagcaugguccaaccagacagu

SEQ ID NO: 254971 - RNA, 30 nt, Human
uggauaaagaccuuccagcuccuguguucu

SEQ ID NO: 254972 - RNA, 32 nt, Human
uggauaaauacugaaugaggccgggugcaaug

SEQ ID NO: 254973 - RNA, 32 nt, Human
uggauaaauauaaaccagaaacucagcaugaa

SEQ ID NO: 254974 - RNA, 32 nt, Human
uggauaaaugaggcugauguuuggagggagag

SEQ ID NO: 254975 - RNA, 21 nt, Human
uggauaaauuauauugcuaug

SEQ ID NO: 254976 - RNA, 32 nt, Human
uggauaacaacugcacuccagccuggaugaca

SEQ ID NO: 254977 - RNA, 32 nt, Human
uggauaacacagugaaaccccgucucuacuaa

SEQ ID NO: 254978 - RNA, 32 nt, Human
uggauaacacggagaaaccccgucucuacuaa

SEQ ID NO: 254979 - RNA, 32 nt, Human
uggauaacgacugcacuccagccuggaugaca

SEQ ID NO: 254980 - RNA, 32 nt, Human
uggauaacuauauuuucuggauucuggagguu

SEQ ID NO: 254981 - RNA, 32 nt, Human
uggauaagaaacuaagggccacagaccaaaug

SEQ ID NO: 254982 - RNA, 32 nt, Human
uggauaagacaagagggguauuuuggagucca

SEQ ID NO: 254983 - RNA, 32 nt, Human
uggauaagagacuugacagaaagcuuucaaag

SEQ ID NO: 254984 - RNA, 19 nt, Human
uggauaagaucccaggaag

SEQ ID NO: 254985 - RNA, 31 nt, Human
uggauaagugagagagagucagguugcaugu

SEQ ID NO: 254986 - RNA, 32 nt, Human
uggauaauacuagggagaaaaacaaaugugug

SEQ ID NO: 254987 - RNA, 32 nt, Human
uggauaauauuccucuuggccuugugagaaac

SEQ ID NO: 254988 - RNA, 32 nt, Human
uggauaaucagugaaacuacuuaacacagcua

SEQ ID NO: 254989 - RNA, 32 nt, Human
uggauaaugcuggccauucugccuuucugaca

SEQ ID NO: 254990 - RNA, 32 nt, Human
uggauaaugcuggccauuuugccuuucugaca

SEQ ID NO: 254991 - RNA, 32 nt, Human
uggauacaauaacaggaccuuaccucacagga

SEQ ID NO: 254992 - RNA, 32 nt, Human
uggauacccacugucaccugcacuaugaagug

SEQ ID NO: 254993 - RNA, 32 nt, Human
uggauacccucuauuggucaggcauuguguua

SEQ ID NO: 254994 - RNA, 32 nt, Human
uggauaccuacuuagugcucauggaagaaggg

SEQ ID NO: 254995 - RNA, 32 nt, Human
uggauaccugcauuuaacuuguggacuaugua

SEQ ID NO: 254996 - RNA, 32 nt, Human
uggauaccuggcuucucuuuccuuagagaugc

SEQ ID NO: 254997 - RNA, 32 nt, Human
uggauacgugcaaggucgcugaggcagugcug

SEQ ID NO: 254998 - RNA, 32 nt, Human
uggauacuaaaauguuacggaaguagcucuuu

SEQ ID NO: 254999 - RNA, 32 nt, Human
uggauacucagcccugugagugcaauaaaugc

SEQ ID NO: 255000 - RNA, 23 nt, Human
uggauacucuuggcccaccgcag

SEQ ID NO: 255001 - RNA, 32 nt, Human
uggauacuuuauuuucuuuuauguuucuauau

SEQ ID NO: 255002 - RNA, 32 nt, Human
uggauagaaaugucaccuauaugggauuugcc

SEQ ID NO: 255003 - RNA, 32 nt, Human
uggauagaacugggacaaacacagacccaucu

SEQ ID NO: 255004 - RNA, 32 nt, Human
uggauagacuaggcaauucaucagcucaccug

SEQ ID NO: 255005 - RNA, 32 nt, Human
uggauagagaaacgguuucaguucaucugguu

SEQ ID NO: 255006 - RNA, 32 nt, Human
uggauagagacaggauuucaucguguugccca

SEQ ID NO: 255007 - RNA, 32 nt, Human
uggauagaugaggagacacagugcagacuggg

SEQ ID NO: 255008 - RNA, 32 nt, Human
uggauagaugugagacauggagccuaaggaga

SEQ ID NO: 255009 - RNA, 32 nt, Human
uggauagcagaguaauguuugaccucuggaaa

SEQ ID NO: 255010 - RNA, 32 nt, Human
uggauagccuaucaguuuauggaaggauauaa

SEQ ID NO: 255011 - RNA, 32 nt, Human
uggauagcgcauauaucagaagauucaccggc

SEQ ID NO: 255012 - RNA, 32 nt, Human
uggauagcucauaguuggcucuuucuggguga

SEQ ID NO: 255013 - RNA, 32 nt, Human
uggauaggggaugagguugcugugaaagcagc

SEQ ID NO: 255014 - RNA, 19 nt, Human
uggauaguauauuucuaug

SEQ ID NO: 255015 - RNA, 32 nt, Human
uggauagucauuuugaaaccaccuuugcaaaa

SEQ ID NO: 255016 - RNA, 18 nt, Human
uggauaguccaagcuuug

SEQ ID NO: 255017 - RNA, 32 nt, Human
uggauaguguggaguguggggaagaaaagaua

SEQ ID NO: 255018 - RNA, 17 nt, Human
uggauaguugccaguua

SEQ ID NO: 255019 - RNA, 20 nt, Human
uggauaguugcguauuccug

SEQ ID NO: 255020 - RNA, 19 nt, Human
uggauaguuucuauugcua

SEQ ID NO: 255021 - RNA, 32 nt, Human
uggauauagaugcacacauaucuguacauaua

SEQ ID NO: 255022 - RNA, 32 nt, Human
uggauauagcaacuucuuuucucuucaaauga

SEQ ID NO: 255023 - RNA, 32 nt, Human
uggauauaggucagugaggcccagggagaggc

SEQ ID NO: 255024 - RNA, 32 nt, Human
uggauaucaccaccucauguuuccagaguccc

SEQ ID NO: 255025 - RNA, 32 nt, Human
uggauaucuagcuuccuuuaccccuguucugc

SEQ ID NO: 255026 - RNA, 32 nt, Human
uggauaucucuccugcagcccagcaccgagau

SEQ ID NO: 255027 - RNA, 32 nt, Human
uggauaugaagugccuagaaccaccacaaccu

SEQ ID NO: 255028 - RNA, 32 nt, Human
uggauauggugcagagaagcuggacuucugug

SEQ ID NO: 255029 - RNA, 32 nt, Human
uggauaugugccaggcccucuccugccacaca

SEQ ID NO: 255030 - RNA, 32 nt, Human
uggauaugugguuccugaugcauuuggacuug

SEQ ID NO: 255031 - RNA, 32 nt, Human
uggauauguguguauacacauauacacaucuc

SEQ ID NO: 255032 - RNA, 32 nt, Human
uggauauuacucugccucauaaugaagccaac

SEQ ID NO: 255033 - RNA, 32 nt, Human
uggauauuaucccggcuuggagauuuugccag

SEQ ID NO: 255034 - RNA, 32 nt, Human
uggauauuccuuaaaauggaauaagauuaagc

SEQ ID NO: 255035 - RNA, 32 nt, Human
uggauauugcagaaucaugccuggcacacggc

SEQ ID NO: 255036 - RNA, 32 nt, Human
uggauauugggcaaggcaggaaaccucuggag

SEQ ID NO: 255037 - RNA, 32 nt, Human
uggauauuuacagcuucuuuuguuuuuaauug

SEQ ID NO: 255038 - RNA, 32 nt, Human
uggauauuucaaggauuuauaucuauucaucc

SEQ ID NO: 255039 - RNA, 32 nt, Human
uggaucaaauccagccugcugccugcuuuuua

SEQ ID NO: 255040 - RNA, 22 nt, Human
uggaucaagcaaugguggugaa

SEQ ID NO: 255041 - RNA, 32 nt, Human
uggaucacaaggucaagagauagagaccaucu

SEQ ID NO: 255042 - RNA, 32 nt, Human
uggaucacaaggucaagaguucgagaccagcc

SEQ ID NO: 255043 - RNA, 32 nt, Human
uggaucacaccuguaaucccagcacuuuggga

SEQ ID NO: 255044 - RNA, 32 nt, Human
uggaucacagcacacacauacauacacccucc

SEQ ID NO: 255045 - RNA, 32 nt, Human
uggaucacagccucucuugggccguacugugu

SEQ ID NO: 255046 - RNA, 32 nt, Human
uggaucacagccucucuugggcuguacugugu

SEQ ID NO: 255047 - RNA, 32 nt, Human
uggaucaccacaaccuccgucucccagguuca

SEQ ID NO: 255048 - RNA, 23 nt, Human
uggaucacccaggucccagcaga

SEQ ID NO: 255049 - RNA, 32 nt, Human
uggaucacccccaggaggggaaaaugguggca

SEQ ID NO: 255050 - RNA, 32 nt, Human
uggaucaccgaccucucccaagaggggccugg

SEQ ID NO: 255051 - RNA, 32 nt, Human
uggaucaccugaguucgagaccagccuaacca

SEQ ID NO: 255052 - RNA, 32 nt, Human
uggaucaccuugaauuuccuuuuggacguuau

SEQ ID NO: 255053 - RNA, 21 nt, Human
uggaucacgccuguaauccca

SEQ ID NO: 255054 - RNA, 32 nt, Human
uggaucacgccuguaaucccagcgcuuuggga

SEQ ID NO: 255055 - RNA, 23 nt, Human
uggaucacgggauaccacuuccu

SEQ ID NO: 255056 - RNA, 32 nt, Human
uggaucacuacaaccuccaccucccggguuca

SEQ ID NO: 255057 - RNA, 32 nt, Human
uggaucacuuccaaguggacagccuggaugaa

SEQ ID NO: 255058 - RNA, 32 nt, Human
uggaucacuuuucuuucaucacuugaguauuc

SEQ ID NO: 255059 - RNA, 32 nt, Human
uggaucagaggacuuggacuagauagaagcau

SEQ ID NO: 255060 - RNA, 32 nt, Human
uggaucagccaagcgaaacuuggagcuuugac

SEQ ID NO: 255061 - RNA, 32 nt, Human
uggaucagcuggaacagaugaaggagaaaaug

SEQ ID NO: 255062 - RNA, 32 nt, Human
uggaucaggcaggccagaggggcaguucaugg

SEQ ID NO: 255063 - RNA, 32 nt, Human
uggaucagggccuuccugccucccgcugggca

SEQ ID NO: 255064 - RNA, 32 nt, Human
uggaucagguacugugucugcucauaaguacu

SEQ ID NO: 255065 - RNA, 32 nt, Human
uggaucaguaaaauuauacugugugugagugu

SEQ ID NO: 255066 - RNA, 24 nt, Human
uggaucagugaagauccuaggaaa

SEQ ID NO: 255067 - RNA, 32 nt, Human
uggaucaguucacagcauuaacuacaagugaa

SEQ ID NO: 255068 - RNA, 32 nt, Human
uggaucaucuaaggccgggaguucaagaccag

SEQ ID NO: 255069 - RNA, 17 nt, Human
uggaucaugagggugaa

SEQ ID NO: 255070 - RNA, 32 nt, Human
uggaucaugccacugcacuccaaccugggcag

SEQ ID NO: 255071 - RNA, 32 nt, Human
uggaucaugccuguaaucccagcacuuuggga

SEQ ID NO: 255072 - RNA, 32 nt, Human
uggaucaugccuguaaucccaguacuuuggga

SEQ ID NO: 255073 - RNA, 19 nt, Human
uggaucauggcauguagaa

SEQ ID NO: 255074 - RNA, 32 nt, Human
uggaucaugggggaguuuucucaugauuuaac

SEQ ID NO: 255075 - RNA, 18 nt, Human
uggaucauguggagugaa

SEQ ID NO: 255076 - RNA, 19 nt, Human
uggaucauuugugguugaa

SEQ ID NO: 255077 - RNA, 32 nt, Human
uggauccaaagucauguguccacacauucaua

SEQ ID NO: 255078 - RNA, 32 nt, Human
uggauccaacagagaagacaggugaguugcug

SEQ ID NO: 255079 - RNA, 32 nt, Human
uggauccagccacucuggcacagcguucuugc

SEQ ID NO: 255080 - RNA, 32 nt, Human
uggauccagcucugggagcccugccgaggugu

SEQ ID NO: 255081 - RNA, 32 nt, Human
uggauccagcugguuuuuguuuugcugaggcu

SEQ ID NO: 255082 - RNA, 32 nt, Human
uggauccaggugaagggggcagaggacuggga

SEQ ID NO: 255083 - RNA, 24 nt, Human
uggaucccacccaaauccaacuca

SEQ ID NO: 255084 - RNA, 32 nt, Human
uggauccccugcccaccugguccgacgcuuug

SEQ ID NO: 255085 - RNA, 32 nt, Human
uggaucccugcuccccacacggaggacccaac

SEQ ID NO: 255086 - RNA, 32 nt, Human
uggaucccuuucuccuguuucugcaagugucc

SEQ ID NO: 255087 - RNA, 32 nt, Human
uggauccguuugaccaauuugcaccaguuuua

SEQ ID NO: 255088 - RNA, 32 nt, Human
uggauccuagccuuauccucugaucuccaugg

SEQ ID NO: 255089 - RNA, 21 nt, Human
uggauccuccccuuccuggca

SEQ ID NO: 255090 - RNA, 32 nt, Human
uggauccucuaucacgaagauauugagauaag

SEQ ID NO: 255091 - RNA, 32 nt, Human
uggauccucugccugcccccucccccgugacg

SEQ ID NO: 255092 - RNA, 32 nt, Human
uggauccugaaacugcaucuuggcccuguugc

SEQ ID NO: 255093 - RNA, 32 nt, Human
uggauccugagcuagcccauguaaauccgggu

SEQ ID NO: 255094 - RNA, 21 nt, Human
uggauccugcauaguggugag

SEQ ID NO: 255095 - RNA, 32 nt, Human
uggauccugccagcccugccagcuuucccaga

SEQ ID NO: 255096 - RNA, 32 nt, Human
uggauccuggcaacugcagcugcuggauucca

SEQ ID NO: 255097 - RNA, 32 nt, Human
uggauccugggcuggguggccccugucucggg

SEQ ID NO: 255098 - RNA, 32 nt, Human
uggauccuuacugcucuuccucgguggcagga

SEQ ID NO: 255099 - RNA, 32 nt, Human
uggauccuucaaauaggcccugagaugugagg

SEQ ID NO: 255100 - RNA, 32 nt, Human
uggauccuuucacgacagugacccugggcugg

SEQ ID NO: 255101 - RNA, 32 nt, Human
uggaucgccgcggccccuccucccagagcggc

SEQ ID NO: 255102 - RNA, 22 nt, Human
uggaucgcgagcucccagcaga

SEQ ID NO: 255103 - RNA, 32 nt, Human
uggaucggccacugcacuccgggcugggcgac

SEQ ID NO: 255104 - RNA, 24 nt, Human
uggaucguggccucugagcuccac

SEQ ID NO: 255105 - RNA, 32 nt, Human
uggaucuccaggguacccuccaccccagcugc

SEQ ID NO: 255106 - RNA, 32 nt, Human
uggaucucccucagauccccucuucucagaca

SEQ ID NO: 255107 - RNA, 32 nt, Human
uggaucucggagcauucuggauuuugaauuuu

SEQ ID NO: 255108 - RNA, 32 nt, Human
uggaucucuccugcuguaaccccacgcacaag

SEQ ID NO: 255109 - RNA, 32 nt, Human
uggaucucuccugggucucccugcugcgccug

SEQ ID NO: 255110 - RNA, 32 nt, Human
uggaucugcagagccuuccugcccuggccacg

SEQ ID NO: 255111 - RNA, 32 nt, Human
uggaucugcccaggcggcggcggcggcggcgg

SEQ ID NO: 255112 - RNA, 32 nt, Human
uggaucuggagucugcauucacgcacgcuggu

SEQ ID NO: 255113 - RNA, 32 nt, Human
uggaucugggagaaggaaaaugcuucuuucuu

SEQ ID NO: 255114 - RNA, 32 nt, Human
uggaucugggcaaaugaaaauguuucaggaag

SEQ ID NO: 255115 - RNA, 19 nt, Human
uggaucugggcccagcaaa

SEQ ID NO: 255116 - RNA, 32 nt, Human
uggaucugggggugucagacaggcuacccugu

SEQ ID NO: 255117 - RNA, 32 nt, Human
uggaucuggggugggaguaacagggcagaaau

SEQ ID NO: 255118 - RNA, 32 nt, Human
uggaucuguguguauguacauaguagacaugu

SEQ ID NO: 255119 - RNA, 32 nt, Human
uggaucuucaacuuugccauucaugcuucuau

SEQ ID NO: 255120 - RNA, 32 nt, Human
uggaucuugcucacacucuuucaagagaagcu

SEQ ID NO: 255121 - RNA, 32 nt, Human
uggaucuugggcugggacuggaugugccaaug

SEQ ID NO: 255122 - RNA, 32 nt, Human
uggaucuugguucugcucuucuugccucugga

SEQ ID NO: 255123 - RNA, 32 nt, Human
uggaucuuguguccagggacauggggugacau

SEQ ID NO: 255124 - RNA, 32 nt, Human
uggaugaaaaggagggagagaagguggaaaug

SEQ ID NO: 255125 - RNA, 21 nt, Human
uggaugaaaaguuuuagcaaa

SEQ ID NO: 255126 - RNA, 32 nt, Human
uggaugaagagcugucaccucugccuugcccu

SEQ ID NO: 255127 - RNA, 32 nt, Human
uggaugaaggugaaugacuaaagcuuugcuac

SEQ ID NO: 255128 - RNA, 32 nt, Human
uggaugacaaaucucugcuuuauuucuugucu

SEQ ID NO: 255129 - RNA, 32 nt, Human
uggaugacacccgccucacuguggcaguguau

SEQ ID NO: 255130 - RNA, 32 nt, Human
uggaugacagaaacugaauacauugcucccuu

SEQ ID NO: 255131 - RNA, 32 nt, Human
uggaugacagggcagagcaggaaggacaggaa

SEQ ID NO: 255132 - RNA, 22 nt, Human
uggaugaccaacacugcacuca

SEQ ID NO: 255133 - RNA, 32 nt, Human
uggaugaccgggagagccggagcccaggaagc

SEQ ID NO: 255134 - RNA, 32 nt, Human
uggaugaccuugccaccucccucuccuccuuu

SEQ ID NO: 255135 - RNA, 32 nt, Human
uggaugacuauggagccagaacaggcaaaucc

SEQ ID NO: 255136 - RNA, 32 nt, Human
uggaugacuuggagauuuaucucuguuuccuu

SEQ ID NO: 255137 - RNA, 18 nt, Human
uggaugagaaccugcucc

SEQ ID NO: 255138 - RNA, 32 nt, Human
uggaugagaaccugcuccguucugcuaccuug

SEQ ID NO: 255139 - RNA, 32 nt, Human
uggaugagaagaggagaaaaauaaaacaagga

SEQ ID NO: 255140 - RNA, 22 nt, Human
uggaugagaagugcaaugggca

SEQ ID NO: 255141 - RNA, 32 nt, Human
uggaugagacuuccaaaccugacagaugucag

SEQ ID NO: 255142 - RNA, 32 nt, Human
uggaugagagaugagagcagaccggcuucucc

SEQ ID NO: 255143 - RNA, 32 nt, Human
uggaugagagccucuuuggagauaucaagucc

SEQ ID NO: 255144 - RNA, 32 nt, Human
uggaugagccaggggacacagaagagaagccc

SEQ ID NO: 255145 - RNA, 32 nt, Human
uggaugaggagaaaggaugggccauccaggca

SEQ ID NO: 255146 - RNA, 32 nt, Human
uggaugaggagcuggaggggacacuggcccag

SEQ ID NO: 255147 - RNA, 17 nt, Human
uggaugagggggccaga

SEQ ID NO: 255148 - RNA, 32 nt, Human
uggaugagugcuggacgaagaauggccugggc

SEQ ID NO: 255149 - RNA, 32 nt, Human
uggaugagugucaaagugaauuugauuuguac

SEQ ID NO: 255150 - RNA, 32 nt, Human
uggaugaguguggcauuccgugaagaggaagg

SEQ ID NO: 255151 - RNA, 32 nt, Human
uggaugauacacaagcuucauucccaucuaua

SEQ ID NO: 255152 - RNA, 28 nt, Human
uggaugaucugcaaaagaggaaaacaac

SEQ ID NO: 255153 - RNA, 32 nt, Human
uggaugaugaggaggaggaugaggaugaggag

SEQ ID NO: 255154 - RNA, 32 nt, Human
uggaugaugcuggccauuuugccuuucugaca

SEQ ID NO: 255155 - RNA, 20 nt, Human
uggaugauggauuccacaaa

SEQ ID NO: 255156 - RNA, 23 nt, Human
uggaugaugucugauugguucca

SEQ ID NO: 255157 - RNA, 32 nt, Human
uggaugcaaaauccaaagcaccucuggguuua

SEQ ID NO: 255158 - RNA, 32 nt, Human
uggaugcaaagccaccacaaugccuacaggaa

SEQ ID NO: 255159 - RNA, 32 nt, Human
uggaugcaaucucucagggaagugaaucacaa

SEQ ID NO: 255160 - RNA, 32 nt, Human
uggaugcagagacagagccauugaaaguguuu

SEQ ID NO: 255161 - RNA, 32 nt, Human
uggaugcagagggacuccucccuaucugauuc

SEQ ID NO: 255162 - RNA, 32 nt, Human
uggaugcagagguggagguugaggccgugacu

SEQ ID NO: 255163 - RNA, 32 nt, Human
uggaugcagcagccugaaacuugagagcgaaa

SEQ ID NO: 255164 - RNA, 32 nt, Human
uggaugcaggaagcugggaaagacugauguug

SEQ ID NO: 255165 - RNA, 32 nt, Human
uggaugcaggaggacgaggagugaggggucca

SEQ ID NO: 255166 - RNA, 24 nt, Human
uggaugcaguggcucacaccugua

SEQ ID NO: 255167 - RNA, 24 nt, Human
uggaugcaguggcucaugccugua

SEQ ID NO: 255168 - RNA, 24 nt, Human
uggaugcaguggcucaugcuugua

SEQ ID NO: 255169 - RNA, 19 nt, Human
uggaugcagugguggugag

SEQ ID NO: 255170 - RNA, 28 nt, Human
uggaugcaucggaaagagccuggggcaa

SEQ ID NO: 255171 - RNA, 32 nt, Human
uggaugcauguucugauugccucuuuggagaa

SEQ ID NO: 255172 - RNA, 22 nt, Human
uggaugccaacucuggcgaaug

SEQ ID NO: 255173 - RNA, 22 nt, Human
uggaugccagcccaggaugagu

SEQ ID NO: 255174 - RNA, 32 nt, Human
uggaugccagugccaaauuuaaagagcuugaa

SEQ ID NO: 255175 - RNA, 22 nt, Human
uggaugccaugggcuaugggag

SEQ ID NO: 255176 - RNA, 32 nt, Human
uggaugcccaagugauuuucucuaauaaucgg

SEQ ID NO: 255177 - RNA, 21 nt, Human
uggaugcccagcgcugggaag

SEQ ID NO: 255178 - RNA, 32 nt, Human
uggaugcccaggacaggacuguucuacauuug

SEQ ID NO: 255179 - RNA, 28 nt, Human
uggaugcccuggaggaacaaggaggccu

SEQ ID NO: 255180 - RNA, 18 nt, Human
uggaugccuauaauccca

SEQ ID NO: 255181 - RNA, 32 nt, Human
uggaugccugccugcccugcccugugcugugg

SEQ ID NO: 255182 - RNA, 32 nt, Human
uggaugccugggaacuuuuuguacccauugua

SEQ ID NO: 255183 - RNA, 18 nt, Human
uggaugccuguaauccua

SEQ ID NO: 255184 - RNA, 32 nt, Human
uggaugccuguaauccuagcuccucgggaggc

SEQ ID NO: 255185 - RNA, 32 nt, Human
uggaugcgggcuggccguggcccagugaagcc

SEQ ID NO: 255186 - RNA, 24 nt, Human
uggaugcgguggcucacaauugua

SEQ ID NO: 255187 - RNA, 24 nt, Human
uggaugcgguggcucacgccugua

SEQ ID NO: 255188 - RNA, 32 nt, Human
uggaugcguccccagaucgcaggauuuccaag

SEQ ID NO: 255189 - RNA, 32 nt, Human
uggaugcucauggccagcugggggcucugugg

SEQ ID NO: 255190 - RNA, 32 nt, Human
uggaugcuccuccuguuuaccccacauccacu

SEQ ID NO: 255191 - RNA, 24 nt, Human
uggaugcugcaauucccaaugcag

SEQ ID NO: 255192 - RNA, 32 nt, Human
uggaugcugcauaauccaccuggguacuucag

SEQ ID NO: 255193 - RNA, 23 nt, Human
uggaugcugccauguugggaagu

SEQ ID NO: 255194 - RNA, 32 nt, Human
uggaugcugcguuuuaaggaagugagugagaa

SEQ ID NO: 255195 - RNA, 32 nt, Human
uggaugcuggcgggugacuugcagugggcgcc

SEQ ID NO: 255196 - RNA, 32 nt, Human
uggaugcugggaaguccaagaucaaggcucug

SEQ ID NO: 255197 - RNA, 32 nt, Human
uggaugcugggcuucauaccugggugaugaga

SEQ ID NO: 255198 - RNA, 21 nt, Human
uggaugcuggggugcugagug

SEQ ID NO: 255199 - RNA, 28 nt, Human
uggaugcuggguggcgccucaucugcau

SEQ ID NO: 255200 - RNA, 19 nt, Human
uggaugcugugccggggag

SEQ ID NO: 255201 - RNA, 32 nt, Human
uggaugcuguucugugaucuaaaacaacucuu

SEQ ID NO: 255202 - RNA, 32 nt, Human
uggaugcuuaaagcugcagcaaaaagaccaga

SEQ ID NO: 255203 - RNA, 32 nt, Human
uggaugcuuccagcucaugagaugucucagca

SEQ ID NO: 255204 - RNA, 32 nt, Human
uggaugcuuccugcccuugaacaucagacucc

SEQ ID NO: 255205 - RNA, 32 nt, Human
uggaugcuuucaccagcagacccggccaugug

SEQ ID NO: 255206 - RNA, 32 nt, Human
uggauggaacaggaaaccaaucaccuggcacc

SEQ ID NO: 255207 - RNA, 32 nt, Human
uggauggaaggugcccgcacaccagcugagaa

SEQ ID NO: 255208 - RNA, 32 nt, Human
uggauggacacauugcuguggguagucccucc

SEQ ID NO: 255209 - RNA, 32 nt, Human
uggauggagagcagcagcaggggaagaggugc

SEQ ID NO: 255210 - RNA, 32 nt, Human
uggauggagaggggaggggagggugcaggcau

SEQ ID NO: 255211 - RNA, 28 nt, Human
uggauggagcagcaggagccagugaguc

SEQ ID NO: 255212 - RNA, 32 nt, Human
uggauggagcccaggcgggagcgguggcccug

SEQ ID NO: 255213 - RNA, 32 nt, Human
uggauggagguggggagugugguguguaaagu

SEQ ID NO: 255214 - RNA, 32 nt, Human
uggauggauacuccaugagaaaagccgugggu

SEQ ID NO: 255215 - RNA, 32 nt, Human
uggauggaugaaaaggagagggaaggaaggaa

SEQ ID NO: 255216 - RNA, 32 nt, Human
uggauggauggagggauggaaggagggaggga

SEQ ID NO: 255217 - RNA, 32 nt, Human
uggauggcaaaguggugucugagaccagugau

SEQ ID NO: 255218 - RNA, 32 nt, Human
uggauggcacaccacaguuuguuugcauuuca

SEQ ID NO: 255219 - RNA, 23 nt, Human
uggauggcagugcccaaaacagg

SEQ ID NO: 255220 - RNA, 32 nt, Human
uggauggcgugcugggaauagaaagcagcucu

SEQ ID NO: 255221 - RNA, 32 nt, Human
uggauggcucaagucugcacagagcaaguccu

SEQ ID NO: 255222 - RNA, 32 nt, Human
uggauggcuccuccucuuccuucugcuccaag

SEQ ID NO: 255223 - RNA, 32 nt, Human
uggauggcuggccugugguggaugggugcucu

SEQ ID NO: 255224 - RNA, 32 nt, Human
uggauggcuucaaaggaauauaccacuagagc

SEQ ID NO: 255225 - RNA, 32 nt, Human
uggaugggaaacuagggauggcaggagagucu

SEQ ID NO: 255226 - RNA, 19 nt, Human
uggaugggaaacugcucca

SEQ ID NO: 255227 - RNA, 32 nt, Human
uggaugggaaugaggaaggagugaggggaaga

SEQ ID NO: 255228 - RNA, 22 nt, Human
uggaugggacacguggggagug

SEQ ID NO: 255229 - RNA, 32 nt, Human
uggaugggacucuuaugucauaacuucuguua

SEQ ID NO: 255230 - RNA, 32 nt, Human
uggaugggccauuccgaucugccuuaugaaau

SEQ ID NO: 255231 - RNA, 32 nt, Human
uggaugggccugugacaccccaaagagaagaa

SEQ ID NO: 255232 - RNA, 18 nt, Human
uggaugggcugcacccag

SEQ ID NO: 255233 - RNA, 32 nt, Human
uggauggggaggaggcaccauuugcuggaacu

SEQ ID NO: 255234 - RNA, 32 nt, Human
uggauggggauccagauggagguggagcugca

SEQ ID NO: 255235 - RNA, 32 nt, Human
uggauggggauccagauggagguggaggguug

SEQ ID NO: 255236 - RNA, 32 nt, Human
uggauggggcuuccagcucagaacccaucccu

SEQ ID NO: 255237 - RNA, 32 nt, Human
uggauggggguguccggcugagccccgggauc

SEQ ID NO: 255238 - RNA, 32 nt, Human
uggauggggguuggcaggaagcuguuaaagau

SEQ ID NO: 255239 - RNA, 32 nt, Human
uggauggguauaaggugggcuugguccaacag

SEQ ID NO: 255240 - RNA, 32 nt, Human
uggaugggugaggcaagccaggagagcaagca

SEQ ID NO: 255241 - RNA, 32 nt, Human
uggauggguuacagucguguggauggcuuacc

SEQ ID NO: 255242 - RNA, 32 nt, Human
uggauggucaucucggaguuccaguaccgccc

SEQ ID NO: 255243 - RNA, 19 nt, Human
uggaugguccacugcuuug

SEQ ID NO: 255244 - RNA, 32 nt, Human
uggaugguccuguuagaaaggcagcaugccag

SEQ ID NO: 255245 - RNA, 32 nt, Human
uggauggucucgauuuucugaucuuaugauuc

SEQ ID NO: 255246 - RNA, 32 nt, Human
uggauggucucuaauacuaucuccuuccuucc

SEQ ID NO: 255247 - RNA, 32 nt, Human
uggauggugaaaugugcauggugcacagucug

SEQ ID NO: 255248 - RNA, 32 nt, Human
uggauggugcaaccuguggcccagggagcuac

SEQ ID NO: 255249 - RNA, 32 nt, Human
uggauggugcuggguccccacagggagcgaga

SEQ ID NO: 255250 - RNA, 32 nt, Human
uggaugguggaguggacacugggugaaccacg

SEQ ID NO: 255251 - RNA, 32 nt, Human
uggaugguggugaguggaucauuucuuucagc

SEQ ID NO: 255252 - RNA, 32 nt, Human
uggaugguuagaaacaauaauauauaggguuu

SEQ ID NO: 255253 - RNA, 32 nt, Human
uggauguaaccaacaaccacagaacuacagaa

SEQ ID NO: 255254 - RNA, 32 nt, Human
uggauguaagagaauccagcagagauggacug

SEQ ID NO: 255255 - RNA, 32 nt, Human
uggauguaauauauguagcacacacacauaga

SEQ ID NO: 255256 - RNA, 19 nt, Human
uggauguaauuacugaaga

SEQ ID NO: 255257 - RNA, 32 nt, Human
uggauguacacacggaaguggaggaggaggag

SEQ ID NO: 255258 - RNA, 32 nt, Human
uggauguagauggugcccagaccuuuucccuc

SEQ ID NO: 255259 - RNA, 32 nt, Human
uggauguauaaccuguuuccagccuggccuga

SEQ ID NO: 255260 - RNA, 32 nt, Human
uggauguauacuauuuggaugauccaguagua

SEQ ID NO: 255261 - RNA, 32 nt, Human
uggauguaucccaacagaggaacagguaucuu

SEQ ID NO: 255262 - RNA, 32 nt, Human
uggauguaucuauucaauuucucaguuuaugu

SEQ ID NO: 255263 - RNA, 32 nt, Human
uggaugucaggggacgggugugaggcaugagc

SEQ ID NO: 255264 - RNA, 32 nt, Human
uggaugucagugcagugcacugcuacuguuuu

SEQ ID NO: 255265 - RNA, 24 nt, Human
uggauguccagccagcugcccccu

SEQ ID NO: 255266 - RNA, 22 nt, Human
uggaugucgagggugguuugug

SEQ ID NO: 255267 - RNA, 32 nt, Human
uggaugucggcggugaagagcugugcaggccg

SEQ ID NO: 255268 - RNA, 32 nt, Human
uggaugucggugacaccugccucccagguggu

SEQ ID NO: 255269 - RNA, 28 nt, Human
uggaugucuaucucccuggcuuggugcc

SEQ ID NO: 255270 - RNA, 32 nt, Human
uggaugucucucgcuacguuuccccagagcag

SEQ ID NO: 255271 - RNA, 32 nt, Human
uggaugucuugccuugagauaaggcugccgga

SEQ ID NO: 255272 - RNA, 32 nt, Human
uggaugucuuucuucuucauccaagcacccua

SEQ ID NO: 255273 - RNA, 19 nt, Human
uggaugugagaguggugaa

SEQ ID NO: 255274 - RNA, 24 nt, Human
uggaugugaugacucaugccugug

SEQ ID NO: 255275 - RNA, 32 nt, Human
uggaugugcaaacccaacccaagaauaccuug

SEQ ID NO: 255276 - RNA, 32 nt, Human
uggaugugcaagaccagccacuggagguagcu

SEQ ID NO: 255277 - RNA, 32 nt, Human
uggaugugcaaguuguggagagaaggagcacc

SEQ ID NO: 255278 - RNA, 32 nt, Human
uggaugugccugaaaugcccagccaggagccc

SEQ ID NO: 255279 - RNA, 32 nt, Human
uggaugugcuccugaaucuacuuuuuauaaaa

SEQ ID NO: 255280 - RNA, 32 nt, Human
uggauguggcagaguccugaugaaagauguau

SEQ ID NO: 255281 - RNA, 32 nt, Human
uggauguggcaggagccccaucaaggaaggac

SEQ ID NO: 255282 - RNA, 32 nt, Human
uggauguggcugcaguccagagaaaggaaaga

SEQ ID NO: 255283 - RNA, 32 nt, Human
uggaugugggaaagccuacaguuggaaaucac

SEQ ID NO: 255284 - RNA, 32 nt, Human
uggauguggucucuacacuaaccuucuugaug

SEQ ID NO: 255285 - RNA, 24 nt, Human
uggauguggugacucaugccugua

SEQ ID NO: 255286 - RNA, 23 nt, Human
uggaugugguggcagugccugua

SEQ ID NO: 255287 - RNA, 24 nt, Human
uggaugugguggcauacgccugua

SEQ ID NO: 255288 - RNA, 24 nt, Human
uggaugugguggcucacaacugua

SEQ ID NO: 255289 - RNA, 24 nt, Human
uggaugugguggcucacaccugua

SEQ ID NO: 255290 - RNA, 24 nt, Human
uggaugugguggcucauaccugua

SEQ ID NO: 255291 - RNA, 24 nt, Human
uggaugugguggugcacaccugug

SEQ ID NO: 255292 - RNA, 24 nt, Human
uggaugugguggugugcaccugua

SEQ ID NO: 255293 - RNA, 32 nt, Human
uggaugugguuagagggaugggcugaauaggc

SEQ ID NO: 255294 - RNA, 32 nt, Human
uggauguguagcaaggaugggagaagcgaaau

SEQ ID NO: 255295 - RNA, 32 nt, Human
uggauguguccagaagcuuuaccauccacacc

SEQ ID NO: 255296 - RNA, 19 nt, Human
uggauguguguguggugaa

SEQ ID NO: 255297 - RNA, 32 nt, Human
uggauguucaggccuagcuccaaccaagagug

SEQ ID NO: 255298 - RNA, 23 nt, Human
uggauguucaguauguuugugag

SEQ ID NO: 255299 - RNA, 32 nt, Human
uggauguugaaaucuuugccuccucagucggg

SEQ ID NO: 255300 - RNA, 32 nt, Human
uggauguugcuugacuccuuccauccuuccug

SEQ ID NO: 255301 - RNA, 32 nt, Human
uggauguuggggaggaagagaggagauggauu

SEQ ID NO: 255302 - RNA, 32 nt, Human
uggauguuguuaucucccuccuggccuuugua

SEQ ID NO: 255303 - RNA, 32 nt, Human
uggauguuguugccaaggaaaccaccuccuuc

SEQ ID NO: 255304 - RNA, 32 nt, Human
uggauguuuccucuuccucccuuaugucuacc

SEQ ID NO: 255305 - RNA, 21 nt, Human
uggauguuugaacuugcucca

SEQ ID NO: 255306 - RNA, 23 nt, Human
uggauguuugccugguccgugag

SEQ ID NO: 255307 - RNA, 32 nt, Human
uggauuaaagacggcccacagaccagaacuuc

SEQ ID NO: 255308 - RNA, 32 nt, Human
uggauuaauuccuuuuggcaaggaggcccuuu

SEQ ID NO: 255309 - RNA, 32 nt, Human
uggauuacccaggaagguugagcugcugagau

SEQ ID NO: 255310 - RNA, 17 nt, Human
uggauuaccugguggug

SEQ ID NO: 255311 - RNA, 32 nt, Human
uggauuacgggaguucgagaccagccugggca

SEQ ID NO: 255312 - RNA, 32 nt, Human
uggauuacuucaguugaccuuugugaagguuu

SEQ ID NO: 255313 - RNA, 32 nt, Human
uggauuagaaagcugcaggagggucaucgcuu

SEQ ID NO: 255314 - RNA, 32 nt, Human
uggauuagacccaagggcugagcuccucuagg

SEQ ID NO: 255315 - RNA, 32 nt, Human
uggauuagcagggguggguccaggaagaugau

SEQ ID NO: 255316 - RNA, 32 nt, Human
uggauuaggaacaggauucauuccuuuaacuu

SEQ ID NO: 255317 - RNA, 32 nt, Human
uggauuagggcugcucagccuguuuucucucu

SEQ ID NO: 255318 - RNA, 32 nt, Human
uggauuauaaaaauaugggggaaagugcuaug

SEQ ID NO: 255319 - RNA, 32 nt, Human
uggauuauauacuaguuaauuucuuccauucc

SEQ ID NO: 255320 - RNA, 32 nt, Human
uggauuauauugcuugacuucuaccucagaau

SEQ ID NO: 255321 - RNA, 32 nt, Human
uggauuaucccuuuuuccuauaccugaaaaca

SEQ ID NO: 255322 - RNA, 32 nt, Human
uggauuauguaauacauuguaaaguuuuaauu

SEQ ID NO: 255323 - RNA, 32 nt, Human
uggauuauuuggaagcucggaagugaaauucu

SEQ ID NO: 255324 - RNA, 32 nt, Human
uggauucaagcgauucuccugucccagccucc

SEQ ID NO: 255325 - RNA, 32 nt, Human
uggauucacaccauucuccugccucagccucc

SEQ ID NO: 255326 - RNA, 32 nt, Human
uggauucaccacugcuaacaccuccugguugg

SEQ ID NO: 255327 - RNA, 32 nt, Human
uggauucagacugaauuauaccacaggccuuc

SEQ ID NO: 255328 - RNA, 32 nt, Human
uggauucagccaugcauggacugggguguucc

SEQ ID NO: 255329 - RNA, 32 nt, Human
uggauucagccccaccuccugcucacagaccc

SEQ ID NO: 255330 - RNA, 32 nt, Human
uggauucagcucccccagguuccccaugauga

SEQ ID NO: 255331 - RNA, 32 nt, Human
uggauucaucugcaacacaggcugccggguug

SEQ ID NO: 255332 - RNA, 32 nt, Human
uggauucaugccacguugaagauaaaauuauc

SEQ ID NO: 255333 - RNA, 32 nt, Human
uggauucauguggacauucaggaagcuuauuc

SEQ ID NO: 255334 - RNA, 32 nt, Human
uggauucauuuacauuguuuacacuucuauga

SEQ ID NO: 255335 - RNA, 21 nt, Human
uggauuccagaaugauugcuu

SEQ ID NO: 255336 - RNA, 32 nt, Human
uggauuccagcacuggaggacccccugccacg

SEQ ID NO: 255337 - RNA, 32 nt, Human
uggauuccagcauucagcaggugcagaucucg

SEQ ID NO: 255338 - RNA, 32 nt, Human
uggauuccauauuuuuguuucucuccaauuca

SEQ ID NO: 255339 - RNA, 32 nt, Human
uggauuccaucacauggugagccuugaggaag

SEQ ID NO: 255340 - RNA, 32 nt, Human
uggauuccaucuuucugcaguaacagcgggca

SEQ ID NO: 255341 - RNA, 21 nt, Human
uggauuccauggggucugcuu

SEQ ID NO: 255342 - RNA, 32 nt, Human
uggauucccacauuugucuucuuucugucuuu

SEQ ID NO: 255343 - RNA, 32 nt, Human
uggauuccguauguucuucauagagaguguuu

SEQ ID NO: 255344 - RNA, 32 nt, Human
uggauuccuaucucguuacucugucuccauua

SEQ ID NO: 255345 - RNA, 32 nt, Human
uggauuccuccagggccugauccugggugcag

SEQ ID NO: 255346 - RNA, 32 nt, Human
uggauuccuccaggucaggggcuggcugggac

SEQ ID NO: 255347 - RNA, 32 nt, Human
uggauuccuccuccucuuccuccgcggcgggu

SEQ ID NO: 255348 - RNA, 32 nt, Human
uggauuccucuccugaaaaugcuuuuuccuuu

SEQ ID NO: 255349 - RNA, 21 nt, Human
uggauuccugaaccaggggga

SEQ ID NO: 255350 - RNA, 32 nt, Human
uggauuccugcacgaaguggcugaugggaacc

SEQ ID NO: 255351 - RNA, 32 nt, Human
uggauucgggagcugggaguaaccaggcaaag

SEQ ID NO: 255352 - RNA, 19 nt, Human
uggauucuaucauccaggu

SEQ ID NO: 255353 - RNA, 32 nt, Human
uggauucuccaggacaaaccuguguucaugga

SEQ ID NO: 255354 - RNA, 32 nt, Human
uggauucuccugcucgcugccucccagcaucu

SEQ ID NO: 255355 - RNA, 32 nt, Human
uggauucucuuucauggcagaugcucuuggac

SEQ ID NO: 255356 - RNA, 32 nt, Human
uggauucugauucaggaggagccucccagucu

SEQ ID NO: 255357 - RNA, 32 nt, Human
uggauucugccuccaucucugccuccauggcu

SEQ ID NO: 255358 - RNA, 32 nt, Human
uggauucuggaaauauuuugaagauugaauug

SEQ ID NO: 255359 - RNA, 32 nt, Human
uggauucuggaagucagguugcacagagucac

SEQ ID NO: 255360 - RNA, 32 nt, Human
uggauucugugcagugcuaggagggaggagag

SEQ ID NO: 255361 - RNA, 32 nt, Human
uggauucugugccaucugaacaugcucuccug

SEQ ID NO: 255362 - RNA, 32 nt, Human
uggauucuguggccccaaauguuaauagugcc

SEQ ID NO: 255363 - RNA, 32 nt, Human
uggauucuuaaccuugaauccaaagugucugc

SEQ ID NO: 255364 - RNA, 32 nt, Human
uggauucuugucuuccccaaccucucaguggu

SEQ ID NO: 255365 - RNA, 32 nt, Human
uggauugacuggucaguugcuacaaucagaau

SEQ ID NO: 255366 - RNA, 32 nt, Human
uggauugagagggaggcccugggaggagagaa

SEQ ID NO: 255367 - RNA, 23 nt, Human
uggauugaucagagagaauugaa

SEQ ID NO: 255368 - RNA, 32 nt, Human
uggauugauguucacagcuuuauacuucagaa

SEQ ID NO: 255369 - RNA, 32 nt, Human
uggauugcacacuguagugagacauccauccu

SEQ ID NO: 255370 - RNA, 22 nt, Human
uggauugcaccucuguaaacua

SEQ ID NO: 255371 - RNA, 32 nt, Human
uggauugcacguggccucuugagcaguggcug

SEQ ID NO: 255372 - RNA, 32 nt, Human
uggauugcaguggcgugaucaugccucacugc

SEQ ID NO: 255373 - RNA, 32 nt, Human
uggauugccguuuguaccuguaucaguauugc

SEQ ID NO: 255374 - RNA, 32 nt, Human
uggauugcgccacugcacuccagccugggcaa

SEQ ID NO: 255375 - RNA, 32 nt, Human
uggauugcgcuacugcacuccagccuggguga

SEQ ID NO: 255376 - RNA, 32 nt, Human
uggauuggaaugcagaggucuccaaacugauu

SEQ ID NO: 255377 - RNA, 21 nt, Human
uggauuggaugcuggggugug

SEQ ID NO: 255378 - RNA, 32 nt, Human
uggauugggauagaaguauuuguguaccugga

SEQ ID NO: 255379 - RNA, 32 nt, Human
uggauugggguggcuuucucuucuaagucacu

SEQ ID NO: 255380 - RNA, 32 nt, Human
uggauugggucagccccucugcauuuaccuau

SEQ ID NO: 255381 - RNA, 32 nt, Human
uggauuguagccaguucagcuaggcaaaagcc

SEQ ID NO: 255382 - RNA, 22 nt, Human
uggauuguauaacccauauacu

SEQ ID NO: 255383 - RNA, 32 nt, Human
uggauuguauuaucugcuuuccuuuaccaagg

SEQ ID NO: 255384 - RNA, 32 nt, Human
uggauugucaucagcccugccuguuuugcacc

SEQ ID NO: 255385 - RNA, 32 nt, Human
uggauugugcugcucucguuucagcuuugauu

SEQ ID NO: 255386 - RNA, 32 nt, Human
uggauugugcugcuguuagccuuaguuucagu

SEQ ID NO: 255387 - RNA, 32 nt, Human
uggauuuaaaggacaguggcacacuggggaga

SEQ ID NO: 255388 - RNA, 32 nt, Human
uggauuuacccaggucgaguucagagagccuc

SEQ ID NO: 255389 - RNA, 32 nt, Human
uggauuuagccaaggaccuggcaacccaggaa

SEQ ID NO: 255390 - RNA, 32 nt, Human
uggauuuagggagggggcugugauguaaaacg

SEQ ID NO: 255391 - RNA, 32 nt, Human
uggauuuagggauagugucccucuccaugucc

SEQ ID NO: 255392 - RNA, 32 nt, Human
uggauuuaucacauugaguuaugaaauuaccu

SEQ ID NO: 255393 - RNA, 32 nt, Human
uggauuucaagcacuuucacacuuaacaaaau

SEQ ID NO: 255394 - RNA, 23 nt, Human
uggauuucaaguuggcggcugcc

SEQ ID NO: 255395 - RNA, 32 nt, Human
uggauuucacccaggaggaguggcagcaacug

SEQ ID NO: 255396 - RNA, 32 nt, Human
uggauuucacccaggaggaguggcggcaacug

SEQ ID NO: 255397 - RNA, 32 nt, Human
uggauuucagcccucaaagcguuccgugagcc

SEQ ID NO: 255398 - RNA, 32 nt, Human
uggauuucauuuccccaggucuucaguguuga

SEQ ID NO: 255399 - RNA, 32 nt, Human
uggauuuccacuuauguaacuaguggugcuau

SEQ ID NO: 255400 - RNA, 32 nt, Human
uggauuuccuccagaguucggauuuccugaga

SEQ ID NO: 255401 - RNA, 32 nt, Human
uggauuuccugcuuggagucucaggccccagc

SEQ ID NO: 255402 - RNA, 32 nt, Human
uggauuuccuggaagacguggauuuuccugga

SEQ ID NO: 255403 - RNA, 32 nt, Human
uggauuucuacccccuugcuauccucucuggc

SEQ ID NO: 255404 - RNA, 32 nt, Human
uggauuucuccugccaggagaaucuccugcag

SEQ ID NO: 255405 - RNA, 32 nt, Human
uggauuucugaacgaagcagagcucagcucuu

SEQ ID NO: 255406 - RNA, 24 nt, Human
uggauuucuucucccaacaacuac

SEQ ID NO: 255407 - RNA, 32 nt, Human
uggauuugaccuucaaaauugaaggucguucu

SEQ ID NO: 255408 - RNA, 32 nt, Human
uggauuugaggcagauaccauaaagaaaaguu

SEQ ID NO: 255409 - RNA, 32 nt, Human
uggauuugaguuuccauauuguucaucauuac

SEQ ID NO: 255410 - RNA, 19 nt, Human
uggauuugcucauugcugu

SEQ ID NO: 255411 - RNA, 32 nt, Human
uggauuugcuguucuugccugcagggccucag

SEQ ID NO: 255412 - RNA, 32 nt, Human
uggauuugggaugucaggggaagaacucagug

SEQ ID NO: 255413 - RNA, 32 nt, Human
uggauuugggcuagucuugugauugcuuugac

SEQ ID NO: 255414 - RNA, 32 nt, Human
uggauuuggggguuaugagaacuccauguuuu

SEQ ID NO: 255415 - RNA, 32 nt, Human
uggauuuggucaucucaagaagagucuucaga

SEQ ID NO: 255416 - RNA, 32 nt, Human
uggauuugucaggugcaucacagaggucaaag

SEQ ID NO: 255417 - RNA, 32 nt, Human
uggauuugugcaauauguaaaaauguaucaaa

SEQ ID NO: 255418 - RNA, 32 nt, Human
uggauuuuacuucuaagagcaaaggaaagccc

SEQ ID NO: 255419 - RNA, 32 nt, Human
uggauuuuccagauccuugugguccuggaaau

SEQ ID NO: 255420 - RNA, 32 nt, Human
uggauuuucuagaauuaguuguaggcgacagu

SEQ ID NO: 255421 - RNA, 32 nt, Human
uggauuuucuucuuucuuuguuuagaaaggga

SEQ ID NO: 255422 - RNA, 32 nt, Human
uggauuuugcaccuggcuuuggggcaggggug

SEQ ID NO: 255423 - RNA, 32 nt, Human
uggauuuugguaucugcagggguccugggaac

SEQ ID NO: 255424 - RNA, 32 nt, Human
uggauuuuguuucauuuaaccucucuuugcac

SEQ ID NO: 255425 - RNA, 21 nt, Human
uggauuuuuagguggugggaa

SEQ ID NO: 255426 - RNA, 32 nt, Human
uggauuuuuccuccacuaaaucugcaggaaac

SEQ ID NO: 255427 - RNA, 32 nt, Human
uggauuuuucugaauaaaguucugcaugagau

SEQ ID NO: 255428 - RNA, 32 nt, Human
uggauuuuuguguguauguauguaugugauua

SEQ ID NO: 255429 - RNA, 32 nt, Human
uggauuuuuguguuguuuuuguucuguuuuac

SEQ ID NO: 255430 - RNA, 32 nt, Human
uggcaaaaacaugcugagcagcuuugaaggcu

SEQ ID NO: 255431 - RNA, 32 nt, Human
uggcaaaaagacgucaggccacccucauagua

SEQ ID NO: 255432 - RNA, 32 nt, Human
uggcaaaaagaugucaaggaugucacugggag

SEQ ID NO: 255433 - RNA, 32 nt, Human
uggcaaaaaggaagacccccacccucaccugc

SEQ ID NO: 255434 - RNA, 21 nt, Human
uggcaaaacaguccuugcccu

SEQ ID NO: 255435 - RNA, 32 nt, Human
uggcaaaaccccaucucuaccaaaaauacaaa

SEQ ID NO: 255436 - RNA, 32 nt, Human
uggcaaaaccccaucuuuaccaaaaauaagcu

SEQ ID NO: 255437 - RNA, 32 nt, Human
uggcaaaaccccaugucuacuaaaaauauuua

SEQ ID NO: 255438 - RNA, 32 nt, Human
uggcaaaacccccacucuugccuggauucuga

SEQ ID NO: 255439 - RNA, 21 nt, Human
uggcaaaagaagagauaagag

SEQ ID NO: 255440 - RNA, 32 nt, Human
uggcaaaagcuacauuuuuacuguccuuacca

SEQ ID NO: 255441 - RNA, 24 nt, Human
uggcaaaaucauggcucacugcag

SEQ ID NO: 255442 - RNA, 32 nt, Human
uggcaaaaucauggcucacugcagccuggagc

SEQ ID NO: 255443 - RNA, 32 nt, Human
uggcaaaaugcacaggggaaugugaaaagacu

SEQ ID NO: 255444 - RNA, 32 nt, Human
uggcaaacagaaguucaggaugagacccugcu

SEQ ID NO: 255445 - RNA, 32 nt, Human
uggcaaacauggcaaaacugucucuauuaaaa

SEQ ID NO: 255446 - RNA, 32 nt, Human
uggcaaacauggcgacacccugucucuacuaa

SEQ ID NO: 255447 - RNA, 32 nt, Human
uggcaaacauggugaaaccccaucucuaguaa

SEQ ID NO: 255448 - RNA, 32 nt, Human
uggcaaacauggugaaacgccgucucuacuga

SEQ ID NO: 255449 - RNA, 32 nt, Human
uggcaaaccuucgacuucauuuugccaccucu

SEQ ID NO: 255450 - RNA, 32 nt, Human
uggcaaacuaguaucugcuguaaaacaaccua

SEQ ID NO: 255451 - RNA, 32 nt, Human
uggcaaacucuccaccacacguaaugaaacuu

SEQ ID NO: 255452 - RNA, 32 nt, Human
uggcaaagaaacagcguccagagcagacacag

SEQ ID NO: 255453 - RNA, 32 nt, Human
uggcaaagagaagaaaggcccaagagcgagac

SEQ ID NO: 255454 - RNA, 32 nt, Human
uggcaaagagucggccacccagauuuaccaca

SEQ ID NO: 255455 - RNA, 32 nt, Human
uggcaaagcagacucaaugcacugucgacauc

SEQ ID NO: 255456 - RNA, 32 nt, Human
uggcaaaggagaggacaccgccagugguccaa

SEQ ID NO: 255457 - RNA, 32 nt, Human
uggcaaagggagugccugggccuggugaccca

SEQ ID NO: 255458 - RNA, 32 nt, Human
uggcaaagguccaagccccaaccaaggggauu

SEQ ID NO: 255459 - RNA, 18 nt, Human
uggcaaauaaaauguaaa

SEQ ID NO: 255460 - RNA, 32 nt, Human
uggcaaauaagauucuaaaagcacuuauaucc

SEQ ID NO: 255461 - RNA, 32 nt, Human
uggcaaauauagaauauuucacauucucagag

SEQ ID NO: 255462 - RNA, 32 nt, Human
uggcaaaucugccagggaugucuucaccaagg

SEQ ID NO: 255463 - RNA, 32 nt, Human
uggcaaaugaagcacagaaaucucuuugcucu

SEQ ID NO: 255464 - RNA, 32 nt, Human
uggcaaaugccuguaauaccagcuacucagga

SEQ ID NO: 255465 - RNA, 32 nt, Human
uggcaaaugccuguaaucccagcacuuuggga

SEQ ID NO: 255466 - RNA, 24 nt, Human
uggcaaaugccuguaaucccagcu

SEQ ID NO: 255467 - RNA, 32 nt, Human
uggcaaauggggcuccugggcccaguccugcu

SEQ ID NO: 255468 - RNA, 32 nt, Human
uggcaaauguuucucagucauaguuggacugu

SEQ ID NO: 255469 - RNA, 32 nt, Human
uggcaaauuauuuuaaacugugcucaacccuu

SEQ ID NO: 255470 - RNA, 32 nt, Human
uggcaacaagguaggcccuggugcagggcaag

SEQ ID NO: 255471 - RNA, 31 nt, Human
uggcaacacagcuacaaaggcauaaacaaga

SEQ ID NO: 255472 - RNA, 32 nt, Human
uggcaacacugcgcuccagccuggcagacaga

SEQ ID NO: 255473 - RNA, 32 nt, Human
uggcaacauggugaaaccccaucuccaccaaa

SEQ ID NO: 255474 - RNA, 32 nt, Human
uggcaaccaucagaagcuuggaagaggcaaag

SEQ ID NO: 255475 - RNA, 32 nt, Human
uggcaacccaguagcuggagucugaagaugga

SEQ ID NO: 255476 - RNA, 28 nt, Human
uggcaacccucagcugccucaucguggc

SEQ ID NO: 255477 - RNA, 32 nt, Human
uggcaacccuccuggacuaggcugcucuuguu

SEQ ID NO: 255478 - RNA, 32 nt, Human
uggcaacccuggggucuuugaugucuugacag

SEQ ID NO: 255479 - RNA, 32 nt, Human
uggcaaccgcagguggcucugaggugagagac

SEQ ID NO: 255480 - RNA, 21 nt, Human
uggcaaccuaacauaccagug

SEQ ID NO: 255481 - RNA, 32 nt, Human
uggcaaccugagccacacaggccuccaccccu

SEQ ID NO: 255482 - RNA, 32 nt, Human
uggcaacguccucccacagagacagaggggaa

SEQ ID NO: 255483 - RNA, 32 nt, Human
uggcaacuagcauggugccugccccuaauaca

SEQ ID NO: 255484 - RNA, 32 nt, Human
uggcaacuccaaagucaucuugccagucccgg

SEQ ID NO: 255485 - RNA, 32 nt, Human
uggcaacugcagcugcuggauuccagauucug

SEQ ID NO: 255486 - RNA, 20 nt, Human
uggcaacugcugaucgacuu

SEQ ID NO: 255487 - RNA, 32 nt, Human
uggcaacuuacuacugaaucucuaaucaaugu

SEQ ID NO: 255488 - RNA, 32 nt, Human
uggcaagaaacagacaaagccccaugaaaaau

SEQ ID NO: 255489 - RNA, 32 nt, Human
uggcaagacauuuccuagcugagagaugcuuu

SEQ ID NO: 255490 - RNA, 23 nt, Human
uggcaagaccuuuguucaaaauu

SEQ ID NO: 255491 - RNA, 32 nt, Human
uggcaagagauggguuuauggguuggggcgcc

SEQ ID NO: 255492 - RNA, 32 nt, Human
uggcaagagcgcugucaggccuggugaagggu

SEQ ID NO: 255493 - RNA, 32 nt, Human
uggcaagagcuccugaaccaguuucauuucug

SEQ ID NO: 255494 - RNA, 32 nt, Human
uggcaagaggagguggcggcggugguaguggu

SEQ ID NO: 255495 - RNA, 32 nt, Human
uggcaagagggagggaaggaaggagagcaaaa

SEQ ID NO: 255496 - RNA, 23 nt, Human
uggcaagaucucggcucacugca

SEQ ID NO: 255497 - RNA, 24 nt, Human
uggcaagaucucggcucacugcag

SEQ ID NO: 255498 - RNA, 23 nt, Human
uggcaagaucuuggcucacugca

SEQ ID NO: 255499 - RNA, 32 nt, Human
uggcaagauggaaaccaacuucuccacuccuc

SEQ ID NO: 255500 - RNA, 32 nt, Human
uggcaagcacuggagguggaaggggucauggg

SEQ ID NO: 255501 - RNA, 19 nt, Human
uggcaagcagccuucugaa

SEQ ID NO: 255502 - RNA, 32 nt, Human
uggcaagccccgaggcagggauggccggccca

SEQ ID NO: 255503 - RNA, 21 nt, Human
uggcaagcgccuguaguccca

SEQ ID NO: 255504 - RNA, 24 nt, Human
uggcaagcgccuguagucccagcu

SEQ ID NO: 255505 - RNA, 32 nt, Human
uggcaagcuauguccgcaguucccaggaauuu

SEQ ID NO: 255506 - RNA, 32 nt, Human
uggcaagcugccucuugaguuuguuauaaaag

SEQ ID NO: 255507 - RNA, 32 nt, Human
uggcaaggaagagagagccuucauggcaauuu

SEQ ID NO: 255508 - RNA, 32 nt, Human
uggcaaggacaggagagcagugcagugacaca

SEQ ID NO: 255509 - RNA, 32 nt, Human
uggcaaggacuagagagcaggagugccuggcc

SEQ ID NO: 255510 - RNA, 32 nt, Human
uggcaaggcccaggcaguuccagaucccugca

SEQ ID NO: 255511 - RNA, 32 nt, Human
uggcaaggcugacagagcucuggguugugcac

SEQ ID NO: 255512 - RNA, 32 nt, Human
uggcaagggagcauuccaggagagaaagggac

SEQ ID NO: 255513 - RNA, 22 nt, Human
uggcaagguagaccucauagca

SEQ ID NO: 255514 - RNA, 23 nt, Human
uggcaaggucuucagucaaaguu

SEQ ID NO: 255515 - RNA, 30 nt, Human
uggcaagguuuuuaaucagaaagcacaccu

SEQ ID NO: 255516 - RNA, 32 nt, Human
uggcaaguaaaugacaaaagggacauugauag

SEQ ID NO: 255517 - RNA, 32 nt, Human
uggcaaguuacuuccucuccccaggucucucg

SEQ ID NO: 255518 - RNA, 32 nt, Human
uggcaaguucaucucagagaaaggggauucag

SEQ ID NO: 255519 - RNA, 32 nt, Human
uggcaaguuuguuaccucacuugagugggguu

SEQ ID NO: 255520 - RNA, 32 nt, Human
uggcaauaaaguggaaguugccgucaaacaga

SEQ ID NO: 255521 - RNA, 32 nt, Human
uggcaauacagguaucuguuguaaugacauca

SEQ ID NO: 255522 - RNA, 32 nt, Human
uggcaauacuauccuaacugacaugcagauuc

SEQ ID NO: 255523 - RNA, 32 nt, Human
uggcaauagaguuccuugccauuccugguuuu

SEQ ID NO: 255524 - RNA, 32 nt, Human
uggcaaucaaugcuccauccugccagcccugg

SEQ ID NO: 255525 - RNA, 32 nt, Human
uggcaauccacagaaagagaagagccuuaauu

SEQ ID NO: 255526 - RNA, 32 nt, Human
uggcaaugccaguggaaccacacugcuugagg

SEQ ID NO: 255527 - RNA, 32 nt, Human
uggcaaugccuugcuuuccugcuguugaacau

SEQ ID NO: 255528 - RNA, 32 nt, Human
uggcaaugcuuaaaucucagcauuuccacuga

SEQ ID NO: 255529 - RNA, 32 nt, Human
uggcaauggaaaguccagaguuguuauuguau

SEQ ID NO: 255530 - RNA, 29 nt, Human
uggcaauggcugcucucaaucccuugagg

SEQ ID NO: 255531 - RNA, 32 nt, Human
uggcaauugcuuucugauaucagcucguuuga

SEQ ID NO: 255532 - RNA, 32 nt, Human
uggcaauuggcacugaaggcaccccaggcccc

SEQ ID NO: 255533 - RNA, 32 nt, Human
uggcaauuggugguggggaggcaucugcucca

SEQ ID NO: 255534 - RNA, 32 nt, Human
uggcaauugugaacugcuugaacaguaacuau

SEQ ID NO: 255535 - RNA, 32 nt, Human
uggcaauuucauuuuuggcagucuauuucugu

SEQ ID NO: 255536 - RNA, 32 nt, Human
uggcaauuuuuacacaaaccugaaaagauguu

SEQ ID NO: 255537 - RNA, 32 nt, Human
uggcacaaaaaccuggugaggccucccccuuc

SEQ ID NO: 255538 - RNA, 32 nt, Human
uggcacaaacauagcucacugcagccuugaac

SEQ ID NO: 255539 - RNA, 32 nt, Human
uggcacaaacauggcucacugcagccucgacc

SEQ ID NO: 255540 - RNA, 32 nt, Human
uggcacaaauaauguacacccaccucaacaug

SEQ ID NO: 255541 - RNA, 32 nt, Human
uggcacaaauggagccccuccaugcagagauc

SEQ ID NO: 255542 - RNA, 18 nt, Human
uggcacaaccucagcuca

SEQ ID NO: 255543 - RNA, 23 nt, Human
uggcacaaccucagcucacugca

SEQ ID NO: 255544 - RNA, 23 nt, Human
uggcacaaccucggcucacugca

SEQ ID NO: 255545 - RNA, 23 nt, Human
uggcacaaccuuggcucacugca

SEQ ID NO: 255546 - RNA, 26 nt, Human
uggcacaagauuaugacucacuguag

SEQ ID NO: 255547 - RNA, 32 nt, Human
uggcacaagcagguaaccaggauggcuaacag

SEQ ID NO: 255548 - RNA, 24 nt, Human
uggcacaaucaaagcucacugcag

SEQ ID NO: 255549 - RNA, 32 nt, Human
uggcacaaucaaagcucacugcagccuugaau

SEQ ID NO: 255550 - RNA, 23 nt, Human
uggcacaaucaaggcucacugca

SEQ ID NO: 255551 - RNA, 24 nt, Human
uggcacaaucaaggcucacugcag

SEQ ID NO: 255552 - RNA, 18 nt, Human
uggcacaaucaauguaag

SEQ ID NO: 255553 - RNA, 32 nt, Human
uggcacaaucacagcucacugcagccuggacc

SEQ ID NO: 255554 - RNA, 24 nt, Human
uggcacaaucacagcucacuguag

SEQ ID NO: 255555 - RNA, 24 nt, Human
uggcacaaucacagcucauugcag

SEQ ID NO: 255556 - RNA, 32 nt, Human
uggcacaaucacagcucauugcagccucaacc

SEQ ID NO: 255557 - RNA, 24 nt, Human
uggcacaaucacaguucacugcag

SEQ ID NO: 255558 - RNA, 24 nt, Human
uggcacaaucacggcucacugcag

SEQ ID NO: 255559 - RNA, 21 nt, Human
uggcacaaucagcucacugca

SEQ ID NO: 255560 - RNA, 24 nt, Human
uggcacaaucauaccucacugcag

SEQ ID NO: 255561 - RNA, 32 nt, Human
uggcacaaucauaccucacugcagccucuugg

SEQ ID NO: 255562 - RNA, 24 nt, Human
uggcacaaucauagcucacugcag

SEQ ID NO: 255563 - RNA, 32 nt, Human
uggcacaaucauagcucacugcagcuuugacc

SEQ ID NO: 255564 - RNA, 24 nt, Human
uggcacaaucauagcucgcugcag

SEQ ID NO: 255565 - RNA, 32 nt, Human
uggcacaaucauagcucgcugcagccucgacc

SEQ ID NO: 255566 - RNA, 24 nt, Human
uggcacaaucauggcucacugcag

SEQ ID NO: 255567 - RNA, 32 nt, Human
uggcacaaucauggcucacugcagccccgaac

SEQ ID NO: 255568 - RNA, 32 nt, Human
uggcacaaucauggcucacugcagccucaacc

SEQ ID NO: 255569 - RNA, 32 nt, Human
uggcacaaucauggcucacugcagccucgagc

SEQ ID NO: 255570 - RNA, 32 nt, Human
uggcacaaucauggcucacugcagccuugaac

SEQ ID NO: 255571 - RNA, 32 nt, Human
uggcacaaucauggcucacugcagucucaauc

SEQ ID NO: 255572 - RNA, 32 nt, Human
uggcacaaucauggcucacugcagucucugcc

SEQ ID NO: 255573 - RNA, 32 nt, Human
uggcacaaucauggcugauugcagccuugacc

SEQ ID NO: 255574 - RNA, 24 nt, Human
uggcacaaucauugcucacuguag

SEQ ID NO: 255575 - RNA, 19 nt, Human
uggcacaaucccucacugc

SEQ ID NO: 255576 - RNA, 32 nt, Human
uggcacaauccguuguucugucguuuagugca

SEQ ID NO: 255577 - RNA, 23 nt, Human
uggcacaaucucaacucacugca

SEQ ID NO: 255578 - RNA, 23 nt, Human
uggcacaaucucagcucacugca

SEQ ID NO: 255579 - RNA, 23 nt, Human
uggcacaaucucagcucacugua

SEQ ID NO: 255580 - RNA, 23 nt, Human
uggcacaaucucaguucacugca

SEQ ID NO: 255581 - RNA, 24 nt, Human
uggcacaaucucgacucacugcag

SEQ ID NO: 255582 - RNA, 24 nt, Human
uggcacaaucucggcccacugcag

SEQ ID NO: 255583 - RNA, 24 nt, Human
uggcacaaucucggcccgcugcag

SEQ ID NO: 255584 - RNA, 23 nt, Human
uggcacaaucucggcucacugca

SEQ ID NO: 255585 - RNA, 23 nt, Human
uggcacaaucucggcucauugca

SEQ ID NO: 255586 - RNA, 23 nt, Human
uggcacaaucucgguucacugca

SEQ ID NO: 255587 - RNA, 23 nt, Human
uggcacaaucuuagcucacugca

SEQ ID NO: 255588 - RNA, 24 nt, Human
uggcacaaucuugacucgcugcag

SEQ ID NO: 255589 - RNA, 23 nt, Human
uggcacaaucuugccucacugca

SEQ ID NO: 255590 - RNA, 23 nt, Human
uggcacaaucuuggcucacugca

SEQ ID NO: 255591 - RNA, 23 nt, Human
uggcacaaucuuggcucagugca

SEQ ID NO: 255592 - RNA, 32 nt, Human
uggcacaaugacgacucacugcagccucaacc

SEQ ID NO: 255593 - RNA, 32 nt, Human
uggcacaauugcacuccagcccgagugacaga

SEQ ID NO: 255594 - RNA, 23 nt, Human
uggcacaauuucagcucacugca

SEQ ID NO: 255595 - RNA, 23 nt, Human
uggcacaauuuuggcucacugca

SEQ ID NO: 255596 - RNA, 23 nt, Human
uggcacaauuuuggcucccugca

SEQ ID NO: 255597 - RNA, 21 nt, Human
uggcacacaccaguaauccca

SEQ ID NO: 255598 - RNA, 21 nt, Human
uggcacacacccguaauccca

SEQ ID NO: 255599 - RNA, 24 nt, Human
uggcacacacccguaguuccagcu

SEQ ID NO: 255600 - RNA, 21 nt, Human
uggcacacaccuauaaucuca

SEQ ID NO: 255601 - RNA, 21 nt, Human
uggcacacaccuauaguccca

SEQ ID NO: 255602 - RNA, 21 nt, Human
uggcacacaccuguaauccca

SEQ ID NO: 255603 - RNA, 24 nt, Human
uggcacacaccuguaaucccaacu

SEQ ID NO: 255604 - RNA, 24 nt, Human
uggcacacaccuguaaucccagcu

SEQ ID NO: 255605 - RNA, 24 nt, Human
uggcacacaccuguaaucccaguu

SEQ ID NO: 255606 - RNA, 21 nt, Human
uggcacacaccuguaaucuca

SEQ ID NO: 255607 - RNA, 21 nt, Human
uggcacacaccuguaguccca

SEQ ID NO: 255608 - RNA, 24 nt, Human
uggcacacaccuguagucccagcu

SEQ ID NO: 255609 - RNA, 32 nt, Human
uggcacacagcagggacccaggcaguggggcu

SEQ ID NO: 255610 - RNA, 32 nt, Human
uggcacacagguguccauucagaugagaguug

SEQ ID NO: 255611 - RNA, 32 nt, Human
uggcacacagugcucacccagaggaccgcagg

SEQ ID NO: 255612 - RNA, 21 nt, Human
uggcacaccccuguaguccca

SEQ ID NO: 255613 - RNA, 24 nt, Human
uggcacaccccuguagucccagcu

SEQ ID NO: 255614 - RNA, 32 nt, Human
uggcacaccugucccuuauguaaaaggagucg

SEQ ID NO: 255615 - RNA, 25 nt, Human
uggcacacgaucucggcucaccgca

SEQ ID NO: 255616 - RNA, 21 nt, Human
uggcacacgccuguaaaccca

SEQ ID NO: 255617 - RNA, 24 nt, Human
uggcacacgccuguaaacccaacu

SEQ ID NO: 255618 - RNA, 21 nt, Human
uggcacacgccuguaauacca

SEQ ID NO: 255619 - RNA, 24 nt, Human
uggcacacgccuguaauaccagcu

SEQ ID NO: 255620 - RNA, 24 nt, Human
uggcacacgccuguaaucacagcu

SEQ ID NO: 255621 - RNA, 32 nt, Human
uggcacacgccuguaaucacagcuacuuggga

SEQ ID NO: 255622 - RNA, 21 nt, Human
uggcacacgccuguaauccca

SEQ ID NO: 255623 - RNA, 22 nt, Human
uggcacacgccuguaaucccag

SEQ ID NO: 255624 - RNA, 23 nt, Human
uggcacacgccuguaaucccagc

SEQ ID NO: 255625 - RNA, 24 nt, Human
uggcacacgccuguaaucccagcu

SEQ ID NO: 255626 - RNA, 32 nt, Human
uggcacacgccuguaaucccagguacuuggaa

SEQ ID NO: 255627 - RNA, 24 nt, Human
uggcacacgccuguaaucccaguu

SEQ ID NO: 255628 - RNA, 32 nt, Human
uggcacacgccuguaaucccaguuacuuggga

SEQ ID NO: 255629 - RNA, 21 nt, Human
uggcacacgccuguaaucuca

SEQ ID NO: 255630 - RNA, 24 nt, Human
uggcacacgccuguaaucucagcu

SEQ ID NO: 255631 - RNA, 21 nt, Human
uggcacacgccuguaguccca

SEQ ID NO: 255632 - RNA, 24 nt, Human
uggcacacgccuguagucccagcu

SEQ ID NO: 255633 - RNA, 21 nt, Human
uggcacacggcuguaauccca

SEQ ID NO: 255634 - RNA, 21 nt, Human
uggcacacuccuguaauccca

SEQ ID NO: 255635 - RNA, 24 nt, Human
uggcacacuccuguaaucccagcu

SEQ ID NO: 255636 - RNA, 32 nt, Human
uggcacacuccuguaaucccagcuacuuagga

SEQ ID NO: 255637 - RNA, 23 nt, Human
uggcacacucuccgcucacugca

SEQ ID NO: 255638 - RNA, 23 nt, Human
uggcacagagaacccugcuucaa

SEQ ID NO: 255639 - RNA, 21 nt, Human
uggcacagagcaguggcaggg

SEQ ID NO: 255640 - RNA, 21 nt, Human
uggcacagagcauugaaagga

SEQ ID NO: 255641 - RNA, 32 nt, Human
uggcacagaggcccccugauccaauucugugc

SEQ ID NO: 255642 - RNA, 32 nt, Human
uggcacagaguuucccacgggggcugcagugg

SEQ ID NO: 255643 - RNA, 32 nt, Human
uggcacagaucucuuucccucugccucaaagc

SEQ ID NO: 255644 - RNA, 32 nt, Human
uggcacagcagacuggagacugaggcagggcc

SEQ ID NO: 255645 - RNA, 32 nt, Human
uggcacagcccaggcaccuuaugguuauggug

SEQ ID NO: 255646 - RNA, 32 nt, Human
uggcacagccugggcaaggggagaaggugguc

SEQ ID NO: 255647 - RNA, 32 nt, Human
uggcacagcucagggcacccaggcuggacccc

SEQ ID NO: 255648 - RNA, 32 nt, Human
uggcacaggaagcacaugauaaagcaugcuca

SEQ ID NO: 255649 - RNA, 32 nt, Human
uggcacaggaucugaguugcagcucugcaccc

SEQ ID NO: 255650 - RNA, 20 nt, Human
uggcacaggccagugcugaa

SEQ ID NO: 255651 - RNA, 32 nt, Human
uggcacaggccugcuuugugauagggguuuua

SEQ ID NO: 255652 - RNA, 32 nt, Human
uggcacagguaacauuuggacauguucaucuu

SEQ ID NO: 255653 - RNA, 24 nt, Human
uggcacagguuuaagaacgaagga

SEQ ID NO: 255654 - RNA, 32 nt, Human
uggcacaguaaacaaacccuguuaugcuguau

SEQ ID NO: 255655 - RNA, 32 nt, Human
uggcacaguagcuggggagaccucagcagggc

SEQ ID NO: 255656 - RNA, 24 nt, Human
uggcacagucauagcucacugcag

SEQ ID NO: 255657 - RNA, 24 nt, Human
uggcacagucauggcucgcugcag

SEQ ID NO: 255658 - RNA, 32 nt, Human
uggcacagucauggcucgcugcagccuugacc

SEQ ID NO: 255659 - RNA, 23 nt, Human
uggcacagucucagcucacugca

SEQ ID NO: 255660 - RNA, 23 nt, Human
uggcacagucucggcucacugca

SEQ ID NO: 255661 - RNA, 32 nt, Human
uggcacagucucuacucaggaggcugaggcag

SEQ ID NO: 255662 - RNA, 23 nt, Human
uggcacagucuuggcucacugca

SEQ ID NO: 255663 - RNA, 32 nt, Human
uggcacaguucugccugugaccugccgccuaa

SEQ ID NO: 255664 - RNA, 19 nt, Human
uggcacauaccuguaaucc

SEQ ID NO: 255665 - RNA, 24 nt, Human
uggcacauaccuguaauccaagcu

SEQ ID NO: 255666 - RNA, 21 nt, Human
uggcacauaccuguaauccca

SEQ ID NO: 255667 - RNA, 24 nt, Human
uggcacauaccuguaaucccagcu

SEQ ID NO: 255668 - RNA, 32 nt, Human
uggcacauaccuguaaucccagcuacucggga

SEQ ID NO: 255669 - RNA, 32 nt, Human
uggcacauaccuguaaucccagcuacuuggaa

SEQ ID NO: 255670 - RNA, 21 nt, Human
uggcacauaccuguaaugcca

SEQ ID NO: 255671 - RNA, 24 nt, Human
uggcacauaccuguaaugccagcu

SEQ ID NO: 255672 - RNA, 32 nt, Human
uggcacauaccuguaaugccagcuacuuggga

SEQ ID NO: 255673 - RNA, 32 nt, Human
uggcacaucacacuaaugcauggagcuucuca

SEQ ID NO: 255674 - RNA, 32 nt, Human
uggcacaucauaaccaauuggaaaccugcagu

SEQ ID NO: 255675 - RNA, 21 nt, Human
uggcacaucccuauaauucca

SEQ ID NO: 255676 - RNA, 24 nt, Human
uggcacaucccuauaauuccagcu

SEQ ID NO: 255677 - RNA, 21 nt, Human
uggcacaucccuguaauucca

SEQ ID NO: 255678 - RNA, 24 nt, Human
uggcacaucccuguaauuccagcu

SEQ ID NO: 255679 - RNA, 19 nt, Human
uggcacaucugugguccca

SEQ ID NO: 255680 - RNA, 21 nt, Human
uggcacaugacuguaauccca

SEQ ID NO: 255681 - RNA, 32 nt, Human
uggcacaugauagugcaaacugcucugacacc

SEQ ID NO: 255682 - RNA, 21 nt, Human
uggcacaugccuauaauccca

SEQ ID NO: 255683 - RNA, 21 nt, Human
uggcacaugccuauaguccca

SEQ ID NO: 255684 - RNA, 21 nt, Human
uggcacaugccuaugauccca

SEQ ID NO: 255685 - RNA, 24 nt, Human
uggcacaugccugcaaucccagcu

SEQ ID NO: 255686 - RNA, 32 nt, Human
uggcacaugccugcaaucccagcuacuugaga

SEQ ID NO: 255687 - RNA, 32 nt, Human
uggcacaugccugcagucccaguuacuugggu

SEQ ID NO: 255688 - RNA, 32 nt, Human
uggcacaugccuggagucccagcuacucggga

SEQ ID NO: 255689 - RNA, 32 nt, Human
uggcacaugccuguaaaccuagcuacuugaga

SEQ ID NO: 255690 - RNA, 21 nt, Human
uggcacaugccuguaacucca

SEQ ID NO: 255691 - RNA, 24 nt, Human
uggcacaugccuguaacuccagcu

SEQ ID NO: 255692 - RNA, 32 nt, Human
uggcacaugccuguaacuccagcuacuuggga

SEQ ID NO: 255693 - RNA, 32 nt, Human
uggcacaugccuguaauaucagcuacucagga

SEQ ID NO: 255694 - RNA, 19 nt, Human
uggcacaugccuguaaucc

SEQ ID NO: 255695 - RNA, 21 nt, Human
uggcacaugccuguaauccca

SEQ ID NO: 255696 - RNA, 32 nt, Human
uggcacaugccuguaaucccaacuacuuggga

SEQ ID NO: 255697 - RNA, 22 nt, Human
uggcacaugccuguaaucccag

SEQ ID NO: 255698 - RNA, 32 nt, Human
uggcacaugccuguaaucccagauacuuggga

SEQ ID NO: 255699 - RNA, 23 nt, Human
uggcacaugccuguaaucccagc

SEQ ID NO: 255700 - RNA, 32 nt, Human
uggcacaugccuguaaucccagcacuuuggga

SEQ ID NO: 255701 - RNA, 32 nt, Human
uggcacaugccuguaaucccagcacuuugggg

SEQ ID NO: 255702 - RNA, 24 nt, Human
uggcacaugccuguaaucccagcu

SEQ ID NO: 255703 - RNA, 32 nt, Human
uggcacaugccuguaaucccagcuacccgggg

SEQ ID NO: 255704 - RNA, 32 nt, Human
uggcacaugccuguaaucccagcuacgucagg

SEQ ID NO: 255705 - RNA, 29 nt, Human
uggcacaugccuguaaucccagcuacuca

SEQ ID NO: 255706 - RNA, 32 nt, Human
uggcacaugccuguaaucccagcuacucagga

SEQ ID NO: 255707 - RNA, 32 nt, Human
uggcacaugccuguaaucccagcuacucaggg

SEQ ID NO: 255708 - RNA, 32 nt, Human
uggcacaugccuguaaucccagcuacucauga

SEQ ID NO: 255709 - RNA, 32 nt, Human
uggcacaugccuguaaucccagcuacuccgga

SEQ ID NO: 255710 - RNA, 32 nt, Human
uggcacaugccuguaaucccagcuacucggag

SEQ ID NO: 255711 - RNA, 32 nt, Human
uggcacaugccuguaaucccagcuacucggga

SEQ ID NO: 255712 - RNA, 32 nt, Human
uggcacaugccuguaaucccagcuacuuggca

SEQ ID NO: 255713 - RNA, 32 nt, Human
uggcacaugccuguaaucccagcuacuuggga

SEQ ID NO: 255714 - RNA, 32 nt, Human
uggcacaugccuguaaucccagcugcucagga

SEQ ID NO: 255715 - RNA, 32 nt, Human
uggcacaugccuguaaucccagcugcuggaga

SEQ ID NO: 255716 - RNA, 24 nt, Human
uggcacaugccuguaaucccaguu

SEQ ID NO: 255717 - RNA, 32 nt, Human
uggcacaugccuguaaucccgguauuugggag

SEQ ID NO: 255718 - RNA, 32 nt, Human
uggcacaugccuguaauccgagugcuuuggga

SEQ ID NO: 255719 - RNA, 32 nt, Human
uggcacaugccuguaauccuagcacuuuggga

SEQ ID NO: 255720 - RNA, 32 nt, Human
uggcacaugccuguaauccuagcuacucggga

SEQ ID NO: 255721 - RNA, 21 nt, Human
uggcacaugccuguaaucgca

SEQ ID NO: 255722 - RNA, 24 nt, Human
uggcacaugccuguaaucgcagcu

SEQ ID NO: 255723 - RNA, 32 nt, Human
uggcacaugccuguaaucgcagcuacucagga

SEQ ID NO: 255724 - RNA, 21 nt, Human
uggcacaugccuguaaucuca

SEQ ID NO: 255725 - RNA, 32 nt, Human
uggcacaugccuguaaucucaacugcuuggga

SEQ ID NO: 255726 - RNA, 32 nt, Human
uggcacaugccuguaaucucagcgacuuggga

SEQ ID NO: 255727 - RNA, 24 nt, Human
uggcacaugccuguaaucucagcu

SEQ ID NO: 255728 - RNA, 32 nt, Human
uggcacaugccuguaaucucagcuacuagaga

SEQ ID NO: 255729 - RNA, 32 nt, Human
uggcacaugccuguaaucucagcuacucagga

SEQ ID NO: 255730 - RNA, 32 nt, Human
uggcacaugccuguaaucucagcuacuuggga

SEQ ID NO: 255731 - RNA, 21 nt, Human
uggcacaugccuguaaugcca

SEQ ID NO: 255732 - RNA, 24 nt, Human
uggcacaugccuguaaugccagcu

SEQ ID NO: 255733 - RNA, 32 nt, Human
uggcacaugccuguaaugccagcuacucggga

SEQ ID NO: 255734 - RNA, 21 nt, Human
uggcacaugccuguaauucca

SEQ ID NO: 255735 - RNA, 24 nt, Human
uggcacaugccuguaauuccagcu

SEQ ID NO: 255736 - RNA, 32 nt, Human
uggcacaugccuguaauuccagcugcuuggga

SEQ ID NO: 255737 - RNA, 21 nt, Human
uggcacaugccuguaguccca

SEQ ID NO: 255738 - RNA, 32 nt, Human
uggcacaugccuguagucccaccuacuuggga

SEQ ID NO: 255739 - RNA, 32 nt, Human
uggcacaugccuguagucccagauacuuggga

SEQ ID NO: 255740 - RNA, 23 nt, Human
uggcacaugccuguagucccagc

SEQ ID NO: 255741 - RNA, 32 nt, Human
uggcacaugccuguagucccagccacuagggc

SEQ ID NO: 255742 - RNA, 24 nt, Human
uggcacaugccuguagucccagcu

SEQ ID NO: 255743 - RNA, 32 nt, Human
uggcacaugccuguagucccagcuacguggga

SEQ ID NO: 255744 - RNA, 32 nt, Human
uggcacaugccuguagucccagcuacucaaga

SEQ ID NO: 255745 - RNA, 32 nt, Human
uggcacaugccuguagucccagcuacuccaga

SEQ ID NO: 255746 - RNA, 32 nt, Human
uggcacaugccuguagucccagcuacucggga

SEQ ID NO: 255747 - RNA, 32 nt, Human
uggcacaugccuguagucccagcuacugggga

SEQ ID NO: 255748 - RNA, 32 nt, Human
uggcacaugccuguagucccagcuacuugaga

SEQ ID NO: 255749 - RNA, 32 nt, Human
uggcacaugccuguaguuccagccacccggga

SEQ ID NO: 255750 - RNA, 24 nt, Human
uggcacaugccuguaguuccagcu

SEQ ID NO: 255751 - RNA, 32 nt, Human
uggcacaugccuguaguuccagcuacucagga

SEQ ID NO: 255752 - RNA, 24 nt, Human
uggcacaugccuguauucccagcu

SEQ ID NO: 255753 - RNA, 32 nt, Human
uggcacaugccuguauucccagcugcuuggga

SEQ ID NO: 255754 - RNA, 21 nt, Human
uggcacaugccugugauccca

SEQ ID NO: 255755 - RNA, 32 nt, Human
uggcacaugccugugaucccagcacuuuggga

SEQ ID NO: 255756 - RNA, 24 nt, Human
uggcacaugccugugaucccagcu

SEQ ID NO: 255757 - RNA, 32 nt, Human
uggcacaugccugugaucccagcuacucagga

SEQ ID NO: 255758 - RNA, 32 nt, Human
uggcacaugccugugaucccagcuacugagga

SEQ ID NO: 255759 - RNA, 32 nt, Human
uggcacaugccuguggccccagccacucugaa

SEQ ID NO: 255760 - RNA, 32 nt, Human
uggcacaugccuguggucccagguacuugaga

SEQ ID NO: 255761 - RNA, 32 nt, Human
uggcacaugccugugguccuagccacuagagg

SEQ ID NO: 255762 - RNA, 32 nt, Human
uggcacaugccuguggucucagcuacuuggga

SEQ ID NO: 255763 - RNA, 32 nt, Human
uggcacaugccugugguuccagccacucagga

SEQ ID NO: 255764 - RNA, 32 nt, Human
uggcacaugccuguugucccagcugcuuggga

SEQ ID NO: 255765 - RNA, 21 nt, Human
uggcacaugcuuguaauccca

SEQ ID NO: 255766 - RNA, 24 nt, Human
uggcacaugcuuguaaucccagcu

SEQ ID NO: 255767 - RNA, 21 nt, Human
uggcacauuccuguaauccca

SEQ ID NO: 255768 - RNA, 24 nt, Human
uggcacauuccuguaaucccagcu

SEQ ID NO: 255769 - RNA, 32 nt, Human
uggcacauuccuguaaucccagcuacucggga

SEQ ID NO: 255770 - RNA, 32 nt, Human
uggcacauuguggcauuuuuccuugccuuccu

SEQ ID NO: 255771 - RNA, 32 nt, Human
uggcacauuucugcuauaaugaagauuaaaua

SEQ ID NO: 255772 - RNA, 32 nt, Human
uggcaccaaaguggaccucuuugcaccuugca

SEQ ID NO: 255773 - RNA, 16 nt, Human
uggcaccaaaugugaa

SEQ ID NO: 255774 - RNA, 32 nt, Human
uggcaccaagccauuggugaaggaucugccuc

SEQ ID NO: 255775 - RNA, 32 nt, Human
uggcaccaagggacaggagaagagaggaaaua

SEQ ID NO: 255776 - RNA, 32 nt, Human
uggcaccaauccaggcagauccaggacuauau

SEQ ID NO: 255777 - RNA, 32 nt, Human
uggcaccacagaggcccucagccgaguccagc

SEQ ID NO: 255778 - RNA, 32 nt, Human
uggcaccacggccggcaccugggggcacacac

SEQ ID NO: 255779 - RNA, 32 nt, Human
uggcaccacuacacuccagcccgggcgacaga

SEQ ID NO: 255780 - RNA, 32 nt, Human
uggcaccacugcacuccagccuaggugacaga

SEQ ID NO: 255781 - RNA, 32 nt, Human
uggcaccacugcacuccagccuggacgacaga

SEQ ID NO: 255782 - RNA, 32 nt, Human
uggcaccacugcacuccagccugggagacaca

SEQ ID NO: 255783 - RNA, 32 nt, Human
uggcaccacugcacuccagccugggagacaga

SEQ ID NO: 255784 - RNA, 32 nt, Human
uggcaccacugcacuccagccugggcaacaga

SEQ ID NO: 255785 - RNA, 32 nt, Human
uggcaccacugcacuccagccugggugacaga

SEQ ID NO: 255786 - RNA, 32 nt, Human
uggcaccacugcacuccagccugggugagaga

SEQ ID NO: 255787 - RNA, 32 nt, Human
uggcaccacugcacuccagcuugggugacaga

SEQ ID NO: 255788 - RNA, 32 nt, Human
uggcaccacugcacuccauccugggugacaga

SEQ ID NO: 255789 - RNA, 32 nt, Human
uggcaccacugcacuccggccuaggcaacgag

SEQ ID NO: 255790 - RNA, 32 nt, Human
uggcaccacugcacuucagccugggugacaga

SEQ ID NO: 255791 - RNA, 32 nt, Human
uggcaccacugcauuccagccugggugacaga

SEQ ID NO: 255792 - RNA, 32 nt, Human
uggcaccacugcccuccagccuggaugacaga

SEQ ID NO: 255793 - RNA, 32 nt, Human
uggcaccacuggacuccagccugggcgacaga

SEQ ID NO: 255794 - RNA, 32 nt, Human
uggcaccacuguacuccagccugggugacaga

SEQ ID NO: 255795 - RNA, 32 nt, Human
uggcaccacuuauugcacuccagcccgggcga

SEQ ID NO: 255796 - RNA, 32 nt, Human
uggcaccagacauuugcagucuggaccagugu

SEQ ID NO: 255797 - RNA, 32 nt, Human
uggcaccagacucuugcuuuugcccaucugga

SEQ ID NO: 255798 - RNA, 32 nt, Human
uggcaccagcaacuacuucuuuauauuguucu

SEQ ID NO: 255799 - RNA, 32 nt, Human
uggcaccagcagugccccagugcccacgguac

SEQ ID NO: 255800 - RNA, 32 nt, Human
uggcaccagcuagucaccucccagaagaaacu

SEQ ID NO: 255801 - RNA, 32 nt, Human
uggcaccagcuccuguggaauguuugguugcu

SEQ ID NO: 255802 - RNA, 31 nt, Human
uggcaccaguuucagggccucacccaagcuu

SEQ ID NO: 255803 - RNA, 23 nt, Human
uggcaccaucucagcucacugca

SEQ ID NO: 255804 - RNA, 23 nt, Human
uggcaccaucucagcucacugcg

SEQ ID NO: 255805 - RNA, 23 nt, Human
uggcaccaucuccgcucacugca

SEQ ID NO: 255806 - RNA, 23 nt, Human
uggcaccaucucggcucacucca

SEQ ID NO: 255807 - RNA, 23 nt, Human
uggcaccaucucggcucacugca

SEQ ID NO: 255808 - RNA, 23 nt, Human
uggcaccaucucgucucacugca

SEQ ID NO: 255809 - RNA, 23 nt, Human
uggcaccaucuuggcucacugca

SEQ ID NO: 255810 - RNA, 23 nt, Human
uggcaccaucuuggcucacuuca

SEQ ID NO: 255811 - RNA, 32 nt, Human
uggcaccaugaccaccugcagccgccaguuca

SEQ ID NO: 255812 - RNA, 32 nt, Human
uggcaccauuacacuccagccugggcaacagu

SEQ ID NO: 255813 - RNA, 32 nt, Human
uggcaccauugcacccuagccugggcaacaga

SEQ ID NO: 255814 - RNA, 32 nt, Human
uggcaccauugcacuccagccugggugacaag

SEQ ID NO: 255815 - RNA, 23 nt, Human
uggcaccauuucggcucacugca

SEQ ID NO: 255816 - RNA, 32 nt, Human
uggcacccaaucucccuguccuucacuguccc

SEQ ID NO: 255817 - RNA, 32 nt, Human
uggcacccaggccacgugggaccuggaggagc

SEQ ID NO: 255818 - RNA, 32 nt, Human
uggcacccaucugcaaauaucucccucucucc

SEQ ID NO: 255819 - RNA, 31 nt, Human
uggcacccaugcaccuuacauuugaaaucua

SEQ ID NO: 255820 - RNA, 32 nt, Human
uggcaccccaacaccggcagggaaccuacccu

SEQ ID NO: 255821 - RNA, 21 nt, Human
uggcacccccaccccaucccu

SEQ ID NO: 255822 - RNA, 32 nt, Human
uggcaccccuacugcuggggaccacaguccug

SEQ ID NO: 255823 - RNA, 32 nt, Human
uggcaccccugcugcugacaggggccgguggg

SEQ ID NO: 255824 - RNA, 21 nt, Human
uggcacccgccuguaauccca

SEQ ID NO: 255825 - RNA, 24 nt, Human
uggcacccgccuguaaucccagcu

SEQ ID NO: 255826 - RNA, 32 nt, Human
uggcacccgguaccuggugacagcacucauca

SEQ ID NO: 255827 - RNA, 32 nt, Human
uggcacccgguuuacagggaggugauugagga

SEQ ID NO: 255828 - RNA, 32 nt, Human
uggcacccuccagcccucagaaguugcguagg

SEQ ID NO: 255829 - RNA, 32 nt, Human
uggcacccuccucugcugucugccugggagcc

SEQ ID NO: 255830 - RNA, 32 nt, Human
uggcacccugguuucgcugagaacaaacucug

SEQ ID NO: 255831 - RNA, 32 nt, Human
uggcaccgagagggcuggagugcaguggcgug

SEQ ID NO: 255832 - RNA, 32 nt, Human
uggcaccgcugcacuccaaccugggcaacaga

SEQ ID NO: 255833 - RNA, 32 nt, Human
uggcaccggaaggccagcagagggcacggccc

SEQ ID NO: 255834 - RNA, 32 nt, Human
uggcaccgggcauccacccaucagcccccgcc

SEQ ID NO: 255835 - RNA, 32 nt, Human
uggcaccguccccucagugcuggucucaugac

SEQ ID NO: 255836 - RNA, 23 nt, Human
uggcaccgucuuggcucacugca

SEQ ID NO: 255837 - RNA, 32 nt, Human
uggcaccgugcuguguggaaacccuccccucu

SEQ ID NO: 255838 - RNA, 32 nt, Human
uggcaccguggcaagaugguaucagagagaaa

SEQ ID NO: 255839 - RNA, 32 nt, Human
uggcaccguuucucccuccacagggccaaagc

SEQ ID NO: 255840 - RNA, 32 nt, Human
uggcaccuagugcagugcugggcacagaguag

SEQ ID NO: 255841 - RNA, 32 nt, Human
uggcaccuauaaucccaguuacucgggaggau

SEQ ID NO: 255842 - RNA, 32 nt, Human
uggcaccuauagucccagcuacucggaaggcu

SEQ ID NO: 255843 - RNA, 32 nt, Human
uggcaccucacagaggugggaccuaagaggac

SEQ ID NO: 255844 - RNA, 32 nt, Human
uggcaccuccacuacucuuuucuguuuguuga

SEQ ID NO: 255845 - RNA, 32 nt, Human
uggcaccuccuuuggugaaaccacggccaaug

SEQ ID NO: 255846 - RNA, 32 nt, Human
uggcaccugcacacuccaucuccugcucacca

SEQ ID NO: 255847 - RNA, 32 nt, Human
uggcaccugcagccacagaucgcuuaggcacc

SEQ ID NO: 255848 - RNA, 32 nt, Human
uggcaccugcaucaccuccuccucuugcagug

SEQ ID NO: 255849 - RNA, 32 nt, Human
uggcaccugcauugaggggagucugggugcau

SEQ ID NO: 255850 - RNA, 32 nt, Human
uggcaccugccagaggggaaagcaggcaugac

SEQ ID NO: 255851 - RNA, 32 nt, Human
uggcaccugccccugaggguccugagacuugg

SEQ ID NO: 255852 - RNA, 21 nt, Human
uggcaccugccuauaauccca

SEQ ID NO: 255853 - RNA, 32 nt, Human
uggcaccugccugggggccauccagcugugug

SEQ ID NO: 255854 - RNA, 21 nt, Human
uggcaccugccuguaauccca

SEQ ID NO: 255855 - RNA, 24 nt, Human
uggcaccugccuguaaucccagcu

SEQ ID NO: 255856 - RNA, 32 nt, Human
uggcaccugccuguaaucccagcuacuuggga

SEQ ID NO: 255857 - RNA, 21 nt, Human
uggcaccugccuguaaucuca

SEQ ID NO: 255858 - RNA, 24 nt, Human
uggcaccugccuguaaucucagcu

SEQ ID NO: 255859 - RNA, 32 nt, Human
uggcaccuggaaaacccacaggucagaguaag

SEQ ID NO: 255860 - RNA, 21 nt, Human
uggcaccuggagagcccuuaa

SEQ ID NO: 255861 - RNA, 32 nt, Human
uggcaccuguaaucccagcauuuugggagacc

SEQ ID NO: 255862 - RNA, 32 nt, Human
uggcaccuguagucccagcuacucaggaggcu

SEQ ID NO: 255863 - RNA, 32 nt, Human
uggcaccuguagucccagcuacucuggaggcu

SEQ ID NO: 255864 - RNA, 32 nt, Human
uggcaccuguagucccagcuacuugggaggcu

SEQ ID NO: 255865 - RNA, 32 nt, Human
uggcaccuguagucuuagcuacucaggaggcu

SEQ ID NO: 255866 - RNA, 32 nt, Human
uggcaccuugacugcagccccaugagacagaa

SEQ ID NO: 255867 - RNA, 32 nt, Human
uggcaccuuggaaagaaaaaugaagaacaacu

SEQ ID NO: 255868 - RNA, 32 nt, Human
uggcacgaaauggcugaagugcaugggucagg

SEQ ID NO: 255869 - RNA, 22 nt, Human
uggcacgaacacggcucacugc

SEQ ID NO: 255870 - RNA, 23 nt, Human
uggcacgaccucugcucgcugca

SEQ ID NO: 255871 - RNA, 24 nt, Human
uggcacgaucacagcucacugcag

SEQ ID NO: 255872 - RNA, 21 nt, Human
uggcacgaucauagcucacug

SEQ ID NO: 255873 - RNA, 23 nt, Human
uggcacgaucauagcucacugua

SEQ ID NO: 255874 - RNA, 24 nt, Human
uggcacgaucauggcucacugcag

SEQ ID NO: 255875 - RNA, 32 nt, Human
uggcacgaucauggcucacugcagccuugacu

SEQ ID NO: 255876 - RNA, 23 nt, Human
uggcacgauccuggcucacugca

SEQ ID NO: 255877 - RNA, 23 nt, Human
uggcacgauccugguucacugca

SEQ ID NO: 255878 - RNA, 23 nt, Human
uggcacgaucgcggcucacugca

SEQ ID NO: 255879 - RNA, 23 nt, Human
uggcacgaucucaacucacugca

SEQ ID NO: 255880 - RNA, 23 nt, Human
uggcacgaucucagcucacugca

SEQ ID NO: 255881 - RNA, 24 nt, Human
uggcacgaucucagcucacugcag

SEQ ID NO: 255882 - RNA, 24 nt, Human
uggcacgaucucagcucauugcag

SEQ ID NO: 255883 - RNA, 23 nt, Human
uggcacgaucucagcucccugca

SEQ ID NO: 255884 - RNA, 23 nt, Human
uggcacgaucucaggucacugca

SEQ ID NO: 255885 - RNA, 23 nt, Human
uggcacgaucuccacgcacuaca

SEQ ID NO: 255886 - RNA, 23 nt, Human
uggcacgaucucgacucacugca

SEQ ID NO: 255887 - RNA, 23 nt, Human
uggcacgaucucgccucacugca

SEQ ID NO: 255888 - RNA, 23 nt, Human
uggcacgaucucggcucaccgca

SEQ ID NO: 255889 - RNA, 23 nt, Human
uggcacgaucucggcucacggca

SEQ ID NO: 255890 - RNA, 21 nt, Human
uggcacgaucucggcucacug

SEQ ID NO: 255891 - RNA, 23 nt, Human
uggcacgaucucggcucacugca

SEQ ID NO: 255892 - RNA, 24 nt, Human
uggcacgaucucggcucacugcag

SEQ ID NO: 255893 - RNA, 23 nt, Human
uggcacgaucucggcugacugca

SEQ ID NO: 255894 - RNA, 23 nt, Human
uggcacgaucucggcuuauggca

SEQ ID NO: 255895 - RNA, 23 nt, Human
uggcacgaucucgguucacugca

SEQ ID NO: 255896 - RNA, 23 nt, Human
uggcacgaucugggcucauugca

SEQ ID NO: 255897 - RNA, 23 nt, Human
uggcacgaucuuagcucacuaca

SEQ ID NO: 255898 - RNA, 23 nt, Human
uggcacgaucuuggcucacucca

SEQ ID NO: 255899 - RNA, 23 nt, Human
uggcacgaucuuggcucacugca

SEQ ID NO: 255900 - RNA, 24 nt, Human
uggcacgaucuuggcucacugcag

SEQ ID NO: 255901 - RNA, 23 nt, Human
uggcacgaucuuggcuuacuaca

SEQ ID NO: 255902 - RNA, 23 nt, Human
uggcacgaucuuggcuuacugca

SEQ ID NO: 255903 - RNA, 23 nt, Human
uggcacgaucuuggcuuucugca

SEQ ID NO: 255904 - RNA, 23 nt, Human
uggcacgaucuugguucacugca

SEQ ID NO: 255905 - RNA, 24 nt, Human
uggcacgauuauggcucauugcag

SEQ ID NO: 255906 - RNA, 32 nt, Human
uggcacgauuauggcucauugcagccucgacu

SEQ ID NO: 255907 - RNA, 23 nt, Human
uggcacgauuuuagcucacugca

SEQ ID NO: 255908 - RNA, 21 nt, Human
uggcacgcaccaguaauccca

SEQ ID NO: 255909 - RNA, 21 nt, Human
uggcacgcaccuauaguccca

SEQ ID NO: 255910 - RNA, 21 nt, Human
uggcacgcaccuguaauccca

SEQ ID NO: 255911 - RNA, 24 nt, Human
uggcacgcaccuguaaucccagcu

SEQ ID NO: 255912 - RNA, 21 nt, Human
uggcacgcaccuguaguccca

SEQ ID NO: 255913 - RNA, 24 nt, Human
uggcacgcaccuguagucccagcu

SEQ ID NO: 255914 - RNA, 32 nt, Human
uggcacgcaccuuguaggcuccugcccucacc

SEQ ID NO: 255915 - RNA, 32 nt, Human
uggcacgccucccgaggagggguggguuuggg

SEQ ID NO: 255916 - RNA, 21 nt, Human
uggcacgcgccuaugauccca

SEQ ID NO: 255917 - RNA, 21 nt, Human
uggcacgcgccuguaauacca

SEQ ID NO: 255918 - RNA, 24 nt, Human
uggcacgcgccuguaauaccagcu

SEQ ID NO: 255919 - RNA, 21 nt, Human
uggcacgcgccuguaauccca

SEQ ID NO: 255920 - RNA, 24 nt, Human
uggcacgcgccuguaaucccagcu

SEQ ID NO: 255921 - RNA, 32 nt, Human
uggcacgcgccuguaaucccagcuacuuggga

SEQ ID NO: 255922 - RNA, 21 nt, Human
uggcacgcgccuguaguccca

SEQ ID NO: 255923 - RNA, 24 nt, Human
uggcacgcgccuguagucccagcu

SEQ ID NO: 255924 - RNA, 25 nt, Human
uggcacgcuccagcagcccuccucu

SEQ ID NO: 255925 - RNA, 21 nt, Human
uggcacgcuccuguaguccca

SEQ ID NO: 255926 - RNA, 24 nt, Human
uggcacgcuccuguagucccagcu

SEQ ID NO: 255927 - RNA, 20 nt, Human
uggcacgcucuguaauccca

SEQ ID NO: 255928 - RNA, 32 nt, Human
uggcacggauacaauaaaagacuuuuacaaac

SEQ ID NO: 255929 - RNA, 32 nt, Human
uggcacggcuaugccaucacugauuucugccc

SEQ ID NO: 255930 - RNA, 32 nt, Human
uggcacgggcagccaccauccuggccucaccu

SEQ ID NO: 255931 - RNA, 32 nt, Human
uggcacggggcagaggugccuggagcccacgc

SEQ ID NO: 255932 - RNA, 23 nt, Human
uggcacggucucaccucacugca

SEQ ID NO: 255933 - RNA, 23 nt, Human
uggcacgguggcucacgccugua

SEQ ID NO: 255934 - RNA, 21 nt, Human
uggcacguaccuguaaucuca

SEQ ID NO: 255935 - RNA, 24 nt, Human
uggcacguaccuguaaucucagcu

SEQ ID NO: 255936 - RNA, 21 nt, Human
uggcacgugccuauaguccca

SEQ ID NO: 255937 - RNA, 21 nt, Human
uggcacgugccuguaauccca

SEQ ID NO: 255938 - RNA, 24 nt, Human
uggcacgugccuguaaucccagcu

SEQ ID NO: 255939 - RNA, 32 nt, Human
uggcacgugccuguaaucccagcuaccuggga

SEQ ID NO: 255940 - RNA, 32 nt, Human
uggcacgugccuguaaucccagcuacucagga

SEQ ID NO: 255941 - RNA, 32 nt, Human
uggcacgugccuguaaucccagcuacucgcaa

SEQ ID NO: 255942 - RNA, 32 nt, Human
uggcacgugccuguaaucccagcuacucggga

SEQ ID NO: 255943 - RNA, 24 nt, Human
uggcacgugccuguaaucccaguu

SEQ ID NO: 255944 - RNA, 32 nt, Human
uggcacgugccuguaaucccaguuacucagga

SEQ ID NO: 255945 - RNA, 32 nt, Human
uggcacgugccuguaaucccaguuacuuggga

SEQ ID NO: 255946 - RNA, 32 nt, Human
uggcacgugccuguaaucucagcuacucagga

SEQ ID NO: 255947 - RNA, 21 nt, Human
uggcacgugccuguaauucca

SEQ ID NO: 255948 - RNA, 24 nt, Human
uggcacgugccuguaauuccagcu

SEQ ID NO: 255949 - RNA, 32 nt, Human
uggcacgugccuguaauuccagcuacuuggga

SEQ ID NO: 255950 - RNA, 24 nt, Human
uggcacgugccuguaauuucagcu

SEQ ID NO: 255951 - RNA, 21 nt, Human
uggcacgugccuguagcccca

SEQ ID NO: 255952 - RNA, 24 nt, Human
uggcacgugccuguagccccagcu

SEQ ID NO: 255953 - RNA, 32 nt, Human
uggcacgugccuguagccccagcuacuuggga

SEQ ID NO: 255954 - RNA, 21 nt, Human
uggcacgugccuguaguccca

SEQ ID NO: 255955 - RNA, 24 nt, Human
uggcacgugccuguagucccagcu

SEQ ID NO: 255956 - RNA, 32 nt, Human
uggcacgugccuguagucccagcuacucagga

SEQ ID NO: 255957 - RNA, 32 nt, Human
uggcacgugccuguagucccagcuacuccgga

SEQ ID NO: 255958 - RNA, 32 nt, Human
uggcacgugccuguagucccagcuacucggga

SEQ ID NO: 255959 - RNA, 32 nt, Human
uggcacgugccuguaguccuuccuacuugaag

SEQ ID NO: 255960 - RNA, 32 nt, Human
uggcacgugccuguagugccggcuacucagga

SEQ ID NO: 255961 - RNA, 24 nt, Human
uggcacgugccuguaguuccagcu

SEQ ID NO: 255962 - RNA, 32 nt, Human
uggcacgugccuguaguuccagcuacuuggga

SEQ ID NO: 255963 - RNA, 21 nt, Human
uggcacgugccugugauccca

SEQ ID NO: 255964 - RNA, 24 nt, Human
uggcacgugccugugaucccagcu

SEQ ID NO: 255965 - RNA, 32 nt, Human
uggcacgugggcggagacugaguggcugggca

SEQ ID NO: 255966 - RNA, 21 nt, Human
uggcacgugucuguaauccca

SEQ ID NO: 255967 - RNA, 24 nt, Human
uggcacgugucuguaaucccagcu

SEQ ID NO: 255968 - RNA, 23 nt, Human
uggcacguucucagcucacugca

SEQ ID NO: 255969 - RNA, 18 nt, Human
uggcacuacuugguccca

SEQ ID NO: 255970 - RNA, 32 nt, Human
uggcacuagcagggguguggagacaggccccc

SEQ ID NO: 255971 - RNA, 32 nt, Human
uggcacuaucaccaccucucugccuucaugcc

SEQ ID NO: 255972 - RNA, 23 nt, Human
uggcacuaucccaacucacugca

SEQ ID NO: 255973 - RNA, 23 nt, Human
uggcacuaucucagcucacugca

SEQ ID NO: 255974 - RNA, 23 nt, Human
uggcacuaucuuggcucacugca

SEQ ID NO: 255975 - RNA, 23 nt, Human
uggcacuaucuuggcucauugca

SEQ ID NO: 255976 - RNA, 23 nt, Human
uggcacuaucuuggcuuacugca

SEQ ID NO: 255977 - RNA, 32 nt, Human
uggcacuaugugcagugagccaccauggagga

SEQ ID NO: 255978 - RNA, 32 nt, Human
uggcacucacugcagacuuccucuuucaaggg

SEQ ID NO: 255979 - RNA, 32 nt, Human
uggcacuccagccuggacaacaagagcgaaau

SEQ ID NO: 255980 - RNA, 32 nt, Human
uggcacuccagccugggcaacagagugagacc

SEQ ID NO: 255981 - RNA, 32 nt, Human
uggcacucccagcccggggccugcugccucca

SEQ ID NO: 255982 - RNA, 32 nt, Human
uggcacucuggaauuguuucaguuaagucauu

SEQ ID NO: 255983 - RNA, 32 nt, Human
uggcacucuggaauuguuuuaguuaagucauu

SEQ ID NO: 255984 - RNA, 32 nt, Human
uggcacucuguucaaccaacuguggauggaaa

SEQ ID NO: 255985 - RNA, 32 nt, Human
uggcacucuucucaguguccccaaacucccug

SEQ ID NO: 255986 - RNA, 32 nt, Human
uggcacucuuguuugcuuucugcuucacuauc

SEQ ID NO: 255987 - RNA, 32 nt, Human
uggcacugaacaguaagcggcuccaggccucc

SEQ ID NO: 255988 - RNA, 32 nt, Human
uggcacugagcaugccaucugcuuuaggcccu

SEQ ID NO: 255989 - RNA, 24 nt, Human
uggcacugaucucggcucacugca

SEQ ID NO: 255990 - RNA, 21 nt, Human
uggcacugcaagccacacggu

SEQ ID NO: 255991 - RNA, 32 nt, Human
uggcacugcacgaggggccaggagagcagcag

SEQ ID NO: 255992 - RNA, 32 nt, Human
uggcacugcacuccagccugggcaacagagug

SEQ ID NO: 255993 - RNA, 32 nt, Human
uggcacugcacuccagucugggugacagagug

SEQ ID NO: 255994 - RNA, 22 nt, Human
uggcacugcagacgccacccag

SEQ ID NO: 255995 - RNA, 21 nt, Human
uggcacugcaggccaggccag

SEQ ID NO: 255996 - RNA, 19 nt, Human
uggcacugcccccucccag

SEQ ID NO: 255997 - RNA, 32 nt, Human
uggcacugccuaucugcacuuccaggugcccc

SEQ ID NO: 255998 - RNA, 32 nt, Human
uggcacugcgacugcccagucuggccugcgcu

SEQ ID NO: 255999 - RNA, 32 nt, Human
uggcacugcucccucugaagugcagugggauc

SEQ ID NO: 256000 - RNA, 32 nt, Human
uggcacugcugaggcacauggcagagcaggac

SEQ ID NO: 256001 - RNA, 32 nt, Human
uggcacugcugcacuccagccugcgggacaga

SEQ ID NO: 256002 - RNA, 23 nt, Human
uggcacuggagccacccauuuua

SEQ ID NO: 256003 - RNA, 32 nt, Human
uggcacuggcaauucaagacugccuuuccuac

SEQ ID NO: 256004 - RNA, 32 nt, Human
uggcacuggcagagaaggauaggaguggaaug

SEQ ID NO: 256005 - RNA, 16 nt, Human
uggcacugggcccgca

SEQ ID NO: 256006 - RNA, 19 nt, Human
uggcacugucagcccccag

SEQ ID NO: 256007 - RNA, 32 nt, Human
uggcacugucucacuuggccaaguuugcagcc

SEQ ID NO: 256008 - RNA, 32 nt, Human
uggcacuguggcucuggcgccuggugacuucu

SEQ ID NO: 256009 - RNA, 32 nt, Human
uggcacuguugcuggggugacggcagaauuca

SEQ ID NO: 256010 - RNA, 21 nt, Human
uggcacuuaccuguaguccca

SEQ ID NO: 256011 - RNA, 24 nt, Human
uggcacuuaccuguagucccagcu

SEQ ID NO: 256012 - RNA, 24 nt, Human
uggcacuuagguccaaggucucca

SEQ ID NO: 256013 - RNA, 32 nt, Human
uggcacuuauuucuuccaucugccucagaguu

SEQ ID NO: 256014 - RNA, 32 nt, Human
uggcacuuccaagcuggcaucuugccccuuga

SEQ ID NO: 256015 - RNA, 32 nt, Human
uggcacuuccuuggacuacuuguuucguaaag

SEQ ID NO: 256016 - RNA, 32 nt, Human
uggcacuucgagaaggaaguggagaguaaaga

SEQ ID NO: 256017 - RNA, 21 nt, Human
uggcacuugccuguaauccca

SEQ ID NO: 256018 - RNA, 24 nt, Human
uggcacuugccuguaaucccaucu

SEQ ID NO: 256019 - RNA, 32 nt, Human
uggcacuugccuguagucucagcuacuuagga

SEQ ID NO: 256020 - RNA, 20 nt, Human
uggcacuugggacuuccaua

SEQ ID NO: 256021 - RNA, 32 nt, Human
uggcacuuuaugcugaccaucgguaacggaca

SEQ ID NO: 256022 - RNA, 32 nt, Human
uggcacuuugagggggucucuaccuccccauc

SEQ ID NO: 256023 - RNA, 32 nt, Human
uggcacuuugcucagcacgucuucccaggccu

SEQ ID NO: 256024 - RNA, 32 nt, Human
uggcacuuugggaggcugaggcgggcagaucg

SEQ ID NO: 256025 - RNA, 20 nt, Human
uggcagaaacuuugguccca

SEQ ID NO: 256026 - RNA, 20 nt, Human
uggcagaaaggcucaguaag

SEQ ID NO: 256027 - RNA, 32 nt, Human
uggcagaaaucagcuagacgcuauaccgugga

SEQ ID NO: 256028 - RNA, 32 nt, Human
uggcagaacacugcacuccaauuuccucgggc

SEQ ID NO: 256029 - RNA, 32 nt, Human
uggcagaacagucacuguccuuguaaaguuuu

SEQ ID NO: 256030 - RNA, 32 nt, Human
uggcagaaccucggcucucaggagguccuugu

SEQ ID NO: 256031 - RNA, 27 nt, Human
uggcagaagagggagggagggagggcc

SEQ ID NO: 256032 - RNA, 21 nt, Human
uggcagaagagugacaaaauu

SEQ ID NO: 256033 - RNA, 32 nt, Human
uggcagaaggugaaagagguuguguugacugu

SEQ ID NO: 256034 - RNA, 32 nt, Human
uggcagaaguugcuucacagaggggaacaguu

SEQ ID NO: 256035 - RNA, 17 nt, Human
uggcagaaucuagcaug

SEQ ID NO: 256036 - RNA, 32 nt, Human
uggcagacaccaggaaggagaagaggaaccau

SEQ ID NO: 256037 - RNA, 32 nt, Human
uggcagacaccaggaaggaggagaggaaccau

SEQ ID NO: 256038 - RNA, 21 nt, Human
uggcagacaccugugguccca

SEQ ID NO: 256039 - RNA, 32 nt, Human
uggcagacagcccaggacaacgagagggacug

SEQ ID NO: 256040 - RNA, 18 nt, Human
uggcagaccaaauguaga

SEQ ID NO: 256041 - RNA, 32 nt, Human
uggcagaccugggagagccagggcaggguuuu

SEQ ID NO: 256042 - RNA, 32 nt, Human
uggcagacucagcccacugccuugccagucuu

SEQ ID NO: 256043 - RNA, 29 nt, Human
uggcagacucugugugugcccauggaaga

SEQ ID NO: 256044 - RNA, 18 nt, Human
uggcagacuuaaaguaaa

SEQ ID NO: 256045 - RNA, 25 nt, Human
uggcagagaaggcagaccgaagaga

SEQ ID NO: 256046 - RNA, 32 nt, Human
uggcagagagacaugcuuguuccucuggauug

SEQ ID NO: 256047 - RNA, 32 nt, Human
uggcagagagagaaguuggcuagcauggaauc

SEQ ID NO: 256048 - RNA, 32 nt, Human
uggcagagagccagggcagagagagacuggac

SEQ ID NO: 256049 - RNA, 23 nt, Human
uggcagagagggcucccagcaga

SEQ ID NO: 256050 - RNA, 32 nt, Human
uggcagagagugagguaguggcgagaaagcug

SEQ ID NO: 256051 - RNA, 32 nt, Human
uggcagagaucgugggcuggcuguguccacgu

SEQ ID NO: 256052 - RNA, 32 nt, Human
uggcagagaugggguuucaccauauuggccag

SEQ ID NO: 256053 - RNA, 32 nt, Human
uggcagagcaacuugcacaacagccuggaccu

SEQ ID NO: 256054 - RNA, 28 nt, Human
uggcagagcaagagggggaaagcaggau

SEQ ID NO: 256055 - RNA, 21 nt, Human
uggcagagcugggagcaagau

SEQ ID NO: 256056 - RNA, 32 nt, Human
uggcagagcugggagcaagauggacagagggg

SEQ ID NO: 256057 - RNA, 22 nt, Human
uggcagagcuuugacgguuuua

SEQ ID NO: 256058 - RNA, 32 nt, Human
uggcagaggaagcacagcucagguucccacac

SEQ ID NO: 256059 - RNA, 32 nt, Human
uggcagaggaagcacagcucggguucccacac

SEQ ID NO: 256060 - RNA, 32 nt, Human
uggcagaggagaagaaucgcuugaaccuggaa

SEQ ID NO: 256061 - RNA, 32 nt, Human
uggcagaggagguggaguucuuccaugcagga

SEQ ID NO: 256062 - RNA, 32 nt, Human
uggcagaggcacaugcagacccugccuggagc

SEQ ID NO: 256063 - RNA, 32 nt, Human
uggcagaggcaggauaagucaccugcacauga

SEQ ID NO: 256064 - RNA, 32 nt, Human
uggcagaggccaguaaauacaguuccuagaag

SEQ ID NO: 256065 - RNA, 21 nt, Human
uggcagaggccuguaauccca

SEQ ID NO: 256066 - RNA, 32 nt, Human
uggcagaggccuguaaucccagcuacuuggga

SEQ ID NO: 256067 - RNA, 19 nt, Human
uggcagaggcugagaacag

SEQ ID NO: 256068 - RNA, 21 nt, Human
uggcagagggaauugguucca

SEQ ID NO: 256069 - RNA, 32 nt, Human
uggcagagggagaggacaggaggaggagccuu

SEQ ID NO: 256070 - RNA, 32 nt, Human
uggcagagggcacccugggauaccugguagaa

SEQ ID NO: 256071 - RNA, 23 nt, Human
uggcagaggggaugucuggcuug

SEQ ID NO: 256072 - RNA, 32 nt, Human
uggcagaggggccguggcaggagcagguggug

SEQ ID NO: 256073 - RNA, 32 nt, Human
uggcagaggggcuggugcccuggagaaaauaa

SEQ ID NO: 256074 - RNA, 21 nt, Human
uggcagagggggccuggucuc

SEQ ID NO: 256075 - RNA, 32 nt, Human
uggcagagggguaaggagagccuucuuggcuu

SEQ ID NO: 256076 - RNA, 21 nt, Human
uggcagaggggucucgccaaa

SEQ ID NO: 256077 - RNA, 20 nt, Human
uggcagagggucucaggaaa

SEQ ID NO: 256078 - RNA, 32 nt, Human
uggcagaggugaaggacauggagcagcugcug

SEQ ID NO: 256079 - RNA, 17 nt, Human
uggcagaguaauguaaa

SEQ ID NO: 256080 - RNA, 22 nt, Human
uggcagaguagaguuccagggu

SEQ ID NO: 256081 - RNA, 32 nt, Human
uggcagaguggggcuuggaaccggguagccug

SEQ ID NO: 256082 - RNA, 22 nt, Human
uggcagaguucuauaauguaaa

SEQ ID NO: 256083 - RNA, 32 nt, Human
uggcagauacaaaagacaguggcuuuuaucau

SEQ ID NO: 256084 - RNA, 32 nt, Human
uggcagauaccugccuuggccugcuggcugcu

SEQ ID NO: 256085 - RNA, 32 nt, Human
uggcagauauagaccugcagcuaacuggauuu

SEQ ID NO: 256086 - RNA, 16 nt, Human
uggcagaugcaguaga

SEQ ID NO: 256087 - RNA, 19 nt, Human
uggcagaugucccggcgaa

SEQ ID NO: 256088 - RNA, 19 nt, Human
uggcagauuacacauguaa

SEQ ID NO: 256089 - RNA, 32 nt, Human
uggcagauucaaucacuugccuuucucauucu

SEQ ID NO: 256090 - RNA, 32 nt, Human
uggcagauucugcuuuccuugauccuuuguuu

SEQ ID NO: 256091 - RNA, 18 nt, Human
uggcagauuucaaguaaa

SEQ ID NO: 256092 - RNA, 18 nt, Human
uggcagauuuugguguaa

SEQ ID NO: 256093 - RNA, 32 nt, Human
uggcagcaaaacuaggaaaaugggaagaaauu

SEQ ID NO: 256094 - RNA, 32 nt, Human
uggcagcaaacaagauggaagcagggaucaaa

SEQ ID NO: 256095 - RNA, 32 nt, Human
uggcagcaaagaaguccaacugugcugguacc

SEQ ID NO: 256096 - RNA, 20 nt, Human
uggcagcaaaucuuugugca

SEQ ID NO: 256097 - RNA, 23 nt, Human
uggcagcaaggggucuuugugca

SEQ ID NO: 256098 - RNA, 32 nt, Human
uggcagcaagugugucauucacacacaucauu

SEQ ID NO: 256099 - RNA, 24 nt, Human
uggcagcaaguuaaauuuuuguca

SEQ ID NO: 256100 - RNA, 22 nt, Human
uggcagcacaagauccugcaga

SEQ ID NO: 256101 - RNA, 32 nt, Human
uggcagcacagcccagggccugcaugggggca

SEQ ID NO: 256102 - RNA, 32 nt, Human
uggcagcaccacugccugcucccuggaaggua

SEQ ID NO: 256103 - RNA, 32 nt, Human
uggcagcacccaggcauaacuggagauugcac

SEQ ID NO: 256104 - RNA, 32 nt, Human
uggcagcaccgggcuggacugcccugaucccu

SEQ ID NO: 256105 - RNA, 32 nt, Human
uggcagcaccuucaucuuucugaccuccuccu

SEQ ID NO: 256106 - RNA, 32 nt, Human
uggcagcacgccugccuugcucugccccaugc

SEQ ID NO: 256107 - RNA, 32 nt, Human
uggcagcacggcacuucagccuaggugacaga

SEQ ID NO: 256108 - RNA, 32 nt, Human
uggcagcacugagacuugaaccagggaauugu

SEQ ID NO: 256109 - RNA, 32 nt, Human
uggcagcagaaagagaaagaacagaaaagaga

SEQ ID NO: 256110 - RNA, 32 nt, Human
uggcagcagaggcuccucugauggcugacauc

SEQ ID NO: 256111 - RNA, 32 nt, Human
uggcagcagccgcggcggcuccgcgagcucgc

SEQ ID NO: 256112 - RNA, 32 nt, Human
uggcagcagcugcaccugggaggcaggcaggc

SEQ ID NO: 256113 - RNA, 32 nt, Human
uggcagcaggaggcacgcacccagagaaugcu

SEQ ID NO: 256114 - RNA, 32 nt, Human
uggcagcaggaggcagacagguuucugggcag

SEQ ID NO: 256115 - RNA, 32 nt, Human
uggcagcaggcagaugcacaccggaccugguc

SEQ ID NO: 256116 - RNA, 32 nt, Human
uggcagcagggaggaagcaggagugcccccuc

SEQ ID NO: 256117 - RNA, 32 nt, Human
uggcagcagucgagagagagugugugaaggag

SEQ ID NO: 256118 - RNA, 32 nt, Human
uggcagcauaaauauuaugauaagcuaaaagc

SEQ ID NO: 256119 - RNA, 32 nt, Human
uggcagcauggagcugaagagaggaaagaccu

SEQ ID NO: 256120 - RNA, 32 nt, Human
uggcagccaagaacagauaggaagggauuggc

SEQ ID NO: 256121 - RNA, 32 nt, Human
uggcagccacacacaggcggccagggcggcca

SEQ ID NO: 256122 - RNA, 32 nt, Human
uggcagccaccgcggcccucaucccccugcac

SEQ ID NO: 256123 - RNA, 32 nt, Human
uggcagccaguccggcuaaguggagcucagag

SEQ ID NO: 256124 - RNA, 32 nt, Human
uggcagccauugauaggaauucuaucacuaua

SEQ ID NO: 256125 - RNA, 21 nt, Human
uggcagccauuucucccagca

SEQ ID NO: 256126 - RNA, 32 nt, Human
uggcagcccagccugagaccguugcauugagg

SEQ ID NO: 256127 - RNA, 32 nt, Human
uggcagccccagggcaauagcucucagaucuc

SEQ ID NO: 256128 - RNA, 32 nt, Human
uggcagcccgagacccagaguuuguagaguuu

SEQ ID NO: 256129 - RNA, 32 nt, Human
uggcagcccugaggaagaugguugcagaggaa

SEQ ID NO: 256130 - RNA, 21 nt, Human
uggcagcccugccucauauca

SEQ ID NO: 256131 - RNA, 32 nt, Human
uggcagcccuggaagugcaguguuggggcgau

SEQ ID NO: 256132 - RNA, 32 nt, Human
uggcagcccuucuggaacccuggaccuggacc

SEQ ID NO: 256133 - RNA, 32 nt, Human
uggcagccgaggcugcagcccggcccagggcg

SEQ ID NO: 256134 - RNA, 22 nt, Human
uggcagccgggagcccagcgaa

SEQ ID NO: 256135 - RNA, 32 nt, Human
uggcagccuacuagggaccuggggaagcaaaa

SEQ ID NO: 256136 - RNA, 20 nt, Human
uggcagccucagcucccgca

SEQ ID NO: 256137 - RNA, 32 nt, Human
uggcagccucaguuggccccuggcagaggaac

SEQ ID NO: 256138 - RNA, 32 nt, Human
uggcagccuccaccaguucccugggcugcuau

SEQ ID NO: 256139 - RNA, 32 nt, Human
uggcagccuccacccuuucucuaugccugcaa

SEQ ID NO: 256140 - RNA, 21 nt, Human
uggcagccuccaucuccagca

SEQ ID NO: 256141 - RNA, 32 nt, Human
uggcagccuccccucagucuuccuccacccgc

SEQ ID NO: 256142 - RNA, 32 nt, Human
uggcagccuccuggugcccaaggacugaaaac

SEQ ID NO: 256143 - RNA, 21 nt, Human
uggcagccucuacucccagca

SEQ ID NO: 256144 - RNA, 32 nt, Human
uggcagccucuagcccucagcuucccacggaa

SEQ ID NO: 256145 - RNA, 32 nt, Human
uggcagccucuccaggcccagcuccugcaucu

SEQ ID NO: 256146 - RNA, 32 nt, Human
uggcagccuggcagagguuugcagacaggcug

SEQ ID NO: 256147 - RNA, 32 nt, Human
uggcagccuucagggauaugaggugaguccuu

SEQ ID NO: 256148 - RNA, 32 nt, Human
uggcagccuucccgccacaccaaccaaccaau

SEQ ID NO: 256149 - RNA, 32 nt, Human
uggcagccuuucucuaucaagggucagacggu

SEQ ID NO: 256150 - RNA, 32 nt, Human
uggcagcgaugauggggagacgccuggaagcu

SEQ ID NO: 256151 - RNA, 32 nt, Human
uggcagcgcauagaaggccagcagggagacug

SEQ ID NO: 256152 - RNA, 32 nt, Human
uggcagcggaggcagagagggagaggagacaa

SEQ ID NO: 256153 - RNA, 32 nt, Human
uggcagcggcagcccacgccucccagggauug

SEQ ID NO: 256154 - RNA, 32 nt, Human
uggcagcggcggccucccccagccuggacccc

SEQ ID NO: 256155 - RNA, 32 nt, Human
uggcagcgucggcagcagaggaugccccaggc

SEQ ID NO: 256156 - RNA, 32 nt, Human
uggcagcguggccgccuccuggaguuggcccu

SEQ ID NO: 256157 - RNA, 32 nt, Human
uggcagcucacacccagacucacuggccacac

SEQ ID NO: 256158 - RNA, 32 nt, Human
uggcagcucacacuuguaaucacugcacuuuc

SEQ ID NO: 256159 - RNA, 32 nt, Human
uggcagcucacacuuguaaucacugcacuuug

SEQ ID NO: 256160 - RNA, 32 nt, Human
uggcagcucacugaucucuugccucugcugau

SEQ ID NO: 256161 - RNA, 32 nt, Human
uggcagcucagaagguugguggcaccuuauca

SEQ ID NO: 256162 - RNA, 32 nt, Human
uggcagcuccacugccgucaacuccuguucuc

SEQ ID NO: 256163 - RNA, 32 nt, Human
uggcagcuccccuccaguuucagugucacugu

SEQ ID NO: 256164 - RNA, 32 nt, Human
uggcagcuccgcuaacuccaucauggcucauu

SEQ ID NO: 256165 - RNA, 32 nt, Human
uggcagcucgaagaagcugucggggcuugcag

SEQ ID NO: 256166 - RNA, 32 nt, Human
uggcagcucugaccaccucuggccccaggccc

SEQ ID NO: 256167 - RNA, 32 nt, Human
uggcagcucugccacgucaccgccugccuggc

SEQ ID NO: 256168 - RNA, 18 nt, Human
uggcagcucuugguccua

SEQ ID NO: 256169 - RNA, 23 nt, Human
uggcagcugaagaucccaguaga

SEQ ID NO: 256170 - RNA, 19 nt, Human
uggcagcugacuugguucu

SEQ ID NO: 256171 - RNA, 32 nt, Human
uggcagcugccugcauuucaggaaaagaggag

SEQ ID NO: 256172 - RNA, 32 nt, Human
uggcagcuucccaagguucuuccagagauuca

SEQ ID NO: 256173 - RNA, 32 nt, Human
uggcagcuuggaccuguuggaagcaguagagu

SEQ ID NO: 256174 - RNA, 32 nt, Human
uggcagcuugugauuuagaaaaguggguucau

SEQ ID NO: 256175 - RNA, 32 nt, Human
uggcagcuuugcaaauggcaucaacuggaagu

SEQ ID NO: 256176 - RNA, 32 nt, Human
uggcaggacacugagggccugccuguggugug

SEQ ID NO: 256177 - RNA, 32 nt, Human
uggcaggacauggagagagggagggauuccaa

SEQ ID NO: 256178 - RNA, 21 nt, Human
uggcaggacgacucacugcgg

SEQ ID NO: 256179 - RNA, 32 nt, Human
uggcaggacugaacuugaacaccagaaacaac

SEQ ID NO: 256180 - RNA, 32 nt, Human
uggcaggagaaaagcagacggaaguggcucca

SEQ ID NO: 256181 - RNA, 32 nt, Human
uggcaggagaggggcauuuggaggcucccucc

SEQ ID NO: 256182 - RNA, 32 nt, Human
uggcaggagcagcugggaugcagggcaccaag

SEQ ID NO: 256183 - RNA, 32 nt, Human
uggcaggagccagacgcugcugugcugccacg

SEQ ID NO: 256184 - RNA, 32 nt, Human
uggcaggagcccacccucccucugccauuacc

SEQ ID NO: 256185 - RNA, 32 nt, Human
uggcaggagcggugagaucacugccucacggc

SEQ ID NO: 256186 - RNA, 32 nt, Human
uggcaggagcucugguaccugggaagcuggau

SEQ ID NO: 256187 - RNA, 18 nt, Human
uggcaggaggagccgcag

SEQ ID NO: 256188 - RNA, 32 nt, Human
uggcaggaggcagacuugcagagcuuguuuug

SEQ ID NO: 256189 - RNA, 32 nt, Human
uggcaggagucccugaggacgggagcugccua

SEQ ID NO: 256190 - RNA, 21 nt, Human
uggcaggagugucccagcaag

SEQ ID NO: 256191 - RNA, 32 nt, Human
uggcaggaguuggaagugugugaucugugggc

SEQ ID NO: 256192 - RNA, 32 nt, Human
uggcaggauagaagcagcggcucacuuggacu

SEQ ID NO: 256193 - RNA, 32 nt, Human
uggcaggauauuuguguucuuccuuuaaccaa

SEQ ID NO: 256194 - RNA, 32 nt, Human
uggcaggaucacagcuuacugcagccuugacc

SEQ ID NO: 256195 - RNA, 23 nt, Human
uggcaggaucucagaucacugca

SEQ ID NO: 256196 - RNA, 23 nt, Human
uggcaggaucucagcucacugca

SEQ ID NO: 256197 - RNA, 24 nt, Human
uggcaggaucucagcuuacugcag

SEQ ID NO: 256198 - RNA, 32 nt, Human
uggcaggaucucagcuuacugcagcuuccauc

SEQ ID NO: 256199 - RNA, 23 nt, Human
uggcaggaucucggcucacugca

SEQ ID NO: 256200 - RNA, 19 nt, Human
uggcaggaugauugguucu

SEQ ID NO: 256201 - RNA, 32 nt, Human
uggcaggaugguggagguuucucaaggagcug

SEQ ID NO: 256202 - RNA, 32 nt, Human
uggcaggcaacuccaugaucugaccccgguua

SEQ ID NO: 256203 - RNA, 21 nt, Human
uggcaggcaccuguaauccca

SEQ ID NO: 256204 - RNA, 24 nt, Human
uggcaggcaccuguaaucccagcu

SEQ ID NO: 256205 - RNA, 21 nt, Human
uggcaggcaccuguaaucuca

SEQ ID NO: 256206 - RNA, 21 nt, Human
uggcaggcaccuguaguccca

SEQ ID NO: 256207 - RNA, 24 nt, Human
uggcaggcaccuguagucccagcu

SEQ ID NO: 256208 - RNA, 32 nt, Human
uggcaggcaggagccccgcccucccaggcaca

SEQ ID NO: 256209 - RNA, 21 nt, Human
uggcaggcaguaucgauuuua

SEQ ID NO: 256210 - RNA, 32 nt, Human
uggcaggcauacagcacccucuaccuccgugg

SEQ ID NO: 256211 - RNA, 32 nt, Human
uggcaggccacuggcaugugcugaguagcgca

SEQ ID NO: 256212 - RNA, 21 nt, Human
uggcaggccccuguaauccca

SEQ ID NO: 256213 - RNA, 24 nt, Human
uggcaggccccuguaaucccagcu

SEQ ID NO: 256214 - RNA, 32 nt, Human
uggcaggcccuggaggaugagaagguggcagg

SEQ ID NO: 256215 - RNA, 32 nt, Human
uggcaggccuuccugaguuagauuuguaguug

SEQ ID NO: 256216 - RNA, 21 nt, Human
uggcaggcgccuauaauccca

SEQ ID NO: 256217 - RNA, 21 nt, Human
uggcaggcgccuauaguccca

SEQ ID NO: 256218 - RNA, 19 nt, Human
uggcaggcgccuguaaucc

SEQ ID NO: 256219 - RNA, 23 nt, Human
uggcaggcgccuguaauccagcu

SEQ ID NO: 256220 - RNA, 21 nt, Human
uggcaggcgccuguaauccca

SEQ ID NO: 256221 - RNA, 24 nt, Human
uggcaggcgccuguaaucccagcu

SEQ ID NO: 256222 - RNA, 32 nt, Human
uggcaggcgccuguaaucccagcuacuuggaa

SEQ ID NO: 256223 - RNA, 32 nt, Human
uggcaggcgccuguaaucccagcuacuuggga

SEQ ID NO: 256224 - RNA, 32 nt, Human
uggcaggcgccuguaaucccagcuauuuggga

SEQ ID NO: 256225 - RNA, 21 nt, Human
uggcaggcgccuguaguccca

SEQ ID NO: 256226 - RNA, 32 nt, Human
uggcaggcgccuguagucccagcacuuuggga

SEQ ID NO: 256227 - RNA, 24 nt, Human
uggcaggcgccuguagucccagcu

SEQ ID NO: 256228 - RNA, 32 nt, Human
uggcaggcgccuguaucccagcuacuugggag

SEQ ID NO: 256229 - RNA, 21 nt, Human
uggcaggcgccugugguccca

SEQ ID NO: 256230 - RNA, 32 nt, Human
uggcaggcgcuuccgucggcagcacuguguuu

SEQ ID NO: 256231 - RNA, 21 nt, Human
uggcaggcgucuguaauccca

SEQ ID NO: 256232 - RNA, 24 nt, Human
uggcaggcgucuguaaucccagcu

SEQ ID NO: 256233 - RNA, 18 nt, Human
uggcaggcuauaauccca

SEQ ID NO: 256234 - RNA, 32 nt, Human
uggcaggcugccagggggaagugccuucuuca

SEQ ID NO: 256235 - RNA, 32 nt, Human
uggcaggcugggggcugggaugugaugggugu

SEQ ID NO: 256236 - RNA, 32 nt, Human
uggcagggaaggagguggcucuuggcccaggc

SEQ ID NO: 256237 - RNA, 32 nt, Human
uggcagggacagaaagguggacugggggccau

SEQ ID NO: 256238 - RNA, 32 nt, Human
uggcagggacgaggacaaauauggaugaggug

SEQ ID NO: 256239 - RNA, 32 nt, Human
uggcagggagacagccuggcccagugacccug

SEQ ID NO: 256240 - RNA, 32 nt, Human
uggcagggagagaagccagacaugaguucaac

SEQ ID NO: 256241 - RNA, 32 nt, Human
uggcagggagagaggaggccggaagaacaacc

SEQ ID NO: 256242 - RNA, 32 nt, Human
uggcagggagcacugcugcuccaugcuccauu

SEQ ID NO: 256243 - RNA, 32 nt, Human
uggcagggagcuguggucagugggggucagcc

SEQ ID NO: 256244 - RNA, 32 nt, Human
uggcagggaggcggcguugcgguggcugcauu

SEQ ID NO: 256245 - RNA, 32 nt, Human
uggcagggaucuuucuggaggaaaagcugggg

SEQ ID NO: 256246 - RNA, 32 nt, Human
uggcagggcacgguggcucacacuuguaaucc

SEQ ID NO: 256247 - RNA, 32 nt, Human
uggcagggcagaggagguagucuggaguugga

SEQ ID NO: 256248 - RNA, 32 nt, Human
uggcagggcccccagccccuccccuggcugag

SEQ ID NO: 256249 - RNA, 32 nt, Human
uggcagggccuggggagccccagcacaaugau

SEQ ID NO: 256250 - RNA, 32 nt, Human
uggcagggcuagccacaacggaggcuuucagu

SEQ ID NO: 256251 - RNA, 32 nt, Human
uggcagggcucagugcagggaggcggaggccc

SEQ ID NO: 256252 - RNA, 32 nt, Human
uggcagggcucuggacuggugacaugccaccc

SEQ ID NO: 256253 - RNA, 32 nt, Human
uggcagggcucuggacuggugacgugccaccc

SEQ ID NO: 256254 - RNA, 32 nt, Human
uggcaggggcuggcacaugacaguggagcaga

SEQ ID NO: 256255 - RNA, 32 nt, Human
uggcagggggagaucccaagccuagccuuggg

SEQ ID NO: 256256 - RNA, 32 nt, Human
uggcagggggaggcacguuucaucugucagcu

SEQ ID NO: 256257 - RNA, 32 nt, Human
uggcagggggcuggcaugucagcacugcccug

SEQ ID NO: 256258 - RNA, 32 nt, Human
uggcagggucugcacagggccauguccuggcu

SEQ ID NO: 256259 - RNA, 32 nt, Human
uggcagggugcuggggagaugccccucugagc

SEQ ID NO: 256260 - RNA, 32 nt, Human
uggcaggguucugugcucaggugggaaaucug

SEQ ID NO: 256261 - RNA, 32 nt, Human
uggcaggguuuuagugugugagugggauccag

SEQ ID NO: 256262 - RNA, 21 nt, Human
uggcagguaccuguaauccca

SEQ ID NO: 256263 - RNA, 32 nt, Human
uggcagguacuuggagagugggaccaagaccc

SEQ ID NO: 256264 - RNA, 32 nt, Human
uggcagguccccuguccuccugggugggagcu

SEQ ID NO: 256265 - RNA, 19 nt, Human
uggcaggucuuugcagcuc

SEQ ID NO: 256266 - RNA, 32 nt, Human
uggcaggugcagcccccacugccuuugaccug

SEQ ID NO: 256267 - RNA, 32 nt, Human
uggcaggugccuguaaucccagcuacucagga

SEQ ID NO: 256268 - RNA, 32 nt, Human
uggcaggugccuguaaucccagcuacucaggg

SEQ ID NO: 256269 - RNA, 32 nt, Human
uggcaggugccuguaaucccagcuacucggga

SEQ ID NO: 256270 - RNA, 32 nt, Human
uggcaggugccuguaaucccagcuacucuguc

SEQ ID NO: 256271 - RNA, 32 nt, Human
uggcaggugccuguaaucccagcuacuugaga

SEQ ID NO: 256272 - RNA, 32 nt, Human
uggcaggugccuguaaucccagcuacuuggga

SEQ ID NO: 256273 - RNA, 32 nt, Human
uggcaggugccuguaaucccauguacucugga

SEQ ID NO: 256274 - RNA, 21 nt, Human
uggcaggugccuguaauccua

SEQ ID NO: 256275 - RNA, 32 nt, Human
uggcaggugccuguaauccuagcuacuuggca

SEQ ID NO: 256276 - RNA, 32 nt, Human
uggcaggugccuguagucccagcuacucggca

SEQ ID NO: 256277 - RNA, 32 nt, Human
uggcaggugccuguagucccagcuacucggga

SEQ ID NO: 256278 - RNA, 32 nt, Human
uggcaggugccuguagucccagcuacucugga

SEQ ID NO: 256279 - RNA, 32 nt, Human
uggcaggugccuguagucccagcuacuuggga

SEQ ID NO: 256280 - RNA, 32 nt, Human
uggcaggugccuguagucucagcuacucagga

SEQ ID NO: 256281 - RNA, 21 nt, Human
uggcaggugcuuauaauccca

SEQ ID NO: 256282 - RNA, 21 nt, Human
uggcaggugcuuguaauccca

SEQ ID NO: 256283 - RNA, 24 nt, Human
uggcaggugcuuguaaucccagcu

SEQ ID NO: 256284 - RNA, 22 nt, Human
uggcaggugcuuuuugguucca

SEQ ID NO: 256285 - RNA, 32 nt, Human
uggcagguggagaggaggauggggaccagcag

SEQ ID NO: 256286 - RNA, 32 nt, Human
uggcagguggcugagcaggagcucccaagugc

SEQ ID NO: 256287 - RNA, 32 nt, Human
uggcaggugggucaaugcucucuccuuggagc

SEQ ID NO: 256288 - RNA, 32 nt, Human
uggcagguggucuccuggguagcaggaucugg

SEQ ID NO: 256289 - RNA, 32 nt, Human
uggcagguuccagagaaugcaguagaccuuuu

SEQ ID NO: 256290 - RNA, 31 nt, Human
uggcagguugagagaggagaaugcuggaaag

SEQ ID NO: 256291 - RNA, 32 nt, Human
uggcagguuucgaggcugcuugagaggacuug

SEQ ID NO: 256292 - RNA, 32 nt, Human
uggcagguuuggagagcuguaucuguugggcc

SEQ ID NO: 256293 - RNA, 32 nt, Human
uggcagguuugggaggaugagacaaucaacug

SEQ ID NO: 256294 - RNA, 17 nt, Human
uggcaguaaaauguaga

SEQ ID NO: 256295 - RNA, 32 nt, Human
uggcaguaauccagauugcuuuugccaccaac

SEQ ID NO: 256296 - RNA, 32 nt, Human
uggcaguagaugguaggcucuccagucucaaa

SEQ ID NO: 256297 - RNA, 19 nt, Human
uggcaguagcuuugguucc

SEQ ID NO: 256298 - RNA, 21 nt, Human
uggcagucaccuguaauccca

SEQ ID NO: 256299 - RNA, 24 nt, Human
uggcagucaccuguaaucccagcu

SEQ ID NO: 256300 - RNA, 21 nt, Human
uggcagucaccuguaguccca

SEQ ID NO: 256301 - RNA, 24 nt, Human
uggcagucaccuguagucccagcu

SEQ ID NO: 256302 - RNA, 32 nt, Human
uggcagucacuggaagucugggaagaauccuu

SEQ ID NO: 256303 - RNA, 19 nt, Human
uggcagucauuuggucuca

SEQ ID NO: 256304 - RNA, 32 nt, Human
uggcaguccuggucaugggcaggaugaagcgu

SEQ ID NO: 256305 - RNA, 32 nt, Human
uggcagucgaaggagcuucgucuggcagcaga

SEQ ID NO: 256306 - RNA, 32 nt, Human
uggcagucguccaaaccccaggaagagagcuc

SEQ ID NO: 256307 - RNA, 19 nt, Human
uggcagugaagagaacagg

SEQ ID NO: 256308 - RNA, 32 nt, Human
uggcagugagacugaggaugaggacagcaugg

SEQ ID NO: 256309 - RNA, 32 nt, Human
uggcagugagcaguugaauuuaucuugaauuu

SEQ ID NO: 256310 - RNA, 18 nt, Human
uggcagugagcugagauc

SEQ ID NO: 256311 - RNA, 21 nt, Human
uggcagugagcugagaucgcg

SEQ ID NO: 256312 - RNA, 32 nt, Human
uggcagugcaagacacugccgggaagacggau

SEQ ID NO: 256313 - RNA, 32 nt, Human
uggcagugccagagcccaggccccagagcccu

SEQ ID NO: 256314 - RNA, 32 nt, Human
uggcagugcccccagagugugcagcugugauu

SEQ ID NO: 256315 - RNA, 20 nt, Human
uggcagugccuguaauccca

SEQ ID NO: 256316 - RNA, 23 nt, Human
uggcagugccuguaaucccagcu

SEQ ID NO: 256317 - RNA, 32 nt, Human
uggcagugccuguaaucccagcuauuugggag

SEQ ID NO: 256318 - RNA, 32 nt, Human
uggcagugccuguagucccagcugcucgggag

SEQ ID NO: 256319 - RNA, 21 nt, Human
uggcagugccuucuguuccca

SEQ ID NO: 256320 - RNA, 19 nt, Human
uggcagugcucaggcgccc

SEQ ID NO: 256321 - RNA, 20 nt, Human
uggcagugcugaccauuuca

SEQ ID NO: 256322 - RNA, 19 nt, Human
uggcagugcugaccucgca

SEQ ID NO: 256323 - RNA, 18 nt, Human
uggcagugcugagggacc

SEQ ID NO: 256324 - RNA, 21 nt, Human
uggcagugcugaucgauccca

SEQ ID NO: 256325 - RNA, 20 nt, Human
uggcagugcugauucagccu

SEQ ID NO: 256326 - RNA, 19 nt, Human
uggcagugcugccgacuuc

SEQ ID NO: 256327 - RNA, 32 nt, Human
uggcagugcugccucuuguaggugcuggcuaa

SEQ ID NO: 256328 - RNA, 19 nt, Human
uggcagugcugcuacuccu

SEQ ID NO: 256329 - RNA, 21 nt, Human
uggcagugcuggagaugaccc

SEQ ID NO: 256330 - RNA, 19 nt, Human
uggcagugcuggguaucuu

SEQ ID NO: 256331 - RNA, 21 nt, Human
uggcagugcuggguucaccca

SEQ ID NO: 256332 - RNA, 18 nt, Human
uggcagugcugguaccca

SEQ ID NO: 256333 - RNA, 16 nt, Human
uggcagugcuguuccu

SEQ ID NO: 256334 - RNA, 19 nt, Human
uggcagugcuuccucuccu

SEQ ID NO: 256335 - RNA, 18 nt, Human
uggcagugcuugugauuc

SEQ ID NO: 256336 - RNA, 32 nt, Human
uggcaguggaggugggguguuugggaggcugc

SEQ ID NO: 256337 - RNA, 18 nt, Human
uggcaguggaugggaccc

SEQ ID NO: 256338 - RNA, 32 nt, Human
uggcaguggcacauaggcaagugucuuugcau

SEQ ID NO: 256339 - RNA, 19 nt, Human
uggcaguggcaugaucuca

SEQ ID NO: 256340 - RNA, 32 nt, Human
uggcaguggcccauccugucuucuacuugaaa

SEQ ID NO: 256341 - RNA, 31 nt, Human
uggcaguggcucucuggccgcgggcccuguc

SEQ ID NO: 256342 - RNA, 19 nt, Human
uggcaguggcuguguccca

SEQ ID NO: 256343 - RNA, 18 nt, Human
uggcagugggacagaucc

SEQ ID NO: 256344 - RNA, 20 nt, Human
uggcaguggggagauuucca

SEQ ID NO: 256345 - RNA, 20 nt, Human
uggcaguggugccggccuca

SEQ ID NO: 256346 - RNA, 18 nt, Human
uggcaguguaguauucca

SEQ ID NO: 256347 - RNA, 19 nt, Human
uggcaguguaucuaccuca

SEQ ID NO: 256348 - RNA, 32 nt, Human
uggcaguguaugguucaggaaugcugaauaug

SEQ ID NO: 256349 - RNA, 24 nt, Human
uggcagugucauggcucacugcag

SEQ ID NO: 256350 - RNA, 32 nt, Human
uggcagugucauggcucacugcagccucaacc

SEQ ID NO: 256351 - RNA, 19 nt, Human
uggcaguguccuucauccu

SEQ ID NO: 256352 - RNA, 19 nt, Human
uggcaguguggaaauucca

SEQ ID NO: 256353 - RNA, 32 nt, Human
uggcaguguggagccugcaggaggagaggcug

SEQ ID NO: 256354 - RNA, 32 nt, Human
uggcagugugggcaccgcggcccgggacgaca

SEQ ID NO: 256355 - RNA, 20 nt, Human
uggcaguguuaggcaucuua

SEQ ID NO: 256356 - RNA, 20 nt, Human
uggcaguguuaucucaucuc

SEQ ID NO: 256357 - RNA, 32 nt, Human
uggcaguguucauauucucaaacuagucaaaa

SEQ ID NO: 256358 - RNA, 21 nt, Human
uggcaguguugagaucuccca

SEQ ID NO: 256359 - RNA, 18 nt, Human
uggcaguguugguaacua

SEQ ID NO: 256360 - RNA, 19 nt, Human
uggcaguguugucagcuca

SEQ ID NO: 256361 - RNA, 21 nt, Human
uggcaguguuuuaaggaccca

SEQ ID NO: 256362 - RNA, 32 nt, Human
uggcaguuauuguugagagaaaagccuuccca

SEQ ID NO: 256363 - RNA, 32 nt, Human
uggcaguuccccaggccuucaggcuguuuucu

SEQ ID NO: 256364 - RNA, 32 nt, Human
uggcaguucccccagccccacccugucugcuc

SEQ ID NO: 256365 - RNA, 32 nt, Human
uggcaguuccucccagaagaucaaaggauccu

SEQ ID NO: 256366 - RNA, 32 nt, Human
uggcaguuccucgccucggugccaucagggag

SEQ ID NO: 256367 - RNA, 32 nt, Human
uggcaguugccuggugaucgagaaagaacgga

SEQ ID NO: 256368 - RNA, 32 nt, Human
uggcaguuuaggcugcacaacugguaaaauga

SEQ ID NO: 256369 - RNA, 32 nt, Human
uggcaguuucuccaaauguuaaacauagaauu

SEQ ID NO: 256370 - RNA, 32 nt, Human
uggcaguuuuucacagcucaucuugcuguguu

SEQ ID NO: 256371 - RNA, 21 nt, Human
uggcaguuuuugaaauguaaa

SEQ ID NO: 256372 - RNA, 32 nt, Human
uggcauaaaaacaagaaccacaaaaacuugaa

SEQ ID NO: 256373 - RNA, 32 nt, Human
uggcauaaauuauuccuggugagacauguggc

SEQ ID NO: 256374 - RNA, 23 nt, Human
uggcauaaucacagcucacugca

SEQ ID NO: 256375 - RNA, 32 nt, Human
uggcauaaucauaccucauugcagccucagac

SEQ ID NO: 256376 - RNA, 24 nt, Human
uggcauaaucucagcucacugcag

SEQ ID NO: 256377 - RNA, 32 nt, Human
uggcauaaucucagcucacugcagucucugcc

SEQ ID NO: 256378 - RNA, 23 nt, Human
uggcauaaucucggcucacugca

SEQ ID NO: 256379 - RNA, 21 nt, Human
uggcauacaccuguaguccca

SEQ ID NO: 256380 - RNA, 24 nt, Human
uggcauacaccuguagucccagcu

SEQ ID NO: 256381 - RNA, 32 nt, Human
uggcauacagcuccauuggaggggacacauca

SEQ ID NO: 256382 - RNA, 21 nt, Human
uggcauacgccuguaauccca

SEQ ID NO: 256383 - RNA, 24 nt, Human
uggcauacgccuguaaucccagcu

SEQ ID NO: 256384 - RNA, 32 nt, Human
uggcauacgccuguaauccuagcuacuuggga

SEQ ID NO: 256385 - RNA, 32 nt, Human
uggcauacucaacagcaacgccagcuuucugg

SEQ ID NO: 256386 - RNA, 21 nt, Human
uggcauacuccuguaguccca

SEQ ID NO: 256387 - RNA, 24 nt, Human
uggcauacuccuguagucccagcu

SEQ ID NO: 256388 - RNA, 32 nt, Human
uggcauacucucuuccagcccuaggaggaggg

SEQ ID NO: 256389 - RNA, 32 nt, Human
uggcauagaggaccuggaauugcuagaggggc

SEQ ID NO: 256390 - RNA, 26 nt, Human
uggcauagagugauucaaccaccuua

SEQ ID NO: 256391 - RNA, 32 nt, Human
uggcauaggaguguguuaugggugcugaacuc

SEQ ID NO: 256392 - RNA, 21 nt, Human
uggcauaggccuguaauucca

SEQ ID NO: 256393 - RNA, 32 nt, Human
uggcauaggccuguaauuccagcuacucuggc

SEQ ID NO: 256394 - RNA, 32 nt, Human
uggcauaugccauuucugggaaaugcaucugg

SEQ ID NO: 256395 - RNA, 32 nt, Human
uggcauaugccuguaaaucccagcuauuuggg

SEQ ID NO: 256396 - RNA, 21 nt, Human
uggcauaugccuguaguccca

SEQ ID NO: 256397 - RNA, 32 nt, Human
uggcauaugccuguagucccaguuacuuggga

SEQ ID NO: 256398 - RNA, 32 nt, Human
uggcauaugcuggggguagggguagcauuguu

SEQ ID NO: 256399 - RNA, 19 nt, Human
uggcauauggcauuuucua

SEQ ID NO: 256400 - RNA, 32 nt, Human
uggcauauuuugcaucuacaacuucuauaaua

SEQ ID NO: 256401 - RNA, 32 nt, Human
uggcaucaaauguuugcagcagucuccauaau

SEQ ID NO: 256402 - RNA, 32 nt, Human
uggcaucaaauucuaaggagcuugaucaggag

SEQ ID NO: 256403 - RNA, 32 nt, Human
uggcaucaaccaagcuaauucagcauuagaug

SEQ ID NO: 256404 - RNA, 31 nt, Human
uggcaucacagcuaaguagcuguggccaccg

SEQ ID NO: 256405 - RNA, 32 nt, Human
uggcaucacccaggugaaugguguccagguga

SEQ ID NO: 256406 - RNA, 21 nt, Human
uggcaucacccauaaagggaa

SEQ ID NO: 256407 - RNA, 32 nt, Human
uggcaucaccuuaggcagggaaguguaagaaa

SEQ ID NO: 256408 - RNA, 32 nt, Human
uggcaucagacaccggcccguguuccuuguca

SEQ ID NO: 256409 - RNA, 32 nt, Human
uggcaucagagcugagugauggacgaccugca

SEQ ID NO: 256410 - RNA, 32 nt, Human
uggcaucaggaguucaagaccaaccuggccaa

SEQ ID NO: 256411 - RNA, 16 nt, Human
uggcaucaggggcaaa

SEQ ID NO: 256412 - RNA, 32 nt, Human
uggcaucauaggaccuggcacagggaagggac

SEQ ID NO: 256413 - RNA, 32 nt, Human
uggcaucauccauucucucugcccaaguugcu

SEQ ID NO: 256414 - RNA, 23 nt, Human
uggcaucaucucagcucacugca

SEQ ID NO: 256415 - RNA, 32 nt, Human
uggcaucauugcauuccagccugggcaacaga

SEQ ID NO: 256416 - RNA, 24 nt, Human
uggcaucauuguaacucacugcag

SEQ ID NO: 256417 - RNA, 32 nt, Human
uggcaucauuguaacucacugcagccugaaac

SEQ ID NO: 256418 - RNA, 32 nt, Human
uggcauccagcagagaguuagaaaugcucugu

SEQ ID NO: 256419 - RNA, 32 nt, Human
uggcauccagggccaggcaggcagcuugaggu

SEQ ID NO: 256420 - RNA, 32 nt, Human
uggcauccauuuuuccaaagaagagucgaguc

SEQ ID NO: 256421 - RNA, 32 nt, Human
uggcaucccugaguccccuccggcuccuaugg

SEQ ID NO: 256422 - RNA, 32 nt, Human
uggcauccuggugugcuguucuugaguuuucg

SEQ ID NO: 256423 - RNA, 32 nt, Human
uggcauccuguguggcagacagcagaauuggg

SEQ ID NO: 256424 - RNA, 32 nt, Human
uggcauccuugaucucagggaucuucuccguu

SEQ ID NO: 256425 - RNA, 22 nt, Human
uggcaucgaauagccuuaauga

SEQ ID NO: 256426 - RNA, 32 nt, Human
uggcaucgaguggguggagaccagagaagccg

SEQ ID NO: 256427 - RNA, 32 nt, Human
uggcaucguugugccuaaccugggagacggaa

SEQ ID NO: 256428 - RNA, 32 nt, Human
uggcaucuaagugucuguguucuuguaagccu

SEQ ID NO: 256429 - RNA, 32 nt, Human
uggcaucuacggagcccagcaggcgugccagg

SEQ ID NO: 256430 - RNA, 32 nt, Human
uggcaucucccaggugccacugcagggauagc

SEQ ID NO: 256431 - RNA, 32 nt, Human
uggcaucuccccacugcuccucucuuucccca

SEQ ID NO: 256432 - RNA, 32 nt, Human
uggcaucugcccaccccaccccuugcccucuu

SEQ ID NO: 256433 - RNA, 32 nt, Human
uggcaucugccucccuagaccuccuucccucc

SEQ ID NO: 256434 - RNA, 32 nt, Human
uggcaucuggguucaccuccccacucugauga

SEQ ID NO: 256435 - RNA, 20 nt, Human
uggcaucuguggcgguccua

SEQ ID NO: 256436 - RNA, 32 nt, Human
uggcaucugugggauagaggccagccugcaua

SEQ ID NO: 256437 - RNA, 32 nt, Human
uggcaucuguugaacugaggagcauuucucau

SEQ ID NO: 256438 - RNA, 20 nt, Human
uggcaucuuagaccuccaca

SEQ ID NO: 256439 - RNA, 32 nt, Human
uggcaucuucucaggcagaggugcaaccuguc

SEQ ID NO: 256440 - RNA, 32 nt, Human
uggcaucuuuugggcauauucuuccuuuuaau

SEQ ID NO: 256441 - RNA, 32 nt, Human
uggcaucuuuuuaaaaaguuauauuuucuaaa

SEQ ID NO: 256442 - RNA, 32 nt, Human
uggcaugaaacauuaacacagcucuuuuuaua

SEQ ID NO: 256443 - RNA, 32 nt, Human
uggcaugaacacaacgcacugcagccucuacc

SEQ ID NO: 256444 - RNA, 32 nt, Human
uggcaugaacccaggaggcagagcuugcagug

SEQ ID NO: 256445 - RNA, 32 nt, Human
uggcaugaacccaggaggcagagcuuguagug

SEQ ID NO: 256446 - RNA, 32 nt, Human
uggcaugaacccaggaguuggagcuugcagug

SEQ ID NO: 256447 - RNA, 32 nt, Human
uggcaugaaccccaggcuggagugcaguggcu

SEQ ID NO: 256448 - RNA, 23 nt, Human
uggcaugaacucagcucacugca

SEQ ID NO: 256449 - RNA, 24 nt, Human
uggcaugaauaaggugccaggaaa

SEQ ID NO: 256450 - RNA, 32 nt, Human
uggcaugaauuaguguucuagacucugcuuug

SEQ ID NO: 256451 - RNA, 19 nt, Human
uggcaugagauucucauag

SEQ ID NO: 256452 - RNA, 32 nt, Human
uggcaugaggaguggguggccuccucuccauc

SEQ ID NO: 256453 - RNA, 32 nt, Human
uggcaugaucacaccucacugcagccuuggcc

SEQ ID NO: 256454 - RNA, 32 nt, Human
uggcaugaucacagcucacugcagccucgacc

SEQ ID NO: 256455 - RNA, 32 nt, Human
uggcaugaucacggcucacugcagcuucaaac

SEQ ID NO: 256456 - RNA, 24 nt, Human
uggcaugaucauaacucacugcag

SEQ ID NO: 256457 - RNA, 32 nt, Human
uggcaugaucauaacucacugcagccucaaac

SEQ ID NO: 256458 - RNA, 32 nt, Human
uggcaugaucauagaucacugcagccucaaac

SEQ ID NO: 256459 - RNA, 24 nt, Human
uggcaugaucauagcucacugcag

SEQ ID NO: 256460 - RNA, 32 nt, Human
uggcaugaucauagcucacugcagccucauac

SEQ ID NO: 256461 - RNA, 32 nt, Human
uggcaugaucauagcucacugcagccuugaac

SEQ ID NO: 256462 - RNA, 32 nt, Human
uggcaugaucauagcucauugcagccucaaac

SEQ ID NO: 256463 - RNA, 32 nt, Human
uggcaugaucaucagugagcgugagaucacug

SEQ ID NO: 256464 - RNA, 23 nt, Human
uggcaugaucauggcucacugca

SEQ ID NO: 256465 - RNA, 24 nt, Human
uggcaugaucauggcucacugcag

SEQ ID NO: 256466 - RNA, 32 nt, Human
uggcaugaucauggcucacugcagccuugacc

SEQ ID NO: 256467 - RNA, 32 nt, Human
uggcaugaucauggcuuacugcagccuugauc

SEQ ID NO: 256468 - RNA, 23 nt, Human
uggcaugaucucagcucacugca

SEQ ID NO: 256469 - RNA, 24 nt, Human
uggcaugaucucagcucacugcag

SEQ ID NO: 256470 - RNA, 32 nt, Human
uggcaugaucucagcucacugcagccuccguc

SEQ ID NO: 256471 - RNA, 23 nt, Human
uggcaugaucucagcucacugua

SEQ ID NO: 256472 - RNA, 24 nt, Human
uggcaugaucucagcucacuguag

SEQ ID NO: 256473 - RNA, 23 nt, Human
uggcaugaucucagcucgcugca

SEQ ID NO: 256474 - RNA, 23 nt, Human
uggcaugaucucaguucacugca

SEQ ID NO: 256475 - RNA, 23 nt, Human
uggcaugaucucgacucacugca

SEQ ID NO: 256476 - RNA, 32 nt, Human
uggcaugaucucgacucacugcagccuccgcc

SEQ ID NO: 256477 - RNA, 23 nt, Human
uggcaugaucucggcucaccgca

SEQ ID NO: 256478 - RNA, 24 nt, Human
uggcaugaucucggcucaccgcag

SEQ ID NO: 256479 - RNA, 23 nt, Human
uggcaugaucucggcucacggca

SEQ ID NO: 256480 - RNA, 23 nt, Human
uggcaugaucucggcucacuaca

SEQ ID NO: 256481 - RNA, 23 nt, Human
uggcaugaucucggcucacugca

SEQ ID NO: 256482 - RNA, 23 nt, Human
uggcaugaucucggcucacugcg

SEQ ID NO: 256483 - RNA, 23 nt, Human
uggcaugaucucggcucauugca

SEQ ID NO: 256484 - RNA, 23 nt, Human
uggcaugaucucggcucgcuaca

SEQ ID NO: 256485 - RNA, 23 nt, Human
uggcaugaucucggcucgcugca

SEQ ID NO: 256486 - RNA, 23 nt, Human
uggcaugaucucggcuuacugca

SEQ ID NO: 256487 - RNA, 23 nt, Human
uggcaugaucugggcucacugca

SEQ ID NO: 256488 - RNA, 23 nt, Human
uggcaugaucuggucucacugca

SEQ ID NO: 256489 - RNA, 21 nt, Human
uggcaugaucuuggcucacug

SEQ ID NO: 256490 - RNA, 23 nt, Human
uggcaugaucuuggcucacugca

SEQ ID NO: 256491 - RNA, 24 nt, Human
uggcaugaucuuggcucacugcag

SEQ ID NO: 256492 - RNA, 32 nt, Human
uggcaugaucuuggcucacugcagccucgacu

SEQ ID NO: 256493 - RNA, 24 nt, Human
uggcaugaucuuggcucacuucag

SEQ ID NO: 256494 - RNA, 23 nt, Human
uggcaugaucuuggcuuacugca

SEQ ID NO: 256495 - RNA, 23 nt, Human
uggcaugaugucggcucacugca

SEQ ID NO: 256496 - RNA, 32 nt, Human
uggcaugauucuggcucacugcagccucaaac

SEQ ID NO: 256497 - RNA, 24 nt, Human
uggcaugauuguagcucacugcag

SEQ ID NO: 256498 - RNA, 32 nt, Human
uggcaugauuguagcucacugcagucuucagc

SEQ ID NO: 256499 - RNA, 32 nt, Human
uggcaugauuucaguucacugcagccucgacc

SEQ ID NO: 256500 - RNA, 23 nt, Human
uggcaugauuucggcucacugca

SEQ ID NO: 256501 - RNA, 21 nt, Human
uggcaugcaccuauaauccca

SEQ ID NO: 256502 - RNA, 21 nt, Human
uggcaugcaccuguaauccca

SEQ ID NO: 256503 - RNA, 24 nt, Human
uggcaugcaccuguaaucccagcu

SEQ ID NO: 256504 - RNA, 32 nt, Human
uggcaugcaccuguaaucccagcuacuuggga

SEQ ID NO: 256505 - RNA, 21 nt, Human
uggcaugcaccuguaguccca

SEQ ID NO: 256506 - RNA, 24 nt, Human
uggcaugcaccuguagucccagcu

SEQ ID NO: 256507 - RNA, 32 nt, Human
uggcaugcaguggcaugaucucggcucaccgc

SEQ ID NO: 256508 - RNA, 32 nt, Human
uggcaugcagugguagucccagcuacucagga

SEQ ID NO: 256509 - RNA, 21 nt, Human
uggcaugcaucuguaauccca

SEQ ID NO: 256510 - RNA, 24 nt, Human
uggcaugcaucuguaaucccagcu

SEQ ID NO: 256511 - RNA, 32 nt, Human
uggcaugcaugcugcugguaggagacccccaa

SEQ ID NO: 256512 - RNA, 32 nt, Human
uggcaugccgggccccuccauccacccggggg

SEQ ID NO: 256513 - RNA, 32 nt, Human
uggcaugccuguguucccagcuacucaggagg

SEQ ID NO: 256514 - RNA, 32 nt, Human
uggcaugccuuggguuuccuauccugagagug

SEQ ID NO: 256515 - RNA, 21 nt, Human
uggcaugcgccuauaaucuca

SEQ ID NO: 256516 - RNA, 21 nt, Human
uggcaugcgccuauaguccca

SEQ ID NO: 256517 - RNA, 20 nt, Human
uggcaugcgccuguaauccc

SEQ ID NO: 256518 - RNA, 21 nt, Human
uggcaugcgccuguaauccca

SEQ ID NO: 256519 - RNA, 24 nt, Human
uggcaugcgccuguaaucccagcu

SEQ ID NO: 256520 - RNA, 32 nt, Human
uggcaugcgccuguaaucccagcuacuucgga

SEQ ID NO: 256521 - RNA, 24 nt, Human
uggcaugcgccuguaaucccggcu

SEQ ID NO: 256522 - RNA, 21 nt, Human
uggcaugcgccuguaguccca

SEQ ID NO: 256523 - RNA, 24 nt, Human
uggcaugcgccuguagucccagcu

SEQ ID NO: 256524 - RNA, 21 nt, Human
uggcaugcgccugugauccca

SEQ ID NO: 256525 - RNA, 24 nt, Human
uggcaugcgccugugaucccagcu

SEQ ID NO: 256526 - RNA, 32 nt, Human
uggcaugcguugcuagagucaugugaauagaa

SEQ ID NO: 256527 - RNA, 24 nt, Human
uggcaugcucucagcucacugcag

SEQ ID NO: 256528 - RNA, 32 nt, Human
uggcaugcucucagcucacugcagcccugacu

SEQ ID NO: 256529 - RNA, 32 nt, Human
uggcaugcuuccccugggcuccaggcugacuu

SEQ ID NO: 256530 - RNA, 21 nt, Human
uggcaugcuucuguaauccca

SEQ ID NO: 256531 - RNA, 32 nt, Human
uggcauggaaggcagaggcugggugggguggg

SEQ ID NO: 256532 - RNA, 32 nt, Human
uggcauggagaagccucagggaaaggccugcc

SEQ ID NO: 256533 - RNA, 32 nt, Human
uggcauggagccaggcccucaggcgagcaggg

SEQ ID NO: 256534 - RNA, 32 nt, Human
uggcauggaggagcccucuugcaccagguaga

SEQ ID NO: 256535 - RNA, 32 nt, Human
uggcauggaguauagugcaaauucauuuuuaa

SEQ ID NO: 256536 - RNA, 32 nt, Human
uggcauggagugaauuagaagacacgagacuu

SEQ ID NO: 256537 - RNA, 19 nt, Human
uggcauggccaggagcccu

SEQ ID NO: 256538 - RNA, 32 nt, Human
uggcauggcucacgccuguaaucccagcacuu

SEQ ID NO: 256539 - RNA, 32 nt, Human
uggcaugggaaacauggcaaaaccccaucucu

SEQ ID NO: 256540 - RNA, 32 nt, Human
uggcaugggaagaaugaaagaggcuuuguaac

SEQ ID NO: 256541 - RNA, 32 nt, Human
uggcauggggauggguucaggccaggucuuuu

SEQ ID NO: 256542 - RNA, 23 nt, Human
uggcauggucucagcucacugua

SEQ ID NO: 256543 - RNA, 32 nt, Human
uggcauggucucagcucacuguaaccuccacc

SEQ ID NO: 256544 - RNA, 32 nt, Human
uggcaugguguuuguggacugguucagggaag

SEQ ID NO: 256545 - RNA, 17 nt, Human
uggcauguaaauguaaa

SEQ ID NO: 256546 - RNA, 21 nt, Human
uggcauguaccuguaacccca

SEQ ID NO: 256547 - RNA, 32 nt, Human
uggcaugucagagaaggcaauugaaaaauuua

SEQ ID NO: 256548 - RNA, 32 nt, Human
uggcaugucauaagagaaacagaugugcauau

SEQ ID NO: 256549 - RNA, 32 nt, Human
uggcaugucauccucagggcgcuuccucgcuc

SEQ ID NO: 256550 - RNA, 32 nt, Human
uggcaugucaucuucugagcccuucuuucuac

SEQ ID NO: 256551 - RNA, 32 nt, Human
uggcaugucuggcacauggcccccaggcugcg

SEQ ID NO: 256552 - RNA, 32 nt, Human
uggcaugucuggcaguagucucucauucacuc

SEQ ID NO: 256553 - RNA, 32 nt, Human
uggcaugugccagcuacucgggaggcugaggc

SEQ ID NO: 256554 - RNA, 24 nt, Human
uggcaugugccugcaaucccagcu

SEQ ID NO: 256555 - RNA, 32 nt, Human
uggcaugugccuguaaccccagcuacucagga

SEQ ID NO: 256556 - RNA, 20 nt, Human
uggcaugugccuguaauccc

SEQ ID NO: 256557 - RNA, 21 nt, Human
uggcaugugccuguaauccca

SEQ ID NO: 256558 - RNA, 24 nt, Human
uggcaugugccuguaaucccagcu

SEQ ID NO: 256559 - RNA, 32 nt, Human
uggcaugugccuguaaucccagcuacucagga

SEQ ID NO: 256560 - RNA, 32 nt, Human
uggcaugugccuguaaucccagcuauuuggca

SEQ ID NO: 256561 - RNA, 24 nt, Human
uggcaugugccuguaaucccaguu

SEQ ID NO: 256562 - RNA, 32 nt, Human
uggcaugugccuguaaucccaguuacugggga

SEQ ID NO: 256563 - RNA, 24 nt, Human
uggcaugugccuguaaucccugcu

SEQ ID NO: 256564 - RNA, 21 nt, Human
uggcaugugccuguaguccca

SEQ ID NO: 256565 - RNA, 24 nt, Human
uggcaugugccuguagucccagcu

SEQ ID NO: 256566 - RNA, 32 nt, Human
uggcaugugccuguagucccagcuacucagga

SEQ ID NO: 256567 - RNA, 32 nt, Human
uggcaugugccuguagucccagcuacucugga

SEQ ID NO: 256568 - RNA, 32 nt, Human
uggcaugugccuguagucccagcuacuuggga

SEQ ID NO: 256569 - RNA, 24 nt, Human
uggcaugugccuguaguuccagcu

SEQ ID NO: 256570 - RNA, 32 nt, Human
uggcaugugccuguaguuccagcuacucagga

SEQ ID NO: 256571 - RNA, 24 nt, Human
uggcaugugccuguauucccagcu

SEQ ID NO: 256572 - RNA, 32 nt, Human
uggcaugugcucagcuccgucaacaucugcug

SEQ ID NO: 256573 - RNA, 21 nt, Human
uggcaugugcuuguaauccca

SEQ ID NO: 256574 - RNA, 24 nt, Human
uggcaugugcuuguaaucccagcu

SEQ ID NO: 256575 - RNA, 32 nt, Human
uggcauguguacccaggaugggccuauagguc

SEQ ID NO: 256576 - RNA, 23 nt, Human
uggcauguucauggcucacugca

SEQ ID NO: 256577 - RNA, 32 nt, Human
uggcauguucccauuuuugcuuagcucaauua

SEQ ID NO: 256578 - RNA, 32 nt, Human
uggcauuaaaaaggugggagaaauggaagaaa

SEQ ID NO: 256579 - RNA, 32 nt, Human
uggcauuagauucuuauagaagcacgaacacu

SEQ ID NO: 256580 - RNA, 23 nt, Human
uggcauuaucucagcucacugca

SEQ ID NO: 256581 - RNA, 31 nt, Human
uggcauucaauaaacauauguugaaagaaua

SEQ ID NO: 256582 - RNA, 32 nt, Human
uggcauucacagaccacagcuucuaugugagg

SEQ ID NO: 256583 - RNA, 32 nt, Human
uggcauucacaggcuugauguauuccacuguu

SEQ ID NO: 256584 - RNA, 32 nt, Human
uggcauucagccaguggaagacaaaggagcgu

SEQ ID NO: 256585 - RNA, 21 nt, Human
uggcauucgucuguaauccca

SEQ ID NO: 256586 - RNA, 24 nt, Human
uggcauucgucuguaaucccagcu

SEQ ID NO: 256587 - RNA, 32 nt, Human
uggcauucucuuuuccagagccucgaguuugg

SEQ ID NO: 256588 - RNA, 32 nt, Human
uggcauucugaugcuuuucagguuuaauccuu

SEQ ID NO: 256589 - RNA, 32 nt, Human
uggcauucuguguaacaagcagcagaaccuag

SEQ ID NO: 256590 - RNA, 21 nt, Human
uggcauugaagcaggcacuug

SEQ ID NO: 256591 - RNA, 21 nt, Human
uggcauugaggcuaaccucca

SEQ ID NO: 256592 - RNA, 32 nt, Human
uggcauugcacuccagccugggugguagauca

SEQ ID NO: 256593 - RNA, 31 nt, Human
uggcauugcacugcuuauaugccaagcuaau

SEQ ID NO: 256594 - RNA, 32 nt, Human
uggcauugccuuucaugaguuacuugucuaua

SEQ ID NO: 256595 - RNA, 18 nt, Human
uggcauugcuugauuuua

SEQ ID NO: 256596 - RNA, 21 nt, Human
uggcauuggcaguuacugguc

SEQ ID NO: 256597 - RNA, 20 nt, Human
uggcauuguggggucugggc

SEQ ID NO: 256598 - RNA, 32 nt, Human
uggcauuguuagcuggggacauggaaguggac

SEQ ID NO: 256599 - RNA, 32 nt, Human
uggcauuguucucuuggaaggcugcuuugcag

SEQ ID NO: 256600 - RNA, 17 nt, Human
uggcauuucaauguaaa

SEQ ID NO: 256601 - RNA, 32 nt, Human
uggcauuucuccuuucugugcacagcacuuua

SEQ ID NO: 256602 - RNA, 32 nt, Human
uggcauuucuggagcaggagguugucaggaca

SEQ ID NO: 256603 - RNA, 32 nt, Human
uggcauuucuguagcugagcacagcaggggag

SEQ ID NO: 256604 - RNA, 18 nt, Human
uggcauuugacgauucua

SEQ ID NO: 256605 - RNA, 32 nt, Human
uggcauuugcauuuuagagaagggaaaacagu

SEQ ID NO: 256606 - RNA, 21 nt, Human
uggcauuugccuguaauccca

SEQ ID NO: 256607 - RNA, 24 nt, Human
uggcauuugccuguaaucccagcu

SEQ ID NO: 256608 - RNA, 32 nt, Human
uggcauuuggcauguccaugacauuggagacu

SEQ ID NO: 256609 - RNA, 23 nt, Human
uggcauuuguggccacucacuuu

SEQ ID NO: 256610 - RNA, 32 nt, Human
uggcauuuuaaauauauuuggcaauuuuccca

SEQ ID NO: 256611 - RNA, 32 nt, Human
uggcauuuucucaaauaaaacucugcaagagu

SEQ ID NO: 256612 - RNA, 32 nt, Human
uggccaaaaaguucacagacagcaguguuugc

SEQ ID NO: 256613 - RNA, 32 nt, Human
uggccaaaacaacauuuuaaguagaagaucca

SEQ ID NO: 256614 - RNA, 32 nt, Human
uggccaaaacagugaaaccccgucucuacuaa

SEQ ID NO: 256615 - RNA, 32 nt, Human
uggccaaaaccagaaccagcagucuccugccu

SEQ ID NO: 256616 - RNA, 32 nt, Human
uggccaaaauggugaaacuccaucucuacuaa

SEQ ID NO: 256617 - RNA, 32 nt, Human
uggccaaacauggugaaacccugucuacaaaa

SEQ ID NO: 256618 - RNA, 32 nt, Human
uggccaaagacgccggcuugguguggccccag

SEQ ID NO: 256619 - RNA, 32 nt, Human
uggccaaagauaggaggaagaaagagaacucu

SEQ ID NO: 256620 - RNA, 24 nt, Human
uggccaaagcaucaggaaagggaa

SEQ ID NO: 256621 - RNA, 32 nt, Human
uggccaaagcuggacaccuccuugggacacug

SEQ ID NO: 256622 - RNA, 22 nt, Human
uggccaaagugcuuggaugcaa

SEQ ID NO: 256623 - RNA, 32 nt, Human
uggccaaaguguugaaaacuugcuagaaaggc

SEQ ID NO: 256624 - RNA, 32 nt, Human
uggccaaaguguugggauuacaggcauaagcc

SEQ ID NO: 256625 - RNA, 32 nt, Human
uggccaaauggugaaaccccaucucuacgaaa

SEQ ID NO: 256626 - RNA, 32 nt, Human
uggccaaauuuccuacagcgagauuaugaaac

SEQ ID NO: 256627 - RNA, 32 nt, Human
uggccaacaaggcaaaaccccgucucuaccaa

SEQ ID NO: 256628 - RNA, 32 nt, Human
uggccaacaaggcaaaaccccgucucuacuaa

SEQ ID NO: 256629 - RNA, 32 nt, Human
uggccaacaaggugaaaccccaucucuacuaa

SEQ ID NO: 256630 - RNA, 32 nt, Human
uggccaacaaggugaaaccccgucucuacuaa

SEQ ID NO: 256631 - RNA, 32 nt, Human
uggccaacaaggugaaccucaucucuacuaaa

SEQ ID NO: 256632 - RNA, 32 nt, Human
uggccaacacagugaaaccccaucucuacuaa

SEQ ID NO: 256633 - RNA, 32 nt, Human
uggccaacaccaaugccccaaccuucccccac

SEQ ID NO: 256634 - RNA, 32 nt, Human
uggccaacacggugaaaacccgucucuacaaa

SEQ ID NO: 256635 - RNA, 32 nt, Human
uggccaacacggugaaaccccaucucuacuaa

SEQ ID NO: 256636 - RNA, 32 nt, Human
uggccaacacggugaaaccccaucucucuaaa

SEQ ID NO: 256637 - RNA, 32 nt, Human
uggccaacacggugaaaccccgucucuacuaa

SEQ ID NO: 256638 - RNA, 32 nt, Human
uggccaacacggugaaaccccgucucuccuaa

SEQ ID NO: 256639 - RNA, 32 nt, Human
uggccaacagggugaaaccccgucucuacaaa

SEQ ID NO: 256640 - RNA, 32 nt, Human
uggccaacauaaugaaaccccaucucuacuaa

SEQ ID NO: 256641 - RNA, 32 nt, Human
uggccaacauagcaaaaccccaucucuauuaa

SEQ ID NO: 256642 - RNA, 32 nt, Human
uggccaacauagcgaaaccccgucucuacuaa

SEQ ID NO: 256643 - RNA, 32 nt, Human
uggccaacauagugaaaccccaucucuaccaa

SEQ ID NO: 256644 - RNA, 32 nt, Human
uggccaacauagugaaaccccaucucuacuaa

SEQ ID NO: 256645 - RNA, 32 nt, Human
uggccaacauagugaaaccccaucucuacuga

SEQ ID NO: 256646 - RNA, 32 nt, Human
uggccaacauagugaaaccccgucucuacuaa

SEQ ID NO: 256647 - RNA, 32 nt, Human
uggccaacauagugaaaccccgucucuaguaa

SEQ ID NO: 256648 - RNA, 32 nt, Human
uggccaacauagugaaaccccgucucuauuaa

SEQ ID NO: 256649 - RNA, 32 nt, Human
uggccaacauagugaaaccccgucucuucuaa

SEQ ID NO: 256650 - RNA, 32 nt, Human
uggccaacauagugaaacuccgucucuacuaa

SEQ ID NO: 256651 - RNA, 32 nt, Human
uggccaacauagugaaaucccaucucuacuaa

SEQ ID NO: 256652 - RNA, 22 nt, Human
uggccaacauagugagacccca

SEQ ID NO: 256653 - RNA, 20 nt, Human
uggccaacauaguggagaga

SEQ ID NO: 256654 - RNA, 32 nt, Human
uggccaacaucgugaaaccccaucucuacuaa

SEQ ID NO: 256655 - RNA, 32 nt, Human
uggccaacaugacaaaaccccgucucuacuaa

SEQ ID NO: 256656 - RNA, 32 nt, Human
uggccaacaugacgaaaccccaucucuacuaa

SEQ ID NO: 256657 - RNA, 32 nt, Human
uggccaacaugacgaaaccccgucucuacuaa

SEQ ID NO: 256658 - RNA, 32 nt, Human
uggccaacaugauaaaacaccgucucugcuag

SEQ ID NO: 256659 - RNA, 32 nt, Human
uggccaacaugaugaaaccccaucuccacuaa

SEQ ID NO: 256660 - RNA, 32 nt, Human
uggccaacaugaugaaaccccaucucuacuaa

SEQ ID NO: 256661 - RNA, 32 nt, Human
uggccaacaugaugaaaccccgucucuaccaa

SEQ ID NO: 256662 - RNA, 32 nt, Human
uggccaacaugaugaaaccccgucucuacuaa

SEQ ID NO: 256663 - RNA, 32 nt, Human
uggccaacaugaugaaaccccgucucuacuac

SEQ ID NO: 256664 - RNA, 32 nt, Human
uggccaacauggagaaaccccaucucuaccaa

SEQ ID NO: 256665 - RNA, 32 nt, Human
uggccaacauggagaaaccccaucucuacuaa

SEQ ID NO: 256666 - RNA, 32 nt, Human
uggccaacauggagaaaccccgucucuacuaa

SEQ ID NO: 256667 - RNA, 32 nt, Human
uggccaacauggcaaaaacccaucucuucuaa

SEQ ID NO: 256668 - RNA, 32 nt, Human
uggccaacauggcaaaaaccugucucuacuaa

SEQ ID NO: 256669 - RNA, 32 nt, Human
uggccaacauggcaaaaccacaucucuacuaa

SEQ ID NO: 256670 - RNA, 32 nt, Human
uggccaacauggcaaaaccaucucuacuaaaa

SEQ ID NO: 256671 - RNA, 32 nt, Human
uggccaacauggcaaaaccccaucacuaaaaa

SEQ ID NO: 256672 - RNA, 32 nt, Human
uggccaacauggcaaaaccccaucuccacaaa

SEQ ID NO: 256673 - RNA, 32 nt, Human
uggccaacauggcaaaaccccaucucuaccaa

SEQ ID NO: 256674 - RNA, 32 nt, Human
uggccaacauggcaaaaccccaucucuacuaa

SEQ ID NO: 256675 - RNA, 32 nt, Human
uggccaacauggcaaaaccccaucucuacuga

SEQ ID NO: 256676 - RNA, 32 nt, Human
uggccaacauggcaaaaccccaucuuuacuaa

SEQ ID NO: 256677 - RNA, 32 nt, Human
uggccaacauggcaaaaccccaugucuacuaa

SEQ ID NO: 256678 - RNA, 32 nt, Human
uggccaacauggcaaaacccccaucucgacua

SEQ ID NO: 256679 - RNA, 32 nt, Human
uggccaacauggcaaaacccccgucucuacua

SEQ ID NO: 256680 - RNA, 32 nt, Human
uggccaacauggcaaaacccccucuuuacuaa

SEQ ID NO: 256681 - RNA, 32 nt, Human
uggccaacauggcaaaaccccgucucuacuaa

SEQ ID NO: 256682 - RNA, 32 nt, Human
uggccaacauggcaaaaccccgucuguacuca

SEQ ID NO: 256683 - RNA, 32 nt, Human
uggccaacauggcaaaaccccuucucuacuaa

SEQ ID NO: 256684 - RNA, 32 nt, Human
uggccaacauggcaaaacccgucucuacuaaa

SEQ ID NO: 256685 - RNA, 32 nt, Human
uggccaacauggcaaaacccuaucucuacuaa

SEQ ID NO: 256686 - RNA, 29 nt, Human
uggccaacauggcaaaacccugccucuac

SEQ ID NO: 256687 - RNA, 32 nt, Human
uggccaacauggcaaaacccuguaucugugaa

SEQ ID NO: 256688 - RNA, 32 nt, Human
uggccaacauggcaaaacccugucgcuacaaa

SEQ ID NO: 256689 - RNA, 32 nt, Human
uggccaacauggcaaaacccugucuacuaaaa

SEQ ID NO: 256690 - RNA, 32 nt, Human
uggccaacauggcaaaacccugucucuacuaa

SEQ ID NO: 256691 - RNA, 32 nt, Human
uggccaacauggcaaaacccugucucugcuaa

SEQ ID NO: 256692 - RNA, 32 nt, Human
uggccaacauggcaaaaccucaucucuacuaa

SEQ ID NO: 256693 - RNA, 32 nt, Human
uggccaacauggcaaaaccuugucuccacuaa

SEQ ID NO: 256694 - RNA, 32 nt, Human
uggccaacauggcaaaaccuugucucuacuaa

SEQ ID NO: 256695 - RNA, 32 nt, Human
uggccaacauggcaaaaucccaucucuacuaa

SEQ ID NO: 256696 - RNA, 32 nt, Human
uggccaacauggcaaaaucccgucucuacuaa

SEQ ID NO: 256697 - RNA, 32 nt, Human
uggccaacauggcaacaccccgucucuaauaa

SEQ ID NO: 256698 - RNA, 32 nt, Human
uggccaacauggcaagaccccaucucuacuaa

SEQ ID NO: 256699 - RNA, 32 nt, Human
uggccaacauggcagaaaccccaucucuacua

SEQ ID NO: 256700 - RNA, 32 nt, Human
uggccaacauggcgaaaacccaucucuacuaa

SEQ ID NO: 256701 - RNA, 32 nt, Human
uggccaacauggcgaaacaccugucucuacua

SEQ ID NO: 256702 - RNA, 32 nt, Human
uggccaacauggcgaaaccccaucgcuacuaa

SEQ ID NO: 256703 - RNA, 32 nt, Human
uggccaacauggcgaaaccccaucucuaccga

SEQ ID NO: 256704 - RNA, 30 nt, Human
uggccaacauggcgaaaccccaucucuacu

SEQ ID NO: 256705 - RNA, 32 nt, Human
uggccaacauggcgaaaccccaucucuacuaa

SEQ ID NO: 256706 - RNA, 32 nt, Human
uggccaacauggcgaaaccccaucucuacuua

SEQ ID NO: 256707 - RNA, 32 nt, Human
uggccaacauggcgaaaccccaucucugcuaa

SEQ ID NO: 256708 - RNA, 32 nt, Human
uggccaacauggcgaaaccccauuucuacuaa

SEQ ID NO: 256709 - RNA, 30 nt, Human
uggccaacauggcgaaaccccgucucuacu

SEQ ID NO: 256710 - RNA, 32 nt, Human
uggccaacauggcgaaaccccgucucuacuaa

SEQ ID NO: 256711 - RNA, 32 nt, Human
uggccaacauggcgaaaccccgucucuacuau

SEQ ID NO: 256712 - RNA, 32 nt, Human
uggccaacauggcgaaaccccgucucuauuaa

SEQ ID NO: 256713 - RNA, 32 nt, Human
uggccaacauggcgaaaccccgucuuuacuaa

SEQ ID NO: 256714 - RNA, 32 nt, Human
uggccaacauggcgaaaccccucucuacuaaa

SEQ ID NO: 256715 - RNA, 32 nt, Human
uggccaacauggcgaaaccccuucucuacuaa

SEQ ID NO: 256716 - RNA, 32 nt, Human
uggccaacauggcgaaacccuaucucuacuaa

SEQ ID NO: 256717 - RNA, 32 nt, Human
uggccaacauggcgaaacccuaucucuccuaa

SEQ ID NO: 256718 - RNA, 32 nt, Human
uggccaacauggcgaaacccugucucuacuaa

SEQ ID NO: 256719 - RNA, 32 nt, Human
uggccaacauggcgaaaccucaucucuacuaa

SEQ ID NO: 256720 - RNA, 32 nt, Human
uggccaacauggcgaaaccucauuucuacuaa

SEQ ID NO: 256721 - RNA, 32 nt, Human
uggccaacauggcgaaaccucgccucuacuaa

SEQ ID NO: 256722 - RNA, 32 nt, Human
uggccaacauggcgaaaccucuucucuacuaa

SEQ ID NO: 256723 - RNA, 32 nt, Human
uggccaacauggcgaaacuccgucacuacuaa

SEQ ID NO: 256724 - RNA, 30 nt, Human
uggccaacauggcgaaaucccgucuuuacc

SEQ ID NO: 256725 - RNA, 32 nt, Human
uggccaacauggcgaaauuccaucucuaguaa

SEQ ID NO: 256726 - RNA, 32 nt, Human
uggccaacauggcgaauucccguucucuacua

SEQ ID NO: 256727 - RNA, 32 nt, Human
uggccaacauggcgagaccccaucucuacuaa

SEQ ID NO: 256728 - RNA, 32 nt, Human
uggccaacauggcggaaccccaucuccacuaa

SEQ ID NO: 256729 - RNA, 32 nt, Human
uggccaacauggcggaacccugucucuaccaa

SEQ ID NO: 256730 - RNA, 32 nt, Human
uggccaacauggggaaaccccaucucuacuaa

SEQ ID NO: 256731 - RNA, 32 nt, Human
uggccaacauggggaaaccccgucucuacuaa

SEQ ID NO: 256732 - RNA, 32 nt, Human
uggccaacauggggaaacuccgucucuacuaa

SEQ ID NO: 256733 - RNA, 32 nt, Human
uggccaacauggggaaaucccaucucuacuaa

SEQ ID NO: 256734 - RNA, 32 nt, Human
uggccaacaugguaaaaccccaucucuacuaa

SEQ ID NO: 256735 - RNA, 32 nt, Human
uggccaacaugguaaaaccccgucucuacuaa

SEQ ID NO: 256736 - RNA, 32 nt, Human
uggccaacaugguaaaacgccgucucuacuaa

SEQ ID NO: 256737 - RNA, 32 nt, Human
uggccaacaugguaaaaucccgucucuacuaa

SEQ ID NO: 256738 - RNA, 32 nt, Human
uggccaacauggucaaaacccgucucuacuaa

SEQ ID NO: 256739 - RNA, 32 nt, Human
uggccaacauggucccagcugcagggcagcca

SEQ ID NO: 256740 - RNA, 32 nt, Human
uggccaacauggugaaaacccaucucuauuaa

SEQ ID NO: 256741 - RNA, 32 nt, Human
uggccaacauggugaaaacccaucucugcuga

SEQ ID NO: 256742 - RNA, 32 nt, Human
uggccaacauggugaaaccccaucuccacaaa

SEQ ID NO: 256743 - RNA, 32 nt, Human
uggccaacauggugaaaccccaucuccacuaa

SEQ ID NO: 256744 - RNA, 32 nt, Human
uggccaacauggugaaaccccaucucuacaaa

SEQ ID NO: 256745 - RNA, 32 nt, Human
uggccaacauggugaaaccccaucucuacagu

SEQ ID NO: 256746 - RNA, 32 nt, Human
uggccaacauggugaaaccccaucucuaccaa

SEQ ID NO: 256747 - RNA, 30 nt, Human
uggccaacauggugaaaccccaucucuacu

SEQ ID NO: 256748 - RNA, 32 nt, Human
uggccaacauggugaaaccccaucucuacuaa

SEQ ID NO: 256749 - RNA, 32 nt, Human
uggccaacauggugaaaccccaucucuacuag

SEQ ID NO: 256750 - RNA, 32 nt, Human
uggccaacauggugaaaccccaucucuacuga

SEQ ID NO: 256751 - RNA, 32 nt, Human
uggccaacauggugaaaccccaucucuaucag

SEQ ID NO: 256752 - RNA, 32 nt, Human
uggccaacauggugaaaccccaucucuauuaa

SEQ ID NO: 256753 - RNA, 32 nt, Human
uggccaacauggugaaaccccaucucuauuau

SEQ ID NO: 256754 - RNA, 32 nt, Human
uggccaacauggugaaaccccaucucugcuaa

SEQ ID NO: 256755 - RNA, 32 nt, Human
uggccaacauggugaaaccccgucuccacuaa

SEQ ID NO: 256756 - RNA, 32 nt, Human
uggccaacauggugaaaccccgucucuacaaa

SEQ ID NO: 256757 - RNA, 32 nt, Human
uggccaacauggugaaaccccgucucuaccaa

SEQ ID NO: 256758 - RNA, 32 nt, Human
uggccaacauggugaaaccccgucucuacuaa

SEQ ID NO: 256759 - RNA, 32 nt, Human
uggccaacauggugaaaccccgucucuacuua

SEQ ID NO: 256760 - RNA, 32 nt, Human
uggccaacauggugaaaccccgucucuaguaa

SEQ ID NO: 256761 - RNA, 32 nt, Human
uggccaacauggugaaaccccgucucuauuaa

SEQ ID NO: 256762 - RNA, 32 nt, Human
uggccaacauggugaaaccccgucucuauuac

SEQ ID NO: 256763 - RNA, 32 nt, Human
uggccaacauggugaaacgccaucucuaccaa

SEQ ID NO: 256764 - RNA, 32 nt, Human
uggccaacauggugaaacgccaucucuacuaa

SEQ ID NO: 256765 - RNA, 32 nt, Human
uggccaacauggugaaacuccaucucuacuaa

SEQ ID NO: 256766 - RNA, 32 nt, Human
uggccaacauggugaaacuccaucucuccuaa

SEQ ID NO: 256767 - RNA, 32 nt, Human
uggccaacauggugaaacuccgucucuacuaa

SEQ ID NO: 256768 - RNA, 32 nt, Human
uggccaacauggugaaacuccgucucugcuaa

SEQ ID NO: 256769 - RNA, 32 nt, Human
uggccaacauggugaaaucccaucucuacuga

SEQ ID NO: 256770 - RNA, 32 nt, Human
uggccaacauggugaaaucccgucucuacuaa

SEQ ID NO: 256771 - RNA, 32 nt, Human
uggccaacauggugaaaucccgucucuacugc

SEQ ID NO: 256772 - RNA, 32 nt, Human
uggccaacauggugaaaugccgucucuacuaa

SEQ ID NO: 256773 - RNA, 32 nt, Human
uggccaacauggugaaccccaucucuacuaaa

SEQ ID NO: 256774 - RNA, 30 nt, Human
uggccaacauggugaagccccaucucuacu

SEQ ID NO: 256775 - RNA, 32 nt, Human
uggccaacauggugaagcuccgucucuacuaa

SEQ ID NO: 256776 - RNA, 32 nt, Human
uggccaacauggugaagucccgucucuacuaa

SEQ ID NO: 256777 - RNA, 32 nt, Human
uggccaacauggugaauccccgucucuauuaa

SEQ ID NO: 256778 - RNA, 32 nt, Human
uggccaacauggugacaccccgucucuacuaa

SEQ ID NO: 256779 - RNA, 32 nt, Human
uggccaacauggugagacaccgucucuacuaa

SEQ ID NO: 256780 - RNA, 32 nt, Human
uggccaacauggugagaccccaucucuacaaa

SEQ ID NO: 256781 - RNA, 32 nt, Human
uggccaacauggugagaccccaucucugcuaa

SEQ ID NO: 256782 - RNA, 32 nt, Human
uggccaacauggugagcccccgucucuacuaa

SEQ ID NO: 256783 - RNA, 32 nt, Human
uggccaacaugguuaaaccccaucucuacgaa

SEQ ID NO: 256784 - RNA, 32 nt, Human
uggccaacaugguuaaaccccgucucuacuaa

SEQ ID NO: 256785 - RNA, 32 nt, Human
uggccaacaugucgaagugccaucucuacuaa

SEQ ID NO: 256786 - RNA, 32 nt, Human
uggccaacaugugaaaccccgucuccacugaa

SEQ ID NO: 256787 - RNA, 32 nt, Human
uggccaacauuguaaaaccccaucucuacuaa

SEQ ID NO: 256788 - RNA, 32 nt, Human
uggccaacauugugaaaccccaucucuacaaa

SEQ ID NO: 256789 - RNA, 32 nt, Human
uggccaacauugugaaaccccaucucugccaa

SEQ ID NO: 256790 - RNA, 24 nt, Human
uggccaacccagcaguccuucccu

SEQ ID NO: 256791 - RNA, 32 nt, Human
uggccaacccagccuggucaacauggugaaac

SEQ ID NO: 256792 - RNA, 32 nt, Human
uggccaaccccacagggagcucuggaguuaaa

SEQ ID NO: 256793 - RNA, 32 nt, Human
uggccaaccugccuuuccccagaaggagugau

SEQ ID NO: 256794 - RNA, 32 nt, Human
uggccaaccuggugaaaccccaucucugcuaa

SEQ ID NO: 256795 - RNA, 32 nt, Human
uggccaaccuggugaaaccccgucucuauuaa

SEQ ID NO: 256796 - RNA, 32 nt, Human
uggccaacgcccgagugucuguuuucaggagc

SEQ ID NO: 256797 - RNA, 32 nt, Human
uggccaacguagugaaaccccgucucuacaaa

SEQ ID NO: 256798 - RNA, 32 nt, Human
uggccaacgugaugaaacuccaucucuacaaa

SEQ ID NO: 256799 - RNA, 32 nt, Human
uggccaacguggcaaaaccccaucucuacuaa

SEQ ID NO: 256800 - RNA, 32 nt, Human
uggccaacguggcaaaaccccgucucuacuaa

SEQ ID NO: 256801 - RNA, 32 nt, Human
uggccaacguggcaaaacuccaucucuauuaa

SEQ ID NO: 256802 - RNA, 32 nt, Human
uggccaacguggcaaauacccaucucuacuaa

SEQ ID NO: 256803 - RNA, 32 nt, Human
uggccaacguggggaaaccccaucucuacgaa

SEQ ID NO: 256804 - RNA, 32 nt, Human
uggccaacguggugaaacaccgucucuacuaa

SEQ ID NO: 256805 - RNA, 32 nt, Human
uggccaacguggugaaaccccaucucuacuaa

SEQ ID NO: 256806 - RNA, 32 nt, Human
uggccaacguggugaaaccccgucucuacuaa

SEQ ID NO: 256807 - RNA, 32 nt, Human
uggccaacguggugaaaccccgucucuacuga

SEQ ID NO: 256808 - RNA, 32 nt, Human
uggccaacuucaacauacccuggaccaaaaca

SEQ ID NO: 256809 - RNA, 32 nt, Human
uggccaacuucugaacaggaagcaguucgcuc

SEQ ID NO: 256810 - RNA, 32 nt, Human
uggccaacuugaugaaaccccaucucuacccg

SEQ ID NO: 256811 - RNA, 32 nt, Human
uggccaacuuggugaaaccccaucucuacaaa

SEQ ID NO: 256812 - RNA, 32 nt, Human
uggccaacuuggugaaaccccgucuuuacuaa

SEQ ID NO: 256813 - RNA, 32 nt, Human
uggccaagagggcugaggucugacccugcuuu

SEQ ID NO: 256814 - RNA, 32 nt, Human
uggccaagauggugaaaccccaucucuacuaa

SEQ ID NO: 256815 - RNA, 32 nt, Human
uggccaagauggugaaaccccaucucugcaaa

SEQ ID NO: 256816 - RNA, 32 nt, Human
uggccaagauggugaaaucccaucucuacaaa

SEQ ID NO: 256817 - RNA, 32 nt, Human
uggccaagcccuccucuucccagaauuggccc

SEQ ID NO: 256818 - RNA, 32 nt, Human
uggccaagccuggcccuuaaacaacugcagaa

SEQ ID NO: 256819 - RNA, 32 nt, Human
uggccaagcuacuagaaugcagcuaggaaagu

SEQ ID NO: 256820 - RNA, 32 nt, Human
uggccaaggagaaaucaaaguccuuccuaaau

SEQ ID NO: 256821 - RNA, 32 nt, Human
uggccaaggcuuccugcauugcuucccuguga

SEQ ID NO: 256822 - RNA, 32 nt, Human
uggccaagggccugaugcugugguccuguuug

SEQ ID NO: 256823 - RNA, 15 nt, Human
uggccaagguccagc

SEQ ID NO: 256824 - RNA, 32 nt, Human
uggccaaguaguacagcuagagcccagggucc

SEQ ID NO: 256825 - RNA, 17 nt, Human
uggccaaguaugggguc

SEQ ID NO: 256826 - RNA, 21 nt, Human
uggccaaguccaaggucacac

SEQ ID NO: 256827 - RNA, 32 nt, Human
uggccaagucucugagaucuucucccagggcg

SEQ ID NO: 256828 - RNA, 32 nt, Human
uggccaauaaggugaaacuccaucucuacuaa

SEQ ID NO: 256829 - RNA, 32 nt, Human
uggccaauagaagagacaggagacaggaagcc

SEQ ID NO: 256830 - RNA, 32 nt, Human
uggccaauaugaugaaaccccaucucuacuaa

SEQ ID NO: 256831 - RNA, 32 nt, Human
uggccaauaugcaaaaccacaucucuacuaaa

SEQ ID NO: 256832 - RNA, 32 nt, Human
uggccaauaugcgaaaccacaucucuacuaaa

SEQ ID NO: 256833 - RNA, 32 nt, Human
uggccaauauggcaaaaccccaucucuacuaa

SEQ ID NO: 256834 - RNA, 32 nt, Human
uggccaauauggcgaaaccccaucucuacuaa

SEQ ID NO: 256835 - RNA, 32 nt, Human
uggccaauauggugaaaccccaucucuacaaa

SEQ ID NO: 256836 - RNA, 32 nt, Human
uggccaauauggugaaaccccaucucuacuaa

SEQ ID NO: 256837 - RNA, 32 nt, Human
uggccaauauggugaaaccccgucucuacuaa

SEQ ID NO: 256838 - RNA, 32 nt, Human
uggccaauauggugagaccccaucucuacuaa

SEQ ID NO: 256839 - RNA, 31 nt, Human
uggccaaugaacacaagcagauuugcagauc

SEQ ID NO: 256840 - RNA, 32 nt, Human
uggccaauggagacagaggcuuagugcagagc

SEQ ID NO: 256841 - RNA, 32 nt, Human
uggccaaugugaugaaaccccgucucuacuaa

SEQ ID NO: 256842 - RNA, 32 nt, Human
uggccaauguggugaaaccccaucucuacuaa

SEQ ID NO: 256843 - RNA, 32 nt, Human
uggccaauguggugaaacuccaucucuucuaa

SEQ ID NO: 256844 - RNA, 32 nt, Human
uggccaauucucccaggaguccuggccacuuu

SEQ ID NO: 256845 - RNA, 32 nt, Human
uggccaauuggagcaucucugauguccagcaa

SEQ ID NO: 256846 - RNA, 32 nt, Human
uggccacaagcuuuuucuauccuguuuucaug

SEQ ID NO: 256847 - RNA, 32 nt, Human
uggccacaaggccaguggcaccugccagaggg

SEQ ID NO: 256848 - RNA, 26 nt, Human
uggccacaagugaucugcccgccuua

SEQ ID NO: 256849 - RNA, 18 nt, Human
uggccacacacucagcca

SEQ ID NO: 256850 - RNA, 32 nt, Human
uggccacacagcugcccccaucgccuggcggg

SEQ ID NO: 256851 - RNA, 32 nt, Human
uggccacaccagccgucggccucccaggcugu

SEQ ID NO: 256852 - RNA, 32 nt, Human
uggccacaccuugccuccucuucccgucccag

SEQ ID NO: 256853 - RNA, 32 nt, Human
uggccacacuggggcugccuuucucugacucu

SEQ ID NO: 256854 - RNA, 23 nt, Human
uggccacacuuggcagcccuccu

SEQ ID NO: 256855 - RNA, 32 nt, Human
uggccacagaacuuggcucaggagaugacaug

SEQ ID NO: 256856 - RNA, 32 nt, Human
uggccacagagcaugggcugggccugggcaca

SEQ ID NO: 256857 - RNA, 19 nt, Human
uggccacagcagcgcgagg

SEQ ID NO: 256858 - RNA, 32 nt, Human
uggccacagcugugugcucagucagugcacug

SEQ ID NO: 256859 - RNA, 32 nt, Human
uggccacaggcagguccagucacugcaaaagu

SEQ ID NO: 256860 - RNA, 32 nt, Human
uggccacaggcaguagaggaggaaugaggaug

SEQ ID NO: 256861 - RNA, 32 nt, Human
uggccacaggcuagauccccggugguuuugug

SEQ ID NO: 256862 - RNA, 32 nt, Human
uggccacaggggcucaccugggccccauggcu

SEQ ID NO: 256863 - RNA, 32 nt, Human
uggccacaggugacacuugguccuugcugcca

SEQ ID NO: 256864 - RNA, 32 nt, Human
uggccacauagcccccagccaggagagaugac

SEQ ID NO: 256865 - RNA, 32 nt, Human
uggccacauggugaaacccugucucuacuaaa

SEQ ID NO: 256866 - RNA, 32 nt, Human
uggccacauggugcaaccccgucuuaguaaaa

SEQ ID NO: 256867 - RNA, 32 nt, Human
uggccaccacuccaccagaugggcagagcagc

SEQ ID NO: 256868 - RNA, 21 nt, Human
uggccaccagcaggcccuugg

SEQ ID NO: 256869 - RNA, 32 nt, Human
uggccaccagccucgucacauacaccagcauc

SEQ ID NO: 256870 - RNA, 32 nt, Human
uggccaccauggcaaaugcugagaucugaggg

SEQ ID NO: 256871 - RNA, 32 nt, Human
uggccaccauggugagaccccgucucuacuaa

SEQ ID NO: 256872 - RNA, 32 nt, Human
uggccaccaugucugcacacaccagaaaugga

SEQ ID NO: 256873 - RNA, 32 nt, Human
uggccacccaccucacugacagucuuccuuuc

SEQ ID NO: 256874 - RNA, 32 nt, Human
uggccaccccgcugccccauggcuggcugggu

SEQ ID NO: 256875 - RNA, 21 nt, Human
uggccaccggcccaacugcag

SEQ ID NO: 256876 - RNA, 32 nt, Human
uggccaccguggcgaaacaccgucucuacuaa

SEQ ID NO: 256877 - RNA, 20 nt, Human
uggccaccguguucccagca

SEQ ID NO: 256878 - RNA, 19 nt, Human
uggccaccuacccgagaga

SEQ ID NO: 256879 - RNA, 19 nt, Human
uggccaccuccccucccca

SEQ ID NO: 256880 - RNA, 32 nt, Human
uggccaccuccccuccccacagccuuccucac

SEQ ID NO: 256881 - RNA, 32 nt, Human
uggccaccuccccugcuucucccugggcugug

SEQ ID NO: 256882 - RNA, 19 nt, Human
uggccaccuccucugcaca

SEQ ID NO: 256883 - RNA, 32 nt, Human
uggccaccucucuccuuugcugaggccuccag

SEQ ID NO: 256884 - RNA, 22 nt, Human
uggccaccugagaccugcucca

SEQ ID NO: 256885 - RNA, 32 nt, Human
uggccaccugcaggaugugcagggcugccuca

SEQ ID NO: 256886 - RNA, 32 nt, Human
uggccaccugugucacccuugugccuuagccu

SEQ ID NO: 256887 - RNA, 23 nt, Human
uggccacgacccagcccuccccc

SEQ ID NO: 256888 - RNA, 32 nt, Human
uggccacgccuccugagaccacuuggaaacag

SEQ ID NO: 256889 - RNA, 22 nt, Human
uggccacgcugcugaucguccu

SEQ ID NO: 256890 - RNA, 32 nt, Human
uggccacggaaacugguucacugguuggcacc

SEQ ID NO: 256891 - RNA, 32 nt, Human
uggccacggaacccaccaugcacugcaaggcu

SEQ ID NO: 256892 - RNA, 32 nt, Human
uggccacggcugcuugugaaugcagcuuugcc

SEQ ID NO: 256893 - RNA, 32 nt, Human
uggccacgggaggcggggcugcauggcugggg

SEQ ID NO: 256894 - RNA, 32 nt, Human
uggccacgucacaaccucugaucucagaccgu

SEQ ID NO: 256895 - RNA, 32 nt, Human
uggccacgugcagaagaagugcggcugggggc

SEQ ID NO: 256896 - RNA, 32 nt, Human
uggccacguguagccccagcugucugcaggca

SEQ ID NO: 256897 - RNA, 32 nt, Human
uggccacuagagacagcccagccugggccaug

SEQ ID NO: 256898 - RNA, 32 nt, Human
uggccacucacauccaggucucugccuggcua

SEQ ID NO: 256899 - RNA, 32 nt, Human
uggccacucccagcacaauuuggagugucaag

SEQ ID NO: 256900 - RNA, 21 nt, Human
uggccacugagcccccuugga

SEQ ID NO: 256901 - RNA, 32 nt, Human
uggccacugaggaaccacacugugcugcggaa

SEQ ID NO: 256902 - RNA, 32 nt, Human
uggccacugcaagcuccaccucccagguucac

SEQ ID NO: 256903 - RNA, 32 nt, Human
uggccacugcaauccagccugggcgauagagu

SEQ ID NO: 256904 - RNA, 32 nt, Human
uggccacugcauucaaauuccaauguguacuu

SEQ ID NO: 256905 - RNA, 32 nt, Human
uggccacugcccucguccccagccugcacucc

SEQ ID NO: 256906 - RNA, 32 nt, Human
uggccacugcgucuggcauuccugggucguua

SEQ ID NO: 256907 - RNA, 32 nt, Human
uggccacugcucccuaagccagccugguccau

SEQ ID NO: 256908 - RNA, 18 nt, Human
uggccacuggcacacuua

SEQ ID NO: 256909 - RNA, 32 nt, Human
uggccacugggcugggcuggagucuggcuggu

SEQ ID NO: 256910 - RNA, 32 nt, Human
uggccacugugcguuacagccuggaggggcgc

SEQ ID NO: 256911 - RNA, 19 nt, Human
uggccacugugggagggaa

SEQ ID NO: 256912 - RNA, 32 nt, Human
uggccacuucacuaucuucuucaaauacaaag

SEQ ID NO: 256913 - RNA, 32 nt, Human
uggccacuucucugauccucuggccaacacac

SEQ ID NO: 256914 - RNA, 32 nt, Human
uggccacuugacuuguggaaggccaucuugau

SEQ ID NO: 256915 - RNA, 32 nt, Human
uggccacuugaguuuguccuccaaggguaggu

SEQ ID NO: 256916 - RNA, 30 nt, Human
uggccagaaagccacaagcgcaaucaugcu

SEQ ID NO: 256917 - RNA, 32 nt, Human
uggccagaaagccacaagcgcaaucaugcuuu

SEQ ID NO: 256918 - RNA, 32 nt, Human
uggccagaaauaaaguuccucccaguuccaga

SEQ ID NO: 256919 - RNA, 32 nt, Human
uggccagaacuccaaccauguggaaucugagg

SEQ ID NO: 256920 - RNA, 32 nt, Human
uggccagaagauggcagcaaaccaccagcuuc

SEQ ID NO: 256921 - RNA, 32 nt, Human
uggccagacaacacucacugcaggccuuagcc

SEQ ID NO: 256922 - RNA, 27 nt, Human
uggccagacucugacccaccuaccuca

SEQ ID NO: 256923 - RNA, 32 nt, Human
uggccagacucugacccaccuaccucagcugg

SEQ ID NO: 256924 - RNA, 32 nt, Human
uggccagacuggucucaaacuccugggcugaa

SEQ ID NO: 256925 - RNA, 32 nt, Human
uggccagacugugccagaacauggugacagac

SEQ ID NO: 256926 - RNA, 32 nt, Human
uggccagagacaccuccaggccguagccuggg

SEQ ID NO: 256927 - RNA, 32 nt, Human
uggccagagagcuguucuuguuucugguguug

SEQ ID NO: 256928 - RNA, 32 nt, Human
uggccagagaggaggagaaggagggugagagg

SEQ ID NO: 256929 - RNA, 32 nt, Human
uggccagagagggaaggugaacagcagaagac

SEQ ID NO: 256930 - RNA, 32 nt, Human
uggccagagauaaaauuccucccaguuccaga

SEQ ID NO: 256931 - RNA, 32 nt, Human
uggccagagaugcuggacuugccuaaauauau

SEQ ID NO: 256932 - RNA, 32 nt, Human
uggccagagcacaggugcccuuuugucaggau

SEQ ID NO: 256933 - RNA, 32 nt, Human
uggccagagcuccuugccaucugcuaagaaga

SEQ ID NO: 256934 - RNA, 19 nt, Human
uggccagaggcaggguggc

SEQ ID NO: 256935 - RNA, 32 nt, Human
uggccagaggcucgaggggcucaggggcucag

SEQ ID NO: 256936 - RNA, 32 nt, Human
uggccagagucaggggacagggagagagcucc

SEQ ID NO: 256937 - RNA, 32 nt, Human
uggccagagucaggggacagggagggagcucc

SEQ ID NO: 256938 - RNA, 32 nt, Human
uggccagagugcccugaagcaccacuaccaac

SEQ ID NO: 256939 - RNA, 32 nt, Human
uggccagagugcgucuggagggaacacggcau

SEQ ID NO: 256940 - RNA, 32 nt, Human
uggccagauaaauuaagucaaacauuugguuu

SEQ ID NO: 256941 - RNA, 32 nt, Human
uggccagaugcacugggaacagagccacgggu

SEQ ID NO: 256942 - RNA, 32 nt, Human
uggccagauuccagauaguauugugaacaaga

SEQ ID NO: 256943 - RNA, 32 nt, Human
uggccagauucugcccuuaggauccaaaccuu

SEQ ID NO: 256944 - RNA, 32 nt, Human
uggccagcaaggugaaaccccaucucuacuaa

SEQ ID NO: 256945 - RNA, 32 nt, Human
uggccagcacacugcuaaccagucaccaaaug

SEQ ID NO: 256946 - RNA, 32 nt, Human
uggccagcacagagccggggcguugauucuga

SEQ ID NO: 256947 - RNA, 32 nt, Human
uggccagcacggugaaaccccgucucugcuga

SEQ ID NO: 256948 - RNA, 21 nt, Human
uggccagcacugcucccggca

SEQ ID NO: 256949 - RNA, 32 nt, Human
uggccagcacugggugagaguggggagggggc

SEQ ID NO: 256950 - RNA, 32 nt, Human
uggccagcaggguuuguggccgccucugcugu

SEQ ID NO: 256951 - RNA, 32 nt, Human
uggccagcaguguccuccagcacuuccauuuu

SEQ ID NO: 256952 - RNA, 32 nt, Human
uggccagcauagugaaaccccaucucuacuaa

SEQ ID NO: 256953 - RNA, 32 nt, Human
uggccagcauggcaaaaccccgucucuacuaa

SEQ ID NO: 256954 - RNA, 32 nt, Human
uggccagcauggcgaaaccccaucucuacuaa

SEQ ID NO: 256955 - RNA, 32 nt, Human
uggccagcauggugaaaccccaucucuaccaa

SEQ ID NO: 256956 - RNA, 32 nt, Human
uggccagcauggugaaaccccaucucuacuaa

SEQ ID NO: 256957 - RNA, 32 nt, Human
uggccagcauggugaaaccccaucucuacuau

SEQ ID NO: 256958 - RNA, 32 nt, Human
uggccagcauggugaaaccccgucucuacuaa

SEQ ID NO: 256959 - RNA, 32 nt, Human
uggccagcauggugaaacccugucuuuacuaa

SEQ ID NO: 256960 - RNA, 32 nt, Human
uggccagcauggugagaccccgucucuauuaa

SEQ ID NO: 256961 - RNA, 32 nt, Human
uggccagcauugaggaauuccacagacacaua

SEQ ID NO: 256962 - RNA, 32 nt, Human
uggccagccagccugacguggcugccuuccuc

SEQ ID NO: 256963 - RNA, 32 nt, Human
uggccagccagguggaagaaaguuuccaagcu

SEQ ID NO: 256964 - RNA, 32 nt, Human
uggccagcccagaaccccuggccagucgcugg

SEQ ID NO: 256965 - RNA, 32 nt, Human
uggccagcccaggagaucaucaugcaaucguc

SEQ ID NO: 256966 - RNA, 18 nt, Human
uggccagccuccacuccc

SEQ ID NO: 256967 - RNA, 32 nt, Human
uggccagccuccagcuccucagaccuccuggg

SEQ ID NO: 256968 - RNA, 32 nt, Human
uggccagccuccagcucucagccaggaggucc

SEQ ID NO: 256969 - RNA, 18 nt, Human
uggccagccuuccccagu

SEQ ID NO: 256970 - RNA, 32 nt, Human
uggccagcucaagguguuuccuuuugccuggu

SEQ ID NO: 256971 - RNA, 32 nt, Human
uggccagcucugcauuugacaaaugccaggaa

SEQ ID NO: 256972 - RNA, 21 nt, Human
uggccagcugcccaccccagu

SEQ ID NO: 256973 - RNA, 32 nt, Human
uggccagcugcucagggcucaggcuggggccu

SEQ ID NO: 256974 - RNA, 32 nt, Human
uggccagcugguccccgcuacauucaaccaau

SEQ ID NO: 256975 - RNA, 20 nt, Human
uggccagcuucuucagcaag

SEQ ID NO: 256976 - RNA, 32 nt, Human
uggccaggaaagggcaguccugagggagaaga

SEQ ID NO: 256977 - RNA, 32 nt, Human
uggccaggaaggcacaagguagcugugggcca

SEQ ID NO: 256978 - RNA, 32 nt, Human
uggccaggacagugaugccaccagggagagcu

SEQ ID NO: 256979 - RNA, 32 nt, Human
uggccaggagcuccuggcugggacacggagag

SEQ ID NO: 256980 - RNA, 32 nt, Human
uggccaggaguugggagaccagccuggggacc

SEQ ID NO: 256981 - RNA, 20 nt, Human
uggccaggaucccccacuuc

SEQ ID NO: 256982 - RNA, 32 nt, Human
uggccaggaugcauagaggagauucuagcagg

SEQ ID NO: 256983 - RNA, 32 nt, Human
uggccaggcacagagccaggugcuuuacaugu

SEQ ID NO: 256984 - RNA, 32 nt, Human
uggccaggcagaggucuguggaguggagaggc

SEQ ID NO: 256985 - RNA, 32 nt, Human
uggccaggcagagucagcagcugcagugugga

SEQ ID NO: 256986 - RNA, 32 nt, Human
uggccaggcagggagagaguagcugcagccuu

SEQ ID NO: 256987 - RNA, 18 nt, Human
uggccaggccacaguaaa

SEQ ID NO: 256988 - RNA, 21 nt, Human
uggccaggccagagcugcagc

SEQ ID NO: 256989 - RNA, 32 nt, Human
uggccaggccugagacacagaggcccacugcg

SEQ ID NO: 256990 - RNA, 32 nt, Human
uggccaggcuagucucaaaccccugaccuuag

SEQ ID NO: 256991 - RNA, 32 nt, Human
uggccaggcucgaagcagucucuguuuccagc

SEQ ID NO: 256992 - RNA, 20 nt, Human
uggccaggcugacugguccc

SEQ ID NO: 256993 - RNA, 32 nt, Human
uggccaggcugcucucaaaccccugaccucaa

SEQ ID NO: 256994 - RNA, 32 nt, Human
uggccaggcuggucucgaaccccugagcucag

SEQ ID NO: 256995 - RNA, 32 nt, Human
uggccaggcuggucuggaaccccuggccucgg

SEQ ID NO: 256996 - RNA, 32 nt, Human
uggccaggcuggucuugaaccccugaccucag

SEQ ID NO: 256997 - RNA, 32 nt, Human
uggccaggcuggucuugaauucuuggccccag

SEQ ID NO: 256998 - RNA, 32 nt, Human
uggccaggcuugguggcucaggccuguaaucc

SEQ ID NO: 256999 - RNA, 32 nt, Human
uggccagggaaaugccagcagcaauaaaagaa

SEQ ID NO: 257000 - RNA, 19 nt, Human
uggccagggaauaggggga

SEQ ID NO: 257001 - RNA, 18 nt, Human
uggccagggaccccauca

SEQ ID NO: 257002 - RNA, 32 nt, Human
uggccagggaggaaugucccuuuuguucuucc

SEQ ID NO: 257003 - RNA, 32 nt, Human
uggccagggaggaugcuggagcggagaagauc

SEQ ID NO: 257004 - RNA, 32 nt, Human
uggccagggaggcauugcugcaggugagccug

SEQ ID NO: 257005 - RNA, 32 nt, Human
uggccagggcaggcugggagggacauacuuuc

SEQ ID NO: 257006 - RNA, 32 nt, Human
uggccagggcugccguggcaaaaugagcuguc

SEQ ID NO: 257007 - RNA, 32 nt, Human
uggccagggcuggucucgaacuccugaccaca

SEQ ID NO: 257008 - RNA, 19 nt, Human
uggccaggggucaccagca

SEQ ID NO: 257009 - RNA, 32 nt, Human
uggccaggguucccagaaggaaggaacucacc

SEQ ID NO: 257010 - RNA, 32 nt, Human
uggccaggguucccuagccuauggagcacgca

SEQ ID NO: 257011 - RNA, 18 nt, Human
uggccagguacaggggga

SEQ ID NO: 257012 - RNA, 32 nt, Human
uggccagguauuuuaggaugugagaaggaaga

SEQ ID NO: 257013 - RNA, 32 nt, Human
uggccagguggaggagggaggggaggagcagg

SEQ ID NO: 257014 - RNA, 32 nt, Human
uggccaggugguggagacagagacaggcccug

SEQ ID NO: 257015 - RNA, 32 nt, Human
uggccagguuccuugcccuccccaccccaucc

SEQ ID NO: 257016 - RNA, 32 nt, Human
uggccaguagaggugguggagcagagcagcca

SEQ ID NO: 257017 - RNA, 32 nt, Human
uggccagucacgugaaggugggcagggcccuu

SEQ ID NO: 257018 - RNA, 32 nt, Human
uggccaguccacccugccugccgucugugcuu

SEQ ID NO: 257019 - RNA, 32 nt, Human
uggccagucccgagcccucccucccaggcacc

SEQ ID NO: 257020 - RNA, 18 nt, Human
uggccagucccucugcca

SEQ ID NO: 257021 - RNA, 32 nt, Human
uggccagugaggaagucuugaagaauagagcc

SEQ ID NO: 257022 - RNA, 22 nt, Human
uggccagugaggagcucacagg

SEQ ID NO: 257023 - RNA, 32 nt, Human
uggccagugauaagaaauuaaauaaguauuug

SEQ ID NO: 257024 - RNA, 17 nt, Human
uggccagugugauccca

SEQ ID NO: 257025 - RNA, 32 nt, Human
uggccaguuaagcagagacuucacugacugac

SEQ ID NO: 257026 - RNA, 32 nt, Human
uggccaguucauagcagcacugugaggacccc

SEQ ID NO: 257027 - RNA, 32 nt, Human
uggccaguuccaccugccccagccagagggca

SEQ ID NO: 257028 - RNA, 32 nt, Human
uggccaguugagucucucaaaugaggggcuac

SEQ ID NO: 257029 - RNA, 32 nt, Human
uggccauaaaaauacgggaauaaguuguggaa

SEQ ID NO: 257030 - RNA, 32 nt, Human
uggccauaaaccacagacucucuccaggcucu

SEQ ID NO: 257031 - RNA, 23 nt, Human
uggccauaaucuguaauuccugc

SEQ ID NO: 257032 - RNA, 32 nt, Human
uggccauagauguauuucuguguguacauaug

SEQ ID NO: 257033 - RNA, 32 nt, Human
uggccauagccccuccuggagauggggucaag

SEQ ID NO: 257034 - RNA, 32 nt, Human
uggccaucacuaccaaccaggguuucaaaaag

SEQ ID NO: 257035 - RNA, 32 nt, Human
uggccaucauaaccccaguacucaguaggcgc

SEQ ID NO: 257036 - RNA, 32 nt, Human
uggccaucauggugaaaccccaucucuacuaa

SEQ ID NO: 257037 - RNA, 32 nt, Human
uggccaucauggugucaggaaggcugagaugu

SEQ ID NO: 257038 - RNA, 32 nt, Human
uggccauccaccuaaggacugccugcuuucug

SEQ ID NO: 257039 - RNA, 32 nt, Human
uggccauccacucagcugauguuuccugggaa

SEQ ID NO: 257040 - RNA, 32 nt, Human
uggccauccuguugccccaggcacaugaccuu

SEQ ID NO: 257041 - RNA, 32 nt, Human
uggccaucucgcuccuccuccucuguuccaau

SEQ ID NO: 257042 - RNA, 32 nt, Human
uggccaucuggaccucaauccccagcuuuccc

SEQ ID NO: 257043 - RNA, 32 nt, Human
uggccaucuguggagccccagagccugcggcu

SEQ ID NO: 257044 - RNA, 32 nt, Human
uggccaucuucccacucucucuucgcaucauc

SEQ ID NO: 257045 - RNA, 32 nt, Human
uggccaucuuugcuacuuuccuagagaacccg

SEQ ID NO: 257046 - RNA, 30 nt, Human
uggccaugacgggcuggagcugccuuguga

SEQ ID NO: 257047 - RNA, 32 nt, Human
uggccaugccaaacagcacccagcacaaguag

SEQ ID NO: 257048 - RNA, 32 nt, Human
uggccaugcccagggcugguguugguugagga

SEQ ID NO: 257049 - RNA, 23 nt, Human
uggccaugccuccacccaccuua

SEQ ID NO: 257050 - RNA, 32 nt, Human
uggccaugcucaccgcccugcuucacugcccc

SEQ ID NO: 257051 - RNA, 32 nt, Human
uggccaugcugggcuggaguggcuguggggug

SEQ ID NO: 257052 - RNA, 32 nt, Human
uggccaugcuggucucaaauucugaaagagga

SEQ ID NO: 257053 - RNA, 32 nt, Human
uggccaugggcagaggcgaagggcuggugggc

SEQ ID NO: 257054 - RNA, 32 nt, Human
uggccaugggcuaugcccucccuuccuccuga

SEQ ID NO: 257055 - RNA, 32 nt, Human
uggccauggggaggggccauggcuuggcaugu

SEQ ID NO: 257056 - RNA, 32 nt, Human
uggccaugucccuugugcauugagugcauccc

SEQ ID NO: 257057 - RNA, 32 nt, Human
uggccaugucggcagggccagggccuccuaca

SEQ ID NO: 257058 - RNA, 32 nt, Human
uggccauguguauauuuauaucauguuuacca

SEQ ID NO: 257059 - RNA, 32 nt, Human
uggccauuaguauuuuuauaaaacucaaugcu

SEQ ID NO: 257060 - RNA, 32 nt, Human
uggccauuauggugaaaccccgucucuacuaa

SEQ ID NO: 257061 - RNA, 32 nt, Human
uggccauuccuucugggacagacagagagagg

SEQ ID NO: 257062 - RNA, 18 nt, Human
uggccauucucaaaggga

SEQ ID NO: 257063 - RNA, 32 nt, Human
uggccauugcacuccagccugggugacagagu

SEQ ID NO: 257064 - RNA, 32 nt, Human
uggccauugcacuccagcgugggcaacagagu

SEQ ID NO: 257065 - RNA, 32 nt, Human
uggccauuggugacccaaagaugaugaaaaau

SEQ ID NO: 257066 - RNA, 32 nt, Human
uggccauuggugacuaguggggccaagagaag

SEQ ID NO: 257067 - RNA, 22 nt, Human
uggccauugugugccugccuua

SEQ ID NO: 257068 - RNA, 32 nt, Human
uggccauuuccaccuggugaagauuuucauag

SEQ ID NO: 257069 - RNA, 32 nt, Human
uggcccaaaacacaaauuuauauucucacaua

SEQ ID NO: 257070 - RNA, 21 nt, Human
uggcccaaacauggaguuuug

SEQ ID NO: 257071 - RNA, 32 nt, Human
uggcccaacaaccgucuacagaacagcugcug

SEQ ID NO: 257072 - RNA, 32 nt, Human
uggcccaacuccaggaguuuccuuucauuccc

SEQ ID NO: 257073 - RNA, 32 nt, Human
uggcccaagagccaggcucaggaacaggaagc

SEQ ID NO: 257074 - RNA, 32 nt, Human
uggcccaagccgcaccggagcagcggcuggau

SEQ ID NO: 257075 - RNA, 21 nt, Human
uggcccaagccuguaguccca

SEQ ID NO: 257076 - RNA, 24 nt, Human
uggcccaagccuguagucccagcu

SEQ ID NO: 257077 - RNA, 32 nt, Human
uggcccaagcuacgcucacugcaggcuccgcc

SEQ ID NO: 257078 - RNA, 21 nt, Human
uggcccaaggucuccagcaga

SEQ ID NO: 257079 - RNA, 32 nt, Human
uggcccacaaaauuucacaaugacugcugagg

SEQ ID NO: 257080 - RNA, 32 nt, Human
uggcccacaaacagucuugggcucagacugua

SEQ ID NO: 257081 - RNA, 32 nt, Human
uggcccacaccuguaaucccagcacuuuggga

SEQ ID NO: 257082 - RNA, 24 nt, Human
uggcccacaccuguggucccagcu

SEQ ID NO: 257083 - RNA, 32 nt, Human
uggcccacacuauucuuuccaccugcagugcu

SEQ ID NO: 257084 - RNA, 32 nt, Human
uggcccacagccgcagcaauggcgcugaguuc

SEQ ID NO: 257085 - RNA, 21 nt, Human
uggcccacagcuguaauccca

SEQ ID NO: 257086 - RNA, 32 nt, Human
uggcccacaggauaagccucaggcccugggaa

SEQ ID NO: 257087 - RNA, 23 nt, Human
uggcccacaucagcauugaccac

SEQ ID NO: 257088 - RNA, 21 nt, Human
uggcccacaucuguaauccca

SEQ ID NO: 257089 - RNA, 22 nt, Human
uggcccacauguggaugccaca

SEQ ID NO: 257090 - RNA, 26 nt, Human
uggcccaccaccucccucuccugcca

SEQ ID NO: 257091 - RNA, 32 nt, Human
uggcccaccgugggccucagagcugcugcugg

SEQ ID NO: 257092 - RNA, 32 nt, Human
uggcccaccucaucccuccagccugggaucuc

SEQ ID NO: 257093 - RNA, 21 nt, Human
uggcccacgccuguaauccca

SEQ ID NO: 257094 - RNA, 23 nt, Human
uggcccacgccuguaaucccagc

SEQ ID NO: 257095 - RNA, 32 nt, Human
uggcccacgccuguaaucccagcacuuuggga

SEQ ID NO: 257096 - RNA, 24 nt, Human
uggcccacgccuguaaucccagcu

SEQ ID NO: 257097 - RNA, 32 nt, Human
uggcccacgccuguaaucccagcuacuuggaa

SEQ ID NO: 257098 - RNA, 32 nt, Human
uggcccacugcaaccucugccucccggguuca

SEQ ID NO: 257099 - RNA, 32 nt, Human
uggcccacugcaaccucugcuuccuagguuca

SEQ ID NO: 257100 - RNA, 32 nt, Human
uggcccacugcaagcuccgccucccagguuca

SEQ ID NO: 257101 - RNA, 32 nt, Human
uggcccacugguggcuaggucuccccuuaucc

SEQ ID NO: 257102 - RNA, 32 nt, Human
uggcccagaaaccaaaugugaacuuccugucu

SEQ ID NO: 257103 - RNA, 32 nt, Human
uggcccagaagacccaggcaguguagcgacag

SEQ ID NO: 257104 - RNA, 32 nt, Human
uggcccagacagguaggugugauaaacagagu

SEQ ID NO: 257105 - RNA, 24 nt, Human
uggcccagacgccagcccuucccu

SEQ ID NO: 257106 - RNA, 32 nt, Human
uggcccagaggagccaagccgcacagacccga

SEQ ID NO: 257107 - RNA, 32 nt, Human
uggcccagaguccuucagaggcaagucuggua

SEQ ID NO: 257108 - RNA, 32 nt, Human
uggcccagcaagcagaggcgggcaggaggauc

SEQ ID NO: 257109 - RNA, 32 nt, Human
uggcccagcccccacaccacaguucccugcca

SEQ ID NO: 257110 - RNA, 19 nt, Human
uggcccagcucccccggga

SEQ ID NO: 257111 - RNA, 32 nt, Human
uggcccagcucccugcccugaguccugagcca

SEQ ID NO: 257112 - RNA, 21 nt, Human
uggcccagcuccugcucacag

SEQ ID NO: 257113 - RNA, 32 nt, Human
uggcccagcuuggagugcuugugugguccaac

SEQ ID NO: 257114 - RNA, 32 nt, Human
uggcccaggaagggggcaguuucugucgcggg

SEQ ID NO: 257115 - RNA, 32 nt, Human
uggcccaggagaagagacacuagccauaaaau

SEQ ID NO: 257116 - RNA, 32 nt, Human
uggcccaggagaagucaggaagggagcccagc

SEQ ID NO: 257117 - RNA, 32 nt, Human
uggcccaggagccaccauggagagugagaagc

SEQ ID NO: 257118 - RNA, 32 nt, Human
uggcccaggagcucuguucuuuccuaaucuaa

SEQ ID NO: 257119 - RNA, 32 nt, Human
uggcccaggaggcagagguugcagugagcuga

SEQ ID NO: 257120 - RNA, 32 nt, Human
uggcccaggaucccugagcuuucccaguagcc

SEQ ID NO: 257121 - RNA, 32 nt, Human
uggcccaggcagcagaagguucccugaggucc

SEQ ID NO: 257122 - RNA, 32 nt, Human
uggcccaggcaugaccuggugccuggcccagc

SEQ ID NO: 257123 - RNA, 17 nt, Human
uggcccaggccugccca

SEQ ID NO: 257124 - RNA, 17 nt, Human
uggcccaggccugcccc

SEQ ID NO: 257125 - RNA, 32 nt, Human
uggcccaggccuggcgggcacugcuucccggc

SEQ ID NO: 257126 - RNA, 32 nt, Human
uggcccaggccugggcuucagccucccggggc

SEQ ID NO: 257127 - RNA, 32 nt, Human
uggcccaggccuguaaucccaucacuuuggga

SEQ ID NO: 257128 - RNA, 17 nt, Human
uggcccaggccugucca

SEQ ID NO: 257129 - RNA, 32 nt, Human
uggcccaggcgccaccacugaugccacccagg

SEQ ID NO: 257130 - RNA, 21 nt, Human
uggcccaggcuagagugcagu

SEQ ID NO: 257131 - RNA, 22 nt, Human
uggcccaggcuagagugcagug

SEQ ID NO: 257132 - RNA, 32 nt, Human
uggcccaggcuagagugcaguggugcgauuau

SEQ ID NO: 257133 - RNA, 25 nt, Human
uggcccaggcucuaagcucugcggg

SEQ ID NO: 257134 - RNA, 22 nt, Human
uggcccaggcugaagugcagug

SEQ ID NO: 257135 - RNA, 32 nt, Human
uggcccaggcugaagugcaguggugugauuac

SEQ ID NO: 257136 - RNA, 20 nt, Human
uggcccaggcuggacuccag

SEQ ID NO: 257137 - RNA, 20 nt, Human
uggcccaggcuggagugcag

SEQ ID NO: 257138 - RNA, 21 nt, Human
uggcccaggcuggagugcagg

SEQ ID NO: 257139 - RNA, 22 nt, Human
uggcccaggcuggagugcagug

SEQ ID NO: 257140 - RNA, 32 nt, Human
uggcccaggcuggagugcaguggcacaaccuc

SEQ ID NO: 257141 - RNA, 32 nt, Human
uggcccaggcuggagugcaguggcgcaaccuc

SEQ ID NO: 257142 - RNA, 32 nt, Human
uggcccaggcuggagugcaguggcgcaaucau

SEQ ID NO: 257143 - RNA, 32 nt, Human
uggcccaggcuggagugcaguggcgcggucuu

SEQ ID NO: 257144 - RNA, 32 nt, Human
uggcccaggcuggagugcaguggcuguucuca

SEQ ID NO: 257145 - RNA, 32 nt, Human
uggcccaggcuggagugcaguggugcgaucuc

SEQ ID NO: 257146 - RNA, 32 nt, Human
uggcccaggcuggaguguaguggcguggucuu

SEQ ID NO: 257147 - RNA, 20 nt, Human
uggcccaggcuggcgugcag

SEQ ID NO: 257148 - RNA, 32 nt, Human
uggcccaggcuggcgugcagugggccgucuca

SEQ ID NO: 257149 - RNA, 20 nt, Human
uggcccaggcugggaaucac

SEQ ID NO: 257150 - RNA, 22 nt, Human
uggcccaggcugggagcuugga

SEQ ID NO: 257151 - RNA, 32 nt, Human
uggcccaggcuggucucaaacuucuggccuua

SEQ ID NO: 257152 - RNA, 24 nt, Human
uggcccagggaggauuccaggaga

SEQ ID NO: 257153 - RNA, 26 nt, Human
uggcccagggcgggggcagcuccaag

SEQ ID NO: 257154 - RNA, 32 nt, Human
uggcccaggguaagggcuguugagguaccuua

SEQ ID NO: 257155 - RNA, 32 nt, Human
uggcccagguggacucaggagggaaccuggcc

SEQ ID NO: 257156 - RNA, 32 nt, Human
uggcccagguggagcaggagggaccacuggaa

SEQ ID NO: 257157 - RNA, 32 nt, Human
uggcccagucugcccacaauccuggcccugag

SEQ ID NO: 257158 - RNA, 32 nt, Human
uggcccagugaccacagagagaucugcaccuc

SEQ ID NO: 257159 - RNA, 32 nt, Human
uggcccaguggcuggagccucucaccugagcc

SEQ ID NO: 257160 - RNA, 32 nt, Human
uggcccaguguaggaagcccaguuugcucucu

SEQ ID NO: 257161 - RNA, 21 nt, Human
uggcccauacuuguaauccca

SEQ ID NO: 257162 - RNA, 24 nt, Human
uggcccauacuuguaaucccagcu

SEQ ID NO: 257163 - RNA, 32 nt, Human
uggcccauagaaacaugacacugaccuuggag

SEQ ID NO: 257164 - RNA, 32 nt, Human
uggcccaucaaaggaaccugggggaggaugca

SEQ ID NO: 257165 - RNA, 32 nt, Human
uggcccaucccugagugucuagaguucccagc

SEQ ID NO: 257166 - RNA, 21 nt, Human
uggcccauccuuggagcuuua

SEQ ID NO: 257167 - RNA, 32 nt, Human
uggcccaucucuucugugccuuagucacauau

SEQ ID NO: 257168 - RNA, 32 nt, Human
uggcccaucugccaccaucugugccuacaggg

SEQ ID NO: 257169 - RNA, 32 nt, Human
uggcccaucugccuccuggccuuccuguucca

SEQ ID NO: 257170 - RNA, 32 nt, Human
uggcccaucugucuccccuuggggccaccucu

SEQ ID NO: 257171 - RNA, 32 nt, Human
uggcccaucuuccuauucccacguguagcuag

SEQ ID NO: 257172 - RNA, 32 nt, Human
uggcccaucuuuuaugggaagacagagugaug

SEQ ID NO: 257173 - RNA, 32 nt, Human
uggcccaugagcugggaugguccuccagcugc

SEQ ID NO: 257174 - RNA, 32 nt, Human
uggcccaugcccacagcaggcaaccaaggcug

SEQ ID NO: 257175 - RNA, 21 nt, Human
uggcccaugccuauaauccca

SEQ ID NO: 257176 - RNA, 32 nt, Human
uggcccaugccuauaaucccagcacuuuggga

SEQ ID NO: 257177 - RNA, 23 nt, Human
uggcccaugccuguaaauccagc

SEQ ID NO: 257178 - RNA, 21 nt, Human
uggcccaugccuguaauccca

SEQ ID NO: 257179 - RNA, 23 nt, Human
uggcccaugccuguaaucccagc

SEQ ID NO: 257180 - RNA, 32 nt, Human
uggcccaugccuguaaucccagcacuuuggga

SEQ ID NO: 257181 - RNA, 32 nt, Human
uggcccaugccuguaaucccagcacuuugggg

SEQ ID NO: 257182 - RNA, 24 nt, Human
uggcccaugccuguaaucccagcu

SEQ ID NO: 257183 - RNA, 21 nt, Human
uggcccaugccuguaaucuca

SEQ ID NO: 257184 - RNA, 23 nt, Human
uggcccaugccuguaaucucagc

SEQ ID NO: 257185 - RNA, 32 nt, Human
uggcccaugccuguaaucucagcacucuggga

SEQ ID NO: 257186 - RNA, 21 nt, Human
uggcccaugccuguagcccca

SEQ ID NO: 257187 - RNA, 24 nt, Human
uggcccaugccuguagccccagcu

SEQ ID NO: 257188 - RNA, 21 nt, Human
uggcccaugccuguaguccca

SEQ ID NO: 257189 - RNA, 24 nt, Human
uggcccaugccuguagucccagcu

SEQ ID NO: 257190 - RNA, 32 nt, Human
uggcccaugccuguagucccagcuacucagga

SEQ ID NO: 257191 - RNA, 32 nt, Human
uggcccaugccuguagugccagcauuuuggga

SEQ ID NO: 257192 - RNA, 21 nt, Human
uggcccaugccuguuauccca

SEQ ID NO: 257193 - RNA, 23 nt, Human
uggcccaugccuguuaucccagc

SEQ ID NO: 257194 - RNA, 32 nt, Human
uggcccaugccuguuaucccagcacuugggga

SEQ ID NO: 257195 - RNA, 19 nt, Human
uggcccaugccuguucagu

SEQ ID NO: 257196 - RNA, 32 nt, Human
uggcccaugguggucuauccuguggcuaaugc

SEQ ID NO: 257197 - RNA, 32 nt, Human
uggcccaugucacauuggcaccugauggcauc

SEQ ID NO: 257198 - RNA, 28 nt, Human
uggcccauguuugcugccucuaucuggu

SEQ ID NO: 257199 - RNA, 32 nt, Human
uggcccauucagaaagacaggagaauuaggag

SEQ ID NO: 257200 - RNA, 32 nt, Human
uggccccaacaaccccagugagcaggagguga

SEQ ID NO: 257201 - RNA, 32 nt, Human
uggccccaaccagcacccccgccccagccuac

SEQ ID NO: 257202 - RNA, 32 nt, Human
uggccccacagcaaaccagaggguccaaggga

SEQ ID NO: 257203 - RNA, 32 nt, Human
uggccccacagcacauagcacggagggcggcg

SEQ ID NO: 257204 - RNA, 21 nt, Human
uggccccaccccuccuggcca

SEQ ID NO: 257205 - RNA, 32 nt, Human
uggccccacccucaccagccugggcagcagca

SEQ ID NO: 257206 - RNA, 20 nt, Human
uggccccaccucuucugcca

SEQ ID NO: 257207 - RNA, 32 nt, Human
uggccccacuuuccuuuuucuuccuccuccag

SEQ ID NO: 257208 - RNA, 32 nt, Human
uggccccagcaccccacugcccucucuccugc

SEQ ID NO: 257209 - RNA, 31 nt, Human
uggccccagcaguccccuaggaggggccuug

SEQ ID NO: 257210 - RNA, 20 nt, Human
uggccccagcagugcacagg

SEQ ID NO: 257211 - RNA, 19 nt, Human
uggccccagccccgcggga

SEQ ID NO: 257212 - RNA, 32 nt, Human
uggccccagccuuccucuucuuccugcucugu

SEQ ID NO: 257213 - RNA, 17 nt, Human
uggccccagcggcgcga

SEQ ID NO: 257214 - RNA, 32 nt, Human
uggccccagcuucucaguaggcugagguggga

SEQ ID NO: 257215 - RNA, 32 nt, Human
uggccccaggaccugcacucccaauccugcug

SEQ ID NO: 257216 - RNA, 32 nt, Human
uggccccaggagauagcuuuccggugacagcu

SEQ ID NO: 257217 - RNA, 32 nt, Human
uggccccaggagccuuugguucaguaaacgac

SEQ ID NO: 257218 - RNA, 32 nt, Human
uggccccaggcagaguuuugcaccagcaggac

SEQ ID NO: 257219 - RNA, 22 nt, Human
uggccccaggcagcccuuuucc

SEQ ID NO: 257220 - RNA, 17 nt, Human
uggccccaggccggggg

SEQ ID NO: 257221 - RNA, 20 nt, Human
uggccccaggcuggcucagg

SEQ ID NO: 257222 - RNA, 32 nt, Human
uggccccagggagggcaggaggcucuugaccc

SEQ ID NO: 257223 - RNA, 32 nt, Human
uggccccaggggugaagcaggaggggccaggc

SEQ ID NO: 257224 - RNA, 32 nt, Human
uggccccagguggggguuguagugagagcuuc

SEQ ID NO: 257225 - RNA, 32 nt, Human
uggccccagguugccagcgucgcuacagccca

SEQ ID NO: 257226 - RNA, 32 nt, Human
uggccccagucccagcccccaccuuuggcuga

SEQ ID NO: 257227 - RNA, 17 nt, Human
uggccccagugcugagg

SEQ ID NO: 257228 - RNA, 32 nt, Human
uggccccaguucuucucugcccucucucccaa

SEQ ID NO: 257229 - RNA, 32 nt, Human
uggccccaucacucuggccucugccuucaucu

SEQ ID NO: 257230 - RNA, 23 nt, Human
uggccccaucucugcucacugca

SEQ ID NO: 257231 - RNA, 32 nt, Human
uggccccaucuucuggcccuuagcuggugcca

SEQ ID NO: 257232 - RNA, 32 nt, Human
uggccccaugauguauaaaugugcccaaaagc

SEQ ID NO: 257233 - RNA, 32 nt, Human
uggccccauuacugcugccuugcuucagccac

SEQ ID NO: 257234 - RNA, 32 nt, Human
uggccccauucgcagaugugggagacucugcu

SEQ ID NO: 257235 - RNA, 32 nt, Human
uggccccauuucuccauuuuguggaccaagcc

SEQ ID NO: 257236 - RNA, 32 nt, Human
uggcccccaaaccaaauccaaagguucuggcc

SEQ ID NO: 257237 - RNA, 32 nt, Human
uggcccccaagugcccugggccguggcucccu

SEQ ID NO: 257238 - RNA, 19 nt, Human
uggcccccacccucugcca

SEQ ID NO: 257239 - RNA, 32 nt, Human
uggcccccacgagcagcuccaggcuggaguuc

SEQ ID NO: 257240 - RNA, 32 nt, Human
uggcccccagccuccagacccucuaaugcccu

SEQ ID NO: 257241 - RNA, 32 nt, Human
uggcccccagccuccuggaaaacagguuggcg

SEQ ID NO: 257242 - RNA, 32 nt, Human
uggcccccaggccacaugggaccuggaggagc

SEQ ID NO: 257243 - RNA, 32 nt, Human
uggcccccgaacccaagccucacuuuucugug

SEQ ID NO: 257244 - RNA, 32 nt, Human
uggcccccgaggaggagcagaggaucaaugcg

SEQ ID NO: 257245 - RNA, 21 nt, Human
uggcccccggcuccccacaca

SEQ ID NO: 257246 - RNA, 32 nt, Human
uggcccccucaccuuuuccuuuccagcuguuu

SEQ ID NO: 257247 - RNA, 32 nt, Human
uggcccccucaguucucccagguuguuccuca

SEQ ID NO: 257248 - RNA, 32 nt, Human
uggcccccuccagagucccagggcaauggguc

SEQ ID NO: 257249 - RNA, 32 nt, Human
uggcccccuccucugcuuuagccccggcaagc

SEQ ID NO: 257250 - RNA, 32 nt, Human
uggcccccucgaggaugacuccacuagcgccc

SEQ ID NO: 257251 - RNA, 32 nt, Human
uggcccccucuccaucucuccugaccuccuga

SEQ ID NO: 257252 - RNA, 32 nt, Human
uggcccccugcaaccuccgccucccggguucg

SEQ ID NO: 257253 - RNA, 17 nt, Human
uggcccccugcgcgagg

SEQ ID NO: 257254 - RNA, 19 nt, Human
uggcccccuucccccaggg

SEQ ID NO: 257255 - RNA, 32 nt, Human
uggccccgcagcugcccccacuuccuuugaga

SEQ ID NO: 257256 - RNA, 32 nt, Human
uggccccgcaugagccucggccaucucucccu

SEQ ID NO: 257257 - RNA, 21 nt, Human
uggccccgccccgccagccgc

SEQ ID NO: 257258 - RNA, 30 nt, Human
uggccccggagccacagcacaaucaucuca

SEQ ID NO: 257259 - RNA, 21 nt, Human
uggccccggccuuugccccaa

SEQ ID NO: 257260 - RNA, 31 nt, Human
uggccccggcucucuggaccuugucucgcuc

SEQ ID NO: 257261 - RNA, 19 nt, Human
uggccccggggagccgagg

SEQ ID NO: 257262 - RNA, 32 nt, Human
uggccccguguccagugccaggcaggcuucag

SEQ ID NO: 257263 - RNA, 32 nt, Human
uggccccuacagccgcuggaucuagugccagg

SEQ ID NO: 257264 - RNA, 32 nt, Human
uggccccuacccugcccugccugaagcucccc

SEQ ID NO: 257265 - RNA, 32 nt, Human
uggccccuagacccucucuauagccaugagac

SEQ ID NO: 257266 - RNA, 16 nt, Human
uggccccuaggcgagg

SEQ ID NO: 257267 - RNA, 32 nt, Human
uggccccuagggagaaaugcagaaggaguagc

SEQ ID NO: 257268 - RNA, 32 nt, Human
uggccccuaugcagaagggcagacaguucuuc

SEQ ID NO: 257269 - RNA, 32 nt, Human
uggccccucaaaccucacccugaccuccugcu

SEQ ID NO: 257270 - RNA, 32 nt, Human
uggccccuccacccucccuccccucccggcuc

SEQ ID NO: 257271 - RNA, 32 nt, Human
uggccccuccacccucucccccagccgcacgg

SEQ ID NO: 257272 - RNA, 32 nt, Human
uggccccuccacugcuucucuccccauccaca

SEQ ID NO: 257273 - RNA, 32 nt, Human
uggccccuccucugccaagcccccaggggagc

SEQ ID NO: 257274 - RNA, 32 nt, Human
uggccccuccuucuccccuccagaccccuacc

SEQ ID NO: 257275 - RNA, 32 nt, Human
uggccccucuacuguaaaugugccuuagccua

SEQ ID NO: 257276 - RNA, 19 nt, Human
uggccccucugaccugcac

SEQ ID NO: 257277 - RNA, 20 nt, Human
uggccccugaauucugcgca

SEQ ID NO: 257278 - RNA, 32 nt, Human
uggccccugcaaccgugcucuggcgggcacac

SEQ ID NO: 257279 - RNA, 32 nt, Human
uggccccugcagcacucaccaguugcaucuug

SEQ ID NO: 257280 - RNA, 32 nt, Human
uggccccugcccggcccugcgugcccgcgcgu

SEQ ID NO: 257281 - RNA, 32 nt, Human
uggccccugccuggcucccugccaggcucccu

SEQ ID NO: 257282 - RNA, 32 nt, Human
uggccccugcuccccgcccccucacuuagagg

SEQ ID NO: 257283 - RNA, 32 nt, Human
uggccccuggaacaugccagcacacacugcca

SEQ ID NO: 257284 - RNA, 32 nt, Human
uggccccuggacacacaguguggcauccucau

SEQ ID NO: 257285 - RNA, 32 nt, Human
uggccccuggagagacacaggagaaggagaga

SEQ ID NO: 257286 - RNA, 21 nt, Human
uggccccuggagggucagggg

SEQ ID NO: 257287 - RNA, 32 nt, Human
uggccccuggcagaggaacaaggacacagaca

SEQ ID NO: 257288 - RNA, 32 nt, Human
uggccccuggcccaucucuucugugccuuagu

SEQ ID NO: 257289 - RNA, 32 nt, Human
uggccccuggcuccuccagccugaaugagcua

SEQ ID NO: 257290 - RNA, 32 nt, Human
uggccccuggcucuggccuggugggcggaggc

SEQ ID NO: 257291 - RNA, 32 nt, Human
uggccccuggggauucugugguguggguggaa

SEQ ID NO: 257292 - RNA, 21 nt, Human
uggccccugucccuggcccca

SEQ ID NO: 257293 - RNA, 32 nt, Human
uggccccugugcaccguaguggccauggcaug

SEQ ID NO: 257294 - RNA, 32 nt, Human
uggccccuuagugucuggaauguggccuucca

SEQ ID NO: 257295 - RNA, 32 nt, Human
uggccccuuccccucacucucucucuugcucc

SEQ ID NO: 257296 - RNA, 32 nt, Human
uggccccuuccuccucugccuggugaguuggc

SEQ ID NO: 257297 - RNA, 32 nt, Human
uggccccuuccucuagggaggggauggggagg

SEQ ID NO: 257298 - RNA, 32 nt, Human
uggccccuuccuguccugucucaggccaggcu

SEQ ID NO: 257299 - RNA, 32 nt, Human
uggccccuucuggggguggugggcaggugaca

SEQ ID NO: 257300 - RNA, 32 nt, Human
uggcccgaggcacguguccaggagaccggccu

SEQ ID NO: 257301 - RNA, 32 nt, Human
uggcccgaggugaccuucuagcagguuccccc

SEQ ID NO: 257302 - RNA, 32 nt, Human
uggcccgcagagccugcgagucuagacuccag

SEQ ID NO: 257303 - RNA, 32 nt, Human
uggcccgcagaggcacugccacagcugugagg

SEQ ID NO: 257304 - RNA, 32 nt, Human
uggcccgcagccgccaccuacccagugaccau

SEQ ID NO: 257305 - RNA, 32 nt, Human
uggcccgcagccgccgcgacuucggcacaguu

SEQ ID NO: 257306 - RNA, 32 nt, Human
uggcccgccaagguugggaggauuguacacua

SEQ ID NO: 257307 - RNA, 32 nt, Human
uggcccggaaccaaggugggccaagguccgcc

SEQ ID NO: 257308 - RNA, 32 nt, Human
uggcccggacgggguuucuccauguuucccag

SEQ ID NO: 257309 - RNA, 32 nt, Human
uggcccggaggcaccuuccccagaguccugac

SEQ ID NO: 257310 - RNA, 32 nt, Human
uggcccggcaggcagcuucgugcuggaggaac

SEQ ID NO: 257311 - RNA, 32 nt, Human
uggcccggccacuccgaaggcagggaggagga

SEQ ID NO: 257312 - RNA, 21 nt, Human
uggcccggccuccuccugcca

SEQ ID NO: 257313 - RNA, 19 nt, Human
uggcccgggcgcgcugagg

SEQ ID NO: 257314 - RNA, 18 nt, Human
uggcccgguagucagggg

SEQ ID NO: 257315 - RNA, 32 nt, Human
uggcccuaaucuagccaagcaccauggagaga

SEQ ID NO: 257316 - RNA, 32 nt, Human
uggcccuacagcugccugaggucuccaucacc

SEQ ID NO: 257317 - RNA, 18 nt, Human
uggcccuacgucuggaug

SEQ ID NO: 257318 - RNA, 32 nt, Human
uggcccuacugcacauggcccccagccuccau

SEQ ID NO: 257319 - RNA, 18 nt, Human
uggcccuaggcagcgagg

SEQ ID NO: 257320 - RNA, 22 nt, Human
uggcccuaggccccuuccugcc

SEQ ID NO: 257321 - RNA, 32 nt, Human
uggcccuaugaucuauccuuuacuugaaagcu

SEQ ID NO: 257322 - RNA, 32 nt, Human
uggcccucacuguggcuagcuucugggcaagu

SEQ ID NO: 257323 - RNA, 18 nt, Human
uggcccucagcucugccc

SEQ ID NO: 257324 - RNA, 32 nt, Human
uggcccucaucuuaaucucugcugauuauuua

SEQ ID NO: 257325 - RNA, 32 nt, Human
uggcccucccaaaguguugggauuacaggcau

SEQ ID NO: 257326 - RNA, 32 nt, Human
uggcccucccagcugucugggacuucagugga

SEQ ID NO: 257327 - RNA, 32 nt, Human
uggcccuccuccccaucucaguuugcaacuca

SEQ ID NO: 257328 - RNA, 32 nt, Human
uggcccuccucucugcugccacucauuccaga

SEQ ID NO: 257329 - RNA, 32 nt, Human
uggcccucggggaacccgcacacacagcagga

SEQ ID NO: 257330 - RNA, 32 nt, Human
uggcccucuaccauaccacuuccccagccaga

SEQ ID NO: 257331 - RNA, 32 nt, Human
uggcccucuccucucuugaaaguucucugcuu

SEQ ID NO: 257332 - RNA, 32 nt, Human
uggcccucuccucugcccagccggggcagcug

SEQ ID NO: 257333 - RNA, 32 nt, Human
uggcccucucugcucugcuucuccuccugccg

SEQ ID NO: 257334 - RNA, 32 nt, Human
uggcccucugaguggugguggagggugggggu

SEQ ID NO: 257335 - RNA, 32 nt, Human
uggcccucugucugggcgaacagcccccuccu

SEQ ID NO: 257336 - RNA, 32 nt, Human
uggcccucuguggguucugcauccauggauuc

SEQ ID NO: 257337 - RNA, 32 nt, Human
uggcccucuuggaggucugugcucuuaccucc

SEQ ID NO: 257338 - RNA, 32 nt, Human
uggcccugagccuucuuuggauagugaaaagg

SEQ ID NO: 257339 - RNA, 20 nt, Human
uggcccugauccaccuaccu

SEQ ID NO: 257340 - RNA, 32 nt, Human
uggcccugcacuccgccuuaguccuggggccg

SEQ ID NO: 257341 - RNA, 32 nt, Human
uggcccugcagccuccaccucgccgcuggggg

SEQ ID NO: 257342 - RNA, 32 nt, Human
uggcccugccacagcccucccucggcacacuu

SEQ ID NO: 257343 - RNA, 32 nt, Human
uggcccugccacuccagccuggccucacuguc

SEQ ID NO: 257344 - RNA, 32 nt, Human
uggcccugcccagccaugaaucgcuuggccau

SEQ ID NO: 257345 - RNA, 32 nt, Human
uggcccugcccgccuccgccuucuggagagcc

SEQ ID NO: 257346 - RNA, 23 nt, Human
uggcccugcccugguuuccugcc

SEQ ID NO: 257347 - RNA, 32 nt, Human
uggcccugccguuuccccuccuuggguuuaug

SEQ ID NO: 257348 - RNA, 20 nt, Human
uggcccugccucuccccgcu

SEQ ID NO: 257349 - RNA, 17 nt, Human
uggcccugccucugcug

SEQ ID NO: 257350 - RNA, 31 nt, Human
uggcccugccucuucuggccuggugucuccu

SEQ ID NO: 257351 - RNA, 32 nt, Human
uggcccugcgcugccuggaggaauucucagcc

SEQ ID NO: 257352 - RNA, 32 nt, Human
uggcccugcugccucugucuauuucaauauag

SEQ ID NO: 257353 - RNA, 32 nt, Human
uggcccugcuguggcuccccagcuccagucgg

SEQ ID NO: 257354 - RNA, 21 nt, Human
uggcccugcuucuuccuccca

SEQ ID NO: 257355 - RNA, 18 nt, Human
uggcccuggacacccagu

SEQ ID NO: 257356 - RNA, 32 nt, Human
uggcccuggauggacucagggaagcacgggac

SEQ ID NO: 257357 - RNA, 32 nt, Human
uggcccuggcagcacagcucucaggcccagcc

SEQ ID NO: 257358 - RNA, 32 nt, Human
uggcccuggccuggcccguggcgcauccucac

SEQ ID NO: 257359 - RNA, 32 nt, Human
uggcccuggcuccaucucucugucaccucacc

SEQ ID NO: 257360 - RNA, 32 nt, Human
uggcccuggcugcuuuacacaaucuguucuau

SEQ ID NO: 257361 - RNA, 32 nt, Human
uggcccugggaaaauuuugaaugaaauuucaa

SEQ ID NO: 257362 - RNA, 32 nt, Human
uggcccugggacuucucucugcaggaggagag

SEQ ID NO: 257363 - RNA, 32 nt, Human
uggcccugggagaggcugggugagcuggggug

SEQ ID NO: 257364 - RNA, 32 nt, Human
uggcccugggcccggagucugcaggccgcgcu

SEQ ID NO: 257365 - RNA, 32 nt, Human
uggcccuggggaggacccucuugguggagggg

SEQ ID NO: 257366 - RNA, 18 nt, Human
uggcccuguacccagggc

SEQ ID NO: 257367 - RNA, 32 nt, Human
uggcccugugggcugaggguaaggcuggguag

SEQ ID NO: 257368 - RNA, 32 nt, Human
uggcccuuagacugagauucagagauaugaaa

SEQ ID NO: 257369 - RNA, 32 nt, Human
uggcccuuaggaggcccaaaagaggggcgaca

SEQ ID NO: 257370 - RNA, 32 nt, Human
uggcccuuccauugucagccuggaccugccaa

SEQ ID NO: 257371 - RNA, 32 nt, Human
uggcccuucucaaagugucccaugaaaaaguu

SEQ ID NO: 257372 - RNA, 32 nt, Human
uggcccuugcagcccauaccaguuucgacuga

SEQ ID NO: 257373 - RNA, 32 nt, Human
uggcccuugcccaaggcagggaagaaggaugu

SEQ ID NO: 257374 - RNA, 32 nt, Human
uggcccuugccuguagucucagcacuuuggga

SEQ ID NO: 257375 - RNA, 32 nt, Human
uggcccuuguuuucucccauguggacccugau

SEQ ID NO: 257376 - RNA, 32 nt, Human
uggcccuuucacucccccuuggcccuuucacu

SEQ ID NO: 257377 - RNA, 32 nt, Human
uggcccuuucuaaagggaaguauggcaguuag

SEQ ID NO: 257378 - RNA, 32 nt, Human
uggcccuuuucuuccuccuugaagcucccagu

SEQ ID NO: 257379 - RNA, 32 nt, Human
uggccgaacccccaccaccaccgccuccucca

SEQ ID NO: 257380 - RNA, 21 nt, Human
uggccgaacccccuuccugcc

SEQ ID NO: 257381 - RNA, 32 nt, Human
uggccgaaggggauguccuguuuucaccagag

SEQ ID NO: 257382 - RNA, 32 nt, Human
uggccgacauggcaaaaccccgucucuacuaa

SEQ ID NO: 257383 - RNA, 30 nt, Human
uggccgacauggugaaaccccaucucuacu

SEQ ID NO: 257384 - RNA, 32 nt, Human
uggccgacauggugaaaccccaucucuacuaa

SEQ ID NO: 257385 - RNA, 32 nt, Human
uggccgagaacugcacuugccucaguguucuc

SEQ ID NO: 257386 - RNA, 32 nt, Human
uggccgagacagcaggucccacccugcacagc

SEQ ID NO: 257387 - RNA, 17 nt, Human
uggccgagccacaggga

SEQ ID NO: 257388 - RNA, 32 nt, Human
uggccgagcugcagaacuccuugccaaagaac

SEQ ID NO: 257389 - RNA, 32 nt, Human
uggccgagcuuccucugggagggaggaaacag

SEQ ID NO: 257390 - RNA, 32 nt, Human
uggccgaggcgguugggcggaggcggagcagg

SEQ ID NO: 257391 - RNA, 32 nt, Human
uggccgagguuggucaugaggcugggguuccc

SEQ ID NO: 257392 - RNA, 23 nt, Human
uggccgcaccccccuuuccaggg

SEQ ID NO: 257393 - RNA, 21 nt, Human
uggccgcacguggacccaagg

SEQ ID NO: 257394 - RNA, 32 nt, Human
uggccgcaggcagauggauaugugggggacac

SEQ ID NO: 257395 - RNA, 32 nt, Human
uggccgcaguggccugcccugcucugagcacu

SEQ ID NO: 257396 - RNA, 32 nt, Human
uggccgcauucugcagacuuccuaucuucgug

SEQ ID NO: 257397 - RNA, 18 nt, Human
uggccgccaccuccggga

SEQ ID NO: 257398 - RNA, 18 nt, Human
uggccgccacucuccggg

SEQ ID NO: 257399 - RNA, 32 nt, Human
uggccgccauggagccucauccauccacacgu

SEQ ID NO: 257400 - RNA, 18 nt, Human
uggccgcccauuccgcga

SEQ ID NO: 257401 - RNA, 19 nt, Human
uggccgccccacuuuccgg

SEQ ID NO: 257402 - RNA, 32 nt, Human
uggccgcccccagcccccuccuggugccaccu

SEQ ID NO: 257403 - RNA, 25 nt, Human
uggccgccccgccccgcgccuccgg

SEQ ID NO: 257404 - RNA, 32 nt, Human
uggccgcccuggaggggagggugcgccugcaa

SEQ ID NO: 257405 - RNA, 27 nt, Human
uggccgccgccgcuccuccccccagga

SEQ ID NO: 257406 - RNA, 21 nt, Human
uggccgccgcgucccccgaga

SEQ ID NO: 257407 - RNA, 32 nt, Human
uggccgccguccccauccccugcccucagcac

SEQ ID NO: 257408 - RNA, 32 nt, Human
uggccgccuccucugugucauugucuguucuc

SEQ ID NO: 257409 - RNA, 32 nt, Human
uggccgccugcccuuucucuccgcuccagccu

SEQ ID NO: 257410 - RNA, 23 nt, Human
uggccgcgccuuaaagggccuca

SEQ ID NO: 257411 - RNA, 32 nt, Human
uggccgcggccaugcaguccugugccagggcg

SEQ ID NO: 257412 - RNA, 32 nt, Human
uggccgcggucuccauagagcugggggcgggc

SEQ ID NO: 257413 - RNA, 32 nt, Human
uggccgcguccagggucaccugugccuggucg

SEQ ID NO: 257414 - RNA, 32 nt, Human
uggccgcgucccacuccucaggccggggcgca

SEQ ID NO: 257415 - RNA, 32 nt, Human
uggccgcucacagacuggcaggcgggcgggcg

SEQ ID NO: 257416 - RNA, 32 nt, Human
uggccgcuccuggaggcggcggcgggagcgca

SEQ ID NO: 257417 - RNA, 32 nt, Human
uggccgcucucccgccccuccugggaucugug

SEQ ID NO: 257418 - RNA, 32 nt, Human
uggccgcugcaguuccagugguuauuucuaag

SEQ ID NO: 257419 - RNA, 32 nt, Human
uggccgcugccgccuccgccccagguuuugcg

SEQ ID NO: 257420 - RNA, 32 nt, Human
uggccgcugcugugacaggcaguguucuuggg

SEQ ID NO: 257421 - RNA, 17 nt, Human
uggccgcuggcccggga

SEQ ID NO: 257422 - RNA, 32 nt, Human
uggccgcuguaugaagcagccucgggcagggg

SEQ ID NO: 257423 - RNA, 20 nt, Human
uggccgcuguccucccgggg

SEQ ID NO: 257424 - RNA, 32 nt, Human
uggccggacgcugaagcccaggagagcgaugg

SEQ ID NO: 257425 - RNA, 32 nt, Human
uggccggagagggggcagccagagcggcagcc

SEQ ID NO: 257426 - RNA, 32 nt, Human
uggccggccacucccgucugcugugacgcgcg

SEQ ID NO: 257427 - RNA, 32 nt, Human
uggccggccaggcuucccgugcguuauacaca

SEQ ID NO: 257428 - RNA, 32 nt, Human
uggccggcccucccccugcucugcuucugcgc

SEQ ID NO: 257429 - RNA, 24 nt, Human
uggccggcgccuguaaucccagcu

SEQ ID NO: 257430 - RNA, 32 nt, Human
uggccggcgcugggccccagagcgaugacauc

SEQ ID NO: 257431 - RNA, 32 nt, Human
uggccggcuccucuccccaucugccuucuccu

SEQ ID NO: 257432 - RNA, 32 nt, Human
uggccggcuguggggagccaggcggccgcagu

SEQ ID NO: 257433 - RNA, 32 nt, Human
uggccgggacaagauaaacggagcugguggcg

SEQ ID NO: 257434 - RNA, 32 nt, Human
uggccgggagagggaggaagaggauggcaggg

SEQ ID NO: 257435 - RNA, 32 nt, Human
uggccgggcagggacagggcagaggacucuga

SEQ ID NO: 257436 - RNA, 19 nt, Human
uggccgggcaucgguccca

SEQ ID NO: 257437 - RNA, 32 nt, Human
uggccgggcggggcggugucuccuuucacagc

SEQ ID NO: 257438 - RNA, 30 nt, Human
uggccggggagccacaggcagggucugcug

SEQ ID NO: 257439 - RNA, 32 nt, Human
uggccggggccagaggcacaugcucugguuug

SEQ ID NO: 257440 - RNA, 18 nt, Human
uggccggggccccugcca

SEQ ID NO: 257441 - RNA, 32 nt, Human
uggccggggcugaagccacacagcccagaagg

SEQ ID NO: 257442 - RNA, 18 nt, Human
uggccgggguccuccaca

SEQ ID NO: 257443 - RNA, 32 nt, Human
uggccgggguggugaaaccccaucucuacuaa

SEQ ID NO: 257444 - RNA, 32 nt, Human
uggccgguaggcugcuggcgccuagguugugu

SEQ ID NO: 257445 - RNA, 19 nt, Human
uggccggugccuguaaucc

SEQ ID NO: 257446 - RNA, 20 nt, Human
uggccggugccuguaaucca

SEQ ID NO: 257447 - RNA, 24 nt, Human
uggccggugccuguaauccaagcu

SEQ ID NO: 257448 - RNA, 32 nt, Human
uggccgguggcucucauggccacugagggucu

SEQ ID NO: 257449 - RNA, 32 nt, Human
uggccguacaccugugcugaacggccagagac

SEQ ID NO: 257450 - RNA, 32 nt, Human
uggccguaugaaggugucucccagaagcauua

SEQ ID NO: 257451 - RNA, 32 nt, Human
uggccguaugugggugucuugaggcaguuuuu

SEQ ID NO: 257452 - RNA, 32 nt, Human
uggccguauucugccgucucacacuucuccau

SEQ ID NO: 257453 - RNA, 21 nt, Human
uggccgucacucccucugcca

SEQ ID NO: 257454 - RNA, 31 nt, Human
uggccguccaggugaaucacagcugaggagg

SEQ ID NO: 257455 - RNA, 32 nt, Human
uggccguccucacaccugugcgcagcccgacc

SEQ ID NO: 257456 - RNA, 32 nt, Human
uggccgucuucuuccagggaacgagaggucac

SEQ ID NO: 257457 - RNA, 32 nt, Human
uggccgugagagagacaggagaggaaggaggg

SEQ ID NO: 257458 - RNA, 32 nt, Human
uggccgugagaggacauugcugaggagagugg

SEQ ID NO: 257459 - RNA, 31 nt, Human
uggccgugcaauaaauaucugccgugaacag

SEQ ID NO: 257460 - RNA, 19 nt, Human
uggccgugcucccccggga

SEQ ID NO: 257461 - RNA, 32 nt, Human
uggccguggagagacacugcccccaggaugac

SEQ ID NO: 257462 - RNA, 32 nt, Human
uggccguggaggacccagagaagcgugugggc

SEQ ID NO: 257463 - RNA, 23 nt, Human
uggccgugucucguguguuguua

SEQ ID NO: 257464 - RNA, 22 nt, Human
uggccgugucugugugugugca

SEQ ID NO: 257465 - RNA, 31 nt, Human
uggccguuaaggaugccaaugccaagcucuc

SEQ ID NO: 257466 - RNA, 32 nt, Human
uggccguucagagcaccuugugguguaguggg

SEQ ID NO: 257467 - RNA, 16 nt, Human
uggccguucucugagc

SEQ ID NO: 257468 - RNA, 32 nt, Human
uggccuaaagaaucccacccccacuucaugcc

SEQ ID NO: 257469 - RNA, 32 nt, Human
uggccuaaauucucugccuuuuuaacuugcuu

SEQ ID NO: 257470 - RNA, 32 nt, Human
uggccuaauccuuccucuaggagaagagcauu

SEQ ID NO: 257471 - RNA, 23 nt, Human
uggccuaaugaucugcccaccuc

SEQ ID NO: 257472 - RNA, 32 nt, Human
uggccuacaugguugaaaccccaucucuacua

SEQ ID NO: 257473 - RNA, 32 nt, Human
uggcuuaugccuguaaucccagcaugcuggga

SEQ ID NO: 257474 - RNA, 32 nt, Human
uggcuuaugccuguaaucccgguacuuuggga

SEQ ID NO: 257475 - RNA, 32 nt, Human
uggcuuaugccuguaaucccugcacuuuggga

SEQ ID NO: 257476 - RNA, 21 nt, Human
uggcuuaugccuguaauccua

SEQ ID NO: 257477 - RNA, 32 nt, Human
uggcuuaugccuguaauccuagaacuuuggga

SEQ ID NO: 257478 - RNA, 32 nt, Human
uggcuuaugccuguaauccuagcgcuuuggga

SEQ ID NO: 257479 - RNA, 21 nt, Human
uggcuuaugccuguaaucuca

SEQ ID NO: 257480 - RNA, 32 nt, Human
uggcuuaugccuguaauugcagcacuuuuaga

SEQ ID NO: 257481 - RNA, 18 nt, Human
uggcuuaugccuguaguc

SEQ ID NO: 257482 - RNA, 21 nt, Human
uggcuuaugcuuguaauccca

SEQ ID NO: 257483 - RNA, 32 nt, Human
uggcuuaugcuuguaaucccagcacuuuggga

SEQ ID NO: 257484 - RNA, 32 nt, Human
uggcuuauucacauuaauaaaaaucacaagcu

SEQ ID NO: 257485 - RNA, 21 nt, Human
uggcuuauuccuguaauccca

SEQ ID NO: 257486 - RNA, 32 nt, Human
uggcuuauuugaaaaacaucuuuauguugaga

SEQ ID NO: 257487 - RNA, 32 nt, Human
uggcuucaagcaauccuuccacuuuggccuuc

SEQ ID NO: 257488 - RNA, 26 nt, Human
uggcuucaagcgauucucccaccuca

SEQ ID NO: 257489 - RNA, 32 nt, Human
uggcuucaagcgauucucccaccucagccucc

SEQ ID NO: 257490 - RNA, 32 nt, Human
uggcuucaccacagugcugccugggcaccucu

SEQ ID NO: 257491 - RNA, 32 nt, Human
uggcuucaccgcccuacuuccaccuccgccca

SEQ ID NO: 257492 - RNA, 22 nt, Human
uggcuucacgccuguaauacca

SEQ ID NO: 257493 - RNA, 32 nt, Human
uggcuucacuagagagaguccauucagcagaa

SEQ ID NO: 257494 - RNA, 32 nt, Human
uggcuucacugcagguaaugccuuucccuuca

SEQ ID NO: 257495 - RNA, 32 nt, Human
uggcuucagaggccuggcaucuucuggagaag

SEQ ID NO: 257496 - RNA, 18 nt, Human
uggcuucagaggcucaca

SEQ ID NO: 257497 - RNA, 32 nt, Human
uggcuucagcccaggcguggugucaguuuccu

SEQ ID NO: 257498 - RNA, 32 nt, Human
uggcuucagccucugcagucaggaugaagccc

SEQ ID NO: 257499 - RNA, 32 nt, Human
uggcuucaggcaauucuccugccuuugccucc

SEQ ID NO: 257500 - RNA, 24 nt, Human
uggcuucagggaggaccuagcaga

SEQ ID NO: 257501 - RNA, 32 nt, Human
uggcuucagggugggaguaguuggagcauugg

SEQ ID NO: 257502 - RNA, 32 nt, Human
uggcuucaggguggggccuugagaaggggaau

SEQ ID NO: 257503 - RNA, 32 nt, Human
uggcuucagggugggguuuggaagcuucugga

SEQ ID NO: 257504 - RNA, 21 nt, Human
uggcuucauaguacaggggga

SEQ ID NO: 257505 - RNA, 32 nt, Human
uggcuucauauauguaacgugagguauuaaug

SEQ ID NO: 257506 - RNA, 32 nt, Human
uggcuucaugacaccacaguccuggucuuucu

SEQ ID NO: 257507 - RNA, 32 nt, Human
uggcuuccaucuuuugcaucaccaccacuccu

SEQ ID NO: 257508 - RNA, 32 nt, Human
uggcuuccaugugcagcacucuucccaauugc

SEQ ID NO: 257509 - RNA, 32 nt, Human
uggcuuccauugaggagcccaggcuggggcca

SEQ ID NO: 257510 - RNA, 32 nt, Human
uggcuuccccuccccaccccacgcgugcauaa

SEQ ID NO: 257511 - RNA, 32 nt, Human
uggcuucccuggcaugauggacaaaggccugg

SEQ ID NO: 257512 - RNA, 32 nt, Human
uggcuuccucauucaucccucuugcuaaaaga

SEQ ID NO: 257513 - RNA, 32 nt, Human
uggcuuccugaaggagggggcaguggcgcagg

SEQ ID NO: 257514 - RNA, 32 nt, Human
uggcuuccugcucgaccucccugagucugauc

SEQ ID NO: 257515 - RNA, 32 nt, Human
uggcuuccuggaaucaaaaugugaauucaugu

SEQ ID NO: 257516 - RNA, 32 nt, Human
uggcuucgcuggucggaucguccuccuggccc

SEQ ID NO: 257517 - RNA, 28 nt, Human
uggcuucggggugcugccucucccuccc

SEQ ID NO: 257518 - RNA, 32 nt, Human
uggcuucguguaggauggugaucgggguggga

SEQ ID NO: 257519 - RNA, 32 nt, Human
uggcuucuagggaggccucaggaagcuuacag

SEQ ID NO: 257520 - RNA, 32 nt, Human
uggcuucuagguacugucuucuggaccucaga

SEQ ID NO: 257521 - RNA, 18 nt, Human
uggcuucuauucaagucc

SEQ ID NO: 257522 - RNA, 32 nt, Human
uggcuucucaauuuucuuccuucucugccccu

SEQ ID NO: 257523 - RNA, 32 nt, Human
uggcuucucacugccaccucaaacccgcugcc

SEQ ID NO: 257524 - RNA, 32 nt, Human
uggcuucucauggggaugguucauccccgacu

SEQ ID NO: 257525 - RNA, 32 nt, Human
uggcuucuccaccugcuccugccuggacggcg

SEQ ID NO: 257526 - RNA, 32 nt, Human
uggcuucuccaccuuugauccauucugcacag

SEQ ID NO: 257527 - RNA, 32 nt, Human
uggcuucuccauccuacccaagguaacagugu

SEQ ID NO: 257528 - RNA, 32 nt, Human
uggcuucuccauccucauuugcaaaccucaga

SEQ ID NO: 257529 - RNA, 32 nt, Human
uggcuucuccauccuguuuucugcaacauucu

SEQ ID NO: 257530 - RNA, 32 nt, Human
uggcuucucccauggggacccagaagucccua

SEQ ID NO: 257531 - RNA, 32 nt, Human
uggcuucuccucagggcaaccccugcccaacc

SEQ ID NO: 257532 - RNA, 32 nt, Human
uggcuucuccucggaccucugugaauauuuau

SEQ ID NO: 257533 - RNA, 32 nt, Human
uggcuucuccugggcucuggcauuaguugguc

SEQ ID NO: 257534 - RNA, 32 nt, Human
uggcuucucgugguuuuucccaccccagcugc

SEQ ID NO: 257535 - RNA, 32 nt, Human
uggcuucucugccuccagccuuugggguagcc

SEQ ID NO: 257536 - RNA, 19 nt, Human
uggcuucucuugagucaca

SEQ ID NO: 257537 - RNA, 32 nt, Human
uggcuucugaggcuacagaacuccaacccaga

SEQ ID NO: 257538 - RNA, 26 nt, Human
uggcuucugaucuccacuccacuuua

SEQ ID NO: 257539 - RNA, 32 nt, Human
uggcuucugcgugcuuucucccuuccguccua

SEQ ID NO: 257540 - RNA, 18 nt, Human
uggcuucugcugcugcug

SEQ ID NO: 257541 - RNA, 24 nt, Human
uggcuucuggauaucgcccaccuu

SEQ ID NO: 257542 - RNA, 32 nt, Human
uggcuucugggagcuggaaagagcuggcuuag

SEQ ID NO: 257543 - RNA, 32 nt, Human
uggcuucugggcacaaugggaaguuaucccuu

SEQ ID NO: 257544 - RNA, 32 nt, Human
uggcuucugggggagagcuuggggcagcagag

SEQ ID NO: 257545 - RNA, 32 nt, Human
uggcuucuguaaucccaggacuuugggaggcc

SEQ ID NO: 257546 - RNA, 32 nt, Human
uggcuucuguuuccagcucugacacaccgacc

SEQ ID NO: 257547 - RNA, 32 nt, Human
uggcuucuuagagugagagaaguauguggaca

SEQ ID NO: 257548 - RNA, 32 nt, Human
uggcuucuuccuauuugccaugggcuucacug

SEQ ID NO: 257549 - RNA, 32 nt, Human
uggcuucuuccuucaggaacugaagaaccccc

SEQ ID NO: 257550 - RNA, 18 nt, Human
uggcuucuucuagucgca

SEQ ID NO: 257551 - RNA, 17 nt, Human
uggcuucuucuggucac

SEQ ID NO: 257552 - RNA, 32 nt, Human
uggcuucuucuuugaucucucuuugaccauac

SEQ ID NO: 257553 - RNA, 32 nt, Human
uggcuucuugagaaggcucacagcuguggucu

SEQ ID NO: 257554 - RNA, 18 nt, Human
uggcuugaacccagcaga

SEQ ID NO: 257555 - RNA, 32 nt, Human
uggcuugaacccagcagauggagguugcagug

SEQ ID NO: 257556 - RNA, 32 nt, Human
uggcuugaacccaggaggcagagguugcagug

SEQ ID NO: 257557 - RNA, 32 nt, Human
uggcuugaacccaggagguggagguugcggug

SEQ ID NO: 257558 - RNA, 32 nt, Human
uggcuugaacccaggagguggagguugcugug

SEQ ID NO: 257559 - RNA, 32 nt, Human
uggcuugaaccccagaggcggagguugcagug

SEQ ID NO: 257560 - RNA, 32 nt, Human
uggcuugaaccuuuucccuucaguaauaacgu

SEQ ID NO: 257561 - RNA, 32 nt, Human
uggcuugaagaggaauaauauacacauaacuu

SEQ ID NO: 257562 - RNA, 24 nt, Human
uggcuugacuggauggaaggagac

SEQ ID NO: 257563 - RNA, 32 nt, Human
uggcuugagcccaggagguggagguugcagug

SEQ ID NO: 257564 - RNA, 32 nt, Human
uggcuugagcccaggagguugaggcugcagug

SEQ ID NO: 257565 - RNA, 32 nt, Human
uggcuugagcccaggagguugaggucacagug

SEQ ID NO: 257566 - RNA, 32 nt, Human
uggcuugagcccaggaguucaagaccagccug

SEQ ID NO: 257567 - RNA, 32 nt, Human
uggcuugagcccaggaguuugagguugcagug

SEQ ID NO: 257568 - RNA, 32 nt, Human
uggcuugagcccuagagguugaggcugcagug

SEQ ID NO: 257569 - RNA, 20 nt, Human
uggcuugagugauccucccg

SEQ ID NO: 257570 - RNA, 32 nt, Human
uggcuugaucaagugggcuuuggauccauaug

SEQ ID NO: 257571 - RNA, 32 nt, Human
uggcuugaucauagcucacugcagccuugagc

SEQ ID NO: 257572 - RNA, 32 nt, Human
uggcuugaucccuggcugaaucaccuggauga

SEQ ID NO: 257573 - RNA, 23 nt, Human
uggcuugaucucggcucacugca

SEQ ID NO: 257574 - RNA, 23 nt, Human
uggcuugaucucggcucauugca

SEQ ID NO: 257575 - RNA, 32 nt, Human
uggcuugauucagacuggaguggauaggauaa

SEQ ID NO: 257576 - RNA, 32 nt, Human
uggcuugcaagcuguucauuuuucugaaggag

SEQ ID NO: 257577 - RNA, 21 nt, Human
uggcuugcaccuguaauccca

SEQ ID NO: 257578 - RNA, 23 nt, Human
uggcuugcaccuguaaucccagc

SEQ ID NO: 257579 - RNA, 32 nt, Human
uggcuugcaccuguaaucccagcacuuuggga

SEQ ID NO: 257580 - RNA, 32 nt, Human
uggcuugccucccuccuuccuccccucucaac

SEQ ID NO: 257581 - RNA, 32 nt, Human
uggcuugcugcagccucaaccuccugggcuca

SEQ ID NO: 257582 - RNA, 32 nt, Human
uggcuugcugggaggugggcugcagcacagag

SEQ ID NO: 257583 - RNA, 32 nt, Human
uggcuugcuuugauguauguuuggaaagaugu

SEQ ID NO: 257584 - RNA, 32 nt, Human
uggcuuggaaucaccaacucugccuguauugu

SEQ ID NO: 257585 - RNA, 21 nt, Human
uggcuuggacagccccaguga

SEQ ID NO: 257586 - RNA, 19 nt, Human
uggcuuggacccagggaga

SEQ ID NO: 257587 - RNA, 32 nt, Human
uggcuuggacugugaggguagaguaggcucgc

SEQ ID NO: 257588 - RNA, 32 nt, Human
uggcuuggagcagaggugggggucggcgccuu

SEQ ID NO: 257589 - RNA, 32 nt, Human
uggcuuggcaucugcacuccagcccaggacug

SEQ ID NO: 257590 - RNA, 32 nt, Human
uggcuuggccagcagaaccagccccaagccag

SEQ ID NO: 257591 - RNA, 32 nt, Human
uggcuugggcccaggaggucgaggcugcggug

SEQ ID NO: 257592 - RNA, 32 nt, Human
uggcuugggcuggagucacgggggcggucucu

SEQ ID NO: 257593 - RNA, 19 nt, Human
uggcuuggggccagaagga

SEQ ID NO: 257594 - RNA, 32 nt, Human
uggcuugggggaaaaggauaguuuugucuccu

SEQ ID NO: 257595 - RNA, 32 nt, Human
uggcuuggugaggacagcaggaggggcccaca

SEQ ID NO: 257596 - RNA, 32 nt, Human
uggcuuggugucagggagaggcuguagagugg

SEQ ID NO: 257597 - RNA, 32 nt, Human
uggcuugguuacugugacuguagcuggagugg

SEQ ID NO: 257598 - RNA, 21 nt, Human
uggcuuguacccguaauccca

SEQ ID NO: 257599 - RNA, 32 nt, Human
uggcuuguccaaggccacacagcuggcuugaa

SEQ ID NO: 257600 - RNA, 32 nt, Human
uggcuugucucaggaguguugaaugugugccc

SEQ ID NO: 257601 - RNA, 32 nt, Human
uggcuugugagacucaugguguccuugucccu

SEQ ID NO: 257602 - RNA, 32 nt, Human
uggcuugugcacuccagagcagcauccugagu

SEQ ID NO: 257603 - RNA, 21 nt, Human
uggcuugugccuguaauccca

SEQ ID NO: 257604 - RNA, 32 nt, Human
uggcuugugccuguaaucccagaacuuuggaa

SEQ ID NO: 257605 - RNA, 32 nt, Human
uggcuugugccuguagucccagcuacuuggga

SEQ ID NO: 257606 - RNA, 32 nt, Human
uggcuuguguucuguuccuuucacaaaagcuc

SEQ ID NO: 257607 - RNA, 32 nt, Human
uggcuuguuccaagcgcugccuucuccaacug

SEQ ID NO: 257608 - RNA, 21 nt, Human
uggcuuguuccuguaguccca

SEQ ID NO: 257609 - RNA, 32 nt, Human
uggcuuguuuccaucacuggaaaucacuuaga

SEQ ID NO: 257610 - RNA, 21 nt, Human
uggcuuguuuuuaaagcuuua

SEQ ID NO: 257611 - RNA, 26 nt, Human
uggcuuuaaaggucuaccccacuuua

SEQ ID NO: 257612 - RNA, 32 nt, Human
uggcuuuaagcuccgcuucugucaguauuugc

SEQ ID NO: 257613 - RNA, 32 nt, Human
uggcuuuacaggguucucagagauguggggua

SEQ ID NO: 257614 - RNA, 32 nt, Human
uggcuuuaccaguguugacagaaaaauuuuaa

SEQ ID NO: 257615 - RNA, 32 nt, Human
uggcuuuagguuuuucuugaagaauuaggaaa

SEQ ID NO: 257616 - RNA, 32 nt, Human
uggcuuuauuaucaccucacuacuuuuuagag

SEQ ID NO: 257617 - RNA, 19 nt, Human
uggcuuuauucuaauccca

SEQ ID NO: 257618 - RNA, 32 nt, Human
uggcuuucaaauggucacccauuuuucuuuca

SEQ ID NO: 257619 - RNA, 32 nt, Human
uggcuuucagcagcuguggggaggugggacug

SEQ ID NO: 257620 - RNA, 32 nt, Human
uggcuuuccaucucagccucggagggcaacau

SEQ ID NO: 257621 - RNA, 32 nt, Human
uggcuuuccaugcuccucucccuccaccuccu

SEQ ID NO: 257622 - RNA, 31 nt, Human
uggcuuucccucucugggccucagucuguuc

SEQ ID NO: 257623 - RNA, 21 nt, Human
uggcuuucuaacccccugcca

SEQ ID NO: 257624 - RNA, 32 nt, Human
uggcuuucuaauaccaauuguaauauuuacaa

SEQ ID NO: 257625 - RNA, 32 nt, Human
uggcuuucuccucagcaggucccaccacccuc

SEQ ID NO: 257626 - RNA, 32 nt, Human
uggcuuucugcaaccucugccucccagguuca

SEQ ID NO: 257627 - RNA, 32 nt, Human
uggcuuucuggcugcuggaggcuggggagaag

SEQ ID NO: 257628 - RNA, 32 nt, Human
uggcuuugaaggaggaagacaccuugagccaa

SEQ ID NO: 257629 - RNA, 32 nt, Human
uggcuuugaccaugaaacugugaauggcccua

SEQ ID NO: 257630 - RNA, 32 nt, Human
uggcuuugagaaggaagggaagauggaacagg

SEQ ID NO: 257631 - RNA, 32 nt, Human
uggcuuugagauacaguucaguuuuuauuagg

SEQ ID NO: 257632 - RNA, 19 nt, Human
uggcuuugagcccucuaca

SEQ ID NO: 257633 - RNA, 32 nt, Human
uggcuuugaggagaauccucucugccauucuu

SEQ ID NO: 257634 - RNA, 22 nt, Human
uggcuuugaugaggcccacuuc

SEQ ID NO: 257635 - RNA, 17 nt, Human
uggcuuugauuucggca

SEQ ID NO: 257636 - RNA, 32 nt, Human
uggcuuugcacugagcagcucagucuacuggu

SEQ ID NO: 257637 - RNA, 32 nt, Human
uggcuuugcagaacagagguagcaaugucacc

SEQ ID NO: 257638 - RNA, 32 nt, Human
uggcuuugccagagguugcaacauguugagag

SEQ ID NO: 257639 - RNA, 32 nt, Human
uggcuuugcccaccccucacuccccagggagc

SEQ ID NO: 257640 - RNA, 30 nt, Human
uggcuuugccucuccuguguccugucuuuc

SEQ ID NO: 257641 - RNA, 31 nt, Human
uggcuuugccucuccuguguccugucuuucu

SEQ ID NO: 257642 - RNA, 32 nt, Human
uggcuuugcgcggucucugccugcugagcagu

SEQ ID NO: 257643 - RNA, 32 nt, Human
uggcuuugcggagaagguuccaccuuacgcuc

SEQ ID NO: 257644 - RNA, 32 nt, Human
uggcuuugcucuggacaaaggguuccagagag

SEQ ID NO: 257645 - RNA, 32 nt, Human
uggcuuugcucugugcagaacccagcacacgu

SEQ ID NO: 257646 - RNA, 23 nt, Human
uggcuuugcugaucccccaccuc

SEQ ID NO: 257647 - RNA, 32 nt, Human
uggcuuuggaaagaccugugaggggaaaccuu

SEQ ID NO: 257648 - RNA, 32 nt, Human
uggcuuuggcaguggagccgccagucuuggug

SEQ ID NO: 257649 - RNA, 32 nt, Human
uggcuuugggagagagcagcagcaagguauuc

SEQ ID NO: 257650 - RNA, 32 nt, Human
uggcuuugggcaguucaggaggaggacuccau

SEQ ID NO: 257651 - RNA, 32 nt, Human
uggcuuugggcugagaggaugagggaggucuu

SEQ ID NO: 257652 - RNA, 20 nt, Human
uggcuuugggcuuccuccgc

SEQ ID NO: 257653 - RNA, 32 nt, Human
uggcuuugguagagucuccucuuguguuucau

SEQ ID NO: 257654 - RNA, 32 nt, Human
uggcuuuggucaccacgagucuagcucagggc

SEQ ID NO: 257655 - RNA, 21 nt, Human
uggcuuuggugguugguucca

SEQ ID NO: 257656 - RNA, 18 nt, Human
uggcuuuguacugagaaa

SEQ ID NO: 257657 - RNA, 32 nt, Human
uggcuuuguaggcugugcugugucugaagggg

SEQ ID NO: 257658 - RNA, 22 nt, Human
uggcuuuguccucacucucuca

SEQ ID NO: 257659 - RNA, 20 nt, Human
uggcuuuguggugccaccuc

SEQ ID NO: 257660 - RNA, 32 nt, Human
uggcuuugugucuccccugcuuuccccacgca

SEQ ID NO: 257661 - RNA, 32 nt, Human
uggcuuuguugcuucucuaucuguauuuagcu

SEQ ID NO: 257662 - RNA, 31 nt, Human
uggcuuuuaauaaauacucauugguugaaac

SEQ ID NO: 257663 - RNA, 21 nt, Human
uggcuuuuauuccuuuccaca

SEQ ID NO: 257664 - RNA, 32 nt, Human
uggcuuuucccaaaguuucugacuuugugguu

SEQ ID NO: 257665 - RNA, 32 nt, Human
uggcuuuucuaccuguaacaugcacauagagc

SEQ ID NO: 257666 - RNA, 32 nt, Human
uggcuuuucucccaacuuuuuguuuuacguau

SEQ ID NO: 257667 - RNA, 32 nt, Human
uggcuuuucucccagccccuuuccaugccuuu

SEQ ID NO: 257668 - RNA, 32 nt, Human
uggcuuuucuuagagccucuuggagacaacau

SEQ ID NO: 257669 - RNA, 22 nt, Human
uggcuuuugaauaucuuccaca

SEQ ID NO: 257670 - RNA, 32 nt, Human
uggcuuuugagguuccugguucuugaagccag

SEQ ID NO: 257671 - RNA, 21 nt, Human
uggcuuuugccuguaauccca

SEQ ID NO: 257672 - RNA, 32 nt, Human
uggcuuuugccuguaaucccaacacuuuggga

SEQ ID NO: 257673 - RNA, 27 nt, Human
uggcuuuugcugauuucauuuauuuua

SEQ ID NO: 257674 - RNA, 32 nt, Human
uggcuuuugcugcucuguucucccucuacauu

SEQ ID NO: 257675 - RNA, 32 nt, Human
uggcuuuuugcacgugaguaugauccaggauu

SEQ ID NO: 257676 - RNA, 32 nt, Human
uggcuuuuuggagagggaaauuuggaaacggg

SEQ ID NO: 257677 - RNA, 32 nt, Human
uggcuuuuugggcuguuugcuuuugcuacuac

SEQ ID NO: 257678 - RNA, 32 nt, Human
uggcuuuuugugaaugugcagugcaacuuuuu

SEQ ID NO: 257679 - RNA, 16 nt, Human
ugggaaaaacugugau

SEQ ID NO: 257680 - RNA, 32 nt, Human
ugggaaaaagagacucuuuuaggaucagaucu

SEQ ID NO: 257681 - RNA, 32 nt, Human
ugggaaaacagcaagccacagagcggaacaag

SEQ ID NO: 257682 - RNA, 32 nt, Human
ugggaaaacagcuucugagccauuuuggggag

SEQ ID NO: 257683 - RNA, 32 nt, Human
ugggaaaaccaaaagaauucacggauccuuug

SEQ ID NO: 257684 - RNA, 22 nt, Human
ugggaaaacuggauuacuuuca

SEQ ID NO: 257685 - RNA, 32 nt, Human
ugggaaaagacaggagaaguacugacucaacu

SEQ ID NO: 257686 - RNA, 32 nt, Human
ugggaaaagacuugccuucugccagaacuuaa

SEQ ID NO: 257687 - RNA, 32 nt, Human
ugggaaaagagaucacguggauuccggucaaa

SEQ ID NO: 257688 - RNA, 32 nt, Human
ugggaaaagccagaagccagaggggcacaagg

SEQ ID NO: 257689 - RNA, 32 nt, Human
ugggaaaagcgggugagcaggaggcaugaggu

SEQ ID NO: 257690 - RNA, 32 nt, Human
ugggaaaaggaaaggucgagagaaucuugucc

SEQ ID NO: 257691 - RNA, 32 nt, Human
ugggaaaagggaggcagaggaggcagaggcag

SEQ ID NO: 257692 - RNA, 32 nt, Human
ugggaaaaggggauauucaaaaguucuguggu

SEQ ID NO: 257693 - RNA, 32 nt, Human
ugggaaaaggucaagaaagaggcagaaagaga

SEQ ID NO: 257694 - RNA, 32 nt, Human
ugggaaaagucaguaaaaaugauacugaagag

SEQ ID NO: 257695 - RNA, 32 nt, Human
ugggaaaaugcacacauuucugaggggagagg

SEQ ID NO: 257696 - RNA, 32 nt, Human
ugggaaaaugcacguggagaugaaaccagauu

SEQ ID NO: 257697 - RNA, 32 nt, Human
ugggaaaauuacuguuaccucuaccaucuuaa

SEQ ID NO: 257698 - RNA, 20 nt, Human
ugggaaacacacagaaauuu

SEQ ID NO: 257699 - RNA, 32 nt, Human
ugggaaacaggaacuccucgaccucaggccaa

SEQ ID NO: 257700 - RNA, 32 nt, Human
ugggaaacauaaagcagaauugggagggacuu

SEQ ID NO: 257701 - RNA, 32 nt, Human
ugggaaacauaacaagaccccgucucuacaaa

SEQ ID NO: 257702 - RNA, 32 nt, Human
ugggaaacauagugagaccccgucucuacaaa

SEQ ID NO: 257703 - RNA, 32 nt, Human
ugggaaacauggcaaaaccccaucucuauaaa

SEQ ID NO: 257704 - RNA, 32 nt, Human
ugggaaacauggcaaaacccgucuuuaugugc

SEQ ID NO: 257705 - RNA, 32 nt, Human
ugggaaacauggcaaaaucccaucucuacaac

SEQ ID NO: 257706 - RNA, 32 nt, Human
ugggaaacauggcaaaauccucucucuauuuu

SEQ ID NO: 257707 - RNA, 32 nt, Human
ugggaaacccagccugggaaggcagcauucca

SEQ ID NO: 257708 - RNA, 32 nt, Human
ugggaaacccucuccaucucccaaggcugcca

SEQ ID NO: 257709 - RNA, 32 nt, Human
ugggaaacguggcgaaaccccaucucuacuaa

SEQ ID NO: 257710 - RNA, 32 nt, Human
ugggaaacucacagcuggacucaggggacacg

SEQ ID NO: 257711 - RNA, 32 nt, Human
ugggaaacugcuuuuccacaaggaaucuccgu

SEQ ID NO: 257712 - RNA, 32 nt, Human
ugggaaacuguaccuaccucucuucccacugc

SEQ ID NO: 257713 - RNA, 32 nt, Human
ugggaaacuucucacugaugugcucaaguaca

SEQ ID NO: 257714 - RNA, 32 nt, Human
ugggaaagaaucaguaagaugcagggcugacu

SEQ ID NO: 257715 - RNA, 32 nt, Human
ugggaaagaaucaguaggaugacagggcugac

SEQ ID NO: 257716 - RNA, 32 nt, Human
ugggaaagacuggaguaucucagucccucuca

SEQ ID NO: 257717 - RNA, 32 nt, Human
ugggaaagaggacucacaguuagccagcugac

SEQ ID NO: 257718 - RNA, 23 nt, Human
ugggaaagcagagguugcaguga

SEQ ID NO: 257719 - RNA, 32 nt, Human
ugggaaagcccaaccugguucuuuaacaaggc

SEQ ID NO: 257720 - RNA, 32 nt, Human
ugggaaagcccaggccgcaggagugggaugcc

SEQ ID NO: 257721 - RNA, 20 nt, Human
ugggaaagcugucugagaca

SEQ ID NO: 257722 - RNA, 32 nt, Human
ugggaaaggaaaggaccacagcaaacaccauu

SEQ ID NO: 257723 - RNA, 32 nt, Human
ugggaaaggaagagaaggagcaaguaagaaug

SEQ ID NO: 257724 - RNA, 32 nt, Human
ugggaaaggaggaccugcaaccaucugacuug

SEQ ID NO: 257725 - RNA, 21 nt, Human
ugggaaaggauucacaguaag

SEQ ID NO: 257726 - RNA, 32 nt, Human
ugggaaaggcugggaucauauguauuucuaug

SEQ ID NO: 257727 - RNA, 32 nt, Human
ugggaaagggagcaaggggcagauagcucagc

SEQ ID NO: 257728 - RNA, 32 nt, Human
ugggaaagggguucauuucacaaaaggaaaau

SEQ ID NO: 257729 - RNA, 32 nt, Human
ugggaaagucuugggagugagggguuguggug

SEQ ID NO: 257730 - RNA, 32 nt, Human
ugggaaagugaaaacaacaagcuaacccacau

SEQ ID NO: 257731 - RNA, 21 nt, Human
ugggaaagugcccuggaccgg

SEQ ID NO: 257732 - RNA, 32 nt, Human
ugggaaagugcuagcugugcucaccuucaugg

SEQ ID NO: 257733 - RNA, 32 nt, Human
ugggaaaucagcgccuugcagagaugcugggg

SEQ ID NO: 257734 - RNA, 32 nt, Human
ugggaaaugagacuugcucucuggccuuuucc

SEQ ID NO: 257735 - RNA, 32 nt, Human
ugggaaaugcagauugcuagguucaccagccc

SEQ ID NO: 257736 - RNA, 32 nt, Human
ugggaaauuacuccgugcugugcaguggggcg

SEQ ID NO: 257737 - RNA, 32 nt, Human
ugggaaauucauguuguugaucuuuaauuauu

SEQ ID NO: 257738 - RNA, 32 nt, Human
ugggaaauucauuucaagcugcagaggaacgu

SEQ ID NO: 257739 - RNA, 32 nt, Human
ugggaaauucccaggguauuacuggaccuaug

SEQ ID NO: 257740 - RNA, 32 nt, Human
ugggaaauugcucuccccucuguggcuuggac

SEQ ID NO: 257741 - RNA, 32 nt, Human
ugggaacaaaggaggcucagagaggaaagacg

SEQ ID NO: 257742 - RNA, 32 nt, Human
ugggaacaagggaagagagagcaggagcuggg

SEQ ID NO: 257743 - RNA, 32 nt, Human
ugggaacacaaaccagcaucaccacagcaugu

SEQ ID NO: 257744 - RNA, 20 nt, Human
ugggaacacaauccagaaug

SEQ ID NO: 257745 - RNA, 21 nt, Human
ugggaacaccaguuucuagcu

SEQ ID NO: 257746 - RNA, 32 nt, Human
ugggaacagaagagagaaggaggcagggagau

SEQ ID NO: 257747 - RNA, 32 nt, Human
ugggaacagagagcaaacauuuugggaugaug

SEQ ID NO: 257748 - RNA, 32 nt, Human
ugggaacagaguccuugucacuccaggggaug

SEQ ID NO: 257749 - RNA, 32 nt, Human
ugggaacagcugcuacccccaagacuugccac

SEQ ID NO: 257750 - RNA, 32 nt, Human
ugggaacaggauuccaggaccccuuucuuguu

SEQ ID NO: 257751 - RNA, 32 nt, Human
ugggaacagguggcagagaagugccauguuug

SEQ ID NO: 257752 - RNA, 32 nt, Human
ugggaacaucugccuuuucagucucuucugaa

SEQ ID NO: 257753 - RNA, 32 nt, Human
ugggaacaucuucaaugacaucugcaaccauu

SEQ ID NO: 257754 - RNA, 32 nt, Human
ugggaaccaacauucuuuggauuuagugggga

SEQ ID NO: 257755 - RNA, 32 nt, Human
ugggaaccaagcuauuccuuucccuuccucuu

SEQ ID NO: 257756 - RNA, 18 nt, Human
ugggaaccaagggcccuc

SEQ ID NO: 257757 - RNA, 19 nt, Human
ugggaaccacagaggaagg

SEQ ID NO: 257758 - RNA, 21 nt, Human
ugggaaccacaguuccuggcu

SEQ ID NO: 257759 - RNA, 32 nt, Human
ugggaaccaguucuuagccacuuggacacuga

SEQ ID NO: 257760 - RNA, 32 nt, Human
ugggaaccaugccugggcuuucaccuugaagc

SEQ ID NO: 257761 - RNA, 32 nt, Human
ugggaaccauggugucaauacauaucauguag

SEQ ID NO: 257762 - RNA, 20 nt, Human
ugggaacccaagcugaggga

SEQ ID NO: 257763 - RNA, 24 nt, Human
ugggaacccccuugcucccagggg

SEQ ID NO: 257764 - RNA, 20 nt, Human
ugggaaccccggguucaggg

SEQ ID NO: 257765 - RNA, 22 nt, Human
ugggaaccccugugccaagggg

SEQ ID NO: 257766 - RNA, 21 nt, Human
ugggaacccgcagccugggga

SEQ ID NO: 257767 - RNA, 32 nt, Human
ugggaacccgggaggcagagcuugcagugagc

SEQ ID NO: 257768 - RNA, 32 nt, Human
ugggaacccgggaggcggagcuugcagugagc

SEQ ID NO: 257769 - RNA, 21 nt, Human
ugggaacccuggcccagagga

SEQ ID NO: 257770 - RNA, 32 nt, Human
ugggaacccugggccaggagguuacagugguc

SEQ ID NO: 257771 - RNA, 32 nt, Human
ugggaaccuccaccuccuacuccccacccacc

SEQ ID NO: 257772 - RNA, 32 nt, Human
ugggaaccucccccucccuugugguuucagca

SEQ ID NO: 257773 - RNA, 22 nt, Human
ugggaaccucggggcccagggg

SEQ ID NO: 257774 - RNA, 32 nt, Human
ugggaaccuggaaguggguugcaucugacucu

SEQ ID NO: 257775 - RNA, 32 nt, Human
ugggaaccugggacccagagagaaaggaugca

SEQ ID NO: 257776 - RNA, 32 nt, Human
ugggaaccuucauaugugcaguauuuauauug

SEQ ID NO: 257777 - RNA, 32 nt, Human
ugggaacgauuucgcgcugaggaagacccuuu

SEQ ID NO: 257778 - RNA, 32 nt, Human
ugggaacgucacaucagacaauaggaacggcu

SEQ ID NO: 257779 - RNA, 19 nt, Human
ugggaacuccacucgggga

SEQ ID NO: 257780 - RNA, 32 nt, Human
ugggaacugcagaccuguccuccugguggguc

SEQ ID NO: 257781 - RNA, 23 nt, Human
ugggaacugcagggaggcucuga

SEQ ID NO: 257782 - RNA, 32 nt, Human
ugggaacuggaaagaaaguuacagaaaggaua

SEQ ID NO: 257783 - RNA, 32 nt, Human
ugggaacuucaugcugauuuguacauauugaa

SEQ ID NO: 257784 - RNA, 32 nt, Human
ugggaacuucuuucuugcccgccaagcccgca

SEQ ID NO: 257785 - RNA, 32 nt, Human
ugggaacuuggaaaucaagugagacccaagca

SEQ ID NO: 257786 - RNA, 32 nt, Human
ugggaagaaaaauuggucagcuuggcucgggg

SEQ ID NO: 257787 - RNA, 21 nt, Human
ugggaagaaagaguuugcugg

SEQ ID NO: 257788 - RNA, 32 nt, Human
ugggaagaaaucugguauccaagcuuaaauuu

SEQ ID NO: 257789 - RNA, 23 nt, Human
ugggaagaacaacaggaaaccaa

SEQ ID NO: 257790 - RNA, 32 nt, Human
ugggaagaacaacaggaaaccaaggucugacc

SEQ ID NO: 257791 - RNA, 23 nt, Human
ugggaagaacaggguugcauuua

SEQ ID NO: 257792 - RNA, 32 nt, Human
ugggaagaacccuuucuuuugugaccauagga

SEQ ID NO: 257793 - RNA, 24 nt, Human
ugggaagaacuggauaugugcuaa

SEQ ID NO: 257794 - RNA, 32 nt, Human
ugggaagaagagaagcgaggcuggggacacag

SEQ ID NO: 257795 - RNA, 32 nt, Human
ugggaagaaugggaagugacugcuuaauggau

SEQ ID NO: 257796 - RNA, 21 nt, Human
ugggaagaauuuggauaccaa

SEQ ID NO: 257797 - RNA, 24 nt, Human
ugggaagacaacuaggauacuuuc

SEQ ID NO: 257798 - RNA, 32 nt, Human
ugggaagacagcagagguguguagacagguag

SEQ ID NO: 257799 - RNA, 20 nt, Human
ugggaagaccuaugcuuuca

SEQ ID NO: 257800 - RNA, 32 nt, Human
ugggaagaccucucacaggcagcacuggcagg

SEQ ID NO: 257801 - RNA, 19 nt, Human
ugggaagaccuuaagccau

SEQ ID NO: 257802 - RNA, 32 nt, Human
ugggaagacgcuggucaguucaccugccccac

SEQ ID NO: 257803 - RNA, 21 nt, Human
ugggaagacucaaaauguaaa

SEQ ID NO: 257804 - RNA, 32 nt, Human
ugggaagagaacugggcugacuccaggaccuc

SEQ ID NO: 257805 - RNA, 32 nt, Human
ugggaagagagccugauggccugcacuuuuag

SEQ ID NO: 257806 - RNA, 32 nt, Human
ugggaagagagguucacagaggcccuugucua

SEQ ID NO: 257807 - RNA, 19 nt, Human
ugggaagagaguuugcugg

SEQ ID NO: 257808 - RNA, 32 nt, Human
ugggaagagccuugugcucuccacuuugccac

SEQ ID NO: 257809 - RNA, 32 nt, Human
ugggaagaggagaaugguguggauaugguucu

SEQ ID NO: 257810 - RNA, 32 nt, Human
ugggaagaggugacgcgugucccuggaacccc

SEQ ID NO: 257811 - RNA, 23 nt, Human
ugggaagaguaaggguugguuca

SEQ ID NO: 257812 - RNA, 32 nt, Human
ugggaagagucaggauuggccacauugccaau

SEQ ID NO: 257813 - RNA, 32 nt, Human
ugggaagaguguaagugacuacaguagucauu

SEQ ID NO: 257814 - RNA, 32 nt, Human
ugggaagaguuuagugugaaacugggguggaa

SEQ ID NO: 257815 - RNA, 23 nt, Human
ugggaagaucacuugagccccgg

SEQ ID NO: 257816 - RNA, 32 nt, Human
ugggaagaucaucuuccccuggagcuuggcca

SEQ ID NO: 257817 - RNA, 32 nt, Human
ugggaagaucccgggggcggcuuuggacagcc

SEQ ID NO: 257818 - RNA, 32 nt, Human
ugggaagaucccuugagcccaggaguucgaga

SEQ ID NO: 257819 - RNA, 32 nt, Human
ugggaagaucuuuuaaaaaggcaguaggcccg

SEQ ID NO: 257820 - RNA, 21 nt, Human
ugggaagaugccccuggggua

SEQ ID NO: 257821 - RNA, 32 nt, Human
ugggaagauggacgcagcuacucugaccuacg

SEQ ID NO: 257822 - RNA, 32 nt, Human
ugggaagauggccaggaauggacucauaccau

SEQ ID NO: 257823 - RNA, 23 nt, Human
ugggaagauugcuugaacucagg

SEQ ID NO: 257824 - RNA, 22 nt, Human
ugggaagauuugaaaucuuuua

SEQ ID NO: 257825 - RNA, 32 nt, Human
ugggaagcaccuuugugcuuucaaaggcaaga

SEQ ID NO: 257826 - RNA, 32 nt, Human
ugggaagccagccaugguaagggcuggugagg

SEQ ID NO: 257827 - RNA, 32 nt, Human
ugggaagccaggaagugggagggguggggguc

SEQ ID NO: 257828 - RNA, 32 nt, Human
ugggaagccugaucccgguguguggcccagcu

SEQ ID NO: 257829 - RNA, 32 nt, Human
ugggaagccuguaaucccagcuacuugggagg

SEQ ID NO: 257830 - RNA, 21 nt, Human
ugggaagcggacccuccugcc

SEQ ID NO: 257831 - RNA, 22 nt, Human
ugggaagcggagguugcaguga

SEQ ID NO: 257832 - RNA, 32 nt, Human
ugggaagcucugaggagguucauuguaauuuc

SEQ ID NO: 257833 - RNA, 32 nt, Human
ugggaagcuggcaaucugcaccuuggggccug

SEQ ID NO: 257834 - RNA, 32 nt, Human
ugggaagcugugguguggcugcaguggagagu

SEQ ID NO: 257835 - RNA, 32 nt, Human
ugggaagcuuguugcaagaagguugugggaaa

SEQ ID NO: 257836 - RNA, 32 nt, Human
ugggaaggaaaggggagagggagauucccaag

SEQ ID NO: 257837 - RNA, 32 nt, Human
ugggaaggaaggcagugccugcucugcuguga

SEQ ID NO: 257838 - RNA, 32 nt, Human
ugggaaggagacaggacauuccuguacuaagg

SEQ ID NO: 257839 - RNA, 19 nt, Human
ugggaaggagggagccggg

SEQ ID NO: 257840 - RNA, 32 nt, Human
ugggaaggagggagggagggcggugacuuggg

SEQ ID NO: 257841 - RNA, 32 nt, Human
ugggaaggauaagguguccaacagaaagugug

SEQ ID NO: 257842 - RNA, 32 nt, Human
ugggaaggcaagaugcccaacaacagcacugc

SEQ ID NO: 257843 - RNA, 23 nt, Human
ugggaaggcccacagcccaaggg

SEQ ID NO: 257844 - RNA, 32 nt, Human
ugggaaggcccaggcgagggccaauguugugu

SEQ ID NO: 257845 - RNA, 22 nt, Human
ugggaaggccuuuagccagggg

SEQ ID NO: 257846 - RNA, 22 nt, Human
ugggaaggcgcugggaccaagg

SEQ ID NO: 257847 - RNA, 32 nt, Human
ugggaaggcggaaauggccaaaccccaggcau

SEQ ID NO: 257848 - RNA, 32 nt, Human
ugggaaggcuaaggugggagaauccuugaggc

SEQ ID NO: 257849 - RNA, 32 nt, Human
ugggaaggcugaggcaggagaauugcuugaac

SEQ ID NO: 257850 - RNA, 32 nt, Human
ugggaaggcugagguaggagaaucuuuugaau

SEQ ID NO: 257851 - RNA, 24 nt, Human
ugggaaggcugcuaaaacccaggg

SEQ ID NO: 257852 - RNA, 32 nt, Human
ugggaaggcuguagguggagagaugggcuuau

SEQ ID NO: 257853 - RNA, 32 nt, Human
ugggaagggagacagaggcggcggcggcucag

SEQ ID NO: 257854 - RNA, 32 nt, Human
ugggaagggagggagagggggcgcagcucgca

SEQ ID NO: 257855 - RNA, 32 nt, Human
ugggaagggaugggacacagcuucuggcacca

SEQ ID NO: 257856 - RNA, 32 nt, Human
ugggaagggcaggcaggagcuggcuauucugu

SEQ ID NO: 257857 - RNA, 32 nt, Human
ugggaagggcgcaccuuccugccaaaagcaau

SEQ ID NO: 257858 - RNA, 21 nt, Human
ugggaagggcugguccagggg

SEQ ID NO: 257859 - RNA, 32 nt, Human
ugggaaggggaggagagcaaugaaaggcgcgu

SEQ ID NO: 257860 - RNA, 32 nt, Human
ugggaaggggcagcucauguucagguuuccag

SEQ ID NO: 257861 - RNA, 32 nt, Human
ugggaagggggaccgaaucuucccugggagga

SEQ ID NO: 257862 - RNA, 32 nt, Human
ugggaagggggcaggggugaggagcugagccu

SEQ ID NO: 257863 - RNA, 32 nt, Human
ugggaagggguuuuaauaaacagacccuggcg

SEQ ID NO: 257864 - RNA, 23 nt, Human
ugggaaggucacuugagcccagg

SEQ ID NO: 257865 - RNA, 32 nt, Human
ugggaagguggaggccggcagggcggaggcgg

SEQ ID NO: 257866 - RNA, 32 nt, Human
ugggaaggugggaggugcagccagucuagacc

SEQ ID NO: 257867 - RNA, 21 nt, Human
ugggaagguuaaaccgcaggg

SEQ ID NO: 257868 - RNA, 32 nt, Human
ugggaaguaacugccucugacuucaacucaag

SEQ ID NO: 257869 - RNA, 32 nt, Human
ugggaaguaaugaguuguugaccuugaguuga

SEQ ID NO: 257870 - RNA, 32 nt, Human
ugggaaguagcuguacaaagaaaaugauauga

SEQ ID NO: 257871 - RNA, 32 nt, Human
ugggaaguaucucagagaaucagcuaaguuuc

SEQ ID NO: 257872 - RNA, 32 nt, Human
ugggaagucucagcagcucuucuggcuguguu

SEQ ID NO: 257873 - RNA, 32 nt, Human
ugggaagugccaagccacgcggccucaaggga

SEQ ID NO: 257874 - RNA, 32 nt, Human
ugggaaguggagcccccggagcugcuaccgug

SEQ ID NO: 257875 - RNA, 32 nt, Human
ugggaaguggggcuauaggcagccucucugau

SEQ ID NO: 257876 - RNA, 32 nt, Human
ugggaaguggguuggagggaggccaggccggc

SEQ ID NO: 257877 - RNA, 32 nt, Human
ugggaagugguaggacucuggaagaggccaca

SEQ ID NO: 257878 - RNA, 32 nt, Human
ugggaaguguucuuccugccuuucugcuaggu

SEQ ID NO: 257879 - RNA, 32 nt, Human
ugggaaguucaaaagaaagaauaacaggaccu

SEQ ID NO: 257880 - RNA, 32 nt, Human
ugggaaguucacugccccaacucuuuucccgg

SEQ ID NO: 257881 - RNA, 32 nt, Human
ugggaaguucaggaggugggaacuuuguacac

SEQ ID NO: 257882 - RNA, 32 nt, Human
ugggaaguugcaugcugccuccuggguuuuau

SEQ ID NO: 257883 - RNA, 32 nt, Human
ugggaauaaagauggccaugaacagucacaaa

SEQ ID NO: 257884 - RNA, 32 nt, Human
ugggaauaaauaugccucuccuuuguauauua

SEQ ID NO: 257885 - RNA, 32 nt, Human
ugggaauacaggcacgccaccaugcccagcua

SEQ ID NO: 257886 - RNA, 21 nt, Human
ugggaauacaggcaugagcca

SEQ ID NO: 257887 - RNA, 32 nt, Human
ugggaauacuuguguugagcacuugcugugug

SEQ ID NO: 257888 - RNA, 32 nt, Human
ugggaauaugccagaccugugcccguggaaga

SEQ ID NO: 257889 - RNA, 32 nt, Human
ugggaaucaaguuuggagacccacgcuggaca

SEQ ID NO: 257890 - RNA, 32 nt, Human
ugggaaucacauaagggugaaaccagaaacga

SEQ ID NO: 257891 - RNA, 32 nt, Human
ugggaaucacauuucaacaugagauuuggagg

SEQ ID NO: 257892 - RNA, 23 nt, Human
ugggaauccauuuuccugcggga

SEQ ID NO: 257893 - RNA, 32 nt, Human
ugggaaucgaucugugagcauauuuaacuauc

SEQ ID NO: 257894 - RNA, 32 nt, Human
ugggaaucucauaggaagagccaggacaugaa

SEQ ID NO: 257895 - RNA, 32 nt, Human
ugggaaucugagauaugaucccagaaaacauc

SEQ ID NO: 257896 - RNA, 32 nt, Human
ugggaaucuguuccucaccauaucaucccacg

SEQ ID NO: 257897 - RNA, 32 nt, Human
ugggaaugaaggugaaaacuuggagauuucac

SEQ ID NO: 257898 - RNA, 32 nt, Human
ugggaaugaccacucccuuccuaaagaugaga

SEQ ID NO: 257899 - RNA, 32 nt, Human
ugggaaugaggcaguggguggagagagaaugg

SEQ ID NO: 257900 - RNA, 32 nt, Human
ugggaaugcagucggcccugcgcauguggugu

SEQ ID NO: 257901 - RNA, 32 nt, Human
ugggaaugccgcagggagccaggcuggggcca

SEQ ID NO: 257902 - RNA, 32 nt, Human
ugggaauggaaaggacagcaagcacaggugag

SEQ ID NO: 257903 - RNA, 32 nt, Human
ugggaauggaaaugccugauguuaagggaaga

SEQ ID NO: 257904 - RNA, 21 nt, Human
ugggaauggccgggccggggg

SEQ ID NO: 257905 - RNA, 29 nt, Human
ugggaauggcugcuucauuccucgaggau

SEQ ID NO: 257906 - RNA, 32 nt, Human
ugggaauggcugcuucauuccucgaggaugcc

SEQ ID NO: 257907 - RNA, 32 nt, Human
ugggaaugggguggaagggugauggggagcua

SEQ ID NO: 257908 - RNA, 32 nt, Human
ugggaauggggugggagccacagggacgaccc

SEQ ID NO: 257909 - RNA, 32 nt, Human
ugggaauggucgcuuccuguuuucccuuuucc

SEQ ID NO: 257910 - RNA, 32 nt, Human
ugggaauguuugucucaucccauucugcguca

SEQ ID NO: 257911 - RNA, 22 nt, Human
ugggaauuacaggcgugagcca

SEQ ID NO: 257912 - RNA, 32 nt, Human
ugggaauuauaaugagcaccaagcagaaugaa

SEQ ID NO: 257913 - RNA, 32 nt, Human
ugggaauuauuuccuccucccuccaggcagau

SEQ ID NO: 257914 - RNA, 32 nt, Human
ugggaauucaaaggaagagaucuuaaaaguca

SEQ ID NO: 257915 - RNA, 32 nt, Human
ugggaauuguggcuuugaagaccucuggacau

SEQ ID NO: 257916 - RNA, 32 nt, Human
ugggaauuguuuuucaucuguuucuaugguug

SEQ ID NO: 257917 - RNA, 32 nt, Human
ugggacaaagaguuccucuggggcucuuguuc

SEQ ID NO: 257918 - RNA, 32 nt, Human
ugggacaaagccuggggcugggcgggggccau

SEQ ID NO: 257919 - RNA, 32 nt, Human
ugggacaagaugaccucugcagucucuccagc

SEQ ID NO: 257920 - RNA, 17 nt, Human
ugggacaagcgcacggg

SEQ ID NO: 257921 - RNA, 32 nt, Human
ugggacaaggcagggcuggcccaggugacccg

SEQ ID NO: 257922 - RNA, 32 nt, Human
ugggacaagggugggaacucaggaguuacuac

SEQ ID NO: 257923 - RNA, 32 nt, Human
ugggacaaugaccacgcugccuguuugucugu

SEQ ID NO: 257924 - RNA, 32 nt, Human
ugggacacacggguccuccugagucccguagc

SEQ ID NO: 257925 - RNA, 19 nt, Human
ugggacacacugccugcca

SEQ ID NO: 257926 - RNA, 32 nt, Human
ugggacacacugggcuggagcugccggcuggc

SEQ ID NO: 257927 - RNA, 32 nt, Human
ugggacacagaaucacuugcuccaucucauac

SEQ ID NO: 257928 - RNA, 32 nt, Human
ugggacacagccgcgcccgugccgcagaagga

SEQ ID NO: 257929 - RNA, 32 nt, Human
ugggacacaggcaggucauucuuugaacaggc

SEQ ID NO: 257930 - RNA, 18 nt, Human
ugggacacaggggccuuc

SEQ ID NO: 257931 - RNA, 32 nt, Human
ugggacacauggucugucaaugagagcauaau

SEQ ID NO: 257932 - RNA, 32 nt, Human
ugggacaccagcugguccaggcacagccuugc

SEQ ID NO: 257933 - RNA, 32 nt, Human
ugggacacggcugggggcaggccagaggccuc

SEQ ID NO: 257934 - RNA, 32 nt, Human
ugggacacuagaacaggaaggcuccugggccu

SEQ ID NO: 257935 - RNA, 32 nt, Human
ugggacacugcagauaaaaucacaaaaaccac

SEQ ID NO: 257936 - RNA, 32 nt, Human
ugggacacuuaaguaacaucuaaagcauuauu

SEQ ID NO: 257937 - RNA, 32 nt, Human
ugggacagaaagugccuccaccugcaucccca

SEQ ID NO: 257938 - RNA, 32 nt, Human
ugggacagaagcagaggaggcugccugcugug

SEQ ID NO: 257939 - RNA, 32 nt, Human
ugggacagaaggggcagagggagggcagaggc

SEQ ID NO: 257940 - RNA, 32 nt, Human
ugggacagacgcaggccagcugcccagagccc

SEQ ID NO: 257941 - RNA, 32 nt, Human
ugggacagacuggaggaugaggacaaaccaaa

SEQ ID NO: 257942 - RNA, 32 nt, Human
ugggacagagcagaggaaggcaggggauuuag

SEQ ID NO: 257943 - RNA, 32 nt, Human
ugggacagagguggagacaggugcagugaccc

SEQ ID NO: 257944 - RNA, 32 nt, Human
ugggacagagguuggaaggaaaggacuagggu

SEQ ID NO: 257945 - RNA, 32 nt, Human
ugggacagagucucauucugucacucaggcua

SEQ ID NO: 257946 - RNA, 22 nt, Human
ugggacagauuaggaugaggug

SEQ ID NO: 257947 - RNA, 32 nt, Human
ugggacagccuccccucugggaccuuucccug

SEQ ID NO: 257948 - RNA, 21 nt, Human
ugggacagcggaacccagagu

SEQ ID NO: 257949 - RNA, 32 nt, Human
ugggacagcuggucaccuuacgcaagagccag

SEQ ID NO: 257950 - RNA, 32 nt, Human
ugggacagcuuuggauuuguuuucauaaaauc

SEQ ID NO: 257951 - RNA, 32 nt, Human
ugggacaggaagagaagagccguguggccgcg

SEQ ID NO: 257952 - RNA, 32 nt, Human
ugggacaggagaagggaacgggcuuucuuuuc

SEQ ID NO: 257953 - RNA, 32 nt, Human
ugggacaggcagcucuagucagugagaaaucg

SEQ ID NO: 257954 - RNA, 32 nt, Human
ugggacaggccugcaggcacucaguuggccgg

SEQ ID NO: 257955 - RNA, 32 nt, Human
ugggacaggccugucaggccucugggaaucuc

SEQ ID NO: 257956 - RNA, 32 nt, Human
ugggacaggccuucacuuuggagccacgggau

SEQ ID NO: 257957 - RNA, 32 nt, Human
ugggacaggcuccugaggaggauugaggguga

SEQ ID NO: 257958 - RNA, 19 nt, Human
ugggacaggcuggggccag

SEQ ID NO: 257959 - RNA, 32 nt, Human
ugggacaggcuggggccaggaggcagaaacac

SEQ ID NO: 257960 - RNA, 32 nt, Human
ugggacagggaggauccugucuggccuucagu

SEQ ID NO: 257961 - RNA, 23 nt, Human
ugggacaggggagaaccuagggu

SEQ ID NO: 257962 - RNA, 21 nt, Human
ugggacagggucucacucugu

SEQ ID NO: 257963 - RNA, 32 nt, Human
ugggacagggucucacucugucacccaggcug

SEQ ID NO: 257964 - RNA, 32 nt, Human
ugggacaguugaguuaagggauggcuuucaca

SEQ ID NO: 257965 - RNA, 32 nt, Human
ugggacaugcagaaugcgugucuuugcaaaag

SEQ ID NO: 257966 - RNA, 32 nt, Human
ugggacaugccugugagcacguccagcacaga

SEQ ID NO: 257967 - RNA, 32 nt, Human
ugggacaugcucugguaacacacagauauggg

SEQ ID NO: 257968 - RNA, 32 nt, Human
ugggacauguacuccaagccuccgucacaaaa

SEQ ID NO: 257969 - RNA, 32 nt, Human
ugggacauuagcuuugggaaaaguaaugaaaa

SEQ ID NO: 257970 - RNA, 32 nt, Human
ugggacauugccacuucugcccuggaacucgu

SEQ ID NO: 257971 - RNA, 32 nt, Human
ugggaccaaagugcagggcgugcagugcggau

SEQ ID NO: 257972 - RNA, 32 nt, Human
ugggaccaacagcagccagagcaguuagccag

SEQ ID NO: 257973 - RNA, 32 nt, Human
ugggaccaagccuccaauaucucugaauagcc

SEQ ID NO: 257974 - RNA, 21 nt, Human
ugggaccacaggcaugcgcca

SEQ ID NO: 257975 - RNA, 18 nt, Human
ugggaccacagugcaagg

SEQ ID NO: 257976 - RNA, 32 nt, Human
ugggaccacauggggaagaucuagcaccauac

SEQ ID NO: 257977 - RNA, 32 nt, Human
ugggaccaccuacuccccuuggaggguccgga

SEQ ID NO: 257978 - RNA, 32 nt, Human
ugggaccacuagaauauagucacuguagaaua

SEQ ID NO: 257979 - RNA, 32 nt, Human
ugggaccacucuuuuucuuucucacaagcaag

SEQ ID NO: 257980 - RNA, 32 nt, Human
ugggaccacuggcugaucacaucaccucucug

SEQ ID NO: 257981 - RNA, 32 nt, Human
ugggaccagagcugacuccauuucucaaucug

SEQ ID NO: 257982 - RNA, 32 nt, Human
ugggaccagauuccagguccaaagucaccaug

SEQ ID NO: 257983 - RNA, 18 nt, Human
ugggaccagcagaccccu

SEQ ID NO: 257984 - RNA, 17 nt, Human
ugggaccagcagccccc

SEQ ID NO: 257985 - RNA, 23 nt, Human
ugggaccagguggccauagaggg

SEQ ID NO: 257986 - RNA, 32 nt, Human
ugggaccaugaaguggcucggcagccagaagu

SEQ ID NO: 257987 - RNA, 25 nt, Human
ugggacccaccagugggcaagaggg

SEQ ID NO: 257988 - RNA, 32 nt, Human
ugggacccaccgugggaccugaggcagaacug

SEQ ID NO: 257989 - RNA, 32 nt, Human
ugggacccagagccaagaaagcugagauaucc

SEQ ID NO: 257990 - RNA, 23 nt, Human
ugggacccaggaggccucugaug

SEQ ID NO: 257991 - RNA, 21 nt, Human
ugggacccauccucagugcuc

SEQ ID NO: 257992 - RNA, 32 nt, Human
ugggacccaucuuugcuuccuuucaguugccu

SEQ ID NO: 257993 - RNA, 32 nt, Human
ugggaccccacacacuccaggugggaucagau

SEQ ID NO: 257994 - RNA, 21 nt, Human
ugggacccccuguaccaaaac

SEQ ID NO: 257995 - RNA, 32 nt, Human
ugggacccccuucccaguguucugccgcuccu

SEQ ID NO: 257996 - RNA, 32 nt, Human
ugggacccguaaguggcuguccagaaaggcgg

SEQ ID NO: 257997 - RNA, 32 nt, Human
ugggacccucaccugucucuggcuucugccac

SEQ ID NO: 257998 - RNA, 32 nt, Human
ugggacccuccaggagccccgggauugaagga

SEQ ID NO: 257999 - RNA, 32 nt, Human
ugggacccuccugggcugccaggauuuagcag

SEQ ID NO: 258000 - RNA, 32 nt, Human
ugggacccucgguccucucuccugggccaugg

SEQ ID NO: 258001 - RNA, 32 nt, Human
ugggacccuggauuuucggacacugagcgcca

SEQ ID NO: 258002 - RNA, 21 nt, Human
ugggaccgaagccguaaccga

SEQ ID NO: 258003 - RNA, 32 nt, Human
ugggaccgcaggcacacaucacugugccuggc

SEQ ID NO: 258004 - RNA, 32 nt, Human
ugggaccgcugccucuggcuucugcugggccg

SEQ ID NO: 258005 - RNA, 24 nt, Human
ugggaccggccgcugagcccaagg

SEQ ID NO: 258006 - RNA, 32 nt, Human
ugggaccuagagcucucaaaagacuuagcaag

SEQ ID NO: 258007 - RNA, 32 nt, Human
ugggaccucaacacagacaucugggugaaggc

SEQ ID NO: 258008 - RNA, 19 nt, Human
ugggaccucaagggccuuc

SEQ ID NO: 258009 - RNA, 21 nt, Human
ugggaccucccacugcccccu

SEQ ID NO: 258010 - RNA, 22 nt, Human
ugggaccugagaccaagggggu

SEQ ID NO: 258011 - RNA, 32 nt, Human
ugggaccugaguagcugggaccacaggcaugc

SEQ ID NO: 258012 - RNA, 32 nt, Human
ugggaccugcagcucugccuuugcuggcuggg

SEQ ID NO: 258013 - RNA, 32 nt, Human
ugggaccugcccccagcuucugccacgcuuua

SEQ ID NO: 258014 - RNA, 32 nt, Human
ugggaccugcuccccugucucuucuccgugac

SEQ ID NO: 258015 - RNA, 32 nt, Human
ugggaccugcugcugugcuggguggcuggacg

SEQ ID NO: 258016 - RNA, 32 nt, Human
ugggaccuguaaucccagcuacuugggaggcu

SEQ ID NO: 258017 - RNA, 32 nt, Human
ugggaccugugcuugccgugagggccccagga

SEQ ID NO: 258018 - RNA, 32 nt, Human
ugggaccuuugggcaggguuugcccacugacg

SEQ ID NO: 258019 - RNA, 32 nt, Human
ugggacgaacaaggacugggcuggguccagcu

SEQ ID NO: 258020 - RNA, 32 nt, Human
ugggacgacuucagcaugucucaggccaccaa

SEQ ID NO: 258021 - RNA, 23 nt, Human
ugggacgauugcuugagcccggg

SEQ ID NO: 258022 - RNA, 32 nt, Human
ugggacgcauccugccucugugcgccauuccu

SEQ ID NO: 258023 - RNA, 32 nt, Human
ugggacgccuguccgaccgccucggcaggaac

SEQ ID NO: 258024 - RNA, 32 nt, Human
ugggacggagucucacuccauugcccaggcug

SEQ ID NO: 258025 - RNA, 32 nt, Human
ugggacggcagagagacaaguucuuauaucug

SEQ ID NO: 258026 - RNA, 32 nt, Human
ugggacgggaggcgggagggggcugguggugc

SEQ ID NO: 258027 - RNA, 32 nt, Human
ugggacgggagguggagaguuugcagagccgg

SEQ ID NO: 258028 - RNA, 32 nt, Human
ugggacgggcucucccucacagccuccagagg

SEQ ID NO: 258029 - RNA, 32 nt, Human
ugggacggggucucgcucugucgcccaggcug

SEQ ID NO: 258030 - RNA, 32 nt, Human
ugggacggucacccagcagugccgggcugggc

SEQ ID NO: 258031 - RNA, 32 nt, Human
ugggacgugcaguguggggauuacaggggagg

SEQ ID NO: 258032 - RNA, 32 nt, Human
ugggacguggugcugucaggacaggguccugc

SEQ ID NO: 258033 - RNA, 32 nt, Human
ugggacguuaggcagagagcucagauggcccu

SEQ ID NO: 258034 - RNA, 32 nt, Human
ugggacuaaccacuaaccucacccccaaacuc

SEQ ID NO: 258035 - RNA, 32 nt, Human
ugggacuacaggcacaagucaccaugccuggc

SEQ ID NO: 258036 - RNA, 32 nt, Human
ugggacuacaggcacacaucaccacauccagc

SEQ ID NO: 258037 - RNA, 32 nt, Human
ugggacuacaggcacacaucgccacacccggc

SEQ ID NO: 258038 - RNA, 32 nt, Human
ugggacuacaggcaccugccaccaccaccccc

SEQ ID NO: 258039 - RNA, 21 nt, Human
ugggacuacaggcauaugcca

SEQ ID NO: 258040 - RNA, 32 nt, Human
ugggacuacaggcaugagaaaccaagcccggc

SEQ ID NO: 258041 - RNA, 21 nt, Human
ugggacuacaggcaugaguca

SEQ ID NO: 258042 - RNA, 21 nt, Human
ugggacuacaggcaugcacca

SEQ ID NO: 258043 - RNA, 21 nt, Human
ugggacuacaggcaugcgcca

SEQ ID NO: 258044 - RNA, 21 nt, Human
ugggacuacaggcauguacca

SEQ ID NO: 258045 - RNA, 21 nt, Human
ugggacuacaggcaugugcca

SEQ ID NO: 258046 - RNA, 19 nt, Human
ugggacuacaggggcccuc

SEQ ID NO: 258047 - RNA, 32 nt, Human
ugggacuacaggugcccgccaccaccacgccc

SEQ ID NO: 258048 - RNA, 32 nt, Human
ugggacuacaugcacaugacacuaugcccagc

SEQ ID NO: 258049 - RNA, 32 nt, Human
ugggacuaccauuguauaugcgguccaucauu

SEQ ID NO: 258050 - RNA, 32 nt, Human
ugggacuacuggcugaaggcgagccccgcagc

SEQ ID NO: 258051 - RNA, 19 nt, Human
ugggacuagaucccgcgag

SEQ ID NO: 258052 - RNA, 32 nt, Human
ugggacuagggaggggguuccggguggaggcu

SEQ ID NO: 258053 - RNA, 31 nt, Human
ugggacucaauaaggaucccuuggaagaaau

SEQ ID NO: 258054 - RNA, 32 nt, Human
ugggacucacagucgugaugucuuucaagagg

SEQ ID NO: 258055 - RNA, 32 nt, Human
ugggacucaggcugcgugccuccgucugccug

SEQ ID NO: 258056 - RNA, 22 nt, Human
ugggacucauccagugcuccac

SEQ ID NO: 258057 - RNA, 22 nt, Human
ugggacuccacauccuccagcc

SEQ ID NO: 258058 - RNA, 17 nt, Human
ugggacuccagacagua

SEQ ID NO: 258059 - RNA, 32 nt, Human
ugggacuccuaauggcauuucagucuguugcu

SEQ ID NO: 258060 - RNA, 32 nt, Human
ugggacuccucccaucccccaggcugguacca

SEQ ID NO: 258061 - RNA, 32 nt, Human
ugggacuccuccugccagauuacagaugguuc

SEQ ID NO: 258062 - RNA, 24 nt, Human
ugggacucugcgggagggucccag

SEQ ID NO: 258063 - RNA, 32 nt, Human
ugggacucuggaggcuccuccccuucuuucuc

SEQ ID NO: 258064 - RNA, 32 nt, Human
ugggacucugucuuacauaucugggugccccu

SEQ ID NO: 258065 - RNA, 32 nt, Human
ugggacugaaccauauagacauggacauauca

SEQ ID NO: 258066 - RNA, 32 nt, Human
ugggacugacccaggggaaggaaguggggaag

SEQ ID NO: 258067 - RNA, 31 nt, Human
ugggacugacuucuccuucugaggaugcugg

SEQ ID NO: 258068 - RNA, 32 nt, Human
ugggacugacuuuccgagccuccaguccaaag

SEQ ID NO: 258069 - RNA, 32 nt, Human
ugggacugagccauacaugcccuugaauuccu

SEQ ID NO: 258070 - RNA, 32 nt, Human
ugggacugauguuuacaucuuuggaaagacaa

SEQ ID NO: 258071 - RNA, 32 nt, Human
ugggacugcaacucaugacuauccugauauug

SEQ ID NO: 258072 - RNA, 32 nt, Human
ugggacugcacuccagccugggugacagagcc

SEQ ID NO: 258073 - RNA, 32 nt, Human
ugggacugcaucuucguccuuguccacagcag

SEQ ID NO: 258074 - RNA, 32 nt, Human
ugggacugcccaggcuauggggacaaaggccu

SEQ ID NO: 258075 - RNA, 32 nt, Human
ugggacugcccagggaggaggccuuggaagag

SEQ ID NO: 258076 - RNA, 32 nt, Human
ugggacugcuggggcuucaccagcacgagcua

SEQ ID NO: 258077 - RNA, 32 nt, Human
ugggacuggaaacugcucaccuaugucaugga

SEQ ID NO: 258078 - RNA, 32 nt, Human
ugggacuggccagguuucugcccacauuggac

SEQ ID NO: 258079 - RNA, 32 nt, Human
ugggacuggcccaccccucuucccccuucccc

SEQ ID NO: 258080 - RNA, 32 nt, Human
ugggacuggcuuuccacaggaaguaaacugcu

SEQ ID NO: 258081 - RNA, 32 nt, Human
ugggacugggaucccuugcugauugacaaaca

SEQ ID NO: 258082 - RNA, 32 nt, Human
ugggacugugguuccaaggaugagagcagggg

SEQ ID NO: 258083 - RNA, 32 nt, Human
ugggacuguguuucccuguggguggggagcug

SEQ ID NO: 258084 - RNA, 32 nt, Human
ugggacuguuccagcccaccucccagaugcuu

SEQ ID NO: 258085 - RNA, 18 nt, Human
ugggacuuaagggcccuc

SEQ ID NO: 258086 - RNA, 32 nt, Human
ugggacuuacuuccaaccuccaccagcccugc

SEQ ID NO: 258087 - RNA, 32 nt, Human
ugggacuuccaggaccuccccucagguuguuc

SEQ ID NO: 258088 - RNA, 32 nt, Human
ugggacuucucucugcaggaggagagaacgcu

SEQ ID NO: 258089 - RNA, 32 nt, Human
ugggacuugcagccucugccccacgaguuugu

SEQ ID NO: 258090 - RNA, 32 nt, Human
ugggacuugccggcgcucagaaacgcgcccag

SEQ ID NO: 258091 - RNA, 23 nt, Human
ugggacuugccucagaucagccu

SEQ ID NO: 258092 - RNA, 32 nt, Human
ugggacuugccucagaucagccugcgacugca

SEQ ID NO: 258093 - RNA, 32 nt, Human
ugggacuuggcagaaggcgaggaacaagauuc

SEQ ID NO: 258094 - RNA, 32 nt, Human
ugggacuuggcccucuggcuggggcuucugaa

SEQ ID NO: 258095 - RNA, 32 nt, Human
ugggacuuggccucaccccacccauggaauac

SEQ ID NO: 258096 - RNA, 32 nt, Human
ugggacuugggagcuggggcugaaguugcucu

SEQ ID NO: 258097 - RNA, 32 nt, Human
ugggacuugggagggaacuggggucaggggcu

SEQ ID NO: 258098 - RNA, 32 nt, Human
ugggacuuggugguaagcaaguuuguaaauca

SEQ ID NO: 258099 - RNA, 32 nt, Human
ugggacuugguugggcaugcugugguugcuga

SEQ ID NO: 258100 - RNA, 32 nt, Human
ugggacuuucuacaacgcugcugugcacgacg

SEQ ID NO: 258101 - RNA, 32 nt, Human
ugggacuuugaccacacacagugaugccucac

SEQ ID NO: 258102 - RNA, 19 nt, Human
ugggacuuuuggacccguc

SEQ ID NO: 258103 - RNA, 32 nt, Human
ugggagaaaauagcagaucugcagcagauagg

SEQ ID NO: 258104 - RNA, 32 nt, Human
ugggagaaacaaggaggcagucgcuugugcau

SEQ ID NO: 258105 - RNA, 32 nt, Human
ugggagaaagagagagcuucuguugcugccuc

SEQ ID NO: 258106 - RNA, 31 nt, Human
ugggagaaaggcccuguuucccuggaacugc

SEQ ID NO: 258107 - RNA, 32 nt, Human
ugggagaaaugagauaaaagauguacuuguga

SEQ ID NO: 258108 - RNA, 32 nt, Human
ugggagaaauggccagcuccuucugggguggc

SEQ ID NO: 258109 - RNA, 32 nt, Human
ugggagaaaugugugucggagcugcagggguc

SEQ ID NO: 258110 - RNA, 18 nt, Human
ugggagaagaacccccca

SEQ ID NO: 258111 - RNA, 32 nt, Human
ugggagaagaagcagguagaccaccuguccca

SEQ ID NO: 258112 - RNA, 32 nt, Human
ugggagaagcacagagagguauugugagcaua

SEQ ID NO: 258113 - RNA, 32 nt, Human
ugggagaagcugccccaggaaucugugaggau

SEQ ID NO: 258114 - RNA, 32 nt, Human
ugggagaaggcaguccaacagcaccagcacgg

SEQ ID NO: 258115 - RNA, 21 nt, Human
ugggagaaggcccaggcugcu

SEQ ID NO: 258116 - RNA, 32 nt, Human
ugggagaauaaguuucuagggagccuuacuga

SEQ ID NO: 258117 - RNA, 32 nt, Human
ugggagaaucacaaggucaggagacugagacc

SEQ ID NO: 258118 - RNA, 23 nt, Human
ugggagaaucgcuugagcccagg

SEQ ID NO: 258119 - RNA, 32 nt, Human
ugggagaaucgcuugaguccaggaguuugagg

SEQ ID NO: 258120 - RNA, 23 nt, Human
ugggagaauugcuugaagccagg

SEQ ID NO: 258121 - RNA, 23 nt, Human
ugggagaauugcuugaguccagg

SEQ ID NO: 258122 - RNA, 32 nt, Human
ugggagacaaaggaggaauuuacuuucuucac

SEQ ID NO: 258123 - RNA, 32 nt, Human
ugggagacaauaggcaaacaaugaguacauuc

SEQ ID NO: 258124 - RNA, 32 nt, Human
ugggagacagaccccaccuccuuggguaguga

SEQ ID NO: 258125 - RNA, 32 nt, Human
ugggagacaggccucccucuggaguucauagc

SEQ ID NO: 258126 - RNA, 17 nt, Human
ugggagaccagaguccc

SEQ ID NO: 258127 - RNA, 32 nt, Human
ugggagaccagccuggggaccauagcgagacc

SEQ ID NO: 258128 - RNA, 32 nt, Human
ugggagacgcugcugcaucuccgggacaccac

SEQ ID NO: 258129 - RNA, 32 nt, Human
ugggagacguggcuggaggccauugggaagag

SEQ ID NO: 258130 - RNA, 32 nt, Human
ugggagacugacacugaagaagcuuaaaauca

SEQ ID NO: 258131 - RNA, 32 nt, Human
ugggagagacgguuaagcuggggacgguauuc

SEQ ID NO: 258132 - RNA, 32 nt, Human
ugggagagacuagagugaccagcaggaggaag

SEQ ID NO: 258133 - RNA, 32 nt, Human
ugggagagacugagcuacacuacugcuaaacu

SEQ ID NO: 258134 - RNA, 32 nt, Human
ugggagagagaaggggagaaccaaucucaacu

SEQ ID NO: 258135 - RNA, 32 nt, Human
ugggagagagacaagaccugucgggaacuggg

SEQ ID NO: 258136 - RNA, 32 nt, Human
ugggagagagccagagagaggagugagggugg

SEQ ID NO: 258137 - RNA, 32 nt, Human
ugggagagaggaaaggagggaaggcaagauuc

SEQ ID NO: 258138 - RNA, 32 nt, Human
ugggagagaggcagaaaaaggagcagcuccuc

SEQ ID NO: 258139 - RNA, 32 nt, Human
ugggagagauguauggucuugccuuccaccug

SEQ ID NO: 258140 - RNA, 32 nt, Human
ugggagagauguuguuucaccauguugcccgg

SEQ ID NO: 258141 - RNA, 32 nt, Human
ugggagagcccccauuggaccaguguuugcuu

SEQ ID NO: 258142 - RNA, 32 nt, Human
ugggagagcuguugacagaagcucuccgggcc

SEQ ID NO: 258143 - RNA, 32 nt, Human
ugggagaggacacgggcaugggcugcuggaug

SEQ ID NO: 258144 - RNA, 32 nt, Human
ugggagaggagagaugaaagaugaggaagugg

SEQ ID NO: 258145 - RNA, 32 nt, Human
ugggagaggaggggccuggaguugccgaggaa

SEQ ID NO: 258146 - RNA, 32 nt, Human
ugggagaggaucagguuagcugcugugacuau

SEQ ID NO: 258147 - RNA, 32 nt, Human
ugggagaggcugggugagcuggggugggaucu

SEQ ID NO: 258148 - RNA, 32 nt, Human
ugggagagggacugaguacagugcaacacuac

SEQ ID NO: 258149 - RNA, 32 nt, Human
ugggagagggagacagauggaggcaguggcug

SEQ ID NO: 258150 - RNA, 32 nt, Human
ugggagagggagggaggaaggaagggagggag

SEQ ID NO: 258151 - RNA, 32 nt, Human
ugggagagguagccgagucacacccgguggcu

SEQ ID NO: 258152 - RNA, 32 nt, Human
ugggagaggucacaccuggucucuccacaugu

SEQ ID NO: 258153 - RNA, 24 nt, Human
ugggagagguggcucaugccugua

SEQ ID NO: 258154 - RNA, 20 nt, Human
ugggagagguucugugcaaa

SEQ ID NO: 258155 - RNA, 32 nt, Human
ugggagaguggccuggccgagguguggggcgc

SEQ ID NO: 258156 - RNA, 22 nt, Human
ugggagaucccaggguccucca

SEQ ID NO: 258157 - RNA, 32 nt, Human
ugggagaugacagcuuggugaaaccucuguca

SEQ ID NO: 258158 - RNA, 32 nt, Human
ugggagaugagguuggaggaacgaaggcgagg

SEQ ID NO: 258159 - RNA, 32 nt, Human
ugggagauggagguagggcuggcuggaggaag

SEQ ID NO: 258160 - RNA, 32 nt, Human
ugggagauucuaagaggcuguugcaguauagu

SEQ ID NO: 258161 - RNA, 32 nt, Human
ugggagauugagcugggaggauugcuugagac

SEQ ID NO: 258162 - RNA, 32 nt, Human
ugggagauugcuugaguccaggagaccagccu

SEQ ID NO: 258163 - RNA, 32 nt, Human
ugggagauuuacugcacugauggaccucauca

SEQ ID NO: 258164 - RNA, 24 nt, Human
ugggagcaaagugacaggcacuua

SEQ ID NO: 258165 - RNA, 32 nt, Human
ugggagcaauuauaagacuggcuuauuuugaa

SEQ ID NO: 258166 - RNA, 32 nt, Human
ugggagcacaaagcccaugagggaaggugagu

SEQ ID NO: 258167 - RNA, 19 nt, Human
ugggagcacagcagaagug

SEQ ID NO: 258168 - RNA, 32 nt, Human
ugggagcaccugccagaggaugcucuuuccca

SEQ ID NO: 258169 - RNA, 32 nt, Human
ugggagcaccugcuggagaggguucaggggcc

SEQ ID NO: 258170 - RNA, 32 nt, Human
ugggagcacugguguucacgugggaccacagg

SEQ ID NO: 258171 - RNA, 18 nt, Human
ugggagcagaacaguccc

SEQ ID NO: 258172 - RNA, 32 nt, Human
ugggagcagagcgaucuggugccccggaaacc

SEQ ID NO: 258173 - RNA, 32 nt, Human
ugggagcagauguggaggcugacagccaggcg

SEQ ID NO: 258174 - RNA, 21 nt, Human
ugggagcagauucuuagcaaa

SEQ ID NO: 258175 - RNA, 32 nt, Human
ugggagcagcggcagcaagcugagggggcguc

SEQ ID NO: 258176 - RNA, 32 nt, Human
ugggagcaggaaggcuguuggggaaggaagcu

SEQ ID NO: 258177 - RNA, 32 nt, Human
ugggagcaggacugauugaauuacggaaaaug

SEQ ID NO: 258178 - RNA, 32 nt, Human
ugggagcaggagacaaggaguuugugauguug

SEQ ID NO: 258179 - RNA, 24 nt, Human
ugggagcaguggcucacaccugua

SEQ ID NO: 258180 - RNA, 24 nt, Human
ugggagcaguggcucacgccugua

SEQ ID NO: 258181 - RNA, 32 nt, Human
ugggagcagugugaaggagaagaggcaagaac

SEQ ID NO: 258182 - RNA, 32 nt, Human
ugggagcauagcagugugugagguucucgaga

SEQ ID NO: 258183 - RNA, 31 nt, Human
ugggagcauuaaaaguggugaucuguuacag

SEQ ID NO: 258184 - RNA, 24 nt, Human
ugggagccacccuuguccccagcu

SEQ ID NO: 258185 - RNA, 32 nt, Human
ugggagccaccgcacccagccugcaggucuuc

SEQ ID NO: 258186 - RNA, 32 nt, Human
ugggagccacugccacuccaguccugccacca

SEQ ID NO: 258187 - RNA, 21 nt, Human
ugggagccaggaugggaccaa

SEQ ID NO: 258188 - RNA, 32 nt, Human
ugggagccaggccacagggaggaggcuucuuu

SEQ ID NO: 258189 - RNA, 32 nt, Human
ugggagccaggccaccuuagaaugggguuugg

SEQ ID NO: 258190 - RNA, 32 nt, Human
ugggagccaggccagggugugagggaggugca

SEQ ID NO: 258191 - RNA, 32 nt, Human
ugggagccauuacuuccuuuccaucuugaaug

SEQ ID NO: 258192 - RNA, 32 nt, Human
ugggagcccaggaggcggggcgccugugggag

SEQ ID NO: 258193 - RNA, 32 nt, Human
ugggagcccaggaguuugagaccaguuugggc

SEQ ID NO: 258194 - RNA, 32 nt, Human
ugggagcccaggcagaggaggcaccgagagug

SEQ ID NO: 258195 - RNA, 22 nt, Human
ugggagcccccggccccgggcu

SEQ ID NO: 258196 - RNA, 32 nt, Human
ugggagcccccuggcuugcacugaacccucga

SEQ ID NO: 258197 - RNA, 32 nt, Human
ugggagccccgccucccuaccauggugccagg

SEQ ID NO: 258198 - RNA, 32 nt, Human
ugggagccccgcggguccugcccagaugugga

SEQ ID NO: 258199 - RNA, 32 nt, Human
ugggagccccggggaccccauggggugcugua

SEQ ID NO: 258200 - RNA, 32 nt, Human
ugggagccccuccaugggaccacucucacacu

SEQ ID NO: 258201 - RNA, 32 nt, Human
ugggagccccuccaugggaccccucucacacu

SEQ ID NO: 258202 - RNA, 32 nt, Human
ugggagccccucucagcuguggggcuggcaca

SEQ ID NO: 258203 - RNA, 21 nt, Human
ugggagcccgucgcuauggga

SEQ ID NO: 258204 - RNA, 32 nt, Human
ugggagcccucagacugggcggaggggcugga

SEQ ID NO: 258205 - RNA, 32 nt, Human
ugggagcccugagacuucuuucucuccuugcc

SEQ ID NO: 258206 - RNA, 32 nt, Human
ugggagcccuguggugauggcagccacaccuc

SEQ ID NO: 258207 - RNA, 20 nt, Human
ugggagccgcagcagcuccc

SEQ ID NO: 258208 - RNA, 32 nt, Human
ugggagccgccugucucccugcuucaccuccc

SEQ ID NO: 258209 - RNA, 25 nt, Human
ugggagccucagguucgcucagggg

SEQ ID NO: 258210 - RNA, 32 nt, Human
ugggagccuccaaacuccuagcugucucaucc

SEQ ID NO: 258211 - RNA, 22 nt, Human
ugggagccucuucccuuucuca

SEQ ID NO: 258212 - RNA, 32 nt, Human
ugggagccugagccccacaccugccgggcagu

SEQ ID NO: 258213 - RNA, 21 nt, Human
ugggagccugaggcaugagaa

SEQ ID NO: 258214 - RNA, 32 nt, Human
ugggagccugccugguggaguugagugaugcc

SEQ ID NO: 258215 - RNA, 32 nt, Human
ugggagccuggaggagcaaagacuggggucuu

SEQ ID NO: 258216 - RNA, 32 nt, Human
ugggagccugggaggucaaggcugcagugagc

SEQ ID NO: 258217 - RNA, 21 nt, Human
ugggagccuggggcaggagaa

SEQ ID NO: 258218 - RNA, 32 nt, Human
ugggagccuguggccccaggcacuuugcauca

SEQ ID NO: 258219 - RNA, 32 nt, Human
ugggagccuguggcuuauggcuucacuuaccc

SEQ ID NO: 258220 - RNA, 32 nt, Human
ugggagccuucuucccucuccccuccacuuuc

SEQ ID NO: 258221 - RNA, 20 nt, Human
ugggagcgaccagcagcccc

SEQ ID NO: 258222 - RNA, 32 nt, Human
ugggagcgccugccuucucuugccuugaaagc

SEQ ID NO: 258223 - RNA, 24 nt, Human
ugggagcgguggcucacgccugua

SEQ ID NO: 258224 - RNA, 32 nt, Human
ugggagcuaagcugcgaagaugcaaaggcaua

SEQ ID NO: 258225 - RNA, 32 nt, Human
ugggagcuaauacuccucuuugcucaccacca

SEQ ID NO: 258226 - RNA, 32 nt, Human
ugggagcuacuuccucgguucccuccccgaug

SEQ ID NO: 258227 - RNA, 19 nt, Human
ugggagcuauagggaccuc

SEQ ID NO: 258228 - RNA, 19 nt, Human
ugggagcucagccucccca

SEQ ID NO: 258229 - RNA, 26 nt, Human
ugggagcucagcucgcugcccaggga

SEQ ID NO: 258230 - RNA, 32 nt, Human
ugggagcuccaggcuauuuuugugcuuaguua

SEQ ID NO: 258231 - RNA, 20 nt, Human
ugggagcuccuugagcccgg

SEQ ID NO: 258232 - RNA, 32 nt, Human
ugggagcucugccugccggcaacuuugcugau

SEQ ID NO: 258233 - RNA, 32 nt, Human
ugggagcucugugccacugagguaugaacuug

SEQ ID NO: 258234 - RNA, 32 nt, Human
ugggagcugagggggaaggaaguaggggaaug

SEQ ID NO: 258235 - RNA, 32 nt, Human
ugggagcugaugggagaaugauuaagugguca

SEQ ID NO: 258236 - RNA, 32 nt, Human
ugggagcugcugcaggauggaguggaaagcug

SEQ ID NO: 258237 - RNA, 32 nt, Human
ugggagcuggaguccacugggguggccugacu

SEQ ID NO: 258238 - RNA, 32 nt, Human
ugggagcugggaaaggaaugagaagacagaag

SEQ ID NO: 258239 - RNA, 32 nt, Human
ugggagcugggaacaggaaugaagaggaagag

SEQ ID NO: 258240 - RNA, 32 nt, Human
ugggagcugggaugauaaagaugaggcuugcg

SEQ ID NO: 258241 - RNA, 32 nt, Human
ugggagcuggggcagggggagagccaggcaau

SEQ ID NO: 258242 - RNA, 32 nt, Human
ugggagcugucaccuccacuccuaggcuuuuc

SEQ ID NO: 258243 - RNA, 32 nt, Human
ugggagcuuccaagcccuugagguccagcugu

SEQ ID NO: 258244 - RNA, 32 nt, Human
ugggagcuugccugaccucccuuccugggcug

SEQ ID NO: 258245 - RNA, 32 nt, Human
ugggagcuuuaauccucuuucugcuucacacu

SEQ ID NO: 258246 - RNA, 32 nt, Human
ugggaggaaaaguugcugcuuccuucagcauc

SEQ ID NO: 258247 - RNA, 32 nt, Human
ugggaggaaaggacagauguguuuacaaggga

SEQ ID NO: 258248 - RNA, 32 nt, Human
ugggaggaagcacagaucucuagagcuguccu

SEQ ID NO: 258249 - RNA, 22 nt, Human
ugggaggaaggaauacauuuua

SEQ ID NO: 258250 - RNA, 32 nt, Human
ugggaggaaggaggcaggcuguggugggacug

SEQ ID NO: 258251 - RNA, 23 nt, Human
ugggaggaccauggggcacaaug

SEQ ID NO: 258252 - RNA, 22 nt, Human
ugggaggacuugcugcuguuca

SEQ ID NO: 258253 - RNA, 32 nt, Human
ugggaggagaagcagucugaugacagagagag

SEQ ID NO: 258254 - RNA, 32 nt, Human
ugggaggagagaagaaagcggggauggugcac

SEQ ID NO: 258255 - RNA, 32 nt, Human
ugggaggagaggaggaaaguggaaaaugcgcc

SEQ ID NO: 258256 - RNA, 32 nt, Human
ugggaggagaggaggcuucagucucaguggcu

SEQ ID NO: 258257 - RNA, 32 nt, Human
ugggaggagaggaggcuucagucucagugguu

SEQ ID NO: 258258 - RNA, 32 nt, Human
ugggaggagcacuucaagaccauucugcuccu

SEQ ID NO: 258259 - RNA, 32 nt, Human
ugggaggagccggaagagagcagugcuucaca

SEQ ID NO: 258260 - RNA, 32 nt, Human
ugggaggaggagaaggaggaggaggagagcgc

SEQ ID NO: 258261 - RNA, 32 nt, Human
ugggaggaggagggauagaacaucacaacacu

SEQ ID NO: 258262 - RNA, 32 nt, Human
ugggaggaggaguaugccuuuggugucccccu

SEQ ID NO: 258263 - RNA, 32 nt, Human
ugggaggaggcgaaggaggagggagaaccccg

SEQ ID NO: 258264 - RNA, 32 nt, Human
ugggaggaggcugcaguacuccugugugucac

SEQ ID NO: 258265 - RNA, 32 nt, Human
ugggaggagggaggaggagacagagaaggcuu

SEQ ID NO: 258266 - RNA, 32 nt, Human
ugggaggagggaggggccaggcagcugagggc

SEQ ID NO: 258267 - RNA, 32 nt, Human
ugggaggagggauagggacgggcagaucagua

SEQ ID NO: 258268 - RNA, 32 nt, Human
ugggaggaggggcuugagguuugcaaaggacu

SEQ ID NO: 258269 - RNA, 18 nt, Human
ugggaggagggggcccgg

SEQ ID NO: 258270 - RNA, 32 nt, Human
ugggaggaggugcuuucgggaggcggggccgc

SEQ ID NO: 258271 - RNA, 32 nt, Human
ugggaggagguggaggaggaggaagaggagaa

SEQ ID NO: 258272 - RNA, 32 nt, Human
ugggaggaggugggaggagcugagagggcuau

SEQ ID NO: 258273 - RNA, 32 nt, Human
ugggaggagucggagaggcaggggcuugcuuu

SEQ ID NO: 258274 - RNA, 32 nt, Human
ugggaggaguggugagaucauagcucacaccu

SEQ ID NO: 258275 - RNA, 32 nt, Human
ugggaggauaguaagagagggagcagggagac

SEQ ID NO: 258276 - RNA, 32 nt, Human
ugggaggaucacugagaccagccugggcaaca

SEQ ID NO: 258277 - RNA, 23 nt, Human
ugggaggaucacuugagcccagg

SEQ ID NO: 258278 - RNA, 32 nt, Human
ugggaggaucacuuuaguccaggaguuuugag

SEQ ID NO: 258279 - RNA, 32 nt, Human
ugggaggaucccuggagcccugaagauugagg

SEQ ID NO: 258280 - RNA, 32 nt, Human
ugggaggaucgcagucagcagagcagggcuga

SEQ ID NO: 258281 - RNA, 23 nt, Human
ugggaggaucgcuugagcccagg

SEQ ID NO: 258282 - RNA, 23 nt, Human
ugggaggaucucuugagcccagg

SEQ ID NO: 258283 - RNA, 23 nt, Human
ugggaggauggcuugagcccagg

SEQ ID NO: 258284 - RNA, 23 nt, Human
ugggaggauugccugagcccagg

SEQ ID NO: 258285 - RNA, 23 nt, Human
ugggaggauugcuugagcccagg

SEQ ID NO: 258286 - RNA, 23 nt, Human
ugggaggauugcuugaguccagg

SEQ ID NO: 258287 - RNA, 24 nt, Human
ugggaggauuguacacuacuuuca

SEQ ID NO: 258288 - RNA, 21 nt, Human
ugggaggauuuucaugcuuuc

SEQ ID NO: 258289 - RNA, 32 nt, Human
ugggaggcaaaaauucaggugccugggggaga

SEQ ID NO: 258290 - RNA, 32 nt, Human
ugggaggcacauccaggcuugggaaacggggg

SEQ ID NO: 258291 - RNA, 21 nt, Human
ugggaggcaccuguaauccca

SEQ ID NO: 258292 - RNA, 32 nt, Human
ugggaggcagaaggguaggcucagggaguuca

SEQ ID NO: 258293 - RNA, 22 nt, Human
ugggaggcagaaguugcaguga

SEQ ID NO: 258294 - RNA, 23 nt, Human
ugggaggcagaaguugcagugag

SEQ ID NO: 258295 - RNA, 32 nt, Human
ugggaggcagagaggggcaggcuugggcaccc

SEQ ID NO: 258296 - RNA, 22 nt, Human
ugggaggcagagguugcaguga

SEQ ID NO: 258297 - RNA, 23 nt, Human
ugggaggcagagguugcagugag

SEQ ID NO: 258298 - RNA, 23 nt, Human
ugggaggcagagguuucagugag

SEQ ID NO: 258299 - RNA, 32 nt, Human
ugggaggcaggcaggcaugcaugugggccucu

SEQ ID NO: 258300 - RNA, 32 nt, Human
ugggaggcagggcaaugcaggauccaaauccu

SEQ ID NO: 258301 - RNA, 32 nt, Human
ugggaggcagggccugggcagggcuucugcac

SEQ ID NO: 258302 - RNA, 32 nt, Human
ugggaggcagguaugauuaacccccugcagaa

SEQ ID NO: 258303 - RNA, 20 nt, Human
ugggaggcagguucugcaaa

SEQ ID NO: 258304 - RNA, 32 nt, Human
ugggaggcaugggaaacagugcagugacucac

SEQ ID NO: 258305 - RNA, 32 nt, Human
ugggaggccaaggcccucagaucuugagccca

SEQ ID NO: 258306 - RNA, 32 nt, Human
ugggaggccagccuggaagaggcagcaguggc

SEQ ID NO: 258307 - RNA, 32 nt, Human
ugggaggccaggaguucgagaccagccuggcc

SEQ ID NO: 258308 - RNA, 32 nt, Human
ugggaggccaggaguuuugagaccagccuggg

SEQ ID NO: 258309 - RNA, 32 nt, Human
ugggaggccauggaaccaggauuagacccaca

SEQ ID NO: 258310 - RNA, 23 nt, Human
ugggaggccaugucucccgggga

SEQ ID NO: 258311 - RNA, 31 nt, Human
ugggaggccaugucucccggggaggcucagg

SEQ ID NO: 258312 - RNA, 32 nt, Human
ugggaggccgaggcggguggaucaugugaggc

SEQ ID NO: 258313 - RNA, 32 nt, Human
ugggaggccuaggugggcagaucaugagguca

SEQ ID NO: 258314 - RNA, 32 nt, Human
ugggaggccugucugcacccagcacugcuccc

SEQ ID NO: 258315 - RNA, 32 nt, Human
ugggaggcgcuucuugccaaaugcagacgagg

SEQ ID NO: 258316 - RNA, 32 nt, Human
ugggaggcggaggagguugcagugaacugaga

SEQ ID NO: 258317 - RNA, 32 nt, Human
ugggaggcggaggcgguggaucacuugagccc

SEQ ID NO: 258318 - RNA, 22 nt, Human
ugggaggcggagguugcagcga

SEQ ID NO: 258319 - RNA, 23 nt, Human
ugggaggcggagguugcagcgag

SEQ ID NO: 258320 - RNA, 22 nt, Human
ugggaggcggagguugcaguga

SEQ ID NO: 258321 - RNA, 23 nt, Human
ugggaggcggagguugcagugag

SEQ ID NO: 258322 - RNA, 22 nt, Human
ugggaggcggagguuguaguga

SEQ ID NO: 258323 - RNA, 32 nt, Human
ugggaggcggugcaggcuguccuggcugcucu

SEQ ID NO: 258324 - RNA, 32 nt, Human
ugggaggcggugggcagcgacacuccuguugg

SEQ ID NO: 258325 - RNA, 32 nt, Human
ugggaggcuaaggcagggagaaucgcuugaag

SEQ ID NO: 258326 - RNA, 32 nt, Human
ugggaggcuccucaggucucaggcucaggugc

SEQ ID NO: 258327 - RNA, 32 nt, Human
ugggaggcucuuucaaggcagcucacccauca

SEQ ID NO: 258328 - RNA, 32 nt, Human
ugggaggcugaagcaggagaaucacuuuaacc

SEQ ID NO: 258329 - RNA, 32 nt, Human
ugggaggcugaggcaggagaauucuuugaacc

SEQ ID NO: 258330 - RNA, 32 nt, Human
ugggaggcugaggcaggagaauuguuugaccu

SEQ ID NO: 258331 - RNA, 32 nt, Human
ugggaggcugaggcaggcagauugcuugagcu

SEQ ID NO: 258332 - RNA, 32 nt, Human
ugggaggcugaggcauggagaaucgcuugaac

SEQ ID NO: 258333 - RNA, 32 nt, Human
ugggaggcugaggcgggagaguggcgugaaac

SEQ ID NO: 258334 - RNA, 32 nt, Human
ugggaggcugagggcaggagaauggcaugaac

SEQ ID NO: 258335 - RNA, 32 nt, Human
ugggaggcugagggcaggagaauugcuugaac

SEQ ID NO: 258336 - RNA, 32 nt, Human
ugggaggcugagggcaggagaauugcuugaau

SEQ ID NO: 258337 - RNA, 32 nt, Human
ugggaggcugcaggggacagcagggccugagg

SEQ ID NO: 258338 - RNA, 32 nt, Human
ugggaggcuggagaaagggaaguggaaggcag

SEQ ID NO: 258339 - RNA, 32 nt, Human
ugggaggcuggagccccaggugcaguggcucu

SEQ ID NO: 258340 - RNA, 32 nt, Human
ugggaggcuggaguuggggcagaggagaacuu

SEQ ID NO: 258341 - RNA, 32 nt, Human
ugggaggcuggcacaggagaaucgcuugaauc

SEQ ID NO: 258342 - RNA, 32 nt, Human
ugggaggcuggcuguggcuccuguuugugaag

SEQ ID NO: 258343 - RNA, 32 nt, Human
ugggaggcuggguggaggagggagcagaaaaa

SEQ ID NO: 258344 - RNA, 32 nt, Human
ugggaggcuggugggaggcagggggcaggccu

SEQ ID NO: 258345 - RNA, 32 nt, Human
ugggaggcugugugcaggcugcaggauaucug

SEQ ID NO: 258346 - RNA, 32 nt, Human
ugggaggcuugugcgaggucucaggccugugu

SEQ ID NO: 258347 - RNA, 21 nt, Human
ugggaggcuuuaaguauggug

SEQ ID NO: 258348 - RNA, 32 nt, Human
ugggaggcuuuuguggcuucugcagcagaagc

SEQ ID NO: 258349 - RNA, 32 nt, Human
ugggagggaccaagguuguaaggguggcuaag

SEQ ID NO: 258350 - RNA, 32 nt, Human
ugggagggacugccucaccaccccugucccgc

SEQ ID NO: 258351 - RNA, 32 nt, Human
ugggagggacuucgaagauaagagugagcggc

SEQ ID NO: 258352 - RNA, 32 nt, Human
ugggagggagacguuauagauuaagaaaugau

SEQ ID NO: 258353 - RNA, 32 nt, Human
ugggagggagagaagaguaagcuggagucacc

SEQ ID NO: 258354 - RNA, 32 nt, Human
ugggagggagagaccggagcagcgccaggagc

SEQ ID NO: 258355 - RNA, 32 nt, Human
ugggagggaggaacaccggugccucggucacu

SEQ ID NO: 258356 - RNA, 32 nt, Human
ugggagggaggaagaacggaagggagggaaag

SEQ ID NO: 258357 - RNA, 32 nt, Human
ugggagggaggacagggaaggccaggcuugcu

SEQ ID NO: 258358 - RNA, 32 nt, Human
ugggagggaggcagugggaaguaguugaauca

SEQ ID NO: 258359 - RNA, 23 nt, Human
ugggagggagggagggcuggcuc

SEQ ID NO: 258360 - RNA, 32 nt, Human
ugggagggcaaggcaagagcuugagcuugagc

SEQ ID NO: 258361 - RNA, 32 nt, Human
ugggagggcugaagccaggggauugcugggcc

SEQ ID NO: 258362 - RNA, 32 nt, Human
ugggaggggaaagaggaaacagagcuagucag

SEQ ID NO: 258363 - RNA, 32 nt, Human
ugggaggggaagggaagggagaggcaagcugg

SEQ ID NO: 258364 - RNA, 32 nt, Human
ugggaggggccagcugccucuuuaggccaguu

SEQ ID NO: 258365 - RNA, 32 nt, Human
ugggagggggaggaggaggagcucacacccuc

SEQ ID NO: 258366 - RNA, 32 nt, Human
ugggagggggcacuucacagggagaagauaaa

SEQ ID NO: 258367 - RNA, 32 nt, Human
ugggaggggguugagggcaggcagagguagcu

SEQ ID NO: 258368 - RNA, 17 nt, Human
ugggaggggugcagugg

SEQ ID NO: 258369 - RNA, 32 nt, Human
ugggagggguggggagggggagggggaagugu

SEQ ID NO: 258370 - RNA, 32 nt, Human
ugggaggguaaagccauuugaagaauaaaguc

SEQ ID NO: 258371 - RNA, 32 nt, Human
ugggaggguggaggcccaggaaugggcgggca

SEQ ID NO: 258372 - RNA, 32 nt, Human
ugggaggguggagggauggggaugggaaggga

SEQ ID NO: 258373 - RNA, 32 nt, Human
ugggaggguguauguguccaggaauuuaucca

SEQ ID NO: 258374 - RNA, 32 nt, Human
ugggaggguuggcaccugcacacuccaucucc

SEQ ID NO: 258375 - RNA, 32 nt, Human
ugggagguagagguuacagggagccaagaucg

SEQ ID NO: 258376 - RNA, 32 nt, Human
ugggagguaggcagagggcaggcaggagaaaa

SEQ ID NO: 258377 - RNA, 32 nt, Human
ugggagguaguguuauaacuggcacuuuaauu

SEQ ID NO: 258378 - RNA, 32 nt, Human
ugggaggucccaggcugugugcacagugacag

SEQ ID NO: 258379 - RNA, 21 nt, Human
ugggaggugccuggccggggg

SEQ ID NO: 258380 - RNA, 22 nt, Human
ugggagguggaggcugcaguga

SEQ ID NO: 258381 - RNA, 23 nt, Human
ugggagguggaggcugcagugag

SEQ ID NO: 258382 - RNA, 32 nt, Human
ugggagguggaggggaggcugcagugagcuga

SEQ ID NO: 258383 - RNA, 32 nt, Human
ugggagguggagguggcagugagccgagauag

SEQ ID NO: 258384 - RNA, 23 nt, Human
ugggagguggagguugcagugag

SEQ ID NO: 258385 - RNA, 32 nt, Human
ugggaggugggagccgcgucucaggcccggcc

SEQ ID NO: 258386 - RNA, 32 nt, Human
ugggaggugguuaggucaugaggguggagauc

SEQ ID NO: 258387 - RNA, 32 nt, Human
ugggaguaaaauuagaagacacugcugaacag

SEQ ID NO: 258388 - RNA, 32 nt, Human
ugggaguacaaggaagaacaaggcaauucuca

SEQ ID NO: 258389 - RNA, 32 nt, Human
ugggaguagacaggaaggccgccggguguugg

SEQ ID NO: 258390 - RNA, 32 nt, Human
ugggaguaggaaugugaccgaaaacaaguugu

SEQ ID NO: 258391 - RNA, 32 nt, Human
ugggaguaggcuccagacaggaggagugggac

SEQ ID NO: 258392 - RNA, 32 nt, Human
ugggagucagaggcgggaugugugcggugaag

SEQ ID NO: 258393 - RNA, 32 nt, Human
ugggagucauguugccugcagggacucuuucc

SEQ ID NO: 258394 - RNA, 32 nt, Human
ugggaguccagugugaucugccuggaucuugc

SEQ ID NO: 258395 - RNA, 32 nt, Human
ugggagucccuuggcccagacacccaccugac

SEQ ID NO: 258396 - RNA, 17 nt, Human
ugggaguccucucccca

SEQ ID NO: 258397 - RNA, 32 nt, Human
ugggagucucccuauguugcccaggcuggucu

SEQ ID NO: 258398 - RNA, 32 nt, Human
ugggagucuggcaagaggaaauuggaagauaa

SEQ ID NO: 258399 - RNA, 32 nt, Human
ugggagugaacugaauuguuuccgcgggcaga

SEQ ID NO: 258400 - RNA, 32 nt, Human
ugggagugaggaggaaaggcaaacucugucuu

SEQ ID NO: 258401 - RNA, 32 nt, Human
ugggagugaugagauucugagggacccaugaa

SEQ ID NO: 258402 - RNA, 32 nt, Human
ugggagugcaagaaauccuuggcaagacccuu

SEQ ID NO: 258403 - RNA, 32 nt, Human
ugggaguggagauacacaggcagacaggaaga

SEQ ID NO: 258404 - RNA, 32 nt, Human
ugggaguggcggauccucccaccccagccgga

SEQ ID NO: 258405 - RNA, 32 nt, Human
ugggagugggcagagguggcacccaggggccc

SEQ ID NO: 258406 - RNA, 32 nt, Human
ugggaguggggagccagagggagcagcucccc

SEQ ID NO: 258407 - RNA, 32 nt, Human
ugggaguggggguuugggagacgggugggaaa

SEQ ID NO: 258408 - RNA, 32 nt, Human
ugggaguggggugggagggggcagcaggcggg

SEQ ID NO: 258409 - RNA, 18 nt, Human
ugggaguggguaggggga

SEQ ID NO: 258410 - RNA, 21 nt, Human
ugggagugguggcucacgccu

SEQ ID NO: 258411 - RNA, 24 nt, Human
ugggagugguggcucaugccugua

SEQ ID NO: 258412 - RNA, 28 nt, Human
ugggaguuaagugcugcuugucuuccca

SEQ ID NO: 258413 - RNA, 32 nt, Human
ugggaguuagagcacggacucucuccaccugc

SEQ ID NO: 258414 - RNA, 32 nt, Human
ugggaguuaggaggagaguaggugagaugauc

SEQ ID NO: 258415 - RNA, 32 nt, Human
ugggaguucauuugggcugggguggaggcugg

SEQ ID NO: 258416 - RNA, 32 nt, Human
ugggaguucucccacccuaagucuuacauaau

SEQ ID NO: 258417 - RNA, 32 nt, Human
ugggaguucugaggcagggugagggggcaagg

SEQ ID NO: 258418 - RNA, 32 nt, Human
ugggaguucuuucauggccucugcuuggggug

SEQ ID NO: 258419 - RNA, 32 nt, Human
ugggaguugaguuccuggauaggcauacuauc

SEQ ID NO: 258420 - RNA, 32 nt, Human
ugggaguugcugcuguuuacagccacagucuc

SEQ ID NO: 258421 - RNA, 32 nt, Human
ugggaguuguguuguacuucauggcacucuga

SEQ ID NO: 258422 - RNA, 32 nt, Human
ugggaguuugcggugggcagggggagggagaa

SEQ ID NO: 258423 - RNA, 32 nt, Human
ugggaguuuugguggaguccgaugauucucuu

SEQ ID NO: 258424 - RNA, 23 nt, Human
ugggauaaagcccuggggacacu

SEQ ID NO: 258425 - RNA, 21 nt, Human
ugggauaacaggcaugagcca

SEQ ID NO: 258426 - RNA, 32 nt, Human
ugggauacaauuacugucaggcauuuuuggug

SEQ ID NO: 258427 - RNA, 32 nt, Human
ugggauacaugugcagaacaugcagguuuguu

SEQ ID NO: 258428 - RNA, 32 nt, Human
ugggauacguaggagguggggaugggggaggg

SEQ ID NO: 258429 - RNA, 32 nt, Human
ugggauagggaaccgugguggcuuccacggag

SEQ ID NO: 258430 - RNA, 32 nt, Human
ugggauaggggcagaggaggcgaggaggccgu

SEQ ID NO: 258431 - RNA, 32 nt, Human
ugggaucaaacuauggccccacccuuagcagu

SEQ ID NO: 258432 - RNA, 32 nt, Human
ugggaucacaccacugcacuccagccugggug

SEQ ID NO: 258433 - RNA, 32 nt, Human
ugggaucacaccacugcacuucagccugggca

SEQ ID NO: 258434 - RNA, 21 nt, Human
ugggaucacaggcgugagcca

SEQ ID NO: 258435 - RNA, 32 nt, Human
ugggaucacaggugggagccacugugccuggc

SEQ ID NO: 258436 - RNA, 32 nt, Human
ugggaucacaugcuuuugucuccacagcaacc

SEQ ID NO: 258437 - RNA, 32 nt, Human
ugggaucacgaggaaaagagaaggaaagugau

SEQ ID NO: 258438 - RNA, 32 nt, Human
ugggaucacgccacugcacuccagcuugggug

SEQ ID NO: 258439 - RNA, 32 nt, Human
ugggaucagagcagugggucacgugaccugcg

SEQ ID NO: 258440 - RNA, 32 nt, Human
ugggaucagaugggaagcagaagcucaucaug

SEQ ID NO: 258441 - RNA, 32 nt, Human
ugggaucaggagacccucccgccucagccccc

SEQ ID NO: 258442 - RNA, 32 nt, Human
ugggaucauaugcacaugcacacacauaccac

SEQ ID NO: 258443 - RNA, 32 nt, Human
ugggaucauauguauuucuauguucuguaaag

SEQ ID NO: 258444 - RNA, 32 nt, Human
ugggaucauccagaggagcuggaaccauggug

SEQ ID NO: 258445 - RNA, 32 nt, Human
ugggauccagaguugaagacccuucagcuggc

SEQ ID NO: 258446 - RNA, 32 nt, Human
ugggauccaguggagcuaaucaguccugccuc

SEQ ID NO: 258447 - RNA, 32 nt, Human
ugggaucccgggcuguaacuugcucuuuuguu

SEQ ID NO: 258448 - RNA, 18 nt, Human
ugggaucccgucucccca

SEQ ID NO: 258449 - RNA, 24 nt, Human
ugggaucccugccuggaccggagg

SEQ ID NO: 258450 - RNA, 32 nt, Human
ugggauccgaaggaacuguacucccccugccc

SEQ ID NO: 258451 - RNA, 32 nt, Human
ugggauccuaaaggaggggcagggagggcgca

SEQ ID NO: 258452 - RNA, 32 nt, Human
ugggauccuggacuacggcacugcuccaggca

SEQ ID NO: 258453 - RNA, 32 nt, Human
ugggaucgcgccauugcacuccagccuggcug

SEQ ID NO: 258454 - RNA, 20 nt, Human
ugggaucgcggcucacugca

SEQ ID NO: 258455 - RNA, 32 nt, Human
ugggaucggaagauggggugcggucacagugc

SEQ ID NO: 258456 - RNA, 32 nt, Human
ugggaucggcacucagggggucuggaaagaag

SEQ ID NO: 258457 - RNA, 32 nt, Human
ugggaucgggguggggacagguagaccaggug

SEQ ID NO: 258458 - RNA, 32 nt, Human
ugggaucguaccacugcacuccagccugggcu

SEQ ID NO: 258459 - RNA, 32 nt, Human
ugggaucguggcauugcacucuagccugggca

SEQ ID NO: 258460 - RNA, 32 nt, Human
ugggaucucaaggagcuuuaaagucuuaaugg

SEQ ID NO: 258461 - RNA, 20 nt, Human
ugggaucucagcucacugca

SEQ ID NO: 258462 - RNA, 32 nt, Human
ugggaucucccugagugucaauauucaguagc

SEQ ID NO: 258463 - RNA, 20 nt, Human
ugggaucucgccucacugca

SEQ ID NO: 258464 - RNA, 20 nt, Human
ugggaucucggcucacugca

SEQ ID NO: 258465 - RNA, 32 nt, Human
ugggaucucugcugccagcucucccagccccu

SEQ ID NO: 258466 - RNA, 32 nt, Human
ugggaucugacugaagccagaggcucuguaaa

SEQ ID NO: 258467 - RNA, 32 nt, Human
ugggaucugccaggcugggguguuuucgguau

SEQ ID NO: 258468 - RNA, 32 nt, Human
ugggaucuggggagagcggcuggagaaagaug

SEQ ID NO: 258469 - RNA, 32 nt, Human
ugggaucuggggaggccgccugguuuuccucc

SEQ ID NO: 258470 - RNA, 25 nt, Human
ugggaucugucccuccugaccgggg

SEQ ID NO: 258471 - RNA, 23 nt, Human
ugggaugaagaaaguuggacacu

SEQ ID NO: 258472 - RNA, 21 nt, Human
ugggaugacaggcaugagcca

SEQ ID NO: 258473 - RNA, 32 nt, Human
ugggaugacgugaguugaggaggcucagcgga

SEQ ID NO: 258474 - RNA, 32 nt, Human
ugggaugacuacaggcaugggccaccacagcc

SEQ ID NO: 258475 - RNA, 32 nt, Human
ugggaugacuccauuauauccugggguugugg

SEQ ID NO: 258476 - RNA, 32 nt, Human
ugggaugagaacauuuuaguuguuuaguuugu

SEQ ID NO: 258477 - RNA, 32 nt, Human
ugggaugagaugacacaagacacuccuaccac

SEQ ID NO: 258478 - RNA, 32 nt, Human
ugggaugaggaugacagagcaacccuucuccu

SEQ ID NO: 258479 - RNA, 32 nt, Human
ugggaugagggauggagagggacugggucucu

SEQ ID NO: 258480 - RNA, 32 nt, Human
ugggaugaguacccccucaaacccugcccucc

SEQ ID NO: 258481 - RNA, 32 nt, Human
ugggaugauggcucagaacauguacacagacu

SEQ ID NO: 258482 - RNA, 32 nt, Human
ugggaugauugcucgauuguuugguuuuuaaa

SEQ ID NO: 258483 - RNA, 32 nt, Human
ugggaugcaccacuggauuguagauugauuuu

SEQ ID NO: 258484 - RNA, 32 nt, Human
ugggaugcagcgaggcccugccuuccuagcag

SEQ ID NO: 258485 - RNA, 32 nt, Human
ugggaugcaggcugagcacccuugcccggcug

SEQ ID NO: 258486 - RNA, 32 nt, Human
ugggaugcagugaugugaucauagcucacugu

SEQ ID NO: 258487 - RNA, 19 nt, Human
ugggaugccaaggccacuc

SEQ ID NO: 258488 - RNA, 32 nt, Human
ugggaugccaucacuugguucaugcucauuca

SEQ ID NO: 258489 - RNA, 31 nt, Human
ugggaugcgcaagacuccacagcagcagagg

SEQ ID NO: 258490 - RNA, 32 nt, Human
ugggaugcgggcccuucuuccucccagaacac

SEQ ID NO: 258491 - RNA, 32 nt, Human
ugggaugcucugccugcugauguggcccugac

SEQ ID NO: 258492 - RNA, 32 nt, Human
ugggaugcuguugcaagaugguucugugacuc

SEQ ID NO: 258493 - RNA, 32 nt, Human
ugggaugcuguuguggcuuugacuuuggccag

SEQ ID NO: 258494 - RNA, 32 nt, Human
ugggaugcuuucucccugccauugucucuugc

SEQ ID NO: 258495 - RNA, 32 nt, Human
ugggauggaaggugaagucuugccaaagaaua

SEQ ID NO: 258496 - RNA, 32 nt, Human
ugggauggagaaaugaauuucuucccacugaa

SEQ ID NO: 258497 - RNA, 32 nt, Human
ugggauggagucucacuauguugcccagacug

SEQ ID NO: 258498 - RNA, 31 nt, Human
ugggauggcaaaggugguggugcuuucaucu

SEQ ID NO: 258499 - RNA, 32 nt, Human
ugggauggcaagagggagacuguggguggccc

SEQ ID NO: 258500 - RNA, 32 nt, Human
ugggaugggaacacuggugggcagcugaggac

SEQ ID NO: 258501 - RNA, 32 nt, Human
ugggaugggaauggggcguggggcuggggcag

SEQ ID NO: 258502 - RNA, 32 nt, Human
ugggaugggaggagugaggcagugggagaaga

SEQ ID NO: 258503 - RNA, 32 nt, Human
ugggaugggaggaucucuugagcccaggagau

SEQ ID NO: 258504 - RNA, 19 nt, Human
ugggaugggccagggcccu

SEQ ID NO: 258505 - RNA, 32 nt, Human
ugggaugggcuacauaaggcccagcucuggca

SEQ ID NO: 258506 - RNA, 32 nt, Human
ugggauggggagaacagagaguagcuguguuu

SEQ ID NO: 258507 - RNA, 32 nt, Human
ugggauggggcuugggaguugcagugaauguc

SEQ ID NO: 258508 - RNA, 32 nt, Human
ugggaugggggcugagcaugcuugugcagaaa

SEQ ID NO: 258509 - RNA, 24 nt, Human
ugggauggggggacagggagccaa

SEQ ID NO: 258510 - RNA, 32 nt, Human
ugggaugggguuuugcgauguugcccaggcug

SEQ ID NO: 258511 - RNA, 32 nt, Human
ugggaugggugaggacuuccugagcuggaaug

SEQ ID NO: 258512 - RNA, 32 nt, Human
ugggaugggugaguccacucuggcuagggcug

SEQ ID NO: 258513 - RNA, 32 nt, Human
ugggaugguggcaaagcccaggaucuggcuuu

SEQ ID NO: 258514 - RNA, 32 nt, Human
ugggaugguuaguguggaggggagauauagau

SEQ ID NO: 258515 - RNA, 17 nt, Human
ugggaugucggggcccu

SEQ ID NO: 258516 - RNA, 32 nt, Human
ugggaugugcauccugcuucccaacuccucua

SEQ ID NO: 258517 - RNA, 32 nt, Human
ugggaugugccccagcacugagaacaaaaugc

SEQ ID NO: 258518 - RNA, 32 nt, Human
ugggauguggagucaggagcaaccagagaccc

SEQ ID NO: 258519 - RNA, 32 nt, Human
ugggaugugguguuccacaugugccuguuucc

SEQ ID NO: 258520 - RNA, 32 nt, Human
ugggauguguccagggcagcacaggaggcagg

SEQ ID NO: 258521 - RNA, 32 nt, Human
ugggauguguuuugggggcagggguuaguucu

SEQ ID NO: 258522 - RNA, 32 nt, Human
ugggauuaaaaauugguuucuagagguaaccu

SEQ ID NO: 258523 - RNA, 32 nt, Human
ugggauuaagaaaccuugcuguccucaccucc

SEQ ID NO: 258524 - RNA, 21 nt, Human
ugggauuacaagaaugagcca

SEQ ID NO: 258525 - RNA, 21 nt, Human
ugggauuacaagcaugagcca

SEQ ID NO: 258526 - RNA, 21 nt, Human
ugggauuacaagcaugaguca

SEQ ID NO: 258527 - RNA, 21 nt, Human
ugggauuacaagcaugcgcca

SEQ ID NO: 258528 - RNA, 32 nt, Human
ugggauuacaccauugcauuccagccugggca

SEQ ID NO: 258529 - RNA, 21 nt, Human
ugggauuacagacaugugcca

SEQ ID NO: 258530 - RNA, 32 nt, Human
ugggauuacaggaauuuagugauugacaaugg

SEQ ID NO: 258531 - RNA, 21 nt, Human
ugggauuacaggcacacgcca

SEQ ID NO: 258532 - RNA, 21 nt, Human
ugggauuacaggcacaugcca

SEQ ID NO: 258533 - RNA, 21 nt, Human
ugggauuacaggcacgcgcca

SEQ ID NO: 258534 - RNA, 21 nt, Human
ugggauuacaggcacgugcca

SEQ ID NO: 258535 - RNA, 21 nt, Human
ugggauuacaggcaggagcca

SEQ ID NO: 258536 - RNA, 21 nt, Human
ugggauuacaggcauaagaca

SEQ ID NO: 258537 - RNA, 21 nt, Human
ugggauuacaggcauacgcca

SEQ ID NO: 258538 - RNA, 21 nt, Human
ugggauuacaggcaugaauca

SEQ ID NO: 258539 - RNA, 20 nt, Human
ugggauuacaggcaugagcc

SEQ ID NO: 258540 - RNA, 21 nt, Human
ugggauuacaggcaugagcca

SEQ ID NO: 258541 - RNA, 21 nt, Human
ugggauuacaggcaugaggca

SEQ ID NO: 258542 - RNA, 21 nt, Human
ugggauuacaggcaugaguca

SEQ ID NO: 258543 - RNA, 21 nt, Human
ugggauuacaggcaugcacca

SEQ ID NO: 258544 - RNA, 21 nt, Human
ugggauuacaggcaugcgcca

SEQ ID NO: 258545 - RNA, 21 nt, Human
ugggauuacaggcaugggcca

SEQ ID NO: 258546 - RNA, 21 nt, Human
ugggauuacaggcauguacca

SEQ ID NO: 258547 - RNA, 21 nt, Human
ugggauuacaggcaugugcca

SEQ ID NO: 258548 - RNA, 32 nt, Human
ugggauuacaggcgugagccaccaccacaccc

SEQ ID NO: 258549 - RNA, 21 nt, Human
ugggauuacagggauaagcca

SEQ ID NO: 258550 - RNA, 21 nt, Human
ugggauuacagggaugagcca

SEQ ID NO: 258551 - RNA, 21 nt, Human
ugggauuacagguaugaacca

SEQ ID NO: 258552 - RNA, 21 nt, Human
ugggauuacagguaugagcca

SEQ ID NO: 258553 - RNA, 32 nt, Human
ugggauuacaggugugagccacuguggccgac

SEQ ID NO: 258554 - RNA, 32 nt, Human
ugggauuacaggugugagucaccccgcacagc

SEQ ID NO: 258555 - RNA, 32 nt, Human
ugggauuacaucugcaggauaaauucuuagaa

SEQ ID NO: 258556 - RNA, 21 nt, Human
ugggauuacaugcaugagcca

SEQ ID NO: 258557 - RNA, 32 nt, Human
ugggauuagaaaauauggguccauuccuuucu

SEQ ID NO: 258558 - RNA, 21 nt, Human
ugggauuagaggcaugagcca

SEQ ID NO: 258559 - RNA, 32 nt, Human
ugggauuagauucaucuauggagggcagagug

SEQ ID NO: 258560 - RNA, 32 nt, Human
ugggauuagggguucugugcucuugccuaauu

SEQ ID NO: 258561 - RNA, 21 nt, Human
ugggauuauagacaugagcca

SEQ ID NO: 258562 - RNA, 32 nt, Human
ugggauuauaggcacacaccaccauacccagc

SEQ ID NO: 258563 - RNA, 21 nt, Human
ugggauuauaggcaugaacca

SEQ ID NO: 258564 - RNA, 21 nt, Human
ugggauuauaggcaugagcca

SEQ ID NO: 258565 - RNA, 32 nt, Human
ugggauuauaggcaugcaccaccaccacccag

SEQ ID NO: 258566 - RNA, 32 nt, Human
ugggauuauguucuucauuugacucucugcuu

SEQ ID NO: 258567 - RNA, 32 nt, Human
ugggauucaaacccgggagugucugcugccac

SEQ ID NO: 258568 - RNA, 32 nt, Human
ugggauucaaacgauuauccugccucagccuc

SEQ ID NO: 258569 - RNA, 32 nt, Human
ugggauucaagcaauucucccaccucagccuc

SEQ ID NO: 258570 - RNA, 32 nt, Human
ugggauucaucuucaaagacuaauccaagaaa

SEQ ID NO: 258571 - RNA, 32 nt, Human
ugggauuccacccucagagucagaugcccuug

SEQ ID NO: 258572 - RNA, 32 nt, Human
ugggauuccaccuggcaccucgaggagccagc

SEQ ID NO: 258573 - RNA, 32 nt, Human
ugggauuccuuuccuuuuuccugccuaacuuu

SEQ ID NO: 258574 - RNA, 32 nt, Human
ugggauucgcugcuuucuuugcacuggucuug

SEQ ID NO: 258575 - RNA, 32 nt, Human
ugggauucuagcugcuggcaggaagcacugua

SEQ ID NO: 258576 - RNA, 32 nt, Human
ugggauucuccuccucccuccgccccacucag

SEQ ID NO: 258577 - RNA, 23 nt, Human
ugggauugaaggggcuucuaaug

SEQ ID NO: 258578 - RNA, 32 nt, Human
ugggauugcaucacugcacuccagccugggug

SEQ ID NO: 258579 - RNA, 32 nt, Human
ugggauugcgggcacaugcaccacgcccggcu

SEQ ID NO: 258580 - RNA, 32 nt, Human
ugggauugcucacauuucucuaauguacugca

SEQ ID NO: 258581 - RNA, 32 nt, Human
ugggauuggcccagcuuggagugcuugugugg

SEQ ID NO: 258582 - RNA, 32 nt, Human
ugggauuguguaugucuauauguguuuaaagc

SEQ ID NO: 258583 - RNA, 32 nt, Human
ugggauuucuacugccaguggcucagccuacc

SEQ ID NO: 258584 - RNA, 32 nt, Human
ugggauuucuaugcaguggccccuuaggccag

SEQ ID NO: 258585 - RNA, 23 nt, Human
ugggauuucucccucucagugga

SEQ ID NO: 258586 - RNA, 32 nt, Human
ugggauuucuucuuuuacugcucugguuaagu

SEQ ID NO: 258587 - RNA, 32 nt, Human
ugggauuugcaugaacuccacucugagcugaa

SEQ ID NO: 258588 - RNA, 32 nt, Human
ugggauuugccugccacuugguuaucauuacu

SEQ ID NO: 258589 - RNA, 32 nt, Human
ugggauuugggugggagaggaaagcaaauuuu

SEQ ID NO: 258590 - RNA, 32 nt, Human
ugggauuuuaaaauuuuccugcccucauaauu

SEQ ID NO: 258591 - RNA, 32 nt, Human
ugggauuuuugagcuaaugggcagcagucagc

SEQ ID NO: 258592 - RNA, 32 nt, Human
ugggcaaaagagaauccccugccuucccuugu

SEQ ID NO: 258593 - RNA, 32 nt, Human
ugggcaaagaagcagagcuaacgaggaaaggg

SEQ ID NO: 258594 - RNA, 32 nt, Human
ugggcaaagcacgaucugcagcuuugaagacu

SEQ ID NO: 258595 - RNA, 20 nt, Human
ugggcaaagcugccugcuau

SEQ ID NO: 258596 - RNA, 32 nt, Human
ugggcaaaggagaguccugccuggcccuacga

SEQ ID NO: 258597 - RNA, 32 nt, Human
ugggcaaagugcugggauuacaagcaugagcu

SEQ ID NO: 258598 - RNA, 22 nt, Human
ugggcaaaguuaagacuugcuu

SEQ ID NO: 258599 - RNA, 32 nt, Human
ugggcaaaucauuccaggucuuugggccucca

SEQ ID NO: 258600 - RNA, 32 nt, Human
ugggcaaauuccaugauggacgagacaaggug

SEQ ID NO: 258601 - RNA, 32 nt, Human
ugggcaacaaagugagacuccaucucuauaua

SEQ ID NO: 258602 - RNA, 18 nt, Human
ugggcaacaagagugaaa

SEQ ID NO: 258603 - RNA, 32 nt, Human
ugggcaacacagcaagaccccaucucuuaaaa

SEQ ID NO: 258604 - RNA, 32 nt, Human
ugggcaacacagcgagaccccaucucuuaaaa

SEQ ID NO: 258605 - RNA, 32 nt, Human
ugggcaacacaggaagaccccgucucuaccaa

SEQ ID NO: 258606 - RNA, 32 nt, Human
ugggcaacacagggagacucaucucuacaaaa

SEQ ID NO: 258607 - RNA, 32 nt, Human
ugggcaacacagugagaccucaucucuaaaaa

SEQ ID NO: 258608 - RNA, 32 nt, Human
ugggcaacacagugagacuccaucucuuaaaa

SEQ ID NO: 258609 - RNA, 29 nt, Human
ugggcaacacagugagacuucauuucuac

SEQ ID NO: 258610 - RNA, 32 nt, Human
ugggcaacacagugagacuucauuucuacaaa

SEQ ID NO: 258611 - RNA, 29 nt, Human
ugggcaacaccgugagaccccaucucuac

SEQ ID NO: 258612 - RNA, 32 nt, Human
ugggcaacacgaugaaaccccaucucuacuaa

SEQ ID NO: 258613 - RNA, 32 nt, Human
ugggcaacacggugaaaccccaucucuauuaa

SEQ ID NO: 258614 - RNA, 32 nt, Human
ugggcaacacggugaaaccccgucucuacuaa

SEQ ID NO: 258615 - RNA, 22 nt, Human
ugggcaacagagcaagacccca

SEQ ID NO: 258616 - RNA, 32 nt, Human
ugggcaacagagcaagaccccaucucuaaaua

SEQ ID NO: 258617 - RNA, 32 nt, Human
ugggcaacagagccagacuccgucucuaaaca

SEQ ID NO: 258618 - RNA, 32 nt, Human
ugggcaacagagcgagacuccaucucuaaaua

SEQ ID NO: 258619 - RNA, 32 nt, Human
ugggcaacagagugagaaccaucucuacccaa

SEQ ID NO: 258620 - RNA, 32 nt, Human
ugggcaacagagugagaccccaucucuuuaaa

SEQ ID NO: 258621 - RNA, 32 nt, Human
ugggcaacaggugagauucugucuccaaauaa

SEQ ID NO: 258622 - RNA, 32 nt, Human
ugggcaacauaacgagaccccgucucuacaaa

SEQ ID NO: 258623 - RNA, 32 nt, Human
ugggcaacauaaugaaacaccaucucuuaaaa

SEQ ID NO: 258624 - RNA, 32 nt, Human
ugggcaacauaaugagacaggucucuacaaac

SEQ ID NO: 258625 - RNA, 32 nt, Human
ugggcaacauagagagaccccaucucugcaaa

SEQ ID NO: 258626 - RNA, 32 nt, Human
ugggcaacauagcaagaccccaucucuacaaa

SEQ ID NO: 258627 - RNA, 32 nt, Human
ugggcaacauagcaagaccccaucucuaccaa

SEQ ID NO: 258628 - RNA, 32 nt, Human
ugggcaacauagcaagaccccaucucuauaaa

SEQ ID NO: 258629 - RNA, 32 nt, Human
ugggcaacauagcaagaccccgucucuacaaa

SEQ ID NO: 258630 - RNA, 32 nt, Human
ugggcaacauagcaagaccccgucucuuaaaa

SEQ ID NO: 258631 - RNA, 32 nt, Human
ugggcaacauagcaagacuccaucucuaagua

SEQ ID NO: 258632 - RNA, 32 nt, Human
ugggcaacauagcaggaccccaucucuacuau

SEQ ID NO: 258633 - RNA, 32 nt, Human
ugggcaacauagcgagaccccaucucuacaaa

SEQ ID NO: 258634 - RNA, 32 nt, Human
ugggcaacauagcgagacuccaucucuauaaa

SEQ ID NO: 258635 - RNA, 32 nt, Human
ugggcaacauaggaagacuccgucucuacaua

SEQ ID NO: 258636 - RNA, 32 nt, Human
ugggcaacauagggagaccccaucucuacaga

SEQ ID NO: 258637 - RNA, 32 nt, Human
ugggcaacauagggaggccccgucucuuaaaa

SEQ ID NO: 258638 - RNA, 32 nt, Human
ugggcaacauagggggaucccaucucuacaca

SEQ ID NO: 258639 - RNA, 32 nt, Human
ugggcaacauaguaagaccccaucucuaugaa

SEQ ID NO: 258640 - RNA, 32 nt, Human
ugggcaacauaguaagaccccaucucuuaaaa

SEQ ID NO: 258641 - RNA, 32 nt, Human
ugggcaacauagugaagccccaucucugcaaa

SEQ ID NO: 258642 - RNA, 32 nt, Human
ugggcaacauagugagaccccaucucuacaaa

SEQ ID NO: 258643 - RNA, 32 nt, Human
ugggcaacauagugagaccccaucucuacaau

SEQ ID NO: 258644 - RNA, 32 nt, Human
ugggcaacauagugagaccccaucucuacauc

SEQ ID NO: 258645 - RNA, 32 nt, Human
ugggcaacauagugagaccccaucucuacuua

SEQ ID NO: 258646 - RNA, 32 nt, Human
ugggcaacauagugagaccccaucucuuuaaa

SEQ ID NO: 258647 - RNA, 23 nt, Human
ugggcaacauagugagacccugu

SEQ ID NO: 258648 - RNA, 22 nt, Human
ugggcaacauagugagaccuug

SEQ ID NO: 258649 - RNA, 32 nt, Human
ugggcaacauagugagaucccaucucuacaaa

SEQ ID NO: 258650 - RNA, 32 nt, Human
ugggcaacauagugaggccccaucucuagaaa

SEQ ID NO: 258651 - RNA, 32 nt, Human
ugggcaacauagugauaccccaucucuuaaaa

SEQ ID NO: 258652 - RNA, 32 nt, Human
ugggcaacaucgggagaccccaucucuacaaa

SEQ ID NO: 258653 - RNA, 32 nt, Human
ugggcaacaugacaagaccccaucucuacaaa

SEQ ID NO: 258654 - RNA, 32 nt, Human
ugggcaacaugaugaaaccccaucuccacugc

SEQ ID NO: 258655 - RNA, 32 nt, Human
ugggcaacauggcaaaaacccaccucuacaaa

SEQ ID NO: 258656 - RNA, 32 nt, Human
ugggcaacauggcaaaacaccgucucuacaaa

SEQ ID NO: 258657 - RNA, 32 nt, Human
ugggcaacauggcaaaaccccaucucuacaaa

SEQ ID NO: 258658 - RNA, 32 nt, Human
ugggcaacauggcaaaaccccauuucuacaaa

SEQ ID NO: 258659 - RNA, 23 nt, Human
ugggcaacauggcaaaacccugu

SEQ ID NO: 258660 - RNA, 32 nt, Human
ugggcaacauggcaaaacccugucucuacaaa

SEQ ID NO: 258661 - RNA, 32 nt, Human
ugggcaacauggcaaaacccugucucuacuaa

SEQ ID NO: 258662 - RNA, 32 nt, Human
ugggcaacauggcaaaacccugucucuauuaa

SEQ ID NO: 258663 - RNA, 32 nt, Human
ugggcaacauggcaaaacccuguuucuacaca

SEQ ID NO: 258664 - RNA, 30 nt, Human
ugggcaacauggcaaaacuuugucucucuu

SEQ ID NO: 258665 - RNA, 32 nt, Human
ugggcaacauggcaaaauccugucucuauaaa

SEQ ID NO: 258666 - RNA, 32 nt, Human
ugggcaacauggcaaagccccaucucuacaaa

SEQ ID NO: 258667 - RNA, 32 nt, Human
ugggcaacauggcaaaugccgucucugcaaaa

SEQ ID NO: 258668 - RNA, 32 nt, Human
ugggcaacauggcaagacccugucucuacuaa

SEQ ID NO: 258669 - RNA, 32 nt, Human
ugggcaacauggcaagacccugucucuuuaaa

SEQ ID NO: 258670 - RNA, 32 nt, Human
ugggcaacauggccagaccuccucucuacaaa

SEQ ID NO: 258671 - RNA, 32 nt, Human
ugggcaacauggcgaaaacccaucucuacaaa

SEQ ID NO: 258672 - RNA, 32 nt, Human
ugggcaacauggcgaaaccccauuucuacuaa

SEQ ID NO: 258673 - RNA, 32 nt, Human
ugggcaacauggcgaaaccccgucucuacuaa

SEQ ID NO: 258674 - RNA, 32 nt, Human
ugggcaacauggcgaaacccuaucucuacaaa

SEQ ID NO: 258675 - RNA, 22 nt, Human
ugggcaacauggcgaaacccug

SEQ ID NO: 258676 - RNA, 32 nt, Human
ugggcaacauggcgaaacccugccucuacaaa

SEQ ID NO: 258677 - RNA, 29 nt, Human
ugggcaacauggcgaaacccugucuccac

SEQ ID NO: 258678 - RNA, 32 nt, Human
ugggcaacauggcgaaacccugucucuacuaa

SEQ ID NO: 258679 - RNA, 32 nt, Human
ugggcaacauggcgagaccccaucucuacuaa

SEQ ID NO: 258680 - RNA, 32 nt, Human
ugggcaacauggcgagacccugucucuacaaa

SEQ ID NO: 258681 - RNA, 32 nt, Human
ugggcaacauggcgagauccugucucugcaaa

SEQ ID NO: 258682 - RNA, 32 nt, Human
ugggcaacauggcgaggccucugucucuacaa

SEQ ID NO: 258683 - RNA, 32 nt, Human
ugggcaacauggcuaaaccccgucucuacaaa

SEQ ID NO: 258684 - RNA, 32 nt, Human
ugggcaacauggggaaacuccaucucuacaaa

SEQ ID NO: 258685 - RNA, 32 nt, Human
ugggcaacauggugaaaccccaucuccaccaa

SEQ ID NO: 258686 - RNA, 29 nt, Human
ugggcaacauggugaaaccccaucucuac

SEQ ID NO: 258687 - RNA, 32 nt, Human
ugggcaacauggugaaaccccaucucuacaaa

SEQ ID NO: 258688 - RNA, 32 nt, Human
ugggcaacauggugaaaccccaucucuacuaa

SEQ ID NO: 258689 - RNA, 32 nt, Human
ugggcaacauggugaaaccccgucucuaccaa

SEQ ID NO: 258690 - RNA, 32 nt, Human
ugggcaacauggugaaaccccgucucuacccc

SEQ ID NO: 258691 - RNA, 32 nt, Human
ugggcaacauggugaaaccccgucucuacuaa

SEQ ID NO: 258692 - RNA, 23 nt, Human
ugggcaacauggugaaacccugu

SEQ ID NO: 258693 - RNA, 32 nt, Human
ugggcaacauggugaaagcccgucucuaccga

SEQ ID NO: 258694 - RNA, 32 nt, Human
ugggcaacauggugaagccccaucucuacaaa

SEQ ID NO: 258695 - RNA, 32 nt, Human
ugggcaacauggugaccucccgucucucucgg

SEQ ID NO: 258696 - RNA, 32 nt, Human
ugggcaacauggugagaccccaucucuacaaa

SEQ ID NO: 258697 - RNA, 32 nt, Human
ugggcaacauggugagaccccaucucuauuua

SEQ ID NO: 258698 - RNA, 32 nt, Human
ugggcaacauggugagaccccgucucuacaaa

SEQ ID NO: 258699 - RNA, 32 nt, Human
ugggcaacauugggagacuccaucucuacaaa

SEQ ID NO: 258700 - RNA, 32 nt, Human
ugggcaaccagcugccccgcuguuuggcccag

SEQ ID NO: 258701 - RNA, 32 nt, Human
ugggcaaccccugaagcauuuuagugaugcga

SEQ ID NO: 258702 - RNA, 32 nt, Human
ugggcaacguagagauccccaucucuaugaaa

SEQ ID NO: 258703 - RNA, 32 nt, Human
ugggcaacguagucagaccccaucucuacaaa

SEQ ID NO: 258704 - RNA, 32 nt, Human
ugggcaacgugacgaaaccccaucucuacgaa

SEQ ID NO: 258705 - RNA, 32 nt, Human
ugggcaacgugaugagacuccgucucuaccaa

SEQ ID NO: 258706 - RNA, 32 nt, Human
ugggcaacguggugaaaccccaucucuacaaa

SEQ ID NO: 258707 - RNA, 32 nt, Human
ugggcaacugucaaccugcagcuuugagucuc

SEQ ID NO: 258708 - RNA, 32 nt, Human
ugggcaacuuagcgagacuccaucucuacaaa

SEQ ID NO: 258709 - RNA, 32 nt, Human
ugggcaacuugguaaaaccccaucucuacaaa

SEQ ID NO: 258710 - RNA, 32 nt, Human
ugggcaagaagagagcggccaucucggaucau

SEQ ID NO: 258711 - RNA, 32 nt, Human
ugggcaagaccucugugaccucaguuucccca

SEQ ID NO: 258712 - RNA, 32 nt, Human
ugggcaagagacuuccucugguuuccucagga

SEQ ID NO: 258713 - RNA, 32 nt, Human
ugggcaagaucccuguccuccugggcccugag

SEQ ID NO: 258714 - RNA, 32 nt, Human
ugggcaagauggcaagaccuuguuucuguuua

SEQ ID NO: 258715 - RNA, 32 nt, Human
ugggcaagauggugaaaccccaucucuacugg

SEQ ID NO: 258716 - RNA, 23 nt, Human
ugggcaagcacaagguaggugcu

SEQ ID NO: 258717 - RNA, 17 nt, Human
ugggcaagcccagugga

SEQ ID NO: 258718 - RNA, 32 nt, Human
ugggcaagcuauagccauggcuguggcuguag

SEQ ID NO: 258719 - RNA, 32 nt, Human
ugggcaagcugauccugcugcaccacaagcac

SEQ ID NO: 258720 - RNA, 32 nt, Human
ugggcaagcugccucccaucacugccugcugg

SEQ ID NO: 258721 - RNA, 32 nt, Human
ugggcaagugaagagauaucagccuggucauc

SEQ ID NO: 258722 - RNA, 32 nt, Human
ugggcaagugcagugaaacaggugcuuccugc

SEQ ID NO: 258723 - RNA, 28 nt, Human
ugggcaauaaacaaguaaauauacaaac

SEQ ID NO: 258724 - RNA, 32 nt, Human
ugggcaauagagaugccuuccccuguagcagu

SEQ ID NO: 258725 - RNA, 32 nt, Human
ugggcaauauagcaagaccccaucucuaaaaa

SEQ ID NO: 258726 - RNA, 32 nt, Human
ugggcaauauagcaagaucccaucucuuuaaa

SEQ ID NO: 258727 - RNA, 32 nt, Human
ugggcaauauagugaaaccccaucucuuaaag

SEQ ID NO: 258728 - RNA, 32 nt, Human
ugggcaauauagugagaccccaucucuagaag

SEQ ID NO: 258729 - RNA, 32 nt, Human
ugggcaauaucgugagaccccaucucuacaaa

SEQ ID NO: 258730 - RNA, 32 nt, Human
ugggcaauauggugacaccccaucucuacaaa

SEQ ID NO: 258731 - RNA, 25 nt, Human
ugggcaaucaaaaaagccaguguga

SEQ ID NO: 258732 - RNA, 32 nt, Human
ugggcaauccaccacuuccucuuccuucugcu

SEQ ID NO: 258733 - RNA, 32 nt, Human
ugggcaauguggcgaaacuccaucucuacaaa

SEQ ID NO: 258734 - RNA, 30 nt, Human
ugggcaauguggggagaccccaucucuaca

SEQ ID NO: 258735 - RNA, 32 nt, Human
ugggcaauuccagagaauucaguaccugcuug

SEQ ID NO: 258736 - RNA, 19 nt, Human
ugggcacaagacagucaaa

SEQ ID NO: 258737 - RNA, 32 nt, Human
ugggcacaagugcagaaggugcaggugcagug

SEQ ID NO: 258738 - RNA, 24 nt, Human
ugggcacaauggcucgugcuugua

SEQ ID NO: 258739 - RNA, 22 nt, Human
ugggcacacuguaucugcuaca

SEQ ID NO: 258740 - RNA, 32 nt, Human
ugggcacagaccugcauuuguugaccuugcac

SEQ ID NO: 258741 - RNA, 32 nt, Human
ugggcacagaugaguccauccaugcucacugg

SEQ ID NO: 258742 - RNA, 32 nt, Human
ugggcacaggcugugagccagggugcugggaa

SEQ ID NO: 258743 - RNA, 24 nt, Human
ugggcacaguagcucaugccugua

SEQ ID NO: 258744 - RNA, 24 nt, Human
ugggcacaguggcucacaccugua

SEQ ID NO: 258745 - RNA, 24 nt, Human
ugggcacaguggcucacgccugua

SEQ ID NO: 258746 - RNA, 22 nt, Human
ugggcacaguggcucaugccug

SEQ ID NO: 258747 - RNA, 24 nt, Human
ugggcacaguggcucaugccugua

SEQ ID NO: 258748 - RNA, 24 nt, Human
ugggcacaguggcuuacaccugua

SEQ ID NO: 258749 - RNA, 19 nt, Human
ugggcacaguggugugcau

SEQ ID NO: 258750 - RNA, 24 nt, Human
ugggcacagugguuuauagcugua

SEQ ID NO: 258751 - RNA, 32 nt, Human
ugggcacaugggagauggggacaggaaagaug

SEQ ID NO: 258752 - RNA, 32 nt, Human
ugggcacauguaaucccagcuacuugggaggc

SEQ ID NO: 258753 - RNA, 28 nt, Human
ugggcaccacaggcugccucaugacccu

SEQ ID NO: 258754 - RNA, 32 nt, Human
ugggcaccaggucugugccaagcacagggacu

SEQ ID NO: 258755 - RNA, 32 nt, Human
ugggcaccaucagcuaaagaugcuggaagcca

SEQ ID NO: 258756 - RNA, 32 nt, Human
ugggcaccauggugagaccccaucucuauuau

SEQ ID NO: 258757 - RNA, 32 nt, Human
ugggcaccauguccuugaagcuucaggcaagc

SEQ ID NO: 258758 - RNA, 32 nt, Human
ugggcacccggauucaccucuggaccacccug

SEQ ID NO: 258759 - RNA, 32 nt, Human
ugggcacccugcacucaauggugaaggacuug

SEQ ID NO: 258760 - RNA, 32 nt, Human
ugggcacccugucuccccuggucucacugcug

SEQ ID NO: 258761 - RNA, 32 nt, Human
ugggcacccuuugggccaccuaguuuccccug

SEQ ID NO: 258762 - RNA, 32 nt, Human
ugggcaccgccagccgccugggcacgggacug

SEQ ID NO: 258763 - RNA, 24 nt, Human
ugggcaccguggcucacgccugua

SEQ ID NO: 258764 - RNA, 32 nt, Human
ugggcaccuauuaugcuacauaucauguuagg

SEQ ID NO: 258765 - RNA, 18 nt, Human
ugggcaccucccugcagu

SEQ ID NO: 258766 - RNA, 32 nt, Human
ugggcaccugaggcggagucugcguggagagg

SEQ ID NO: 258767 - RNA, 32 nt, Human
ugggcaccuggcacuaagggaguaccuuauua

SEQ ID NO: 258768 - RNA, 32 nt, Human
ugggcaccugggagcaccagcugcggcgcaug

SEQ ID NO: 258769 - RNA, 18 nt, Human
ugggcaccuguaauccca

SEQ ID NO: 258770 - RNA, 32 nt, Human
ugggcaccuguaaucccagcuacuagggagac

SEQ ID NO: 258771 - RNA, 32 nt, Human
ugggcaccuguaaucccagcuacucaggaggc

SEQ ID NO: 258772 - RNA, 32 nt, Human
ugggcaccuguaaucccagcuacucgggaggc

SEQ ID NO: 258773 - RNA, 32 nt, Human
ugggcaccuguaaucccagcuacucuggaggc

SEQ ID NO: 258774 - RNA, 32 nt, Human
ugggcaccuguaaucccagcuacuuggaaggc

SEQ ID NO: 258775 - RNA, 32 nt, Human
ugggcaccuguaaucccagcuacuugggaggc

SEQ ID NO: 258776 - RNA, 32 nt, Human
ugggcaccuguaaucucagcuacuugggaggc

SEQ ID NO: 258777 - RNA, 19 nt, Human
ugggcacgccagucugcac

SEQ ID NO: 258778 - RNA, 32 nt, Human
ugggcacgccuguaaucccagcuacucgggag

SEQ ID NO: 258779 - RNA, 32 nt, Human
ugggcacggugacugcgguuauuccuggaggu

SEQ ID NO: 258780 - RNA, 24 nt, Human
ugggcacggugccucaugccugua

SEQ ID NO: 258781 - RNA, 24 nt, Human
ugggcacgguggcucacaccugua

SEQ ID NO: 258782 - RNA, 24 nt, Human
ugggcacgguggcucacgccugua

SEQ ID NO: 258783 - RNA, 24 nt, Human
ugggcacgguggcucacgcuugua

SEQ ID NO: 258784 - RNA, 24 nt, Human
ugggcacgguggcucacuccugua

SEQ ID NO: 258785 - RNA, 24 nt, Human
ugggcacgguggcucauaccugua

SEQ ID NO: 258786 - RNA, 21 nt, Human
ugggcacgguggcucaugccu

SEQ ID NO: 258787 - RNA, 24 nt, Human
ugggcacgguggcucaugccugua

SEQ ID NO: 258788 - RNA, 32 nt, Human
ugggcacucccaggccccaggcagugcugcag

SEQ ID NO: 258789 - RNA, 21 nt, Human
ugggcacugccaccugacaca

SEQ ID NO: 258790 - RNA, 18 nt, Human
ugggcacugcugcugcau

SEQ ID NO: 258791 - RNA, 32 nt, Human
ugggcacuggccccuggcugggccauuucaug

SEQ ID NO: 258792 - RNA, 32 nt, Human
ugggcacugguguggcugcucugggcagauga

SEQ ID NO: 258793 - RNA, 24 nt, Human
ugggcacuguggcucacgccugua

SEQ ID NO: 258794 - RNA, 24 nt, Human
ugggcacuguggcucacuccugua

SEQ ID NO: 258795 - RNA, 32 nt, Human
ugggcacugugggccuguggccuuccuggcug

SEQ ID NO: 258796 - RNA, 32 nt, Human
ugggcacuugacucuauuccauugaccuguuu

SEQ ID NO: 258797 - RNA, 21 nt, Human
ugggcacuuugcacugccaca

SEQ ID NO: 258798 - RNA, 32 nt, Human
ugggcagaaagacuccagcaggugagcucuuc

SEQ ID NO: 258799 - RNA, 32 nt, Human
ugggcagaaagccaaaguacuggacugccugg

SEQ ID NO: 258800 - RNA, 32 nt, Human
ugggcagaaagggaggaggagggcaacaggga

SEQ ID NO: 258801 - RNA, 32 nt, Human
ugggcagaaaugugcugcaaagaguuauauga

SEQ ID NO: 258802 - RNA, 32 nt, Human
ugggcagaacauguuuauugcacagagugggc

SEQ ID NO: 258803 - RNA, 24 nt, Human
ugggcagaccuacaaggcugcgca

SEQ ID NO: 258804 - RNA, 32 nt, Human
ugggcagaccuguccuucugugccucacagua

SEQ ID NO: 258805 - RNA, 32 nt, Human
ugggcagacgcuggugcccgaguucagauccu

SEQ ID NO: 258806 - RNA, 32 nt, Human
ugggcagagacccuguaggauggggucaggaa

SEQ ID NO: 258807 - RNA, 32 nt, Human
ugggcagagagcuggggccaccucuggaggug

SEQ ID NO: 258808 - RNA, 32 nt, Human
ugggcagagcugagugugagaagauggaaaac

SEQ ID NO: 258809 - RNA, 32 nt, Human
ugggcagaggaaccucuagcucugacugucac

SEQ ID NO: 258810 - RNA, 32 nt, Human
ugggcagaggagguguagccuggggcaaagug

SEQ ID NO: 258811 - RNA, 32 nt, Human
ugggcagaggcagaggucagcacuggccauga

SEQ ID NO: 258812 - RNA, 32 nt, Human
ugggcagaggcgggacaguggagaagccugga

SEQ ID NO: 258813 - RNA, 32 nt, Human
ugggcagagggaaaggguggucagggugagga

SEQ ID NO: 258814 - RNA, 32 nt, Human
ugggcagaggggaaggguggucagggugagga

SEQ ID NO: 258815 - RNA, 32 nt, Human
ugggcagaguccugccuucuuccuugaggggc

SEQ ID NO: 258816 - RNA, 32 nt, Human
ugggcagaucacaugaggccaggaguucaaga

SEQ ID NO: 258817 - RNA, 23 nt, Human
ugggcagaucgccugagcccagg

SEQ ID NO: 258818 - RNA, 32 nt, Human
ugggcagaugcuggacauuugaggagccgucu

SEQ ID NO: 258819 - RNA, 32 nt, Human
ugggcagcaaaccugcuguuuaacaucagggu

SEQ ID NO: 258820 - RNA, 31 nt, Human
ugggcagcaaugucugcuacauggaagagau

SEQ ID NO: 258821 - RNA, 32 nt, Human
ugggcagcagagcaagacucugucucaaaagg

SEQ ID NO: 258822 - RNA, 32 nt, Human
ugggcagcagagcgagacucugucucaaaaau

SEQ ID NO: 258823 - RNA, 32 nt, Human
ugggcagcagagcgagacucugucucaacaac

SEQ ID NO: 258824 - RNA, 32 nt, Human
ugggcagcagaggcaacucccgcauccuuugc

SEQ ID NO: 258825 - RNA, 32 nt, Human
ugggcagcagaugcugagcuuuccucaccucc

SEQ ID NO: 258826 - RNA, 21 nt, Human
ugggcagcagcagcagcuucu

SEQ ID NO: 258827 - RNA, 32 nt, Human
ugggcagcauagcgagaccccaucucuauaua

SEQ ID NO: 258828 - RNA, 30 nt, Human
ugggcagcauagugugagacccugucucuu

SEQ ID NO: 258829 - RNA, 32 nt, Human
ugggcagcauggcgaaaucccaucucuacaaa

SEQ ID NO: 258830 - RNA, 32 nt, Human
ugggcagccaccuccuuugcccuagaccagcu

SEQ ID NO: 258831 - RNA, 32 nt, Human
ugggcagccagccugagcugccuccuccaugg

SEQ ID NO: 258832 - RNA, 32 nt, Human
ugggcagccauuugggcagacacuggcuagca

SEQ ID NO: 258833 - RNA, 32 nt, Human
ugggcagccauuuucucccgggagaggcugga

SEQ ID NO: 258834 - RNA, 32 nt, Human
ugggcagcccuggaagcucggaggagaggcca

SEQ ID NO: 258835 - RNA, 32 nt, Human
ugggcagcccuuggagcacacaguggugaaga

SEQ ID NO: 258836 - RNA, 19 nt, Human
ugggcagccggcggcgcgg

SEQ ID NO: 258837 - RNA, 32 nt, Human
ugggcagccuccucacaggugggcugggcugg

SEQ ID NO: 258838 - RNA, 32 nt, Human
ugggcagccugcuuuggccuuuccuuguaugu

SEQ ID NO: 258839 - RNA, 21 nt, Human
ugggcagccugggaagccugg

SEQ ID NO: 258840 - RNA, 32 nt, Human
ugggcagcgacaacgaggaggugguggcuggc

SEQ ID NO: 258841 - RNA, 32 nt, Human
ugggcagcgcacuccagucuucccaggcuagc

SEQ ID NO: 258842 - RNA, 32 nt, Human
ugggcagcggaugggcugggcgaugcagcugg

SEQ ID NO: 258843 - RNA, 32 nt, Human
ugggcagcggccagggcagccauggcuugggc

SEQ ID NO: 258844 - RNA, 32 nt, Human
ugggcagcuaauccuuuccugccugugcucuc

SEQ ID NO: 258845 - RNA, 21 nt, Human
ugggcagcucccaucccaguc

SEQ ID NO: 258846 - RNA, 32 nt, Human
ugggcagcucuauuccagcucaacugauuucu

SEQ ID NO: 258847 - RNA, 32 nt, Human
ugggcagcucuggucaagcacagcauggcgac

SEQ ID NO: 258848 - RNA, 18 nt, Human
ugggcagcugcccaccac

SEQ ID NO: 258849 - RNA, 32 nt, Human
ugggcagcugcuggagcacacgccucaaaguc

SEQ ID NO: 258850 - RNA, 32 nt, Human
ugggcagcuggcacagcugaggcaaggcaggg

SEQ ID NO: 258851 - RNA, 32 nt, Human
ugggcagcugggcccuccugggugggguggug

SEQ ID NO: 258852 - RNA, 32 nt, Human
ugggcagcuguggcagagcagcgacccgcggc

SEQ ID NO: 258853 - RNA, 32 nt, Human
ugggcagcuguggcagagcagucccgacaccu

SEQ ID NO: 258854 - RNA, 32 nt, Human
ugggcagcuguuuggggcucagcugggucccc

SEQ ID NO: 258855 - RNA, 32 nt, Human
ugggcagcuuagggcccugccucuguuucaug

SEQ ID NO: 258856 - RNA, 32 nt, Human
ugggcaggaagccagacacagagcggguggcu

SEQ ID NO: 258857 - RNA, 32 nt, Human
ugggcaggagcaauccagaguuguuauuuuuc

SEQ ID NO: 258858 - RNA, 32 nt, Human
ugggcaggagggcuggaaaagccggcgcugga

SEQ ID NO: 258859 - RNA, 32 nt, Human
ugggcaggaggggaaauggauuugaaccaucu

SEQ ID NO: 258860 - RNA, 32 nt, Human
ugggcaggaugaaggccaggggcacuggagug

SEQ ID NO: 258861 - RNA, 32 nt, Human
ugggcaggcacccggaggaggagcagcagcug

SEQ ID NO: 258862 - RNA, 20 nt, Human
ugggcaggcagagcuggggu

SEQ ID NO: 258863 - RNA, 32 nt, Human
ugggcaggcagccacagagggcauguuaucug

SEQ ID NO: 258864 - RNA, 32 nt, Human
ugggcaggcaggcagggcauagcgacagugug

SEQ ID NO: 258865 - RNA, 32 nt, Human
ugggcaggcaucggagcuuccagccuggggag

SEQ ID NO: 258866 - RNA, 32 nt, Human
ugggcaggcugcaccucaucugggcaggcgca

SEQ ID NO: 258867 - RNA, 32 nt, Human
ugggcaggcuuccuuccuccuggugauggggg

SEQ ID NO: 258868 - RNA, 32 nt, Human
ugggcagggagagugacggggagcagcacagu

SEQ ID NO: 258869 - RNA, 19 nt, Human
ugggcagggcagggcuggc

SEQ ID NO: 258870 - RNA, 32 nt, Human
ugggcagggcuggacgcugggaccuggagcug

SEQ ID NO: 258871 - RNA, 32 nt, Human
ugggcagggcuucugcacuucugcugcuuacc

SEQ ID NO: 258872 - RNA, 32 nt, Human
ugggcaggggaaagagaaagaagaugagagau

SEQ ID NO: 258873 - RNA, 32 nt, Human
ugggcaggggauguuuaaauacugauuaauua

SEQ ID NO: 258874 - RNA, 32 nt, Human
ugggcagggggcaugaugcgggccagugcucc

SEQ ID NO: 258875 - RNA, 32 nt, Human
ugggcagggggcggaggcugccgaggccaggg

SEQ ID NO: 258876 - RNA, 32 nt, Human
ugggcaggggugcucgagagguccccaggagu

SEQ ID NO: 258877 - RNA, 32 nt, Human
ugggcaggguggggcaggaugcagugagccag

SEQ ID NO: 258878 - RNA, 32 nt, Human
ugggcagguagcacgccugcuggcagagguac

SEQ ID NO: 258879 - RNA, 32 nt, Human
ugggcaggugagggcaggauggagaccaaggg

SEQ ID NO: 258880 - RNA, 32 nt, Human
ugggcaggugaguguccaggagaugagggcug

SEQ ID NO: 258881 - RNA, 32 nt, Human
ugggcaggugcagauccaagggcugugguaaa

SEQ ID NO: 258882 - RNA, 32 nt, Human
ugggcagguggccauggggaggggccauggcu

SEQ ID NO: 258883 - RNA, 32 nt, Human
ugggcaguagcuccucccauggccagugguca

SEQ ID NO: 258884 - RNA, 32 nt, Human
ugggcagucaguccagagaugcuggcccucgc

SEQ ID NO: 258885 - RNA, 32 nt, Human
ugggcagucuaaguaagcaacagcaaggcugg

SEQ ID NO: 258886 - RNA, 32 nt, Human
ugggcagugaugacaccaaauauaagcauaaa

SEQ ID NO: 258887 - RNA, 32 nt, Human
ugggcagugccacccacuccuugggccccuag

SEQ ID NO: 258888 - RNA, 32 nt, Human
ugggcagugccuccuccugggccugggucugg

SEQ ID NO: 258889 - RNA, 32 nt, Human
ugggcaguggcugccguaggggaggcgcucug

SEQ ID NO: 258890 - RNA, 32 nt, Human
ugggcaguggcugugggagcaggaauggcgca

SEQ ID NO: 258891 - RNA, 32 nt, Human
ugggcaguggguggagggcugccaggaaacau

SEQ ID NO: 258892 - RNA, 32 nt, Human
ugggcagugucuccugugagaccaaggaccug

SEQ ID NO: 258893 - RNA, 32 nt, Human
ugggcagugugguuuggggcccagggggaauu

SEQ ID NO: 258894 - RNA, 32 nt, Human
ugggcaguguugcugaaagggccagguugugg

SEQ ID NO: 258895 - RNA, 32 nt, Human
ugggcaguugaccugcacagacaggaaccuca

SEQ ID NO: 258896 - RNA, 32 nt, Human
ugggcaguuguucuggacaagucaucaguuuc

SEQ ID NO: 258897 - RNA, 32 nt, Human
ugggcauagccucagccccaggccucuguccu

SEQ ID NO: 258898 - RNA, 24 nt, Human
ugggcauaguagcucaugccugua

SEQ ID NO: 258899 - RNA, 24 nt, Human
ugggcauaguggcaugugccugua

SEQ ID NO: 258900 - RNA, 24 nt, Human
ugggcauaguggcgagugccugua

SEQ ID NO: 258901 - RNA, 24 nt, Human
ugggcauagugguguauaccugua

SEQ ID NO: 258902 - RNA, 24 nt, Human
ugggcauagugguucaugccugua

SEQ ID NO: 258903 - RNA, 32 nt, Human
ugggcaucaauggcaccuccacacagccgaag

SEQ ID NO: 258904 - RNA, 32 nt, Human
ugggcaucagggacuuugugcuaagccugaug

SEQ ID NO: 258905 - RNA, 32 nt, Human
ugggcauccacuucgacugcucagggaaguac

SEQ ID NO: 258906 - RNA, 32 nt, Human
ugggcauccagccucuggggccuuggcacaca

SEQ ID NO: 258907 - RNA, 32 nt, Human
ugggcauccggccugugcugggcauggguggu

SEQ ID NO: 258908 - RNA, 32 nt, Human
ugggcaucguagugagacuccaucucugucuu

SEQ ID NO: 258909 - RNA, 32 nt, Human
ugggcaucuggaagacaaacagcaacucucag

SEQ ID NO: 258910 - RNA, 20 nt, Human
ugggcaucugggauucggag

SEQ ID NO: 258911 - RNA, 32 nt, Human
ugggcaucuguaauccuagcugcucgggaggc

SEQ ID NO: 258912 - RNA, 32 nt, Human
ugggcaucuguggauuuuuggcuacuagaagu

SEQ ID NO: 258913 - RNA, 23 nt, Human
ugggcaucuuccccagcaacuac

SEQ ID NO: 258914 - RNA, 24 nt, Human
ugggcaugauggcgugugccugua

SEQ ID NO: 258915 - RNA, 24 nt, Human
ugggcaugauugcgcaugccugua

SEQ ID NO: 258916 - RNA, 20 nt, Human
ugggcaugcaggugacaagg

SEQ ID NO: 258917 - RNA, 32 nt, Human
ugggcaugccuguaaucccagaauuuugggag

SEQ ID NO: 258918 - RNA, 32 nt, Human
ugggcaugcugugguugcugagggaugagggg

SEQ ID NO: 258919 - RNA, 24 nt, Human
ugggcauggaggcucaugccugua

SEQ ID NO: 258920 - RNA, 32 nt, Human
ugggcauggaggcuugccccagauggggacca

SEQ ID NO: 258921 - RNA, 32 nt, Human
ugggcauggccuccccuccucugcuugccauc

SEQ ID NO: 258922 - RNA, 21 nt, Human
ugggcauggggggccccugau

SEQ ID NO: 258923 - RNA, 24 nt, Human
ugggcaugguagcacaugccugug

SEQ ID NO: 258924 - RNA, 24 nt, Human
ugggcaugguagcucaugccugua

SEQ ID NO: 258925 - RNA, 24 nt, Human
ugggcaugguagugcaugccugua

SEQ ID NO: 258926 - RNA, 24 nt, Human
ugggcauggugacucaugccugua

SEQ ID NO: 258927 - RNA, 24 nt, Human
ugggcaugguggagcaugccugua

SEQ ID NO: 258928 - RNA, 22 nt, Human
ugggcaugguggcacaugccug

SEQ ID NO: 258929 - RNA, 24 nt, Human
ugggcaugguggcacaugccugua

SEQ ID NO: 258930 - RNA, 24 nt, Human
ugggcaugguggcacgugccugug

SEQ ID NO: 258931 - RNA, 24 nt, Human
ugggcaugguggcaggugccugua

SEQ ID NO: 258932 - RNA, 24 nt, Human
ugggcaugguggcaguugccugua

SEQ ID NO: 258933 - RNA, 24 nt, Human
ugggcaugguggcauauaccugua

SEQ ID NO: 258934 - RNA, 24 nt, Human
ugggcaugguggcaugugccugua

SEQ ID NO: 258935 - RNA, 24 nt, Human
ugggcaugguggcgaaugccugua

SEQ ID NO: 258936 - RNA, 24 nt, Human
ugggcaugguggcgcauaccugua

SEQ ID NO: 258937 - RNA, 24 nt, Human
ugggcaugguggcgcaugccugua

SEQ ID NO: 258938 - RNA, 24 nt, Human
ugggcaugguggcgcgugccugua

SEQ ID NO: 258939 - RNA, 24 nt, Human
ugggcaugguggcgggugccugua

SEQ ID NO: 258940 - RNA, 20 nt, Human
ugggcaugguggcgugccug

SEQ ID NO: 258941 - RNA, 22 nt, Human
ugggcaugguggcgugccugua

SEQ ID NO: 258942 - RNA, 24 nt, Human
ugggcaugguggcucacaccugua

SEQ ID NO: 258943 - RNA, 24 nt, Human
ugggcaugguggcucaccccugua

SEQ ID NO: 258944 - RNA, 24 nt, Human
ugggcaugguggcucacgccugua

SEQ ID NO: 258945 - RNA, 24 nt, Human
ugggcaugguggcucacgccugug

SEQ ID NO: 258946 - RNA, 24 nt, Human
ugggcaugguggcucacgcuugua

SEQ ID NO: 258947 - RNA, 24 nt, Human
ugggcaugguggcucacuccugua

SEQ ID NO: 258948 - RNA, 24 nt, Human
ugggcaugguggcucauaccugua

SEQ ID NO: 258949 - RNA, 21 nt, Human
ugggcaugguggcucaugccu

SEQ ID NO: 258950 - RNA, 24 nt, Human
ugggcaugguggcucaugccugua

SEQ ID NO: 258951 - RNA, 24 nt, Human
ugggcaugguggcucgcgcuugug

SEQ ID NO: 258952 - RNA, 24 nt, Human
ugggcaugguggcucgugccugua

SEQ ID NO: 258953 - RNA, 24 nt, Human
ugggcaugguggcuggcgccugua

SEQ ID NO: 258954 - RNA, 24 nt, Human
ugggcaugguggcuuacgccugua

SEQ ID NO: 258955 - RNA, 24 nt, Human
ugggcaugguggcuuaugccugua

SEQ ID NO: 258956 - RNA, 24 nt, Human
ugggcaugguggggcaugccugua

SEQ ID NO: 258957 - RNA, 24 nt, Human
ugggcaugguggugcaugccugua

SEQ ID NO: 258958 - RNA, 24 nt, Human
ugggcauggugguucaugccugua

SEQ ID NO: 258959 - RNA, 32 nt, Human
ugggcaugucaggguuuggccaugacccgaag

SEQ ID NO: 258960 - RNA, 32 nt, Human
ugggcaugugccugucugagccccaggucugu

SEQ ID NO: 258961 - RNA, 32 nt, Human
ugggcauguggucccagcuacucuggaagcug

SEQ ID NO: 258962 - RNA, 31 nt, Human
ugggcauguuaacauugccuaccucauagga

SEQ ID NO: 258963 - RNA, 32 nt, Human
ugggcauuaggggcaacucaugcagaagaccc

SEQ ID NO: 258964 - RNA, 32 nt, Human
ugggcauuccccgcuuuguugcagagaaauua

SEQ ID NO: 258965 - RNA, 32 nt, Human
ugggcauugccaguaccugccuccaggcauau

SEQ ID NO: 258966 - RNA, 22 nt, Human
ugggcauuucaucuucaguccc

SEQ ID NO: 258967 - RNA, 32 nt, Human
ugggcauuuuccuccucugccuacagccaggu

SEQ ID NO: 258968 - RNA, 32 nt, Human
ugggcauuuucucugcuguuacuuuucugcua

SEQ ID NO: 258969 - RNA, 32 nt, Human
ugggccaaaagauagaucaggacgacagccuu

SEQ ID NO: 258970 - RNA, 32 nt, Human
ugggccaaacuaagcucugacaauuaauguua

SEQ ID NO: 258971 - RNA, 32 nt, Human
ugggccaaaggggcuuggagaggucaaaacau

SEQ ID NO: 258972 - RNA, 32 nt, Human
ugggccaacaugguuaaacccuauuucuacua

SEQ ID NO: 258973 - RNA, 32 nt, Human
ugggccaacguggugaaacccugucucuacuu

SEQ ID NO: 258974 - RNA, 32 nt, Human
ugggccaagcauguacaaauucuauuaauuaa

SEQ ID NO: 258975 - RNA, 32 nt, Human
ugggccaagcucugggggcagguggagagggc

SEQ ID NO: 258976 - RNA, 32 nt, Human
ugggccaaggagcagggagacaggaggcagag

SEQ ID NO: 258977 - RNA, 32 nt, Human
ugggccaaggguggggcugggaagcauccugu

SEQ ID NO: 258978 - RNA, 32 nt, Human
ugggccaaugcaugcuucagggccacacccag

SEQ ID NO: 258979 - RNA, 19 nt, Human
ugggccacacggcugcccc

SEQ ID NO: 258980 - RNA, 23 nt, Human
ugggccacagaggauccagcaag

SEQ ID NO: 258981 - RNA, 32 nt, Human
ugggccacaguuucagcagaccaucaggugaa

SEQ ID NO: 258982 - RNA, 32 nt, Human
ugggccacaguuucaguacuucagccucagug

SEQ ID NO: 258983 - RNA, 32 nt, Human
ugggccaccagcuucccucccuugacucuggg

SEQ ID NO: 258984 - RNA, 32 nt, Human
ugggccaccaggaguucaagaccagcccgggc

SEQ ID NO: 258985 - RNA, 32 nt, Human
ugggccaccaggaucagccaggagggcguucu

SEQ ID NO: 258986 - RNA, 21 nt, Human
ugggccacccagggccucuga

SEQ ID NO: 258987 - RNA, 32 nt, Human
ugggccaccgccuugcccagccuggaugccau

SEQ ID NO: 258988 - RNA, 32 nt, Human
ugggccacgggcugcaaccggagccucggacc

SEQ ID NO: 258989 - RNA, 32 nt, Human
ugggccacgguaaaagcaaacagagcagaacc

SEQ ID NO: 258990 - RNA, 32 nt, Human
ugggccacguguagcugggaggccggcaggac

SEQ ID NO: 258991 - RNA, 32 nt, Human
ugggccacuccaggagcugaguuggguggaag

SEQ ID NO: 258992 - RNA, 32 nt, Human
ugggccacugaggagaggggagagagcuggug

SEQ ID NO: 258993 - RNA, 32 nt, Human
ugggccacugcaaagauuccagccugggucca

SEQ ID NO: 258994 - RNA, 32 nt, Human
ugggccacugcacaucugccucucucagggac

SEQ ID NO: 258995 - RNA, 32 nt, Human
ugggccacugcaccccaccaggacggcaggac

SEQ ID NO: 258996 - RNA, 32 nt, Human
ugggccacugcacuccacccugggcgacagag

SEQ ID NO: 258997 - RNA, 32 nt, Human
ugggccacugcacuccagccuggaugacagag

SEQ ID NO: 258998 - RNA, 32 nt, Human
ugggccacugcacucuagccuggcaacagagc

SEQ ID NO: 258999 - RNA, 32 nt, Human
ugggccacugcagucgagccugggcgacacaa

SEQ ID NO: 259000 - RNA, 19 nt, Human
ugggccacugcccucucca

SEQ ID NO: 259001 - RNA, 23 nt, Human
ugggccacuggaggggucucuga

SEQ ID NO: 259002 - RNA, 32 nt, Human
ugggccacuucuuccccuguagaugugggcuu

SEQ ID NO: 259003 - RNA, 21 nt, Human
ugggccagaagauucugcaaa

SEQ ID NO: 259004 - RNA, 32 nt, Human
ugggccagaggacccuuucugauggacuucag

SEQ ID NO: 259005 - RNA, 23 nt, Human
ugggccagagggggucuuaguaa

SEQ ID NO: 259006 - RNA, 32 nt, Human
ugggccagcacacccagaaagccucacauugu

SEQ ID NO: 259007 - RNA, 32 nt, Human
ugggccagcauucucaugggguagagcagaau

SEQ ID NO: 259008 - RNA, 32 nt, Human
ugggccagccucccgaguuccaggagcgaauu

SEQ ID NO: 259009 - RNA, 32 nt, Human
ugggccagcugccugugccugccaugggccag

SEQ ID NO: 259010 - RNA, 32 nt, Human
ugggccagcuuauguaaugucuuuuuggauaa

SEQ ID NO: 259011 - RNA, 32 nt, Human
ugggccaggacugacuuccuccccacacaggg

SEQ ID NO: 259012 - RNA, 32 nt, Human
ugggccaggagaaggugauucucuucuaugcc

SEQ ID NO: 259013 - RNA, 32 nt, Human
ugggccaggaggagcugaggcugcagacccca

SEQ ID NO: 259014 - RNA, 32 nt, Human
ugggccaggaguucaagaucagccuggccaac

SEQ ID NO: 259015 - RNA, 32 nt, Human
ugggccaggaguuuaagaucagccuggccaac

SEQ ID NO: 259016 - RNA, 32 nt, Human
ugggccaggaguuugagaccagccuggccaac

SEQ ID NO: 259017 - RNA, 27 nt, Human
ugggccaggccuaaacaggagcaccug

SEQ ID NO: 259018 - RNA, 32 nt, Human
ugggccaggcugcaccugugcugggggaaggu

SEQ ID NO: 259019 - RNA, 32 nt, Human
ugggccaggcugcucagacuccuggguggcuu

SEQ ID NO: 259020 - RNA, 32 nt, Human
ugggccaggcuucaguucaggccuguugcuua

SEQ ID NO: 259021 - RNA, 32 nt, Human
ugggccaggucaguaaccagcccugcagcaca

SEQ ID NO: 259022 - RNA, 32 nt, Human
ugggccagguccuucacgaggagggagcuacc

SEQ ID NO: 259023 - RNA, 32 nt, Human
ugggccagucccagagaguuaggaagucaagg

SEQ ID NO: 259024 - RNA, 32 nt, Human
ugggccagugccucugccaaguccgaggagga

SEQ ID NO: 259025 - RNA, 32 nt, Human
ugggccagugucaggccagcaggugcagggac

SEQ ID NO: 259026 - RNA, 21 nt, Human
ugggccauagcuccugcucca

SEQ ID NO: 259027 - RNA, 32 nt, Human
ugggccauccccauagccauguuuacaugauu

SEQ ID NO: 259028 - RNA, 32 nt, Human
ugggccaucgccgcagcacaggcagcggcggc

SEQ ID NO: 259029 - RNA, 32 nt, Human
ugggccaugccaggccagagcaguggcccucc

SEQ ID NO: 259030 - RNA, 32 nt, Human
ugggccaugcuggucugacuuaugcuuacuaa

SEQ ID NO: 259031 - RNA, 32 nt, Human
ugggccaugggccccuguagagcugcuuaccu

SEQ ID NO: 259032 - RNA, 32 nt, Human
ugggccaugugacccaaggagggauccuuacc

SEQ ID NO: 259033 - RNA, 32 nt, Human
ugggccauugauagcaucucccaggaacaacg

SEQ ID NO: 259034 - RNA, 21 nt, Human
ugggccauugcaaccaaaaug

SEQ ID NO: 259035 - RNA, 32 nt, Human
ugggccauugggccuggaaaacgugcucugac

SEQ ID NO: 259036 - RNA, 32 nt, Human
ugggcccaaaaacaagcaaaaccaaagaauau

SEQ ID NO: 259037 - RNA, 32 nt, Human
ugggcccaagaguucgagaccagccugggcaa

SEQ ID NO: 259038 - RNA, 32 nt, Human
ugggcccaagcaauucucccaccucagccucc

SEQ ID NO: 259039 - RNA, 32 nt, Human
ugggcccaaggcacagccagggcacaguuagg

SEQ ID NO: 259040 - RNA, 31 nt, Human
ugggcccaagugucgauucaggaaggguguc

SEQ ID NO: 259041 - RNA, 32 nt, Human
ugggcccaauccagaagagacugcucuugaaa

SEQ ID NO: 259042 - RNA, 32 nt, Human
ugggcccacaaccgaagacauucuuuucaggg

SEQ ID NO: 259043 - RNA, 28 nt, Human
ugggcccacacugcugccuucucccagg

SEQ ID NO: 259044 - RNA, 32 nt, Human
ugggcccaccuagccuuucccugcugcccaac

SEQ ID NO: 259045 - RNA, 32 nt, Human
ugggcccaccucugccuccacccucacugugu

SEQ ID NO: 259046 - RNA, 32 nt, Human
ugggcccacuacucauagcagcuccugaggca

SEQ ID NO: 259047 - RNA, 32 nt, Human
ugggcccagagacagcccugggcugcuccuau

SEQ ID NO: 259048 - RNA, 32 nt, Human
ugggcccagccggccucacacucauucagcag

SEQ ID NO: 259049 - RNA, 32 nt, Human
ugggcccagccggccucacacucauucagcgg

SEQ ID NO: 259050 - RNA, 32 nt, Human
ugggcccagccuagggcaucccgggccugggc

SEQ ID NO: 259051 - RNA, 32 nt, Human
ugggcccagcgcagugccucgugccugugauc

SEQ ID NO: 259052 - RNA, 32 nt, Human
ugggcccaggagauggagguugcggugagugg

SEQ ID NO: 259053 - RNA, 32 nt, Human
ugggcccaggaggcagcuggguugcauggaga

SEQ ID NO: 259054 - RNA, 32 nt, Human
ugggcccaggaggucaagccugcagcgagcug

SEQ ID NO: 259055 - RNA, 32 nt, Human
ugggcccaggaggucgaggcugcggugagcca

SEQ ID NO: 259056 - RNA, 32 nt, Human
ugggcccaggagguggagguugcagugagccg

SEQ ID NO: 259057 - RNA, 32 nt, Human
ugggcccaggaguucaaggccagccugggcaa

SEQ ID NO: 259058 - RNA, 32 nt, Human
ugggcccaggcagggcuggggugugcuggcau

SEQ ID NO: 259059 - RNA, 32 nt, Human
ugggcccaggcugagugugagugagcauguca

SEQ ID NO: 259060 - RNA, 32 nt, Human
ugggcccagggcaaaggccucuccccagagga

SEQ ID NO: 259061 - RNA, 32 nt, Human
ugggcccagggcggcggcgggagaagccgggg

SEQ ID NO: 259062 - RNA, 22 nt, Human
ugggcccagggcucuaccugua

SEQ ID NO: 259063 - RNA, 32 nt, Human
ugggcccaggguggcuggcaggagucccagcu

SEQ ID NO: 259064 - RNA, 32 nt, Human
ugggcccaguugggagcucauaucuaacacag

SEQ ID NO: 259065 - RNA, 21 nt, Human
ugggcccauaaacaacaggag

SEQ ID NO: 259066 - RNA, 32 nt, Human
ugggcccauugucccccgcccuggguggcuuc

SEQ ID NO: 259067 - RNA, 32 nt, Human
ugggccccacagagaguccuugugcucagugc

SEQ ID NO: 259068 - RNA, 32 nt, Human
ugggccccacagaguccuugugcucaguguag

SEQ ID NO: 259069 - RNA, 32 nt, Human
ugggccccacuccagaccaagagcagaccauu

SEQ ID NO: 259070 - RNA, 32 nt, Human
ugggccccagcaccuggacucaaggcaguagc

SEQ ID NO: 259071 - RNA, 32 nt, Human
ugggccccaggcagaggaaggccgggagaagg

SEQ ID NO: 259072 - RNA, 32 nt, Human
ugggccccagugagaggggcaggggcagggcc

SEQ ID NO: 259073 - RNA, 32 nt, Human
ugggccccaucagcagagccaccaagagucca

SEQ ID NO: 259074 - RNA, 32 nt, Human
ugggccccaucagcagagccaccaagaguccg

SEQ ID NO: 259075 - RNA, 32 nt, Human
ugggccccaucuuccggcggucgccggaguuu

SEQ ID NO: 259076 - RNA, 32 nt, Human
ugggcccccacuguccccaggccucagaugcu

SEQ ID NO: 259077 - RNA, 32 nt, Human
ugggcccccacuguccccaggccucagcaagg

SEQ ID NO: 259078 - RNA, 32 nt, Human
ugggcccccagccuggccagacaagacgacug

SEQ ID NO: 259079 - RNA, 32 nt, Human
ugggcccccagccuguagggaacuuucuggac

SEQ ID NO: 259080 - RNA, 32 nt, Human
ugggcccccaggagacugaggucuuccugggc

SEQ ID NO: 259081 - RNA, 25 nt, Human
ugggcccccaugccacagucuggcu

SEQ ID NO: 259082 - RNA, 32 nt, Human
ugggcccccggcggaggugggagagagucagg

SEQ ID NO: 259083 - RNA, 32 nt, Human
ugggccccggagguagagguugcagugagcug

SEQ ID NO: 259084 - RNA, 32 nt, Human
ugggccccuaccaggaucagcacuccacuggc

SEQ ID NO: 259085 - RNA, 23 nt, Human
ugggccccucagaaagucgagcu

SEQ ID NO: 259086 - RNA, 21 nt, Human
ugggccccuccaggcucaguu

SEQ ID NO: 259087 - RNA, 32 nt, Human
ugggccccucucucccugaaggggcuuugugg

SEQ ID NO: 259088 - RNA, 32 nt, Human
ugggccccucucugucccaccuugcacaaagg

SEQ ID NO: 259089 - RNA, 32 nt, Human
ugggccccugccaucgggcuccagaaacuacc

SEQ ID NO: 259090 - RNA, 20 nt, Human
ugggccccugcucucuaguu

SEQ ID NO: 259091 - RNA, 32 nt, Human
ugggccccugcucuucccaaagcugcccccaa

SEQ ID NO: 259092 - RNA, 32 nt, Human
ugggccccugcucuucccgagagcugccccca

SEQ ID NO: 259093 - RNA, 32 nt, Human
ugggccccuguaaucccagcuacucgggaggu

SEQ ID NO: 259094 - RNA, 32 nt, Human
ugggccccuguaaucccagcuacuugggaggc

SEQ ID NO: 259095 - RNA, 23 nt, Human
ugggccccuguccccagucccca

SEQ ID NO: 259096 - RNA, 19 nt, Human
ugggccccugucuuccagc

SEQ ID NO: 259097 - RNA, 32 nt, Human
ugggccccuuccccaccagaccuuuguagcuc

SEQ ID NO: 259098 - RNA, 32 nt, Human
ugggcccgcggaggaggacgugguggggaguc

SEQ ID NO: 259099 - RNA, 32 nt, Human
ugggcccggaggcugagacuaaggcuuucgac

SEQ ID NO: 259100 - RNA, 32 nt, Human
ugggcccgggaggcagagguugcagugagccg

SEQ ID NO: 259101 - RNA, 32 nt, Human
ugggcccgggaggucaagguugcagugagcug

SEQ ID NO: 259102 - RNA, 32 nt, Human
ugggcccgggagguggagguugcagugagcug

SEQ ID NO: 259103 - RNA, 32 nt, Human
ugggcccgggagguggagguugcagugaguca

SEQ ID NO: 259104 - RNA, 32 nt, Human
ugggcccgggaguuugaaguugcagugagcua

SEQ ID NO: 259105 - RNA, 24 nt, Human
ugggcccgguggcucaugccugua

SEQ ID NO: 259106 - RNA, 32 nt, Human
ugggcccgugagccacucggccucaggucgcu

SEQ ID NO: 259107 - RNA, 32 nt, Human
ugggcccgugcagagaaggcaccugcagagag

SEQ ID NO: 259108 - RNA, 20 nt, Human
ugggcccuaagguacucuga

SEQ ID NO: 259109 - RNA, 32 nt, Human
ugggcccuacagccucacuuccccagccucac

SEQ ID NO: 259110 - RNA, 32 nt, Human
ugggcccuacuacccugaacacugccucccca

SEQ ID NO: 259111 - RNA, 23 nt, Human
ugggcccuacucugcaccucuga

SEQ ID NO: 259112 - RNA, 32 nt, Human
ugggcccuacugcccuccucugcccaggaaau

SEQ ID NO: 259113 - RNA, 31 nt, Human
ugggcccucaguaaauaccuggaggaaugug

SEQ ID NO: 259114 - RNA, 32 nt, Human
ugggcccucaguguauguuuaagcucaggcug

SEQ ID NO: 259115 - RNA, 28 nt, Human
ugggcccucaucagucgacgucagagaa

SEQ ID NO: 259116 - RNA, 32 nt, Human
ugggcccucccugagggucuggggucaggcuu

SEQ ID NO: 259117 - RNA, 32 nt, Human
ugggcccuccuggagccugccugcuccccagg

SEQ ID NO: 259118 - RNA, 32 nt, Human
ugggcccucggugccugcugugaacugcuuuc

SEQ ID NO: 259119 - RNA, 32 nt, Human
ugggcccucucagcaggggaggguagagcgga

SEQ ID NO: 259120 - RNA, 24 nt, Human
ugggcccucuccagggggccaguu

SEQ ID NO: 259121 - RNA, 32 nt, Human
ugggcccucucccauccagugucucacagccc

SEQ ID NO: 259122 - RNA, 32 nt, Human
ugggcccugaaggagcugagagggagcucaac

SEQ ID NO: 259123 - RNA, 17 nt, Human
ugggcccugagggccuc

SEQ ID NO: 259124 - RNA, 32 nt, Human
ugggcccugcagcuuucuaacuugccgggagg

SEQ ID NO: 259125 - RNA, 32 nt, Human
ugggcccugcaggcugcaggagggcacuggag

SEQ ID NO: 259126 - RNA, 32 nt, Human
ugggcccugccucuccaugccuguaggagcug

SEQ ID NO: 259127 - RNA, 32 nt, Human
ugggcccugccuggagugugugccgccuucuc

SEQ ID NO: 259128 - RNA, 32 nt, Human
ugggcccugcugcucucucaggaccauccgau

SEQ ID NO: 259129 - RNA, 32 nt, Human
ugggcccugcugucacguggcuggugcggcuu

SEQ ID NO: 259130 - RNA, 32 nt, Human
ugggcccuggggacccaugggagggggcugcu

SEQ ID NO: 259131 - RNA, 32 nt, Human
ugggcccuggggagcaagaagguaggguugca

SEQ ID NO: 259132 - RNA, 32 nt, Human
ugggcccuggggaugagccacaggggacccac

SEQ ID NO: 259133 - RNA, 32 nt, Human
ugggcccugggucugggaaguacucugaugag

SEQ ID NO: 259134 - RNA, 32 nt, Human
ugggcccuggucccagucccugccuggggcca

SEQ ID NO: 259135 - RNA, 32 nt, Human
ugggcccugucgccccuccuuuuggccugggg

SEQ ID NO: 259136 - RNA, 32 nt, Human
ugggcccugugcaugcugguggccucagggac

SEQ ID NO: 259137 - RNA, 32 nt, Human
ugggcccuguggccuugggccuagagaaggga

SEQ ID NO: 259138 - RNA, 32 nt, Human
ugggcccuuagggucugcuuagcucuucccca

SEQ ID NO: 259139 - RNA, 32 nt, Human
ugggcccuucccugcuauccuuuuucuccuuu

SEQ ID NO: 259140 - RNA, 22 nt, Human
ugggcccuucuucacccugaug

SEQ ID NO: 259141 - RNA, 32 nt, Human
ugggcccuucuuuccuggacuuuguggaggag

SEQ ID NO: 259142 - RNA, 32 nt, Human
ugggcccuugccucuaaauagcacuuuuuggg

SEQ ID NO: 259143 - RNA, 23 nt, Human
ugggcccuuggccagaguccacu

SEQ ID NO: 259144 - RNA, 32 nt, Human
ugggcccuuggucuggacugaauugcccaagc

SEQ ID NO: 259145 - RNA, 32 nt, Human
ugggccgagcaguggcagcagagaguggccuc

SEQ ID NO: 259146 - RNA, 32 nt, Human
ugggccgcaacuuccgagccucccagggcgcc

SEQ ID NO: 259147 - RNA, 32 nt, Human
ugggccgcagccgccgccgcgaugcccaguaa

SEQ ID NO: 259148 - RNA, 32 nt, Human
ugggccgcagugagugggggcaccagugauuc

SEQ ID NO: 259149 - RNA, 32 nt, Human
ugggccgcuagcgguccuccaguucgggcccg

SEQ ID NO: 259150 - RNA, 32 nt, Human
ugggccgcugccuucgcuuucucuucguuguu

SEQ ID NO: 259151 - RNA, 32 nt, Human
ugggccgcugggacgcgguggguguggagcag

SEQ ID NO: 259152 - RNA, 32 nt, Human
ugggccggaacuggagugaggggcacagagug

SEQ ID NO: 259153 - RNA, 20 nt, Human
ugggccggaugaguugugcu

SEQ ID NO: 259154 - RNA, 16 nt, Human
ugggccggcccucaca

SEQ ID NO: 259155 - RNA, 32 nt, Human
ugggccggcuccuuauuuuccugggcugagcc

SEQ ID NO: 259156 - RNA, 32 nt, Human
ugggccgggcgggccccugggagcagccccca

SEQ ID NO: 259157 - RNA, 32 nt, Human
ugggccgggcugggaugucaucuccugccggg

SEQ ID NO: 259158 - RNA, 32 nt, Human
ugggccgguaucuccggcagcuggcacgccau

SEQ ID NO: 259159 - RNA, 32 nt, Human
ugggccggucggggagggggaggcgggauggg

SEQ ID NO: 259160 - RNA, 32 nt, Human
ugggccggugaauuccguguaguggccaagcu

SEQ ID NO: 259161 - RNA, 32 nt, Human
ugggccgugcacucagcccugcccugugcagu

SEQ ID NO: 259162 - RNA, 32 nt, Human
ugggccgugccugcccuccaccuugagugcca

SEQ ID NO: 259163 - RNA, 32 nt, Human
ugggccguggaggugggggcgguggugcugga

SEQ ID NO: 259164 - RNA, 32 nt, Human
ugggccguuggagucugacugcaucuccuguu

SEQ ID NO: 259165 - RNA, 32 nt, Human
ugggccuaagccucgggugggagcucagggcc

SEQ ID NO: 259166 - RNA, 32 nt, Human
ugggccuagaaagccaagugcaaagaugaggg

SEQ ID NO: 259167 - RNA, 22 nt, Human
ugggccuagugggccucuggug

SEQ ID NO: 259168 - RNA, 32 nt, Human
ugggccuaucaggaggacacaggcugcagccu

SEQ ID NO: 259169 - RNA, 32 nt, Human
ugggccuaugaugacccacagaugacucagua

SEQ ID NO: 259170 - RNA, 22 nt, Human
ugggccucaaaauaccauagua

SEQ ID NO: 259171 - RNA, 32 nt, Human
ugggccucaaagccgggcaccagacgggaggg

SEQ ID NO: 259172 - RNA, 21 nt, Human
ugggccucaacgggaaccuga

SEQ ID NO: 259173 - RNA, 20 nt, Human
ugggccucaauguucucauu

SEQ ID NO: 259174 - RNA, 24 nt, Human
ugggccucagucuucccaucugua

SEQ ID NO: 259175 - RNA, 24 nt, Human
ugggccucagugugcccaucugua

SEQ ID NO: 259176 - RNA, 32 nt, Human
ugggccucaguuaugggcagaugagugagucu

SEQ ID NO: 259177 - RNA, 24 nt, Human
ugggccucaguuuccccaucugua

SEQ ID NO: 259178 - RNA, 21 nt, Human
ugggccucaucguucuuguca

SEQ ID NO: 259179 - RNA, 32 nt, Human
ugggccucaugaagaaucacacugcuugugaa

SEQ ID NO: 259180 - RNA, 32 nt, Human
ugggccuccagguggaggcgggcugaugcugg

SEQ ID NO: 259181 - RNA, 22 nt, Human
ugggccuccaugaugucaggaa

SEQ ID NO: 259182 - RNA, 32 nt, Human
ugggccucccaaaaugcugggauuacaggcau

SEQ ID NO: 259183 - RNA, 32 nt, Human
ugggccucccaaaguacugggauuacaggcau

SEQ ID NO: 259184 - RNA, 32 nt, Human
ugggccucccaaagugcuaggauuacagacau

SEQ ID NO: 259185 - RNA, 32 nt, Human
ugggccucccaaagugcuaggauuacaggcau

SEQ ID NO: 259186 - RNA, 32 nt, Human
ugggccucccaaagugcugggauuacaggagu

SEQ ID NO: 259187 - RNA, 32 nt, Human
ugggccucccaaagugcugggauuacaggcau

SEQ ID NO: 259188 - RNA, 32 nt, Human
ugggccucccaaagugcugggauuacaggcgu

SEQ ID NO: 259189 - RNA, 32 nt, Human
ugggccucccaaagugcugggauuacaggugu

SEQ ID NO: 259190 - RNA, 32 nt, Human
ugggccucccaaaguguugggauuacaggcgu

SEQ ID NO: 259191 - RNA, 32 nt, Human
ugggccucccacagugcugggauuacaggcgu

SEQ ID NO: 259192 - RNA, 24 nt, Human
ugggccuccgccggcuacgccgcu

SEQ ID NO: 259193 - RNA, 20 nt, Human
ugggccuccgccuaccagcu

SEQ ID NO: 259194 - RNA, 32 nt, Human
ugggccuccucaccaacggcagugccaaaauc

SEQ ID NO: 259195 - RNA, 32 nt, Human
ugggccuccuggaaggagguggccaccccgcg

SEQ ID NO: 259196 - RNA, 32 nt, Human
ugggccuccugggagguguccuccagccucuc

SEQ ID NO: 259197 - RNA, 32 nt, Human
ugggccucgucuccccuucaagcccccggccu

SEQ ID NO: 259198 - RNA, 32 nt, Human
ugggccucucagagggcucuucugccaucccu

SEQ ID NO: 259199 - RNA, 32 nt, Human
ugggccucuccugcccaccucuacuucucugu

SEQ ID NO: 259200 - RNA, 24 nt, Human
ugggccucugacucugaguccacu

SEQ ID NO: 259201 - RNA, 32 nt, Human
ugggccucugcucacaccugggaaggggcucu

SEQ ID NO: 259202 - RNA, 32 nt, Human
ugggccucugcucucuugccuggcuuccuucu

SEQ ID NO: 259203 - RNA, 32 nt, Human
ugggccugagguccucccucugaaaugcagag

SEQ ID NO: 259204 - RNA, 32 nt, Human
ugggccugagucuuggcacgaguguccuggcc

SEQ ID NO: 259205 - RNA, 32 nt, Human
ugggccugagugagaggggaggccaagagugg

SEQ ID NO: 259206 - RNA, 32 nt, Human
ugggccugcacacuccagcccaaagggucugu

SEQ ID NO: 259207 - RNA, 32 nt, Human
ugggccugcagcagacucaaggcuccgagugc

SEQ ID NO: 259208 - RNA, 32 nt, Human
ugggccugcagcucccuucuccugggacuuag

SEQ ID NO: 259209 - RNA, 32 nt, Human
ugggccugcagucccagcuaccugggaggcug

SEQ ID NO: 259210 - RNA, 32 nt, Human
ugggccugccuccugggcugguuccugggucc

SEQ ID NO: 259211 - RNA, 32 nt, Human
ugggccugcuccagaccugauccuggaggccc

SEQ ID NO: 259212 - RNA, 32 nt, Human
ugggccugcuccccgcuuccuccccuucaguc

SEQ ID NO: 259213 - RNA, 32 nt, Human
ugggccugcugccucuucccacucuacaccuu

SEQ ID NO: 259214 - RNA, 32 nt, Human
ugggccugcuggagcugcugcagccgcacgug

SEQ ID NO: 259215 - RNA, 32 nt, Human
ugggccugcugggaggaggagggggaagagga

SEQ ID NO: 259216 - RNA, 32 nt, Human
ugggccuggaaccgggccgcagucccacagcu

SEQ ID NO: 259217 - RNA, 32 nt, Human
ugggccuggaagaccaucccagccucugaguu

SEQ ID NO: 259218 - RNA, 32 nt, Human
ugggccuggcaggacuccagaugaggacaaga

SEQ ID NO: 259219 - RNA, 32 nt, Human
ugggccuggccgugcugccucuccugaguagg

SEQ ID NO: 259220 - RNA, 29 nt, Human
ugggccuggcugcacagcauccuccucug

SEQ ID NO: 259221 - RNA, 32 nt, Human
ugggccuggcuuuccagacuccuggcucuggc

SEQ ID NO: 259222 - RNA, 32 nt, Human
ugggccugggacuucugccucugccgccucca

SEQ ID NO: 259223 - RNA, 32 nt, Human
ugggccugggagacacacagaggccaggccuu

SEQ ID NO: 259224 - RNA, 32 nt, Human
ugggccugggaggcauagguugcagugagccg

SEQ ID NO: 259225 - RNA, 32 nt, Human
ugggccugggaggcggagguugcagugagccg

SEQ ID NO: 259226 - RNA, 32 nt, Human
ugggccugggaggucgaggcugcagugagcug

SEQ ID NO: 259227 - RNA, 32 nt, Human
ugggccugggcaaugggaaggagccagaaaug

SEQ ID NO: 259228 - RNA, 32 nt, Human
ugggccugggccggcccugcucugggcccgug

SEQ ID NO: 259229 - RNA, 32 nt, Human
ugggccugggcugggcuggggcuaggagggca

SEQ ID NO: 259230 - RNA, 32 nt, Human
ugggccugggcugggugggccugggcagcugg

SEQ ID NO: 259231 - RNA, 32 nt, Human
ugggccugggcugugggucuggcagacagacc

SEQ ID NO: 259232 - RNA, 32 nt, Human
ugggccugggggcugggcuggaccagggcgug

SEQ ID NO: 259233 - RNA, 32 nt, Human
ugggccuguccgcuggcgucauggcaccgaaa

SEQ ID NO: 259234 - RNA, 32 nt, Human
ugggccuguggacugcagccucggcgaucaga

SEQ ID NO: 259235 - RNA, 32 nt, Human
ugggccuuagcaccugcagugccucaaagccc

SEQ ID NO: 259236 - RNA, 32 nt, Human
ugggccuuagcuccucccugggcuugguagag

SEQ ID NO: 259237 - RNA, 32 nt, Human
ugggccuucagaauuaauggccagcaguguca

SEQ ID NO: 259238 - RNA, 32 nt, Human
ugggccuucaguggaugggcagugccacucag

SEQ ID NO: 259239 - RNA, 32 nt, Human
ugggccuucauguaaggaggcuggguggugag

SEQ ID NO: 259240 - RNA, 32 nt, Human
ugggccuuccccuguuacucagccucugacac

SEQ ID NO: 259241 - RNA, 21 nt, Human
ugggccuuccgaggccucuga

SEQ ID NO: 259242 - RNA, 32 nt, Human
ugggccuuccugguccccuccuuggcugcggu

SEQ ID NO: 259243 - RNA, 32 nt, Human
ugggccuucgaccucggaccuccgucuuccag

SEQ ID NO: 259244 - RNA, 18 nt, Human
ugggccuucucucuccca

SEQ ID NO: 259245 - RNA, 23 nt, Human
ugggccuucuuagaggguucagu

SEQ ID NO: 259246 - RNA, 32 nt, Human
ugggccuucuuagaggguucagucuaggaccc

SEQ ID NO: 259247 - RNA, 32 nt, Human
ugggccuugcccucccccucccagcccagggu

SEQ ID NO: 259248 - RNA, 32 nt, Human
ugggccuugcugcugcugcacccaacuacuga

SEQ ID NO: 259249 - RNA, 32 nt, Human
ugggccuugugaggcuguagugugucagcaca

SEQ ID NO: 259250 - RNA, 32 nt, Human
ugggccuuuccagagaacugcagaccucacug

SEQ ID NO: 259251 - RNA, 32 nt, Human
ugggccuuucccucucuuaucccugagggugg

SEQ ID NO: 259252 - RNA, 32 nt, Human
ugggccuuucuuucuuuucuucuccucuggga

SEQ ID NO: 259253 - RNA, 32 nt, Human
ugggcgaacagcccccuccucaccgcccgccg

SEQ ID NO: 259254 - RNA, 32 nt, Human
ugggcgaaggaggacauccucacuggacgagc

SEQ ID NO: 259255 - RNA, 32 nt, Human
ugggcgacagagcaagagacccugacuaaaac

SEQ ID NO: 259256 - RNA, 32 nt, Human
ugggcgacagagugagacuccaucucuaaaaa

SEQ ID NO: 259257 - RNA, 32 nt, Human
ugggcgacaggcugcucagugucgauggaauc

SEQ ID NO: 259258 - RNA, 32 nt, Human
ugggcgacgacgagacggacagugauguccag

SEQ ID NO: 259259 - RNA, 32 nt, Human
ugggcgacgaugagacggacagugauguccag

SEQ ID NO: 259260 - RNA, 32 nt, Human
ugggcgaggaggcguuuccacccccuggugcc

SEQ ID NO: 259261 - RNA, 32 nt, Human
ugggcgaucugcaggucuggaugaaggagccc

SEQ ID NO: 259262 - RNA, 32 nt, Human
ugggcgcaccugcugcucagggcaggguugcu

SEQ ID NO: 259263 - RNA, 32 nt, Human
ugggcgcagcaggcacgggccuggugggacua

SEQ ID NO: 259264 - RNA, 24 nt, Human
ugggcgcaguggcucacaccugua

SEQ ID NO: 259265 - RNA, 22 nt, Human
ugggcgcaguggcucaccugua

SEQ ID NO: 259266 - RNA, 24 nt, Human
ugggcgcaguggcucacgccugua

SEQ ID NO: 259267 - RNA, 24 nt, Human
ugggcgcaguggcucacgcuugua

SEQ ID NO: 259268 - RNA, 24 nt, Human
ugggcgcaguggcucaugccugua

SEQ ID NO: 259269 - RNA, 24 nt, Human
ugggcgcaguggcuuacaccugua

SEQ ID NO: 259270 - RNA, 24 nt, Human
ugggcgcaguggcuuacgccugua

SEQ ID NO: 259271 - RNA, 32 nt, Human
ugggcgccagggacacagcagugaauagaaca

SEQ ID NO: 259272 - RNA, 32 nt, Human
ugggcgccaguucuccacaaccacagggcaga

SEQ ID NO: 259273 - RNA, 32 nt, Human
ugggcgcccccggcggcgugugaauggcggcc

SEQ ID NO: 259274 - RNA, 32 nt, Human
ugggcgcccugagaccacucgcugcucucacc

SEQ ID NO: 259275 - RNA, 24 nt, Human
ugggcgccguggcucacaccugua

SEQ ID NO: 259276 - RNA, 21 nt, Human
ugggcgccucuuuccuuucuc

SEQ ID NO: 259277 - RNA, 18 nt, Human
ugggcgccuguaauccca

SEQ ID NO: 259278 - RNA, 32 nt, Human
ugggcgccuguaaucccagcuacucaggagaa

SEQ ID NO: 259279 - RNA, 32 nt, Human
ugggcgccuguaaucccagcuacucaggagac

SEQ ID NO: 259280 - RNA, 32 nt, Human
ugggcgccuguaaucccagcuacucaggaggc

SEQ ID NO: 259281 - RNA, 32 nt, Human
ugggcgccuguaaucccagcuacucgggaggc

SEQ ID NO: 259282 - RNA, 32 nt, Human
ugggcgccuguaaucccagcuacucgggaggu

SEQ ID NO: 259283 - RNA, 32 nt, Human
ugggcgccuguaaucccagcuacuggggaggc

SEQ ID NO: 259284 - RNA, 32 nt, Human
ugggcgccuguaaucccagcuacuugggaggc

SEQ ID NO: 259285 - RNA, 32 nt, Human
ugggcgccuguaaucccagcugcucaggagac

SEQ ID NO: 259286 - RNA, 32 nt, Human
ugggcgccuguaaucccagcugcucaggaggc

SEQ ID NO: 259287 - RNA, 32 nt, Human
ugggcgccuguaaucccaguuacucgggaggc

SEQ ID NO: 259288 - RNA, 32 nt, Human
ugggcgccuguaaucucagcuacuugggaggc

SEQ ID NO: 259289 - RNA, 32 nt, Human
ugggcgcgaccacuaacccgguuaaugaccuc

SEQ ID NO: 259290 - RNA, 32 nt, Human
ugggcgcgauggcggaggcuguacugaggguc

SEQ ID NO: 259291 - RNA, 32 nt, Human
ugggcgcgcgggagcugggaggcugcgagauc

SEQ ID NO: 259292 - RNA, 32 nt, Human
ugggcgcggccauguuggaggcuccgggcccg

SEQ ID NO: 259293 - RNA, 22 nt, Human
ugggcgcgggaaucccggcgga

SEQ ID NO: 259294 - RNA, 24 nt, Human
ugggcgcggugacucaugccugua

SEQ ID NO: 259295 - RNA, 24 nt, Human
ugggcgcgguggcgcaugccugua

SEQ ID NO: 259296 - RNA, 24 nt, Human
ugggcgcgguggcucacaccugua

SEQ ID NO: 259297 - RNA, 23 nt, Human
ugggcgcgguggcucacgccugu

SEQ ID NO: 259298 - RNA, 24 nt, Human
ugggcgcgguggcucacgccugua

SEQ ID NO: 259299 - RNA, 24 nt, Human
ugggcgcgguggcucacgcuugua

SEQ ID NO: 259300 - RNA, 24 nt, Human
ugggcgcgguggcucaugccugua

SEQ ID NO: 259301 - RNA, 24 nt, Human
ugggcgcgguggcucaugcuugua

SEQ ID NO: 259302 - RNA, 24 nt, Human
ugggcgcgguggcucgggccugua

SEQ ID NO: 259303 - RNA, 24 nt, Human
ugggcgcgguggcucuugccugua

SEQ ID NO: 259304 - RNA, 24 nt, Human
ugggcgcgguggcuuacgccugua

SEQ ID NO: 259305 - RNA, 24 nt, Human
ugggcgcgguggugcaugccugua

SEQ ID NO: 259306 - RNA, 24 nt, Human
ugggcgcggugguucacgccugua

SEQ ID NO: 259307 - RNA, 19 nt, Human
ugggcgcucagugacaagg

SEQ ID NO: 259308 - RNA, 32 nt, Human
ugggcgcuccucuccccuacagcagcccccuu

SEQ ID NO: 259309 - RNA, 32 nt, Human
ugggcgcugcagcugcucccggcgcguccccg

SEQ ID NO: 259310 - RNA, 32 nt, Human
ugggcgcugcgcggacucgcccccaggaaacg

SEQ ID NO: 259311 - RNA, 32 nt, Human
ugggcgcugcuugcuaaagagccgagcacgcg

SEQ ID NO: 259312 - RNA, 32 nt, Human
ugggcgcugucccuucucuuucccaggagccc

SEQ ID NO: 259313 - RNA, 32 nt, Human
ugggcggaaggggacuucgggagccaguagcc

SEQ ID NO: 259314 - RNA, 32 nt, Human
ugggcggacgcgugggcucugggagugugaaa

SEQ ID NO: 259315 - RNA, 32 nt, Human
ugggcggacuugagaguguccuccgcuucuga

SEQ ID NO: 259316 - RNA, 32 nt, Human
ugggcggagccccagccgcuagugcugguggc

SEQ ID NO: 259317 - RNA, 32 nt, Human
ugggcggaggcggaagcggaaguggcgagaaa

SEQ ID NO: 259318 - RNA, 32 nt, Human
ugggcggaggcugaggaccccagggugggagg

SEQ ID NO: 259319 - RNA, 32 nt, Human
ugggcggagggaggaaggaugggugcggguaa

SEQ ID NO: 259320 - RNA, 32 nt, Human
ugggcggaggugggcaggaugugagagguggg

SEQ ID NO: 259321 - RNA, 32 nt, Human
ugggcggauauuuucauaugaucccucccuca

SEQ ID NO: 259322 - RNA, 23 nt, Human
ugggcggauugcuugaggucagg

SEQ ID NO: 259323 - RNA, 32 nt, Human
ugggcggcaccacugggaacucuggacuugag

SEQ ID NO: 259324 - RNA, 32 nt, Human
ugggcggccagccagcccuggggcccauugcc

SEQ ID NO: 259325 - RNA, 32 nt, Human
ugggcggcucauggugccacagccccuggcag

SEQ ID NO: 259326 - RNA, 32 nt, Human
ugggcggcugaaagcuggaggggccaagacug

SEQ ID NO: 259327 - RNA, 32 nt, Human
ugggcggcuucccggcugaccacaguggcuug

SEQ ID NO: 259328 - RNA, 32 nt, Human
ugggcggcuuugaccgagaggcugcuggagcu

SEQ ID NO: 259329 - RNA, 32 nt, Human
ugggcgggaugagacaaaaggagggaugaaac

SEQ ID NO: 259330 - RNA, 32 nt, Human
ugggcgggcuaccucugagaacggcugaaaug

SEQ ID NO: 259331 - RNA, 32 nt, Human
ugggcggggagaagauagggaacacucauccc

SEQ ID NO: 259332 - RNA, 20 nt, Human
ugggcggggagcucggcaaa

SEQ ID NO: 259333 - RNA, 32 nt, Human
ugggcggggccugcccuacagugagcagccca

SEQ ID NO: 259334 - RNA, 32 nt, Human
ugggcgggggaugacucacagcccaucccauc

SEQ ID NO: 259335 - RNA, 32 nt, Human
ugggcggguagcagugcugggccugugucuug

SEQ ID NO: 259336 - RNA, 32 nt, Human
ugggcgggugugagccauugcgcccagccuug

SEQ ID NO: 259337 - RNA, 32 nt, Human
ugggcgguagaggggagguugggguuggagca

SEQ ID NO: 259338 - RNA, 24 nt, Human
ugggcguaguggcucacaccugua

SEQ ID NO: 259339 - RNA, 21 nt, Human
ugggcguaguggcucaugccu

SEQ ID NO: 259340 - RNA, 24 nt, Human
ugggcguaguggcucuugccugua

SEQ ID NO: 259341 - RNA, 32 nt, Human
ugggcguccaggacuucggcacugccuaugcc

SEQ ID NO: 259342 - RNA, 32 nt, Human
ugggcguccgggcagcugcagcugagaggacu

SEQ ID NO: 259343 - RNA, 32 nt, Human
ugggcgucugcucugggacaccccaaagagcu

SEQ ID NO: 259344 - RNA, 32 nt, Human
ugggcgugagccaccgugacuggccuguuuuu

SEQ ID NO: 259345 - RNA, 32 nt, Human
ugggcgugaggccuccugggccugucgggccu

SEQ ID NO: 259346 - RNA, 24 nt, Human
ugggcgugaugacacgugccugua

SEQ ID NO: 259347 - RNA, 24 nt, Human
ugggcgugauggcacgugccugua

SEQ ID NO: 259348 - RNA, 32 nt, Human
ugggcgugcuagagguugcagcaugagacuuu

SEQ ID NO: 259349 - RNA, 32 nt, Human
ugggcguggcagccucacagggaacacgggac

SEQ ID NO: 259350 - RNA, 24 nt, Human
ugggcguggcggcucaugccugua

SEQ ID NO: 259351 - RNA, 24 nt, Human
ugggcgugggggcucaugccugua

SEQ ID NO: 259352 - RNA, 24 nt, Human
ugggcgugguagcuugugccugug

SEQ ID NO: 259353 - RNA, 24 nt, Human
ugggcgugguggcacacacccgua

SEQ ID NO: 259354 - RNA, 24 nt, Human
ugggcgugguggcacacaccugua

SEQ ID NO: 259355 - RNA, 24 nt, Human
ugggcgugguggcacacgccugua

SEQ ID NO: 259356 - RNA, 24 nt, Human
ugggcgugguggcacauaccugua

SEQ ID NO: 259357 - RNA, 21 nt, Human
ugggcgugguggcacaugccu

SEQ ID NO: 259358 - RNA, 24 nt, Human
ugggcgugguggcacaugccugua

SEQ ID NO: 259359 - RNA, 24 nt, Human
ugggcgugguggcacgcgccugua

SEQ ID NO: 259360 - RNA, 24 nt, Human
ugggcgugguggcacgugccugua

SEQ ID NO: 259361 - RNA, 22 nt, Human
ugggcgugguggcacguuccug

SEQ ID NO: 259362 - RNA, 24 nt, Human
ugggcgugguggcagaugccugua

SEQ ID NO: 259363 - RNA, 24 nt, Human
ugggcgugguggcaggcgccugug

SEQ ID NO: 259364 - RNA, 24 nt, Human
ugggcgugguggcaugcaccugua

SEQ ID NO: 259365 - RNA, 24 nt, Human
ugggcgugguggcaugcgccugua

SEQ ID NO: 259366 - RNA, 24 nt, Human
ugggcgugguggcaugugccugua

SEQ ID NO: 259367 - RNA, 24 nt, Human
ugggcgugguggcauguggcugua

SEQ ID NO: 259368 - RNA, 24 nt, Human
ugggcgugguggcgagcgccugua

SEQ ID NO: 259369 - RNA, 21 nt, Human
ugggcgugguggcgcaugccu

SEQ ID NO: 259370 - RNA, 24 nt, Human
ugggcgugguggcgcaugccugua

SEQ ID NO: 259371 - RNA, 32 nt, Human
ugggcgugguggcgcauugccuguaaucccag

SEQ ID NO: 259372 - RNA, 24 nt, Human
ugggcgugguggcgcgcgccugua

SEQ ID NO: 259373 - RNA, 24 nt, Human
ugggcgugguggcgggcaccugua

SEQ ID NO: 259374 - RNA, 24 nt, Human
ugggcgugguggcgggcgccugua

SEQ ID NO: 259375 - RNA, 24 nt, Human
ugggcgugguggcgggcgccugug

SEQ ID NO: 259376 - RNA, 24 nt, Human
ugggcgugguggcgugcgccugua

SEQ ID NO: 259377 - RNA, 21 nt, Human
ugggcgugguggcucacaccu

SEQ ID NO: 259378 - RNA, 23 nt, Human
ugggcgugguggcucacaccugu

SEQ ID NO: 259379 - RNA, 24 nt, Human
ugggcgugguggcucacaccugua

SEQ ID NO: 259380 - RNA, 24 nt, Human
ugggcgugguggcucacaccugug

SEQ ID NO: 259381 - RNA, 24 nt, Human
ugggcgugguggcucacaucugua

SEQ ID NO: 259382 - RNA, 24 nt, Human
ugggcgugguggcucacgccugua

SEQ ID NO: 259383 - RNA, 24 nt, Human
ugggcgugguggcucacgccugug

SEQ ID NO: 259384 - RNA, 24 nt, Human
ugggcgugguggcucacgcuugua

SEQ ID NO: 259385 - RNA, 24 nt, Human
ugggcgugguggcucacuccugua

SEQ ID NO: 259386 - RNA, 24 nt, Human
ugggcgugguggcucaugccugua

SEQ ID NO: 259387 - RNA, 24 nt, Human
ugggcgugguggcucaugccugug

SEQ ID NO: 259388 - RNA, 24 nt, Human
ugggcgugguggcucaugcuugua

SEQ ID NO: 259389 - RNA, 24 nt, Human
ugggcgugguggcucucgccugua

SEQ ID NO: 259390 - RNA, 24 nt, Human
ugggcgugguggcuggcgccugua

SEQ ID NO: 259391 - RNA, 24 nt, Human
ugggcguggugguacacaccugug

SEQ ID NO: 259392 - RNA, 24 nt, Human
ugggcguggugguacaugccugua

SEQ ID NO: 259393 - RNA, 24 nt, Human
ugggcgugguggugcacgccugua

SEQ ID NO: 259394 - RNA, 24 nt, Human
ugggcgugguggugcaugccugua

SEQ ID NO: 259395 - RNA, 24 nt, Human
ugggcgugguggugcgcaccugua

SEQ ID NO: 259396 - RNA, 24 nt, Human
ugggcgugguggugggcaccugua

SEQ ID NO: 259397 - RNA, 24 nt, Human
ugggcguggugguguaccccugua

SEQ ID NO: 259398 - RNA, 24 nt, Human
ugggcguggugguucacaccugua

SEQ ID NO: 259399 - RNA, 32 nt, Human
ugggcgugugggguauucuccacccacuuaua

SEQ ID NO: 259400 - RNA, 32 nt, Human
ugggcguugccuggguucuugggagagagggg

SEQ ID NO: 259401 - RNA, 24 nt, Human
ugggcguuguggcucaugccugua

SEQ ID NO: 259402 - RNA, 32 nt, Human
ugggcguuuguggauucugaaagagaaagccg

SEQ ID NO: 259403 - RNA, 32 nt, Human
ugggcuaaaacagagccuucaaaacuucggcu

SEQ ID NO: 259404 - RNA, 32 nt, Human
ugggcuaaaugcugcuaucauaggcauccaua

SEQ ID NO: 259405 - RNA, 32 nt, Human
ugggcuaaauggguacuagaacaacaacugcc

SEQ ID NO: 259406 - RNA, 32 nt, Human
ugggcuaauugccaccaauuucagccugccac

SEQ ID NO: 259407 - RNA, 32 nt, Human
ugggcuacaugacgaaacuccaucucuaucaa

SEQ ID NO: 259408 - RNA, 32 nt, Human
ugggcuacaugcuggggucaaggcaguagaac

SEQ ID NO: 259409 - RNA, 32 nt, Human
ugggcuagaauguacacgucuccuugccugaa

SEQ ID NO: 259410 - RNA, 32 nt, Human
ugggcuaggcugcagccugccuccuggggacu

SEQ ID NO: 259411 - RNA, 32 nt, Human
ugggcuauacaguccagcaggcaguaugcacc

SEQ ID NO: 259412 - RNA, 32 nt, Human
ugggcuauaugaggagagaggagcagcaggca

SEQ ID NO: 259413 - RNA, 32 nt, Human
ugggcuaugcuggguaccaccauguacucagg

SEQ ID NO: 259414 - RNA, 32 nt, Human
ugggcucaaagugauccucccaugucagccuc

SEQ ID NO: 259415 - RNA, 32 nt, Human
ugggcucaaaugauccucccaccucagccucc

SEQ ID NO: 259416 - RNA, 32 nt, Human
ugggcucaagaguucaagaccagucugggcaa

SEQ ID NO: 259417 - RNA, 32 nt, Human
ugggcucaagcaauccucccaccucagcccga

SEQ ID NO: 259418 - RNA, 32 nt, Human
ugggcucaagcaauccucccaccucagccuau

SEQ ID NO: 259419 - RNA, 32 nt, Human
ugggcucaagcaauccucccaccucagccucc

SEQ ID NO: 259420 - RNA, 32 nt, Human
ugggcucaagcaauccucccaccucccagugu

SEQ ID NO: 259421 - RNA, 32 nt, Human
ugggcucaagcaauucucccaccucagccucc

SEQ ID NO: 259422 - RNA, 32 nt, Human
ugggcucaagcaauucucccaccucagccucu

SEQ ID NO: 259423 - RNA, 32 nt, Human
ugggcucaagcaauucuuccaccucagccucc

SEQ ID NO: 259424 - RNA, 32 nt, Human
ugggcucaagcaguccucccaccccagccucu

SEQ ID NO: 259425 - RNA, 32 nt, Human
ugggcucaagcaguccucccaccucagccucc

SEQ ID NO: 259426 - RNA, 32 nt, Human
ugggcucaagcaguccucccaccucagucucc

SEQ ID NO: 259427 - RNA, 32 nt, Human
ugggcucaagcgauccucccaccucagccucc

SEQ ID NO: 259428 - RNA, 32 nt, Human
ugggcucaagcgauccucccaccucagcuucu

SEQ ID NO: 259429 - RNA, 22 nt, Human
ugggcucaaggcucccagcaga

SEQ ID NO: 259430 - RNA, 32 nt, Human
ugggcucaagugauccucccaccucagccucc

SEQ ID NO: 259431 - RNA, 32 nt, Human
ugggcucaagugauccucccaccucagcuucc

SEQ ID NO: 259432 - RNA, 32 nt, Human
ugggcucaagugauccuccugucucggccucc

SEQ ID NO: 259433 - RNA, 32 nt, Human
ugggcucacaccauucuccugccucagccucc

SEQ ID NO: 259434 - RNA, 32 nt, Human
ugggcucacugcaaccuccgccucccugguuc

SEQ ID NO: 259435 - RNA, 32 nt, Human
ugggcucacugcaaccuccuccuccuggauuc

SEQ ID NO: 259436 - RNA, 32 nt, Human
ugggcucacugcaaccucugccucccggguuc

SEQ ID NO: 259437 - RNA, 32 nt, Human
ugggcucacugcaaccucugccuuccagguuc

SEQ ID NO: 259438 - RNA, 32 nt, Human
ugggcucacugcaaccuucaccuccagguuca

SEQ ID NO: 259439 - RNA, 32 nt, Human
ugggcucacugcagccuagaccugcugggcuc

SEQ ID NO: 259440 - RNA, 32 nt, Human
ugggcucacugcagccucaaccucccagguuc

SEQ ID NO: 259441 - RNA, 32 nt, Human
ugggcucagaauuugucacuaaggcugcuaac

SEQ ID NO: 259442 - RNA, 32 nt, Human
ugggcucagccacucccuccagucucaaguaa

SEQ ID NO: 259443 - RNA, 32 nt, Human
ugggcucaggcgauucuccugucucagccucc

SEQ ID NO: 259444 - RNA, 24 nt, Human
ugggcucaguggcucaccccugua

SEQ ID NO: 259445 - RNA, 32 nt, Human
ugggcucauccagaaucucaucaggacuggau

SEQ ID NO: 259446 - RNA, 32 nt, Human
ugggcucaugugauccucccaccucagccucc

SEQ ID NO: 259447 - RNA, 32 nt, Human
ugggcucauugcaaccuccgccucccggcuuc

SEQ ID NO: 259448 - RNA, 32 nt, Human
ugggcucauugcaaccucugccucccggguuc

SEQ ID NO: 259449 - RNA, 32 nt, Human
ugggcuccagccugggcgacagagugagaguc

SEQ ID NO: 259450 - RNA, 32 nt, Human
ugggcuccaggcaacagagcccuacuggcagg

SEQ ID NO: 259451 - RNA, 22 nt, Human
ugggcuccaggggccucuggug

SEQ ID NO: 259452 - RNA, 32 nt, Human
ugggcuccaugcggagccuggccugcaucccc

SEQ ID NO: 259453 - RNA, 32 nt, Human
ugggcucccaaaacaccugacagccccucccu

SEQ ID NO: 259454 - RNA, 32 nt, Human
ugggcucccacuuucuucccagaagagggcua

SEQ ID NO: 259455 - RNA, 32 nt, Human
ugggcucccagagagacccugaguuucaaaua

SEQ ID NO: 259456 - RNA, 22 nt, Human
ugggcucccagggauacuguuu

SEQ ID NO: 259457 - RNA, 32 nt, Human
ugggcuccccaggccugcccccggcugguccc

SEQ ID NO: 259458 - RNA, 32 nt, Human
ugggcuccccuucucucuaccuucucccccaa

SEQ ID NO: 259459 - RNA, 21 nt, Human
ugggcucccguccacuccacu

SEQ ID NO: 259460 - RNA, 32 nt, Human
ugggcucccucaggcucugguaugacauauuu

SEQ ID NO: 259461 - RNA, 32 nt, Human
ugggcucccugccccucucugccuguucugga

SEQ ID NO: 259462 - RNA, 32 nt, Human
ugggcucccugccuguggcucagccccagcuc

SEQ ID NO: 259463 - RNA, 32 nt, Human
ugggcucccuggcagcuguuggcaucucgugg

SEQ ID NO: 259464 - RNA, 23 nt, Human
ugggcuccgagguccgugcuccu

SEQ ID NO: 259465 - RNA, 32 nt, Human
ugggcuccguagcugcucagcaaaugucagca

SEQ ID NO: 259466 - RNA, 32 nt, Human
ugggcuccuaggagguaguuuucuugaagggg

SEQ ID NO: 259467 - RNA, 32 nt, Human
ugggcuccucaagggacuuccuggagaguagc

SEQ ID NO: 259468 - RNA, 32 nt, Human
ugggcuccugguggcugcucaguguucccagg

SEQ ID NO: 259469 - RNA, 21 nt, Human
ugggcuccuguagucccagcu

SEQ ID NO: 259470 - RNA, 32 nt, Human
ugggcuccugucacccuccacgucuccacaga

SEQ ID NO: 259471 - RNA, 32 nt, Human
ugggcucgggaugcugcucuuccuuccuucac

SEQ ID NO: 259472 - RNA, 32 nt, Human
ugggcucgggugauccucccaccucggccucc

SEQ ID NO: 259473 - RNA, 32 nt, Human
ugggcucuaauccaguugucuaucccuuucac

SEQ ID NO: 259474 - RNA, 32 nt, Human
ugggcucuacagugcuuacugcagccuugugu

SEQ ID NO: 259475 - RNA, 32 nt, Human
ugggcucuaggggaaccuggggucggaugagc

SEQ ID NO: 259476 - RNA, 32 nt, Human
ugggcucucagaugaaggcaaagcuuugaucc

SEQ ID NO: 259477 - RNA, 32 nt, Human
ugggcucucagggacugagggcagcugcccug

SEQ ID NO: 259478 - RNA, 32 nt, Human
ugggcucugaauacuccauucugccucacuuc

SEQ ID NO: 259479 - RNA, 18 nt, Human
ugggcucugaccuggggu

SEQ ID NO: 259480 - RNA, 32 nt, Human
ugggcucugaucagugccuguugcguguaaac

SEQ ID NO: 259481 - RNA, 32 nt, Human
ugggcucugaugggaagagggaggugggccug

SEQ ID NO: 259482 - RNA, 32 nt, Human
ugggcucugcccugggcagacaggcagagggc

SEQ ID NO: 259483 - RNA, 32 nt, Human
ugggcucugcuuccuccgccugcugccuggac

SEQ ID NO: 259484 - RNA, 32 nt, Human
ugggcucugggaacaggggacuacuuuggggc

SEQ ID NO: 259485 - RNA, 32 nt, Human
ugggcucugggauguggaaccauggcguccag

SEQ ID NO: 259486 - RNA, 32 nt, Human
ugggcucugggcagcagcagggaucugguggu

SEQ ID NO: 259487 - RNA, 31 nt, Human
ugggcucuggugucucccagucugcuaaagc

SEQ ID NO: 259488 - RNA, 32 nt, Human
ugggcucuguuuaggagggcagugagaccacc

SEQ ID NO: 259489 - RNA, 21 nt, Human
ugggcucuugaguugcugcuu

SEQ ID NO: 259490 - RNA, 21 nt, Human
ugggcucuugcgucuccagcu

SEQ ID NO: 259491 - RNA, 32 nt, Human
ugggcugaaagaaugauuuagaaaacuaguga

SEQ ID NO: 259492 - RNA, 25 nt, Human
ugggcugaacagcugugaccaaaac

SEQ ID NO: 259493 - RNA, 32 nt, Human
ugggcugaagaaaagagcaagggaagagguga

SEQ ID NO: 259494 - RNA, 32 nt, Human
ugggcugacaacacucccucuccugggaccuc

SEQ ID NO: 259495 - RNA, 32 nt, Human
ugggcugacagagcagguucucauuucucagc

SEQ ID NO: 259496 - RNA, 32 nt, Human
ugggcugacucuggcgccaugauguugccuua

SEQ ID NO: 259497 - RNA, 32 nt, Human
ugggcugacugagacaauucuguccauguaaa

SEQ ID NO: 259498 - RNA, 32 nt, Human
ugggcugacuuuugauaggccaugccuugcca

SEQ ID NO: 259499 - RNA, 19 nt, Human
ugggcugagaaaccaggga

SEQ ID NO: 259500 - RNA, 32 nt, Human
ugggcugagacccagcugagugcagcguggcg

SEQ ID NO: 259501 - RNA, 32 nt, Human
ugggcugagccaccuugugagugcaguuacug

SEQ ID NO: 259502 - RNA, 32 nt, Human
ugggcugagccgaguccucuuucagcagcagc

SEQ ID NO: 259503 - RNA, 32 nt, Human
ugggcugaggaugcagaaacaggcaggacaca

SEQ ID NO: 259504 - RNA, 32 nt, Human
ugggcugagggaagggagaggagaggaacaag

SEQ ID NO: 259505 - RNA, 32 nt, Human
ugggcugagggcaucuccaaagcuggccugau

SEQ ID NO: 259506 - RNA, 32 nt, Human
ugggcugaggggcagggagccggcugugccca

SEQ ID NO: 259507 - RNA, 32 nt, Human
ugggcugaguagaggcaccagauuugggcucc

SEQ ID NO: 259508 - RNA, 32 nt, Human
ugggcugaugagagguagagcagcaugcaucg

SEQ ID NO: 259509 - RNA, 32 nt, Human
ugggcugcagaaucgcugaacugugugccucu

SEQ ID NO: 259510 - RNA, 32 nt, Human
ugggcugcaggaggccaugaagguggccgugg

SEQ ID NO: 259511 - RNA, 32 nt, Human
ugggcugcaucuggcccuggcuggaggccuug

SEQ ID NO: 259512 - RNA, 32 nt, Human
ugggcugcaugggcugcuuuuauucauggugg

SEQ ID NO: 259513 - RNA, 32 nt, Human
ugggcugcauucccaugagcuuaggcauucua

SEQ ID NO: 259514 - RNA, 32 nt, Human
ugggcugccaggauuuagcagggagguggcug

SEQ ID NO: 259515 - RNA, 32 nt, Human
ugggcugcccagagccccacagcuucaaggcc

SEQ ID NO: 259516 - RNA, 32 nt, Human
ugggcugccuccagcccgggccugugucuugg

SEQ ID NO: 259517 - RNA, 32 nt, Human
ugggcugccucuucugucuuaacugguucugc

SEQ ID NO: 259518 - RNA, 32 nt, Human
ugggcugcgcggccccagccugggcacccuga

SEQ ID NO: 259519 - RNA, 32 nt, Human
ugggcugcggaagcucugccugccaaggauuc

SEQ ID NO: 259520 - RNA, 32 nt, Human
ugggcugcggaagguaacuggggacgucgcag

SEQ ID NO: 259521 - RNA, 32 nt, Human
ugggcugcgguggcucuggagcuggucagcgu

SEQ ID NO: 259522 - RNA, 32 nt, Human
ugggcugcgugugugguagggaugugcagguc

SEQ ID NO: 259523 - RNA, 20 nt, Human
ugggcugcuagaaagcagca

SEQ ID NO: 259524 - RNA, 21 nt, Human
ugggcugcucccgccccagcc

SEQ ID NO: 259525 - RNA, 32 nt, Human
ugggcugcucccucgugcacagcgcaggggag

SEQ ID NO: 259526 - RNA, 32 nt, Human
ugggcugcugaggggcuagugcagugguccug

SEQ ID NO: 259527 - RNA, 32 nt, Human
ugggcugcuggccaugaaucucugccucuccc

SEQ ID NO: 259528 - RNA, 32 nt, Human
ugggcugcugggacaugcaggcucugaguggg

SEQ ID NO: 259529 - RNA, 32 nt, Human
ugggcugcugggacuggguucauucucaugac

SEQ ID NO: 259530 - RNA, 32 nt, Human
ugggcugcugugggcugcauuuggauagcugu

SEQ ID NO: 259531 - RNA, 31 nt, Human
ugggcugcuugguucugacauucuggacugc

SEQ ID NO: 259532 - RNA, 32 nt, Human
ugggcuggaacagcagauuucagcuacauaua

SEQ ID NO: 259533 - RNA, 32 nt, Human
ugggcuggaagaggcagcaaaagggaaaauca

SEQ ID NO: 259534 - RNA, 32 nt, Human
ugggcuggagagaaggagaaggauuaggaaaa

SEQ ID NO: 259535 - RNA, 18 nt, Human
ugggcuggagcaggggga

SEQ ID NO: 259536 - RNA, 32 nt, Human
ugggcuggagugagagagaggcaggucuccag

SEQ ID NO: 259537 - RNA, 32 nt, Human
ugggcuggaguuaaauggaaguacaaugcagu

SEQ ID NO: 259538 - RNA, 32 nt, Human
ugggcuggauugagaagaaaacugacaagagu

SEQ ID NO: 259539 - RNA, 32 nt, Human
ugggcuggcaccugggcacagugcuuccaggu

SEQ ID NO: 259540 - RNA, 32 nt, Human
ugggcuggcaucugcauuacccaagcucugcu

SEQ ID NO: 259541 - RNA, 32 nt, Human
ugggcuggccgccugcagcccguguccaggag

SEQ ID NO: 259542 - RNA, 32 nt, Human
ugggcuggcugugguggagaauguagcgcaac

SEQ ID NO: 259543 - RNA, 32 nt, Human
ugggcuggcuuccguccugguagccaaggcua

SEQ ID NO: 259544 - RNA, 32 nt, Human
ugggcugggaccccucugccuccagggcgcgu

SEQ ID NO: 259545 - RNA, 32 nt, Human
ugggcugggaggagggaggcaggggagagccg

SEQ ID NO: 259546 - RNA, 32 nt, Human
ugggcugggagggagagaccggagcagcgcca

SEQ ID NO: 259547 - RNA, 32 nt, Human
ugggcugggagggagagcccuacagugcgugg

SEQ ID NO: 259548 - RNA, 32 nt, Human
ugggcugggauggugacuccugaaaccucuuc

SEQ ID NO: 259549 - RNA, 32 nt, Human
ugggcugggccccugaggccaggcugacuugg

SEQ ID NO: 259550 - RNA, 32 nt, Human
ugggcugggcccugggcuuggcucgaguucuc

SEQ ID NO: 259551 - RNA, 32 nt, Human
ugggcugggccgggcccaggaagugggcggcg

SEQ ID NO: 259552 - RNA, 32 nt, Human
ugggcugggccugagauucugcauuucuaagg

SEQ ID NO: 259553 - RNA, 32 nt, Human
ugggcugggccuggguggccucugucuuugca

SEQ ID NO: 259554 - RNA, 32 nt, Human
ugggcugggcgggccagcuggggaagcauuug

SEQ ID NO: 259555 - RNA, 32 nt, Human
ugggcugggcuggagucuggcugguccaacac

SEQ ID NO: 259556 - RNA, 32 nt, Human
ugggcugggcugggcugagccccuggucuucu

SEQ ID NO: 259557 - RNA, 32 nt, Human
ugggcugggcugggcuggacuggacgccucuc

SEQ ID NO: 259558 - RNA, 32 nt, Human
ugggcugggcugggcugggcugugggagcccu

SEQ ID NO: 259559 - RNA, 32 nt, Human
ugggcuggggcugcuccccuaacccuacuuug

SEQ ID NO: 259560 - RNA, 32 nt, Human
ugggcugggggaaggagccugaagguugcccc

SEQ ID NO: 259561 - RNA, 32 nt, Human
ugggcugggggaggggaacaggaugcccagcc

SEQ ID NO: 259562 - RNA, 32 nt, Human
ugggcugggguuggccaccguagcuuaguggg

SEQ ID NO: 259563 - RNA, 32 nt, Human
ugggcuggguaggguugcucagucuuuggggg

SEQ ID NO: 259564 - RNA, 32 nt, Human
ugggcugggugagcuugaaguccucugggaca

SEQ ID NO: 259565 - RNA, 32 nt, Human
ugggcugggugggccugggcagcugggugggc

SEQ ID NO: 259566 - RNA, 29 nt, Human
ugggcugggugucuggugccuggaacaga

SEQ ID NO: 259567 - RNA, 32 nt, Human
ugggcugguaaauccaaagggauaaggcuuca

SEQ ID NO: 259568 - RNA, 32 nt, Human
ugggcugguacccaggccuggagcagcgguac

SEQ ID NO: 259569 - RNA, 32 nt, Human
ugggcuggucuaggcuguggccugccaccuuc

SEQ ID NO: 259570 - RNA, 32 nt, Human
ugggcuggucucaaacuccugaccucaaguga

SEQ ID NO: 259571 - RNA, 32 nt, Human
ugggcuggucucaaacuccugaccucugguga

SEQ ID NO: 259572 - RNA, 32 nt, Human
ugggcuggucucaaacuccugauuucuuaguc

SEQ ID NO: 259573 - RNA, 32 nt, Human
ugggcuggucucaaacuccuggguucaagcaa

SEQ ID NO: 259574 - RNA, 32 nt, Human
ugggcuggucucaaacuucugaucucaaguga

SEQ ID NO: 259575 - RNA, 32 nt, Human
ugggcuggucucgaacuccuaaccucaaguga

SEQ ID NO: 259576 - RNA, 32 nt, Human
ugggcuggucugugucugggccugucccaugg

SEQ ID NO: 259577 - RNA, 32 nt, Human
ugggcuggugaguuuucgaggugacugugcug

SEQ ID NO: 259578 - RNA, 32 nt, Human
ugggcuggugcaggccccugagguuucuagug

SEQ ID NO: 259579 - RNA, 32 nt, Human
ugggcugguggaggcggggucgagauggcggc

SEQ ID NO: 259580 - RNA, 32 nt, Human
ugggcugguguuuguggcugacuugguacaga

SEQ ID NO: 259581 - RNA, 32 nt, Human
ugggcugugaaauuguacuuccaggcuuggau

SEQ ID NO: 259582 - RNA, 20 nt, Human
ugggcugugaucacaccacu

SEQ ID NO: 259583 - RNA, 31 nt, Human
ugggcugugauucccccuugcccaucagaga

SEQ ID NO: 259584 - RNA, 32 nt, Human
ugggcugugcuccccucuuccuacugucaguu

SEQ ID NO: 259585 - RNA, 32 nt, Human
ugggcugugcucuccccuguuuacccgaugua

SEQ ID NO: 259586 - RNA, 32 nt, Human
ugggcuguggaggugggcaugugggccccugg

SEQ ID NO: 259587 - RNA, 32 nt, Human
ugggcuguggucacgugcucccagaagaccug

SEQ ID NO: 259588 - RNA, 31 nt, Human
ugggcugugguggaaaaaugagggcuggagc

SEQ ID NO: 259589 - RNA, 32 nt, Human
ugggcuguuggcugggggcaugggggaggcuc

SEQ ID NO: 259590 - RNA, 32 nt, Human
ugggcuguugugcacacagugcagccuggauc

SEQ ID NO: 259591 - RNA, 32 nt, Human
ugggcuguuucacaggccuggccacgcucuca

SEQ ID NO: 259592 - RNA, 32 nt, Human
ugggcuguuucaugaagcuuucacuuuaaaau

SEQ ID NO: 259593 - RNA, 32 nt, Human
ugggcuuaaagcaguuaguaacaggaaagcuc

SEQ ID NO: 259594 - RNA, 32 nt, Human
ugggcuuaaucaggacggaagaggagggggug

SEQ ID NO: 259595 - RNA, 32 nt, Human
ugggcuuaaugauggagaaaaaguguacccug

SEQ ID NO: 259596 - RNA, 32 nt, Human
ugggcuuaccuugcccgucaguucccugccaa

SEQ ID NO: 259597 - RNA, 32 nt, Human
ugggcuuacugacaguugcccagaucugaagg

SEQ ID NO: 259598 - RNA, 32 nt, Human
ugggcuuagagcaguuucuguccugcugguua

SEQ ID NO: 259599 - RNA, 32 nt, Human
ugggcuuaguccauccuccacacuguugugca

SEQ ID NO: 259600 - RNA, 32 nt, Human
ugggcuuauuucccuggcuggguuauggggga

SEQ ID NO: 259601 - RNA, 32 nt, Human
ugggcuucaagcaauccuccugugucagccac

SEQ ID NO: 259602 - RNA, 32 nt, Human
ugggcuucaagcacugucuuccaucugcaucu

SEQ ID NO: 259603 - RNA, 32 nt, Human
ugggcuucacacaagaaccaccucucccgcag

SEQ ID NO: 259604 - RNA, 32 nt, Human
ugggcuucaguuuccuccuugcuccaugaggg

SEQ ID NO: 259605 - RNA, 32 nt, Human
ugggcuuccagggcagcgauugaggagaccuu

SEQ ID NO: 259606 - RNA, 32 nt, Human
ugggcuuccauggcaggaagaugagaagaaau

SEQ ID NO: 259607 - RNA, 32 nt, Human
ugggcuuccuggggccaguguugcaggcugaa

SEQ ID NO: 259608 - RNA, 32 nt, Human
ugggcuucguggugagcacugcagccucccug

SEQ ID NO: 259609 - RNA, 32 nt, Human
ugggcuucucagcgggucaagugcaguaccug

SEQ ID NO: 259610 - RNA, 32 nt, Human
ugggcuucuccaggagcagggaggguggaggg

SEQ ID NO: 259611 - RNA, 23 nt, Human
ugggcuucuccgggauuuuaguu

SEQ ID NO: 259612 - RNA, 32 nt, Human
ugggcuucugggagggacgggcugggaggaga

SEQ ID NO: 259613 - RNA, 32 nt, Human
ugggcuucuguccuccucugugucccggcaug

SEQ ID NO: 259614 - RNA, 32 nt, Human
ugggcuucugugagacuuaucacacauagugu

SEQ ID NO: 259615 - RNA, 32 nt, Human
ugggcuucuuucuccccagagggcccucugcc

SEQ ID NO: 259616 - RNA, 32 nt, Human
ugggcuugaccaggaacagcagagccaggccc

SEQ ID NO: 259617 - RNA, 32 nt, Human
ugggcuugagggaggcagcagcuccaacaccu

SEQ ID NO: 259618 - RNA, 32 nt, Human
ugggcuugcagcacugccaucuugccauguac

SEQ ID NO: 259619 - RNA, 32 nt, Human
ugggcuugccugcccuucaacagggucuauug

SEQ ID NO: 259620 - RNA, 32 nt, Human
ugggcuugcuccugcaaccaguaucuccuugg

SEQ ID NO: 259621 - RNA, 32 nt, Human
ugggcuugcuggucuaucacuuccuggccucu

SEQ ID NO: 259622 - RNA, 32 nt, Human
ugggcuuggagagugugcagugccuccugacu

SEQ ID NO: 259623 - RNA, 32 nt, Human
ugggcuuggcauacagcaggagcccaguaaau

SEQ ID NO: 259624 - RNA, 32 nt, Human
ugggcuuggccaaaacaggcucaggccaaaga

SEQ ID NO: 259625 - RNA, 32 nt, Human
ugggcuugggguggacaaacccagaggcugug

SEQ ID NO: 259626 - RNA, 24 nt, Human
ugggcuugguggcucacaccugua

SEQ ID NO: 259627 - RNA, 32 nt, Human
ugggcuuguagcugaccaacagccugcucucc

SEQ ID NO: 259628 - RNA, 32 nt, Human
ugggcuugugcgcggaccuggcgacgcucuag

SEQ ID NO: 259629 - RNA, 32 nt, Human
ugggcuuguucuucaugccuaacuuaauaauu

SEQ ID NO: 259630 - RNA, 32 nt, Human
ugggcuuuagcuguuuuucucauuuguuggug

SEQ ID NO: 259631 - RNA, 32 nt, Human
ugggcuuucagauuucucuuuuuaaccacauu

SEQ ID NO: 259632 - RNA, 32 nt, Human
ugggcuuucccaggaaggagaugaagguagaa

SEQ ID NO: 259633 - RNA, 32 nt, Human
ugggcuuuccuuguuugacuucagaccuggau

SEQ ID NO: 259634 - RNA, 32 nt, Human
ugggcuuucuguuccuccugaguagcugauuu

SEQ ID NO: 259635 - RNA, 32 nt, Human
ugggcuuugaacuuagacaucuaccucagagc

SEQ ID NO: 259636 - RNA, 32 nt, Human
ugggcuuugccucacguauuccugcugccacc

SEQ ID NO: 259637 - RNA, 32 nt, Human
ugggcuuugccuucugacaccucaguggugcu

SEQ ID NO: 259638 - RNA, 32 nt, Human
ugggcuuuuaauccugugugugauuacuagua

SEQ ID NO: 259639 - RNA, 32 nt, Human
uggggaaaacauccuuuaacuucggggucguc

SEQ ID NO: 259640 - RNA, 32 nt, Human
uggggaaaagcacuuuccuggugauggaaaaa

SEQ ID NO: 259641 - RNA, 32 nt, Human
uggggaaaaucccuuuuccugccugccugucu

SEQ ID NO: 259642 - RNA, 32 nt, Human
uggggaaacaaaggugggagggguggggaaua

SEQ ID NO: 259643 - RNA, 32 nt, Human
uggggaaacugaggccuugagaaggaaaaagg

SEQ ID NO: 259644 - RNA, 32 nt, Human
uggggaaagacacaccccucucuaugaaauga

SEQ ID NO: 259645 - RNA, 32 nt, Human
uggggaaagaggaggaagagcauuaggacaaa

SEQ ID NO: 259646 - RNA, 32 nt, Human
uggggaaagauggcugccgcccauggaccuuu

SEQ ID NO: 259647 - RNA, 32 nt, Human
uggggaaagcacaagaggaggaccgggaucca

SEQ ID NO: 259648 - RNA, 32 nt, Human
uggggaaagugccggaccaccaugccgcgcuc

SEQ ID NO: 259649 - RNA, 32 nt, Human
uggggaacaaguguccuucagaacccagagaa

SEQ ID NO: 259650 - RNA, 32 nt, Human
uggggaacauagugagauaccgucucuacaaa

SEQ ID NO: 259651 - RNA, 32 nt, Human
uggggaacauggcaagaccccaucucuacaaa

SEQ ID NO: 259652 - RNA, 32 nt, Human
uggggaaccaaggauaggggaaggagucagca

SEQ ID NO: 259653 - RNA, 32 nt, Human
uggggaacccagcaggaaauuagaauagaacc

SEQ ID NO: 259654 - RNA, 32 nt, Human
uggggaacgagaguaauuugaagaaugcuuga

SEQ ID NO: 259655 - RNA, 32 nt, Human
uggggaacugguuuauucuguacuccuaaaca

SEQ ID NO: 259656 - RNA, 32 nt, Human
uggggaagaacugggagcuccccaacuuggac

SEQ ID NO: 259657 - RNA, 32 nt, Human
uggggaagaagacaguggggagaaagugcagg

SEQ ID NO: 259658 - RNA, 32 nt, Human
uggggaagacagcauuccacagccuggucagg

SEQ ID NO: 259659 - RNA, 32 nt, Human
uggggaagagccggcagcuccuccucaucccc

SEQ ID NO: 259660 - RNA, 32 nt, Human
uggggaagagcugagcaaagagagaaaggagg

SEQ ID NO: 259661 - RNA, 32 nt, Human
uggggaagaggaacgggcagcugggagccuuc

SEQ ID NO: 259662 - RNA, 32 nt, Human
uggggaagcaaguuggcaguucuugaacagca

SEQ ID NO: 259663 - RNA, 32 nt, Human
uggggaagccaacagacacagcaggaggagag

SEQ ID NO: 259664 - RNA, 32 nt, Human
uggggaagccaccccauagaugacauugcccg

SEQ ID NO: 259665 - RNA, 32 nt, Human
uggggaagccugggugaggaugggccaggucc

SEQ ID NO: 259666 - RNA, 32 nt, Human
uggggaagcggcaaggaauuuucaccuccagc

SEQ ID NO: 259667 - RNA, 32 nt, Human
uggggaagcugaggcaggagaaucccuugaac

SEQ ID NO: 259668 - RNA, 32 nt, Human
uggggaagcugaggcaggagaauugcuugaac

SEQ ID NO: 259669 - RNA, 32 nt, Human
uggggaagcuguugcuguugcuagacgacggg

SEQ ID NO: 259670 - RNA, 32 nt, Human
uggggaaggaagagggcgagaucuuggcaucc

SEQ ID NO: 259671 - RNA, 32 nt, Human
uggggaaggagaaucacuugagcccaggaagc

SEQ ID NO: 259672 - RNA, 32 nt, Human
uggggaaggagagggaagaagggaggagcggu

SEQ ID NO: 259673 - RNA, 19 nt, Human
uggggaaggcaggaggcag

SEQ ID NO: 259674 - RNA, 32 nt, Human
uggggaaggggagccaggucagcugggucuag

SEQ ID NO: 259675 - RNA, 32 nt, Human
uggggaaggguuuucugucuuauggagugagu

SEQ ID NO: 259676 - RNA, 32 nt, Human
uggggaaguaucugcucuucucauguuaaaag

SEQ ID NO: 259677 - RNA, 32 nt, Human
uggggaaguccgaggggcuggggaaggguuuc

SEQ ID NO: 259678 - RNA, 32 nt, Human
uggggaagugaggaagaagggauucuagaguu

SEQ ID NO: 259679 - RNA, 32 nt, Human
uggggaagugauauuugcaacaucucauacuu

SEQ ID NO: 259680 - RNA, 32 nt, Human
uggggaaguucaggcuguccccagaagucaac

SEQ ID NO: 259681 - RNA, 32 nt, Human
uggggaaguucuuauguuuaucuugcuuuuca

SEQ ID NO: 259682 - RNA, 32 nt, Human
uggggaauaggucaucaaaaagagguaacuau

SEQ ID NO: 259683 - RNA, 32 nt, Human
uggggaauauaacauaucaaaauacaugaaca

SEQ ID NO: 259684 - RNA, 32 nt, Human
uggggaaugcagcccuggugucucccgaggcc

SEQ ID NO: 259685 - RNA, 31 nt, Human
uggggaauggcugcugccauggugccggggc

SEQ ID NO: 259686 - RNA, 32 nt, Human
uggggaaugggcagguggccucugcuggucuc

SEQ ID NO: 259687 - RNA, 32 nt, Human
uggggaaugugguaaccaggaggaagggucac

SEQ ID NO: 259688 - RNA, 24 nt, Human
uggggacaagcgguggagaagggu

SEQ ID NO: 259689 - RNA, 32 nt, Human
uggggacacagcaauaauguggguggcaguaa

SEQ ID NO: 259690 - RNA, 32 nt, Human
uggggacacagcacaaacgguguuuacgccac

SEQ ID NO: 259691 - RNA, 24 nt, Human
uggggacacagggcuccuagcaag

SEQ ID NO: 259692 - RNA, 32 nt, Human
uggggacacauaccccucaguacuguagcaug

SEQ ID NO: 259693 - RNA, 32 nt, Human
uggggacagaacucuccucucccacucuagca

SEQ ID NO: 259694 - RNA, 32 nt, Human
uggggacaggcaguggcaggcaccacuagcga

SEQ ID NO: 259695 - RNA, 24 nt, Human
uggggacaggcgcagugccugugg

SEQ ID NO: 259696 - RNA, 22 nt, Human
uggggacagguggccaaagugg

SEQ ID NO: 259697 - RNA, 24 nt, Human
uggggacaguggcucacaccugua

SEQ ID NO: 259698 - RNA, 32 nt, Human
uggggacaucccucucuaggccuaggccaugu

SEQ ID NO: 259699 - RNA, 32 nt, Human
uggggacauugccaccacgucgccaugacggc

SEQ ID NO: 259700 - RNA, 32 nt, Human
uggggacauugcucucugggcuuuugguuugg

SEQ ID NO: 259701 - RNA, 32 nt, Human
uggggaccaacggaaagaguucacgaugggag

SEQ ID NO: 259702 - RNA, 32 nt, Human
uggggaccacacaggcaccugccuuccuagau

SEQ ID NO: 259703 - RNA, 32 nt, Human
uggggaccagccgccgcgcccgccucggaguc

SEQ ID NO: 259704 - RNA, 32 nt, Human
uggggaccaggauaugacuccuggugcccagg

SEQ ID NO: 259705 - RNA, 32 nt, Human
uggggaccagggacugauuauuugucaccugg

SEQ ID NO: 259706 - RNA, 32 nt, Human
uggggaccagggaggugcaggugucugcagug

SEQ ID NO: 259707 - RNA, 32 nt, Human
uggggacccaaacuguaugcauuguuccagau

SEQ ID NO: 259708 - RNA, 32 nt, Human
uggggacccagagggaaggcagaaggagauga

SEQ ID NO: 259709 - RNA, 19 nt, Human
uggggacccagcucaggga

SEQ ID NO: 259710 - RNA, 32 nt, Human
uggggaccccaucuccccuuggagacuuuggg

SEQ ID NO: 259711 - RNA, 32 nt, Human
uggggaccccuccaggaagaugcugacaucca

SEQ ID NO: 259712 - RNA, 32 nt, Human
uggggaccccuguacuugggggagacacaccu

SEQ ID NO: 259713 - RNA, 32 nt, Human
uggggacccgggggagcugagauacaguuggc

SEQ ID NO: 259714 - RNA, 32 nt, Human
uggggacccuccaggcacuggugagagacaug

SEQ ID NO: 259715 - RNA, 32 nt, Human
uggggacccugggcccaucucucccugcgcac

SEQ ID NO: 259716 - RNA, 32 nt, Human
uggggacccuggggaccuugccgacucuauuc

SEQ ID NO: 259717 - RNA, 32 nt, Human
uggggaccgagauagagagggagaccccauuc

SEQ ID NO: 259718 - RNA, 32 nt, Human
uggggaccgggugaggggccugacggcagagu

SEQ ID NO: 259719 - RNA, 32 nt, Human
uggggaccuccacgggggaaugggauccaggc

SEQ ID NO: 259720 - RNA, 32 nt, Human
uggggaccugaccucugucacucucaugaaau

SEQ ID NO: 259721 - RNA, 18 nt, Human
uggggaccuggccaguga

SEQ ID NO: 259722 - RNA, 32 nt, Human
uggggaccuuggcugcuggaggcugcaccuac

SEQ ID NO: 259723 - RNA, 31 nt, Human
uggggacgaguguccaggcugaagucagggc

SEQ ID NO: 259724 - RNA, 32 nt, Human
uggggacgguggcccugccuucaugcccagga

SEQ ID NO: 259725 - RNA, 23 nt, Human
uggggacucaaaauuaucaaaag

SEQ ID NO: 259726 - RNA, 32 nt, Human
uggggacucaggaagggaggcuuggagggggu

SEQ ID NO: 259727 - RNA, 32 nt, Human
uggggacuccaggauuuucugcucuuggccua

SEQ ID NO: 259728 - RNA, 32 nt, Human
uggggacucccaggaccacaggcugagacgag

SEQ ID NO: 259729 - RNA, 32 nt, Human
uggggacucugcucacuaccugggugacagga

SEQ ID NO: 259730 - RNA, 32 nt, Human
uggggacugggcugagaggguggacgaguuca

SEQ ID NO: 259731 - RNA, 21 nt, Human
uggggacugucauuuuuguga

SEQ ID NO: 259732 - RNA, 32 nt, Human
uggggacugugccauuaaaccucuuuuucuuu

SEQ ID NO: 259733 - RNA, 32 nt, Human
uggggacugugcucacuaccugggugacagga

SEQ ID NO: 259734 - RNA, 32 nt, Human
uggggacuguggccgccacccuucccaccgcc

SEQ ID NO: 259735 - RNA, 32 nt, Human
uggggacuuccagagugggcucccuaaacagc

SEQ ID NO: 259736 - RNA, 32 nt, Human
uggggagaaaaaugggaaguuguucacagaug

SEQ ID NO: 259737 - RNA, 32 nt, Human
uggggagaaaaguucccugggacugcacaagu

SEQ ID NO: 259738 - RNA, 20 nt, Human
uggggagaaaccagagcaga

SEQ ID NO: 259739 - RNA, 19 nt, Human
uggggagaaaccccacaaa

SEQ ID NO: 259740 - RNA, 18 nt, Human
uggggagaaaccuacaga

SEQ ID NO: 259741 - RNA, 32 nt, Human
uggggagaaagaaaaaguguauuacuuaaaga

SEQ ID NO: 259742 - RNA, 17 nt, Human
uggggagaaagggcaaa

SEQ ID NO: 259743 - RNA, 21 nt, Human
uggggagaaauaacuaguaga

SEQ ID NO: 259744 - RNA, 32 nt, Human
uggggagaaauaagaauggaaagguggcuuga

SEQ ID NO: 259745 - RNA, 19 nt, Human
uggggagaaccacacuaaa

SEQ ID NO: 259746 - RNA, 19 nt, Human
uggggagaagaaaacagca

SEQ ID NO: 259747 - RNA, 32 nt, Human
uggggagaagaagggaagagagcagcaguagc

SEQ ID NO: 259748 - RNA, 21 nt, Human
uggggagaagagaacauuaga

SEQ ID NO: 259749 - RNA, 32 nt, Human
uggggagaagaguaugcuuccuuuuauccaug

SEQ ID NO: 259750 - RNA, 20 nt, Human
uggggagaagccccagcaag

SEQ ID NO: 259751 - RNA, 19 nt, Human
uggggagaagcccuacaaa

SEQ ID NO: 259752 - RNA, 26 nt, Human
uggggagaaggaagauccucagugaa

SEQ ID NO: 259753 - RNA, 21 nt, Human
uggggagaagggagaagcaag

SEQ ID NO: 259754 - RNA, 19 nt, Human
uggggagaaguccaccaag

SEQ ID NO: 259755 - RNA, 32 nt, Human
uggggagaagugguccagguggagggaacagc

SEQ ID NO: 259756 - RNA, 19 nt, Human
uggggagaaucuaugcaag

SEQ ID NO: 259757 - RNA, 20 nt, Human
uggggagaauuuccaucaag

SEQ ID NO: 259758 - RNA, 19 nt, Human
uggggagacaggcagcaaa

SEQ ID NO: 259759 - RNA, 32 nt, Human
uggggagacagguggagaugaggugaagauca

SEQ ID NO: 259760 - RNA, 24 nt, Human
uggggagaccucaggauacuuaca

SEQ ID NO: 259761 - RNA, 32 nt, Human
uggggagacucagacgagggagguuucugaua

SEQ ID NO: 259762 - RNA, 20 nt, Human
uggggagagacacagucaaa

SEQ ID NO: 259763 - RNA, 32 nt, Human
uggggagagacaccccaaccucccaggguggg

SEQ ID NO: 259764 - RNA, 32 nt, Human
uggggagagaggcagaggcagcuggagcgccg

SEQ ID NO: 259765 - RNA, 18 nt, Human
uggggagagauaaggcaa

SEQ ID NO: 259766 - RNA, 32 nt, Human
uggggagagcccagaaggacauugcagacaga

SEQ ID NO: 259767 - RNA, 20 nt, Human
uggggagaggaaggggcaga

SEQ ID NO: 259768 - RNA, 32 nt, Human
uggggagaggacucaauagcuccaccccuucu

SEQ ID NO: 259769 - RNA, 22 nt, Human
uggggagaggaggaugagcaga

SEQ ID NO: 259770 - RNA, 19 nt, Human
uggggagaggaggcgcaag

SEQ ID NO: 259771 - RNA, 20 nt, Human
uggggagaggaguccauaga

SEQ ID NO: 259772 - RNA, 32 nt, Human
uggggagagggaggagaaagaggaggaucucg

SEQ ID NO: 259773 - RNA, 32 nt, Human
uggggagagggagggccgggaagccaggaaag

SEQ ID NO: 259774 - RNA, 32 nt, Human
uggggagagggaggggagagaccacagccggg

SEQ ID NO: 259775 - RNA, 20 nt, Human
uggggagaggguggggcaga

SEQ ID NO: 259776 - RNA, 32 nt, Human
uggggagagguggaggcugacagcugagacgu

SEQ ID NO: 259777 - RNA, 32 nt, Human
uggggagagguguggagaaggagagaacaugg

SEQ ID NO: 259778 - RNA, 32 nt, Human
uggggagagguguucgguuuccccagccuguu

SEQ ID NO: 259779 - RNA, 32 nt, Human
uggggagaguagaagggaaagcugaccuugaa

SEQ ID NO: 259780 - RNA, 20 nt, Human
uggggagagucaacaggaaa

SEQ ID NO: 259781 - RNA, 32 nt, Human
uggggagaguuuacauaaggaagagaagaaau

SEQ ID NO: 259782 - RNA, 32 nt, Human
uggggagauccagcagccuaagcuuagaaagg

SEQ ID NO: 259783 - RNA, 32 nt, Human
uggggagaucugcagaagcaucagaccaggca

SEQ ID NO: 259784 - RNA, 16 nt, Human
uggggagaugagcaga

SEQ ID NO: 259785 - RNA, 32 nt, Human
uggggagaugggcugggaggggagaucccgga

SEQ ID NO: 259786 - RNA, 20 nt, Human
uggggagauuuugccacaaa

SEQ ID NO: 259787 - RNA, 32 nt, Human
uggggagcaaaccuggcuugauggcauuuugu

SEQ ID NO: 259788 - RNA, 26 nt, Human
uggggagcaacuuuugaguaucuuua

SEQ ID NO: 259789 - RNA, 32 nt, Human
uggggagcacagaaggccaguugcugagcagg

SEQ ID NO: 259790 - RNA, 32 nt, Human
uggggagcacagaggcugccugugucagggag

SEQ ID NO: 259791 - RNA, 32 nt, Human
uggggagcaggagagagaggguaggcuagggg

SEQ ID NO: 259792 - RNA, 22 nt, Human
uggggagcaggucucuggcaga

SEQ ID NO: 259793 - RNA, 32 nt, Human
uggggagcagucccucugcaccccagagugag

SEQ ID NO: 259794 - RNA, 32 nt, Human
uggggagcaguuuuccccuggccucaguuccc

SEQ ID NO: 259795 - RNA, 32 nt, Human
uggggagcauagaaaaacugggaagagagguu

SEQ ID NO: 259796 - RNA, 32 nt, Human
uggggagcauugcaccuggcaugaggaguggg

SEQ ID NO: 259797 - RNA, 32 nt, Human
uggggagccaaggcaggagaaucgcuuuaggc

SEQ ID NO: 259798 - RNA, 20 nt, Human
uggggagccagcccagcaag

SEQ ID NO: 259799 - RNA, 32 nt, Human
uggggagccaggagucgcggccccugccuccc

SEQ ID NO: 259800 - RNA, 32 nt, Human
uggggagcccaggauggagguggcggucgcgg

SEQ ID NO: 259801 - RNA, 32 nt, Human
uggggagcccccaguggcggggacagggccag

SEQ ID NO: 259802 - RNA, 32 nt, Human
uggggagccgcuggggagccaccccauucauc

SEQ ID NO: 259803 - RNA, 32 nt, Human
uggggagccugccucccuagcuccuggccccu

SEQ ID NO: 259804 - RNA, 32 nt, Human
uggggagccuuccccaccuuagcugucuccug

SEQ ID NO: 259805 - RNA, 32 nt, Human
uggggagcuacgacagauuggccaaagacuca

SEQ ID NO: 259806 - RNA, 32 nt, Human
uggggagcucagagcugagauccuacaggagu

SEQ ID NO: 259807 - RNA, 32 nt, Human
uggggagcugaacugcccgagacacugucgca

SEQ ID NO: 259808 - RNA, 32 nt, Human
uggggagcuggcagggcagaggagguagucug

SEQ ID NO: 259809 - RNA, 32 nt, Human
uggggagcuugcccuuuaccuccagggcugcu

SEQ ID NO: 259810 - RNA, 32 nt, Human
uggggagcuuggcugagggucugggaaaugag

SEQ ID NO: 259811 - RNA, 32 nt, Human
uggggagcuuuugcccacacacuuuccaucuc

SEQ ID NO: 259812 - RNA, 32 nt, Human
uggggaggaacagacuggcaggaagcacaccg

SEQ ID NO: 259813 - RNA, 18 nt, Human
uggggaggaacagucaag

SEQ ID NO: 259814 - RNA, 19 nt, Human
uggggaggaaccaugcaaa

SEQ ID NO: 259815 - RNA, 21 nt, Human
uggggaggaagagcaaguaga

SEQ ID NO: 259816 - RNA, 32 nt, Human
uggggaggaagaggaggaagaggaaggggaga

SEQ ID NO: 259817 - RNA, 20 nt, Human
uggggaggaagcucaccaaa

SEQ ID NO: 259818 - RNA, 21 nt, Human
uggggaggaagggccaggaga

SEQ ID NO: 259819 - RNA, 32 nt, Human
uggggaggaaugagaggguccaggcagggugu

SEQ ID NO: 259820 - RNA, 19 nt, Human
uggggaggaccagggcccu

SEQ ID NO: 259821 - RNA, 32 nt, Human
uggggaggacccagcuuccagcccaggaagcc

SEQ ID NO: 259822 - RNA, 32 nt, Human
uggggaggaccggaggagagaggaccccgccu

SEQ ID NO: 259823 - RNA, 18 nt, Human
uggggaggagaacucagc

SEQ ID NO: 259824 - RNA, 32 nt, Human
uggggaggagagagggggagaccccuuugccu

SEQ ID NO: 259825 - RNA, 18 nt, Human
uggggaggagaucccugu

SEQ ID NO: 259826 - RNA, 18 nt, Human
uggggaggaggaagcgga

SEQ ID NO: 259827 - RNA, 19 nt, Human
uggggaggaggacccggca

SEQ ID NO: 259828 - RNA, 32 nt, Human
uggggaggaggcaccauuugcuggaacugaag

SEQ ID NO: 259829 - RNA, 19 nt, Human
uggggaggaggcccgugca

SEQ ID NO: 259830 - RNA, 32 nt, Human
uggggaggaggcggaggcagcggcuggaggag

SEQ ID NO: 259831 - RNA, 21 nt, Human
uggggaggagggacauguaga

SEQ ID NO: 259832 - RNA, 20 nt, Human
uggggaggagggcaggcaga

SEQ ID NO: 259833 - RNA, 32 nt, Human
uggggaggagggcuggucuccgcuccucaggg

SEQ ID NO: 259834 - RNA, 21 nt, Human
uggggaggaggucagaggaga

SEQ ID NO: 259835 - RNA, 32 nt, Human
uggggaggagugagaaaaggagagcaggaaag

SEQ ID NO: 259836 - RNA, 19 nt, Human
uggggaggagugccagcaa

SEQ ID NO: 259837 - RNA, 32 nt, Human
uggggaggaguggggcagggcagagaaucccc

SEQ ID NO: 259838 - RNA, 19 nt, Human
uggggaggauggcugcaaa

SEQ ID NO: 259839 - RNA, 22 nt, Human
uggggaggcaagaucucaggga

SEQ ID NO: 259840 - RNA, 21 nt, Human
uggggaggcagagccaggaag

SEQ ID NO: 259841 - RNA, 31 nt, Human
uggggaggcagcuagauaccaaaccauucua

SEQ ID NO: 259842 - RNA, 32 nt, Human
uggggaggccacagcagggcugagggaacucu

SEQ ID NO: 259843 - RNA, 32 nt, Human
uggggaggccacccuuccugcccuacccgcag

SEQ ID NO: 259844 - RNA, 32 nt, Human
uggggaggcccagcuggagcggcgggcagugg

SEQ ID NO: 259845 - RNA, 32 nt, Human
uggggaggccccuccuuccugcagagccgucc

SEQ ID NO: 259846 - RNA, 32 nt, Human
uggggaggcccuccugcugccuuggggugaca

SEQ ID NO: 259847 - RNA, 32 nt, Human
uggggaggccgaggcaggcggaucacuugagg

SEQ ID NO: 259848 - RNA, 32 nt, Human
uggggaggccgaggcgggcagaucacgagauc

SEQ ID NO: 259849 - RNA, 32 nt, Human
uggggaggccgaggcggguggaucaggagguc

SEQ ID NO: 259850 - RNA, 32 nt, Human
uggggaggcguugccaucagaugcccugcggc

SEQ ID NO: 259851 - RNA, 32 nt, Human
uggggaggcuaaagcaggaggauggcuuuagc

SEQ ID NO: 259852 - RNA, 32 nt, Human
uggggaggcugaagcaggaaaaucgcuugaac

SEQ ID NO: 259853 - RNA, 32 nt, Human
uggggaggcugaaguaggaggaucauuuaugc

SEQ ID NO: 259854 - RNA, 32 nt, Human
uggggaggcugaggcacgagaaucacuugaac

SEQ ID NO: 259855 - RNA, 32 nt, Human
uggggaggcugaggcagcauugcuugaaccca

SEQ ID NO: 259856 - RNA, 32 nt, Human
uggggaggcugaggcaggaaaauggugucaac

SEQ ID NO: 259857 - RNA, 32 nt, Human
uggggaggcugaggcaggacaauggcgugaac

SEQ ID NO: 259858 - RNA, 32 nt, Human
uggggaggcugaggcaggagaauagcuugaac

SEQ ID NO: 259859 - RNA, 32 nt, Human
uggggaggcugaggcaggagaaucacuugaac

SEQ ID NO: 259860 - RNA, 32 nt, Human
uggggaggcugaggcaggagaaucacuugaau

SEQ ID NO: 259861 - RNA, 32 nt, Human
uggggaggcugaggcaggagaaucgcuugaac

SEQ ID NO: 259862 - RNA, 32 nt, Human
uggggaggcugaggcaggagaaucguuuuaac

SEQ ID NO: 259863 - RNA, 32 nt, Human
uggggaggcugaggcaggagaauggcaugaac

SEQ ID NO: 259864 - RNA, 32 nt, Human
uggggaggcugaggcaggagaauggcgugaac

SEQ ID NO: 259865 - RNA, 32 nt, Human
uggggaggcugaggcaggagaauggcuggaac

SEQ ID NO: 259866 - RNA, 32 nt, Human
uggggaggcugaggcaggagaauggcuuggag

SEQ ID NO: 259867 - RNA, 32 nt, Human
uggggaggcugaggcaggagaauugcuuaaau

SEQ ID NO: 259868 - RNA, 32 nt, Human
uggggaggcugaggcaggagaauugcuuugaa

SEQ ID NO: 259869 - RNA, 32 nt, Human
uggggaggcugaggcaggaggaucacuugaga

SEQ ID NO: 259870 - RNA, 32 nt, Human
uggggaggcugaggcaggcagaucacuuaggc

SEQ ID NO: 259871 - RNA, 32 nt, Human
uggggaggcugaggcgggagaaucgcuugaac

SEQ ID NO: 259872 - RNA, 32 nt, Human
uggggaggcugagguaggagaauucgcuugag

SEQ ID NO: 259873 - RNA, 32 nt, Human
uggggaggcugagucaggagaaucgcuugaac

SEQ ID NO: 259874 - RNA, 20 nt, Human
uggggaggcugcugcuuuca

SEQ ID NO: 259875 - RNA, 32 nt, Human
uggggaggcuggccggagagagagggaaggac

SEQ ID NO: 259876 - RNA, 32 nt, Human
uggggagggaaaggagagagaaggaaaggagu

SEQ ID NO: 259877 - RNA, 32 nt, Human
uggggagggaaagggcaccaggcagcccgugg

SEQ ID NO: 259878 - RNA, 32 nt, Human
uggggagggaagggaaggcagcuccaagaaga

SEQ ID NO: 259879 - RNA, 32 nt, Human
uggggagggagacauccagcuugggcuuuccc

SEQ ID NO: 259880 - RNA, 32 nt, Human
uggggagggagagagagggagggagagggagu

SEQ ID NO: 259881 - RNA, 32 nt, Human
uggggagggaggcagcgcggugguuaucaacc

SEQ ID NO: 259882 - RNA, 32 nt, Human
uggggagggagggagagaagagggggcuaaau

SEQ ID NO: 259883 - RNA, 32 nt, Human
uggggagggagggagaggccgccacccccgcc

SEQ ID NO: 259884 - RNA, 32 nt, Human
uggggagggaggguccggcuccccagcccuuc

SEQ ID NO: 259885 - RNA, 32 nt, Human
uggggagggagguggaggagccgugcaauccc

SEQ ID NO: 259886 - RNA, 32 nt, Human
uggggagggagugcccacgugggaucugagag

SEQ ID NO: 259887 - RNA, 32 nt, Human
uggggagggauaugauggagagccagccagug

SEQ ID NO: 259888 - RNA, 19 nt, Human
uggggagggauuucacaag

SEQ ID NO: 259889 - RNA, 21 nt, Human
uggggagggcaucccugcaaa

SEQ ID NO: 259890 - RNA, 32 nt, Human
uggggagggcccauuccauccaucuuaggccc

SEQ ID NO: 259891 - RNA, 32 nt, Human
uggggagggcuccagacccaaccuggucacaa

SEQ ID NO: 259892 - RNA, 22 nt, Human
uggggagggcugccucagcaga

SEQ ID NO: 259893 - RNA, 32 nt, Human
uggggagggcugggagggggagggaacuuuua

SEQ ID NO: 259894 - RNA, 32 nt, Human
uggggagggcuggggacuaugcaauuccaaag

SEQ ID NO: 259895 - RNA, 19 nt, Human
uggggaggggaagaguaaa

SEQ ID NO: 259896 - RNA, 32 nt, Human
uggggaggggaaggagcggcacaugggguuga

SEQ ID NO: 259897 - RNA, 32 nt, Human
uggggaggggagagaggugggggcaaggggga

SEQ ID NO: 259898 - RNA, 32 nt, Human
uggggaggggagcgggacaggcgacacaggag

SEQ ID NO: 259899 - RNA, 32 nt, Human
uggggaggggauguccaggcaggugcgagcau

SEQ ID NO: 259900 - RNA, 18 nt, Human
uggggaggggcaggggga

SEQ ID NO: 259901 - RNA, 19 nt, Human
uggggaggggccacgcgga

SEQ ID NO: 259902 - RNA, 21 nt, Human
uggggaggggcccagagcaaa

SEQ ID NO: 259903 - RNA, 32 nt, Human
uggggaggggcuccguguagcaacccaggugu

SEQ ID NO: 259904 - RNA, 32 nt, Human
uggggaggggcugcggaaggaggaggcucagg

SEQ ID NO: 259905 - RNA, 32 nt, Human
uggggagggggaggggagaguaucaugggaga

SEQ ID NO: 259906 - RNA, 32 nt, Human
uggggagggggaggggcaggagcuuggaccuu

SEQ ID NO: 259907 - RNA, 32 nt, Human
uggggagggggagggggaagugucugccuuua

SEQ ID NO: 259908 - RNA, 32 nt, Human
uggggagggggcuguaacucagugaguggcuu

SEQ ID NO: 259909 - RNA, 23 nt, Human
uggggagggggucaccuagggga

SEQ ID NO: 259910 - RNA, 22 nt, Human
uggggagggggucucucccgaa

SEQ ID NO: 259911 - RNA, 21 nt, Human
uggggaggggguggccggcga

SEQ ID NO: 259912 - RNA, 18 nt, Human
uggggagggguaggggga

SEQ ID NO: 259913 - RNA, 32 nt, Human
uggggaggggugggacaaacugcaagguucug

SEQ ID NO: 259914 - RNA, 32 nt, Human
uggggaggguuucuuggguuucuugaagccag

SEQ ID NO: 259915 - RNA, 32 nt, Human
uggggagguagagguuacagcgagccaagauc

SEQ ID NO: 259916 - RNA, 32 nt, Human
uggggaggucagggaggcggggccaagggugu

SEQ ID NO: 259917 - RNA, 32 nt, Human
uggggaggucccagaggugggaggcuggcauc

SEQ ID NO: 259918 - RNA, 32 nt, Human
uggggaggucuggauggaucuguguaggaguu

SEQ ID NO: 259919 - RNA, 32 nt, Human
uggggaggugaguucuggaaggcaggggcucu

SEQ ID NO: 259920 - RNA, 21 nt, Human
uggggagguggauuuagcaga

SEQ ID NO: 259921 - RNA, 32 nt, Human
uggggagguggcacuagggaucaaagaagaug

SEQ ID NO: 259922 - RNA, 21 nt, Human
uggggagguggcccaggcaga

SEQ ID NO: 259923 - RNA, 24 nt, Human
uggggagguggucccuccagcgga

SEQ ID NO: 259924 - RNA, 32 nt, Human
uggggaggugugaacucaagggccuagcccca

SEQ ID NO: 259925 - RNA, 32 nt, Human
uggggagucaacuaauuugccugaggccacac

SEQ ID NO: 259926 - RNA, 32 nt, Human
uggggagucacucagaauaucacuguaaauga

SEQ ID NO: 259927 - RNA, 32 nt, Human
uggggagucagaaaauugggaacucauaucaa

SEQ ID NO: 259928 - RNA, 32 nt, Human
uggggagucauccgcagagucacucacccacu

SEQ ID NO: 259929 - RNA, 32 nt, Human
uggggagucggggccuuccugggagcuggaac

SEQ ID NO: 259930 - RNA, 32 nt, Human
uggggagucugcuucauuucuaucauuccauu

SEQ ID NO: 259931 - RNA, 32 nt, Human
uggggagugagcugauggcuccgagacugguc

SEQ ID NO: 259932 - RNA, 32 nt, Human
uggggagugaucucuuggacacagagccccca

SEQ ID NO: 259933 - RNA, 32 nt, Human
uggggagugccacccuggagccuaccggcaca

SEQ ID NO: 259934 - RNA, 18 nt, Human
uggggagugcccagcaag

SEQ ID NO: 259935 - RNA, 32 nt, Human
uggggagugggaacagggaggggcagaaaacc

SEQ ID NO: 259936 - RNA, 32 nt, Human
uggggaguggguacuugugagccucggacaca

SEQ ID NO: 259937 - RNA, 21 nt, Human
uggggaguggguccaaguaag

SEQ ID NO: 259938 - RNA, 32 nt, Human
uggggaguggguggcaggugggggugggcugc

SEQ ID NO: 259939 - RNA, 32 nt, Human
uggggagugguuuccaggagcugccugguguc

SEQ ID NO: 259940 - RNA, 32 nt, Human
uggggagugugaggacauggagggugggaggc

SEQ ID NO: 259941 - RNA, 32 nt, Human
uggggaguugcugcuggguggggugccacagg

SEQ ID NO: 259942 - RNA, 32 nt, Human
uggggaguuggcugaaggacuuggggagccca

SEQ ID NO: 259943 - RNA, 32 nt, Human
uggggaguuucuuccuggcaucaugccuucug

SEQ ID NO: 259944 - RNA, 32 nt, Human
uggggauaccuuccugcuguccuuccugagca

SEQ ID NO: 259945 - RNA, 25 nt, Human
uggggauaguaaugcacaaaauggu

SEQ ID NO: 259946 - RNA, 32 nt, Human
uggggauaugguuucuugaagcauuuuuaggc

SEQ ID NO: 259947 - RNA, 21 nt, Human
uggggauaugucaucugugaa

SEQ ID NO: 259948 - RNA, 32 nt, Human
uggggaucacagccucaccccugccccugugg

SEQ ID NO: 259949 - RNA, 32 nt, Human
uggggaucagaaaggugggcuugcuggagcug

SEQ ID NO: 259950 - RNA, 32 nt, Human
uggggaucagaggaugggguggucagugguag

SEQ ID NO: 259951 - RNA, 19 nt, Human
uggggaucaggccccagag

SEQ ID NO: 259952 - RNA, 32 nt, Human
uggggaucagggagguggagggacagugugaa

SEQ ID NO: 259953 - RNA, 32 nt, Human
uggggaucauuuuucucuucugaaccccagaa

SEQ ID NO: 259954 - RNA, 32 nt, Human
uggggauccacaggaacgacauucauacaggg

SEQ ID NO: 259955 - RNA, 23 nt, Human
uggggauccccuggccaagaggg

SEQ ID NO: 259956 - RNA, 32 nt, Human
uggggaugacuauccccucucugguuauugua

SEQ ID NO: 259957 - RNA, 32 nt, Human
uggggaugagccaggcuggggacaguggggcu

SEQ ID NO: 259958 - RNA, 32 nt, Human
uggggaugaggguggugagccccugggcgugg

SEQ ID NO: 259959 - RNA, 32 nt, Human
uggggaugcagccagcuggccugcacugggug

SEQ ID NO: 259960 - RNA, 32 nt, Human
uggggaugccuauagguugucugugaaaucgc

SEQ ID NO: 259961 - RNA, 19 nt, Human
uggggauggccagggcccu

SEQ ID NO: 259962 - RNA, 30 nt, Human
uggggauggggaaggagcaggagcugcugg

SEQ ID NO: 259963 - RNA, 32 nt, Human
uggggaugggggugggauaugaggguggcaug

SEQ ID NO: 259964 - RNA, 32 nt, Human
uggggaugguaaccucacugccccgucacucc

SEQ ID NO: 259965 - RNA, 32 nt, Human
uggggauggugagaauggagguucuagaaggg

SEQ ID NO: 259966 - RNA, 24 nt, Human
uggggaugguggcucacaccugug

SEQ ID NO: 259967 - RNA, 32 nt, Human
uggggauggugggagcagaagagcagaggcug

SEQ ID NO: 259968 - RNA, 32 nt, Human
uggggaugguugucccugcaacauggugccac

SEQ ID NO: 259969 - RNA, 32 nt, Human
uggggaugugccacugucacucagaagggcaa

SEQ ID NO: 259970 - RNA, 18 nt, Human
uggggauucacccagugg

SEQ ID NO: 259971 - RNA, 32 nt, Human
uggggauuccagggaccccacuuagugcucua

SEQ ID NO: 259972 - RNA, 32 nt, Human
uggggauucugccacaccuccguguccugcuc

SEQ ID NO: 259973 - RNA, 18 nt, Human
uggggauucuggaugcaa

SEQ ID NO: 259974 - RNA, 32 nt, Human
uggggauucuuucuuuugguccuuccuggaau

SEQ ID NO: 259975 - RNA, 32 nt, Human
uggggauugcagcguucucgaaguggcuguag

SEQ ID NO: 259976 - RNA, 32 nt, Human
uggggauuugaacccaggucuaccuguugcag

SEQ ID NO: 259977 - RNA, 32 nt, Human
uggggauuugguuacauccuugcuaagcccca

SEQ ID NO: 259978 - RNA, 32 nt, Human
uggggcaaaauguggacaaggaaucuuauggc

SEQ ID NO: 259979 - RNA, 18 nt, Human
uggggcaaacagcccccu

SEQ ID NO: 259980 - RNA, 32 nt, Human
uggggcaacuccagagagaagcauccccuggc

SEQ ID NO: 259981 - RNA, 32 nt, Human
uggggcaagaguugguacaaacagaaauacua

SEQ ID NO: 259982 - RNA, 32 nt, Human
uggggcaagaucccccagcccgacuagaccca

SEQ ID NO: 259983 - RNA, 32 nt, Human
uggggcaagugaguuaggggcccaggggcaau

SEQ ID NO: 259984 - RNA, 23 nt, Human
uggggcaaucucggcucacugca

SEQ ID NO: 259985 - RNA, 23 nt, Human
uggggcaaucuuggcucccugca

SEQ ID NO: 259986 - RNA, 32 nt, Human
uggggcacaaggggacuggaggcaguugcuuu

SEQ ID NO: 259987 - RNA, 32 nt, Human
uggggcacagccugcccaaccccagauaguca

SEQ ID NO: 259988 - RNA, 32 nt, Human
uggggcaccaauaacaaggagcucacccugcc

SEQ ID NO: 259989 - RNA, 19 nt, Human
uggggcaccaccuagugga

SEQ ID NO: 259990 - RNA, 21 nt, Human
uggggcacccaggagggcccu

SEQ ID NO: 259991 - RNA, 32 nt, Human
uggggcaccugaaagaaauuagugugggugcu

SEQ ID NO: 259992 - RNA, 32 nt, Human
uggggcaccuugcuccuccuucugcugcugcc

SEQ ID NO: 259993 - RNA, 18 nt, Human
uggggcacgaacauuuua

SEQ ID NO: 259994 - RNA, 32 nt, Human
uggggcacucacugccccucauccccagaaau

SEQ ID NO: 259995 - RNA, 32 nt, Human
uggggcagagcuggaagaggaaaggucuuggg

SEQ ID NO: 259996 - RNA, 32 nt, Human
uggggcagaggacauguggcuggcaggcuaca

SEQ ID NO: 259997 - RNA, 32 nt, Human
uggggcagaggacccggugccugccuggcaga

SEQ ID NO: 259998 - RNA, 32 nt, Human
uggggcagagggacagggcagccagaccaagg

SEQ ID NO: 259999 - RNA, 32 nt, Human
uggggcagagguggggaugugaagguagauac

SEQ ID NO: 260000 - RNA, 32 nt, Human
uggggcagauggggcuuuaccagcgucgggug

SEQ ID NO: 260001 - RNA, 32 nt, Human
uggggcagcaauggcugugcauuuuucagguu

SEQ ID NO: 260002 - RNA, 32 nt, Human
uggggcagccacggggacaggacgggguuggg

SEQ ID NO: 260003 - RNA, 32 nt, Human
uggggcagccaucccggccauucugagguaug

SEQ ID NO: 260004 - RNA, 32 nt, Human
uggggcagccccggaaggaaccagggauuagg

SEQ ID NO: 260005 - RNA, 32 nt, Human
uggggcagccuccugauggggauguuuggccu

SEQ ID NO: 260006 - RNA, 32 nt, Human
uggggcagccuggcugugggaggugaugacau

SEQ ID NO: 260007 - RNA, 32 nt, Human
uggggcagccuggggcaaggggaggggccagc

SEQ ID NO: 260008 - RNA, 32 nt, Human
uggggcagcugaggcagggcuaggagaagagc

SEQ ID NO: 260009 - RNA, 32 nt, Human
uggggcagcuggcacucaccaggccuggguca

SEQ ID NO: 260010 - RNA, 32 nt, Human
uggggcaggacaacaucaccguacugcaugug

SEQ ID NO: 260011 - RNA, 32 nt, Human
ugguggaacauggugcccuggcccaucuuccc

SEQ ID NO: 260012 - RNA, 32 nt, Human
ugguggaaccagccccuccagccuggggucca

SEQ ID NO: 260013 - RNA, 32 nt, Human
ugguggaagaccaguaauugcuggaagacugg

SEQ ID NO: 260014 - RNA, 32 nt, Human
ugguggaagcaguucacuuaaaggccaugagu

SEQ ID NO: 260015 - RNA, 32 nt, Human
ugguggaaggugucgccugcucuggcugagua

SEQ ID NO: 260016 - RNA, 32 nt, Human
ugguggaaucucugcugacgucacgucacucc

SEQ ID NO: 260017 - RNA, 32 nt, Human
ugguggaaugcgagagucucagccugaagcag

SEQ ID NO: 260018 - RNA, 32 nt, Human
ugguggacagucagggggcaguggccuggggg

SEQ ID NO: 260019 - RNA, 32 nt, Human
ugguggacagugccccucccaccuuccuucuu

SEQ ID NO: 260020 - RNA, 32 nt, Human
ugguggaccaacaugaaacucacugcaaagga

SEQ ID NO: 260021 - RNA, 32 nt, Human
ugguggacgccuguaaucccagcuacuuggga

SEQ ID NO: 260022 - RNA, 25 nt, Human
ugguggacugcagagcugcuuccac

SEQ ID NO: 260023 - RNA, 32 nt, Human
ugguggacuguacugauacucaacuagagugu

SEQ ID NO: 260024 - RNA, 32 nt, Human
ugguggagaacagagagaugagaagcagaggg

SEQ ID NO: 260025 - RNA, 19 nt, Human
ugguggagaaccacagcug

SEQ ID NO: 260026 - RNA, 32 nt, Human
ugguggagaaggucuagccaggcuccagacug

SEQ ID NO: 260027 - RNA, 32 nt, Human
ugguggagacagggucucaccauguuggcuag

SEQ ID NO: 260028 - RNA, 32 nt, Human
ugguggagacgggguuucaccguguuggccgg

SEQ ID NO: 260029 - RNA, 32 nt, Human
ugguggagacgggguuucgcuguguuggccgg

SEQ ID NO: 260030 - RNA, 32 nt, Human
ugguggagacgggguuucuccauguuggucag

SEQ ID NO: 260031 - RNA, 32 nt, Human
ugguggagaggagagggagaaagggaaguccc

SEQ ID NO: 260032 - RNA, 32 nt, Human
ugguggagaugggguuucgccauauugaucag

SEQ ID NO: 260033 - RNA, 32 nt, Human
ugguggagauggguuuucaccauguuggccag

SEQ ID NO: 260034 - RNA, 32 nt, Human
ugguggagcccagccagcuguggacuuuaagu

SEQ ID NO: 260035 - RNA, 32 nt, Human
ugguggagcuccaggagguuugucucucuugu

SEQ ID NO: 260036 - RNA, 32 nt, Human
ugguggagcuggcaagagaccugcuggaguuc

SEQ ID NO: 260037 - RNA, 32 nt, Human
ugguggagcugggcugggaccuccgggcugcu

SEQ ID NO: 260038 - RNA, 32 nt, Human
ugguggagcugggguuucucuccuccccaguc

SEQ ID NO: 260039 - RNA, 32 nt, Human
ugguggaggacggagagaaaccucuuuauuuc

SEQ ID NO: 260040 - RNA, 32 nt, Human
ugguggaggaggaggaggaggaggaaggcaaa

SEQ ID NO: 260041 - RNA, 32 nt, Human
ugguggaggcggcggaggcggcggcggaggcg

SEQ ID NO: 260042 - RNA, 32 nt, Human
ugguggagugugacggaggcauggggccugug

SEQ ID NO: 260043 - RNA, 32 nt, Human
ugguggaugauggcagagcauagauucuacuc

SEQ ID NO: 260044 - RNA, 19 nt, Human
ugguggauggcucuggaga

SEQ ID NO: 260045 - RNA, 32 nt, Human
ugguggaugggcccugcaagacacaggcucag

SEQ ID NO: 260046 - RNA, 32 nt, Human
ugguggauguagcacaauuuccacacugugaa

SEQ ID NO: 260047 - RNA, 32 nt, Human
ugguggcaauuuaagcacaaagguacucauuu

SEQ ID NO: 260048 - RNA, 32 nt, Human
ugguggcacacauaccuguaaucccagcuacu

SEQ ID NO: 260049 - RNA, 32 nt, Human
ugguggcacaugcaccuguaaucccagcuacu

SEQ ID NO: 260050 - RNA, 32 nt, Human
ugguggcaccacugagccuagaccauggagcc

SEQ ID NO: 260051 - RNA, 32 nt, Human
ugguggcaccacugcacuccagccugggugac

SEQ ID NO: 260052 - RNA, 32 nt, Human
ugguggcaccacugcccuccagccuggaugac

SEQ ID NO: 260053 - RNA, 32 nt, Human
ugguggcacccaggcgaguggugcccagguga

SEQ ID NO: 260054 - RNA, 32 nt, Human
ugguggcacccaggugagugguguccagguga

SEQ ID NO: 260055 - RNA, 32 nt, Human
ugguggcaccugggaaacagagcgagacgcug

SEQ ID NO: 260056 - RNA, 32 nt, Human
ugguggcacucccugugccccugcugcugcug

SEQ ID NO: 260057 - RNA, 32 nt, Human
ugguggcacuucucuguaaucucagcuucuca

SEQ ID NO: 260058 - RNA, 32 nt, Human
ugguggcagaaacaugcauuugccauaaauaa

SEQ ID NO: 260059 - RNA, 32 nt, Human
ugguggcagaaccgagcacuacccagcaaggu

SEQ ID NO: 260060 - RNA, 32 nt, Human
ugguggcagagcaguuggcacaccugugggug

SEQ ID NO: 260061 - RNA, 32 nt, Human
ugguggcagagccagucuucugggccucacau

SEQ ID NO: 260062 - RNA, 32 nt, Human
ugguggcagagucucaaagcugagaugcugag

SEQ ID NO: 260063 - RNA, 32 nt, Human
ugguggcagcagcgucaguagagacagagaac

SEQ ID NO: 260064 - RNA, 32 nt, Human
ugguggcaggaggaaaauugauaaaucagagg

SEQ ID NO: 260065 - RNA, 32 nt, Human
ugguggcagggauggagguuacgcaugggcuc

SEQ ID NO: 260066 - RNA, 32 nt, Human
ugguggcaguggcucccagcacuuugggaggc

SEQ ID NO: 260067 - RNA, 19 nt, Human
ugguggcaguggcugugau

SEQ ID NO: 260068 - RNA, 21 nt, Human
ugguggccacaagcacucagg

SEQ ID NO: 260069 - RNA, 32 nt, Human
ugguggccacugcuacagcugguccacagaga

SEQ ID NO: 260070 - RNA, 23 nt, Human
ugguggccagagaggcuccaggg

SEQ ID NO: 260071 - RNA, 21 nt, Human
ugguggccaggggcugugggg

SEQ ID NO: 260072 - RNA, 32 nt, Human
ugguggccauguacuuggaaaaaggccgcaug

SEQ ID NO: 260073 - RNA, 21 nt, Human
ugguggccauugugcuugggg

SEQ ID NO: 260074 - RNA, 32 nt, Human
ugguggcccaggagacagcacaccaccaggcu

SEQ ID NO: 260075 - RNA, 32 nt, Human
ugguggcccaggaggcggcaggacggccaaga

SEQ ID NO: 260076 - RNA, 32 nt, Human
ugguggcccagggagugugaggcugcagccuc

SEQ ID NO: 260077 - RNA, 28 nt, Human
ugguggcccagggcugccuccuucccug

SEQ ID NO: 260078 - RNA, 32 nt, Human
ugguggcccaggucuucaggcugcaacaggcc

SEQ ID NO: 260079 - RNA, 32 nt, Human
ugguggccccuccagauggucuccaccagcac

SEQ ID NO: 260080 - RNA, 32 nt, Human
ugguggcccggcgggcagcccagcucuguggu

SEQ ID NO: 260081 - RNA, 32 nt, Human
ugguggcccuccuccccaucucaguuugcaac

SEQ ID NO: 260082 - RNA, 32 nt, Human
ugguggcccugggauggggaaccgcgguggcu

SEQ ID NO: 260083 - RNA, 32 nt, Human
ugguggccgagaggaggcacggaggagaguca

SEQ ID NO: 260084 - RNA, 23 nt, Human
ugguggccgggguguggcucagg

SEQ ID NO: 260085 - RNA, 32 nt, Human
ugguggccgucuccacucccuaggcaaguucu

SEQ ID NO: 260086 - RNA, 32 nt, Human
ugguggccgucuggcugaccugggccaauggg

SEQ ID NO: 260087 - RNA, 32 nt, Human
ugguggccuagacuccccaguauccacucuuc

SEQ ID NO: 260088 - RNA, 21 nt, Human
ugguggccuagugacucaggg

SEQ ID NO: 260089 - RNA, 32 nt, Human
ugguggccucaggcugucuggagguguuugga

SEQ ID NO: 260090 - RNA, 32 nt, Human
ugguggccugaggccaggaggcugcagcugcu

SEQ ID NO: 260091 - RNA, 32 nt, Human
ugguggccugggaggcagggccugggcagggc

SEQ ID NO: 260092 - RNA, 32 nt, Human
ugguggccugggaucuggcacacucccucucc

SEQ ID NO: 260093 - RNA, 32 nt, Human
ugguggccugguccuguuggggugggggucuu

SEQ ID NO: 260094 - RNA, 32 nt, Human
ugguggccuguaaucccagcuacuugggaggc

SEQ ID NO: 260095 - RNA, 32 nt, Human
ugguggcgaggugggagcuggcagagcgcagg

SEQ ID NO: 260096 - RNA, 32 nt, Human
ugguggcgcacaccuauaaucucagcuacuca

SEQ ID NO: 260097 - RNA, 32 nt, Human
ugguggcgcuggcugcgcucggccugcucgcc

SEQ ID NO: 260098 - RNA, 32 nt, Human
ugguggcggacaccuguaaucccugcugcuug

SEQ ID NO: 260099 - RNA, 32 nt, Human
ugguggcgggugccugggaggcugaggcagga

SEQ ID NO: 260100 - RNA, 32 nt, Human
ugguggcggucaccuguaacccaagcuacuug

SEQ ID NO: 260101 - RNA, 32 nt, Human
ugguggcgugagccuguaguccuagcuacucg

SEQ ID NO: 260102 - RNA, 32 nt, Human
ugguggcgugagccugucgucccagcuacuca

SEQ ID NO: 260103 - RNA, 32 nt, Human
ugguggcuaaugaagugaggggagggagggau

SEQ ID NO: 260104 - RNA, 32 nt, Human
ugguggcuacuuuuggucugaaacccacuugg

SEQ ID NO: 260105 - RNA, 32 nt, Human
ugguggcucaaaugccuguaaucccaguacuu

SEQ ID NO: 260106 - RNA, 21 nt, Human
ugguggcucaagccuguaauc

SEQ ID NO: 260107 - RNA, 32 nt, Human
ugguggcucacacccauaaucccaacacuuug

SEQ ID NO: 260108 - RNA, 32 nt, Human
ugguggcucacaccuauaaccccagcacuuug

SEQ ID NO: 260109 - RNA, 32 nt, Human
ugguggcucacaccuauaaucccaacacuuuc

SEQ ID NO: 260110 - RNA, 21 nt, Human
ugguggcucacaccuguaauc

SEQ ID NO: 260111 - RNA, 32 nt, Human
ugguggcucacaccuguaaucacugcacucca

SEQ ID NO: 260112 - RNA, 32 nt, Human
ugguggcucacaccuguaaucccaacccuuug

SEQ ID NO: 260113 - RNA, 32 nt, Human
ugguggcucacaccugucauuccggccucaga

SEQ ID NO: 260114 - RNA, 21 nt, Human
ugguggcucacgccuguaauc

SEQ ID NO: 260115 - RNA, 21 nt, Human
ugguggcucacgccuguaguc

SEQ ID NO: 260116 - RNA, 21 nt, Human
ugguggcucaggccuguaauc

SEQ ID NO: 260117 - RNA, 18 nt, Human
ugguggcucauaccugua

SEQ ID NO: 260118 - RNA, 32 nt, Human
ugguggcucauaccuguaaaucccagcacuuu

SEQ ID NO: 260119 - RNA, 21 nt, Human
ugguggcucauaccuguaauc

SEQ ID NO: 260120 - RNA, 32 nt, Human
ugguggcucauaccuguaaucccagcacuuug

SEQ ID NO: 260121 - RNA, 32 nt, Human
ugguggcucauaccuguaauccuagcacucug

SEQ ID NO: 260122 - RNA, 32 nt, Human
ugguggcucauaccuguaaucucagcacugug

SEQ ID NO: 260123 - RNA, 32 nt, Human
ugguggcucauaccuguuaauuccagcacuuu

SEQ ID NO: 260124 - RNA, 21 nt, Human
ugguggcucaugccuauaauc

SEQ ID NO: 260125 - RNA, 18 nt, Human
ugguggcucaugccugua

SEQ ID NO: 260126 - RNA, 21 nt, Human
ugguggcucaugccuguaauc

SEQ ID NO: 260127 - RNA, 21 nt, Human
ugguggcucaugccuguaguc

SEQ ID NO: 260128 - RNA, 21 nt, Human
ugguggcucaugucuauaauc

SEQ ID NO: 260129 - RNA, 23 nt, Human
ugguggcugacaucagcguccau

SEQ ID NO: 260130 - RNA, 32 nt, Human
ugguggcugagccagcuccuugaggauguggc

SEQ ID NO: 260131 - RNA, 22 nt, Human
ugguggcugagguguucacggg

SEQ ID NO: 260132 - RNA, 32 nt, Human
ugguggcugauguggaggagacagccagcacc

SEQ ID NO: 260133 - RNA, 32 nt, Human
ugguggcugcacccugccuggccccuguaacc

SEQ ID NO: 260134 - RNA, 32 nt, Human
ugguggcugggaaacauagaggauggaggugu

SEQ ID NO: 260135 - RNA, 32 nt, Human
ugguggcuggggaagaggaacgggcagcuggg

SEQ ID NO: 260136 - RNA, 32 nt, Human
ugguggcuguagucgcagcuacucaggaggcu

SEQ ID NO: 260137 - RNA, 32 nt, Human
ugguggcugugucuucaugugaaagaaacuga

SEQ ID NO: 260138 - RNA, 21 nt, Human
ugguggcuuacgccuguaauc

SEQ ID NO: 260139 - RNA, 32 nt, Human
ugguggcuuaggccaucacccuucccuuggcu

SEQ ID NO: 260140 - RNA, 21 nt, Human
ugguggcuuaugccuguaauc

SEQ ID NO: 260141 - RNA, 32 nt, Human
ugguggcuuuaaucccagcacuuugggaaccc

SEQ ID NO: 260142 - RNA, 32 nt, Human
uggugggaaaacacagguaagagggcauccuu

SEQ ID NO: 260143 - RNA, 32 nt, Human
uggugggaagagugccuggaggcccagaaguu

SEQ ID NO: 260144 - RNA, 32 nt, Human
uggugggaagccaguuggccagcuggggugag

SEQ ID NO: 260145 - RNA, 19 nt, Human
uggugggaaguaauugggu

SEQ ID NO: 260146 - RNA, 32 nt, Human
uggugggaauggcugcuucauuccucgaggau

SEQ ID NO: 260147 - RNA, 32 nt, Human
uggugggaaugggguuucaaccacguuggcca

SEQ ID NO: 260148 - RNA, 32 nt, Human
uggugggaauguaaauuaguucaaccauugug

SEQ ID NO: 260149 - RNA, 22 nt, Human
uggugggacacaccgaaagggu

SEQ ID NO: 260150 - RNA, 32 nt, Human
uggugggaccagggcuccacagaggccacaaa

SEQ ID NO: 260151 - RNA, 20 nt, Human
uggugggacccaggguccuc

SEQ ID NO: 260152 - RNA, 32 nt, Human
uggugggacuuguaucuugucugccauaucag

SEQ ID NO: 260153 - RNA, 32 nt, Human
uggugggagagggagacagauggaggcagugg

SEQ ID NO: 260154 - RNA, 32 nt, Human
uggugggagagggagaccuagagaucuggcug

SEQ ID NO: 260155 - RNA, 32 nt, Human
uggugggagagggaguggagugcaguguggcu

SEQ ID NO: 260156 - RNA, 32 nt, Human
uggugggaggauuggagguuggugggauaggg

SEQ ID NO: 260157 - RNA, 32 nt, Human
uggugggaggcgaugggauuauggggcagagu

SEQ ID NO: 260158 - RNA, 32 nt, Human
uggugggagucuagggccgaagaaaaacagcu

SEQ ID NO: 260159 - RNA, 32 nt, Human
uggugggaugcugaggucggaggcuucgcuug

SEQ ID NO: 260160 - RNA, 32 nt, Human
uggugggcaaacauguuaccaaguuaaacgcc

SEQ ID NO: 260161 - RNA, 32 nt, Human
uggugggcaaagcagccaccccacagccuugu

SEQ ID NO: 260162 - RNA, 32 nt, Human
uggugggcacagaaguagcucuggugaccuug

SEQ ID NO: 260163 - RNA, 32 nt, Human
uggugggcacagugccuguugcccugggaaag

SEQ ID NO: 260164 - RNA, 32 nt, Human
uggugggcaggcagucggacgcucagcaggac

SEQ ID NO: 260165 - RNA, 32 nt, Human
uggugggcaggggagagagggaaaugccaaaa

SEQ ID NO: 260166 - RNA, 32 nt, Human
uggugggcauaaggagaauuugugccuauaac

SEQ ID NO: 260167 - RNA, 32 nt, Human
uggugggcaugcugggcaggcuugggggugac

SEQ ID NO: 260168 - RNA, 32 nt, Human
uggugggcaugggguggggagcagggaguugc

SEQ ID NO: 260169 - RNA, 32 nt, Human
uggugggccaggcuggggcucgaggucucucc

SEQ ID NO: 260170 - RNA, 32 nt, Human
uggugggccaguguccaagcagagcuugugaa

SEQ ID NO: 260171 - RNA, 32 nt, Human
uggugggcgccuguaaucccagcuacuuggga

SEQ ID NO: 260172 - RNA, 32 nt, Human
uggugggcgccuguaaucucagcuacuuggga

SEQ ID NO: 260173 - RNA, 32 nt, Human
uggugggcgccuguaauuccagcuacucagga

SEQ ID NO: 260174 - RNA, 32 nt, Human
uggugggcgccuguaauuccagcuacucaggg

SEQ ID NO: 260175 - RNA, 32 nt, Human
uggugggcgccuguaauuccagcuacucggga

SEQ ID NO: 260176 - RNA, 32 nt, Human
uggugggcgccuguaauuccagcuacucugga

SEQ ID NO: 260177 - RNA, 32 nt, Human
uggugggcggccugaggugagagcccgaccgg

SEQ ID NO: 260178 - RNA, 32 nt, Human
uggugggcugagcccaggucuagguuucugug

SEQ ID NO: 260179 - RNA, 19 nt, Human
uggugggcuucagaugagu

SEQ ID NO: 260180 - RNA, 32 nt, Human
ugguggggaaggggccaucuguggaagaaaca

SEQ ID NO: 260181 - RNA, 32 nt, Human
ugguggggacugcucccuaacuccaggagcca

SEQ ID NO: 260182 - RNA, 32 nt, Human
ugguggggagacaaggaggagcgagggauacu

SEQ ID NO: 260183 - RNA, 32 nt, Human
ugguggggagaccauggcucagaggaagggug

SEQ ID NO: 260184 - RNA, 32 nt, Human
ugguggggagagaaagaauacagugaguucuu

SEQ ID NO: 260185 - RNA, 32 nt, Human
ugguggggagcacagacacaggauaggacucc

SEQ ID NO: 260186 - RNA, 32 nt, Human
ugguggggagcugggccaggagagggacugac

SEQ ID NO: 260187 - RNA, 22 nt, Human
ugguggggaggccuucuggaca

SEQ ID NO: 260188 - RNA, 17 nt, Human
ugguggggagucugaga

SEQ ID NO: 260189 - RNA, 21 nt, Human
ugguggggcaaagggcuggac

SEQ ID NO: 260190 - RNA, 32 nt, Human
ugguggggcaggaacgguggaggcagagguga

SEQ ID NO: 260191 - RNA, 20 nt, Human
ugguggggcagugggagaua

SEQ ID NO: 260192 - RNA, 32 nt, Human
ugguggggcccauggaggagacaggaagccuc

SEQ ID NO: 260193 - RNA, 32 nt, Human
ugguggggccugcagucaugaauggcaagugg

SEQ ID NO: 260194 - RNA, 18 nt, Human
ugguggggcggccugaga

SEQ ID NO: 260195 - RNA, 21 nt, Human
ugguggggcucuacugcgaca

SEQ ID NO: 260196 - RNA, 21 nt, Human
ugguggggcugggcgguccca

SEQ ID NO: 260197 - RNA, 22 nt, Human
ugguggggcuucuucuguaaca

SEQ ID NO: 260198 - RNA, 30 nt, Human
ugguggggcuuuuccaugcuuuuccucucc

SEQ ID NO: 260199 - RNA, 32 nt, Human
uggugggggaaagagacuuagaggagagaggc

SEQ ID NO: 260200 - RNA, 32 nt, Human
uggugggggaaggggaggaggggaagaaggaa

SEQ ID NO: 260201 - RNA, 19 nt, Human
uggugggggccccuggaca

SEQ ID NO: 260202 - RNA, 21 nt, Human
ugguggggggcagggccacuc

SEQ ID NO: 260203 - RNA, 32 nt, Human
ugguggggguuucucauuguucuccggcccug

SEQ ID NO: 260204 - RNA, 32 nt, Human
ugguggggucaccagaugggagggugggaggc

SEQ ID NO: 260205 - RNA, 32 nt, Human
ugguggguccucagagagagugucuggcgcau

SEQ ID NO: 260206 - RNA, 32 nt, Human
uggugggugagcagugguaugaagaggggaca

SEQ ID NO: 260207 - RNA, 22 nt, Human
uggugggugccccucugggaca

SEQ ID NO: 260208 - RNA, 32 nt, Human
uggugggugccuguaaccucagcuacuuggga

SEQ ID NO: 260209 - RNA, 32 nt, Human
uggugggugccuguaaucccagauacucagga

SEQ ID NO: 260210 - RNA, 32 nt, Human
uggugggugccuguaaucccagcuacauggga

SEQ ID NO: 260211 - RNA, 32 nt, Human
uggugggugccuguaaucccagcuacucaaga

SEQ ID NO: 260212 - RNA, 32 nt, Human
uggugggugccuguaaucccagcuacucagga

SEQ ID NO: 260213 - RNA, 32 nt, Human
uggugggugccuguaaucccagcuacucggga

SEQ ID NO: 260214 - RNA, 32 nt, Human
uggugggugccuguaaucccagcuacuuggga

SEQ ID NO: 260215 - RNA, 32 nt, Human
uggugggugccuguaaucccagcuucuuagga

SEQ ID NO: 260216 - RNA, 32 nt, Human
uggugggugccuguaaucccaguuacuuggga

SEQ ID NO: 260217 - RNA, 32 nt, Human
uggugggugccuguaauccuagcuacuuggga

SEQ ID NO: 260218 - RNA, 32 nt, Human
uggugggugccuguaaucucagcuacucggga

SEQ ID NO: 260219 - RNA, 32 nt, Human
uggugggugccuguaauuccagccacucgaga

SEQ ID NO: 260220 - RNA, 32 nt, Human
uggugggugccuguagucccagcuacucggga

SEQ ID NO: 260221 - RNA, 32 nt, Human
uggugggugccuguagucccagcuacucugga

SEQ ID NO: 260222 - RNA, 32 nt, Human
uggugggugccuguagucccagcuacuuggga

SEQ ID NO: 260223 - RNA, 32 nt, Human
uggugggugccuguaguuccagcuacuuggga

SEQ ID NO: 260224 - RNA, 32 nt, Human
ugguggguggcagucggggcugacggcggcgg

SEQ ID NO: 260225 - RNA, 32 nt, Human
ugguggguggggugggugguuuuuguuuuugu

SEQ ID NO: 260226 - RNA, 32 nt, Human
ugguggguggguggugugaguggcaucuuggc

SEQ ID NO: 260227 - RNA, 32 nt, Human
ugguggguuagugguccucaggaugugauaaa

SEQ ID NO: 260228 - RNA, 32 nt, Human
uggugguaaauggaugugagggcaaguacauc

SEQ ID NO: 260229 - RNA, 32 nt, Human
uggugguaaggcuuucaccaguucucaggaug

SEQ ID NO: 260230 - RNA, 32 nt, Human
uggugguacccuccucccccagcccaucuguu

SEQ ID NO: 260231 - RNA, 32 nt, Human
uggugguagcagcagacaagggaggagaaaug

SEQ ID NO: 260232 - RNA, 32 nt, Human
uggugguagggcaggagagcaaacaaacaguc

SEQ ID NO: 260233 - RNA, 32 nt, Human
ugguggucagcccucagagcuguuucuaggca

SEQ ID NO: 260234 - RNA, 32 nt, Human
ugguggucaguaguucaagaccaggcuggcca

SEQ ID NO: 260235 - RNA, 32 nt, Human
uggugguccaggagagacugggcugaagggag

SEQ ID NO: 260236 - RNA, 32 nt, Human
uggugguccugcccuucucccugcaugccugu

SEQ ID NO: 260237 - RNA, 31 nt, Human
ugguggucgagaccuguucacggaugguggg

SEQ ID NO: 260238 - RNA, 32 nt, Human
ugguggucuccuuuguguaaaauaacaacaga

SEQ ID NO: 260239 - RNA, 32 nt, Human
ugguggucucucuuacaccagcuccugccuca

SEQ ID NO: 260240 - RNA, 32 nt, Human
ugguggucucugcuuuguuuucugucuugucu

SEQ ID NO: 260241 - RNA, 32 nt, Human
ugguggucugggaggaucacaggaugucaagg

SEQ ID NO: 260242 - RNA, 32 nt, Human
ugguggugaagauggcaguuccauuuccauau

SEQ ID NO: 260243 - RNA, 32 nt, Human
ugguggugaagauggccaagauccccguaucg

SEQ ID NO: 260244 - RNA, 32 nt, Human
ugguggugacucugcuuccugcacugacccag

SEQ ID NO: 260245 - RNA, 32 nt, Human
ugguggugagagcacacguccuugucuuguuc

SEQ ID NO: 260246 - RNA, 32 nt, Human
ugguggugcaccacuguaccccagguucuagu

SEQ ID NO: 260247 - RNA, 24 nt, Human
ugguggugcaugccuauaauccca

SEQ ID NO: 260248 - RNA, 24 nt, Human
ugguggugcaugccugugguccca

SEQ ID NO: 260249 - RNA, 24 nt, Human
ugguggugcgugccugugauccca

SEQ ID NO: 260250 - RNA, 24 nt, Human
ugguggugcgugccugugguccca

SEQ ID NO: 260251 - RNA, 32 nt, Human
ugguggugcuacccuuggccucccagaguccu

SEQ ID NO: 260252 - RNA, 32 nt, Human
ugguggugcuuccaacugcgggacaggaagug

SEQ ID NO: 260253 - RNA, 32 nt, Human
uggugguggacaggaaggacuugggaagggga

SEQ ID NO: 260254 - RNA, 32 nt, Human
uggugguggacagucccugaggcaagccauuu

SEQ ID NO: 260255 - RNA, 32 nt, Human
uggugguggcaguggaggaggcugaggaggcu

SEQ ID NO: 260256 - RNA, 32 nt, Human
uggugguggccuguaaucccagcuacuuggga

SEQ ID NO: 260257 - RNA, 20 nt, Human
uggugguggcugagacccca

SEQ ID NO: 260258 - RNA, 24 nt, Human
ugguggugggcaccugugauccca

SEQ ID NO: 260259 - RNA, 32 nt, Human
ugguggugggcacgccuguaaucccagcuacu

SEQ ID NO: 260260 - RNA, 32 nt, Human
ugguggugguauccaaaaucuucaguaacuag

SEQ ID NO: 260261 - RNA, 32 nt, Human
ugguggugguggccaggggcuguggggaggga

SEQ ID NO: 260262 - RNA, 32 nt, Human
ugguggugucugucagacacacacaggucgcc

SEQ ID NO: 260263 - RNA, 32 nt, Human
ugguggugugagugggaggcggcggcgcuggu

SEQ ID NO: 260264 - RNA, 32 nt, Human
ugguggugugcgcaccuguagucccagcuacu

SEQ ID NO: 260265 - RNA, 32 nt, Human
uggugguguggaauccugcaaaugaucacaaa

SEQ ID NO: 260266 - RNA, 32 nt, Human
uggugguguggaccccacugccugcuagggaa

SEQ ID NO: 260267 - RNA, 32 nt, Human
ugguggugugggcaccugugaugcaggagacu

SEQ ID NO: 260268 - RNA, 32 nt, Human
uggugguuauguuugacagaaggcauuagguu

SEQ ID NO: 260269 - RNA, 32 nt, Human
uggugguuauuucuaaauuuuugaggugcuuu

SEQ ID NO: 260270 - RNA, 32 nt, Human
uggugguucaaagguuggaaggcagugcagag

SEQ ID NO: 260271 - RNA, 21 nt, Human
uggugguucacgccuguaauc

SEQ ID NO: 260272 - RNA, 32 nt, Human
uggugguucagcuggagauaaaaagaagaauu

SEQ ID NO: 260273 - RNA, 21 nt, Human
uggugguucaugccuguaauc

SEQ ID NO: 260274 - RNA, 32 nt, Human
uggugguuccugccagccucaggccagggguu

SEQ ID NO: 260275 - RNA, 22 nt, Human
uggugguucgggggcggugcua

SEQ ID NO: 260276 - RNA, 22 nt, Human
uggugguucugccugcuugcug

SEQ ID NO: 260277 - RNA, 20 nt, Human
uggugguucuggcuggugug

SEQ ID NO: 260278 - RNA, 32 nt, Human
uggugguucuuaauuuuuaauuuaguuugggg

SEQ ID NO: 260279 - RNA, 32 nt, Human
uggugguugggaggggaauaggaaaggagcau

SEQ ID NO: 260280 - RNA, 32 nt, Human
uggugguuguaguguuagagguguuagcuugc

SEQ ID NO: 260281 - RNA, 32 nt, Human
uggugguuguggugggggaauguggauggggg

SEQ ID NO: 260282 - RNA, 22 nt, Human
uggugguuucagggggcuguug

SEQ ID NO: 260283 - RNA, 32 nt, Human
uggugguuucugucuccuccucccgcugaaca

SEQ ID NO: 260284 - RNA, 32 nt, Human
uggugguuuggcuucuguucuuauucuugagu

SEQ ID NO: 260285 - RNA, 23 nt, Human
uggugguuuuggccccuuugcug

SEQ ID NO: 260286 - RNA, 32 nt, Human
ugguguaaaaguguuuacagaaacaucuuugu

SEQ ID NO: 260287 - RNA, 32 nt, Human
ugguguaagcaaccuguggccugcacuugugg

SEQ ID NO: 260288 - RNA, 32 nt, Human
ugguguaagggagggagggguagggacagaag

SEQ ID NO: 260289 - RNA, 32 nt, Human
ugguguaauucucguguccaagaaggaagcug

SEQ ID NO: 260290 - RNA, 32 nt, Human
ugguguacagauuauuucaucacucaggugau

SEQ ID NO: 260291 - RNA, 24 nt, Human
ugguguaccccuguaaucccagcu

SEQ ID NO: 260292 - RNA, 32 nt, Human
ugguguacgccuguaaucccagugacuuggga

SEQ ID NO: 260293 - RNA, 32 nt, Human
ugguguagcaugcaaggaagcagaagaccugg

SEQ ID NO: 260294 - RNA, 32 nt, Human
ugguguagggcugaguacugaauggucuucca

SEQ ID NO: 260295 - RNA, 32 nt, Human
ugguguagugcacaccuguaaucccagguacu

SEQ ID NO: 260296 - RNA, 32 nt, Human
ugguguaugccuguaaucccagcuacucggga

SEQ ID NO: 260297 - RNA, 32 nt, Human
ugguguaugccuguagucccagccacucagaa

SEQ ID NO: 260298 - RNA, 32 nt, Human
ugguguaugccuguagucccugcuacuuggga

SEQ ID NO: 260299 - RNA, 32 nt, Human
ugguguauuuugcacagacaagcaucugccuu

SEQ ID NO: 260300 - RNA, 32 nt, Human
uggugucaaagacauucacuauguuuuuaugg

SEQ ID NO: 260301 - RNA, 32 nt, Human
uggugucaaaguuucaggaaggauuuuacccu

SEQ ID NO: 260302 - RNA, 32 nt, Human
uggugucaaccauucuggcucuucuguauuua

SEQ ID NO: 260303 - RNA, 32 nt, Human
uggugucaagagggagguggaggcaggcacug

SEQ ID NO: 260304 - RNA, 32 nt, Human
uggugucaaucagcuagcaagugauggagccc

SEQ ID NO: 260305 - RNA, 31 nt, Human
uggugucacagcuuacaaaaguaucuugauc

SEQ ID NO: 260306 - RNA, 32 nt, Human
uggugucacaugcccacagcagccucggugac

SEQ ID NO: 260307 - RNA, 32 nt, Human
uggugucaccauccacgaagcugcugucucug

SEQ ID NO: 260308 - RNA, 32 nt, Human
uggugucacccaggcuggagugcaguggugug

SEQ ID NO: 260309 - RNA, 32 nt, Human
uggugucacccuggauaggcaagggauaacuc

SEQ ID NO: 260310 - RNA, 32 nt, Human
uggugucagagaccagggugugcagucugagc

SEQ ID NO: 260311 - RNA, 32 nt, Human
uggugucagcaagcacugucgacuucuuccuc

SEQ ID NO: 260312 - RNA, 32 nt, Human
uggugucagcuacucgggaggcugaggcagga

SEQ ID NO: 260313 - RNA, 32 nt, Human
uggugucaggcagguuugccagugaagacuuc

SEQ ID NO: 260314 - RNA, 32 nt, Human
uggugucagucuuuucugucucagccuuucaa

SEQ ID NO: 260315 - RNA, 32 nt, Human
uggugucauucuccagaaccagguguggauug

SEQ ID NO: 260316 - RNA, 32 nt, Human
ugguguccacccacauugagggugggucugcc

SEQ ID NO: 260317 - RNA, 32 nt, Human
uggugucccgcgugaggcacacugugaaggau

SEQ ID NO: 260318 - RNA, 32 nt, Human
ugguguccuaaagggggcugcagcaggggugu

SEQ ID NO: 260319 - RNA, 32 nt, Human
ugguguccuccaggccugggugggcggguuac

SEQ ID NO: 260320 - RNA, 32 nt, Human
ugguguccucuaguggaagaaauaguagcucc

SEQ ID NO: 260321 - RNA, 32 nt, Human
ugguguccugggacccagagcaacaggaucug

SEQ ID NO: 260322 - RNA, 32 nt, Human
ugguguccugggccugggaaacuagguuccca

SEQ ID NO: 260323 - RNA, 32 nt, Human
uggugucgccucucacacuuugcagucauuua

SEQ ID NO: 260324 - RNA, 32 nt, Human
uggugucucaaagaaggguagaaguucuaaug

SEQ ID NO: 260325 - RNA, 32 nt, Human
uggugucuccaaugaacuuguuuccugguuuu

SEQ ID NO: 260326 - RNA, 32 nt, Human
uggugucuccaccacugucccuucuccccgcu

SEQ ID NO: 260327 - RNA, 32 nt, Human
uggugucucugccaggcuccucaggcccagac

SEQ ID NO: 260328 - RNA, 32 nt, Human
uggugucucuuugaaagauuuugggaagauuu

SEQ ID NO: 260329 - RNA, 32 nt, Human
uggugucugaaauugaauaugcugugaaacug

SEQ ID NO: 260330 - RNA, 32 nt, Human
uggugucugaggcccaggcugaggccuccgcu

SEQ ID NO: 260331 - RNA, 32 nt, Human
uggugucugagggcccaggccuugccagccuc

SEQ ID NO: 260332 - RNA, 32 nt, Human
uggugucugcaccuccuuucccucucuccauc

SEQ ID NO: 260333 - RNA, 32 nt, Human
uggugucugcugucacugugcccucauuggcc

SEQ ID NO: 260334 - RNA, 32 nt, Human
uggugucugggcuguuuuugaaaaaguuucca

SEQ ID NO: 260335 - RNA, 32 nt, Human
uggugucuggggacagggagggaugggguccc

SEQ ID NO: 260336 - RNA, 32 nt, Human
uggugucuguaaucccagcugugggagguuga

SEQ ID NO: 260337 - RNA, 32 nt, Human
uggugucuuaugcuaaacgguggaauguauag

SEQ ID NO: 260338 - RNA, 32 nt, Human
uggugucuucuuucuccaacucuuggugggaa

SEQ ID NO: 260339 - RNA, 32 nt, Human
uggugucuugcuccacccuccuggcgagggga

SEQ ID NO: 260340 - RNA, 32 nt, Human
uggugucuuuuggggaaaauguuaugcaugga

SEQ ID NO: 260341 - RNA, 32 nt, Human
uggugugaaacaugaggccaaauaaauaagug

SEQ ID NO: 260342 - RNA, 32 nt, Human
uggugugaaagaucuaaaagcuguuucauuuu

SEQ ID NO: 260343 - RNA, 32 nt, Human
uggugugaacccaggaggcacagcuugcagug

SEQ ID NO: 260344 - RNA, 32 nt, Human
uggugugaacccaggaggcagagcuugcagug

SEQ ID NO: 260345 - RNA, 32 nt, Human
uggugugaacccaggaggcggagcuugcagug

SEQ ID NO: 260346 - RNA, 32 nt, Human
uggugugaacccaggaggcggugcuugcaggg

SEQ ID NO: 260347 - RNA, 32 nt, Human
uggugugacaccuucugccaccaucuccugcc

SEQ ID NO: 260348 - RNA, 32 nt, Human
uggugugacacuuuggagcaaaaaccuugcag

SEQ ID NO: 260349 - RNA, 32 nt, Human
uggugugagagggugaaggcggcgcuggaggc

SEQ ID NO: 260350 - RNA, 32 nt, Human
uggugugagauccucuuuacucugggcagaag

SEQ ID NO: 260351 - RNA, 32 nt, Human
uggugugagccccaccgcugugcaucgaauga

SEQ ID NO: 260352 - RNA, 32 nt, Human
uggugugaggacuucucagacaaaggcaaggc

SEQ ID NO: 260353 - RNA, 32 nt, Human
uggugugaguuccucuggugggagggagaacg

SEQ ID NO: 260354 - RNA, 32 nt, Human
uggugugaucacagcucacugcagccucaacc

SEQ ID NO: 260355 - RNA, 32 nt, Human
uggugugaucacagcucacugcagccucgacc

SEQ ID NO: 260356 - RNA, 32 nt, Human
uggugugaucacagcucacugcagccucgacu

SEQ ID NO: 260357 - RNA, 32 nt, Human
uggugugaucacagcucacugcagccuugacc

SEQ ID NO: 260358 - RNA, 32 nt, Human
uggugugaucacagcucauugcagccuccacu

SEQ ID NO: 260359 - RNA, 32 nt, Human
uggugugaucacggcucacugcagccuugacg

SEQ ID NO: 260360 - RNA, 32 nt, Human
uggugugaucauagcucacugcagccuggaau

SEQ ID NO: 260361 - RNA, 32 nt, Human
uggugugaucauagcucacugcagcuuugacu

SEQ ID NO: 260362 - RNA, 32 nt, Human
uggugugaucauagcucacugcauccuccagu

SEQ ID NO: 260363 - RNA, 32 nt, Human
uggugugaucauagcucacuggagccucuaau

SEQ ID NO: 260364 - RNA, 32 nt, Human
uggugugaucauagcucacuguaacuucgacc

SEQ ID NO: 260365 - RNA, 32 nt, Human
uggugugaucauaguucacuguauucucaacc

SEQ ID NO: 260366 - RNA, 32 nt, Human
uggugugaucauggcucacugcagccccaacc

SEQ ID NO: 260367 - RNA, 32 nt, Human
uggugugaucauggcucacugcagccucgacc

SEQ ID NO: 260368 - RNA, 32 nt, Human
uggugugaucaugguucacugcagucuugacc

SEQ ID NO: 260369 - RNA, 32 nt, Human
uggugugaucccagcucacugcagccucgacc

SEQ ID NO: 260370 - RNA, 32 nt, Human
uggugugaucucagcucacugcagccuccaac

SEQ ID NO: 260371 - RNA, 32 nt, Human
uggugugaucucagcucacugcagccucuguc

SEQ ID NO: 260372 - RNA, 32 nt, Human
uggugugauugcacuccagcccaggggacaau

SEQ ID NO: 260373 - RNA, 21 nt, Human
uggugugcaccuguaauccca

SEQ ID NO: 260374 - RNA, 21 nt, Human
uggugugcaccuguaauucca

SEQ ID NO: 260375 - RNA, 21 nt, Human
uggugugcaccuguaguccca

SEQ ID NO: 260376 - RNA, 21 nt, Human
uggugugcacuuguaauccca

SEQ ID NO: 260377 - RNA, 32 nt, Human
uggugugcagagccacaugaagccugcugggg

SEQ ID NO: 260378 - RNA, 32 nt, Human
uggugugcagccuggccaacauggugaaaccu

SEQ ID NO: 260379 - RNA, 32 nt, Human
uggugugcagugauacaaucuuggcucacugc

SEQ ID NO: 260380 - RNA, 32 nt, Human
uggugugcaguggcgugaucuuggcucacagc

SEQ ID NO: 260381 - RNA, 32 nt, Human
uggugugcaguggugugaucuuggcucgcugc

SEQ ID NO: 260382 - RNA, 21 nt, Human
uggugugcaucuguaauccca

SEQ ID NO: 260383 - RNA, 32 nt, Human
uggugugcaugcugggcugccuggcaaaucug

SEQ ID NO: 260384 - RNA, 21 nt, Human
uggugugccccuguaauccca

SEQ ID NO: 260385 - RNA, 24 nt, Human
uggugugccccuguaaucccagcu

SEQ ID NO: 260386 - RNA, 32 nt, Human
uggugugccugcucccagccucuugcucagag

SEQ ID NO: 260387 - RNA, 32 nt, Human
uggugugccuguagucccagcuacuugggagg

SEQ ID NO: 260388 - RNA, 21 nt, Human
uggugugcgcauguaauccca

SEQ ID NO: 260389 - RNA, 21 nt, Human
uggugugcgccuauaauccca

SEQ ID NO: 260390 - RNA, 21 nt, Human
uggugugcgccuguaauccca

SEQ ID NO: 260391 - RNA, 32 nt, Human
uggugugcgccuguaaucccagcuacuuggga

SEQ ID NO: 260392 - RNA, 32 nt, Human
uggugugcgccuguaauuccagcuacucggga

SEQ ID NO: 260393 - RNA, 21 nt, Human
uggugugcgucuguaauccca

SEQ ID NO: 260394 - RNA, 32 nt, Human
uggugugcguguguauguauguguauguauau

SEQ ID NO: 260395 - RNA, 32 nt, Human
uggugugcugcaagccacaaaagauguuuuga

SEQ ID NO: 260396 - RNA, 32 nt, Human
ugguguggaagaggagcucaagaggcuggaau

SEQ ID NO: 260397 - RNA, 32 nt, Human
ugguguggacagugguggagcucggaugugcu

SEQ ID NO: 260398 - RNA, 32 nt, Human
ugguguggagcuuucugccuuguaggugggcg

SEQ ID NO: 260399 - RNA, 24 nt, Human
ugguguggaguuggggcugccaua

SEQ ID NO: 260400 - RNA, 32 nt, Human
ugguguggcagccaucucuccucccagggguc

SEQ ID NO: 260401 - RNA, 32 nt, Human
ugguguggccugcugcuuccaggcugcaaacc

SEQ ID NO: 260402 - RNA, 32 nt, Human
ugguguggcgcaugccuauaaucccagcuacu

SEQ ID NO: 260403 - RNA, 32 nt, Human
ugguguggcuauagucugagcuacucaggagg

SEQ ID NO: 260404 - RNA, 32 nt, Human
ugguguggcugcagccaacacaaagggugauc

SEQ ID NO: 260405 - RNA, 32 nt, Human
ugguguggcuguaggggaggggagaccacacc

SEQ ID NO: 260406 - RNA, 32 nt, Human
uggugugggaagaagccagggguaagaagaua

SEQ ID NO: 260407 - RNA, 32 nt, Human
uggugugggaggcagaggugcugacguucugg

SEQ ID NO: 260408 - RNA, 32 nt, Human
uggugugggaggcgauggggguuggguggugg

SEQ ID NO: 260409 - RNA, 32 nt, Human
ugguguggggccugggcugccaggaaccucau

SEQ ID NO: 260410 - RNA, 32 nt, Human
uggugugggguuuugcuuugguuuuuaauuau

SEQ ID NO: 260411 - RNA, 32 nt, Human
ugguguggguaguuuagaaaaugaguuagguu

SEQ ID NO: 260412 - RNA, 32 nt, Human
uggugugggugacacggugauggccacaguca

SEQ ID NO: 260413 - RNA, 32 nt, Human
ugguguggugcugcucccucaccuccaaaaga

SEQ ID NO: 260414 - RNA, 32 nt, Human
uggugugguggaagaggggaugagggaaagaa

SEQ ID NO: 260415 - RNA, 32 nt, Human
uggugugguggaggaggauaaaaagggccacc

SEQ ID NO: 260416 - RNA, 32 nt, Human
ugguguggugggcaccuguagugccagcuacu

SEQ ID NO: 260417 - RNA, 32 nt, Human
ugguguggugucugcacaaggagugccuucuc

SEQ ID NO: 260418 - RNA, 32 nt, Human
uggugugguuaucuugggucauuuggauguuu

SEQ ID NO: 260419 - RNA, 21 nt, Human
ugguguguaccuguaguccca

SEQ ID NO: 260420 - RNA, 32 nt, Human
uggugugucacugcauccauugccaccuccug

SEQ ID NO: 260421 - RNA, 32 nt, Human
uggugugucuccucucccucccucccucuucu

SEQ ID NO: 260422 - RNA, 32 nt, Human
uggugugugauggacauggaagcagugguguc

SEQ ID NO: 260423 - RNA, 32 nt, Human
uggugugugauggacauggaugcagugguguc

SEQ ID NO: 260424 - RNA, 21 nt, Human
uggugugugccuauaauccca

SEQ ID NO: 260425 - RNA, 21 nt, Human
uggugugugccuguaauccca

SEQ ID NO: 260426 - RNA, 32 nt, Human
uggugugugccuguaaucccggcuacuuggga

SEQ ID NO: 260427 - RNA, 21 nt, Human
uggugugugccuguaaugcca

SEQ ID NO: 260428 - RNA, 32 nt, Human
uggugugugccuguaauuccagcuacucggga

SEQ ID NO: 260429 - RNA, 21 nt, Human
uggugugugccuguaguccca

SEQ ID NO: 260430 - RNA, 32 nt, Human
uggugugugccuguagucccagcuacuuguga

SEQ ID NO: 260431 - RNA, 32 nt, Human
uggugugugccuguaguccuagcugcuuggga

SEQ ID NO: 260432 - RNA, 32 nt, Human
uggugugugccuguagucucagcuacuuggga

SEQ ID NO: 260433 - RNA, 32 nt, Human
uggugugugccuguaguuccagcuacucagga

SEQ ID NO: 260434 - RNA, 32 nt, Human
uggugugugccuguauucacagcugcuuggau

SEQ ID NO: 260435 - RNA, 32 nt, Human
uggugugugccuguauuccuagcuacuuugau

SEQ ID NO: 260436 - RNA, 32 nt, Human
uggugugugcgagucuggcacuguucccgcug

SEQ ID NO: 260437 - RNA, 21 nt, Human
uggugugugcuuguaauccca

SEQ ID NO: 260438 - RNA, 32 nt, Human
ugguguguggcagaaaggucugaacagagcug

SEQ ID NO: 260439 - RNA, 32 nt, Human
uggugugugguuugacucugcuuuucuuccgg

SEQ ID NO: 260440 - RNA, 21 nt, Human
uggugugugucuguaauccca

SEQ ID NO: 260441 - RNA, 32 nt, Human
ugguguguuucuuugcuggucacacccaugau

SEQ ID NO: 260442 - RNA, 32 nt, Human
ugguguuaacugggaauauuaaagcauucuaa

SEQ ID NO: 260443 - RNA, 32 nt, Human
ugguguuagagaaacaucaaaugccauauuuu

SEQ ID NO: 260444 - RNA, 32 nt, Human
ugguguuagugaugcuggagaagagaauauua

SEQ ID NO: 260445 - RNA, 32 nt, Human
ugguguuaguguuuuguagcuaaugguucccu

SEQ ID NO: 260446 - RNA, 32 nt, Human
ugguguuaugaggaagaauaaaggggauaaaa

SEQ ID NO: 260447 - RNA, 32 nt, Human
ugguguuauuccauuugcuauuuaaagaaacc

SEQ ID NO: 260448 - RNA, 32 nt, Human
ugguguucaccaacgugggagacuucaccgga

SEQ ID NO: 260449 - RNA, 32 nt, Human
ugguguucaccagccuguaucuugucugagac

SEQ ID NO: 260450 - RNA, 32 nt, Human
ugguguucauuuccaucaugucuacauauucc

SEQ ID NO: 260451 - RNA, 32 nt, Human
ugguguuccacuguccagcccagcaugaguag

SEQ ID NO: 260452 - RNA, 32 nt, Human
ugguguuccugggcucugcacacagcaggagc

SEQ ID NO: 260453 - RNA, 32 nt, Human
ugguguucgagguggagguuaggcgggugaag

SEQ ID NO: 260454 - RNA, 32 nt, Human
ugguguucucccaucucugccucuggcacccu

SEQ ID NO: 260455 - RNA, 32 nt, Human
ugguguucuccucuuguugauguugaaauggu

SEQ ID NO: 260456 - RNA, 32 nt, Human
ugguguucucuuugauuguagguccuuagacu

SEQ ID NO: 260457 - RNA, 32 nt, Human
ugguguucuggcuguggcccugccuuagacug

SEQ ID NO: 260458 - RNA, 32 nt, Human
ugguguugagaagaaucaggagagggauacaa

SEQ ID NO: 260459 - RNA, 32 nt, Human
ugguguugcccaggcagagagggcagugugga

SEQ ID NO: 260460 - RNA, 32 nt, Human
ugguguugcuuccaaucuguugcugcuagauu

SEQ ID NO: 260461 - RNA, 32 nt, Human
ugguguugcuuccacccugcagcaggugggau

SEQ ID NO: 260462 - RNA, 32 nt, Human
ugguguuggaggccacuggguaacaacagaag

SEQ ID NO: 260463 - RNA, 32 nt, Human
ugguguuggccaaacucuuugccauuucacug

SEQ ID NO: 260464 - RNA, 32 nt, Human
ugguguuggcggucuggcucagcugggcaggg

SEQ ID NO: 260465 - RNA, 32 nt, Human
ugguguuuagagacuguaaaugcauauucaca

SEQ ID NO: 260466 - RNA, 32 nt, Human
ugguguuuguuaauguaaacauucagugaagg

SEQ ID NO: 260467 - RNA, 32 nt, Human
ugguguuuguuuuuagaaguuuugccaguccu

SEQ ID NO: 260468 - RNA, 32 nt, Human
ugguguuuucccaaggcucccuucccaagcuc

SEQ ID NO: 260469 - RNA, 32 nt, Human
ugguguuuuggggaugagagggugcuauccau

SEQ ID NO: 260470 - RNA, 32 nt, Human
ugguuaaacuaaauggaaccaugugcuaauuu

SEQ ID NO: 260471 - RNA, 32 nt, Human
ugguuaacacgcugaaaucccaucucuacaaa

SEQ ID NO: 260472 - RNA, 32 nt, Human
ugguuaacauggugaaacaccaucucuaguaa

SEQ ID NO: 260473 - RNA, 32 nt, Human
ugguuaacccuguaagaaaacuuauucuacau

SEQ ID NO: 260474 - RNA, 32 nt, Human
ugguuaagaaaauuauuuugcuuucaguguaa

SEQ ID NO: 260475 - RNA, 32 nt, Human
ugguuaaugaugguuaaugauaaccauuaaua

SEQ ID NO: 260476 - RNA, 32 nt, Human
ugguuaauggaaagcacugugcucugaagugg

SEQ ID NO: 260477 - RNA, 32 nt, Human
ugguuaauggaaaggaaaaauguugaacagau

SEQ ID NO: 260478 - RNA, 32 nt, Human
ugguuaauguauauuuuuauucuggcuuuuaa

SEQ ID NO: 260479 - RNA, 32 nt, Human
ugguuaauuccugccuuccucccuuuucccag

SEQ ID NO: 260480 - RNA, 32 nt, Human
ugguuacacagaacauugguuuccaauucagu

SEQ ID NO: 260481 - RNA, 32 nt, Human
ugguuacacagaacauugguuuccaauuuagu

SEQ ID NO: 260482 - RNA, 32 nt, Human
ugguuacaucucugccaugcaggccuggccuu

SEQ ID NO: 260483 - RNA, 20 nt, Human
ugguuaccacucaccugggg

SEQ ID NO: 260484 - RNA, 32 nt, Human
ugguuaccacuggaugagaaauucaguggugc

SEQ ID NO: 260485 - RNA, 32 nt, Human
ugguuaccauuuucuuuuugucauuggcuuag

SEQ ID NO: 260486 - RNA, 32 nt, Human
ugguuaccccucuucccuuguuaucuaagcuu

SEQ ID NO: 260487 - RNA, 32 nt, Human
ugguuaccuaguuuuauucacuuaauugugca

SEQ ID NO: 260488 - RNA, 21 nt, Human
ugguuaccuccccuuccucca

SEQ ID NO: 260489 - RNA, 32 nt, Human
ugguuacgaggaaauuguggauauuaaggaag

SEQ ID NO: 260490 - RNA, 32 nt, Human
ugguuacgcugcggggaucuguuucuuugccu

SEQ ID NO: 260491 - RNA, 32 nt, Human
ugguuacgugugagccaacaucacguuuuguu

SEQ ID NO: 260492 - RNA, 32 nt, Human
ugguuacuccacugccaugugacugaccacau

SEQ ID NO: 260493 - RNA, 32 nt, Human
ugguuacugauggggaagugggaggcauaagg

SEQ ID NO: 260494 - RNA, 32 nt, Human
ugguuacugccuggccgauccaaggcugugga

SEQ ID NO: 260495 - RNA, 32 nt, Human
ugguuacugcucacuuacuagucccaauuguu

SEQ ID NO: 260496 - RNA, 32 nt, Human
ugguuacuucaagggcagccagcaggccugga

SEQ ID NO: 260497 - RNA, 32 nt, Human
ugguuacuucuuucuucugccucgacucacau

SEQ ID NO: 260498 - RNA, 32 nt, Human
ugguuacuugcagccugaaguaccguaacugc

SEQ ID NO: 260499 - RNA, 32 nt, Human
ugguuagaaaugcaacaucaggcugagcaugu

SEQ ID NO: 260500 - RNA, 32 nt, Human
ugguuagaaaugcagaauccuaggcuccaccc

SEQ ID NO: 260501 - RNA, 32 nt, Human
ugguuagaguccugauuuuacugcaaaggugu

SEQ ID NO: 260502 - RNA, 18 nt, Human
ugguuagaucucagcaga

SEQ ID NO: 260503 - RNA, 32 nt, Human
ugguuagaugaugaauaaaaagguucugaaga

SEQ ID NO: 260504 - RNA, 32 nt, Human
ugguuagcacagagcucacccaccuugccugg

SEQ ID NO: 260505 - RNA, 32 nt, Human
ugguuaggaaagcccagggggaagggaggggg

SEQ ID NO: 260506 - RNA, 32 nt, Human
ugguuaggcacagauuuuuggaauccuuucag

SEQ ID NO: 260507 - RNA, 32 nt, Human
ugguuaguugcagaagauacauuggcucuaag

SEQ ID NO: 260508 - RNA, 32 nt, Human
ugguuaguuugggaaaaauaagaugguuaaau

SEQ ID NO: 260509 - RNA, 32 nt, Human
ugguuauacaaaccauauacaucugguuacca

SEQ ID NO: 260510 - RNA, 32 nt, Human
ugguuauacucauggcacgauggccaacuuuc

SEQ ID NO: 260511 - RNA, 32 nt, Human
ugguuaucaccucagugaaucuucccagggcu

SEQ ID NO: 260512 - RNA, 32 nt, Human
ugguuaucgaggcagagacuguaggaauaaug

SEQ ID NO: 260513 - RNA, 32 nt, Human
ugguuaucuccaggaaaaccucauuuagaugg

SEQ ID NO: 260514 - RNA, 32 nt, Human
ugguuaucugugcacauuuccacuugcaccau

SEQ ID NO: 260515 - RNA, 32 nt, Human
ugguuaugauuugugucuuaucagggaaaagg

SEQ ID NO: 260516 - RNA, 32 nt, Human
ugguuauucuacugccucuaggccaggguagu

SEQ ID NO: 260517 - RNA, 32 nt, Human
ugguuauugcccauccugggcauuaaacuugg

SEQ ID NO: 260518 - RNA, 32 nt, Human
ugguuauuucaagaagagagugugagauugca

SEQ ID NO: 260519 - RNA, 32 nt, Human
ugguuauuucuagcccacuccgaacaaugagu

SEQ ID NO: 260520 - RNA, 32 nt, Human
ugguucaaagucuuugcuauugugaauaaugc

SEQ ID NO: 260521 - RNA, 20 nt, Human
ugguucaaccauuguggaag

SEQ ID NO: 260522 - RNA, 32 nt, Human
ugguucaauaaugaaugaaaauucugggugua

SEQ ID NO: 260523 - RNA, 32 nt, Human
ugguucacaccuguaauccaagcacuuuggga

SEQ ID NO: 260524 - RNA, 20 nt, Human
ugguucacaccuguaauccc

SEQ ID NO: 260525 - RNA, 21 nt, Human
ugguucacaccuguaauccca

SEQ ID NO: 260526 - RNA, 32 nt, Human
ugguucacaccuguaaucccagcacuuuggga

SEQ ID NO: 260527 - RNA, 32 nt, Human
ugguucacaccuguaauugcagcacuuuggga

SEQ ID NO: 260528 - RNA, 24 nt, Human
ugguucaccacaauuuuuuaagaa

SEQ ID NO: 260529 - RNA, 32 nt, Human
ugguucacgccuggaaucccagcacuugaggc

SEQ ID NO: 260530 - RNA, 21 nt, Human
ugguucacgccuguaauccca

SEQ ID NO: 260531 - RNA, 32 nt, Human
ugguucacgccuguaaucccagcacuuuggga

SEQ ID NO: 260532 - RNA, 32 nt, Human
ugguucacgccuguaaucccagcacuuugggg

SEQ ID NO: 260533 - RNA, 32 nt, Human
ugguucacgccuguaaugccagcacuuuggga

SEQ ID NO: 260534 - RNA, 32 nt, Human
ugguucacgccuguaauuccagcacuuugaga

SEQ ID NO: 260535 - RNA, 32 nt, Human
ugguucacuacaguugacauccuggcugacaa

SEQ ID NO: 260536 - RNA, 32 nt, Human
ugguucacucuuccuacccucucccuccuaac

SEQ ID NO: 260537 - RNA, 32 nt, Human
ugguucacugcaaccuccaccuccaggguuca

SEQ ID NO: 260538 - RNA, 32 nt, Human
ugguucacugcaaccuccaccucccagguuca

SEQ ID NO: 260539 - RNA, 32 nt, Human
ugguucacugcaaccuccaccucuuggguuca

SEQ ID NO: 260540 - RNA, 32 nt, Human
ugguucacugcaaccuccgcauccgggguuca

SEQ ID NO: 260541 - RNA, 32 nt, Human
ugguucacugcaaccuccgccuccuggauuca

SEQ ID NO: 260542 - RNA, 32 nt, Human
ugguucacugcaaccucugccucccagguuca

SEQ ID NO: 260543 - RNA, 32 nt, Human
ugguucacugcaaccucugccucccggguuca

SEQ ID NO: 260544 - RNA, 32 nt, Human
ugguucacugcaagcuccaccucccggguuca

SEQ ID NO: 260545 - RNA, 32 nt, Human
ugguucacugcaaucucgacuuccaguuucag

SEQ ID NO: 260546 - RNA, 32 nt, Human
ugguucacugcacccucugccucccagguuca

SEQ ID NO: 260547 - RNA, 32 nt, Human
ugguucacugcagacuccaccucuccaggcuc

SEQ ID NO: 260548 - RNA, 32 nt, Human
ugguucacugcagccucgaccucccaggcuca

SEQ ID NO: 260549 - RNA, 32 nt, Human
ugguucacugcagccuugaccuccagggcuca

SEQ ID NO: 260550 - RNA, 32 nt, Human
ugguucacugcagucuugaccucccaggcuua

SEQ ID NO: 260551 - RNA, 32 nt, Human
ugguucagagcccugugucugucagucagucu

SEQ ID NO: 260552 - RNA, 32 nt, Human
ugguucagccccuucuccaaccccuucauaag

SEQ ID NO: 260553 - RNA, 21 nt, Human
ugguucaggccuguaauucca

SEQ ID NO: 260554 - RNA, 32 nt, Human
ugguucaggccuguaauuccagcacuuuggga

SEQ ID NO: 260555 - RNA, 32 nt, Human
ugguucagguuccugacugggccagcgaguga

SEQ ID NO: 260556 - RNA, 23 nt, Human
ugguucaguauucauugaucuca

SEQ ID NO: 260557 - RNA, 32 nt, Human
ugguucagugaucuuggagugaugaugguaac

SEQ ID NO: 260558 - RNA, 17 nt, Human
ugguucagugucuccug

SEQ ID NO: 260559 - RNA, 32 nt, Human
ugguucaguguugcaagagucugggcuugggg

SEQ ID NO: 260560 - RNA, 32 nt, Human
ugguucaguucccuuguccugaucucauccuc

SEQ ID NO: 260561 - RNA, 32 nt, Human
ugguucauccuucccccucucucccucccugc

SEQ ID NO: 260562 - RNA, 32 nt, Human
ugguucaucugaaggcuggauuccauuugaag

SEQ ID NO: 260563 - RNA, 32 nt, Human
ugguucaucuguggguguucagggaggugugg

SEQ ID NO: 260564 - RNA, 32 nt, Human
ugguucaucuucuguacucugucaguuuucug

SEQ ID NO: 260565 - RNA, 32 nt, Human
ugguucaugccaguaaucccagcacuuucgga

SEQ ID NO: 260566 - RNA, 21 nt, Human
ugguucaugccuauaauccca

SEQ ID NO: 260567 - RNA, 32 nt, Human
ugguucaugccuauaaucccagcacuuuggga

SEQ ID NO: 260568 - RNA, 23 nt, Human
ugguucaugccuauaaucccagu

SEQ ID NO: 260569 - RNA, 21 nt, Human
ugguucaugccuauaaucuca

SEQ ID NO: 260570 - RNA, 21 nt, Human
ugguucaugccuauaauucca

SEQ ID NO: 260571 - RNA, 21 nt, Human
ugguucaugccuaucauccca

SEQ ID NO: 260572 - RNA, 32 nt, Human
ugguucaugccuaucaucccagcacuuuggga

SEQ ID NO: 260573 - RNA, 32 nt, Human
ugguucaugccuggaaucccagcacuuuggga

SEQ ID NO: 260574 - RNA, 32 nt, Human
ugguucaugccuggaauccuagcacuuuggga

SEQ ID NO: 260575 - RNA, 32 nt, Human
ugguucaugccuguaauccagcacuuugggag

SEQ ID NO: 260576 - RNA, 21 nt, Human
ugguucaugccuguaauccca

SEQ ID NO: 260577 - RNA, 32 nt, Human
ugguucaugccuguaaucccaaugcuuuggga

SEQ ID NO: 260578 - RNA, 32 nt, Human
ugguucaugccuguaaucccagaacuucggga

SEQ ID NO: 260579 - RNA, 32 nt, Human
ugguucaugccuguaaucccagcacuauggga

SEQ ID NO: 260580 - RNA, 32 nt, Human
ugguucaugccuguaaucccagcacuucacuu

SEQ ID NO: 260581 - RNA, 32 nt, Human
ugguucaugccuguaaucccagcacuugggag

SEQ ID NO: 260582 - RNA, 32 nt, Human
ugguucaugccuguaaucccagcacuuuggaa

SEQ ID NO: 260583 - RNA, 32 nt, Human
ugguucaugccuguaaucccagcacuuuggga

SEQ ID NO: 260584 - RNA, 21 nt, Human
ugguucaugccuguaaucuca

SEQ ID NO: 260585 - RNA, 21 nt, Human
ugguucaugccugugauccca

SEQ ID NO: 260586 - RNA, 32 nt, Human
ugguucaugccuuaaucccagcacuuugggag

SEQ ID NO: 260587 - RNA, 20 nt, Human
ugguucaugcuguaauccca

SEQ ID NO: 260588 - RNA, 32 nt, Human
ugguucaugcuguaaucccaucacuuugggag

SEQ ID NO: 260589 - RNA, 32 nt, Human
ugguucaugucuguaaucccagcacuuuguga

SEQ ID NO: 260590 - RNA, 32 nt, Human
ugguucauguuacucuuucucucuccaucagc

SEQ ID NO: 260591 - RNA, 32 nt, Human
ugguucauucucaggcugggguggacucagau

SEQ ID NO: 260592 - RNA, 21 nt, Human
ugguuccaagaggcuguggcc

SEQ ID NO: 260593 - RNA, 32 nt, Human
ugguuccaaguauguuagaucagcuaacaucu

SEQ ID NO: 260594 - RNA, 32 nt, Human
ugguuccaagucuuugcuauuguaaauagugc

SEQ ID NO: 260595 - RNA, 32 nt, Human
ugguuccaagucuuugcuauugugaauaaugc

SEQ ID NO: 260596 - RNA, 32 nt, Human
ugguuccaagucuuugcuauugugaauagugc

SEQ ID NO: 260597 - RNA, 32 nt, Human
ugguuccaccaacauggagcucucgcagaugu

SEQ ID NO: 260598 - RNA, 32 nt, Human
ugguuccaccuucacaaguauccuucaaaggc

SEQ ID NO: 260599 - RNA, 21 nt, Human
ugguuccagcaaagcgggcuc

SEQ ID NO: 260600 - RNA, 32 nt, Human
ugguuccagcuacucaggaggcugagguggga

SEQ ID NO: 260601 - RNA, 32 nt, Human
ugguuccagcuauucgggaggcugagguaggu

SEQ ID NO: 260602 - RNA, 32 nt, Human
ugguuccagcuccucaguaggcugaggugaga

SEQ ID NO: 260603 - RNA, 31 nt, Human
ugguuccaguuucacagcuaccugcagaggc

SEQ ID NO: 260604 - RNA, 32 nt, Human
ugguuccauggugaaacacaucccugacccuu

SEQ ID NO: 260605 - RNA, 31 nt, Human
ugguuccauguuucucgcacagcagaguucu

SEQ ID NO: 260606 - RNA, 32 nt, Human
ugguuccauuuagacuacuuuccucuucuauu

SEQ ID NO: 260607 - RNA, 32 nt, Human
ugguucccaaaccaaagacagccugcagcccu

SEQ ID NO: 260608 - RNA, 32 nt, Human
ugguucccaagcuacagguggggugggaaagg

SEQ ID NO: 260609 - RNA, 23 nt, Human
ugguucccagggcaggcugacuc

SEQ ID NO: 260610 - RNA, 32 nt, Human
ugguuccccacacauccauaguucugccuccc

SEQ ID NO: 260611 - RNA, 32 nt, Human
ugguucccccuuccccacuucaccuccacuca

SEQ ID NO: 260612 - RNA, 32 nt, Human
ugguuccccugccucccagcccggcugugagu

SEQ ID NO: 260613 - RNA, 32 nt, Human
ugguucccucacagguuucuccagaaaguacu

SEQ ID NO: 260614 - RNA, 32 nt, Human
ugguucccuccccaaggccacagggagcuccg

SEQ ID NO: 260615 - RNA, 32 nt, Human
ugguucccugcagccuugcucugcauaggcuc

SEQ ID NO: 260616 - RNA, 32 nt, Human
ugguucccuggcaggcuggagggcaggagcug

SEQ ID NO: 260617 - RNA, 32 nt, Human
ugguucccuguggcugaccgcaggguguucuc

SEQ ID NO: 260618 - RNA, 32 nt, Human
ugguuccuagaggcagagguugaagauggaag

SEQ ID NO: 260619 - RNA, 32 nt, Human
ugguuccucaagggcagauauuggacacuccu

SEQ ID NO: 260620 - RNA, 31 nt, Human
ugguuccucccucucuggccugugccgccuc

SEQ ID NO: 260621 - RNA, 32 nt, Human
ugguuccuccucccaccaaccccacgcagccc

SEQ ID NO: 260622 - RNA, 32 nt, Human
ugguuccucuggggguugagaauaagaauagu

SEQ ID NO: 260623 - RNA, 32 nt, Human
ugguuccugaugcccauguuccagaggaauuc

SEQ ID NO: 260624 - RNA, 32 nt, Human
ugguuccugcaagcccucuaggaggccgaaag

SEQ ID NO: 260625 - RNA, 32 nt, Human
ugguuccugcagcagcugcugccacugcucag

SEQ ID NO: 260626 - RNA, 32 nt, Human
ugguuccugccaccaccaccuccccaggccgg

SEQ ID NO: 260627 - RNA, 32 nt, Human
ugguuccugcuguuuauucucuggucaugccu

SEQ ID NO: 260628 - RNA, 32 nt, Human
ugguuccugggggaacagagacuggagauguu

SEQ ID NO: 260629 - RNA, 32 nt, Human
ugguuccugugcacugagcccaccagccacag

SEQ ID NO: 260630 - RNA, 32 nt, Human
ugguuccuucugcaguaccucugugguuaaaa

SEQ ID NO: 260631 - RNA, 32 nt, Human
ugguuccuuucuuccucguuuguuacuuuaga

SEQ ID NO: 260632 - RNA, 32 nt, Human
ugguucgugccuguaaucccagcucuuuggga

SEQ ID NO: 260633 - RNA, 32 nt, Human
ugguucgugcuggaaauuucuccuggguuucu

SEQ ID NO: 260634 - RNA, 32 nt, Human
ugguucguuaguggauuacuucugagcuugca

SEQ ID NO: 260635 - RNA, 32 nt, Human
ugguucuaagaacggaagcaucugggcuggau

SEQ ID NO: 260636 - RNA, 32 nt, Human
ugguucuacaguccuggcugauucagauacca

SEQ ID NO: 260637 - RNA, 32 nt, Human
ugguucuacuucucaggcuggacacugacuga

SEQ ID NO: 260638 - RNA, 22 nt, Human
ugguucuaggcauuucugggaa

SEQ ID NO: 260639 - RNA, 32 nt, Human
ugguucuaguacagauacucuacuacacucag

SEQ ID NO: 260640 - RNA, 32 nt, Human
ugguucuaucuagauucuucugugaaucuaaa

SEQ ID NO: 260641 - RNA, 32 nt, Human
ugguucuaucuuccuuuuccucacugaauucc

SEQ ID NO: 260642 - RNA, 21 nt, Human
ugguucucacugagacguuuu

SEQ ID NO: 260643 - RNA, 32 nt, Human
ugguucucagcagaguggagcugaguuucugg

SEQ ID NO: 260644 - RNA, 32 nt, Human
ugguucuccagccucuugccuggcugccagug

SEQ ID NO: 260645 - RNA, 32 nt, Human
ugguucucccuuccucccugaggacaccaaau

SEQ ID NO: 260646 - RNA, 32 nt, Human
ugguucuccugccucagccucccuaguagcug

SEQ ID NO: 260647 - RNA, 32 nt, Human
ugguucuccugccucggccuccugaguggcug

SEQ ID NO: 260648 - RNA, 32 nt, Human
ugguucucuaacuccaucauuuccauuucaga

SEQ ID NO: 260649 - RNA, 22 nt, Human
ugguucucugauuaaaguuuug

SEQ ID NO: 260650 - RNA, 32 nt, Human
ugguucucuucccugcucaggcugccagagag

SEQ ID NO: 260651 - RNA, 32 nt, Human
ugguucugacacacaggaucccaggcaaggca

SEQ ID NO: 260652 - RNA, 32 nt, Human
ugguucugaggccccuacccucccaggcuguc

SEQ ID NO: 260653 - RNA, 32 nt, Human
ugguucugauaaaaucaguccagcacuuuuag

SEQ ID NO: 260654 - RNA, 32 nt, Human
ugguucugcaugucugugcucuuccucaaccc

SEQ ID NO: 260655 - RNA, 32 nt, Human
ugguucugcccuuaccccuccugcccgccuga

SEQ ID NO: 260656 - RNA, 32 nt, Human
ugguucugccugcacuuacuuuguaaugccac

SEQ ID NO: 260657 - RNA, 32 nt, Human
ugguucugcuccuggcccccuuguucagcccc

SEQ ID NO: 260658 - RNA, 32 nt, Human
ugguucugcuucuguggauguagaauggggca

SEQ ID NO: 260659 - RNA, 32 nt, Human
ugguucuggaagccugucccaagugaaugaau

SEQ ID NO: 260660 - RNA, 32 nt, Human
ugguucuggccuuuccugccuuuucucaagcu

SEQ ID NO: 260661 - RNA, 32 nt, Human
ugguucugggggagacagaaaagaggugcggc

SEQ ID NO: 260662 - RNA, 32 nt, Human
ugguucugguuuucaguccacugugaauaggu

SEQ ID NO: 260663 - RNA, 23 nt, Human
ugguucuguccucgugccuuccu

SEQ ID NO: 260664 - RNA, 32 nt, Human
ugguucugugagccucugccuuuuccugguuu

SEQ ID NO: 260665 - RNA, 21 nt, Human
ugguucuuauuuaagguuuug

SEQ ID NO: 260666 - RNA, 32 nt, Human
ugguucuucguucucugucacucuuguuuuug

SEQ ID NO: 260667 - RNA, 32 nt, Human
ugguucuucucccagguauucucuucccaggc

SEQ ID NO: 260668 - RNA, 32 nt, Human
ugguucuucuguuggggaccagugaguacaca

SEQ ID NO: 260669 - RNA, 32 nt, Human
ugguucuuguagcuccgugagcugcagccucu

SEQ ID NO: 260670 - RNA, 32 nt, Human
ugguucuuguuccugagaaggguggguaacag

SEQ ID NO: 260671 - RNA, 32 nt, Human
ugguucuuuacaugacugaaucaauuacaauu

SEQ ID NO: 260672 - RNA, 32 nt, Human
ugguugaaaaggagucaacauggccccaacua

SEQ ID NO: 260673 - RNA, 32 nt, Human
ugguugaaucuuaggaaugaacagugucucaa

SEQ ID NO: 260674 - RNA, 32 nt, Human
ugguugacaucaaaacagcauucuucuucuag

SEQ ID NO: 260675 - RNA, 32 nt, Human
ugguugacccagaggauccugauaaugugcaa

SEQ ID NO: 260676 - RNA, 32 nt, Human
ugguugacugaggagucgggugaggccacccu

SEQ ID NO: 260677 - RNA, 32 nt, Human
ugguugagaaccauuguuccaagugaaggcac

SEQ ID NO: 260678 - RNA, 31 nt, Human
ugguugagaaggagagaaaaagguggcagga

SEQ ID NO: 260679 - RNA, 32 nt, Human
ugguugagaaggagagaaaaagguggcaggaa

SEQ ID NO: 260680 - RNA, 32 nt, Human
ugguugagaugggcaccguuuugcaggaaaca

SEQ ID NO: 260681 - RNA, 32 nt, Human
ugguugagccccugucaagugccagucaugau

SEQ ID NO: 260682 - RNA, 32 nt, Human
ugguugagcgcuucacucuauuuucuggugcu

SEQ ID NO: 260683 - RNA, 32 nt, Human
ugguugagcuuaggagguugaggcugcaguga

SEQ ID NO: 260684 - RNA, 32 nt, Human
ugguugaggagaaaggcggggaagcuuccuca

SEQ ID NO: 260685 - RNA, 18 nt, Human
ugguugaggcccagcgaa

SEQ ID NO: 260686 - RNA, 32 nt, Human
ugguugauggacagcaggcucugccuucugga

SEQ ID NO: 260687 - RNA, 32 nt, Human
ugguugauuaccuguaccgaaaugcuguccag

SEQ ID NO: 260688 - RNA, 32 nt, Human
ugguugauucagcccaccucucugcaucccgc

SEQ ID NO: 260689 - RNA, 32 nt, Human
ugguugauugaaugauuguggaacucauugug

SEQ ID NO: 260690 - RNA, 32 nt, Human
ugguugcaacacuguacuccagccugggcaac

SEQ ID NO: 260691 - RNA, 32 nt, Human
ugguugcaccacuacacuguagccugggugac

SEQ ID NO: 260692 - RNA, 32 nt, Human
ugguugcaccacugcucuccaggcuugaguga

SEQ ID NO: 260693 - RNA, 32 nt, Human
ugguugcaccacuguacuccagccugggcgau

SEQ ID NO: 260694 - RNA, 32 nt, Human
ugguugcagacggagaaauggaggccagagac

SEQ ID NO: 260695 - RNA, 32 nt, Human
ugguugcaggcagaguuuuggggaccuggccc

SEQ ID NO: 260696 - RNA, 32 nt, Human
ugguugcagguucccuuuuuccuuccucaggu

SEQ ID NO: 260697 - RNA, 32 nt, Human
ugguugccacagagcugggacuucauguucuu

SEQ ID NO: 260698 - RNA, 20 nt, Human
ugguugccagccaccuaggg

SEQ ID NO: 260699 - RNA, 32 nt, Human
ugguugcccaggcuggagugcaguggugccau

SEQ ID NO: 260700 - RNA, 32 nt, Human
ugguugcccaggcugggguacagugguggaau

SEQ ID NO: 260701 - RNA, 32 nt, Human
ugguugcccugccucuggcuccagaacagaaa

SEQ ID NO: 260702 - RNA, 31 nt, Human
ugguugccucuauuugggccuggagcaggga

SEQ ID NO: 260703 - RNA, 32 nt, Human
ugguugccucugaagaaacugccuucauugua

SEQ ID NO: 260704 - RNA, 32 nt, Human
ugguugccugcagguauuucacuguuuacugu

SEQ ID NO: 260705 - RNA, 32 nt, Human
ugguugccugcucguccccaagugaccuauac

SEQ ID NO: 260706 - RNA, 32 nt, Human
ugguugccuggacaccccacgggaggaguggc

SEQ ID NO: 260707 - RNA, 32 nt, Human
ugguugccuggccugggcugcgcccagcagcu

SEQ ID NO: 260708 - RNA, 32 nt, Human
ugguugccuugcaggaaugcaaggucagggug

SEQ ID NO: 260709 - RNA, 32 nt, Human
ugguugccuuggaggcagaagcugugaguuuc

SEQ ID NO: 260710 - RNA, 32 nt, Human
ugguugcuagcacauacuuuauuaucccccaa

SEQ ID NO: 260711 - RNA, 32 nt, Human
ugguugcucccaggcugcuguucucagggacc

SEQ ID NO: 260712 - RNA, 32 nt, Human
ugguugcucuucucagcuucagcuguagccac

SEQ ID NO: 260713 - RNA, 32 nt, Human
ugguugcugaaggcuggaguggguguggcaau

SEQ ID NO: 260714 - RNA, 32 nt, Human
ugguugcugcugaaggaggaggcagcagcgag

SEQ ID NO: 260715 - RNA, 32 nt, Human
ugguugcuggcaguggcagcacugggccaggu

SEQ ID NO: 260716 - RNA, 32 nt, Human
ugguugcugggcuguagggugaguggcuugcu

SEQ ID NO: 260717 - RNA, 32 nt, Human
ugguugcugguuugugugugaaaaacauuuuc

SEQ ID NO: 260718 - RNA, 32 nt, Human
ugguugcuuuuauuccagauaauaacacuuaa

SEQ ID NO: 260719 - RNA, 32 nt, Human
ugguuggaaacaguguagucgcuucccuuuuu

SEQ ID NO: 260720 - RNA, 32 nt, Human
ugguuggaagaagacuuucuccccagcugcau

SEQ ID NO: 260721 - RNA, 32 nt, Human
ugguuggaagaccacagacauggaaggggccc

SEQ ID NO: 260722 - RNA, 32 nt, Human
ugguuggaagcauauguggggaggcuggcugg

SEQ ID NO: 260723 - RNA, 32 nt, Human
ugguuggaagugaaaaugccaaacgauauuuu

SEQ ID NO: 260724 - RNA, 32 nt, Human
ugguuggaggcagagcuuggaaaggaagcagc

SEQ ID NO: 260725 - RNA, 32 nt, Human
ugguuggagguuucacauauggcucaacucaa

SEQ ID NO: 260726 - RNA, 32 nt, Human
ugguuggaucccacacuggcagagauggggcc

SEQ ID NO: 260727 - RNA, 32 nt, Human
ugguuggauuuuuccacuaucuuuuuaguuug

SEQ ID NO: 260728 - RNA, 32 nt, Human
ugguuggcaacuguuucaacuuguuugaacca

SEQ ID NO: 260729 - RNA, 32 nt, Human
ugguuggcagaucuuuugggagauacuggaug

SEQ ID NO: 260730 - RNA, 32 nt, Human
ugguuggcagcugccguacuccaggcuugugu

SEQ ID NO: 260731 - RNA, 32 nt, Human
ugguuggcccaagcccugccugacugaccacc

SEQ ID NO: 260732 - RNA, 32 nt, Human
ugguuggcgacuguucuuuccagaccugcucc

SEQ ID NO: 260733 - RNA, 32 nt, Human
ugguuggcucucccucuccucucucccucucc

SEQ ID NO: 260734 - RNA, 31 nt, Human
ugguuggcugagagagaaugacugaccggau

SEQ ID NO: 260735 - RNA, 32 nt, Human
ugguugggagagggagucacaguuccuacucc

SEQ ID NO: 260736 - RNA, 32 nt, Human
ugguugggagugaagagaauccaggcuggcag

SEQ ID NO: 260737 - RNA, 32 nt, Human
ugguugggcuagugggucaucaugucacuuuc

SEQ ID NO: 260738 - RNA, 32 nt, Human
ugguuggggaaaauguggugacugagguacag

SEQ ID NO: 260739 - RNA, 32 nt, Human
ugguugggguugaacaguaagcacauugcugc

SEQ ID NO: 260740 - RNA, 32 nt, Human
ugguuggguccuaucucugagacauuuugaag

SEQ ID NO: 260741 - RNA, 32 nt, Human
ugguuggguuaccagcccuagggcuacagaau

SEQ ID NO: 260742 - RNA, 32 nt, Human
ugguugguauugaugacuucagccuggaaauu

SEQ ID NO: 260743 - RNA, 32 nt, Human
ugguuggugccuuucccccuccuuccucccca

SEQ ID NO: 260744 - RNA, 32 nt, Human
ugguuggugguggcggugacagagugugcagc

SEQ ID NO: 260745 - RNA, 32 nt, Human
ugguuguagauguugcucuacauucaaaccuu

SEQ ID NO: 260746 - RNA, 24 nt, Human
ugguuguauugggcaggguggcuc

SEQ ID NO: 260747 - RNA, 32 nt, Human
ugguugucacaugucacaugcgucuuuuucag

SEQ ID NO: 260748 - RNA, 32 nt, Human
ugguugucagaacaauucaucaacaucuucuu

SEQ ID NO: 260749 - RNA, 32 nt, Human
ugguugucccauagggacugguggaguucugu

SEQ ID NO: 260750 - RNA, 32 nt, Human
ugguugucugcaggagaugguggaugaaauca

SEQ ID NO: 260751 - RNA, 32 nt, Human
ugguugucuugucuuccagggugcaggucacu

SEQ ID NO: 260752 - RNA, 32 nt, Human
ugguugugcagaacaaacaaggcauucauggg

SEQ ID NO: 260753 - RNA, 32 nt, Human
ugguugugccacugcacuccagccuggguaag

SEQ ID NO: 260754 - RNA, 32 nt, Human
ugguugugcucuggggugggggugggguguuu

SEQ ID NO: 260755 - RNA, 32 nt, Human
ugguugugguguagacugugucaggccuacgg

SEQ ID NO: 260756 - RNA, 32 nt, Human
ugguugugucacaguucacugcagccugggug

SEQ ID NO: 260757 - RNA, 20 nt, Human
ugguuguuccacagaguuuu

SEQ ID NO: 260758 - RNA, 32 nt, Human
ugguuguugcagcauucaguuccuugcuguug

SEQ ID NO: 260759 - RNA, 32 nt, Human
ugguuguugcccaggcuggagugcaguggcgc

SEQ ID NO: 260760 - RNA, 32 nt, Human
ugguuguuggcuggggccagagccagagccuu

SEQ ID NO: 260761 - RNA, 32 nt, Human
ugguuguuuucagcuuaaucaccugcucagaa

SEQ ID NO: 260762 - RNA, 32 nt, Human
ugguuuaaaauguaagauuuuaagauccucua

SEQ ID NO: 260763 - RNA, 32 nt, Human
ugguuuaaaccugagacuaacuuaaacacuuc

SEQ ID NO: 260764 - RNA, 32 nt, Human
ugguuuaaaggcacaaggucauggccuuuguc

SEQ ID NO: 260765 - RNA, 32 nt, Human
ugguuuaaaguacaguuucucuaaagaucaga

SEQ ID NO: 260766 - RNA, 32 nt, Human
ugguuuacaccuguaaucccagcacuuuggga

SEQ ID NO: 260767 - RNA, 32 nt, Human
ugguuuacugcaaccuccaccuccuaggcuca

SEQ ID NO: 260768 - RNA, 32 nt, Human
ugguuuagcuaaauuauuuuuccaauguagga

SEQ ID NO: 260769 - RNA, 32 nt, Human
ugguuuaggccuugccaguuuuccgaagucuc

SEQ ID NO: 260770 - RNA, 32 nt, Human
ugguuuagguuucuuccuggguacaguacauu

SEQ ID NO: 260771 - RNA, 32 nt, Human
ugguuuagugacugguagauagcuauuaggua

SEQ ID NO: 260772 - RNA, 30 nt, Human
ugguuuauccucuccaaucugcuccucaca

SEQ ID NO: 260773 - RNA, 32 nt, Human
ugguuuaucuccagcccacagcucuuucccug

SEQ ID NO: 260774 - RNA, 32 nt, Human
ugguuuaugaaugaucuuaagguaauuacaaa

SEQ ID NO: 260775 - RNA, 32 nt, Human
ugguuuaugacucuuaacccccuagaaagaca

SEQ ID NO: 260776 - RNA, 32 nt, Human
ugguuuaugccuguaaucccagcacuguggga

SEQ ID NO: 260777 - RNA, 32 nt, Human
ugguuuaugguaauuucuugcagcagaccuag

SEQ ID NO: 260778 - RNA, 32 nt, Human
ugguuuauuucacuccaguccugaagcaggug

SEQ ID NO: 260779 - RNA, 32 nt, Human
ugguuucaaagcaguuuaugggaacuucucuu

SEQ ID NO: 260780 - RNA, 32 nt, Human
ugguuucaacagacacaaauuuauauguuaac

SEQ ID NO: 260781 - RNA, 32 nt, Human
ugguuucaagcgauccucccaccucggccucc

SEQ ID NO: 260782 - RNA, 32 nt, Human
ugguuucaagcgauccucccacuucagccuuu

SEQ ID NO: 260783 - RNA, 32 nt, Human
ugguuucacaagucauuugugauguacuguuu

SEQ ID NO: 260784 - RNA, 32 nt, Human
ugguuucacaccucuuguuauuccuuagaguc

SEQ ID NO: 260785 - RNA, 32 nt, Human
ugguuucacugagagcugccuccuggucucuu

SEQ ID NO: 260786 - RNA, 32 nt, Human
ugguuucacugccuuccuacccucucuaaugg

SEQ ID NO: 260787 - RNA, 32 nt, Human
ugguuucagcaguuaaugugcuuucuuggauc

SEQ ID NO: 260788 - RNA, 32 nt, Human
ugguuucagcgugccgcucugugucauucagg

SEQ ID NO: 260789 - RNA, 32 nt, Human
ugguuucaggagacucagaguccucugugaaa

SEQ ID NO: 260790 - RNA, 32 nt, Human
ugguuucagguuuuccuucccuuccuuuuucc

SEQ ID NO: 260791 - RNA, 32 nt, Human
ugguuucaucagugcccaugcucugcaucagc

SEQ ID NO: 260792 - RNA, 32 nt, Human
ugguuucaugccccucucuauaccuuucaaag

SEQ ID NO: 260793 - RNA, 32 nt, Human
ugguuuccacacccucuguuagggaagccaca

SEQ ID NO: 260794 - RNA, 32 nt, Human
ugguuuccacaccucagacacgcacaguucac

SEQ ID NO: 260795 - RNA, 32 nt, Human
ugguuuccaccuccagcccugggaaauuuccu

SEQ ID NO: 260796 - RNA, 32 nt, Human
ugguuuccacuggaguaccacucugagcucuu

SEQ ID NO: 260797 - RNA, 32 nt, Human
ugguuuccagagaaaaggccaauaccuaagca

SEQ ID NO: 260798 - RNA, 32 nt, Human
ugguuuccagcccuccggagagugggcuuggc

SEQ ID NO: 260799 - RNA, 32 nt, Human
ugguuuccaguucuacaccacacccauguggc

SEQ ID NO: 260800 - RNA, 32 nt, Human
ugguuucccuggaaguggcagcagcagugagc

SEQ ID NO: 260801 - RNA, 32 nt, Human
ugguuuccucacauccugccucagcuucacca

SEQ ID NO: 260802 - RNA, 32 nt, Human
ugguuuccucauucucuuccaccaaccucugu

SEQ ID NO: 260803 - RNA, 32 nt, Human
ugguuuccucugguuccugccaccaccaccuc

SEQ ID NO: 260804 - RNA, 32 nt, Human
ugguuuccugagauaaauggacaggaagcgca

SEQ ID NO: 260805 - RNA, 32 nt, Human
ugguuuccuguuguaaaaaccuucagugaguu

SEQ ID NO: 260806 - RNA, 32 nt, Human
ugguuuccuuuggaaaugcacuguucucagcc

SEQ ID NO: 260807 - RNA, 32 nt, Human
ugguuucuaagaggcagagggccaggcgcggu

SEQ ID NO: 260808 - RNA, 32 nt, Human
ugguuucuauacugcuguccaagcaggcucac

SEQ ID NO: 260809 - RNA, 32 nt, Human
ugguuucuaucaugcuaauuuauuuugcuuug

SEQ ID NO: 260810 - RNA, 32 nt, Human
ugguuucucagaauccaaagaucacauauucu

SEQ ID NO: 260811 - RNA, 32 nt, Human
ugguuucuccauccaauucuuugaauuuccca

SEQ ID NO: 260812 - RNA, 32 nt, Human
ugguuucuccuccugggagucaaaguccauag

SEQ ID NO: 260813 - RNA, 32 nt, Human
ugguuucucuaguugcaguauuggacaaagag

SEQ ID NO: 260814 - RNA, 32 nt, Human
ugguuucucugagucacagauaaacuucugcc

SEQ ID NO: 260815 - RNA, 32 nt, Human
ugguuucucuucuccccuuccauuucugccuu

SEQ ID NO: 260816 - RNA, 32 nt, Human
ugguuucugcagcagcucacacugauguagcu

SEQ ID NO: 260817 - RNA, 32 nt, Human
ugguuucugcagcuggccauggccaauucaua

SEQ ID NO: 260818 - RNA, 32 nt, Human
ugguuucugcccacucagaguggcagcggaag

SEQ ID NO: 260819 - RNA, 32 nt, Human
ugguuucugcuuucuuuugacuacuugacuga

SEQ ID NO: 260820 - RNA, 32 nt, Human
ugguuucuguucuguugaucccacuucacugu

SEQ ID NO: 260821 - RNA, 32 nt, Human
ugguuucuuauucaaagaugauaauuuagugg

SEQ ID NO: 260822 - RNA, 32 nt, Human
ugguuucuucagaaucaugaaguucuuuugcc

SEQ ID NO: 260823 - RNA, 32 nt, Human
ugguuucuuccucacguggcuuuuucuuccau

SEQ ID NO: 260824 - RNA, 32 nt, Human
ugguuucuuccucugcgguaaaggacuugguc

SEQ ID NO: 260825 - RNA, 32 nt, Human
ugguuucuuggaaagcaggcaagacuuuuucu

SEQ ID NO: 260826 - RNA, 32 nt, Human
ugguuugaaaucaagugguuggaacacuguuu

SEQ ID NO: 260827 - RNA, 32 nt, Human
ugguuugaaggugagcugugaggaugggacua

SEQ ID NO: 260828 - RNA, 32 nt, Human
ugguuugaaguaugacuuuguacugggcccac

SEQ ID NO: 260829 - RNA, 32 nt, Human
ugguuugaccaagucucccaaagcugaagaga

SEQ ID NO: 260830 - RNA, 32 nt, Human
ugguuugagccuugauuagacuuuugaugugc

SEQ ID NO: 260831 - RNA, 32 nt, Human
ugguuugaggguuuccuuuaguucacccucau

SEQ ID NO: 260832 - RNA, 32 nt, Human
ugguuugagguuugguaacuugaugccucccc

SEQ ID NO: 260833 - RNA, 32 nt, Human
ugguuugcaaaagggcuuccuaaaaauaaaaa

SEQ ID NO: 260834 - RNA, 32 nt, Human
ugguuugccccagggaagagcguauccuuacc

SEQ ID NO: 260835 - RNA, 32 nt, Human
ugguuugcgggagauuuccuccccucagucaa

SEQ ID NO: 260836 - RNA, 18 nt, Human
ugguuuggagcaagggga

SEQ ID NO: 260837 - RNA, 32 nt, Human
ugguuuggccacugaauuaauacuguauagca

SEQ ID NO: 260838 - RNA, 32 nt, Human
ugguuuggccacuuugccacagaggccucagg

SEQ ID NO: 260839 - RNA, 32 nt, Human
ugguuuggccagcauggcgaaaccccaucucu

SEQ ID NO: 260840 - RNA, 32 nt, Human
ugguuuggccuuggggcacagagcugagcuga

SEQ ID NO: 260841 - RNA, 32 nt, Human
ugguuugggagcugccagucuccugggaggau

SEQ ID NO: 260842 - RNA, 32 nt, Human
ugguuuggggaccugcaaaugggaggccugag

SEQ ID NO: 260843 - RNA, 20 nt, Human
ugguuuggggcccaggggga

SEQ ID NO: 260844 - RNA, 32 nt, Human
ugguuugggggaagaaaaguaguucugguaug

SEQ ID NO: 260845 - RNA, 32 nt, Human
ugguuugggggaggggacuggaaagcugagac

SEQ ID NO: 260846 - RNA, 32 nt, Human
ugguuuguaagaggggaaagaaaaggagaaag

SEQ ID NO: 260847 - RNA, 32 nt, Human
ugguuuguauacccuugcucccgccuucugau

SEQ ID NO: 260848 - RNA, 32 nt, Human
ugguuugugagaaaguagcugccccucauucu

SEQ ID NO: 260849 - RNA, 32 nt, Human
ugguuuguuucucaagcgcuauccacagaacc

SEQ ID NO: 260850 - RNA, 32 nt, Human
ugguuuguuuuguuuuuaaaccacaguuugau

SEQ ID NO: 260851 - RNA, 31 nt, Human
ugguuuuaaguacuggagcuuuacuguaugu

SEQ ID NO: 260852 - RNA, 32 nt, Human
ugguuuuaaguccucccugcccucucuccucu

SEQ ID NO: 260853 - RNA, 32 nt, Human
ugguuuuaauuuaaaggacaaggcuacauaua

SEQ ID NO: 260854 - RNA, 32 nt, Human
ugguuuuauaggggcuuccuccuucacuuggc

SEQ ID NO: 260855 - RNA, 32 nt, Human
ugguuuuaugcugcuuuguuaggacagaugug

SEQ ID NO: 260856 - RNA, 32 nt, Human
ugguuuuauguggauaugccacaaaacacaag

SEQ ID NO: 260857 - RNA, 32 nt, Human
ugguuuucaagaggaaugccucugguuuuugc

SEQ ID NO: 260858 - RNA, 32 nt, Human
ugguuuucaagcagugcuuuaucucauguccu

SEQ ID NO: 260859 - RNA, 32 nt, Human
ugguuuucagaauuccuguguggcccuccugu

SEQ ID NO: 260860 - RNA, 32 nt, Human
ugguuuucagcagucugugcugugccuggaug

SEQ ID NO: 260861 - RNA, 32 nt, Human
ugguuuucagucuucucucucuuucucucuuu

SEQ ID NO: 260862 - RNA, 32 nt, Human
ugguuuucauuauuaauuuuuaggguaugggc

SEQ ID NO: 260863 - RNA, 32 nt, Human
ugguuuucauuucucuucuucacugccuuuuc

SEQ ID NO: 260864 - RNA, 32 nt, Human
ugguuuucccgugcaucuucagccuggcacau

SEQ ID NO: 260865 - RNA, 32 nt, Human
ugguuuuccuacagcuucuccccaucuuucaa

SEQ ID NO: 260866 - RNA, 32 nt, Human
ugguuuuccucucaggugguugguuuucucca

SEQ ID NO: 260867 - RNA, 32 nt, Human
ugguuuuccuuuucucuucaucuuuggcuccu

SEQ ID NO: 260868 - RNA, 32 nt, Human
ugguuuucuaaccugugacuuuuugaaaugaa

SEQ ID NO: 260869 - RNA, 32 nt, Human
ugguuuucuaggagcuauggucucauaaugac

SEQ ID NO: 260870 - RNA, 28 nt, Human
ugguuuucugauguugccucauuuccug

SEQ ID NO: 260871 - RNA, 32 nt, Human
ugguuuucuucccauuucaaggauccuuuugu

SEQ ID NO: 260872 - RNA, 32 nt, Human
ugguuuugaaccccuggguucaaaugauccuc

SEQ ID NO: 260873 - RNA, 32 nt, Human
ugguuuugaagacccagucacauuggauguga

SEQ ID NO: 260874 - RNA, 32 nt, Human
ugguuuugacuaauccugcuucccucucuggg

SEQ ID NO: 260875 - RNA, 20 nt, Human
ugguuuugagcagucugaug

SEQ ID NO: 260876 - RNA, 18 nt, Human
ugguuuugauuguucaca

SEQ ID NO: 260877 - RNA, 32 nt, Human
ugguuuugcagugccaggaacaauuggggaca

SEQ ID NO: 260878 - RNA, 32 nt, Human
ugguuuugccuuucucuaugcuaacacuuuuu

SEQ ID NO: 260879 - RNA, 32 nt, Human
ugguuuugcuucuccuuuguguuccugugagu

SEQ ID NO: 260880 - RNA, 32 nt, Human
ugguuuuggagguggcugggcaguggcgggca

SEQ ID NO: 260881 - RNA, 32 nt, Human
ugguuuuggccacuacaacugcagaguugaau

SEQ ID NO: 260882 - RNA, 32 nt, Human
ugguuuuggucauacuugcuuugcuaccuaaa

SEQ ID NO: 260883 - RNA, 32 nt, Human
ugguuuuguaacuuguucugguaauguccuuc

SEQ ID NO: 260884 - RNA, 32 nt, Human
ugguuuugucggaaccuaggcaaaugaccaua

SEQ ID NO: 260885 - RNA, 32 nt, Human
ugguuuuguguaugugucugaugauauucagu

SEQ ID NO: 260886 - RNA, 32 nt, Human
ugguuuuguuuccuuuuguaacaaagugaaaa

SEQ ID NO: 260887 - RNA, 18 nt, Human
ugguuuuguuuuuccaua

SEQ ID NO: 260888 - RNA, 32 nt, Human
ugguuuuuaaaaacuaugauuguauuaguucg

SEQ ID NO: 260889 - RNA, 32 nt, Human
ugguuuuuagcuuguucaaaaacagaggccag

SEQ ID NO: 260890 - RNA, 32 nt, Human
ugguuuuuaguuguuuuucuuagucacucuua

SEQ ID NO: 260891 - RNA, 32 nt, Human
ugguuuuuaucugguacccacacacacauaau

SEQ ID NO: 260892 - RNA, 32 nt, Human
ugguuuuuauuccugcuuuguuucuggaaagg

SEQ ID NO: 260893 - RNA, 32 nt, Human
ugguuuuuauucucaguaccucaggcuccccu

SEQ ID NO: 260894 - RNA, 32 nt, Human
ugguuuuucaaaagugaacaauccugugauaa

SEQ ID NO: 260895 - RNA, 32 nt, Human
ugguuuuucaccucagcccucucauaggagca

SEQ ID NO: 260896 - RNA, 32 nt, Human
ugguuuuucuaggccuggugugagagguaggg

SEQ ID NO: 260897 - RNA, 32 nt, Human
ugguuuuucuuuuagcugaaucaucuaucucc

SEQ ID NO: 260898 - RNA, 32 nt, Human
  misc_feature (3)..(3): n is a, c, g, or u
ugncaccugacccuugugccucccucccucug

SEQ ID NO: 260899 - RNA, 32 nt, Human
  misc_feature (3)..(5): n is a, c, g, or u
ugnnncacgccuguaaucccagcacuuuggga

SEQ ID NO: 260900 - RNA, 31 nt, Human
uguaaaaagagacuguuuugggggaaugggg

SEQ ID NO: 260901 - RNA, 32 nt, Human
uguaaaaagcuucauucucacucugcuuugca

SEQ ID NO: 260902 - RNA, 32 nt, Human
uguaaaaaucaauuuuacguagagucaacauu

SEQ ID NO: 260903 - RNA, 32 nt, Human
uguaaaacaaauuuuaauuccucaggguuuua

SEQ ID NO: 260904 - RNA, 22 nt, Human
uguaaaacagauguuguaugua

SEQ ID NO: 260905 - RNA, 21 nt, Human
uguaaaacauugaugacuuua

SEQ ID NO: 260906 - RNA, 32 nt, Human
uguaaaacuauacugacccguuuucaguuuua

SEQ ID NO: 260907 - RNA, 32 nt, Human
uguaaaacugacuuuuucauuacguggguuuu

SEQ ID NO: 260908 - RNA, 32 nt, Human
uguaaaacuguugcagacaacaggauccugua

SEQ ID NO: 260909 - RNA, 32 nt, Human
uguaaaagagccuaguuuuuaauagcuaugga

SEQ ID NO: 260910 - RNA, 21 nt, Human
uguaaaagcaacaucagcuug

SEQ ID NO: 260911 - RNA, 32 nt, Human
uguaaaaggaagggguuggauugcaauaucug

SEQ ID NO: 260912 - RNA, 24 nt, Human
uguaaaaggagguaggaugaauug

SEQ ID NO: 260913 - RNA, 32 nt, Human
uguaaaaggccagcucagauugugagcccuuu

SEQ ID NO: 260914 - RNA, 32 nt, Human
uguaaaagucaguauccuaagagauuaaauug

SEQ ID NO: 260915 - RNA, 32 nt, Human
uguaaaaguuuaaugacccacuuuagaugcuc

SEQ ID NO: 260916 - RNA, 32 nt, Human
uguaaaauacagcacacauacagcaaagugua

SEQ ID NO: 260917 - RNA, 32 nt, Human
uguaaaauaccguguguauauguauguaugug

SEQ ID NO: 260918 - RNA, 32 nt, Human
uguaaaauauacuuucuuuuacagcacaacuu

SEQ ID NO: 260919 - RNA, 32 nt, Human
uguaaaauauuuauugucuucuagccuugagc

SEQ ID NO: 260920 - RNA, 32 nt, Human
uguaaaaucccuucuccuuuacacauccuuua

SEQ ID NO: 260921 - RNA, 32 nt, Human
uguaaaaugggguugauagcagcauucaccug

SEQ ID NO: 260922 - RNA, 32 nt, Human
uguaaaauguuuacuuauucugagcuuagaga

SEQ ID NO: 260923 - RNA, 32 nt, Human
uguaaacaaagacaugggauuuucugacguaa

SEQ ID NO: 260924 - RNA, 32 nt, Human
uguaaacaacagccaagagagcaggggugacg

SEQ ID NO: 260925 - RNA, 32 nt, Human
uguaaacacacgugcacacaucguacacaugu

SEQ ID NO: 260926 - RNA, 32 nt, Human
uguaaacacccuauaaccucaggccuuggcau

SEQ ID NO: 260927 - RNA, 32 nt, Human
uguaaacagaacuggcacacacacauuaagau

SEQ ID NO: 260928 - RNA, 31 nt, Human
uguaaacagaagccuguuucagaaaucugga

SEQ ID NO: 260929 - RNA, 32 nt, Human
uguaaacagaugggcugggcucuugcugccgc

SEQ ID NO: 260930 - RNA, 32 nt, Human
uguaaacaggagacaggaagguggugcuuaca

SEQ ID NO: 260931 - RNA, 32 nt, Human
uguaaacauauguccauuaagaaacauguagu

SEQ ID NO: 260932 - RNA, 32 nt, Human
uguaaacauccuguaauuuaagaucuuggugu

SEQ ID NO: 260933 - RNA, 32 nt, Human
uguaaacaucugcuuguccuucuuaggucgcc

SEQ ID NO: 260934 - RNA, 22 nt, Human
uguaaacauuagcucuuuccac

SEQ ID NO: 260935 - RNA, 32 nt, Human
uguaaacauuuaagauucuccuguggauuuug

SEQ ID NO: 260936 - RNA, 32 nt, Human
uguaaaccaagaagagaaaagcauuucaauuu

SEQ ID NO: 260937 - RNA, 32 nt, Human
uguaaaccaggauuugaaugggugagcugcac

SEQ ID NO: 260938 - RNA, 32 nt, Human
uguaaacccagugggcucugcccacgccgggc

SEQ ID NO: 260939 - RNA, 32 nt, Human
uguaaacccauucagauaaauggcaguacuuu

SEQ ID NO: 260940 - RNA, 20 nt, Human
uguaaaccccgucucuacua

SEQ ID NO: 260941 - RNA, 32 nt, Human
uguaaaccgacgccggaaagcaaaugguaucg

SEQ ID NO: 260942 - RNA, 32 nt, Human
uguaaaccucauuccaccacuuacuagucuca

SEQ ID NO: 260943 - RNA, 32 nt, Human
uguaaacgagcuuguaucuccuucccugugcc

SEQ ID NO: 260944 - RNA, 32 nt, Human
uguaaacgauccagagacaagacagcaccuag

SEQ ID NO: 260945 - RNA, 32 nt, Human
uguaaacgggaggagguggggcgaggcagcca

SEQ ID NO: 260946 - RNA, 20 nt, Human
uguaaacuaaggggaugguu

SEQ ID NO: 260947 - RNA, 32 nt, Human
uguaaacugcuguccuggugacuugucccucu

SEQ ID NO: 260948 - RNA, 21 nt, Human
uguaaacuuaccaguaugucu

SEQ ID NO: 260949 - RNA, 32 nt, Human
uguaaacuucuuucaaauuacucuuccucagu

SEQ ID NO: 260950 - RNA, 32 nt, Human
uguaaacuuggggaagauuaagaaaagaacca

SEQ ID NO: 260951 - RNA, 32 nt, Human
uguaaacuuuucucaguguccagacuuucugu

SEQ ID NO: 260952 - RNA, 32 nt, Human
uguaaagaaagaaaaagggaaguaccaauggg

SEQ ID NO: 260953 - RNA, 20 nt, Human
uguaaagaagaaggcgugca

SEQ ID NO: 260954 - RNA, 32 nt, Human
uguaaagacugaagcauccccaccucaggauu

SEQ ID NO: 260955 - RNA, 32 nt, Human
uguaaagagauucuuuaaaaugcugcuucuuc

SEQ ID NO: 260956 - RNA, 32 nt, Human
uguaaagagggagcacauugacuugggaauuu

SEQ ID NO: 260957 - RNA, 27 nt, Human
uguaaagaguccagguaacugacuuua

SEQ ID NO: 260958 - RNA, 25 nt, Human
uguaaagcaagcaaccucccuccac

SEQ ID NO: 260959 - RNA, 29 nt, Human
uguaaagcaauaaaucuugacuugaaauc

SEQ ID NO: 260960 - RNA, 32 nt, Human
uguaaagcaugugaagacaggccaggcgcggc

SEQ ID NO: 260961 - RNA, 32 nt, Human
uguaaagccagccaugcauuguuaaucaucca

SEQ ID NO: 260962 - RNA, 32 nt, Human
uguaaagccgguuucaggauggcugagcugac

SEQ ID NO: 260963 - RNA, 23 nt, Human
uguaaagccuuuccugccuugca

SEQ ID NO: 260964 - RNA, 32 nt, Human
uguaaagcuaucagucauuuaguagaauagaa

SEQ ID NO: 260965 - RNA, 32 nt, Human
uguaaaggaaauuuaaauucuggagaauucua

SEQ ID NO: 260966 - RNA, 32 nt, Human
uguaaaggagggggaagggaaggguugaccag

SEQ ID NO: 260967 - RNA, 21 nt, Human
uguaaagggaaaauuagcacu

SEQ ID NO: 260968 - RNA, 32 nt, Human
uguaaagggaaaggaugguaagaggagguuac

SEQ ID NO: 260969 - RNA, 32 nt, Human
uguaaaggggacagcucaggguuguuuuggag

SEQ ID NO: 260970 - RNA, 32 nt, Human
uguaaagggucuucugagcugcaguggcaauu

SEQ ID NO: 260971 - RNA, 32 nt, Human
uguaaaggugacaaaauaucugaacagaagag

SEQ ID NO: 260972 - RNA, 32 nt, Human
uguaaaguaaaaagauaaccauacuauacaua

SEQ ID NO: 260973 - RNA, 32 nt, Human
uguaaaguauuguuuuuaaauauugccagauu

SEQ ID NO: 260974 - RNA, 32 nt, Human
uguaaagucuauucuguuuaacaauaagaaau

SEQ ID NO: 260975 - RNA, 32 nt, Human
uguaaagucugcaucuuucacuggggguaaag

SEQ ID NO: 260976 - RNA, 32 nt, Human
uguaaagugcauucccuucaccagcuugugca

SEQ ID NO: 260977 - RNA, 32 nt, Human
uguaaagugucagaaggagcuacaaaaccuac

SEQ ID NO: 260978 - RNA, 30 nt, Human
uguaaaguuucuccucugcuccugaaaacu

SEQ ID NO: 260979 - RNA, 32 nt, Human
uguaaauaaauacaucgccucuuguucggauu

SEQ ID NO: 260980 - RNA, 32 nt, Human
uguaaauaagaaagcaaaguuuaugggaaaau

SEQ ID NO: 260981 - RNA, 32 nt, Human
uguaaauacaaaccgagcacuaguuuuaauau

SEQ ID NO: 260982 - RNA, 32 nt, Human
uguaaauacaugcuuuaauuugcaauuuaaaa

SEQ ID NO: 260983 - RNA, 32 nt, Human
uguaaauaccucaguaauauggguccuuucau

SEQ ID NO: 260984 - RNA, 32 nt, Human
uguaaauacuacuacuacaaaaaucagcuuuc

SEQ ID NO: 260985 - RNA, 32 nt, Human
uguaaauacuauaaugagagccacaucuguaa

SEQ ID NO: 260986 - RNA, 32 nt, Human
uguaaauauucugcaguuguuacuuaggaagc

SEQ ID NO: 260987 - RNA, 32 nt, Human
uguaaaucagaugccagcuguacugccggcuc

SEQ ID NO: 260988 - RNA, 32 nt, Human
uguaaaucugggcuugucuuccuaaugcuacc

SEQ ID NO: 260989 - RNA, 32 nt, Human
uguaaaugaccuuccaguucugucuccucaga

SEQ ID NO: 260990 - RNA, 32 nt, Human
uguaaaugagcaaagauggaucaggaaggugg

SEQ ID NO: 260991 - RNA, 32 nt, Human
uguaaaugauagauuccaugggugagacuuua

SEQ ID NO: 260992 - RNA, 32 nt, Human
uguaaaugcucaauaaauauugaugaugggag

SEQ ID NO: 260993 - RNA, 32 nt, Human
uguaaaugcugcacauccagauugcauaucag

SEQ ID NO: 260994 - RNA, 32 nt, Human
uguaaaugugauggauuucuuaaucauauuua

SEQ ID NO: 260995 - RNA, 32 nt, Human
uguaaauguguuuuacucagcuuucuuuaugu

SEQ ID NO: 260996 - RNA, 32 nt, Human
uguaaauuaauugucagcauuccaugucucaa

SEQ ID NO: 260997 - RNA, 32 nt, Human
uguaaauuaggaaagggagaccagccugacca

SEQ ID NO: 260998 - RNA, 32 nt, Human
uguaaauuauuaaaucggcaacagggcuucuc

SEQ ID NO: 260999 - RNA, 32 nt, Human
uguaaauucagguucaauuaguucucauugca

SEQ ID NO: 261000 - RNA, 22 nt, Human
uguaaauucucccagcaguguc

SEQ ID NO: 261001 - RNA, 32 nt, Human
uguaaauuggacugcagucugaggugcccauu

SEQ ID NO: 261002 - RNA, 32 nt, Human
uguaaauuggcauacaauacugccuuuaauag

SEQ ID NO: 261003 - RNA, 32 nt, Human
uguaaauuguguaguccauccuuuccuccuuu

SEQ ID NO: 261004 - RNA, 32 nt, Human
uguaaauuuauucaacuaacgaugggaaaugu

SEQ ID NO: 261005 - RNA, 32 nt, Human
uguaaauuucagaaugugucucugguacagaa

SEQ ID NO: 261006 - RNA, 32 nt, Human
uguaaauuucugugguugcuaucuuauguaaa

SEQ ID NO: 261007 - RNA, 32 nt, Human
uguaaauuuggucaagucuacucuuccguuca

SEQ ID NO: 261008 - RNA, 32 nt, Human
uguaacaaaacaacacaaauuaaguacaaagu

SEQ ID NO: 261009 - RNA, 32 nt, Human
uguaacaaacccccaugacacaccuuuaugua

SEQ ID NO: 261010 - RNA, 32 nt, Human
uguaacaaagaauguuuggaaaaugcuggaca

SEQ ID NO: 261011 - RNA, 32 nt, Human
uguaacaaaggauuuuuguugucuaaguccca

SEQ ID NO: 261012 - RNA, 32 nt, Human
uguaacaagaagcaaagccuucagcaagauca

SEQ ID NO: 261013 - RNA, 32 nt, Human
uguaacaaguauuuauccguccauccauucau

SEQ ID NO: 261014 - RNA, 32 nt, Human
uguaacacaagaaauaacuccuuuuuacauga

SEQ ID NO: 261015 - RNA, 32 nt, Human
uguaacaccaacacuuaacuucagaaagacau

SEQ ID NO: 261016 - RNA, 32 nt, Human
uguaacaccaugauuaaccacuucagcugacu

SEQ ID NO: 261017 - RNA, 32 nt, Human
uguaacacucacugcaaaggucuacagcuuca

SEQ ID NO: 261018 - RNA, 32 nt, Human
uguaacacucacugccaaggucuucagcuuca

SEQ ID NO: 261019 - RNA, 32 nt, Human
uguaacagagguuuuuacauuugcaaaccuuu

SEQ ID NO: 261020 - RNA, 32 nt, Human
uguaacaggcuucucggugcuccucacccgug

SEQ ID NO: 261021 - RNA, 32 nt, Human
uguaacagggucauacccccucccucuugucc

SEQ ID NO: 261022 - RNA, 32 nt, Human
uguaacaguaaaggcagaaagcuguagugaua

SEQ ID NO: 261023 - RNA, 32 nt, Human
uguaacauaugcugccuacccaccucaaaaug

SEQ ID NO: 261024 - RNA, 32 nt, Human
uguaacaugaccuuaaauagucuuccugcaua

SEQ ID NO: 261025 - RNA, 31 nt, Human
uguaacaugccugugucacucacuuagccuu

SEQ ID NO: 261026 - RNA, 32 nt, Human
uguaacaugccugugucacucacuuagccuug

SEQ ID NO: 261027 - RNA, 32 nt, Human
uguaacauggguuuguuggaguuuuccucauu

SEQ ID NO: 261028 - RNA, 32 nt, Human
uguaaccaaaaaccacuuguagggggaaaaac

SEQ ID NO: 261029 - RNA, 32 nt, Human
uguaaccaaagaagcaaagcuguguaauggag

SEQ ID NO: 261030 - RNA, 32 nt, Human
uguaaccagcuggucuggguguagcucuuaga

SEQ ID NO: 261031 - RNA, 32 nt, Human
uguaacccaacaagagcacauuuuaucauagc

SEQ ID NO: 261032 - RNA, 32 nt, Human
uguaacccagccaccaccaaaaagcaaacaga

SEQ ID NO: 261033 - RNA, 23 nt, Human
uguaacccaggcuggaaugcaau

SEQ ID NO: 261034 - RNA, 24 nt, Human
uguaacccaggcuggaaugcaaug

SEQ ID NO: 261035 - RNA, 32 nt, Human
uguaacccaucucaauuauagaagcaaguuca

SEQ ID NO: 261036 - RNA, 19 nt, Human
uguaaccccaucucuacua

SEQ ID NO: 261037 - RNA, 32 nt, Human
uguaaccuaggagcaggaaacuucagcuuaac

SEQ ID NO: 261038 - RNA, 32 nt, Human
uguaaccucagugcuggggacugaggcgagcc

SEQ ID NO: 261039 - RNA, 32 nt, Human
uguaaccucugccuccugccucccggguccaa

SEQ ID NO: 261040 - RNA, 32 nt, Human
uguaaccucugccuccuggauucaaguguuag

SEQ ID NO: 261041 - RNA, 19 nt, Human
uguaaccucuucccuccac

SEQ ID NO: 261042 - RNA, 22 nt, Human
uguaaccugcugcccccuccac

SEQ ID NO: 261043 - RNA, 32 nt, Human
uguaaccuggcugcauauccagccucgagaaa

SEQ ID NO: 261044 - RNA, 32 nt, Human
uguaacgcucacugcgaaggucugcagcuuca

SEQ ID NO: 261045 - RNA, 32 nt, Human
uguaacggcggaugccuguaaucccagcuacu

SEQ ID NO: 261046 - RNA, 32 nt, Human
uguaacggcuucugauuucugugaaagcugcu

SEQ ID NO: 261047 - RNA, 32 nt, Human
uguaacgugaugaccugcugcuccuggccgcg

SEQ ID NO: 261048 - RNA, 32 nt, Human
uguaacuaaaaguaaauauucuaaauuaaguc

SEQ ID NO: 261049 - RNA, 32 nt, Human
uguaacuaauuucaguuguacugugaaugcua

SEQ ID NO: 261050 - RNA, 32 nt, Human
uguaacuagagggagaacggaaagcugaggug

SEQ ID NO: 261051 - RNA, 32 nt, Human
uguaacuauagaagugaauuguggacguaaaa

SEQ ID NO: 261052 - RNA, 32 nt, Human
uguaacuaugcagaguuguuuggacuucuucc

SEQ ID NO: 261053 - RNA, 32 nt, Human
uguaacucacugcagccugaaacuccuuggcu

SEQ ID NO: 261054 - RNA, 23 nt, Human
uguaacucaggcuggagugcagu

SEQ ID NO: 261055 - RNA, 32 nt, Human
uguaacucaucuuuuaguuuacacuuccuggg

SEQ ID NO: 261056 - RNA, 32 nt, Human
uguaacuccagccugggcaacagagugagacc

SEQ ID NO: 261057 - RNA, 32 nt, Human
uguaacucccacuggaagauggauucucagcc

SEQ ID NO: 261058 - RNA, 32 nt, Human
uguaacucggggccuaacuauaugagauggcu

SEQ ID NO: 261059 - RNA, 32 nt, Human
uguaacucuggccucaaucauauuccucuggg

SEQ ID NO: 261060 - RNA, 32 nt, Human
uguaacugaccucuggccuggccugcacagag

SEQ ID NO: 261061 - RNA, 31 nt, Human
uguaacugaggacguugucagaugcuugucc

SEQ ID NO: 261062 - RNA, 32 nt, Human
uguaacugaggcuuuaaaaagccaagacaucu

SEQ ID NO: 261063 - RNA, 32 nt, Human
uguaacugaggugaggguuguaguagaugcuu

SEQ ID NO: 261064 - RNA, 32 nt, Human
uguaacugccaggacacuuuuguguuugccca

SEQ ID NO: 261065 - RNA, 32 nt, Human
uguaacugcccuuuuaaauggcaugacaaggu

SEQ ID NO: 261066 - RNA, 32 nt, Human
uguaacugcuccacagcucccuggauaacaac

SEQ ID NO: 261067 - RNA, 32 nt, Human
uguaacugcugugggaagaguugcuauauugu

SEQ ID NO: 261068 - RNA, 29 nt, Human
uguaacuggcugcucccugcucccaggga

SEQ ID NO: 261069 - RNA, 32 nt, Human
uguaacuggcugcucccugcucccagggacug

SEQ ID NO: 261070 - RNA, 32 nt, Human
uguaacugggauuacaggcucccaccacaccu

SEQ ID NO: 261071 - RNA, 32 nt, Human
uguaacuggugacacccuuacaagaaaacugg

SEQ ID NO: 261072 - RNA, 32 nt, Human
uguaacuuaaauuaguugugcucugcuauuuu

SEQ ID NO: 261073 - RNA, 22 nt, Human
uguaacuuauucacucuguaaa

SEQ ID NO: 261074 - RNA, 32 nt, Human
uguaacuucauaauuucuuaccauaaccucaa

SEQ ID NO: 261075 - RNA, 32 nt, Human
uguaacuucuaugaucauuacuccaaaguugu

SEQ ID NO: 261076 - RNA, 32 nt, Human
uguaacuuggauguagccaugaccuuacauuu

SEQ ID NO: 261077 - RNA, 32 nt, Human
uguaacuugguuccucccuuucuuaagcccuu

SEQ ID NO: 261078 - RNA, 23 nt, Human
uguaagaaaaaguugagugggga

SEQ ID NO: 261079 - RNA, 32 nt, Human
uguaagaaaagcuuccaguagagcuucuuaua

SEQ ID NO: 261080 - RNA, 32 nt, Human
uguaagaaacaguggcuuauuucuucauuucu

SEQ ID NO: 261081 - RNA, 32 nt, Human
uguaagaaagaaaaggucagccucccaggcaa

SEQ ID NO: 261082 - RNA, 24 nt, Human
uguaagaaagaaaauguuacgugu

SEQ ID NO: 261083 - RNA, 32 nt, Human
uguaagaaagaccuaagguggggaagacuccu

SEQ ID NO: 261084 - RNA, 22 nt, Human
uguaagaaauuucuuacaugua

SEQ ID NO: 261085 - RNA, 21 nt, Human
uguaagaagaagagaugagga

SEQ ID NO: 261086 - RNA, 32 nt, Human
uguaagaagacagauauugacaaggacacuua

SEQ ID NO: 261087 - RNA, 32 nt, Human
uguaagaaggccucuugcuccuugccaggugc

SEQ ID NO: 261088 - RNA, 19 nt, Human
uguaagaagugccuuucac

SEQ ID NO: 261089 - RNA, 32 nt, Human
uguaagaauccuucucauagugaagcacuguu

SEQ ID NO: 261090 - RNA, 21 nt, Human
uguaagacaggaggaugggga

SEQ ID NO: 261091 - RNA, 32 nt, Human
uguaagacauguugcaaaagugucacaagaua

SEQ ID NO: 261092 - RNA, 32 nt, Human
uguaagacuuccugaaacaaguucucaagaag

SEQ ID NO: 261093 - RNA, 32 nt, Human
uguaagacuuucuaagcgcauggcuuugucgu

SEQ ID NO: 261094 - RNA, 32 nt, Human
uguaagagcgcuggaacauucugccucuugag

SEQ ID NO: 261095 - RNA, 32 nt, Human
uguaagagcuaaauccucaucugucauaucaa

SEQ ID NO: 261096 - RNA, 32 nt, Human
uguaagaggcagaugagcugggaaccuggaag

SEQ ID NO: 261097 - RNA, 32 nt, Human
uguaagaugaacacugguuugauccgggacaa

SEQ ID NO: 261098 - RNA, 32 nt, Human
uguaagaugucacugucuggguuccagcccuc

SEQ ID NO: 261099 - RNA, 32 nt, Human
uguaagcaaaauguugaauaucagggcauuuu

SEQ ID NO: 261100 - RNA, 32 nt, Human
uguaagcaacccaguuuaagaaacauggcaac

SEQ ID NO: 261101 - RNA, 32 nt, Human
uguaagcaaggaggggagaggcuuccaccgaa

SEQ ID NO: 261102 - RNA, 32 nt, Human
uguaagcaccuugaucuuggacuucccagccu

SEQ ID NO: 261103 - RNA, 32 nt, Human
uguaagcagagguggcuggcucugcagccuua

SEQ ID NO: 261104 - RNA, 32 nt, Human
uguaagcagccucuccccaucuaccuagcaac

SEQ ID NO: 261105 - RNA, 32 nt, Human
uguaagcagccugagucugucuacaggacaca

SEQ ID NO: 261106 - RNA, 32 nt, Human
uguaagcagguccaucucuccacccacugagg

SEQ ID NO: 261107 - RNA, 32 nt, Human
uguaagccaucacaccuggcccuagugacagg

SEQ ID NO: 261108 - RNA, 32 nt, Human
uguaagcuaaaaagcugugugaacccaggugu

SEQ ID NO: 261109 - RNA, 32 nt, Human
uguaaggaaagauaggaccaaauauguaagug

SEQ ID NO: 261110 - RNA, 25 nt, Human
uguaaggaagauuagaauguaugca

SEQ ID NO: 261111 - RNA, 32 nt, Human
uguaaggacuccugagauauguguccagcaag

SEQ ID NO: 261112 - RNA, 32 nt, Human
uguaaggcaguuggggaguaucuauugaaagu

SEQ ID NO: 261113 - RNA, 32 nt, Human
uguaaggcauuuucaucuuuccuucggguugg

SEQ ID NO: 261114 - RNA, 32 nt, Human
uguaaggcguggaauaggaguugcucagugga

SEQ ID NO: 261115 - RNA, 32 nt, Human
uguaaggcuuaacacaguggguggugaguucu

SEQ ID NO: 261116 - RNA, 32 nt, Human
uguaagggagacucagucccagccucuccccu

SEQ ID NO: 261117 - RNA, 32 nt, Human
uguaaggggcagcaguugaggugggguagugc

SEQ ID NO: 261118 - RNA, 32 nt, Human
uguaaggguaccuuaaaacaagagacucgcuu

SEQ ID NO: 261119 - RNA, 32 nt, Human
uguaaggugccacccccaaacuuuaagguagc

SEQ ID NO: 261120 - RNA, 32 nt, Human
uguaagguggcuggaaagaaccuugaggagag

SEQ ID NO: 261121 - RNA, 32 nt, Human
uguaagguuaaguagcggcacagcauugacaa

SEQ ID NO: 261122 - RNA, 32 nt, Human
uguaaguaaagaaacaagcagaugguauccag

SEQ ID NO: 261123 - RNA, 32 nt, Human
uguaaguagcuggcuugggguaucagcaaauu

SEQ ID NO: 261124 - RNA, 32 nt, Human
uguaaguagggugggacagagauggcaccugg

SEQ ID NO: 261125 - RNA, 22 nt, Human
uguaaguauauguauauacaua

SEQ ID NO: 261126 - RNA, 32 nt, Human
uguaaguauauuuuggaacagauuuguaauuu

SEQ ID NO: 261127 - RNA, 32 nt, Human
uguaagucagcuucucagguggucggacguga

SEQ ID NO: 261128 - RNA, 32 nt, Human
uguaagucauuucuucaguccuucuccucugu

SEQ ID NO: 261129 - RNA, 32 nt, Human
uguaagucccagcuacucaggaggcuuaggua

SEQ ID NO: 261130 - RNA, 32 nt, Human
uguaaguccuuccucuggggaagugaagggua

SEQ ID NO: 261131 - RNA, 20 nt, Human
uguaagucugugccuggaga

SEQ ID NO: 261132 - RNA, 23 nt, Human
uguaagugaauggagaccucaaa

SEQ ID NO: 261133 - RNA, 32 nt, Human
uguaagugauguggacauaauugccuacaaua

SEQ ID NO: 261134 - RNA, 32 nt, Human
uguaagugauguggacguaauugccuacagua

SEQ ID NO: 261135 - RNA, 32 nt, Human
uguaagugcaggaaaccgaguagaaaauguga

SEQ ID NO: 261136 - RNA, 32 nt, Human
uguaagugcucaaauccuccaucuccucacuu

SEQ ID NO: 261137 - RNA, 32 nt, Human
uguaaguggaaauguaauuguguaccaguuuc

SEQ ID NO: 261138 - RNA, 32 nt, Human
uguaaguggagcuguuaaaaacagcagugcug

SEQ ID NO: 261139 - RNA, 32 nt, Human
uguaagugguggggcugggagaggaggaacag

SEQ ID NO: 261140 - RNA, 24 nt, Human
uguaaguguauauauguguguaua

SEQ ID NO: 261141 - RNA, 32 nt, Human
uguaaguguguaguuugaugagcuuggacaaa

SEQ ID NO: 261142 - RNA, 32 nt, Human
uguaaguucaucuagaucuccaccucaccugu

SEQ ID NO: 261143 - RNA, 32 nt, Human
uguaaguuucaguugcugaauauaucaguaua

SEQ ID NO: 261144 - RNA, 32 nt, Human
uguaauaaaacaaugacagcuguaguaacuau

SEQ ID NO: 261145 - RNA, 32 nt, Human
uguaauaaaaccagcagagacacacugagaau

SEQ ID NO: 261146 - RNA, 32 nt, Human
uguaauaacucacguacucugaagagagcuug

SEQ ID NO: 261147 - RNA, 32 nt, Human
uguaauaagcauauaauaaacacguauauaca

SEQ ID NO: 261148 - RNA, 32 nt, Human
uguaauacaagcuuucuuuucauugccuagua

SEQ ID NO: 261149 - RNA, 32 nt, Human
uguaauacaagugaucauagaaggugagaaug

SEQ ID NO: 261150 - RNA, 32 nt, Human
uguaauacgccaaccagucaaguuguguuuug

SEQ ID NO: 261151 - RNA, 32 nt, Human
uguaauaguucuauccuuuugccugcagguca

SEQ ID NO: 261152 - RNA, 32 nt, Human
uguaauauauuugcacaguagaugcuauggau

SEQ ID NO: 261153 - RNA, 32 nt, Human
uguaauaucccuccccauucuucucuuccccu

SEQ ID NO: 261154 - RNA, 32 nt, Human
uguaauauuccaggaugcugcugcaggucucg

SEQ ID NO: 261155 - RNA, 32 nt, Human
uguaauauuccaggaugcugcugcagguggcg

SEQ ID NO: 261156 - RNA, 32 nt, Human
uguaauauuccuuugggguaaguuuccgaaga

SEQ ID NO: 261157 - RNA, 20 nt, Human
uguaauauugcuguccucua

SEQ ID NO: 261158 - RNA, 32 nt, Human
uguaauauuggguggaagaagccaggaggaag

SEQ ID NO: 261159 - RNA, 32 nt, Human
uguaaucacaccacugcacuccagcuuggggg

SEQ ID NO: 261160 - RNA, 32 nt, Human
uguaaucacagguccagagagcuuuauggaag

SEQ ID NO: 261161 - RNA, 32 nt, Human
uguaaucacagugacucaggaggcugagguga

SEQ ID NO: 261162 - RNA, 32 nt, Human
uguaaucacucuggccaaagagagaagggagg

SEQ ID NO: 261163 - RNA, 32 nt, Human
uguaaucacugcacuccaaccuggcaacagag

SEQ ID NO: 261164 - RNA, 32 nt, Human
uguaaucacugcacuuucggaagcugaggugg

SEQ ID NO: 261165 - RNA, 32 nt, Human
uguaaucacugcacuuugggaagcugaggugg

SEQ ID NO: 261166 - RNA, 32 nt, Human
uguaaucagcaacauauucccaacaggaaaau

SEQ ID NO: 261167 - RNA, 32 nt, Human
uguaaucagcuacucgggaggcugaggcaggg

SEQ ID NO: 261168 - RNA, 19 nt, Human
uguaaucagcucccuccau

SEQ ID NO: 261169 - RNA, 32 nt, Human
uguaaucaggagaaagggacagaggaagcccc

SEQ ID NO: 261170 - RNA, 32 nt, Human
uguaaucaguuaugccuauguaaugaagcuuc

SEQ ID NO: 261171 - RNA, 32 nt, Human
uguaaucauacuauuaaaugacucuggaguca

SEQ ID NO: 261172 - RNA, 32 nt, Human
uguaaucauagagaaaagcaaagaagaaaucc

SEQ ID NO: 261173 - RNA, 32 nt, Human
uguaaucauucugaggugaggcuuuucuuauu

SEQ ID NO: 261174 - RNA, 32 nt, Human
uguaaucauugaaccucgagucacuguaaaag

SEQ ID NO: 261175 - RNA, 32 nt, Human
uguaaucauuuugaacaugugugaaaguugau

SEQ ID NO: 261176 - RNA, 32 nt, Human
uguaauccaaaucucuguggcuucaugcuugu

SEQ ID NO: 261177 - RNA, 32 nt, Human
uguaaucccaacacuuucuauuuucuagaauc

SEQ ID NO: 261178 - RNA, 32 nt, Human
uguaaucccagcacuugggaggccguggcagg

SEQ ID NO: 261179 - RNA, 32 nt, Human
uguaaucccagcuaaaggaggcugagguugca

SEQ ID NO: 261180 - RNA, 32 nt, Human
uguaaucccagcuacucaaggcugaggcagga

SEQ ID NO: 261181 - RNA, 20 nt, Human
uguaaucccagcuacucagg

SEQ ID NO: 261182 - RNA, 32 nt, Human
uguaaucccagcuacucccaaggcugaggcag

SEQ ID NO: 261183 - RNA, 20 nt, Human
uguaaucccagcuacucggg

SEQ ID NO: 261184 - RNA, 20 nt, Human
uguaaucccagcuacuuggg

SEQ ID NO: 261185 - RNA, 32 nt, Human
uguaaucccagcuucuggaggcugaggccaga

SEQ ID NO: 261186 - RNA, 32 nt, Human
uguaaucccuuagcuacucaggaggcugaggc

SEQ ID NO: 261187 - RNA, 32 nt, Human
uguaauccuaaguaacacuuugggaggcuggg

SEQ ID NO: 261188 - RNA, 32 nt, Human
uguaauccuagcacuuugggggaccaagucag

SEQ ID NO: 261189 - RNA, 32 nt, Human
uguaauccuagcagguugggaggccaaggugg

SEQ ID NO: 261190 - RNA, 32 nt, Human
uguaauccuggcuacucaggaggccgaggcag

SEQ ID NO: 261191 - RNA, 32 nt, Human
uguaauccugggguugguauguaggaggucua

SEQ ID NO: 261192 - RNA, 32 nt, Human
uguaaucguagcugaggcaggagaaucgccug

SEQ ID NO: 261193 - RNA, 32 nt, Human
uguaaucgugcaaauaaacgcucacuccgaau

SEQ ID NO: 261194 - RNA, 32 nt, Human
uguaaucuacauuccaucaccuuuaucaggug

SEQ ID NO: 261195 - RNA, 31 nt, Human
uguaaucucaauaaauguggauugaaguuuu

SEQ ID NO: 261196 - RNA, 32 nt, Human
uguaaucucccaacaccccaugaagcaaggcu

SEQ ID NO: 261197 - RNA, 32 nt, Human
uguaaucugcauucuccaggaguuuuaugugu

SEQ ID NO: 261198 - RNA, 32 nt, Human
uguaaucuguuucccagggaaauaagcuauug

SEQ ID NO: 261199 - RNA, 32 nt, Human
uguaaucuuugggagcacuuugggaggccgag

SEQ ID NO: 261200 - RNA, 24 nt, Human
uguaaugaaaacuuuacaugaaug

SEQ ID NO: 261201 - RNA, 32 nt, Human
uguaaugagucuggcaaagccuuaaugagcag

SEQ ID NO: 261202 - RNA, 32 nt, Human
uguaaugauccauucaugagcugguaugaaau

SEQ ID NO: 261203 - RNA, 32 nt, Human
uguaaugaucucuuucuuuuguuaauacugcu

SEQ ID NO: 261204 - RNA, 32 nt, Human
uguaaugauucuggcuauuaaucucuauuaug

SEQ ID NO: 261205 - RNA, 32 nt, Human
uguaaugcaaagcauauuuggcaagcaguuca

SEQ ID NO: 261206 - RNA, 32 nt, Human
uguaaugccuagugccuucuauuuacagugaa

SEQ ID NO: 261207 - RNA, 32 nt, Human
uguaaugcuaccucuugaaacugacauccuag

SEQ ID NO: 261208 - RNA, 32 nt, Human
uguaaugcugcagcugagccugggacaggucu

SEQ ID NO: 261209 - RNA, 32 nt, Human
uguaauggaucaauuuaaaauauuuuauuucu

SEQ ID NO: 261210 - RNA, 32 nt, Human
uguaaugggguugaaagcuggggaggaggauc

SEQ ID NO: 261211 - RNA, 32 nt, Human
uguaaugguauguccagccucacucucccucc

SEQ ID NO: 261212 - RNA, 32 nt, Human
uguaaugguggaggugugggcagaggagggag

SEQ ID NO: 261213 - RNA, 32 nt, Human
uguaauguucugaacaaacuugaaugaugaaa

SEQ ID NO: 261214 - RNA, 32 nt, Human
uguaauguugcagauccgcaggcagaagcucu

SEQ ID NO: 261215 - RNA, 32 nt, Human
uguaauguuggucauaauacugcuauaaauau

SEQ ID NO: 261216 - RNA, 32 nt, Human
uguaauuacagaauuuacgaaauguaaauggc

SEQ ID NO: 261217 - RNA, 32 nt, Human
uguaauuacagcccuaucuggagacagcgaau

SEQ ID NO: 261218 - RNA, 32 nt, Human
uguaauuaugugaacuuuugagagagaugaaa

SEQ ID NO: 261219 - RNA, 32 nt, Human
uguaauucaagaagugccuggaagagagggug

SEQ ID NO: 261220 - RNA, 32 nt, Human
uguaauuccagcugcuugggagccugaggcag

SEQ ID NO: 261221 - RNA, 32 nt, Human
uguaauucucacccucucccaagauguuugcc

SEQ ID NO: 261222 - RNA, 32 nt, Human
uguaauucugacacugugucucccgggcuugu

SEQ ID NO: 261223 - RNA, 32 nt, Human
uguaauugaaaccacauggaaagacuagaaau

SEQ ID NO: 261224 - RNA, 32 nt, Human
uguaauugcaccacugcacuccagccugggug

SEQ ID NO: 261225 - RNA, 32 nt, Human
uguaauugcaucacugcacuccaaccugggca

SEQ ID NO: 261226 - RNA, 32 nt, Human
uguaauuuaaggccuuccacaaugaacaguuc

SEQ ID NO: 261227 - RNA, 32 nt, Human
uguaauuuccuucccuccuuuaaccuggcgau

SEQ ID NO: 261228 - RNA, 32 nt, Human
uguaauuugcagggaaauugacugcaggugau

SEQ ID NO: 261229 - RNA, 32 nt, Human
uguaauuuguaagagacaguaaaugguggcau

SEQ ID NO: 261230 - RNA, 32 nt, Human
uguaauuuuccuuuucccagcaugacgaaaaa

SEQ ID NO: 261231 - RNA, 32 nt, Human
uguaauuuugugacacgcucucugccaagccc

SEQ ID NO: 261232 - RNA, 32 nt, Human
uguacaaaacauuugagaaaauauuuuaggac

SEQ ID NO: 261233 - RNA, 32 nt, Human
uguacaaaaguggacagaaaaguggcuggaca

SEQ ID NO: 261234 - RNA, 32 nt, Human
uguacaaacucaaguaugcaagaaauacaucu

SEQ ID NO: 261235 - RNA, 32 nt, Human
uguacaaagaaauuucccucccugccugcaca

SEQ ID NO: 261236 - RNA, 32 nt, Human
uguacaaagacacauguaauggagauuguaca

SEQ ID NO: 261237 - RNA, 23 nt, Human
uguacaaaggaggaagcuucaaa

SEQ ID NO: 261238 - RNA, 32 nt, Human
uguacaacacagaaccaaaugagaaacaguuc

SEQ ID NO: 261239 - RNA, 22 nt, Human
uguacaacaggaagacuugaaa

SEQ ID NO: 261240 - RNA, 32 nt, Human
uguacaacaugcugguuucuguaggguauuuu

SEQ ID NO: 261241 - RNA, 32 nt, Human
uguacaaccaaagagcuaucucaggagaagau

SEQ ID NO: 261242 - RNA, 32 nt, Human
uguacaaccagagaacaggauucuucccuucu

SEQ ID NO: 261243 - RNA, 32 nt, Human
uguacaagaagagauaucuguggaugcuaugc

SEQ ID NO: 261244 - RNA, 32 nt, Human
uguacaagauacaguuucccugggacauaaau

SEQ ID NO: 261245 - RNA, 21 nt, Human
uguacaagcaugacaccaaca

SEQ ID NO: 261246 - RNA, 32 nt, Human
uguacaagcaugcaccaacaguccuuaguuuu

SEQ ID NO: 261247 - RNA, 32 nt, Human
uguacaaggaacagcccucagacguguucugc

SEQ ID NO: 261248 - RNA, 32 nt, Human
uguacaagugaguccgggugguguggguguga

SEQ ID NO: 261249 - RNA, 32 nt, Human
uguacaaucuucccugucaugacuuuaaguuc

SEQ ID NO: 261250 - RNA, 32 nt, Human
uguacaauguacaauuguuucauuucagaaaa

SEQ ID NO: 261251 - RNA, 32 nt, Human
uguacaauucaaaaucaugcaauguuucacuu

SEQ ID NO: 261252 - RNA, 32 nt, Human
uguacaauugaauuggaaauggugcuagucag

SEQ ID NO: 261253 - RNA, 32 nt, Human
uguacaauuggauuccaggaaggaaggagccu

SEQ ID NO: 261254 - RNA, 32 nt, Human
uguacacaaggcagaaggaaguaaaauuucca

SEQ ID NO: 261255 - RNA, 32 nt, Human
uguacacacacuuccucaucacugcagccauu

SEQ ID NO: 261256 - RNA, 32 nt, Human
uguacacacagcaacucagaugaaacucaagg

SEQ ID NO: 261257 - RNA, 20 nt, Human
uguacacacaucccucugag

SEQ ID NO: 261258 - RNA, 32 nt, Human
uguacacagugccaccagugcuccugcagugc

SEQ ID NO: 261259 - RNA, 32 nt, Human
uguacacauaugcacacuuugcacacagacac

SEQ ID NO: 261260 - RNA, 32 nt, Human
uguacacaucugcuuuguuccacacacaugca

SEQ ID NO: 261261 - RNA, 24 nt, Human
uguacacauggugccuucuaagga

SEQ ID NO: 261262 - RNA, 32 nt, Human
uguacaccauggugguucaggcugcaguggcu

SEQ ID NO: 261263 - RNA, 32 nt, Human
uguacacugaucuuuuucaugaggaugggucc

SEQ ID NO: 261264 - RNA, 32 nt, Human
uguacacugcacgaauggaagaggcaccuguc

SEQ ID NO: 261265 - RNA, 32 nt, Human
uguacacuucagcagcuugcacaagggagcuc

SEQ ID NO: 261266 - RNA, 32 nt, Human
uguacacuuggcugucaggcuuucugugcaug

SEQ ID NO: 261267 - RNA, 32 nt, Human
uguacagaagcagcagacaagaucuuccagau

SEQ ID NO: 261268 - RNA, 32 nt, Human
uguacagacauguacucucacacacacaggca

SEQ ID NO: 261269 - RNA, 32 nt, Human
uguacagacucggaaaggucaggaaguucuua

SEQ ID NO: 261270 - RNA, 32 nt, Human
uguacagagcaugcaggccaugucugccagcc

SEQ ID NO: 261271 - RNA, 32 nt, Human
uguacagagccaggaacccuacugcaguaaac

SEQ ID NO: 261272 - RNA, 32 nt, Human
uguacagauaauuuugguggcuuuguuaaugu

SEQ ID NO: 261273 - RNA, 32 nt, Human
uguacagauagaaucccuaccccugcauuugu

SEQ ID NO: 261274 - RNA, 32 nt, Human
uguacagcacugaaaugaaaucaaagaugaag

SEQ ID NO: 261275 - RNA, 32 nt, Human
uguacagcaggcagaaucucuaugaugacugg

SEQ ID NO: 261276 - RNA, 32 nt, Human
uguacagcaggcaggagggugggcaggcaacc

SEQ ID NO: 261277 - RNA, 32 nt, Human
uguacagccagcauucagauuauagguguacc

SEQ ID NO: 261278 - RNA, 32 nt, Human
uguacagccaugaccacuagcuaauucagaau

SEQ ID NO: 261279 - RNA, 32 nt, Human
uguacagccucagcgcaccaggagacccuaga

SEQ ID NO: 261280 - RNA, 32 nt, Human
uguacagcucuucauguugccaaagcaccaag

SEQ ID NO: 261281 - RNA, 22 nt, Human
uguacagcuggcucuacuuccc

SEQ ID NO: 261282 - RNA, 32 nt, Human
uguacaggcacugucuucagcccgaguuccag

SEQ ID NO: 261283 - RNA, 32 nt, Human
uguacaggcccagccucugccucacagcagac

SEQ ID NO: 261284 - RNA, 32 nt, Human
uguacaggcccgggacccagagcgaggguccc

SEQ ID NO: 261285 - RNA, 32 nt, Human
uguacaggcugagacacagcccagagacugaa

SEQ ID NO: 261286 - RNA, 32 nt, Human
uguacagggguuggguggggguugcaggacuc

SEQ ID NO: 261287 - RNA, 32 nt, Human
uguacagguggguuugggagagaggagcaugc

SEQ ID NO: 261288 - RNA, 32 nt, Human
uguacaguaguuuugccccuuuaauuggggca

SEQ ID NO: 261289 - RNA, 32 nt, Human
uguacaguauggccuguugcucaagucuacac

SEQ ID NO: 261290 - RNA, 32 nt, Human
uguacagucacagggaauucugaucugaaggg

SEQ ID NO: 261291 - RNA, 32 nt, Human
uguacaguccccaucaguagcguauagaacac

SEQ ID NO: 261292 - RNA, 32 nt, Human
uguacaguccuuuuucuagaagugagacauac

SEQ ID NO: 261293 - RNA, 23 nt, Human
uguacagugacaucuucugggau

SEQ ID NO: 261294 - RNA, 32 nt, Human
uguacagugccuggcacucugggugcucaaua

SEQ ID NO: 261295 - RNA, 32 nt, Human
uguacaguggguggaaagggcauuuggagcuc

SEQ ID NO: 261296 - RNA, 18 nt, Human
uguacauacauaaacaca

SEQ ID NO: 261297 - RNA, 32 nt, Human
uguacauacauaaacacacauacauguagcac

SEQ ID NO: 261298 - RNA, 32 nt, Human
uguacauacauacuguaugaagcuuguccucu

SEQ ID NO: 261299 - RNA, 32 nt, Human
uguacauacaugcacauacucaaacaugcgua

SEQ ID NO: 261300 - RNA, 32 nt, Human
uguacauacuugcacacagguuccccauguac

SEQ ID NO: 261301 - RNA, 32 nt, Human
uguacauaguuugcuccucugcccuagcccuc

SEQ ID NO: 261302 - RNA, 32 nt, Human
uguacaucaaagaacucauacuggagagaaac

SEQ ID NO: 261303 - RNA, 32 nt, Human
uguacauccucuuuaccaucccuccuucucuc

SEQ ID NO: 261304 - RNA, 32 nt, Human
uguacaucgucuucgucuuccuccugggcgcc

SEQ ID NO: 261305 - RNA, 32 nt, Human
uguacaugagacaggauaccacugucuuuuau

SEQ ID NO: 261306 - RNA, 32 nt, Human
uguacaugcucggaggccuggccauauaggag

SEQ ID NO: 261307 - RNA, 32 nt, Human
uguacauggcaaaguuucaaagagcucuuggc

SEQ ID NO: 261308 - RNA, 32 nt, Human
uguacauggcguguuacauuccugaaccuacu

SEQ ID NO: 261309 - RNA, 32 nt, Human
uguacaugggaggcaugugugugauguguaca

SEQ ID NO: 261310 - RNA, 32 nt, Human
uguacaugggcaggugugucccccaggaaagc

SEQ ID NO: 261311 - RNA, 32 nt, Human
uguacaugugugugugagcacaugugugcaug

SEQ ID NO: 261312 - RNA, 24 nt, Human
uguacauguuuuggagacuucaaa

SEQ ID NO: 261313 - RNA, 32 nt, Human
uguacauuggucagguauauuaucucaaagga

SEQ ID NO: 261314 - RNA, 32 nt, Human
uguacauuguuugaaauguucuuuuuguaaca

SEQ ID NO: 261315 - RNA, 32 nt, Human
uguacauuuagacauuuggguucaguugcuug

SEQ ID NO: 261316 - RNA, 22 nt, Human
uguaccaaaacucaucaguggc

SEQ ID NO: 261317 - RNA, 32 nt, Human
uguaccaaaccacaugggaguauggaaaggcu

SEQ ID NO: 261318 - RNA, 32 nt, Human
uguaccacagaauucagaguccagcacaucac

SEQ ID NO: 261319 - RNA, 18 nt, Human
uguaccaccacacacgga

SEQ ID NO: 261320 - RNA, 21 nt, Human
uguaccaccacauagcacaug

SEQ ID NO: 261321 - RNA, 19 nt, Human
uguaccaccagcagcugga

SEQ ID NO: 261322 - RNA, 18 nt, Human
uguaccaccuaauguaga

SEQ ID NO: 261323 - RNA, 22 nt, Human
uguaccacugagugccuuucac

SEQ ID NO: 261324 - RNA, 32 nt, Human
uguaccacugcacuccaaccuggguuacagca

SEQ ID NO: 261325 - RNA, 32 nt, Human
uguaccacugcacuccagccuggcugacagug

SEQ ID NO: 261326 - RNA, 32 nt, Human
uguaccacugcacuccagccugggcaacagag

SEQ ID NO: 261327 - RNA, 32 nt, Human
uguaccacugcacuccagccugggcgacagag

SEQ ID NO: 261328 - RNA, 32 nt, Human
uguaccacugcacuccagccugggugacagag

SEQ ID NO: 261329 - RNA, 32 nt, Human
uguaccacugcacuccagccuggucaauggag

SEQ ID NO: 261330 - RNA, 32 nt, Human
uguaccacugcacuccagcucggggaacagag

SEQ ID NO: 261331 - RNA, 32 nt, Human
uguaccacugcacuccagucugggcaacagac

SEQ ID NO: 261332 - RNA, 32 nt, Human
uguaccacugcacuccaguuuggcaacagagu

SEQ ID NO: 261333 - RNA, 32 nt, Human
uguaccacugcgcuccaaacugggugacaugg

SEQ ID NO: 261334 - RNA, 32 nt, Human
uguaccacugggauagaggaaucaagaggaca

SEQ ID NO: 261335 - RNA, 32 nt, Human
uguaccacuguacuccagccugggcuggacag

SEQ ID NO: 261336 - RNA, 32 nt, Human
uguaccacuguauuccagccuggacgacugag

SEQ ID NO: 261337 - RNA, 19 nt, Human
uguaccagaaucucuggga

SEQ ID NO: 261338 - RNA, 32 nt, Human
uguaccagagaaggaaaagucugaucccgaaa

SEQ ID NO: 261339 - RNA, 32 nt, Human
uguaccagagcacauuccuuaggggacggcuu

SEQ ID NO: 261340 - RNA, 32 nt, Human
uguaccagagcaccuccaaacugcauugagga

SEQ ID NO: 261341 - RNA, 32 nt, Human
uguaccaggccccagacugagacuuaggcuuc

SEQ ID NO: 261342 - RNA, 32 nt, Human
uguaccaggugggcacaugaagacacaagaag

SEQ ID NO: 261343 - RNA, 32 nt, Human
uguaccagugucacucuggaguacagcgggag

SEQ ID NO: 261344 - RNA, 32 nt, Human
uguaccauaccugcugggccagucccacacau

SEQ ID NO: 261345 - RNA, 32 nt, Human
uguaccauccccauccugagugacuacuaagc

SEQ ID NO: 261346 - RNA, 23 nt, Human
uguaccaucucuaagcaucgagg

SEQ ID NO: 261347 - RNA, 32 nt, Human
uguaccaucugaauuuugcauuuuagcacuug

SEQ ID NO: 261348 - RNA, 32 nt, Human
uguaccaucuugaggcacagcagccacugcuc

SEQ ID NO: 261349 - RNA, 32 nt, Human
uguaccaugcacuccagccuggguaacagagc

SEQ ID NO: 261350 - RNA, 32 nt, Human
uguaccauggcacuccagccuggacaacaaga

SEQ ID NO: 261351 - RNA, 32 nt, Human
uguaccauugcacuccagccugggcaacaaga

SEQ ID NO: 261352 - RNA, 32 nt, Human
uguaccauugcacuccagccugggcaacagag

SEQ ID NO: 261353 - RNA, 32 nt, Human
uguacccaaccuucccuucucccuugagugcu

SEQ ID NO: 261354 - RNA, 32 nt, Human
uguacccacagcuugcugagggcugcucuucu

SEQ ID NO: 261355 - RNA, 32 nt, Human
uguacccagaacuuaaagugagacaaaaccaa

SEQ ID NO: 261356 - RNA, 31 nt, Human
uguacccagagaggcggcagcaggagagcca

SEQ ID NO: 261357 - RNA, 32 nt, Human
uguacccagcugguugggaggaccagagccug

SEQ ID NO: 261358 - RNA, 32 nt, Human
uguacccaggaggcagagauugcagugagcug

SEQ ID NO: 261359 - RNA, 32 nt, Human
uguacccaggaggcggagguuguagugagcug

SEQ ID NO: 261360 - RNA, 32 nt, Human
uguacccaggagguggagguugcagugagccg

SEQ ID NO: 261361 - RNA, 32 nt, Human
uguacccaggagguggagguugcggugaacug

SEQ ID NO: 261362 - RNA, 32 nt, Human
uguacccauucgacaggugagacaucuggggu

SEQ ID NO: 261363 - RNA, 32 nt, Human
uguacccccaaagugcuggauuacagguguga

SEQ ID NO: 261364 - RNA, 32 nt, Human
uguaccccucucagucugcaguauugaguugu

SEQ ID NO: 261365 - RNA, 32 nt, Human
uguaccccuuaaggagaagcucucauuuauuu

SEQ ID NO: 261366 - RNA, 32 nt, Human
uguaccccuuacccaggccucugaggggccag

SEQ ID NO: 261367 - RNA, 32 nt, Human
uguacccgaccuucccuucucccuugagugcu

SEQ ID NO: 261368 - RNA, 32 nt, Human
uguacccuccacccuuuuccuggcccccuaau

SEQ ID NO: 261369 - RNA, 32 nt, Human
uguacccuccuccccucuccuacugucauucu

SEQ ID NO: 261370 - RNA, 20 nt, Human
uguacccuggccccacgggg

SEQ ID NO: 261371 - RNA, 32 nt, Human
uguacccuggggacuaggaggaagggggcaga

SEQ ID NO: 261372 - RNA, 22 nt, Human
uguacccugucuuguggcagga

SEQ ID NO: 261373 - RNA, 23 nt, Human
uguacccuguguggucugcagga

SEQ ID NO: 261374 - RNA, 23 nt, Human
uguacccuucuggacuggcagga

SEQ ID NO: 261375 - RNA, 32 nt, Human
uguacccuucuucuuuuccuaggcccuguccu

SEQ ID NO: 261376 - RNA, 32 nt, Human
uguacccuuggaaaauucccuucccauggagc

SEQ ID NO: 261377 - RNA, 32 nt, Human
uguacccuuugaccauaucccaaaggauaguc

SEQ ID NO: 261378 - RNA, 32 nt, Human
uguaccgcgagggucugcggcuucauucuuga

SEQ ID NO: 261379 - RNA, 21 nt, Human
uguaccggaaguugccucuac

SEQ ID NO: 261380 - RNA, 32 nt, Human
uguaccggcuagguucagauuucagaaaucag

SEQ ID NO: 261381 - RNA, 32 nt, Human
uguaccgggggugggguggggagccaggcccg

SEQ ID NO: 261382 - RNA, 32 nt, Human
uguaccggugugacuagaaacagcucuucugg

SEQ ID NO: 261383 - RNA, 32 nt, Human
uguaccguucaucgccgucaccagcuuccugu

SEQ ID NO: 261384 - RNA, 32 nt, Human
uguaccuaaaaauucagaguaggagagaaauc

SEQ ID NO: 261385 - RNA, 32 nt, Human
uguaccuaaggcccuggguucaagagaguugg

SEQ ID NO: 261386 - RNA, 32 nt, Human
uguaccuaaggugauggggaacuccauucaga

SEQ ID NO: 261387 - RNA, 32 nt, Human
uguaccuauagccccugaauacaugcucaggu

SEQ ID NO: 261388 - RNA, 32 nt, Human
uguaccuauuaaaaguugcaaaguggaauuaa

SEQ ID NO: 261389 - RNA, 32 nt, Human
uguaccucaaagauuuccuaaagucagugccc

SEQ ID NO: 261390 - RNA, 32 nt, Human
uguaccucaaucuccauugcuuucagcaccac

SEQ ID NO: 261391 - RNA, 32 nt, Human
uguaccucacaaaaucaugcaaucuugcagug

SEQ ID NO: 261392 - RNA, 32 nt, Human
uguaccuccacucagcacaguucauguucagu

SEQ ID NO: 261393 - RNA, 32 nt, Human
uguaccuccagccuuucacuccucgguccucc

SEQ ID NO: 261394 - RNA, 32 nt, Human
uguaccucccucacuucucuccuaucacugcu

SEQ ID NO: 261395 - RNA, 32 nt, Human
uguaccuccuaccucagucuaugugagaggaa

SEQ ID NO: 261396 - RNA, 32 nt, Human
uguaccuccuggacuucuccccaggcucacuc

SEQ ID NO: 261397 - RNA, 32 nt, Human
uguaccucgcgcacuccucuugcuccaggucc

SEQ ID NO: 261398 - RNA, 32 nt, Human
uguaccucuagucccagcuacuugggaggcuu

SEQ ID NO: 261399 - RNA, 32 nt, Human
uguaccucuggcaaaugccccaccuuggugau

SEQ ID NO: 261400 - RNA, 32 nt, Human
uguaccucuguuacucucagccuggaaucccc

SEQ ID NO: 261401 - RNA, 28 nt, Human
uguaccugcagugcugcuuuucuugccu

SEQ ID NO: 261402 - RNA, 18 nt, Human
uguaccugcaguguagua

SEQ ID NO: 261403 - RNA, 32 nt, Human
uguaccugcauucccagcuacuugggaggcug

SEQ ID NO: 261404 - RNA, 32 nt, Human
uguaccuggcuucucuucuuccuuuccugcuc

SEQ ID NO: 261405 - RNA, 32 nt, Human
uguaccugggaagcgcagguugcagugagcug

SEQ ID NO: 261406 - RNA, 32 nt, Human
uguaccugggaggaggagguugcagugagcug

SEQ ID NO: 261407 - RNA, 32 nt, Human
uguaccuguagucccagcuacuugggaggcug

SEQ ID NO: 261408 - RNA, 32 nt, Human
uguaccuguaguccuagcuauuugggaagcug

SEQ ID NO: 261409 - RNA, 32 nt, Human
uguaccugugugugugcaugugcacguguuug

SEQ ID NO: 261410 - RNA, 32 nt, Human
uguaccuguuggcggccgggugcaguggcuca

SEQ ID NO: 261411 - RNA, 32 nt, Human
uguaccuuaaacuuccacaucacugcacccug

SEQ ID NO: 261412 - RNA, 32 nt, Human
uguaccuuaauuacuacuguauuugcaaauua

SEQ ID NO: 261413 - RNA, 32 nt, Human
uguaccuucuccaccugcccccaggaaaaaga

SEQ ID NO: 261414 - RNA, 32 nt, Human
uguacgagaaguggccgaagaggcucaggcag

SEQ ID NO: 261415 - RNA, 32 nt, Human
uguacgaggagaaugagugcucccugguggug

SEQ ID NO: 261416 - RNA, 32 nt, Human
uguacgaggaugacaucaccuucuguacccug

SEQ ID NO: 261417 - RNA, 32 nt, Human
uguacgaguggaggacagggacagagcccucu

SEQ ID NO: 261418 - RNA, 32 nt, Human
uguacgcaguuaccacacaguuaccaagcagu

SEQ ID NO: 261419 - RNA, 32 nt, Human
uguacgccaaggaugagcucuagaucauuuga

SEQ ID NO: 261420 - RNA, 32 nt, Human
uguacgcguugccggcgaagaggggagccuga

SEQ ID NO: 261421 - RNA, 32 nt, Human
uguacgcucacuugccccagaugccuccucug

SEQ ID NO: 261422 - RNA, 32 nt, Human
uguacgcugcucauaguagcuuccugccaaag

SEQ ID NO: 261423 - RNA, 32 nt, Human
uguacgcugugguggucacccccaugcugaac

SEQ ID NO: 261424 - RNA, 32 nt, Human
uguacggccuggacaggaugguggucuuucuc

SEQ ID NO: 261425 - RNA, 32 nt, Human
uguacgggaagaggcagagggaggcagccagc

SEQ ID NO: 261426 - RNA, 32 nt, Human
uguacggucugacuucuugagcccauacucaa

SEQ ID NO: 261427 - RNA, 32 nt, Human
uguacguaaaacaaaauagggcuuggcugguc

SEQ ID NO: 261428 - RNA, 29 nt, Human
uguacguaucugugugaguguggggguuu

SEQ ID NO: 261429 - RNA, 32 nt, Human
uguacguccucccagggagaccuaaaccuggc

SEQ ID NO: 261430 - RNA, 32 nt, Human
uguacgugcaugcuguagcugcagccugcauc

SEQ ID NO: 261431 - RNA, 32 nt, Human
uguacgugccuguagucucagcuacuugggag

SEQ ID NO: 261432 - RNA, 32 nt, Human
uguacgugcuccaugcauggccacuugggcua

SEQ ID NO: 261433 - RNA, 32 nt, Human
uguacguuccuaggaucggggcugcuuaugcc

SEQ ID NO: 261434 - RNA, 32 nt, Human
uguacguucuuccgaagcacugaugaucaaaa

SEQ ID NO: 261435 - RNA, 32 nt, Human
uguacuaaaaacacaaaauuagcugggugugg

SEQ ID NO: 261436 - RNA, 32 nt, Human
uguacuaaaaauacaaaauuagccgggcgugg

SEQ ID NO: 261437 - RNA, 32 nt, Human
uguacuaaaaauacaaaauuagcuggguuugg

SEQ ID NO: 261438 - RNA, 32 nt, Human
uguacuaaaaauacagaauuagccgggcaugg

SEQ ID NO: 261439 - RNA, 32 nt, Human
uguacuaaaauacaaaaaucagccaggcgugg

SEQ ID NO: 261440 - RNA, 20 nt, Human
uguacuaagccacccuccac

SEQ ID NO: 261441 - RNA, 32 nt, Human
uguacuaagccagauguuaaagagaucugcaa

SEQ ID NO: 261442 - RNA, 32 nt, Human
uguacuacuagaaaauaccaaauggauauauu

SEQ ID NO: 261443 - RNA, 32 nt, Human
uguacuacugcacuugagcaugaauggguagu

SEQ ID NO: 261444 - RNA, 32 nt, Human
uguacuacuguacuccagccugggggaaagag

SEQ ID NO: 261445 - RNA, 32 nt, Human
uguacuacugugaaguguaugugugcaauaca

SEQ ID NO: 261446 - RNA, 32 nt, Human
uguacuagaauuggauccuaggugcuuagccc

SEQ ID NO: 261447 - RNA, 32 nt, Human
uguacuagaugcuguuuuugucugacuucuac

SEQ ID NO: 261448 - RNA, 32 nt, Human
uguacuaguaccuguggauuacagucaguuaa

SEQ ID NO: 261449 - RNA, 32 nt, Human
uguacuaucagccauggucaacuccgucgucu

SEQ ID NO: 261450 - RNA, 32 nt, Human
uguacuauuccucugcagagcuugacuugaug

SEQ ID NO: 261451 - RNA, 32 nt, Human
uguacucagcccagagugaaagggcacugucu

SEQ ID NO: 261452 - RNA, 32 nt, Human
uguacucaggaccuuggcugggccuggucguc

SEQ ID NO: 261453 - RNA, 31 nt, Human
uguacucaguggacagugcuguugaagauuu

SEQ ID NO: 261454 - RNA, 32 nt, Human
uguacucaucugcuguguguggugccagaagu

SEQ ID NO: 261455 - RNA, 32 nt, Human
uguacuccagcacucuagccugggcgacagag

SEQ ID NO: 261456 - RNA, 32 nt, Human
uguacuccagcccggcacuccagccuggcgac

SEQ ID NO: 261457 - RNA, 32 nt, Human
uguacuccagccugaagagcgagacucugucu

SEQ ID NO: 261458 - RNA, 32 nt, Human
uguacuccagccuggaagacaagagugaaacu

SEQ ID NO: 261459 - RNA, 32 nt, Human
uguacuccagccuggacaacagcgagagcucc

SEQ ID NO: 261460 - RNA, 32 nt, Human
uguacuccagccuggaugacagaguggagacu

SEQ ID NO: 261461 - RNA, 32 nt, Human
uguacuccagccuggcaacagagugagacugu

SEQ ID NO: 261462 - RNA, 32 nt, Human
uguacuccagccuggcccacagagugagaucc

SEQ ID NO: 261463 - RNA, 32 nt, Human
uguacuccagccugggagacacagugagaccc

SEQ ID NO: 261464 - RNA, 32 nt, Human
uguacuccagccugggcaacaagagugaaacu

SEQ ID NO: 261465 - RNA, 32 nt, Human
uguacuccagccugggcaacaagagugaaaug

SEQ ID NO: 261466 - RNA, 32 nt, Human
uguacuccagccugggcaacagagugagaccc

SEQ ID NO: 261467 - RNA, 32 nt, Human
uguacuccagccugggcaacagagugagacug

SEQ ID NO: 261468 - RNA, 32 nt, Human
uguacuccagccugggcgacaaaagugaaacc

SEQ ID NO: 261469 - RNA, 32 nt, Human
uguacuccagccugggcgacagcaagacccug

SEQ ID NO: 261470 - RNA, 32 nt, Human
uguacuccagccugggcgacggagugagacuc

SEQ ID NO: 261471 - RNA, 32 nt, Human
uguacuccagccugggcgauacaacaagaccu

SEQ ID NO: 261472 - RNA, 32 nt, Human
uguacuccagccugggugacaaagugagacuc

SEQ ID NO: 261473 - RNA, 32 nt, Human
uguacuccagccugggugacagagugagaccc

SEQ ID NO: 261474 - RNA, 32 nt, Human
uguacuccagccugggugacagagugagacuc

SEQ ID NO: 261475 - RNA, 32 nt, Human
uguacuccagccugggugacagagugaggccc

SEQ ID NO: 261476 - RNA, 32 nt, Human
uguacuccagccugggugacagagugauacuc

SEQ ID NO: 261477 - RNA, 32 nt, Human
uguacuccaggcgaggccucuggaccuguguu

SEQ ID NO: 261478 - RNA, 32 nt, Human
uguacuccuuucuauuuuaaagagccaagccu

SEQ ID NO: 261479 - RNA, 32 nt, Human
uguacucgggauccucaggacgcaggucacau

SEQ ID NO: 261480 - RNA, 32 nt, Human
uguacucgggcuguucaugucacugcaagacu

SEQ ID NO: 261481 - RNA, 32 nt, Human
uguacucugcuuguacaguccuugagcccagu

SEQ ID NO: 261482 - RNA, 32 nt, Human
uguacucuggaucccuuccccugcuuugaccc

SEQ ID NO: 261483 - RNA, 32 nt, Human
uguacucugggggcagggagaggcuagagggg

SEQ ID NO: 261484 - RNA, 32 nt, Human
uguacucuuugcuaguaccaaaaguagacuga

SEQ ID NO: 261485 - RNA, 32 nt, Human
uguacugaacgccaagcugagaauggugauuc

SEQ ID NO: 261486 - RNA, 32 nt, Human
uguacugaagaaaaggggagcacaaggccuua

SEQ ID NO: 261487 - RNA, 32 nt, Human
uguacugacaguucuuacaguugaggauuugg

SEQ ID NO: 261488 - RNA, 32 nt, Human
uguacugaccaccuccacgugccacuggggcu

SEQ ID NO: 261489 - RNA, 32 nt, Human
uguacugaggguguuuuuaagugaauugcuua

SEQ ID NO: 261490 - RNA, 32 nt, Human
uguacugaguaucggagcacuuuacagaagcu

SEQ ID NO: 261491 - RNA, 32 nt, Human
uguacugagugguacaagccuuggggacugaa

SEQ ID NO: 261492 - RNA, 32 nt, Human
uguacugauaaaauacucuagccugggccaga

SEQ ID NO: 261493 - RNA, 32 nt, Human
uguacugcaaauaugcuguggguucucggugu

SEQ ID NO: 261494 - RNA, 32 nt, Human
uguacugcacacaccacagaaugugugagauu

SEQ ID NO: 261495 - RNA, 32 nt, Human
uguacugccacugucauaaccaauaccaugaa

SEQ ID NO: 261496 - RNA, 32 nt, Human
uguacugccugaguugugccucuugugugcua

SEQ ID NO: 261497 - RNA, 32 nt, Human
uguacugcuaguaccuguaagcauuuuagguc

SEQ ID NO: 261498 - RNA, 32 nt, Human
uguacugcucuucuuuugcucuaagguauggg

SEQ ID NO: 261499 - RNA, 32 nt, Human
uguacuggaaaggcuguggccauguccgcuuc

SEQ ID NO: 261500 - RNA, 32 nt, Human
uguacuggaggacggcccugcacggcucgcag

SEQ ID NO: 261501 - RNA, 32 nt, Human
uguacuggaugggacaucuaaguggucugcaa

SEQ ID NO: 261502 - RNA, 32 nt, Human
uguacuggcaggcagacgugggcacuguggga

SEQ ID NO: 261503 - RNA, 32 nt, Human
uguacuggccacacuuacuauugacagucacc

SEQ ID NO: 261504 - RNA, 32 nt, Human
uguacuggcccgcaguggcuccaauggccugc

SEQ ID NO: 261505 - RNA, 32 nt, Human
uguacuggcgcgggcugcggaagccugcguga

SEQ ID NO: 261506 - RNA, 32 nt, Human
uguacuggugcacaccugucaucccagcuacc

SEQ ID NO: 261507 - RNA, 32 nt, Human
uguacugguucucuucuuuugcucugaggugu

SEQ ID NO: 261508 - RNA, 29 nt, Human
uguacugguuuaaauaaaauguuaacauu

SEQ ID NO: 261509 - RNA, 32 nt, Human
uguacuguaccuccucucaagccaagaagggc

SEQ ID NO: 261510 - RNA, 32 nt, Human
uguacuguacuuuugcaguucuucccaguuca

SEQ ID NO: 261511 - RNA, 32 nt, Human
uguacuguaggggaagaagugggaacugaaau

SEQ ID NO: 261512 - RNA, 31 nt, Human
uguacugucccggaggagguugggaggugga

SEQ ID NO: 261513 - RNA, 32 nt, Human
uguacugugccagggauauugagaugcucugg

SEQ ID NO: 261514 - RNA, 32 nt, Human
uguacuguuuacuucccacuucccagaauccc

SEQ ID NO: 261515 - RNA, 23 nt, Human
uguacuuaagagauaccugugua

SEQ ID NO: 261516 - RNA, 21 nt, Human
uguacuuagcuguuacaugca

SEQ ID NO: 261517 - RNA, 32 nt, Human
uguacuucacccaggcggaaugggauggccug

SEQ ID NO: 261518 - RNA, 32 nt, Human
uguacuuccuguguacucuuuauuucuagcag

SEQ ID NO: 261519 - RNA, 32 nt, Human
uguacuucguuaacacgaaucuguuucagagc

SEQ ID NO: 261520 - RNA, 32 nt, Human
uguacuucuaguguguuucucagaauaucaac

SEQ ID NO: 261521 - RNA, 21 nt, Human
uguacuugacuucuugacgca

SEQ ID NO: 261522 - RNA, 32 nt, Human
uguacuugagugugugucugugugcagccuau

SEQ ID NO: 261523 - RNA, 32 nt, Human
uguacuuggguuuaagagaaguagcuggcucu

SEQ ID NO: 261524 - RNA, 32 nt, Human
uguacuugguggaggcagaggccaaaaagcac

SEQ ID NO: 261525 - RNA, 32 nt, Human
uguacuugguuuuucaccacugagcuuuaaau

SEQ ID NO: 261526 - RNA, 32 nt, Human
uguacuuguuaugaguggggcagcagcacagu

SEQ ID NO: 261527 - RNA, 32 nt, Human
uguacuuuaggaaacauacccaggaaguacag

SEQ ID NO: 261528 - RNA, 32 nt, Human
uguacuuuauuuugcaccuacagcgugccuug

SEQ ID NO: 261529 - RNA, 32 nt, Human
uguacuuucucaggaaccuuucaagcggccag

SEQ ID NO: 261530 - RNA, 32 nt, Human
uguacuuuuuaagagcucaauuugaaaaaucu

SEQ ID NO: 261531 - RNA, 32 nt, Human
uguacuuuuugugcaugaccuggaccugcuaa

SEQ ID NO: 261532 - RNA, 32 nt, Human
uguagaaaagugcuugucaguuguugaauaaa

SEQ ID NO: 261533 - RNA, 26 nt, Human
uguagaaaccauccuuguuacuugca

SEQ ID NO: 261534 - RNA, 32 nt, Human
uguagaaaguagaaaguguaagucccugguug

SEQ ID NO: 261535 - RNA, 32 nt, Human
uguagaacaucuccuggaucaggaaguagaug

SEQ ID NO: 261536 - RNA, 32 nt, Human
uguagaaccaaggacucaucuucauuuuauac

SEQ ID NO: 261537 - RNA, 32 nt, Human
uguagaacuagaggugggugaccuaugguuau

SEQ ID NO: 261538 - RNA, 32 nt, Human
uguagaacuauacaaaagugcuaacauucaug

SEQ ID NO: 261539 - RNA, 32 nt, Human
uguagaagagggagaaggagaggcucugaaag

SEQ ID NO: 261540 - RNA, 21 nt, Human
uguagaagaugcuuccuccau

SEQ ID NO: 261541 - RNA, 32 nt, Human
uguagaagaugguacaccacugccuuuugccc

SEQ ID NO: 261542 - RNA, 32 nt, Human
uguagaagccgaggggacagcaaggggcccag

SEQ ID NO: 261543 - RNA, 32 nt, Human
uguagaagcugaauguuacagugcaagcgcac

SEQ ID NO: 261544 - RNA, 32 nt, Human
uguagaaggacaaugcaucaagaguaguugaa

SEQ ID NO: 261545 - RNA, 32 nt, Human
uguagaaggagagagaagaagaugaaguuugc

SEQ ID NO: 261546 - RNA, 32 nt, Human
uguagaaguagaaagaaaagaaaaagaaaauc

SEQ ID NO: 261547 - RNA, 32 nt, Human
uguagaagucauggacuuuucugggaaaugac

SEQ ID NO: 261548 - RNA, 24 nt, Human
uguagaauaugcggcugcuuccau

SEQ ID NO: 261549 - RNA, 32 nt, Human
uguagaaucccaccaggacuuugcuaacaaua

SEQ ID NO: 261550 - RNA, 31 nt, Human
uguagaaugaggauagaagagaggaaauccc

SEQ ID NO: 261551 - RNA, 24 nt, Human
uguagacaaacauuagcucuuuac

SEQ ID NO: 261552 - RNA, 19 nt, Human
uguagacaagauguuucca

SEQ ID NO: 261553 - RNA, 20 nt, Human
uguagacaagguucauuuac

SEQ ID NO: 261554 - RNA, 32 nt, Human
uguagacaaguaugacacaguucuagaaaaua

SEQ ID NO: 261555 - RNA, 24 nt, Human
uguagacaaguauggcuccuccau

SEQ ID NO: 261556 - RNA, 19 nt, Human
uguagacacaggccucugc

SEQ ID NO: 261557 - RNA, 20 nt, Human
uguagacacccagcucucca

SEQ ID NO: 261558 - RNA, 21 nt, Human
uguagacacccgccgcccucu

SEQ ID NO: 261559 - RNA, 21 nt, Human
uguagacaccuucaccuccau

SEQ ID NO: 261560 - RNA, 32 nt, Human
uguagacacuccugcucucuuccauccccauc

SEQ ID NO: 261561 - RNA, 22 nt, Human
uguagacagagccaggccucac

SEQ ID NO: 261562 - RNA, 32 nt, Human
uguagacagagcggcggggaucccagaggggu

SEQ ID NO: 261563 - RNA, 32 nt, Human
uguagacagcuuuucagaguggcaguaucaua

SEQ ID NO: 261564 - RNA, 20 nt, Human
uguagacagggcuccuugca

SEQ ID NO: 261565 - RNA, 32 nt, Human
uguagacauaugcaugcauguauauguaaaau

SEQ ID NO: 261566 - RNA, 20 nt, Human
uguagacaucuguccuacac

SEQ ID NO: 261567 - RNA, 19 nt, Human
uguagacauguguccccac

SEQ ID NO: 261568 - RNA, 19 nt, Human
uguagacauuguauuccac

SEQ ID NO: 261569 - RNA, 18 nt, Human
uguagaccagagcccucc

SEQ ID NO: 261570 - RNA, 32 nt, Human
uguagacccagccucuaucuccugagccuaua

SEQ ID NO: 261571 - RNA, 32 nt, Human
uguagaccuaguuucacacacaucugugcaag

SEQ ID NO: 261572 - RNA, 32 nt, Human
uguagaccuggaauuuguuuucgucuguucag

SEQ ID NO: 261573 - RNA, 21 nt, Human
uguagacgaacuguuucucua

SEQ ID NO: 261574 - RNA, 32 nt, Human
uguagacggagcccuggcaugucaacagcguu

SEQ ID NO: 261575 - RNA, 32 nt, Human
uguagacggauucuguagaaggauguggcuuu

SEQ ID NO: 261576 - RNA, 21 nt, Human
uguagacuagcagcuuuuuau

SEQ ID NO: 261577 - RNA, 21 nt, Human
uguagacuaguguucuuccau

SEQ ID NO: 261578 - RNA, 32 nt, Human
uguagacucagggucccuguggaggugcugaa

SEQ ID NO: 261579 - RNA, 32 nt, Human
uguagacucccaggagagacuuguagguacaa

SEQ ID NO: 261580 - RNA, 32 nt, Human
uguagacuccugggugcuggaggaguagagac

SEQ ID NO: 261581 - RNA, 32 nt, Human
uguagacuugcagccaaugaccagaagccagg

SEQ ID NO: 261582 - RNA, 32 nt, Human
uguagagaaaaauggugaagaaaacaaagaug

SEQ ID NO: 261583 - RNA, 32 nt, Human
uguagagaagucagagagacuagaugcuuuca

SEQ ID NO: 261584 - RNA, 20 nt, Human
uguagagaaugucccuucac

SEQ ID NO: 261585 - RNA, 32 nt, Human
uguagagacaagggucuuaccauguugcccag

SEQ ID NO: 261586 - RNA, 32 nt, Human
uguagagacaggagucuugccauguugcccag

SEQ ID NO: 261587 - RNA, 32 nt, Human
uguagagacaguguugagaggaaaggggaggu

SEQ ID NO: 261588 - RNA, 32 nt, Human
uguagagacauaaaggagggugaugugauuuu

SEQ ID NO: 261589 - RNA, 32 nt, Human
uguagagacgggguugggggaggcggggguua

SEQ ID NO: 261590 - RNA, 32 nt, Human
uguagagacuagccagcucccgacggaagggg

SEQ ID NO: 261591 - RNA, 22 nt, Human
uguagagagcagcugcuucugc

SEQ ID NO: 261592 - RNA, 32 nt, Human
uguagagagcccgaggggaaguugcugcagag

SEQ ID NO: 261593 - RNA, 32 nt, Human
uguagagagugcacaggacacagaacaaggug

SEQ ID NO: 261594 - RNA, 32 nt, Human
uguagagaugagggucuugccauguuguccag

SEQ ID NO: 261595 - RNA, 32 nt, Human
uguagagauggggucucacuguuguucaaacu

SEQ ID NO: 261596 - RNA, 32 nt, Human
uguagagcaagcacguuuuccaccucacuguc

SEQ ID NO: 261597 - RNA, 32 nt, Human
uguagagcacaagccucuccacccuagagaaa

SEQ ID NO: 261598 - RNA, 32 nt, Human
uguagagcauucccugcgauguggaaaauucu

SEQ ID NO: 261599 - RNA, 32 nt, Human
uguagagccuuuccuauuucccuuccugcugu

SEQ ID NO: 261600 - RNA, 32 nt, Human
uguagagcugcuuguguucccuuuugauucuu

SEQ ID NO: 261601 - RNA, 32 nt, Human
uguagaggacaauuaucaagcuggagcuguca

SEQ ID NO: 261602 - RNA, 32 nt, Human
uguagaggcagaggucucucacuguguugccc

SEQ ID NO: 261603 - RNA, 32 nt, Human
uguagaggcucacaccuguaaucccaguacuu

SEQ ID NO: 261604 - RNA, 32 nt, Human
uguagaggcugcaggugcacacgugggcucca

SEQ ID NO: 261605 - RNA, 32 nt, Human
uguagaggcugcccagaggggccagguggcac

SEQ ID NO: 261606 - RNA, 32 nt, Human
uguagaggcuuccugaacugggagcaggguag

SEQ ID NO: 261607 - RNA, 19 nt, Human
uguagaggcuuuuuuccac

SEQ ID NO: 261608 - RNA, 24 nt, Human
uguagagggaaauuuauagcacua

SEQ ID NO: 261609 - RNA, 32 nt, Human
uguagagggaagcugucccagagauguuugga

SEQ ID NO: 261610 - RNA, 32 nt, Human
uguagagggacugaaaauauuuauuuuguuau

SEQ ID NO: 261611 - RNA, 32 nt, Human
uguagagggagagagaagagcaagggacgugg

SEQ ID NO: 261612 - RNA, 23 nt, Human
uguagagggaggagcgaugggga

SEQ ID NO: 261613 - RNA, 32 nt, Human
uguagaguaacacauaacauuguaugcaugga

SEQ ID NO: 261614 - RNA, 32 nt, Human
uguagaguaauauguaaccagacuggagaacc

SEQ ID NO: 261615 - RNA, 20 nt, Human
uguagaguucugcuuuccac

SEQ ID NO: 261616 - RNA, 21 nt, Human
uguagauaaggacugugccau

SEQ ID NO: 261617 - RNA, 20 nt, Human
uguagauaaggcuauaccgc

SEQ ID NO: 261618 - RNA, 21 nt, Human
uguagauaaggcuucagccau

SEQ ID NO: 261619 - RNA, 22 nt, Human
uguagauaccuugucucucuau

SEQ ID NO: 261620 - RNA, 20 nt, Human
uguagauagagauucucuac

SEQ ID NO: 261621 - RNA, 21 nt, Human
uguagauagccggcgccuucc

SEQ ID NO: 261622 - RNA, 32 nt, Human
uguagauauaaauuacaguuuucauuccuuau

SEQ ID NO: 261623 - RNA, 32 nt, Human
uguagauaucuuaaagguguaaaguuugcaaa

SEQ ID NO: 261624 - RNA, 18 nt, Human
uguagauauugaacuccu

SEQ ID NO: 261625 - RNA, 32 nt, Human
uguagauccuaccuggagggaauggcuuuagg

SEQ ID NO: 261626 - RNA, 25 nt, Human
uguagaucugucagaugcccuucau

SEQ ID NO: 261627 - RNA, 20 nt, Human
uguagaugagcugacuccau

SEQ ID NO: 261628 - RNA, 21 nt, Human
uguagaugaguugcccuccac

SEQ ID NO: 261629 - RNA, 32 nt, Human
uguagaugccaaaagacuaacaauaaccuccu

SEQ ID NO: 261630 - RNA, 20 nt, Human
uguagaugccugaccuccac

SEQ ID NO: 261631 - RNA, 32 nt, Human
uguagauggaguuucacuuuuguugcccaggc

SEQ ID NO: 261632 - RNA, 23 nt, Human
uguagauggccaccucccuccac

SEQ ID NO: 261633 - RNA, 32 nt, Human
uguagauugauucauucuucuucuagcauucu

SEQ ID NO: 261634 - RNA, 32 nt, Human
uguagauugcagagggcaacugguguguuuau

SEQ ID NO: 261635 - RNA, 19 nt, Human
uguagauugcuuccuucau

SEQ ID NO: 261636 - RNA, 25 nt, Human
uguagcaaaacgcauggagugugua

SEQ ID NO: 261637 - RNA, 24 nt, Human
uguagcaaaguuuuauauguggua

SEQ ID NO: 261638 - RNA, 32 nt, Human
uguagcaaaugacugaauacaugugaacaaac

SEQ ID NO: 261639 - RNA, 32 nt, Human
uguagcaaauuucgagcauaagaaauaaaauc

SEQ ID NO: 261640 - RNA, 32 nt, Human
uguagcaaguaaacaguggagcccaggucccc

SEQ ID NO: 261641 - RNA, 27 nt, Human
uguagcaauaaauauauucuaacauca

SEQ ID NO: 261642 - RNA, 25 nt, Human
uguagcaaucuuuuuucuguucacg

SEQ ID NO: 261643 - RNA, 32 nt, Human
uguagcacaccagcauggcacauguauacaua

SEQ ID NO: 261644 - RNA, 32 nt, Human
uguagcacccugguuccccugccuguagguga

SEQ ID NO: 261645 - RNA, 20 nt, Human
uguagcacuuucuugcaguu

SEQ ID NO: 261646 - RNA, 32 nt, Human
uguagcagaaaggcacguccacucacaaggga

SEQ ID NO: 261647 - RNA, 32 nt, Human
uguagcagacaagaucuagaucccagacagaa

SEQ ID NO: 261648 - RNA, 32 nt, Human
uguagcagacacugcaacagaugccuccuaga

SEQ ID NO: 261649 - RNA, 32 nt, Human
uguagcagcagcgggagccaggacuaaggaca

SEQ ID NO: 261650 - RNA, 32 nt, Human
uguagcagccgccuccccugugccccagccuc

SEQ ID NO: 261651 - RNA, 32 nt, Human
uguagcagccuccuggacuuccugaggacucg

SEQ ID NO: 261652 - RNA, 32 nt, Human
uguagcagcuugagaagaggcuugggagugca

SEQ ID NO: 261653 - RNA, 32 nt, Human
uguagcaggagagauagauucagugacuucau

SEQ ID NO: 261654 - RNA, 32 nt, Human
uguagcaggaguacauuuuauacuaguuuggc

SEQ ID NO: 261655 - RNA, 22 nt, Human
uguagcaggcugagcgcagugg

SEQ ID NO: 261656 - RNA, 32 nt, Human
uguagcaggucccgcacuccagccucucgcug

SEQ ID NO: 261657 - RNA, 32 nt, Human
uguagcaguaagacaucuaaaaucaagacaau

SEQ ID NO: 261658 - RNA, 32 nt, Human
uguagcaguacugagaggcagggcccuuaaga

SEQ ID NO: 261659 - RNA, 32 nt, Human
uguagcaguguacccacgcuggguauuaccau

SEQ ID NO: 261660 - RNA, 32 nt, Human
uguagcaucuaucuacccaucuaucuaucauc

SEQ ID NO: 261661 - RNA, 20 nt, Human
uguagcaucugcuccuccac

SEQ ID NO: 261662 - RNA, 32 nt, Human
uguagcauggauuauucuucucauguuaaacc

SEQ ID NO: 261663 - RNA, 32 nt, Human
uguagcauuucuuauccccugagagcugauga

SEQ ID NO: 261664 - RNA, 32 nt, Human
uguagccacuucaguccaucugcccuccagag

SEQ ID NO: 261665 - RNA, 32 nt, Human
uguagccagagaggaggaaggagggaaacuga

SEQ ID NO: 261666 - RNA, 32 nt, Human
uguagccaggccuugcacuacugccauagcca

SEQ ID NO: 261667 - RNA, 32 nt, Human
uguagccaggggacccuagaaguggggugggg

SEQ ID NO: 261668 - RNA, 32 nt, Human
uguagccauuccacaggugagaugucuagagu

SEQ ID NO: 261669 - RNA, 32 nt, Human
uguagcccaagaggaagaggucacuggggcua

SEQ ID NO: 261670 - RNA, 24 nt, Human
uguagcccaggccagagugcagug

SEQ ID NO: 261671 - RNA, 24 nt, Human
uguagcccaggcuggagugcaaug

SEQ ID NO: 261672 - RNA, 32 nt, Human
uguagcccaggcugggaugcaauggcaugguc

SEQ ID NO: 261673 - RNA, 32 nt, Human
uguagcccagucucaggcuuuccucuuccuga

SEQ ID NO: 261674 - RNA, 24 nt, Human
uguagcccagucuggagugcagug

SEQ ID NO: 261675 - RNA, 32 nt, Human
uguagcccagugcggcuccacagcauggaauc

SEQ ID NO: 261676 - RNA, 32 nt, Human
uguagcccauggccagucugucacuguguccu

SEQ ID NO: 261677 - RNA, 21 nt, Human
uguagcccccaucagacccug

SEQ ID NO: 261678 - RNA, 32 nt, Human
uguagcccugcucccucccuggaggcugcucu

SEQ ID NO: 261679 - RNA, 32 nt, Human
uguagcccuggcccagccgccuuccugggaga

SEQ ID NO: 261680 - RNA, 30 nt, Human
uguagccuacacuccaugcuuccuucauau

SEQ ID NO: 261681 - RNA, 32 nt, Human
uguagccucagcugccgcaacagauucagccu

SEQ ID NO: 261682 - RNA, 32 nt, Human
uguagccuccacuggccccaucacugccaacu

SEQ ID NO: 261683 - RNA, 32 nt, Human
uguagccuccacuucugcccuaaguuccccag

SEQ ID NO: 261684 - RNA, 32 nt, Human
uguagccuccaggcacuucugcucucuggcag

SEQ ID NO: 261685 - RNA, 32 nt, Human
uguagccucccacauuuuccccaaaguacagg

SEQ ID NO: 261686 - RNA, 32 nt, Human
uguagccucucugagcguucgcacugucaugc

SEQ ID NO: 261687 - RNA, 32 nt, Human
uguagccugaagccuuggaggaagaaacagga

SEQ ID NO: 261688 - RNA, 32 nt, Human
uguagccugggcaacagagcaagacccugucu

SEQ ID NO: 261689 - RNA, 32 nt, Human
uguagccugggugacaaagugagacccugucu

SEQ ID NO: 261690 - RNA, 32 nt, Human
uguagccugggugacagugugagauucugucu

SEQ ID NO: 261691 - RNA, 32 nt, Human
uguagcgccauggagaagagcaacgagaccaa

SEQ ID NO: 261692 - RNA, 32 nt, Human
uguagcgcccgcucgccgccucccggacucuc

SEQ ID NO: 261693 - RNA, 21 nt, Human
uguagcggcccccaaaccuug

SEQ ID NO: 261694 - RNA, 32 nt, Human
uguagcgggcuccggaucccagccucuccccu

SEQ ID NO: 261695 - RNA, 32 nt, Human
uguagcgucauccccuuggugcuguccuggca

SEQ ID NO: 261696 - RNA, 32 nt, Human
uguagcuacacaaaaguuaccuuaagcucaaa

SEQ ID NO: 261697 - RNA, 32 nt, Human
uguagcuagauaugaugacauuuucucuagaa

SEQ ID NO: 261698 - RNA, 32 nt, Human
uguagcuaucccgggaagacguggaaggccga

SEQ ID NO: 261699 - RNA, 32 nt, Human
uguagcucacugcagucuucagccuccccagu

SEQ ID NO: 261700 - RNA, 32 nt, Human
uguagcucaggagccucguucucaggccggac

SEQ ID NO: 261701 - RNA, 32 nt, Human
uguagcucauacaauuaggacaccuuaggaau

SEQ ID NO: 261702 - RNA, 32 nt, Human
uguagcucccacaauuccccugugucauggga

SEQ ID NO: 261703 - RNA, 21 nt, Human
uguagcuccugccggaggcau

SEQ ID NO: 261704 - RNA, 32 nt, Human
uguagcuccugccucuguagcagaggugacag

SEQ ID NO: 261705 - RNA, 32 nt, Human
uguagcugauauagugaugggcaaacaggaau

SEQ ID NO: 261706 - RNA, 32 nt, Human
uguagcugaucccaggagguggcggcugcgcc

SEQ ID NO: 261707 - RNA, 32 nt, Human
uguagcugcagggggaggggacuucauucaug

SEQ ID NO: 261708 - RNA, 32 nt, Human
uguagcugccgugguugccaggagagcugcgc

SEQ ID NO: 261709 - RNA, 32 nt, Human
uguagcugcucugaucaguuacagauuggcga

SEQ ID NO: 261710 - RNA, 32 nt, Human
uguagcugcucuguuuagacagcggacagacg

SEQ ID NO: 261711 - RNA, 32 nt, Human
uguagcugcuucguuccgccuccgucuuagca

SEQ ID NO: 261712 - RNA, 32 nt, Human
uguagcuggcagcagcgggcaggugaggaccc

SEQ ID NO: 261713 - RNA, 32 nt, Human
uguagcugggauuacagcugccugccaaauuu

SEQ ID NO: 261714 - RNA, 32 nt, Human
uguagcugggauuacaggcgcgcaccaacaca

SEQ ID NO: 261715 - RNA, 32 nt, Human
uguagcugucuugaugccucucugucacccac

SEQ ID NO: 261716 - RNA, 32 nt, Human
uguagcuguggggcccguuccuaggucuguac

SEQ ID NO: 261717 - RNA, 32 nt, Human
uguagcuuccaccucauggauugccacagcuc

SEQ ID NO: 261718 - RNA, 32 nt, Human
uguagcuuugucccuugccaucaugcccaaca

SEQ ID NO: 261719 - RNA, 32 nt, Human
uguaggaaaaacaggcaugacagaccagggug

SEQ ID NO: 261720 - RNA, 21 nt, Human
uguaggaaaagcuguucccau

SEQ ID NO: 261721 - RNA, 19 nt, Human
uguaggaaagaagcuaaag

SEQ ID NO: 261722 - RNA, 19 nt, Human
uguaggaaccgaucugcua

SEQ ID NO: 261723 - RNA, 32 nt, Human
uguaggaagcagugucauuacauucaagcuuc

SEQ ID NO: 261724 - RNA, 32 nt, Human
uguaggaaguguccuguauuuuacuaauuuuu

SEQ ID NO: 261725 - RNA, 32 nt, Human
uguaggaauccugguuguggggaccaagucug

SEQ ID NO: 261726 - RNA, 32 nt, Human
uguaggaaucuagacgccacgagcucuuggcu

SEQ ID NO: 261727 - RNA, 32 nt, Human
uguaggaaugaccacgggccucaguuucccca

SEQ ID NO: 261728 - RNA, 19 nt, Human
uguaggacaauuucuccac

SEQ ID NO: 261729 - RNA, 32 nt, Human
uguaggacuggugcuaaccaccugccaucaug

SEQ ID NO: 261730 - RNA, 32 nt, Human
uguaggagacuugccagagccgggcacauuga

SEQ ID NO: 261731 - RNA, 32 nt, Human
uguaggagaugguucucgccaugcugggggcu

SEQ ID NO: 261732 - RNA, 32 nt, Human
uguaggagauuagugaggcaaggugcugcuca

SEQ ID NO: 261733 - RNA, 32 nt, Human
uguaggagccugggcaauagggucagagggac

SEQ ID NO: 261734 - RNA, 32 nt, Human
uguaggagcuaaagcaggucuccagggagaga

SEQ ID NO: 261735 - RNA, 32 nt, Human
uguaggagcuccucucacaaguaguuguaaug

SEQ ID NO: 261736 - RNA, 32 nt, Human
uguaggaggccagggaggggaacucagcaguu

SEQ ID NO: 261737 - RNA, 32 nt, Human
uguaggagugccuguugccaguguggggugag

SEQ ID NO: 261738 - RNA, 25 nt, Human
uguaggcaaagguggaaguccucca

SEQ ID NO: 261739 - RNA, 28 nt, Human
uguaggcaacagagugagacccugucuc

SEQ ID NO: 261740 - RNA, 20 nt, Human
uguaggcacaugccuucugc

SEQ ID NO: 261741 - RNA, 32 nt, Human
uguaggcacugcagggagaguguggaggucug

SEQ ID NO: 261742 - RNA, 32 nt, Human
uguaggcagaacauacucuccuaagugguugu

SEQ ID NO: 261743 - RNA, 32 nt, Human
uguaggcagcagagaagcauggaggaaaacag

SEQ ID NO: 261744 - RNA, 32 nt, Human
uguaggcagcagagagagaggacagaggggua

SEQ ID NO: 261745 - RNA, 21 nt, Human
uguaggcagggagcccucugc

SEQ ID NO: 261746 - RNA, 23 nt, Human
uguaggcagggucuccccuuuau

SEQ ID NO: 261747 - RNA, 22 nt, Human
uguaggcagguuaauccuccac

SEQ ID NO: 261748 - RNA, 19 nt, Human
uguaggcaguggccccuau

SEQ ID NO: 261749 - RNA, 32 nt, Human
uguaggcagugugggaaaaccuucaaugguca

SEQ ID NO: 261750 - RNA, 32 nt, Human
uguaggcaguuuagugcaucuuugccucucag

SEQ ID NO: 261751 - RNA, 32 nt, Human
uguaggcauauguuucagaaauauuacaagau

SEQ ID NO: 261752 - RNA, 32 nt, Human
uguaggcauguaccaccaugcccagcuaauuu

SEQ ID NO: 261753 - RNA, 24 nt, Human
uguaggccucugacuccccuccac

SEQ ID NO: 261754 - RNA, 22 nt, Human
uguaggccuggagaaaguaaug

SEQ ID NO: 261755 - RNA, 32 nt, Human
uguaggcgguggcagaggguggugagggaggg

SEQ ID NO: 261756 - RNA, 32 nt, Human
uguaggcuacccgagggcagagacugagucug

SEQ ID NO: 261757 - RNA, 32 nt, Human
uguaggcuaugguacuucuuccucauuguuuu

SEQ ID NO: 261758 - RNA, 26 nt, Human
uguaggcuauuaaggguucccuccac

SEQ ID NO: 261759 - RNA, 32 nt, Human
uguaggcucacaccuuaaucucaggccccuau

SEQ ID NO: 261760 - RNA, 32 nt, Human
uguaggcuccaaugcugcuuucccaggagggu

SEQ ID NO: 261761 - RNA, 32 nt, Human
uguaggcuccaccuuaacugugcucagauaca

SEQ ID NO: 261762 - RNA, 32 nt, Human
uguaggcucucugcaaccugggccucccgggu

SEQ ID NO: 261763 - RNA, 32 nt, Human
uguaggcugcauucaggagacagaaggugucu

SEQ ID NO: 261764 - RNA, 32 nt, Human
uguaggcuggguugccagaaaagaugguggcc

SEQ ID NO: 261765 - RNA, 32 nt, Human
uguaggcuuucauguugcaaagaacuccagag

SEQ ID NO: 261766 - RNA, 32 nt, Human
uguagggaccaggcagguaacauagacgagug

SEQ ID NO: 261767 - RNA, 32 nt, Human
uguagggagaggaggccccggcagaggucuuc

SEQ ID NO: 261768 - RNA, 32 nt, Human
uguagggagagggaagggagggaaacaguuuu

SEQ ID NO: 261769 - RNA, 32 nt, Human
uguagggagcugaaauuccuccaccaaguugg

SEQ ID NO: 261770 - RNA, 32 nt, Human
uguagggaggaccagggcagggccagggggug

SEQ ID NO: 261771 - RNA, 32 nt, Human
uguagggaggggccgagcaggaggaggaggaa

SEQ ID NO: 261772 - RNA, 32 nt, Human
uguagggauaucagcguuucucugugugcuug

SEQ ID NO: 261773 - RNA, 32 nt, Human
uguagggcaagaggaugaaggaaggggcuauc

SEQ ID NO: 261774 - RNA, 32 nt, Human
uguagggccaugggccucagggccagaggugg

SEQ ID NO: 261775 - RNA, 32 nt, Human
uguagggcuggaccuauguccuaaggacacac

SEQ ID NO: 261776 - RNA, 32 nt, Human
uguagggcuggccagucaggcccagccaaagc

SEQ ID NO: 261777 - RNA, 32 nt, Human
uguaggggagccaaggccaguaguuugggggu

SEQ ID NO: 261778 - RNA, 32 nt, Human
uguaggggagggaggaaggagggccaggguag

SEQ ID NO: 261779 - RNA, 32 nt, Human
uguaggggugugggacagggagagacucacuu

SEQ ID NO: 261780 - RNA, 32 nt, Human
uguaggguaagaggaaaaacaaguaaaaccuu

SEQ ID NO: 261781 - RNA, 32 nt, Human
uguagggucuccugccuagcugccuagcaagc

SEQ ID NO: 261782 - RNA, 32 nt, Human
uguagggugacggaaaguaggaagugaauuug

SEQ ID NO: 261783 - RNA, 32 nt, Human
uguagggugcuggcugaauagacucuguccag

SEQ ID NO: 261784 - RNA, 32 nt, Human
uguagggugugacauuuuacccuaggguauaa

SEQ ID NO: 261785 - RNA, 32 nt, Human
uguaggguuucagagagguuggcaguggggca

SEQ ID NO: 261786 - RNA, 32 nt, Human
uguagguaaagaaauaggguguggucacucuc

SEQ ID NO: 261787 - RNA, 32 nt, Human
uguagguacacucuuuccuccucuucacuuaa

SEQ ID NO: 261788 - RNA, 32 nt, Human
uguagguagaagcagcagacggugagggaggc

SEQ ID NO: 261789 - RNA, 32 nt, Human
uguagguaggaaguaugugcaggugggaguca

SEQ ID NO: 261790 - RNA, 32 nt, Human
uguaggucacgggaaugucaagagcacccagg

SEQ ID NO: 261791 - RNA, 21 nt, Human
uguagguccugaggccaggga

SEQ ID NO: 261792 - RNA, 21 nt, Human
uguagguccuuggcuggucgg

SEQ ID NO: 261793 - RNA, 32 nt, Human
uguagguccuuucuuaguaguaaagaaucuuc

SEQ ID NO: 261794 - RNA, 32 nt, Human
uguaggucggaggaauggaggcuuacuaacca

SEQ ID NO: 261795 - RNA, 32 nt, Human
uguaggugagaggcggcugaagaguugcugua

SEQ ID NO: 261796 - RNA, 32 nt, Human
uguagguggacaggugacuggguggauguugu

SEQ ID NO: 261797 - RNA, 32 nt, Human
uguagguggaguuugugauugcagugaauaga

SEQ ID NO: 261798 - RNA, 32 nt, Human
uguagguggccaagccagucccuacucuuggg

SEQ ID NO: 261799 - RNA, 31 nt, Human
uguaggugggugggugaguguguccccuccc

SEQ ID NO: 261800 - RNA, 32 nt, Human
uguaggugugagccauggugcccggccgccac

SEQ ID NO: 261801 - RNA, 32 nt, Human
uguaggugugugugcaugcauacauaugccug

SEQ ID NO: 261802 - RNA, 32 nt, Human
uguagguuaucuccuaggcuugaguucaacau

SEQ ID NO: 261803 - RNA, 32 nt, Human
uguagguugcuuuuucuuccuccugggcaacu

SEQ ID NO: 261804 - RNA, 32 nt, Human
uguagguuucccccaucuguauuccaauugua

SEQ ID NO: 261805 - RNA, 32 nt, Human
uguaguaaguuuccuuuuccuuugguucuuuc

SEQ ID NO: 261806 - RNA, 32 nt, Human
uguaguaauaggcagggggcccugccacccca

SEQ ID NO: 261807 - RNA, 32 nt, Human
uguaguacauucuccaagaugcagcccaggag

SEQ ID NO: 261808 - RNA, 21 nt, Human
uguaguaccagcuacucugga

SEQ ID NO: 261809 - RNA, 24 nt, Human
uguaguaccuuuacuuguaucaca

SEQ ID NO: 261810 - RNA, 32 nt, Human
uguaguacuagaucuguaucucuugucugaau

SEQ ID NO: 261811 - RNA, 32 nt, Human
uguaguacuuguuuguaaagcacuuugagauc

SEQ ID NO: 261812 - RNA, 32 nt, Human
uguaguagcugcacuaggugauucuuggagcg

SEQ ID NO: 261813 - RNA, 31 nt, Human
uguaguaggauuuggccucagaucuuugacu

SEQ ID NO: 261814 - RNA, 32 nt, Human
uguaguaguugcuuuucuuccucucucauuug

SEQ ID NO: 261815 - RNA, 32 nt, Human
uguaguaguuuuuccaguuaacacuucauuau

SEQ ID NO: 261816 - RNA, 32 nt, Human
uguaguaucaaacuaccacagaugcuagaguu

SEQ ID NO: 261817 - RNA, 32 nt, Human
uguaguaucaaaggaggcucuagguuuugucu

SEQ ID NO: 261818 - RNA, 32 nt, Human
uguaguaucaucaugaagauucagagaauuua

SEQ ID NO: 261819 - RNA, 21 nt, Human
uguaguaugcugcagcuuuaa

SEQ ID NO: 261820 - RNA, 27 nt, Human
uguaguauuguucuauuuuuguuuaca

SEQ ID NO: 261821 - RNA, 32 nt, Human
uguaguauuuuaaaaugaguuaaaauagauuu

SEQ ID NO: 261822 - RNA, 32 nt, Human
uguagucaagggccugggcacaggagggagag

SEQ ID NO: 261823 - RNA, 32 nt, Human
uguagucacaccacuucaguucugggcccuac

SEQ ID NO: 261824 - RNA, 32 nt, Human
uguagucacagugugcuagagcagaguguugg

SEQ ID NO: 261825 - RNA, 32 nt, Human
uguagucacuucagagagcuggagcggcugcc

SEQ ID NO: 261826 - RNA, 32 nt, Human
uguagucauaauaauagcaagcacucaauaua

SEQ ID NO: 261827 - RNA, 32 nt, Human
uguaguccacuggucuucuauuugggaaacaa

SEQ ID NO: 261828 - RNA, 32 nt, Human
uguaguccagccugagugacagagugagaccc

SEQ ID NO: 261829 - RNA, 22 nt, Human
uguaguccagguugcccgccac

SEQ ID NO: 261830 - RNA, 32 nt, Human
uguagucccagcuacucagggcugaggcagga

SEQ ID NO: 261831 - RNA, 32 nt, Human
uguagucccagcuacucccuccagaggcugag

SEQ ID NO: 261832 - RNA, 20 nt, Human
uguagucccagcuacucggg

SEQ ID NO: 261833 - RNA, 21 nt, Human
uguagucccagcuacucugaa

SEQ ID NO: 261834 - RNA, 32 nt, Human
uguagucccaggcccacuggaaaaaugaaucu

SEQ ID NO: 261835 - RNA, 32 nt, Human
uguaguccgagguacucaggaggcagagacgu

SEQ ID NO: 261836 - RNA, 32 nt, Human
uguaguccuacuucuuccaacuuuccauuccc

SEQ ID NO: 261837 - RNA, 32 nt, Human
uguagucgaagcuacucaggaggcugaggcag

SEQ ID NO: 261838 - RNA, 32 nt, Human
uguagucuccaccacucccuuuugucuuucac

SEQ ID NO: 261839 - RNA, 32 nt, Human
uguagucuguugcugcugaaagaugucugugu

SEQ ID NO: 261840 - RNA, 32 nt, Human
uguagugaggcugacaguugcagaccauagag

SEQ ID NO: 261841 - RNA, 32 nt, Human
uguagugauaacuaguguugcuuuuguuuuag

SEQ ID NO: 261842 - RNA, 32 nt, Human
uguagugcaguggcacgaucuuggcucacugc

SEQ ID NO: 261843 - RNA, 32 nt, Human
uguagugcaguggcauaaucucagcucacugc

SEQ ID NO: 261844 - RNA, 32 nt, Human
uguagugccaaccacucaggaggcugagaugg

SEQ ID NO: 261845 - RNA, 32 nt, Human
uguagugccagcuacucaggaggccgaggcag

SEQ ID NO: 261846 - RNA, 32 nt, Human
uguagugccagcuacucaggaggcugaggcag

SEQ ID NO: 261847 - RNA, 32 nt, Human
uguagugccaggauucaggaaaauggcucccu

SEQ ID NO: 261848 - RNA, 32 nt, Human
uguagugccggcuacucaggaggcugaggcac

SEQ ID NO: 261849 - RNA, 32 nt, Human
uguagugccucaugccuguaauuccagcacuu

SEQ ID NO: 261850 - RNA, 21 nt, Human
uguagugcuagcuacucagaa

SEQ ID NO: 261851 - RNA, 32 nt, Human
uguagugcugagagcaagagcugaucuagcua

SEQ ID NO: 261852 - RNA, 27 nt, Human
uguagugcuguguguauggaguuagug

SEQ ID NO: 261853 - RNA, 23 nt, Human
uguaguggcaagcagccuuuuac

SEQ ID NO: 261854 - RNA, 31 nt, Human
uguaguggcacaaucucagcucacugcaacc

SEQ ID NO: 261855 - RNA, 31 nt, Human
uguaguggcacaaucucggcucacugcaacc

SEQ ID NO: 261856 - RNA, 32 nt, Human
uguaguggcacauggcuauaaucccagguacu

SEQ ID NO: 261857 - RNA, 32 nt, Human
uguaguggcagacgucuguaaucccagcuauu

SEQ ID NO: 261858 - RNA, 32 nt, Human
uguaguggcaggcaccuguaaucccagcuacu

SEQ ID NO: 261859 - RNA, 32 nt, Human
uguaguggcgggcgccuauaaucccagcuacu

SEQ ID NO: 261860 - RNA, 32 nt, Human
uguaguggcuaugcaguguggaaagugagaaa

SEQ ID NO: 261861 - RNA, 32 nt, Human
uguaguggcucacaccuguaaucccagcacuu

SEQ ID NO: 261862 - RNA, 32 nt, Human
uguaguggcucacaccuguaaucucagcacuu

SEQ ID NO: 261863 - RNA, 32 nt, Human
uguaguggcucacgccaguaaucccagcacuu

SEQ ID NO: 261864 - RNA, 32 nt, Human
uguaguggcucacgccuguaaucccagcacuu

SEQ ID NO: 261865 - RNA, 32 nt, Human
uguaguggcucacgccuguaaucccagcauuu

SEQ ID NO: 261866 - RNA, 32 nt, Human
uguaguggcucaugacuguaaucccaguacuu

SEQ ID NO: 261867 - RNA, 32 nt, Human
uguaguggcucaugccuguaaucccaacacuu

SEQ ID NO: 261868 - RNA, 32 nt, Human
uguaguggcucaugccuguaaucccagcacuu

SEQ ID NO: 261869 - RNA, 32 nt, Human
uguaguggcucaugccuguaauccgagcacuu

SEQ ID NO: 261870 - RNA, 32 nt, Human
uguaguggcucaugccuguaauccuagcacuu

SEQ ID NO: 261871 - RNA, 32 nt, Human
uguaguggcucaugcuuguaaucccaguacuu

SEQ ID NO: 261872 - RNA, 32 nt, Human
uguaguggcuuacaccuguagucccaggcacu

SEQ ID NO: 261873 - RNA, 32 nt, Human
uguaguggcuuaugccuguaaucccagcacuu

SEQ ID NO: 261874 - RNA, 21 nt, Human
uguagugggaggcccagcgga

SEQ ID NO: 261875 - RNA, 21 nt, Human
uguagugguaaguugcccucc

SEQ ID NO: 261876 - RNA, 32 nt, Human
uguagugguaaguugcccucccucuccuggcc

SEQ ID NO: 261877 - RNA, 32 nt, Human
uguaguggugcacaccuguaaucccagcuacu

SEQ ID NO: 261878 - RNA, 31 nt, Human
uguaguggugcgaucucagcucacugcaacc

SEQ ID NO: 261879 - RNA, 32 nt, Human
uguaguggugggcaccuguaguccuagcuacu

SEQ ID NO: 261880 - RNA, 32 nt, Human
uguaguggugugcaccuguagucccagcucuu

SEQ ID NO: 261881 - RNA, 32 nt, Human
uguaguggugugcaucuguaaucccagcuacu

SEQ ID NO: 261882 - RNA, 32 nt, Human
uguagugugguuggccaguaggugaguauccc

SEQ ID NO: 261883 - RNA, 32 nt, Human
uguaguguugugggguccucccauggaucauc

SEQ ID NO: 261884 - RNA, 32 nt, Human
uguaguuagaaaacaauugcuucuuuacacau

SEQ ID NO: 261885 - RNA, 32 nt, Human
uguaguuauuugggaguuucauaaccuguuau

SEQ ID NO: 261886 - RNA, 32 nt, Human
uguaguucaugguuuuucccuaccugcccggu

SEQ ID NO: 261887 - RNA, 32 nt, Human
uguaguuccuucccuuguggcaugucauaaga

SEQ ID NO: 261888 - RNA, 32 nt, Human
uguaguucugacagacauuacuggaagguaga

SEQ ID NO: 261889 - RNA, 32 nt, Human
uguaguugagaguccucucccuucuucccuaa

SEQ ID NO: 261890 - RNA, 32 nt, Human
uguaguugauuaugcuucaugugaacucuccu

SEQ ID NO: 261891 - RNA, 32 nt, Human
uguaguugcagaaucccaaacuaggcuacauu

SEQ ID NO: 261892 - RNA, 32 nt, Human
uguaguuugcccagaguugggggcuaggggag

SEQ ID NO: 261893 - RNA, 32 nt, Human
uguaguuuggggaagucaaauggccauuuuau

SEQ ID NO: 261894 - RNA, 32 nt, Human
uguaguuuguaaugugaguucaaucaguauuu

SEQ ID NO: 261895 - RNA, 32 nt, Human
uguaguuuugagauggagucuagcucuguccc

SEQ ID NO: 261896 - RNA, 22 nt, Human
uguaguuuuggaacccacugca

SEQ ID NO: 261897 - RNA, 28 nt, Human
uguauaaaaagugcugucucucaguagu

SEQ ID NO: 261898 - RNA, 32 nt, Human
uguauaaaacacaaugagggagugaaauguua

SEQ ID NO: 261899 - RNA, 32 nt, Human
uguauaaaauggaauuuaaaguucacuuauga

SEQ ID NO: 261900 - RNA, 32 nt, Human
uguauaaaccuugccucuuuucccaaauacug

SEQ ID NO: 261901 - RNA, 32 nt, Human
uguauaaagcagcagaacugaaggggaaaaau

SEQ ID NO: 261902 - RNA, 32 nt, Human
uguauaaauacugauauucuccaaaccuagug

SEQ ID NO: 261903 - RNA, 32 nt, Human
uguauaaauucugcccagaucucuccacaaga

SEQ ID NO: 261904 - RNA, 32 nt, Human
uguauaacaaaccugcacauguaucccugaac

SEQ ID NO: 261905 - RNA, 32 nt, Human
uguauaacaaggugaugucuguuucccagggc

SEQ ID NO: 261906 - RNA, 32 nt, Human
uguauaaccaguauuucccaucauguccuguu

SEQ ID NO: 261907 - RNA, 32 nt, Human
uguauaacguaaacacacuugcccucaugccu

SEQ ID NO: 261908 - RNA, 32 nt, Human
uguauaacugcuuccugccuccuuccaaacug

SEQ ID NO: 261909 - RNA, 32 nt, Human
uguauaacuuuaacuucuguuuuaccagcaua

SEQ ID NO: 261910 - RNA, 32 nt, Human
uguauaagcacugcaaucaauaccucacaaag

SEQ ID NO: 261911 - RNA, 32 nt, Human
uguauaagucauacuguguagaauuucuauuu

SEQ ID NO: 261912 - RNA, 32 nt, Human
uguauaauauacauacauacauaagcauauau

SEQ ID NO: 261913 - RNA, 32 nt, Human
uguauaauauacauacauacauaagcaugggu

SEQ ID NO: 261914 - RNA, 32 nt, Human
uguauaaucccacccaccucaccaaaacgaug

SEQ ID NO: 261915 - RNA, 32 nt, Human
uguauaaucucccaaagccaagguuugguaau

SEQ ID NO: 261916 - RNA, 32 nt, Human
uguauaauggugcuggccauguuguuguuuua

SEQ ID NO: 261917 - RNA, 32 nt, Human
uguauacaaauacaguauuuuccaugguucug

SEQ ID NO: 261918 - RNA, 32 nt, Human
uguauacaaucagcuucugagucucuuaacau

SEQ ID NO: 261919 - RNA, 32 nt, Human
uguauacacacagacacacacauguauguuug

SEQ ID NO: 261920 - RNA, 32 nt, Human
uguauacacagcccugcugggccacaucccgg

SEQ ID NO: 261921 - RNA, 32 nt, Human
uguauacacauacauauaauuuuguuuuccuu

SEQ ID NO: 261922 - RNA, 32 nt, Human
uguauacacauauacacauacagucacacauc

SEQ ID NO: 261923 - RNA, 22 nt, Human
uguauacaccuuggacaaguca

SEQ ID NO: 261924 - RNA, 23 nt, Human
uguauacacugaucuuucaaguc

SEQ ID NO: 261925 - RNA, 32 nt, Human
uguauacacuuacauuuugacagggucuucau

SEQ ID NO: 261926 - RNA, 32 nt, Human
uguauacagccccucccccacauacacacaca

SEQ ID NO: 261927 - RNA, 31 nt, Human
uguauacaguuucaucacugcugucagcuau

SEQ ID NO: 261928 - RNA, 32 nt, Human
uguauacauacauacacauacacacaugcaca

SEQ ID NO: 261929 - RNA, 26 nt, Human
uguauacauacauauauguguauaua

SEQ ID NO: 261930 - RNA, 22 nt, Human
uguauacauauacauauauaua

SEQ ID NO: 261931 - RNA, 22 nt, Human
uguauacauauauguguauaua

SEQ ID NO: 261932 - RNA, 32 nt, Human
uguauacauauguaacaaaccugcacauugug

SEQ ID NO: 261933 - RNA, 32 nt, Human
uguauacauauguaacaaaccugcauguugug

SEQ ID NO: 261934 - RNA, 32 nt, Human
uguauacauauguaacuaaccugcacaaugug

SEQ ID NO: 261935 - RNA, 32 nt, Human
uguauacauauguaacuaaccugcacauugug

SEQ ID NO: 261936 - RNA, 24 nt, Human
uguauacauaugugucuguauaua

SEQ ID NO: 261937 - RNA, 32 nt, Human
uguauacaucugaacuccuccugggcucagaa

SEQ ID NO: 261938 - RNA, 32 nt, Human
uguauaccccuggugggagagggagaccuaga

SEQ ID NO: 261939 - RNA, 32 nt, Human
uguauacccuucucuucucuuaucuucugucu

SEQ ID NO: 261940 - RNA, 32 nt, Human
uguauaccuauguaacaaacccgcauguucug

SEQ ID NO: 261941 - RNA, 29 nt, Human
uguauaccuauguaacaaaccugcacauu

SEQ ID NO: 261942 - RNA, 32 nt, Human
uguauaccuauguaacaaaccugcacauugug

SEQ ID NO: 261943 - RNA, 32 nt, Human
uguauaccuauguaacaaaccugcacguucag

SEQ ID NO: 261944 - RNA, 32 nt, Human
uguauaccuauguaacauggugguuacaguaa

SEQ ID NO: 261945 - RNA, 32 nt, Human
uguauaccuguguaacaaaccugcacauucag

SEQ ID NO: 261946 - RNA, 32 nt, Human
uguauaccuguguaacaaaccugcauguucug

SEQ ID NO: 261947 - RNA, 32 nt, Human
uguauacguauguaacuaaccugcacaaugcg

SEQ ID NO: 261948 - RNA, 26 nt, Human
uguauacguauguguguguauauaau

SEQ ID NO: 261949 - RNA, 32 nt, Human
uguauacucaacaaugucauuuugugacuuug

SEQ ID NO: 261950 - RNA, 32 nt, Human
uguauacucagggugcucugggugggguggcc

SEQ ID NO: 261951 - RNA, 32 nt, Human
uguauacuggacucuggccucagugcugacuu

SEQ ID NO: 261952 - RNA, 32 nt, Human
uguauacugucuguugcugccuggugauucau

SEQ ID NO: 261953 - RNA, 32 nt, Human
uguauacuuagcuuacugcccagaugcaacug

SEQ ID NO: 261954 - RNA, 32 nt, Human
uguauacuuguugccaggaaggugaccucaaa

SEQ ID NO: 261955 - RNA, 32 nt, Human
uguauagcagcuuauggaagucucagcugggc

SEQ ID NO: 261956 - RNA, 32 nt, Human
uguauagccccacaugguggaaguaucacggg

SEQ ID NO: 261957 - RNA, 32 nt, Human
uguauagccguguuaaaccauggccucagauu

SEQ ID NO: 261958 - RNA, 32 nt, Human
uguauagccuauacugcauuagcccaagagau

SEQ ID NO: 261959 - RNA, 32 nt, Human
uguauagcuuuagugggcucuaaaguugcccg

SEQ ID NO: 261960 - RNA, 32 nt, Human
uguauaggaaauuuuauguugugcacauuugc

SEQ ID NO: 261961 - RNA, 32 nt, Human
uguauaggaggaauugccuaaggguggcccac

SEQ ID NO: 261962 - RNA, 32 nt, Human
uguauaguccaagcuacucaggaggcugaggc

SEQ ID NO: 261963 - RNA, 32 nt, Human
uguauaguccuccuuagagaggccugcuccag

SEQ ID NO: 261964 - RNA, 32 nt, Human
uguauaguguuuugagggcagaggaugaucuc

SEQ ID NO: 261965 - RNA, 32 nt, Human
uguauaguucucuuccugcuuuaagcauuacc

SEQ ID NO: 261966 - RNA, 20 nt, Human
uguauauaacaucuaauaua

SEQ ID NO: 261967 - RNA, 32 nt, Human
uguauauaaucaggaggaagaggaaggaagga

SEQ ID NO: 261968 - RNA, 20 nt, Human
uguauauacacacguacaua

SEQ ID NO: 261969 - RNA, 32 nt, Human
uguauauacauacuuacuguaacacaucuaaa

SEQ ID NO: 261970 - RNA, 32 nt, Human
uguauauacauauacacauacacauauaugua

SEQ ID NO: 261971 - RNA, 20 nt, Human
uguauauacguauguauaca

SEQ ID NO: 261972 - RNA, 32 nt, Human
uguauauagcuuuucuucuuucuugagaauuc

SEQ ID NO: 261973 - RNA, 22 nt, Human
uguauauauacacauauauaua

SEQ ID NO: 261974 - RNA, 22 nt, Human
uguauauauacacauauaugua

SEQ ID NO: 261975 - RNA, 24 nt, Human
uguauauauauaccaucccauaua

SEQ ID NO: 261976 - RNA, 22 nt, Human
uguauauauauagauauauaua

SEQ ID NO: 261977 - RNA, 22 nt, Human
uguauauauaugcauauauaua

SEQ ID NO: 261978 - RNA, 22 nt, Human
uguauauauauguauguauaua

SEQ ID NO: 261979 - RNA, 24 nt, Human
uguauauaugcauacauguauaua

SEQ ID NO: 261980 - RNA, 22 nt, Human
uguauauauguauuucuauaua

SEQ ID NO: 261981 - RNA, 32 nt, Human
uguauaucagaaucuucagagcacugcgaugu

SEQ ID NO: 261982 - RNA, 32 nt, Human
uguauaucagcacauccuguggguucagcuuc

SEQ ID NO: 261983 - RNA, 32 nt, Human
uguauaucagcucuaaagcagagauguauuau

SEQ ID NO: 261984 - RNA, 22 nt, Human
uguauaucuauauacacaaaua

SEQ ID NO: 261985 - RNA, 32 nt, Human
uguauaugguauaaaccuugagaucaaagacu

SEQ ID NO: 261986 - RNA, 32 nt, Human
uguauauguaaggggaaagagagauugaucug

SEQ ID NO: 261987 - RNA, 32 nt, Human
uguauauguacuugcuuuaucucuuuacccuu

SEQ ID NO: 261988 - RNA, 32 nt, Human
uguauaugugccacacuuucuuuauccagucu

SEQ ID NO: 261989 - RNA, 32 nt, Human
uguauauguguauauaaauauaugugugugua

SEQ ID NO: 261990 - RNA, 32 nt, Human
uguauaugugugugggugcacacaucuguccc

SEQ ID NO: 261991 - RNA, 32 nt, Human
uguauauguuccacuauaaucuuaugggacca

SEQ ID NO: 261992 - RNA, 32 nt, Human
uguauauuauuacuuuuuaauuuucuaaguau

SEQ ID NO: 261993 - RNA, 32 nt, Human
uguauauucccuuuauuuccuuuaccuuuugu

SEQ ID NO: 261994 - RNA, 32 nt, Human
uguauauugaagaugucucuacacaguaucgu

SEQ ID NO: 261995 - RNA, 32 nt, Human
uguauauugggcucagagagugcacugugucu

SEQ ID NO: 261996 - RNA, 32 nt, Human
uguauauuuaaagccuuuaauacauuuuuggg

SEQ ID NO: 261997 - RNA, 32 nt, Human
uguauauuugugugugcagauguacauaaaga

SEQ ID NO: 261998 - RNA, 32 nt, Human
uguaucaacacuauagaagaugagccaccuug

SEQ ID NO: 261999 - RNA, 32 nt, Human
uguaucaaugagauccccucacccucacccca

SEQ ID NO: 262000 - RNA, 32 nt, Human
uguaucacagcaguaccucucauggcuuuuug

SEQ ID NO: 262001 - RNA, 32 nt, Human
uguaucacguaagugugugagugcagugcaga

SEQ ID NO: 262002 - RNA, 32 nt, Human
uguaucacgugugcuuuguaucuuaagaugug

SEQ ID NO: 262003 - RNA, 32 nt, Human
uguaucacuggcagcaggacgugaccauggag

SEQ ID NO: 262004 - RNA, 32 nt, Human
uguaucacuugcaaguuuuaggaguucauauc

SEQ ID NO: 262005 - RNA, 32 nt, Human
uguaucagagggcuuugaaaacauacacugag

SEQ ID NO: 262006 - RNA, 29 nt, Human
uguaucagucugugugugucugagagucu

SEQ ID NO: 262007 - RNA, 32 nt, Human
uguaucaguguugcucaugcugugucuuugug

SEQ ID NO: 262008 - RNA, 32 nt, Human
uguaucaguucugaguuccacuggccuauccc

SEQ ID NO: 262009 - RNA, 32 nt, Human
uguaucauaaagcacacacuuagcgcucugga

SEQ ID NO: 262010 - RNA, 32 nt, Human
uguaucauccaccucacgccgcauauaccggu

SEQ ID NO: 262011 - RNA, 32 nt, Human
uguaucaucccccagacccagagaaagaggug

SEQ ID NO: 262012 - RNA, 32 nt, Human
uguauccaacagcaaagucuacaauaaaacuu

SEQ ID NO: 262013 - RNA, 32 nt, Human
uguauccaaggaaauaaugugaaugcgaggaa

SEQ ID NO: 262014 - RNA, 32 nt, Human
uguauccaaggaguuugauccuuuugagcugu

SEQ ID NO: 262015 - RNA, 32 nt, Human
uguauccacagcgugggaccaugccaggcaca

SEQ ID NO: 262016 - RNA, 32 nt, Human
uguauccagagggugacccucuucucaaggaa

SEQ ID NO: 262017 - RNA, 32 nt, Human
uguauccagaguggaacccaggcugguguccg

SEQ ID NO: 262018 - RNA, 32 nt, Human
uguauccagcugcagccgccuccggagcuucg

SEQ ID NO: 262019 - RNA, 32 nt, Human
uguauccaggagguggaagugaauugcaagug

SEQ ID NO: 262020 - RNA, 22 nt, Human
uguauccaggucugcuuuccac

SEQ ID NO: 262021 - RNA, 32 nt, Human
uguauccagguucccucccagaggagccacca

SEQ ID NO: 262022 - RNA, 32 nt, Human
uguauccaguguccuaaaguuuuaggauuagu

SEQ ID NO: 262023 - RNA, 32 nt, Human
uguauccauugccggcaccuggugagauuccg

SEQ ID NO: 262024 - RNA, 28 nt, Human
uguaucccaagugcacuguccuucuguc

SEQ ID NO: 262025 - RNA, 32 nt, Human
uguaucccagaacacuagacacuucaaauugu

SEQ ID NO: 262026 - RNA, 32 nt, Human
uguaucccagcacuuugggaggccaaggauca

SEQ ID NO: 262027 - RNA, 32 nt, Human
uguaucccagugaccagccacaggagaugucc

SEQ ID NO: 262028 - RNA, 32 nt, Human
uguaucccaugguggucaaagcaguaaaggag

SEQ ID NO: 262029 - RNA, 32 nt, Human
uguaucccuccaggaguuccuggcacauggug

SEQ ID NO: 262030 - RNA, 32 nt, Human
uguauccugccugggcucuggccccugcucug

SEQ ID NO: 262031 - RNA, 32 nt, Human
uguauccugccugggcucuggccucuacucuc

SEQ ID NO: 262032 - RNA, 32 nt, Human
uguauccugccugggcuguggccucugcucug

SEQ ID NO: 262033 - RNA, 32 nt, Human
uguauccugccuguguuccugccuccugacua

SEQ ID NO: 262034 - RNA, 32 nt, Human
uguauccuggugguucuuacaucccccucugc

SEQ ID NO: 262035 - RNA, 32 nt, Human
uguauccuucuuucuucuuuucacgauaacuu

SEQ ID NO: 262036 - RNA, 32 nt, Human
uguauccuucuuucuucuuuucaugauaaauu

SEQ ID NO: 262037 - RNA, 32 nt, Human
uguauccuuuccucaaccuccuccuuucccaa

SEQ ID NO: 262038 - RNA, 32 nt, Human
uguaucgaguuagagaaauggaagaaacgacg

SEQ ID NO: 262039 - RNA, 32 nt, Human
uguaucgguguuuucuuuccuggugggguagu

SEQ ID NO: 262040 - RNA, 32 nt, Human
uguaucguuucgaugaccuagucucaaaaguc

SEQ ID NO: 262041 - RNA, 32 nt, Human
uguaucuaaaccagaauauuuuggucaaauau

SEQ ID NO: 262042 - RNA, 32 nt, Human
uguaucuacaaccaaaugccucuuaucccuga

SEQ ID NO: 262043 - RNA, 32 nt, Human
uguaucuacuaaaaauacaaaaauuagccagg

SEQ ID NO: 262044 - RNA, 32 nt, Human
uguaucuacuaaaaauacaaaaauuagccgga

SEQ ID NO: 262045 - RNA, 32 nt, Human
uguaucuacuuaaguuugucacugugacaaca

SEQ ID NO: 262046 - RNA, 32 nt, Human
uguaucuauuaaaagacaaaaauuagcugggc

SEQ ID NO: 262047 - RNA, 32 nt, Human
uguaucucacauuuuucccaggagguuaccca

SEQ ID NO: 262048 - RNA, 32 nt, Human
uguaucucaccagcagaccaggagacuggucc

SEQ ID NO: 262049 - RNA, 32 nt, Human
uguaucucagcaccacccucucccucugugcc

SEQ ID NO: 262050 - RNA, 32 nt, Human
uguaucucccaacuagaaacagcuccaguguu

SEQ ID NO: 262051 - RNA, 32 nt, Human
uguaucucccuucacugucucuuccuacauua

SEQ ID NO: 262052 - RNA, 32 nt, Human
uguaucuccgacacucagaggauuucccuaga

SEQ ID NO: 262053 - RNA, 20 nt, Human
uguaucuccugucaggaagc

SEQ ID NO: 262054 - RNA, 32 nt, Human
uguaucucuucccuuuggcuguucaucuacau

SEQ ID NO: 262055 - RNA, 32 nt, Human
uguaucugaacucaaaacaaaguaguuguaua

SEQ ID NO: 262056 - RNA, 32 nt, Human
uguaucugagucuugaagacucugcaaaguga

SEQ ID NO: 262057 - RNA, 32 nt, Human
uguaucugcaccugccucucuguccuggccag

SEQ ID NO: 262058 - RNA, 32 nt, Human
uguaucugcacuugcagccucagcuuucauac

SEQ ID NO: 262059 - RNA, 31 nt, Human
uguaucugccucugugccugugcacaugaag

SEQ ID NO: 262060 - RNA, 32 nt, Human
uguaucuggaaagagggaagacuugauccuca

SEQ ID NO: 262061 - RNA, 32 nt, Human
uguaucuggacaacagggaaagaaaggagcug

SEQ ID NO: 262062 - RNA, 32 nt, Human
uguaucuggcuggacugaucugucucacaaga

SEQ ID NO: 262063 - RNA, 22 nt, Human
uguaucugugccuggccagugg

SEQ ID NO: 262064 - RNA, 32 nt, Human
uguaucuuacucuguuuaagcagaacaccuug

SEQ ID NO: 262065 - RNA, 32 nt, Human
uguaucuuacuggucugaagggaccaagugug

SEQ ID NO: 262066 - RNA, 32 nt, Human
uguaucuucaggccaccugaggcacauccucu

SEQ ID NO: 262067 - RNA, 32 nt, Human
uguaucuucauacacguuuggaaauguuuccu

SEQ ID NO: 262068 - RNA, 32 nt, Human
uguaucuuccuugaccugcuuccuucaguccc

SEQ ID NO: 262069 - RNA, 32 nt, Human
uguaucuucucacuucucacugguguuggaaa

SEQ ID NO: 262070 - RNA, 32 nt, Human
uguaucuucuccccuucugagccuguccauuc

SEQ ID NO: 262071 - RNA, 32 nt, Human
uguaucuucugaacccuacaucaaguugaaaa

SEQ ID NO: 262072 - RNA, 32 nt, Human
uguaucuugcauucagaaaacaaacuguccua

SEQ ID NO: 262073 - RNA, 32 nt, Human
uguaucuuuggagaaggagaaagaaaggaaag

SEQ ID NO: 262074 - RNA, 32 nt, Human
uguaugaaaaugguguacuguauacuuuaaca

SEQ ID NO: 262075 - RNA, 32 nt, Human
uguaugaaaggagagagcaaagggugucugcg

SEQ ID NO: 262076 - RNA, 32 nt, Human
uguaugaaaguuaaggaagggggugaggaugu

SEQ ID NO: 262077 - RNA, 32 nt, Human
uguaugaagucccuccugauuuugugugugug

SEQ ID NO: 262078 - RNA, 32 nt, Human
uguaugaauguauauacaaagacucagcuacu

SEQ ID NO: 262079 - RNA, 32 nt, Human
uguaugacacuucucuuccacccugcacagca

SEQ ID NO: 262080 - RNA, 21 nt, Human
uguaugacagcuuuccuucac

SEQ ID NO: 262081 - RNA, 32 nt, Human
uguaugacccggauuugcuaugcaaaacaauc

SEQ ID NO: 262082 - RNA, 32 nt, Human
uguaugacugcacuccagccugggugacagac

SEQ ID NO: 262083 - RNA, 32 nt, Human
uguaugacugcacuccagccugggugacagag

SEQ ID NO: 262084 - RNA, 32 nt, Human
uguaugagcuguggcuuuuucccauugugaag

SEQ ID NO: 262085 - RNA, 32 nt, Human
uguaugagugugaaugagugugugcacaugag

SEQ ID NO: 262086 - RNA, 32 nt, Human
uguaugauaagaaaguaaguauuccaaaggga

SEQ ID NO: 262087 - RNA, 32 nt, Human
uguaugaucucaggagauguguauggguucaa

SEQ ID NO: 262088 - RNA, 32 nt, Human
uguaugcaguuguccuaucacaguuauauuag

SEQ ID NO: 262089 - RNA, 32 nt, Human
uguaugcauaugcauauguauguauagaaugg

SEQ ID NO: 262090 - RNA, 32 nt, Human
uguaugcaucuaauuucauuugcguaauacau

SEQ ID NO: 262091 - RNA, 32 nt, Human
uguaugccauuuucucccugcaaagcagcuca

SEQ ID NO: 262092 - RNA, 32 nt, Human
uguaugcccuggaagaggggauaguccgcuac

SEQ ID NO: 262093 - RNA, 32 nt, Human
uguaugccugcuccagccuggacugcaccguu

SEQ ID NO: 262094 - RNA, 32 nt, Human
uguaugccuguacuugggcugcacugagcuug

SEQ ID NO: 262095 - RNA, 32 nt, Human
uguaugccugugcagacugacaggauauggug

SEQ ID NO: 262096 - RNA, 32 nt, Human
uguaugcuagaaauagaaagaaaagaaaauug

SEQ ID NO: 262097 - RNA, 32 nt, Human
uguaugcuguuuuucucccaaaugaagacucu

SEQ ID NO: 262098 - RNA, 32 nt, Human
uguaugcuuggauuaucuacugcaauguaaua

SEQ ID NO: 262099 - RNA, 32 nt, Human
uguauggaaacacacaccuucacacaucaaaa

SEQ ID NO: 262100 - RNA, 32 nt, Human
uguauggaaaccuuaaaaaguaaacuuauuuu

SEQ ID NO: 262101 - RNA, 21 nt, Human
uguauggaacuuauagcacug

SEQ ID NO: 262102 - RNA, 32 nt, Human
uguauggacaucaagcaaaauguauuccccga

SEQ ID NO: 262103 - RNA, 32 nt, Human
uguauggaggaaagcacaguggaugcuaggcu

SEQ ID NO: 262104 - RNA, 32 nt, Human
uguauggaggaggccaggcucagagcugagau

SEQ ID NO: 262105 - RNA, 32 nt, Human
uguauggcaugcugggaugugccaggugccug

SEQ ID NO: 262106 - RNA, 32 nt, Human
uguauggcauuuucuuuauccugucugucauu

SEQ ID NO: 262107 - RNA, 32 nt, Human
uguauggccgcucuugggaugcagagacaagg

SEQ ID NO: 262108 - RNA, 32 nt, Human
uguauggccuuucgggaaaauucaaagggugg

SEQ ID NO: 262109 - RNA, 32 nt, Human
uguauggcgacuucuugagcuggaagcuagag

SEQ ID NO: 262110 - RNA, 32 nt, Human
uguauggcgucgugaugucaaaccagauugca

SEQ ID NO: 262111 - RNA, 32 nt, Human
uguauggcuacccuugugaucuacaguaauuu

SEQ ID NO: 262112 - RNA, 32 nt, Human
uguauggcuagaauauccuacuucuccagccu

SEQ ID NO: 262113 - RNA, 32 nt, Human
uguaugggagaggaauggaggaugccaggaug

SEQ ID NO: 262114 - RNA, 32 nt, Human
uguaugggcaaagcuuuugugaucacacacca

SEQ ID NO: 262115 - RNA, 32 nt, Human
uguaugggcaggaggaaaggugggagggggag

SEQ ID NO: 262116 - RNA, 32 nt, Human
uguaugggcucugugggcucugucccuggcug

SEQ ID NO: 262117 - RNA, 32 nt, Human
uguauggggaaaauaguucugaaaggcuagaa

SEQ ID NO: 262118 - RNA, 32 nt, Human
uguaugguagggugcucagcagcaucccuggc

SEQ ID NO: 262119 - RNA, 32 nt, Human
uguauggugggugguggggaaucugggagaga

SEQ ID NO: 262120 - RNA, 32 nt, Human
uguaugguugguuaacagucugcuccccucuu

SEQ ID NO: 262121 - RNA, 32 nt, Human
uguauguaaguugcuuucuauuccaguauauc

SEQ ID NO: 262122 - RNA, 32 nt, Human
uguauguacguacauaugauaaaguucaguuu

SEQ ID NO: 262123 - RNA, 21 nt, Human
uguauguacuuuccuuuaguu

SEQ ID NO: 262124 - RNA, 32 nt, Human
uguauguauaauauacauacauacauaagcau

SEQ ID NO: 262125 - RNA, 24 nt, Human
uguauguauauaccacauuuuguu

SEQ ID NO: 262126 - RNA, 32 nt, Human
uguauguauuaaaaauaauaaaauuccagaaa

SEQ ID NO: 262127 - RNA, 32 nt, Human
uguaugucauuuccuucaaggcaucaugcaga

SEQ ID NO: 262128 - RNA, 32 nt, Human
uguaugucuguguuuugaggaggagggugucu

SEQ ID NO: 262129 - RNA, 28 nt, Human
uguaugucuucccaccucauggauguua

SEQ ID NO: 262130 - RNA, 32 nt, Human
uguaugugaaugcacacaugugcacuuaguuc

SEQ ID NO: 262131 - RNA, 32 nt, Human
uguaugugaauggguguacauguaggaaccug

SEQ ID NO: 262132 - RNA, 31 nt, Human
uguaugugacuucccucccccugccagaaua

SEQ ID NO: 262133 - RNA, 32 nt, Human
uguaugugaugagaggcagagcuggauauugc

SEQ ID NO: 262134 - RNA, 32 nt, Human
uguaugugcaugcacacacgugcauauacaca

SEQ ID NO: 262135 - RNA, 32 nt, Human
uguaugugcaugcauucacacacacauaugua

SEQ ID NO: 262136 - RNA, 32 nt, Human
uguaugugcauguguacacauauguacauaua

SEQ ID NO: 262137 - RNA, 32 nt, Human
uguaugugcggccagugacuuccccaggagug

SEQ ID NO: 262138 - RNA, 32 nt, Human
uguauguggacacaggcuggagucagguucgc

SEQ ID NO: 262139 - RNA, 32 nt, Human
uguauguguauuuauauguauguauguaugug

SEQ ID NO: 262140 - RNA, 29 nt, Human
uguaugugucugugugaguuugguuucuc

SEQ ID NO: 262141 - RNA, 32 nt, Human
uguaugugugccuguguguguauaaaaauaac

SEQ ID NO: 262142 - RNA, 32 nt, Human
uguauguguguauguauguauccgcaugugug

SEQ ID NO: 262143 - RNA, 32 nt, Human
uguauguguguauguguguaugugugugcgug

SEQ ID NO: 262144 - RNA, 24 nt, Human
uguauguguguauguguguguaua

SEQ ID NO: 262145 - RNA, 32 nt, Human
uguaugugugugcuugcgugugugaaugugug

SEQ ID NO: 262146 - RNA, 32 nt, Human
uguaugugugugugcacgcgcgugcgcgcuug

SEQ ID NO: 262147 - RNA, 32 nt, Human
uguaugugugugugcgugcauaaauuauuuaa

SEQ ID NO: 262148 - RNA, 32 nt, Human
uguauguuaggagcauguguguuuguaggcag

SEQ ID NO: 262149 - RNA, 32 nt, Human
uguauguugcccauggugggagcguggucacu

SEQ ID NO: 262150 - RNA, 32 nt, Human
uguauguuggaguccuagagaggcagacaaug

SEQ ID NO: 262151 - RNA, 32 nt, Human
uguauguuuauauacacacauguaucuguaua

SEQ ID NO: 262152 - RNA, 32 nt, Human
uguauguuuaucucccuuuuacucaugggcuc

SEQ ID NO: 262153 - RNA, 32 nt, Human
uguauguuuccccucacuguuugcagcuccca

SEQ ID NO: 262154 - RNA, 32 nt, Human
uguauguuuucagcauuuuaaggcuagagauu

SEQ ID NO: 262155 - RNA, 32 nt, Human
uguauguuuugugcugaacuggcagcuauccc

SEQ ID NO: 262156 - RNA, 32 nt, Human
uguauuaaaaguuucaguuggagcucagaccu

SEQ ID NO: 262157 - RNA, 32 nt, Human
uguauuaacugaggaauaaaagacugaagaaa

SEQ ID NO: 262158 - RNA, 32 nt, Human
uguauuaauaguaaauccaaaaauuagcuggu

SEQ ID NO: 262159 - RNA, 32 nt, Human
uguauuaaugcuugaauauuacuggauaaauu

SEQ ID NO: 262160 - RNA, 31 nt, Human
uguauuagcacucccuccaugccaggcacug

SEQ ID NO: 262161 - RNA, 32 nt, Human
uguauuagccccggaggacgugaugugagacc

SEQ ID NO: 262162 - RNA, 31 nt, Human
uguauuagugagaggugaagccagcuggacu

SEQ ID NO: 262163 - RNA, 32 nt, Human
uguauuaguucugcugucacuucauuuccugu

SEQ ID NO: 262164 - RNA, 32 nt, Human
uguauuaguuugggauuuguuuuuaaauaauu

SEQ ID NO: 262165 - RNA, 32 nt, Human
uguauuaguuuucuauugcugugugacaaauu

SEQ ID NO: 262166 - RNA, 32 nt, Human
uguauuauagaguagaauaguaaagcucuagg

SEQ ID NO: 262167 - RNA, 32 nt, Human
uguauuaugccagauuuccagagccagugguu

SEQ ID NO: 262168 - RNA, 32 nt, Human
uguauuaugugaaucagugagauguuaguaga

SEQ ID NO: 262169 - RNA, 32 nt, Human
uguauuauuuuccuccuuugaguuaggucuug

SEQ ID NO: 262170 - RNA, 32 nt, Human
uguauucaauccagcgaacugcuguauguaua

SEQ ID NO: 262171 - RNA, 32 nt, Human
uguauucacagaaccaccaucaauucacagaa

SEQ ID NO: 262172 - RNA, 32 nt, Human
uguauucagaaauccaaguuggugucauacau

SEQ ID NO: 262173 - RNA, 32 nt, Human
uguauucaucuaagcauuugggcauuuggagu

SEQ ID NO: 262174 - RNA, 32 nt, Human
uguauucaucuauuuuaaauugccggcgacga

SEQ ID NO: 262175 - RNA, 32 nt, Human
uguauuccagccuggacgacugagugagaccc

SEQ ID NO: 262176 - RNA, 32 nt, Human
uguauuccagccugggcaauagagcaaguccc

SEQ ID NO: 262177 - RNA, 32 nt, Human
uguauuccagccugggugacagagugagaucc

SEQ ID NO: 262178 - RNA, 32 nt, Human
uguauuccaucaucuuccuuuuucauuccagu

SEQ ID NO: 262179 - RNA, 32 nt, Human
uguauuccauccugggcaacagagccagaccc

SEQ ID NO: 262180 - RNA, 32 nt, Human
uguauuccauuaucuucucuuuaccaaacuua

SEQ ID NO: 262181 - RNA, 32 nt, Human
uguauucccagccugugucccaugggcacaag

SEQ ID NO: 262182 - RNA, 32 nt, Human
uguauuccccgccaccauggaugacguccccg

SEQ ID NO: 262183 - RNA, 32 nt, Human
uguauucccuggcaaaauggacuuucucaaaa

SEQ ID NO: 262184 - RNA, 32 nt, Human
uguauucuacaacuucuuugguguuuugcucc

SEQ ID NO: 262185 - RNA, 32 nt, Human
uguauucuaccucacacuccagcgugggcuuu

SEQ ID NO: 262186 - RNA, 32 nt, Human
uguauucucacugcuccaucuccugauguagg

SEQ ID NO: 262187 - RNA, 32 nt, Human
uguauucucauggcaccuagugcagugcuggg

SEQ ID NO: 262188 - RNA, 32 nt, Human
uguauucucauuuuggcccuuguucuuaggcc

SEQ ID NO: 262189 - RNA, 32 nt, Human
uguauucuccaauaccaccaucgcucccacca

SEQ ID NO: 262190 - RNA, 32 nt, Human
uguauucuccacccuugaucuuucuccuuguc

SEQ ID NO: 262191 - RNA, 32 nt, Human
uguauucucugcucccuucuuccugcuggguu

SEQ ID NO: 262192 - RNA, 32 nt, Human
uguauucugccucuggacucacauuucucguc

SEQ ID NO: 262193 - RNA, 32 nt, Human
uguauucugggaaugggcagggucacucgucc

SEQ ID NO: 262194 - RNA, 32 nt, Human
uguauucuguguauuauucuuuauuuugggac

SEQ ID NO: 262195 - RNA, 32 nt, Human
uguauucuucagccauaggagugcggucuucc

SEQ ID NO: 262196 - RNA, 32 nt, Human
uguauucuugcuguccacuguuucuucuucuu

SEQ ID NO: 262197 - RNA, 32 nt, Human
uguauugaacuuauucuaaaggcuuaugcuaa

SEQ ID NO: 262198 - RNA, 32 nt, Human
uguauugaagcauugugcugucugaaaauaag

SEQ ID NO: 262199 - RNA, 32 nt, Human
uguauugaccaccacauaugcuaauaccuauc

SEQ ID NO: 262200 - RNA, 32 nt, Human
uguauugagcgguuugcagccugaugcucagc

SEQ ID NO: 262201 - RNA, 32 nt, Human
uguauugauaaauaauugcuuuauaacaaaug

SEQ ID NO: 262202 - RNA, 32 nt, Human
uguauugcaugggcugcauuaucuacagcauu

SEQ ID NO: 262203 - RNA, 32 nt, Human
uguauugccagacuggagugcaguggcgugau

SEQ ID NO: 262204 - RNA, 32 nt, Human
uguauugcccaggcuggagugcaguggcgcga

SEQ ID NO: 262205 - RNA, 32 nt, Human
uguauugccugccagagcuuggaagggaggac

SEQ ID NO: 262206 - RNA, 32 nt, Human
uguauugcucacugcagccccucugccccuau

SEQ ID NO: 262207 - RNA, 32 nt, Human
uguauugcucuaauuggccugcugcccaaggc

SEQ ID NO: 262208 - RNA, 32 nt, Human
uguauugggcaggguggcuccaggauguuagg

SEQ ID NO: 262209 - RNA, 32 nt, Human
uguauuggucagaaagaaaaagaaagaaaacc

SEQ ID NO: 262210 - RNA, 32 nt, Human
uguauuguaaagcucacagcaagcucaguggg

SEQ ID NO: 262211 - RNA, 32 nt, Human
uguauuguacaagcuagagagcugaauuucug

SEQ ID NO: 262212 - RNA, 32 nt, Human
uguauuguccauugauuccugauugacgccgu

SEQ ID NO: 262213 - RNA, 32 nt, Human
uguauuguucugcaguguugaaacagaaugga

SEQ ID NO: 262214 - RNA, 32 nt, Human
uguauuguuugcauccccuugcccucaauaaa

SEQ ID NO: 262215 - RNA, 21 nt, Human
uguauuuaagcaaacagugaa

SEQ ID NO: 262216 - RNA, 32 nt, Human
uguauuuacucugccaggugccuauauuccaa

SEQ ID NO: 262217 - RNA, 32 nt, Human
uguauuuagugcagugcccggcccgacccgcg

SEQ ID NO: 262218 - RNA, 24 nt, Human
uguauuuaguuuguucuacuuaaa

SEQ ID NO: 262219 - RNA, 32 nt, Human
uguauuuauaaagguuuuuggagcugcacuga

SEQ ID NO: 262220 - RNA, 32 nt, Human
uguauuuauauguauguauguaugugugugug

SEQ ID NO: 262221 - RNA, 32 nt, Human
uguauuuauguacguccuccuaggugauggag

SEQ ID NO: 262222 - RNA, 32 nt, Human
uguauuuauuaauuugaaaccaggacauuaaa

SEQ ID NO: 262223 - RNA, 32 nt, Human
uguauuuauuuggaagccagaacauggugggu

SEQ ID NO: 262224 - RNA, 32 nt, Human
uguauuucaagauucaaacaauaaccagcaau

SEQ ID NO: 262225 - RNA, 32 nt, Human
uguauuucaagcaguuugugugguguuucuau

SEQ ID NO: 262226 - RNA, 32 nt, Human
uguauuucagacuuauccauguugauacaugu

SEQ ID NO: 262227 - RNA, 32 nt, Human
uguauuucgauggccagcauuacccuuuaccu

SEQ ID NO: 262228 - RNA, 32 nt, Human
uguauuucuagaaaucaauggcagcugcugau

SEQ ID NO: 262229 - RNA, 32 nt, Human
uguauuucuagcccagcacugccaggaccaag

SEQ ID NO: 262230 - RNA, 32 nt, Human
uguauuucucagauuacaugacauuagucaac

SEQ ID NO: 262231 - RNA, 32 nt, Human
uguauuucucuggagugcaauggugcaaucuc

SEQ ID NO: 262232 - RNA, 32 nt, Human
uguauuucugucugggaccaggaagcugcagc

SEQ ID NO: 262233 - RNA, 32 nt, Human
uguauuucuuuuuccuccuuucugucccuuuc

SEQ ID NO: 262234 - RNA, 32 nt, Human
uguauuugagcuccucuaguugcuguugguuu

SEQ ID NO: 262235 - RNA, 31 nt, Human
uguauuugccucucgugauucuguuuguuac

SEQ ID NO: 262236 - RNA, 32 nt, Human
uguauuuggaaaacauuguaaaugaaacaccu

SEQ ID NO: 262237 - RNA, 32 nt, Human
uguauuuggaagccucugaagagaccaugucu

SEQ ID NO: 262238 - RNA, 32 nt, Human
uguauuuggcaauugcaaguugccugcagaua

SEQ ID NO: 262239 - RNA, 32 nt, Human
uguauuugggcagagucagauucucucagcua

SEQ ID NO: 262240 - RNA, 32 nt, Human
uguauuugguguuuggcccugcaguccccacu

SEQ ID NO: 262241 - RNA, 32 nt, Human
uguauuugucucaaagcuaccaaguuugugca

SEQ ID NO: 262242 - RNA, 32 nt, Human
uguauuugugaauaacaaacugcacaaccugc

SEQ ID NO: 262243 - RNA, 32 nt, Human
uguauuugugcaaguaaggagaugugacuucu

SEQ ID NO: 262244 - RNA, 32 nt, Human
uguauuuuaugaucuuggcuguauuuaauggc

SEQ ID NO: 262245 - RNA, 32 nt, Human
uguauuuuccagccuaggcuuugugugaauua

SEQ ID NO: 262246 - RNA, 32 nt, Human
uguauuuugaaguguagagauaaugagguagu

SEQ ID NO: 262247 - RNA, 32 nt, Human
uguauuuuguagccuuuuccugggcuucagcu

SEQ ID NO: 262248 - RNA, 32 nt, Human
uguauuuuguuaguugcuuagaaauggaaaua

SEQ ID NO: 262249 - RNA, 32 nt, Human
uguauuuuuacuccuuaaagagcuagaauaca

SEQ ID NO: 262250 - RNA, 21 nt, Human
uguauuuuucaaaacuacaaa

SEQ ID NO: 262251 - RNA, 32 nt, Human
uguauuuuucaucaguuguuucucaaagucau

SEQ ID NO: 262252 - RNA, 32 nt, Human
uguauuuuucccuugcuuuuggggguucagag

SEQ ID NO: 262253 - RNA, 32 nt, Human
uguauuuuucuuaauaaauaaaggacauuaca

SEQ ID NO: 262254 - RNA, 32 nt, Human
uguauuuuuguagacuuuaauagagaaguuga

SEQ ID NO: 262255 - RNA, 32 nt, Human
uguauuuuugugcucacugauggaugagcucu

SEQ ID NO: 262256 - RNA, 27 nt, Human
ugucaaaaaucaggcuggagugcagug

SEQ ID NO: 262257 - RNA, 32 nt, Human
ugucaaaaaucaggcuggagugcaguggcaug

SEQ ID NO: 262258 - RNA, 32 nt, Human
ugucaaaagcccgacucggcagcagcggcgga

SEQ ID NO: 262259 - RNA, 32 nt, Human
ugucaaaaggaggauugaggaggaucagauca

SEQ ID NO: 262260 - RNA, 32 nt, Human
ugucaaaagucaaaaccuccuagggguugucc

SEQ ID NO: 262261 - RNA, 32 nt, Human
ugucaaaauacagcuaucaagaaugaugaugu

SEQ ID NO: 262262 - RNA, 32 nt, Human
ugucaaacugcagagcaacagggcuucaguau

SEQ ID NO: 262263 - RNA, 32 nt, Human
ugucaaagaccaccaaugauuccuaaacucca

SEQ ID NO: 262264 - RNA, 32 nt, Human
ugucaaagagccuccuggaaagcugucaucuu

SEQ ID NO: 262265 - RNA, 32 nt, Human
ugucaaauacaaauaaaucugggcuuagggaa

SEQ ID NO: 262266 - RNA, 32 nt, Human
ugucaaauggcagacuugcagagcaaauaagg

SEQ ID NO: 262267 - RNA, 32 nt, Human
ugucaacaaauuugcaaucaugucaggcaugu

SEQ ID NO: 262268 - RNA, 32 nt, Human
ugucaacagaguggaggucucaguggggaaag

SEQ ID NO: 262269 - RNA, 32 nt, Human
ugucaacagauaguuguguuuuuauuguuaac

SEQ ID NO: 262270 - RNA, 32 nt, Human
ugucaacaucacacugugcauccucuuccggc

SEQ ID NO: 262271 - RNA, 32 nt, Human
ugucaaccagcagucaaggaugagcaccaggu

SEQ ID NO: 262272 - RNA, 32 nt, Human
ugucaaccaggacagaaagcauggacaaggga

SEQ ID NO: 262273 - RNA, 23 nt, Human
ugucaaccaggccagagugcagu

SEQ ID NO: 262274 - RNA, 24 nt, Human
ugucaaccaggccagagugcagug

SEQ ID NO: 262275 - RNA, 32 nt, Human
ugucaacccaaagaaguguggcaaacaccauc

SEQ ID NO: 262276 - RNA, 32 nt, Human
ugucaacccacaacaaccagcauagcaaauga

SEQ ID NO: 262277 - RNA, 32 nt, Human
ugucaacccagccauggggaagaucaccuucu

SEQ ID NO: 262278 - RNA, 32 nt, Human
ugucaacccgggaggcggagcuugcagugagc

SEQ ID NO: 262279 - RNA, 24 nt, Human
ugucaaccgggcuggagugcagug

SEQ ID NO: 262280 - RNA, 32 nt, Human
ugucaaccuuuaccacugaggcuggaaauugg

SEQ ID NO: 262281 - RNA, 24 nt, Human
ugucaacgcagacuggagugcagu

SEQ ID NO: 262282 - RNA, 25 nt, Human
ugucaacgcagacuggagugcagug

SEQ ID NO: 262283 - RNA, 32 nt, Human
ugucaacgcagacuggagugcaguggcacgau

SEQ ID NO: 262284 - RNA, 32 nt, Human
ugucaacuccauccuucugucaggccaaaauc

SEQ ID NO: 262285 - RNA, 32 nt, Human
ugucaacugggccagcuguugcucuggggaua

SEQ ID NO: 262286 - RNA, 32 nt, Human
ugucaacuugucauauacaccuccagggacca

SEQ ID NO: 262287 - RNA, 32 nt, Human
ugucaagaagugaacuaugacaauacaucaau

SEQ ID NO: 262288 - RNA, 32 nt, Human
ugucaagaaguuaaauugaggcuuaaugagca

SEQ ID NO: 262289 - RNA, 32 nt, Human
ugucaagaaugcucucugggcgcuguucuugc

SEQ ID NO: 262290 - RNA, 32 nt, Human
ugucaagagaauuuccuggcuguugugaaaga

SEQ ID NO: 262291 - RNA, 32 nt, Human
ugucaagagaggaagagagggaggagggguag

SEQ ID NO: 262292 - RNA, 32 nt, Human
ugucaagagcccagaggagaaagaauggcugu

SEQ ID NO: 262293 - RNA, 32 nt, Human
ugucaagaugcugcaaguacauaggacuggac

SEQ ID NO: 262294 - RNA, 32 nt, Human
ugucaagcacaguuguaaaauaaaguccaaaa

SEQ ID NO: 262295 - RNA, 32 nt, Human
ugucaagcacaucaugucagggugagcagagu

SEQ ID NO: 262296 - RNA, 32 nt, Human
ugucaagccagguguggacauuccaaguucau

SEQ ID NO: 262297 - RNA, 32 nt, Human
ugucaagcccacagggcaccagugccacccag

SEQ ID NO: 262298 - RNA, 21 nt, Human
ugucaagccuugaggacaccc

SEQ ID NO: 262299 - RNA, 32 nt, Human
ugucaagcgguggaguugauuucuccaaccau

SEQ ID NO: 262300 - RNA, 32 nt, Human
ugucaaggaaacaaagcccaaauguuuuuaaa

SEQ ID NO: 262301 - RNA, 32 nt, Human
ugucaaggaauaggguggggcaaugugucauu

SEQ ID NO: 262302 - RNA, 32 nt, Human
ugucaaggaggaaagagagggagauggaggau

SEQ ID NO: 262303 - RNA, 32 nt, Human
ugucaaggaugaugaaaaagaggcugaggaag

SEQ ID NO: 262304 - RNA, 32 nt, Human
ugucaaggccaucucaaaaggagaagcaaagc

SEQ ID NO: 262305 - RNA, 32 nt, Human
ugucaaggccuggucucaucugaaaagcccuc

SEQ ID NO: 262306 - RNA, 32 nt, Human
ugucaagggccagacgggcccagagcgcccaa

SEQ ID NO: 262307 - RNA, 32 nt, Human
ugucaagggguaggagaaagagacgcaaacac

SEQ ID NO: 262308 - RNA, 32 nt, Human
ugucaagggugagggcaacagaugcuggaccc

SEQ ID NO: 262309 - RNA, 32 nt, Human
ugucaaggucccaucuucacuucaagcucauu

SEQ ID NO: 262310 - RNA, 32 nt, Human
ugucaagucuccuguccuccuccuggagcagc

SEQ ID NO: 262311 - RNA, 32 nt, Human
ugucaagugccuuuguuagguggagaagaaau

SEQ ID NO: 262312 - RNA, 32 nt, Human
ugucaaguuagagagagacaauguguaggaaa

SEQ ID NO: 262313 - RNA, 32 nt, Human
ugucaaguuugcagggugcagcuuggaugugg

SEQ ID NO: 262314 - RNA, 32 nt, Human
ugucaaguuuugugucagacaugggaaaucau

SEQ ID NO: 262315 - RNA, 32 nt, Human
ugucaauaaagauggaaagccauuuccaguua

SEQ ID NO: 262316 - RNA, 32 nt, Human
ugucaauaagacgccuugccaacuuggcagcc

SEQ ID NO: 262317 - RNA, 32 nt, Human
ugucaauacacgggguucaguaugacacagaa

SEQ ID NO: 262318 - RNA, 32 nt, Human
ugucaauacccauuucuuuucugaaggucaga

SEQ ID NO: 262319 - RNA, 32 nt, Human
ugucaauacuucuggggucguacuuaggggga

SEQ ID NO: 262320 - RNA, 32 nt, Human
ugucaaucaggcgcgggcugagcucuacgagg

SEQ ID NO: 262321 - RNA, 32 nt, Human
ugucaaucuuucucccagccugccuccaaggg

SEQ ID NO: 262322 - RNA, 32 nt, Human
ugucaaugacauuuuuauuuuugaaguacucu

SEQ ID NO: 262323 - RNA, 32 nt, Human
ugucaauuaacuucuccuucccuuccccucag

SEQ ID NO: 262324 - RNA, 32 nt, Human
ugucaauuagcccacuucagaaaccucagacc

SEQ ID NO: 262325 - RNA, 32 nt, Human
ugucaauucaugacauuauguggaauccuaaa

SEQ ID NO: 262326 - RNA, 32 nt, Human
ugucaauuuaagaaaucuaaagugaaaauuuu

SEQ ID NO: 262327 - RNA, 32 nt, Human
ugucaauuucugcugcuugcaaggaaaggauc

SEQ ID NO: 262328 - RNA, 32 nt, Human
ugucaauuugauguccuugaguuucgaguggg

SEQ ID NO: 262329 - RNA, 32 nt, Human
ugucacaaaacaggaaccagcauucuaauuag

SEQ ID NO: 262330 - RNA, 32 nt, Human
ugucacaaaaggggaggccacaccuggcccag

SEQ ID NO: 262331 - RNA, 32 nt, Human
ugucacaaccaaaacuuuacaagcuuugcuuc

SEQ ID NO: 262332 - RNA, 32 nt, Human
ugucacaagucuuggauuucaaucccaacucu

SEQ ID NO: 262333 - RNA, 32 nt, Human
ugucacaaugcagugaccucacuggccugugg

SEQ ID NO: 262334 - RNA, 32 nt, Human
ugucacaaugcccagacuuggagcaaggcaac

SEQ ID NO: 262335 - RNA, 32 nt, Human
ugucacacagaaugccggaggggcgcagagca

SEQ ID NO: 262336 - RNA, 32 nt, Human
ugucacacagcccucuguagugguugaaucau

SEQ ID NO: 262337 - RNA, 24 nt, Human
ugucacacaggcuggagggcagug

SEQ ID NO: 262338 - RNA, 23 nt, Human
ugucacacaggcuggagugcagu

SEQ ID NO: 262339 - RNA, 24 nt, Human
ugucacacaggcuggagugcagug

SEQ ID NO: 262340 - RNA, 18 nt, Human
ugucacaccucccucaca

SEQ ID NO: 262341 - RNA, 32 nt, Human
ugucacaccuuaaaaucuucaugcuguaguca

SEQ ID NO: 262342 - RNA, 32 nt, Human
ugucacacgugugcuuuaacacaaaacagaua

SEQ ID NO: 262343 - RNA, 32 nt, Human
ugucacacucaccuggcuccagccuccccuac

SEQ ID NO: 262344 - RNA, 32 nt, Human
ugucacacuggauccuuggccuccagggucca

SEQ ID NO: 262345 - RNA, 32 nt, Human
ugucacacuguacaucuaucauaaugugcccu

SEQ ID NO: 262346 - RNA, 32 nt, Human
ugucacacuguacuguaauucccucugugcca

SEQ ID NO: 262347 - RNA, 32 nt, Human
ugucacacuguggccugaucagcaggagccaa

SEQ ID NO: 262348 - RNA, 32 nt, Human
ugucacacuguggccuuuaauaauucuaaaca

SEQ ID NO: 262349 - RNA, 32 nt, Human
ugucacagagaaaagaagagacccacccacuc

SEQ ID NO: 262350 - RNA, 32 nt, Human
ugucacagagaggagaucgggagcugccugcu

SEQ ID NO: 262351 - RNA, 18 nt, Human
ugucacagcgaagacuga

SEQ ID NO: 262352 - RNA, 32 nt, Human
ugucacagcugcaggugguacagagccagcac

SEQ ID NO: 262353 - RNA, 32 nt, Human
ugucacaggccuggacuaaauugauuuuacgu

SEQ ID NO: 262354 - RNA, 32 nt, Human
ugucacaggccuggcuguagcgagcaccuccc

SEQ ID NO: 262355 - RNA, 32 nt, Human
ugucacagggggaaagaaguggguaccacauu

SEQ ID NO: 262356 - RNA, 32 nt, Human
ugucacagguagcaccucccugugcuggggga

SEQ ID NO: 262357 - RNA, 32 nt, Human
ugucacagugacggagauaacacugccaugau

SEQ ID NO: 262358 - RNA, 32 nt, Human
ugucacaguucacugcagccugggugacacuc

SEQ ID NO: 262359 - RNA, 32 nt, Human
ugucacauauaaaaauuaagcugaugacuuug

SEQ ID NO: 262360 - RNA, 32 nt, Human
ugucacaucagguuguaugaugacgaauaaaa

SEQ ID NO: 262361 - RNA, 32 nt, Human
ugucacaucucuccuucuucucuuucaccacu

SEQ ID NO: 262362 - RNA, 32 nt, Human
ugucacaucuugaucacagagcagaaaggcac

SEQ ID NO: 262363 - RNA, 32 nt, Human
ugucacauggaguuagucaaagcacaaaguca

SEQ ID NO: 262364 - RNA, 32 nt, Human
ugucaccaaagugcccaacucuggcacggggc

SEQ ID NO: 262365 - RNA, 32 nt, Human
ugucaccaaccuuggcuaacacaaaugagagc

SEQ ID NO: 262366 - RNA, 23 nt, Human
ugucaccaagcuggacugcagug

SEQ ID NO: 262367 - RNA, 23 nt, Human
ugucaccaaggcuuagugcagug

SEQ ID NO: 262368 - RNA, 32 nt, Human
ugucaccacccaggcucccuugccuuuggcug

SEQ ID NO: 262369 - RNA, 32 nt, Human
ugucaccacucugaagguccagacagaagguu

SEQ ID NO: 262370 - RNA, 32 nt, Human
ugucaccacugcccuccagccugggugacaga

SEQ ID NO: 262371 - RNA, 32 nt, Human
ugucaccagaaaccacauguauuugcauguuu

SEQ ID NO: 262372 - RNA, 22 nt, Human
ugucaccagacuggagugcagu

SEQ ID NO: 262373 - RNA, 23 nt, Human
ugucaccagacuggagugcagug

SEQ ID NO: 262374 - RNA, 32 nt, Human
ugucaccagccuguuuuguccuggucucucug

SEQ ID NO: 262375 - RNA, 20 nt, Human
ugucaccagcuaaagcaaug

SEQ ID NO: 262376 - RNA, 22 nt, Human
ugucaccaggauggagugcagu

SEQ ID NO: 262377 - RNA, 23 nt, Human
ugucaccaggauggagugcagug

SEQ ID NO: 262378 - RNA, 22 nt, Human
ugucaccaggccggagugcagu

SEQ ID NO: 262379 - RNA, 23 nt, Human
ugucaccaggccggagugcagug

SEQ ID NO: 262380 - RNA, 22 nt, Human
ugucaccaggcuagagugcagu

SEQ ID NO: 262381 - RNA, 23 nt, Human
ugucaccaggcuagagugcagug

SEQ ID NO: 262382 - RNA, 22 nt, Human
ugucaccaggcuggaaugcagu

SEQ ID NO: 262383 - RNA, 23 nt, Human
ugucaccaggcuggaaugcagug

SEQ ID NO: 262384 - RNA, 23 nt, Human
ugucaccaggcuggagggcagug

SEQ ID NO: 262385 - RNA, 22 nt, Human
ugucaccaggcuggaguacagu

SEQ ID NO: 262386 - RNA, 23 nt, Human
ugucaccaggcuggaguacagug

SEQ ID NO: 262387 - RNA, 21 nt, Human
ugucaccaggcuggagugcag

SEQ ID NO: 262388 - RNA, 22 nt, Human
ugucaccaggcuggagugcagu

SEQ ID NO: 262389 - RNA, 23 nt, Human
ugucaccaggcuggagugcagua

SEQ ID NO: 262390 - RNA, 23 nt, Human
ugucaccaggcuggagugcagug

SEQ ID NO: 262391 - RNA, 19 nt, Human
ugucaccaggcuguacagu

SEQ ID NO: 262392 - RNA, 23 nt, Human
ugucaccaggcuguauuacagug

SEQ ID NO: 262393 - RNA, 32 nt, Human
ugucaccaguguagaggguggggaaggggugu

SEQ ID NO: 262394 - RNA, 32 nt, Human
ugucaccaucaucuuuugcaauguguugcuca

SEQ ID NO: 262395 - RNA, 23 nt, Human
ugucacccaaccugcaggcagug

SEQ ID NO: 262396 - RNA, 24 nt, Human
ugucacccaagcaggauugcagug

SEQ ID NO: 262397 - RNA, 23 nt, Human
ugucacccaagcuggagugcagu

SEQ ID NO: 262398 - RNA, 24 nt, Human
ugucacccaagcuggagugcagug

SEQ ID NO: 262399 - RNA, 23 nt, Human
ugucacccaaggcggagugcagu

SEQ ID NO: 262400 - RNA, 24 nt, Human
ugucacccaaggcggagugcagug

SEQ ID NO: 262401 - RNA, 32 nt, Human
ugucacccaaggcggagugcagugacgacauc

SEQ ID NO: 262402 - RNA, 23 nt, Human
ugucacccaaguuggagugcagu

SEQ ID NO: 262403 - RNA, 24 nt, Human
ugucacccaaguuggagugcagug

SEQ ID NO: 262404 - RNA, 32 nt, Human
ugucacccacacaguaggugcugagaguuagg

SEQ ID NO: 262405 - RNA, 24 nt, Human
ugucacccacgcuggaaugcagug

SEQ ID NO: 262406 - RNA, 24 nt, Human
ugucacccacgcuggagugcaaug

SEQ ID NO: 262407 - RNA, 24 nt, Human
ugucacccacgcuggagugcugug

SEQ ID NO: 262408 - RNA, 32 nt, Human
ugucacccacugcaucuggaguacagcuucuc

SEQ ID NO: 262409 - RNA, 23 nt, Human
ugucacccagacuagagugcagu

SEQ ID NO: 262410 - RNA, 24 nt, Human
ugucacccagacuagagugcagug

SEQ ID NO: 262411 - RNA, 24 nt, Human
ugucacccagacuggaacacagug

SEQ ID NO: 262412 - RNA, 23 nt, Human
ugucacccagacuggaaugcagu

SEQ ID NO: 262413 - RNA, 24 nt, Human
ugucacccagacuggaaugcagug

SEQ ID NO: 262414 - RNA, 24 nt, Human
ugucacccagacuggaguacaaug

SEQ ID NO: 262415 - RNA, 22 nt, Human
ugucacccagacuggagugcag

SEQ ID NO: 262416 - RNA, 23 nt, Human
ugucacccagacuggagugcagu

SEQ ID NO: 262417 - RNA, 24 nt, Human
ugucacccagacuggagugcagug

SEQ ID NO: 262418 - RNA, 24 nt, Human
ugucacccagacuggagugcgaug

SEQ ID NO: 262419 - RNA, 24 nt, Human
ugucacccagccuggaauguagug

SEQ ID NO: 262420 - RNA, 24 nt, Human
ugucacccaggauggagugcagug

SEQ ID NO: 262421 - RNA, 23 nt, Human
ugucacccaggcaggagugcagu

SEQ ID NO: 262422 - RNA, 24 nt, Human
ugucacccaggcaggagugcagug

SEQ ID NO: 262423 - RNA, 23 nt, Human
ugucacccaggccggagugcagu

SEQ ID NO: 262424 - RNA, 24 nt, Human
ugucacccaggccggagugcagug

SEQ ID NO: 262425 - RNA, 26 nt, Human
ugucacccaggcgggaguggugcaau

SEQ ID NO: 262426 - RNA, 27 nt, Human
ugucacccaggcgggaguggugcaaug

SEQ ID NO: 262427 - RNA, 32 nt, Human
ugucacccaggcgggaguggugcaauggcuug

SEQ ID NO: 262428 - RNA, 23 nt, Human
ugucacccaggcuagaaugcagu

SEQ ID NO: 262429 - RNA, 24 nt, Human
ugucacccaggcuagaaugcagug

SEQ ID NO: 262430 - RNA, 24 nt, Human
ugucacccaggcuagaggguggug

SEQ ID NO: 262431 - RNA, 23 nt, Human
ugucacccaggcuagaguacagu

SEQ ID NO: 262432 - RNA, 24 nt, Human
ugucacccaggcuagaguacagug

SEQ ID NO: 262433 - RNA, 23 nt, Human
ugucacccaggcuagagugcaau

SEQ ID NO: 262434 - RNA, 24 nt, Human
ugucacccaggcuagagugcaaug

SEQ ID NO: 262435 - RNA, 23 nt, Human
ugucacccaggcuagagugcagu

SEQ ID NO: 262436 - RNA, 24 nt, Human
ugucacccaggcuagagugcagug

SEQ ID NO: 262437 - RNA, 23 nt, Human
ugucacccaggcugaacugcagu

SEQ ID NO: 262438 - RNA, 24 nt, Human
ugucacccaggcugaacugcagug

SEQ ID NO: 262439 - RNA, 23 nt, Human
ugucacccaggcugaagugcagu

SEQ ID NO: 262440 - RNA, 24 nt, Human
ugucacccaggcugaagugcagug

SEQ ID NO: 262441 - RNA, 23 nt, Human
ugucacccaggcugcagugcaau

SEQ ID NO: 262442 - RNA, 24 nt, Human
ugucacccaggcugcagugcaaug

SEQ ID NO: 262443 - RNA, 24 nt, Human
ugucacccaggcugcaguguagug

SEQ ID NO: 262444 - RNA, 24 nt, Human
ugucacccaggcugcaguucacug

SEQ ID NO: 262445 - RNA, 32 nt, Human
ugucacccaggcugcuggaguacaguggcaca

SEQ ID NO: 262446 - RNA, 23 nt, Human
ugucacccaggcuggaauccagu

SEQ ID NO: 262447 - RNA, 24 nt, Human
ugucacccaggcuggaauccagug

SEQ ID NO: 262448 - RNA, 22 nt, Human
ugucacccaggcuggaaugacg

SEQ ID NO: 262449 - RNA, 23 nt, Human
ugucacccaggcuggaaugacga

SEQ ID NO: 262450 - RNA, 23 nt, Human
ugucacccaggcuggaaugcagu

SEQ ID NO: 262451 - RNA, 24 nt, Human
ugucacccaggcuggaaugcagug

SEQ ID NO: 262452 - RNA, 23 nt, Human
ugucacccaggcuggacugcaau

SEQ ID NO: 262453 - RNA, 24 nt, Human
ugucacccaggcuggacugcaaug

SEQ ID NO: 262454 - RNA, 23 nt, Human
ugucacccaggcuggacugcagu

SEQ ID NO: 262455 - RNA, 24 nt, Human
ugucacccaggcuggacugcagug

SEQ ID NO: 262456 - RNA, 23 nt, Human
ugucacccaggcuggagagcagu

SEQ ID NO: 262457 - RNA, 24 nt, Human
ugucacccaggcuggagagcagug

SEQ ID NO: 262458 - RNA, 24 nt, Human
ugucacccaggcuggagcacacug

SEQ ID NO: 262459 - RNA, 23 nt, Human
ugucacccaggcuggagcgcagu

SEQ ID NO: 262460 - RNA, 24 nt, Human
ugucacccaggcuggagcgcagug

SEQ ID NO: 262461 - RNA, 19 nt, Human
ugucacccaggcuggagua

SEQ ID NO: 262462 - RNA, 21 nt, Human
ugucacccaggcuggaguaca

SEQ ID NO: 262463 - RNA, 23 nt, Human
ugucacccaggcuggaguacaau

SEQ ID NO: 262464 - RNA, 24 nt, Human
ugucacccaggcuggaguacaaug

SEQ ID NO: 262465 - RNA, 24 nt, Human
ugucacccaggcuggaguacacug

SEQ ID NO: 262466 - RNA, 23 nt, Human
ugucacccaggcuggaguacagu

SEQ ID NO: 262467 - RNA, 24 nt, Human
ugucacccaggcuggaguacagug

SEQ ID NO: 262468 - RNA, 24 nt, Human
ugucacccaggcuggaguaccggu

SEQ ID NO: 262469 - RNA, 24 nt, Human
ugucacccaggcuggaguauagug

SEQ ID NO: 262470 - RNA, 26 nt, Human
ugucacccaggcuggaguauaguggu

SEQ ID NO: 262471 - RNA, 23 nt, Human
ugucacccaggcuggaguccaau

SEQ ID NO: 262472 - RNA, 24 nt, Human
ugucacccaggcuggaguccaaug

SEQ ID NO: 262473 - RNA, 24 nt, Human
ugucacccaggcuggaguccagug

SEQ ID NO: 262474 - RNA, 23 nt, Human
ugucacccaggcuggagucuagu

SEQ ID NO: 262475 - RNA, 24 nt, Human
ugucacccaggcuggagucuagug

SEQ ID NO: 262476 - RNA, 19 nt, Human
ugucacccaggcuggagug

SEQ ID NO: 262477 - RNA, 23 nt, Human
ugucacccaggcuggagugaggu

SEQ ID NO: 262478 - RNA, 24 nt, Human
ugucacccaggcuggagugaggug

SEQ ID NO: 262479 - RNA, 20 nt, Human
ugucacccaggcuggagugc

SEQ ID NO: 262480 - RNA, 21 nt, Human
ugucacccaggcuggagugca

SEQ ID NO: 262481 - RNA, 23 nt, Human
ugucacccaggcuggagugcaau

SEQ ID NO: 262482 - RNA, 24 nt, Human
ugucacccaggcuggagugcaaug

SEQ ID NO: 262483 - RNA, 24 nt, Human
ugucacccaggcuggagugcacug

SEQ ID NO: 262484 - RNA, 22 nt, Human
ugucacccaggcuggagugcag

SEQ ID NO: 262485 - RNA, 23 nt, Human
ugucacccaggcuggagugcagu

SEQ ID NO: 262486 - RNA, 24 nt, Human
ugucacccaggcuggagugcagug

SEQ ID NO: 262487 - RNA, 32 nt, Human
ugucacccaggcuggagugcaguggcgcaauc

SEQ ID NO: 262488 - RNA, 23 nt, Human
ugucacccaggcuggagugcaug

SEQ ID NO: 262489 - RNA, 24 nt, Human
ugucacccaggcuggagugccaug

SEQ ID NO: 262490 - RNA, 24 nt, Human
ugucacccaggcuggagugccgug

SEQ ID NO: 262491 - RNA, 23 nt, Human
ugucacccaggcuggagugcgau

SEQ ID NO: 262492 - RNA, 24 nt, Human
ugucacccaggcuggagugcgaug

SEQ ID NO: 262493 - RNA, 23 nt, Human
ugucacccaggcuggagugcggu

SEQ ID NO: 262494 - RNA, 24 nt, Human
ugucacccaggcuggagugcggug

SEQ ID NO: 262495 - RNA, 24 nt, Human
ugucacccaggcuggagugcuaug

SEQ ID NO: 262496 - RNA, 23 nt, Human
ugucacccaggcuggagugcugu

SEQ ID NO: 262497 - RNA, 24 nt, Human
ugucacccaggcuggagugcugug

SEQ ID NO: 262498 - RNA, 23 nt, Human
ugucacccaggcuggaguguagu

SEQ ID NO: 262499 - RNA, 24 nt, Human
ugucacccaggcuggaguguagug

SEQ ID NO: 262500 - RNA, 24 nt, Human
ugucacccaggcuggaguuauagu

SEQ ID NO: 262501 - RNA, 23 nt, Human
ugucacccaggcuggaguucagu

SEQ ID NO: 262502 - RNA, 24 nt, Human
ugucacccaggcuggaguucagug

SEQ ID NO: 262503 - RNA, 23 nt, Human
ugucacccaggcuggcgugcaau

SEQ ID NO: 262504 - RNA, 24 nt, Human
ugucacccaggcuggcgugcaaug

SEQ ID NO: 262505 - RNA, 32 nt, Human
ugucacccaggcugggaauugcaguggcacaa

SEQ ID NO: 262506 - RNA, 23 nt, Human
ugucacccaggcugggaugcagu

SEQ ID NO: 262507 - RNA, 24 nt, Human
ugucacccaggcugggaugcagug

SEQ ID NO: 262508 - RNA, 32 nt, Human
ugucacccaggcuggggcgcaauggcacgauc

SEQ ID NO: 262509 - RNA, 24 nt, Human
ugucacccaggcugggguacggug

SEQ ID NO: 262510 - RNA, 23 nt, Human
ugucacccaggcuggggugcagu

SEQ ID NO: 262511 - RNA, 24 nt, Human
ugucacccaggcuggggugcagug

SEQ ID NO: 262512 - RNA, 23 nt, Human
ugucacccaggcuguagugcagu

SEQ ID NO: 262513 - RNA, 24 nt, Human
ugucacccaggcuguagugcagug

SEQ ID NO: 262514 - RNA, 24 nt, Human
ugucacccaggcuguaguggagug

SEQ ID NO: 262515 - RNA, 23 nt, Human
ugucacccaggcuugacuacagu

SEQ ID NO: 262516 - RNA, 23 nt, Human
ugucacccaggcuugagugcagu

SEQ ID NO: 262517 - RNA, 24 nt, Human
ugucacccaggcuugagugcagug

SEQ ID NO: 262518 - RNA, 20 nt, Human
ugucacccagggugagugca

SEQ ID NO: 262519 - RNA, 32 nt, Human
ugugagccugcucaccuucauccugcugcuca

SEQ ID NO: 262520 - RNA, 32 nt, Human
ugugagccugggaggucaaggcugcagugagc

SEQ ID NO: 262521 - RNA, 32 nt, Human
ugugagccuucuagggccccaggcugggaggc

SEQ ID NO: 262522 - RNA, 32 nt, Human
ugugagccuuggcuguuggcagugagugagcc

SEQ ID NO: 262523 - RNA, 32 nt, Human
ugugagcgcuggugggagacgccaggcuggga

SEQ ID NO: 262524 - RNA, 32 nt, Human
ugugagcggcucggggccgggggugggcggcg

SEQ ID NO: 262525 - RNA, 32 nt, Human
ugugagcucucugucuuuuacacgcugaauuu

SEQ ID NO: 262526 - RNA, 32 nt, Human
ugugagcugacaaaugcucuggcuccgguggu

SEQ ID NO: 262527 - RNA, 32 nt, Human
ugugagcugagcgguggggucugcguacgccu

SEQ ID NO: 262528 - RNA, 32 nt, Human
ugugagcugccaguuucauuugucuccugacu

SEQ ID NO: 262529 - RNA, 32 nt, Human
ugugagcugcucccccugaccccuggcaggag

SEQ ID NO: 262530 - RNA, 32 nt, Human
ugugagcugcugccucuauccugggugccugc

SEQ ID NO: 262531 - RNA, 32 nt, Human
ugugagcuggagagagaaaaggugguaacugg

SEQ ID NO: 262532 - RNA, 32 nt, Human
ugugagcuggcgcguuuucuccacccggcucc

SEQ ID NO: 262533 - RNA, 23 nt, Human
ugugagcugggacaugccuguga

SEQ ID NO: 262534 - RNA, 32 nt, Human
ugugagcuguggugugagagggugaaggcggc

SEQ ID NO: 262535 - RNA, 32 nt, Human
ugugaggaaagaaaaguaaaacagaaaaagac

SEQ ID NO: 262536 - RNA, 32 nt, Human
ugugaggacacauagagcaugccaucuaugag

SEQ ID NO: 262537 - RNA, 32 nt, Human
ugugaggacacggccuccuguuggagucccau

SEQ ID NO: 262538 - RNA, 32 nt, Human
ugugaggacagcuucagccaggaggcugugag

SEQ ID NO: 262539 - RNA, 32 nt, Human
ugugaggacggcuuccagcagggagcuucccc

SEQ ID NO: 262540 - RNA, 32 nt, Human
ugugaggagaggguggcaucaggagcugcuca

SEQ ID NO: 262541 - RNA, 32 nt, Human
ugugaggagcaagaaagccaguucaaguccca

SEQ ID NO: 262542 - RNA, 32 nt, Human
ugugaggagcuggaguggaagcugcaccuuug

SEQ ID NO: 262543 - RNA, 28 nt, Human
ugugaggaggcuggggccaguugacacc

SEQ ID NO: 262544 - RNA, 19 nt, Human
ugugaggagggcgugggga

SEQ ID NO: 262545 - RNA, 32 nt, Human
ugugaggagguagauuuggcuccucugcuucu

SEQ ID NO: 262546 - RNA, 32 nt, Human
ugugaggaucagcuuguuagccugcagauucc

SEQ ID NO: 262547 - RNA, 32 nt, Human
ugugaggaugaaauaaugaccuugauuuuugg

SEQ ID NO: 262548 - RNA, 32 nt, Human
ugugaggccacuaccccuccagcaacugggag

SEQ ID NO: 262549 - RNA, 32 nt, Human
ugugaggccaggaguuccagaucagccugagc

SEQ ID NO: 262550 - RNA, 32 nt, Human
ugugaggccucuuccccggccauguggaacuc

SEQ ID NO: 262551 - RNA, 32 nt, Human
ugugaggccuggccugggcccagaugcugauc

SEQ ID NO: 262552 - RNA, 31 nt, Human
ugugaggcugcgagagaaagggagugcaugu

SEQ ID NO: 262553 - RNA, 32 nt, Human
ugugaggcugcgagagaaagggagugcaugug

SEQ ID NO: 262554 - RNA, 32 nt, Human
ugugaggcugggaugacaagccuggggccugg

SEQ ID NO: 262555 - RNA, 23 nt, Human
ugugaggcugggcagcccuucac

SEQ ID NO: 262556 - RNA, 19 nt, Human
ugugagggagagacgggga

SEQ ID NO: 262557 - RNA, 32 nt, Human
ugugagggagagugugcaugagcgugugugug

SEQ ID NO: 262558 - RNA, 32 nt, Human
ugugagggcaccccuccucugaagaucccugu

SEQ ID NO: 262559 - RNA, 32 nt, Human
ugugagggcccaggaaugagcaaggcaugguc

SEQ ID NO: 262560 - RNA, 32 nt, Human
ugugaggggaaaggggaaauaaaucuagcaua

SEQ ID NO: 262561 - RNA, 32 nt, Human
ugugaggggagguggaggagauggcggcgacg

SEQ ID NO: 262562 - RNA, 32 nt, Human
ugugaggggagguguaggugugugggugacug

SEQ ID NO: 262563 - RNA, 32 nt, Human
ugugaggggugcagcagccaggaggcgggcgg

SEQ ID NO: 262564 - RNA, 32 nt, Human
ugugagggguuucuuuuggaaauaauuacuuu

SEQ ID NO: 262565 - RNA, 32 nt, Human
ugugagggugccugaggcugaauggcuccacc

SEQ ID NO: 262566 - RNA, 32 nt, Human
ugugagguagguggcauggcagagggggcugg

SEQ ID NO: 262567 - RNA, 22 nt, Human
ugugaggucagccacuggguca

SEQ ID NO: 262568 - RNA, 32 nt, Human
ugugaggugaaugcacacaucacaaagaaguu

SEQ ID NO: 262569 - RNA, 32 nt, Human
ugugaggugcccaaagagguuauagugaaguu

SEQ ID NO: 262570 - RNA, 32 nt, Human
ugugaggugcugcugucucuccuccagcaagg

SEQ ID NO: 262571 - RNA, 32 nt, Human
ugugaggugcugugaggauagagcagagagga

SEQ ID NO: 262572 - RNA, 32 nt, Human
ugugaggugggaugagccgcagcccuuuccug

SEQ ID NO: 262573 - RNA, 32 nt, Human
ugugagguggguggggcagggcuguagcccac

SEQ ID NO: 262574 - RNA, 32 nt, Human
ugugaggugucagugugcaccugcuggagggu

SEQ ID NO: 262575 - RNA, 32 nt, Human
ugugaguaccagcagcccuggagagcagcagg

SEQ ID NO: 262576 - RNA, 32 nt, Human
ugugaguacuacaguccucccaucucacacau

SEQ ID NO: 262577 - RNA, 32 nt, Human
ugugaguagaauauguagcaaagcuuuuuagg

SEQ ID NO: 262578 - RNA, 32 nt, Human
ugugaguagagaaggacccaggucaucugagu

SEQ ID NO: 262579 - RNA, 32 nt, Human
ugugagucuuccagcuuucuucugcuuuuuca

SEQ ID NO: 262580 - RNA, 19 nt, Human
ugugagucuugccggaagc

SEQ ID NO: 262581 - RNA, 32 nt, Human
ugugagucuuucucagaauugauaucuuaaua

SEQ ID NO: 262582 - RNA, 32 nt, Human
ugugagugcaucauuuuaagacaguaugacuu

SEQ ID NO: 262583 - RNA, 32 nt, Human
ugugagugcauguacuaucuuaucucagauau

SEQ ID NO: 262584 - RNA, 32 nt, Human
ugugaguggaaagaaggcuggugcagacccag

SEQ ID NO: 262585 - RNA, 32 nt, Human
ugugaguggauucacccccaaggucagaaugg

SEQ ID NO: 262586 - RNA, 32 nt, Human
ugugaguggcuaccuggcucaacuggagggga

SEQ ID NO: 262587 - RNA, 32 nt, Human
ugugagugggaggcggcggcgcugguggcugc

SEQ ID NO: 262588 - RNA, 32 nt, Human
ugugagugucuuggcccugucccugcccuggg

SEQ ID NO: 262589 - RNA, 32 nt, Human
ugugaguguguuuucugugcugaguagaauag

SEQ ID NO: 262590 - RNA, 32 nt, Human
ugugaguugaaugcacacaucacaaagaacuu

SEQ ID NO: 262591 - RNA, 32 nt, Human
ugugaguugaaugcacacaucacaaagaaguu

SEQ ID NO: 262592 - RNA, 32 nt, Human
ugugaguugcugucugccccuugucaggcugu

SEQ ID NO: 262593 - RNA, 32 nt, Human
ugugaguugggaaucagacucuugaguugaca

SEQ ID NO: 262594 - RNA, 32 nt, Human
ugugaguuugucugauguucuaccacaacgug

SEQ ID NO: 262595 - RNA, 32 nt, Human
ugugaguuuguuguuuuucuguguaugggccu

SEQ ID NO: 262596 - RNA, 32 nt, Human
ugugaguuuuccuuuuggugcauggaacugug

SEQ ID NO: 262597 - RNA, 32 nt, Human
ugugaguuuuguguguacacacacagaaacau

SEQ ID NO: 262598 - RNA, 32 nt, Human
ugugauaaaaacaagcucaggacuuuauucua

SEQ ID NO: 262599 - RNA, 32 nt, Human
ugugauaaaaaucaaugacaucaugucucacu

SEQ ID NO: 262600 - RNA, 32 nt, Human
ugugauaaaacacagaauuuacauauacacug

SEQ ID NO: 262601 - RNA, 32 nt, Human
ugugauaaaauguaauuucaacuauuuuguac

SEQ ID NO: 262602 - RNA, 20 nt, Human
ugugauaaccaccauggaua

SEQ ID NO: 262603 - RNA, 32 nt, Human
ugugauaacuuaggaggcagcaauccuaauag

SEQ ID NO: 262604 - RNA, 20 nt, Human
ugugauaagauacccuccac

SEQ ID NO: 262605 - RNA, 21 nt, Human
ugugauaagcagaacuagaaa

SEQ ID NO: 262606 - RNA, 32 nt, Human
ugugauacaguuaucuaaacagaaugagucua

SEQ ID NO: 262607 - RNA, 32 nt, Human
ugugauacaucagguuucagcacacaacuuac

SEQ ID NO: 262608 - RNA, 32 nt, Human
ugugauagagggcuagaguuugaccuagagag

SEQ ID NO: 262609 - RNA, 32 nt, Human
ugugauagcaccacugcgcuccagccugggug

SEQ ID NO: 262610 - RNA, 32 nt, Human
ugugauaggguuaagagguggggccuuuagaa

SEQ ID NO: 262611 - RNA, 32 nt, Human
ugugauagugucuacuuugagcuagauaaaua

SEQ ID NO: 262612 - RNA, 32 nt, Human
ugugauauagcuaguucccaaagugauuguac

SEQ ID NO: 262613 - RNA, 21 nt, Human
ugugauaucaaaaauguauga

SEQ ID NO: 262614 - RNA, 32 nt, Human
ugugauaugaagacuauccaguucucaguuug

SEQ ID NO: 262615 - RNA, 32 nt, Human
ugugauauuuugcuuuugcaccuuuaaaacaa

SEQ ID NO: 262616 - RNA, 32 nt, Human
ugugaucaagaagguucugaccagcuucugca

SEQ ID NO: 262617 - RNA, 32 nt, Human
ugugaucacaccaccacacuccaaccugugua

SEQ ID NO: 262618 - RNA, 32 nt, Human
ugugaucacaccacugcacuccagccuggacg

SEQ ID NO: 262619 - RNA, 32 nt, Human
ugugaucacaccacugcacuccagccugggca

SEQ ID NO: 262620 - RNA, 32 nt, Human
ugugaucacaccacugcacuccagccugggug

SEQ ID NO: 262621 - RNA, 32 nt, Human
ugugaucacaccacugcacuccagccuuggcg

SEQ ID NO: 262622 - RNA, 32 nt, Human
ugugaucacaccacugcauucuggccugggug

SEQ ID NO: 262623 - RNA, 32 nt, Human
ugugaucacaccauugcaguccagccagguug

SEQ ID NO: 262624 - RNA, 32 nt, Human
ugugaucacacugcugcacuccagccugugca

SEQ ID NO: 262625 - RNA, 32 nt, Human
ugugaucaccucccccugcuuccugcugcugu

SEQ ID NO: 262626 - RNA, 32 nt, Human
ugugaucacgccacugcaccccagccugggug

SEQ ID NO: 262627 - RNA, 32 nt, Human
ugugaucagccugucaugguucugagcccuga

SEQ ID NO: 262628 - RNA, 23 nt, Human
ugugaucauaacugugaucuccu

SEQ ID NO: 262629 - RNA, 32 nt, Human
ugugaucauaccacugcacuccagccugggcg

SEQ ID NO: 262630 - RNA, 21 nt, Human
ugugaucauagaauacugcca

SEQ ID NO: 262631 - RNA, 32 nt, Human
ugugaucauagcucacugcagcuuugacuucc

SEQ ID NO: 262632 - RNA, 32 nt, Human
ugugaucauagcucauagcucacugcagccuc

SEQ ID NO: 262633 - RNA, 32 nt, Human
ugugaucauccagcaugaugcagcgugaggac

SEQ ID NO: 262634 - RNA, 32 nt, Human
ugugaucaugccaccgcacuuccagccugggu

SEQ ID NO: 262635 - RNA, 32 nt, Human
ugugaucaugccacugcacuccagccuggaug

SEQ ID NO: 262636 - RNA, 32 nt, Human
ugugaucaugccacugcacuuccagccugggu

SEQ ID NO: 262637 - RNA, 32 nt, Human
ugugaucaugccacugcauuccagccugggcg

SEQ ID NO: 262638 - RNA, 32 nt, Human
ugugaucaugccacuguacuccagccugggcg

SEQ ID NO: 262639 - RNA, 32 nt, Human
ugugaucaugccaucacaccgcugccuuguga

SEQ ID NO: 262640 - RNA, 32 nt, Human
ugugaucaugcuacugcacuccagccuaggug

SEQ ID NO: 262641 - RNA, 32 nt, Human
ugugaucauggcacugcacuccagccugggca

SEQ ID NO: 262642 - RNA, 32 nt, Human
ugugaucauugguuggacacugugguuaugca

SEQ ID NO: 262643 - RNA, 32 nt, Human
ugugauccagagagcagugggagacgcuggca

SEQ ID NO: 262644 - RNA, 32 nt, Human
ugugauccagugcccuauuuuauagugugguu

SEQ ID NO: 262645 - RNA, 20 nt, Human
ugugaucccagcuaccuggg

SEQ ID NO: 262646 - RNA, 32 nt, Human
ugugauccgccagccucggccucccaaagugc

SEQ ID NO: 262647 - RNA, 32 nt, Human
ugugauccgccauuacacuccagccuggguga

SEQ ID NO: 262648 - RNA, 21 nt, Human
ugugauccuaauccaccuggg

SEQ ID NO: 262649 - RNA, 26 nt, Human
ugugauccuggacccaagggcuuggg

SEQ ID NO: 262650 - RNA, 21 nt, Human
ugugauccugggagcccuggg

SEQ ID NO: 262651 - RNA, 32 nt, Human
ugugaucgcaccacugcacuccagcucgggug

SEQ ID NO: 262652 - RNA, 32 nt, Human
ugugaucgcaccacugcacuccagcuugguuc

SEQ ID NO: 262653 - RNA, 32 nt, Human
ugugaucgcaccacuguacuccagccugggug

SEQ ID NO: 262654 - RNA, 32 nt, Human
ugugaucgcaccacuguauuccagccuggaug

SEQ ID NO: 262655 - RNA, 32 nt, Human
ugugaucgugacauggccuccagccuggguga

SEQ ID NO: 262656 - RNA, 32 nt, Human
ugugaucgugccacugcacuccaaccugagug

SEQ ID NO: 262657 - RNA, 32 nt, Human
ugugaucgugccacugcauuccagccugggag

SEQ ID NO: 262658 - RNA, 32 nt, Human
ugugaucgugccacuguacucuagccuggaag

SEQ ID NO: 262659 - RNA, 32 nt, Human
ugugaucucaacagcacccaguguguuccccu

SEQ ID NO: 262660 - RNA, 32 nt, Human
ugugaucucacauugucuuugaaaguguggau

SEQ ID NO: 262661 - RNA, 32 nt, Human
ugugaucucugcguuucucuucuacacugcug

SEQ ID NO: 262662 - RNA, 32 nt, Human
ugugaucugacagaacccagcacauaaaagaa

SEQ ID NO: 262663 - RNA, 32 nt, Human
ugugaucugacuccugcagacucuuccagauu

SEQ ID NO: 262664 - RNA, 32 nt, Human
ugugaucugccucuugcugccauucuuucucu

SEQ ID NO: 262665 - RNA, 32 nt, Human
ugugaucugccuggaucuugcugcauugagaa

SEQ ID NO: 262666 - RNA, 32 nt, Human
ugugaucugccuggggcucaugcucuggggca

SEQ ID NO: 262667 - RNA, 32 nt, Human
ugugaucuguaacaggguagugugguauugua

SEQ ID NO: 262668 - RNA, 32 nt, Human
ugugaucuugaacaagaggcccaaucucacuu

SEQ ID NO: 262669 - RNA, 32 nt, Human
ugugaucuugggcaaguuacaagccuugauca

SEQ ID NO: 262670 - RNA, 24 nt, Human
ugugaugaagaagcuguuccccac

SEQ ID NO: 262671 - RNA, 32 nt, Human
ugugaugaauacuguauuuuguauuguuucaa

SEQ ID NO: 262672 - RNA, 32 nt, Human
ugugaugaauugaaccucaucggaugcugcug

SEQ ID NO: 262673 - RNA, 32 nt, Human
ugugaugacaccacugcacuccaaccuaggua

SEQ ID NO: 262674 - RNA, 32 nt, Human
ugugaugacagcugggacaugaaggauguggc

SEQ ID NO: 262675 - RNA, 32 nt, Human
ugugaugagcuuccaggucgcuggccuuacca

SEQ ID NO: 262676 - RNA, 32 nt, Human
ugugaugaggagagaguggaagaagcaaaacu

SEQ ID NO: 262677 - RNA, 29 nt, Human
ugugaugaggcugaaagaggaugaguggg

SEQ ID NO: 262678 - RNA, 29 nt, Human
ugugaugagggcccugggccagaacccua

SEQ ID NO: 262679 - RNA, 32 nt, Human
ugugaugaucaugguucacugcagccucgacc

SEQ ID NO: 262680 - RNA, 32 nt, Human
ugugaugcagagaccagagagugaaggcccgg

SEQ ID NO: 262681 - RNA, 32 nt, Human
ugugaugcagucagaggcaccugcggguuagc

SEQ ID NO: 262682 - RNA, 32 nt, Human
ugugaugccaacaaacauugagaaagguaauc

SEQ ID NO: 262683 - RNA, 32 nt, Human
ugugaugccauccugagggcuugcaaccagca

SEQ ID NO: 262684 - RNA, 32 nt, Human
ugugaugccgaggguggagugcaguggcacaa

SEQ ID NO: 262685 - RNA, 31 nt, Human
ugugaugcucucuucugacagccaaagauga

SEQ ID NO: 262686 - RNA, 32 nt, Human
ugugaugcugaagcagagugugucacaaagug

SEQ ID NO: 262687 - RNA, 32 nt, Human
ugugaugcugagauuugggguaugaaugaaag

SEQ ID NO: 262688 - RNA, 32 nt, Human
ugugaugcugagauuugggguaugaaugaagg

SEQ ID NO: 262689 - RNA, 32 nt, Human
ugugaugcugcugguuuuaucucuagugaaau

SEQ ID NO: 262690 - RNA, 32 nt, Human
ugugaugcuggcagaggugacacuaagaggga

SEQ ID NO: 262691 - RNA, 28 nt, Human
ugugauggaagagcugccucaucacgua

SEQ ID NO: 262692 - RNA, 32 nt, Human
ugugauggaagagcugccucaucacguagcag

SEQ ID NO: 262693 - RNA, 32 nt, Human
ugugauggacccaggaggucucugcagagcaa

SEQ ID NO: 262694 - RNA, 31 nt, Human
ugugauggagaucacccaaugccaagggcag

SEQ ID NO: 262695 - RNA, 32 nt, Human
ugugauggagauccacaagccuagccaagcuu

SEQ ID NO: 262696 - RNA, 32 nt, Human
ugugauggagucucacucuguugcccaggcug

SEQ ID NO: 262697 - RNA, 32 nt, Human
ugugauggagucucgcucugucacccaggcug

SEQ ID NO: 262698 - RNA, 32 nt, Human
ugugauggcacauaccuguaaucccagcuacu

SEQ ID NO: 262699 - RNA, 32 nt, Human
ugugauggcacaugccuguaaucccagcuacu

SEQ ID NO: 262700 - RNA, 29 nt, Human
ugugauggccaagaguucacagaggaagc

SEQ ID NO: 262701 - RNA, 32 nt, Human
ugugauggcgcaugccuguaaucccagcuacu

SEQ ID NO: 262702 - RNA, 32 nt, Human
ugugauggcgcaugccuguaaucccaguuacu

SEQ ID NO: 262703 - RNA, 32 nt, Human
ugugauggcgccacugcacuccagucugggca

SEQ ID NO: 262704 - RNA, 32 nt, Human
ugugauggcucacacccguaaucccagcacuu

SEQ ID NO: 262705 - RNA, 32 nt, Human
ugugauggcucacaccuguaauccccagcacu

SEQ ID NO: 262706 - RNA, 32 nt, Human
ugugauggcucacgccuguaaucccagcauuu

SEQ ID NO: 262707 - RNA, 32 nt, Human
ugugauggcucacgccuguaauccuagcacuu

SEQ ID NO: 262708 - RNA, 32 nt, Human
ugugauggcucaugcccauaaucccagcccuu

SEQ ID NO: 262709 - RNA, 32 nt, Human
ugugauggcucaugccuguaaucccagcacuu

SEQ ID NO: 262710 - RNA, 32 nt, Human
ugugaugggauccuuggcucuggcaggcgucc

SEQ ID NO: 262711 - RNA, 32 nt, Human
ugugaugggcacaguacgcagagcaagcucgg

SEQ ID NO: 262712 - RNA, 32 nt, Human
ugugauggggugaggguagggggagcauuugu

SEQ ID NO: 262713 - RNA, 32 nt, Human
ugugaugggguuucgcacuuguugcccaggcu

SEQ ID NO: 262714 - RNA, 32 nt, Human
ugugaugggguuuugcucuuguugcccaggcu

SEQ ID NO: 262715 - RNA, 32 nt, Human
ugugaugguauguuguccaucuucccauccca

SEQ ID NO: 262716 - RNA, 32 nt, Human
ugugauggugcaugccuguaaucccagcuccu

SEQ ID NO: 262717 - RNA, 29 nt, Human
ugugauggugccucuuccauucacaaggg

SEQ ID NO: 262718 - RNA, 32 nt, Human
ugugauggugggugccuguaaucccaguuacu

SEQ ID NO: 262719 - RNA, 32 nt, Human
ugugaugguguuaggagagggggccuuugggg

SEQ ID NO: 262720 - RNA, 32 nt, Human
ugugaugucuacaucuuuuaacuucugguucu

SEQ ID NO: 262721 - RNA, 32 nt, Human
ugugauguggguccugccagggagacauccag

SEQ ID NO: 262722 - RNA, 32 nt, Human
ugugaugugggugggggaggaagaguaaacac

SEQ ID NO: 262723 - RNA, 20 nt, Human
ugugauguguugcucuccau

SEQ ID NO: 262724 - RNA, 32 nt, Human
ugugauguucccaccugcuucuguagaaaugu

SEQ ID NO: 262725 - RNA, 32 nt, Human
ugugauguugcccaggcuagagugcaguggca

SEQ ID NO: 262726 - RNA, 32 nt, Human
ugugauguuuaugauggcuuaggcuuugugaa

SEQ ID NO: 262727 - RNA, 32 nt, Human
ugugauguuuucaggaugcuagggucaaagaa

SEQ ID NO: 262728 - RNA, 32 nt, Human
ugugauuaccugcugcaugaaaaguggcaugg

SEQ ID NO: 262729 - RNA, 32 nt, Human
ugugauuauaucuguaucaggucagcagaaga

SEQ ID NO: 262730 - RNA, 32 nt, Human
ugugauuaugccauugcacuccagccugggug

SEQ ID NO: 262731 - RNA, 32 nt, Human
ugugauuauuuaugcugccucccaaggauaga

SEQ ID NO: 262732 - RNA, 32 nt, Human
ugugauuauuugaugcaccugggaggccaugu

SEQ ID NO: 262733 - RNA, 32 nt, Human
ugugauucaaugcucauaccucucuaaacuua

SEQ ID NO: 262734 - RNA, 32 nt, Human
ugugauucacacagcuucacaccuuucagugu

SEQ ID NO: 262735 - RNA, 32 nt, Human
ugugauucacccagaucuguugugccaguuag

SEQ ID NO: 262736 - RNA, 32 nt, Human
ugugauucacugccuuccucucucuaccaguc

SEQ ID NO: 262737 - RNA, 32 nt, Human
ugugauucacuugccucagccucccagaagug

SEQ ID NO: 262738 - RNA, 32 nt, Human
ugugauucucuucaggaagucagaccuucccu

SEQ ID NO: 262739 - RNA, 21 nt, Human
ugugauugaaagcugccuuuc

SEQ ID NO: 262740 - RNA, 32 nt, Human
ugugauugaacaaaucaaugcucgcaugcaaa

SEQ ID NO: 262741 - RNA, 32 nt, Human
ugugauugaaucugauuggacauuuucuucag

SEQ ID NO: 262742 - RNA, 32 nt, Human
ugugauugacauguagguacccugccacggcc

SEQ ID NO: 262743 - RNA, 32 nt, Human
ugugauugacuucuagcucacugccuuuaaau

SEQ ID NO: 262744 - RNA, 32 nt, Human
ugugauugagccacugcacuccaaucugggug

SEQ ID NO: 262745 - RNA, 32 nt, Human
ugugauugaguugaagaucugcagugagaggg

SEQ ID NO: 262746 - RNA, 32 nt, Human
ugugauugaugucugacgugagucugucucag

SEQ ID NO: 262747 - RNA, 32 nt, Human
ugugauugcaccaccacacuccagccugggug

SEQ ID NO: 262748 - RNA, 32 nt, Human
ugugauugcaccacugcacucaagccugggca

SEQ ID NO: 262749 - RNA, 32 nt, Human
ugugauugcaccacugcacuccagccugggcg

SEQ ID NO: 262750 - RNA, 32 nt, Human
ugugauugcaccacugcacuucagcuugggca

SEQ ID NO: 262751 - RNA, 32 nt, Human
ugugauugcaccacugcacuuuagucugggug

SEQ ID NO: 262752 - RNA, 32 nt, Human
ugugauugcaccacuguacuccagacuggaua

SEQ ID NO: 262753 - RNA, 32 nt, Human
ugugauugcaccacuuguaacuccagccuggg

SEQ ID NO: 262754 - RNA, 32 nt, Human
ugugauugcaccgugacacuccagccugggca

SEQ ID NO: 262755 - RNA, 32 nt, Human
ugugauugcacgacugcacuccagccugggca

SEQ ID NO: 262756 - RNA, 32 nt, Human
ugugauugcacuccagcccaggggacaaugug

SEQ ID NO: 262757 - RNA, 32 nt, Human
ugugauugcgccacugcauuccagcuugggcg

SEQ ID NO: 262758 - RNA, 32 nt, Human
ugugauugcucccuccuguguggacguugccu

SEQ ID NO: 262759 - RNA, 32 nt, Human
ugugauuggguuccugcuggccuguguggcaa

SEQ ID NO: 262760 - RNA, 32 nt, Human
ugugauuguaaguuuucugaggccucgccagc

SEQ ID NO: 262761 - RNA, 32 nt, Human
ugugauuguaccacugcacuccagcucgggga

SEQ ID NO: 262762 - RNA, 32 nt, Human
ugugauugugccacugcacuccagccugggca

SEQ ID NO: 262763 - RNA, 32 nt, Human
ugugauugugccacugcacuccagccugggcc

SEQ ID NO: 262764 - RNA, 32 nt, Human
ugugauugugccacugcacuccagccuggguu

SEQ ID NO: 262765 - RNA, 32 nt, Human
ugugauugugccauugcacuccagccuggaca

SEQ ID NO: 262766 - RNA, 32 nt, Human
ugugauugugccauugcacuccagccugggug

SEQ ID NO: 262767 - RNA, 32 nt, Human
ugugauugugugacaaguguguuuacagauua

SEQ ID NO: 262768 - RNA, 32 nt, Human
ugugauuuacagugggaaugaaagaacagauu

SEQ ID NO: 262769 - RNA, 32 nt, Human
ugugauuuaggagguggagcagauucuaguac

SEQ ID NO: 262770 - RNA, 32 nt, Human
ugugauuuauuuucucccuuucuuuuuggacu

SEQ ID NO: 262771 - RNA, 32 nt, Human
ugugauuucagcuccugucaccucaugcaagg

SEQ ID NO: 262772 - RNA, 32 nt, Human
ugugauuucuacccauuuccugaggccugugg

SEQ ID NO: 262773 - RNA, 32 nt, Human
ugugauuucugagagaaggcucuauuuucgug

SEQ ID NO: 262774 - RNA, 32 nt, Human
ugugauuucuguaccuucuuccuccugccccu

SEQ ID NO: 262775 - RNA, 31 nt, Human
ugugauuucuuucucccugagacccauaagg

SEQ ID NO: 262776 - RNA, 32 nt, Human
ugugauuugcagaguccaugagacaggaacac

SEQ ID NO: 262777 - RNA, 32 nt, Human
ugugauuuguuucugcccucuguguuuccugu

SEQ ID NO: 262778 - RNA, 26 nt, Human
ugugauuuucucuaauguaacuuccu

SEQ ID NO: 262779 - RNA, 21 nt, Human
ugugauuuucuuacaugagua

SEQ ID NO: 262780 - RNA, 32 nt, Human
ugugauuuuuagaauagacuccuggguuguuu

SEQ ID NO: 262781 - RNA, 32 nt, Human
ugugcaaaagccuuggacuuggcugugaucuu

SEQ ID NO: 262782 - RNA, 32 nt, Human
ugugcaaacauguacagaagaaauagaauaca

SEQ ID NO: 262783 - RNA, 24 nt, Human
ugugcaaagggcuuagcuaaguua

SEQ ID NO: 262784 - RNA, 32 nt, Human
ugugcaaauuccacuuuccaucaugcaggaaa

SEQ ID NO: 262785 - RNA, 32 nt, Human
ugugcaacuguagaaacccuccagaaauuucc

SEQ ID NO: 262786 - RNA, 32 nt, Human
ugugcaagaaacagccugccagucugucauug

SEQ ID NO: 262787 - RNA, 32 nt, Human
ugugcaagagucuguuacaaagcuugcugugc

SEQ ID NO: 262788 - RNA, 32 nt, Human
ugugcaagauaaaagcagccugggucacccag

SEQ ID NO: 262789 - RNA, 32 nt, Human
ugugcaagauagaguguguuucauuuguucug

SEQ ID NO: 262790 - RNA, 32 nt, Human
ugugcaaguaagcaucuuacaacuggcucuuc

SEQ ID NO: 262791 - RNA, 32 nt, Human
ugugcaagucaggcccuucuggaacacagcag

SEQ ID NO: 262792 - RNA, 32 nt, Human
ugugcaagucauaccuccccauuuaugucugg

SEQ ID NO: 262793 - RNA, 32 nt, Human
ugugcaaucaaaacaaaaggcagaauagaaug

SEQ ID NO: 262794 - RNA, 32 nt, Human
ugugcaaugaagucugcaggccugaggaccau

SEQ ID NO: 262795 - RNA, 32 nt, Human
ugugcacaaaggaagggcccuggguagggguc

SEQ ID NO: 262796 - RNA, 32 nt, Human
ugugcacacagcugcauccuucugcccucccc

SEQ ID NO: 262797 - RNA, 32 nt, Human
ugugcacacauacucucaggucacauaaacac

SEQ ID NO: 262798 - RNA, 32 nt, Human
ugugcacacaugcacaguugcacagacacaca

SEQ ID NO: 262799 - RNA, 32 nt, Human
ugugcacacaugggugggagggaagaggggca

SEQ ID NO: 262800 - RNA, 32 nt, Human
ugugcacaccacccucggccgucauccuggag

SEQ ID NO: 262801 - RNA, 32 nt, Human
ugugcacagagcagugcuagucgggcuugggg

SEQ ID NO: 262802 - RNA, 32 nt, Human
ugugcacagaggcuguagcccagaggacauau

SEQ ID NO: 262803 - RNA, 32 nt, Human
ugugcacagaguucuuggggcagcucuggggg

SEQ ID NO: 262804 - RNA, 32 nt, Human
ugugcacagcccacccacuuuccucugcuucc

SEQ ID NO: 262805 - RNA, 32 nt, Human
ugugcacaggcagagcccgugagaggucaccc

SEQ ID NO: 262806 - RNA, 32 nt, Human
ugugcacaguggcuggaccccaugcucauucg

SEQ ID NO: 262807 - RNA, 32 nt, Human
ugugcacauaugcauauauuuuguguucauuc

SEQ ID NO: 262808 - RNA, 32 nt, Human
ugugcacaugauacaaaauauguucccguaca

SEQ ID NO: 262809 - RNA, 20 nt, Human
ugugcacaugcacacacaug

SEQ ID NO: 262810 - RNA, 32 nt, Human
ugugcacauggacugaaucacauagauucucc

SEQ ID NO: 262811 - RNA, 32 nt, Human
ugugcaccacauacccaggauguuugugggaa

SEQ ID NO: 262812 - RNA, 32 nt, Human
ugugcaccaguauguaccugcaggcaucaggg

SEQ ID NO: 262813 - RNA, 32 nt, Human
ugugcaccaguauguaccugcaggcauggggg

SEQ ID NO: 262814 - RNA, 32 nt, Human
ugugcaccccucccaccucugccucaguuuac

SEQ ID NO: 262815 - RNA, 32 nt, Human
ugugcaccccuccccauucacagagccuuuuu

SEQ ID NO: 262816 - RNA, 32 nt, Human
ugugcacccgggcuggagaaggcaggagguau

SEQ ID NO: 262817 - RNA, 32 nt, Human
ugugcacccuucucccuccagccugggcuacu

SEQ ID NO: 262818 - RNA, 32 nt, Human
ugugcaccuaaaggaggcgcaucuggggacgg

SEQ ID NO: 262819 - RNA, 32 nt, Human
ugugcaccuccccucuugcacuuucucuccag

SEQ ID NO: 262820 - RNA, 32 nt, Human
ugugcaccuguaaucccagcuacucuggaggc

SEQ ID NO: 262821 - RNA, 32 nt, Human
ugugcaccuguaaucccagcuacucuggaggg

SEQ ID NO: 262822 - RNA, 32 nt, Human
ugugcaccuguaaucccagcuacuugggaggc

SEQ ID NO: 262823 - RNA, 32 nt, Human
ugugcaccuguaauccccgcuacucuggaguc

SEQ ID NO: 262824 - RNA, 32 nt, Human
ugugcaccuguaguucuagcuacuagggaggc

SEQ ID NO: 262825 - RNA, 32 nt, Human
ugugcaccugugauccuagcuacuugggaggc

SEQ ID NO: 262826 - RNA, 32 nt, Human
ugugcaccuguggucccagcucccagggccgg

SEQ ID NO: 262827 - RNA, 32 nt, Human
ugugcaccuuucucccaccucucccuuucucc

SEQ ID NO: 262828 - RNA, 32 nt, Human
ugugcacuaccauagcuacaucaguuugauac

SEQ ID NO: 262829 - RNA, 32 nt, Human
ugugcacuagcucuuuuuaaauuccaugcuac

SEQ ID NO: 262830 - RNA, 32 nt, Human
ugugcacuccauccucauguauccuuuuucac

SEQ ID NO: 262831 - RNA, 32 nt, Human
ugugcacugcaagcugugucuacucaggcccc

SEQ ID NO: 262832 - RNA, 32 nt, Human
ugugcacugcacaucugucucuucccagcucc

SEQ ID NO: 262833 - RNA, 32 nt, Human
ugugcacugcacucuagccugggggaagagug

SEQ ID NO: 262834 - RNA, 32 nt, Human
ugugcacugggguggagcuucgggaaguggcg

SEQ ID NO: 262835 - RNA, 32 nt, Human
ugugcagaaagcccagacuaaggaacaggcug

SEQ ID NO: 262836 - RNA, 32 nt, Human
ugugcagaaguuagaagggucuggcgggggca

SEQ ID NO: 262837 - RNA, 32 nt, Human
ugugcagaaugagaggagagagggaaggcagg

SEQ ID NO: 262838 - RNA, 32 nt, Human
ugugcagaccccugcccugccgcugcagaaau

SEQ ID NO: 262839 - RNA, 32 nt, Human
ugugcagagagcaccaauuuuccuucaauauc

SEQ ID NO: 262840 - RNA, 32 nt, Human
ugugcagagagggaaggaaaagugccauguca

SEQ ID NO: 262841 - RNA, 32 nt, Human
ugugcagagccauagucccacuguggguccug

SEQ ID NO: 262842 - RNA, 32 nt, Human
ugugcagaggaagcucucagauagcagacuuc

SEQ ID NO: 262843 - RNA, 32 nt, Human
ugugcagaggaugggcuggaggacucuggaug

SEQ ID NO: 262844 - RNA, 32 nt, Human
ugugcagaggcagagggugaccgggagcagug

SEQ ID NO: 262845 - RNA, 32 nt, Human
ugugcagaggcagaguguguacugcucggagc

SEQ ID NO: 262846 - RNA, 32 nt, Human
ugugcagauccagcauggaggccacccucagg

SEQ ID NO: 262847 - RNA, 32 nt, Human
ugugcagauggcugugcacaccuggcccggga

SEQ ID NO: 262848 - RNA, 32 nt, Human
ugugcagcagaggccguguuuuucaugccaaa

SEQ ID NO: 262849 - RNA, 32 nt, Human
ugugcagccaaggacacacagcaaguuagugg

SEQ ID NO: 262850 - RNA, 32 nt, Human
ugugcagccacuguuaagccauguguuccaag

SEQ ID NO: 262851 - RNA, 32 nt, Human
ugugcagcccaggaccuaggcgcgguagcugg

SEQ ID NO: 262852 - RNA, 20 nt, Human
ugugcagccucuggugugca

SEQ ID NO: 262853 - RNA, 32 nt, Human
ugugcagcuaucacagguggcucugcugugaa

SEQ ID NO: 262854 - RNA, 32 nt, Human
ugugcagcugacugucucagccaaaccacuga

SEQ ID NO: 262855 - RNA, 32 nt, Human
ugugcagcugcaaccaccauauccagggccca

SEQ ID NO: 262856 - RNA, 17 nt, Human
ugugcagcuggcccgca

SEQ ID NO: 262857 - RNA, 28 nt, Human
ugugcagcugggagucugaaagacugag

SEQ ID NO: 262858 - RNA, 32 nt, Human
ugugcagcuuugaacuagggcugggguugugg

SEQ ID NO: 262859 - RNA, 32 nt, Human
ugugcaggaauggcagaacgcuauccaugacu

SEQ ID NO: 262860 - RNA, 32 nt, Human
ugugcaggagagaaucagaaugagcugggccc

SEQ ID NO: 262861 - RNA, 32 nt, Human
ugugcaggagugaauguauguggcagggagaa

SEQ ID NO: 262862 - RNA, 32 nt, Human
ugugcaggccuggaguaguuggagaguuggau

SEQ ID NO: 262863 - RNA, 32 nt, Human
ugugcaggcucugaggcugcccaggacgggaa

SEQ ID NO: 262864 - RNA, 32 nt, Human
ugugcaggcugucucauuuauuuuuagccauu

SEQ ID NO: 262865 - RNA, 32 nt, Human
ugugcagggaguuggccagcugccgcaucauc

SEQ ID NO: 262866 - RNA, 32 nt, Human
ugugcagggccuggguuugcagccuggcucug

SEQ ID NO: 262867 - RNA, 32 nt, Human
ugugcagggcugggucccgcugccugccgucg

SEQ ID NO: 262868 - RNA, 32 nt, Human
ugugcaggggcugcuggccaagcugcugucuc

SEQ ID NO: 262869 - RNA, 32 nt, Human
ugugcagggggaaacaaaucuauuuuguuuug

SEQ ID NO: 262870 - RNA, 32 nt, Human
ugugcaggggguggcuacagaaaagccccuuu

SEQ ID NO: 262871 - RNA, 32 nt, Human
ugugcagggucuuggguuagagccaaaaugga

SEQ ID NO: 262872 - RNA, 32 nt, Human
ugugcagggucuuuagagcucagcuuucugag

SEQ ID NO: 262873 - RNA, 32 nt, Human
ugugcagggugagggccaugcaugcuaguaug

SEQ ID NO: 262874 - RNA, 32 nt, Human
ugugcaggguggcagaggugccucugcagaga

SEQ ID NO: 262875 - RNA, 32 nt, Human
ugugcaggugugaccucaggugugugaguauc

SEQ ID NO: 262876 - RNA, 32 nt, Human
ugugcagguguuguucaugcgcuccgauggcg

SEQ ID NO: 262877 - RNA, 32 nt, Human
ugugcagucaucucuagaauagacaggauguu

SEQ ID NO: 262878 - RNA, 32 nt, Human
ugugcaguccagcccugccuugcugcagcccc

SEQ ID NO: 262879 - RNA, 32 nt, Human
ugugcagucccagcuacucaggaggcugaggc

SEQ ID NO: 262880 - RNA, 32 nt, Human
ugugcagucuauuuccagagcuuacuuaguug

SEQ ID NO: 262881 - RNA, 32 nt, Human
ugugcagucugagcuuaggcacacacaggagg

SEQ ID NO: 262882 - RNA, 32 nt, Human
ugugcagugaguguggccuaggaacagguccc

SEQ ID NO: 262883 - RNA, 32 nt, Human
ugugcaguggcgccgggcuggggauggaggag

SEQ ID NO: 262884 - RNA, 32 nt, Human
ugugcauaacaguaaugagaucuggaaacacc

SEQ ID NO: 262885 - RNA, 32 nt, Human
ugugcauaauuguagaaauacagauuuuguug

SEQ ID NO: 262886 - RNA, 32 nt, Human
ugugcauacaguggcaacucugucuucccugc

SEQ ID NO: 262887 - RNA, 32 nt, Human
ugugcauagccuugugaaaaaguaucuuucua

SEQ ID NO: 262888 - RNA, 32 nt, Human
ugugcauauagucccagcuacuugggaggcag

SEQ ID NO: 262889 - RNA, 24 nt, Human
ugugcauauauauacauauaugua

SEQ ID NO: 262890 - RNA, 32 nt, Human
ugugcaucagugugcuugaauuuaguagcuua

SEQ ID NO: 262891 - RNA, 32 nt, Human
ugugcaucccuccucugcucuccaucauaacu

SEQ ID NO: 262892 - RNA, 32 nt, Human
ugugcauccuacagugagggguaacugaucag

SEQ ID NO: 262893 - RNA, 32 nt, Human
ugugcauccuggaggugaagguugcagugagc

SEQ ID NO: 262894 - RNA, 32 nt, Human
ugugcaucugcuugucaggaagagucacauug

SEQ ID NO: 262895 - RNA, 32 nt, Human
ugugcaucugggaggugguaggccacaguccu

SEQ ID NO: 262896 - RNA, 32 nt, Human
ugugcaucuguaaucccagcuacuugggaggc

SEQ ID NO: 262897 - RNA, 32 nt, Human
ugugcaucuguaaucccggcuacuugggaggu

SEQ ID NO: 262898 - RNA, 32 nt, Human
ugugcaucuucugcuucugcauccuuggucac

SEQ ID NO: 262899 - RNA, 32 nt, Human
ugugcaucuuucucucugccuuugcauuuccu

SEQ ID NO: 262900 - RNA, 32 nt, Human
ugugcaugcaaaucaugcuuuaggcagugcgg

SEQ ID NO: 262901 - RNA, 32 nt, Human
ugugcaugcaggcaggaggcagggaaauguga

SEQ ID NO: 262902 - RNA, 32 nt, Human
ugugcaugcauguguauuucugccugguucua

SEQ ID NO: 262903 - RNA, 32 nt, Human
ugugcaugcauucacacacacauauguacaug

SEQ ID NO: 262904 - RNA, 32 nt, Human
ugugcauggaaauguccuccaacaauaaagag

SEQ ID NO: 262905 - RNA, 32 nt, Human
ugugcaugguuagggagccaggccuggaauau

SEQ ID NO: 262906 - RNA, 32 nt, Human
ugugcaugucauggaccagugagcuggagaug

SEQ ID NO: 262907 - RNA, 32 nt, Human
ugugcaugucuauaacuccacccuucacugug

SEQ ID NO: 262908 - RNA, 32 nt, Human
ugugcaugugccugugccacccugggugccag

SEQ ID NO: 262909 - RNA, 32 nt, Human
ugugcauguguaugugcguaugcauguguguu

SEQ ID NO: 262910 - RNA, 32 nt, Human
ugugcaugugucuguguguguggaacuuuugu

SEQ ID NO: 262911 - RNA, 32 nt, Human
ugugcaugugugugagcuccuugaacgcacgg

SEQ ID NO: 262912 - RNA, 32 nt, Human
ugugcaugugugugcacacgugugcaugugug

SEQ ID NO: 262913 - RNA, 32 nt, Human
ugugcauuaaacuguaacaaggcuucgggcaa

SEQ ID NO: 262914 - RNA, 21 nt, Human
ugugcauuaaguucccuccgc

SEQ ID NO: 262915 - RNA, 31 nt, Human
ugugcauucaauaaauagcuuuugaguuagg

SEQ ID NO: 262916 - RNA, 32 nt, Human
ugugcauucaguguauauucucaccuuuuaug

SEQ ID NO: 262917 - RNA, 32 nt, Human
ugugcauugcacuccagccugagcaacaggag

SEQ ID NO: 262918 - RNA, 32 nt, Human
ugugcauugcugucugucucuauugccaaaau

SEQ ID NO: 262919 - RNA, 32 nt, Human
ugugcauuggcuuuagagcuacuccucagcug

SEQ ID NO: 262920 - RNA, 32 nt, Human
ugugcauugucuuugagccaaugauccugcuu

SEQ ID NO: 262921 - RNA, 32 nt, Human
ugugcauuuccagaucugauuuucugcuaacu

SEQ ID NO: 262922 - RNA, 32 nt, Human
ugugcauuugcaaaugauaaaaggcaugcucu

SEQ ID NO: 262923 - RNA, 32 nt, Human
ugugcauuugcaccagaugaauguuugaugcu

SEQ ID NO: 262924 - RNA, 32 nt, Human
ugugcauuugugaaagucuugugcagggugag

SEQ ID NO: 262925 - RNA, 32 nt, Human
ugugcauuuuugcccuucuuucugccucucag

SEQ ID NO: 262926 - RNA, 32 nt, Human
ugugccaaaccugagcuaccugcacccgagcc

SEQ ID NO: 262927 - RNA, 32 nt, Human
ugugccaaagagccggugucugauaaucccau

SEQ ID NO: 262928 - RNA, 32 nt, Human
ugugccaaagagcucagcagaggcucacgugg

SEQ ID NO: 262929 - RNA, 32 nt, Human
ugugccaaagcagcuacaauaauagagaggaa

SEQ ID NO: 262930 - RNA, 32 nt, Human
ugugccaagaggagguggguagaugggagugg

SEQ ID NO: 262931 - RNA, 32 nt, Human
ugugccaagcaauagacuaggcaauuuuuaga

SEQ ID NO: 262932 - RNA, 32 nt, Human
ugugccaagcagagguugggaggccauuugug

SEQ ID NO: 262933 - RNA, 32 nt, Human
ugugccaagugguuuauaugcccagccucauu

SEQ ID NO: 262934 - RNA, 32 nt, Human
ugugccaauaagagaaguaaauaucaaacauu

SEQ ID NO: 262935 - RNA, 20 nt, Human
ugugccaaucccagcacucc

SEQ ID NO: 262936 - RNA, 32 nt, Human
ugugccaauguacuccagccuaggugacagag

SEQ ID NO: 262937 - RNA, 32 nt, Human
ugugccacacagaaaucaggugccauuguuac

SEQ ID NO: 262938 - RNA, 32 nt, Human
ugugccacacagugacuuggccccagacgcau

SEQ ID NO: 262939 - RNA, 32 nt, Human
ugugccacagcugcuaggagcugcaguuguac

SEQ ID NO: 262940 - RNA, 32 nt, Human
ugugccacaggcagaggccaggaggagcagua

SEQ ID NO: 262941 - RNA, 22 nt, Human
ugugccacaugcugcucucuac

SEQ ID NO: 262942 - RNA, 32 nt, Human
ugugccacauugucuuccccagaagcucaaac

SEQ ID NO: 262943 - RNA, 32 nt, Human
ugugccaccaaccccaucaggauuuccccagg

SEQ ID NO: 262944 - RNA, 32 nt, Human
ugugccaccacacuccagccugggcgacagaa

SEQ ID NO: 262945 - RNA, 32 nt, Human
ugugccaccacgcauggcuaaucuuuuugugu

SEQ ID NO: 262946 - RNA, 32 nt, Human
ugugccaccacgucuggcuaaucuuuuuauua

SEQ ID NO: 262947 - RNA, 32 nt, Human
ugugccaccauggcuuugacauguugguaggu

SEQ ID NO: 262948 - RNA, 32 nt, Human
ugugccaccgcacuccagcaugggugacagag

SEQ ID NO: 262949 - RNA, 19 nt, Human
ugugccaccuccugccugu

SEQ ID NO: 262950 - RNA, 32 nt, Human
ugugccaccucuccacccaggaggccauguag

SEQ ID NO: 262951 - RNA, 32 nt, Human
ugugccaccugcaguaguggaucauguggagu

SEQ ID NO: 262952 - RNA, 24 nt, Human
ugugccacggagcuugcucuccac

SEQ ID NO: 262953 - RNA, 32 nt, Human
ugugccacggcacuccagccugggcagcagag

SEQ ID NO: 262954 - RNA, 32 nt, Human
ugugccacuacacuccagccuggccacagagc

SEQ ID NO: 262955 - RNA, 32 nt, Human
ugugccacuacacuccagccuggccgacagag

SEQ ID NO: 262956 - RNA, 32 nt, Human
ugugccacuacacuccagccugggagacagag

SEQ ID NO: 262957 - RNA, 32 nt, Human
ugugccacuacacuccagccugggcaacacag

SEQ ID NO: 262958 - RNA, 32 nt, Human
ugugccacuacacuccagccugggcaacagag

SEQ ID NO: 262959 - RNA, 32 nt, Human
ugugccacuacacuccagccugggugacaaag

SEQ ID NO: 262960 - RNA, 32 nt, Human
ugugccacuacuguacucuagccugggcagca

SEQ ID NO: 262961 - RNA, 32 nt, Human
ugugccacuaguacuccagccugggugacaga

SEQ ID NO: 262962 - RNA, 32 nt, Human
ugugccacucacugccuugagccugcuuccuc

SEQ ID NO: 262963 - RNA, 32 nt, Human
ugugccacuccccuccagccugggcgacagag

SEQ ID NO: 262964 - RNA, 32 nt, Human
ugugccacucuacuccagccugggcaacacag

SEQ ID NO: 262965 - RNA, 32 nt, Human
ugugccacugaacucuagccuggguaacagag

SEQ ID NO: 262966 - RNA, 32 nt, Human
ugugccacugacuugcugugugacccugggca

SEQ ID NO: 262967 - RNA, 32 nt, Human
ugugccacugcacaccagccuggacaacagag

SEQ ID NO: 262968 - RNA, 32 nt, Human
ugugccacugcacaccggccugggugacagca

SEQ ID NO: 262969 - RNA, 32 nt, Human
ugugccacugcacacuccaaucugggugaaag

SEQ ID NO: 262970 - RNA, 32 nt, Human
ugugccacugcaccccagccuuggcaacagag

SEQ ID NO: 262971 - RNA, 32 nt, Human
ugugccacugcaccucuagucugggugacaga

SEQ ID NO: 262972 - RNA, 32 nt, Human
ugugccacugcacgcacuccagccugggcgac

SEQ ID NO: 262973 - RNA, 32 nt, Human
ugugccacugcacucaagccugggugacgagu

SEQ ID NO: 262974 - RNA, 32 nt, Human
ugugccacugcacucauccuggaagacagagu

SEQ ID NO: 262975 - RNA, 32 nt, Human
ugugccacugcacuccaacaaccgagcgagac

SEQ ID NO: 262976 - RNA, 32 nt, Human
ugugccacugcacuccaaccugggugacagag

SEQ ID NO: 262977 - RNA, 32 nt, Human
ugugccacugcacuccacccugggcaacagag

SEQ ID NO: 262978 - RNA, 32 nt, Human
ugugccacugcacuccagacugggugacacag

SEQ ID NO: 262979 - RNA, 32 nt, Human
ugugccacugcacuccagccagagugacagag

SEQ ID NO: 262980 - RNA, 32 nt, Human
ugugccacugcacuccagccggggugacagaa

SEQ ID NO: 262981 - RNA, 32 nt, Human
ugugccacugcacuccagccuaggcaacagag

SEQ ID NO: 262982 - RNA, 32 nt, Human
ugugccacugcacuccagccuaggcgacagag

SEQ ID NO: 262983 - RNA, 32 nt, Human
ugugccacugcacuccagccugagcaacaaaa

SEQ ID NO: 262984 - RNA, 32 nt, Human
ugugccacugcacuccagccuggacgacagag

SEQ ID NO: 262985 - RNA, 32 nt, Human
ugugccacugcacuccagccuggcaacagagc

SEQ ID NO: 262986 - RNA, 32 nt, Human
ugugccacugcacuccagccuggcaacagagu

SEQ ID NO: 262987 - RNA, 32 nt, Human
ugugccacugcacuccagccugggagacagag

SEQ ID NO: 262988 - RNA, 32 nt, Human
ugugccacugcacuccagccugggcaacaaga

SEQ ID NO: 262989 - RNA, 32 nt, Human
ugugccacugcacuccagccugggcaacaagg

SEQ ID NO: 262990 - RNA, 32 nt, Human
ugugccacugcacuccagccugggcaacacag

SEQ ID NO: 262991 - RNA, 32 nt, Human
ugugccacugcacuccagccugggcaacagag

SEQ ID NO: 262992 - RNA, 32 nt, Human
ugugccacugcacuccagccugggcaacugag

SEQ ID NO: 262993 - RNA, 32 nt, Human
ugugccacugcacuccagccugggcaauagag

SEQ ID NO: 262994 - RNA, 32 nt, Human
ugugccacugcacuccagccugggcaccaaug

SEQ ID NO: 262995 - RNA, 32 nt, Human
ugugccacugcacuccagccugggccacagaa

SEQ ID NO: 262996 - RNA, 32 nt, Human
ugugccacugcacuccagccugggccacagag

SEQ ID NO: 262997 - RNA, 32 nt, Human
ugugccacugcacuccagccugggcgacagag

SEQ ID NO: 262998 - RNA, 32 nt, Human
ugugccacugcacuccagccugggcgacagug

SEQ ID NO: 262999 - RNA, 32 nt, Human
ugugccacugcacuccagccugggcgauagag

SEQ ID NO: 263000 - RNA, 32 nt, Human
ugugccacugcacuccagccuggguaacagag

SEQ ID NO: 263001 - RNA, 32 nt, Human
ugugccacugcacuccagccuggguaacagug

SEQ ID NO: 263002 - RNA, 32 nt, Human
ugugccacugcacuccagccuggguaagagag

SEQ ID NO: 263003 - RNA, 32 nt, Human
ugugccacugcacuccagccugggugaaagag

SEQ ID NO: 263004 - RNA, 32 nt, Human
ugugccacugcacuccagccugggugacagag

SEQ ID NO: 263005 - RNA, 32 nt, Human
ugugccacugcacuccagccugggugacagcg

SEQ ID NO: 263006 - RNA, 32 nt, Human
ugugccacugcacuccagccugggugacaggg

SEQ ID NO: 263007 - RNA, 32 nt, Human
ugugccacugcacuccagccugggugacugag

SEQ ID NO: 263008 - RNA, 32 nt, Human
ugugccacugcacuccagccuggguggcagag

SEQ ID NO: 263009 - RNA, 32 nt, Human
ugugccacugcacuccagccuggguuacagag

SEQ ID NO: 263010 - RNA, 32 nt, Human
ugugccacugcacuccagccuggucaacaaag

SEQ ID NO: 263011 - RNA, 32 nt, Human
ugugccacugcacuccagccuuggcaacaaga

SEQ ID NO: 263012 - RNA, 32 nt, Human
ugugccacugcacuccagccuuggcaacacag

SEQ ID NO: 263013 - RNA, 32 nt, Human
ugugccacugcacuccagcgugggcaacggag

SEQ ID NO: 263014 - RNA, 32 nt, Human
ugugccacugcacuccagcuggguggcagaga

SEQ ID NO: 263015 - RNA, 32 nt, Human
ugugccacugcacuccagcuuggugacagagu

SEQ ID NO: 263016 - RNA, 32 nt, Human
ugugccacugcacuccagucuggacaacagag

SEQ ID NO: 263017 - RNA, 32 nt, Human
ugugccacugcacucccgccugggcgacagag

SEQ ID NO: 263018 - RNA, 32 nt, Human
ugugccacugcacucgagccugggugacagag

SEQ ID NO: 263019 - RNA, 32 nt, Human
ugugccacugcacucuagccuagguggcugag

SEQ ID NO: 263020 - RNA, 32 nt, Human
ugugccacugcacucuagccucggugacagag

SEQ ID NO: 263021 - RNA, 32 nt, Human
ugugccacugcacucuagccuggacagcagag

SEQ ID NO: 263022 - RNA, 32 nt, Human
ugugccacugcacucuagccugggcaauaagc

SEQ ID NO: 263023 - RNA, 32 nt, Human
ugugccacugcacucuagccugggugacaaag

SEQ ID NO: 263024 - RNA, 32 nt, Human
ugugccacugcacucuagccugggugacagag

SEQ ID NO: 263025 - RNA, 32 nt, Human
ugugccacugcacugcagccugggcgacaauu

SEQ ID NO: 263026 - RNA, 32 nt, Human
ugugccacugcacugcagccugggcuacagag

SEQ ID NO: 263027 - RNA, 32 nt, Human
ugugccacugcacugcaggcugggugacagag

SEQ ID NO: 263028 - RNA, 32 nt, Human
ugugccacugcacuucagccugggcgacagag

SEQ ID NO: 263029 - RNA, 32 nt, Human
ugugccacugcacuucagcuugggugacagag

SEQ ID NO: 263030 - RNA, 32 nt, Human
ugugccacugcacuuuucagccugggugccac

SEQ ID NO: 263031 - RNA, 32 nt, Human
ugugccacugcaguccagccugggugacagag

SEQ ID NO: 263032 - RNA, 32 nt, Human
ugugccacugcauaccagccuaggugacagaa

SEQ ID NO: 263033 - RNA, 32 nt, Human
ugugccacugcauucuagccugggcgauagag

SEQ ID NO: 263034 - RNA, 32 nt, Human
ugugccacugcccuccagccugggugacagag

SEQ ID NO: 263035 - RNA, 32 nt, Human
ugugccacugcgcuccagccugggcgacagag

SEQ ID NO: 263036 - RNA, 32 nt, Human
ugugccacugcucuccagccugggaggcacag

SEQ ID NO: 263037 - RNA, 32 nt, Human
ugugccacuggacucccagccugggugacaga

SEQ ID NO: 263038 - RNA, 32 nt, Human
ugugccacuggguggagugugccuucagggca

SEQ ID NO: 263039 - RNA, 32 nt, Human
ugugccacuguacaccagccugggugacagag

SEQ ID NO: 263040 - RNA, 32 nt, Human
ugugccacuguacuccagccaggccacagagu

SEQ ID NO: 263041 - RNA, 32 nt, Human
ugugccacuguacuccagccuggaagacaaga

SEQ ID NO: 263042 - RNA, 32 nt, Human
ugugccacuguacuccagccuggcccacagag

SEQ ID NO: 263043 - RNA, 32 nt, Human
ugugccacuguacuccagccugggagauagag

SEQ ID NO: 263044 - RNA, 32 nt, Human
ugugccacuguacuccagccugggcgacagag

SEQ ID NO: 263045 - RNA, 32 nt, Human
ugugccacuguacuccagccugggugacagag

SEQ ID NO: 263046 - RNA, 32 nt, Human
ugugccacuguacuccagccuggugacagagc

SEQ ID NO: 263047 - RNA, 32 nt, Human
ugugccacuguacuccauccugggcgacagag

SEQ ID NO: 263048 - RNA, 32 nt, Human
ugugccacuguacugcagccugggugacagaa

SEQ ID NO: 263049 - RNA, 32 nt, Human
ugugccacuguauuccagacugggugacagag

SEQ ID NO: 263050 - RNA, 32 nt, Human
ugugccacuguauuccauccugggcaacagag

SEQ ID NO: 263051 - RNA, 32 nt, Human
ugugccacuguuuuccagccugggcaauacag

SEQ ID NO: 263052 - RNA, 32 nt, Human
ugugccacuucacuccagccugggugacaaag

SEQ ID NO: 263053 - RNA, 32 nt, Human
ugugccacuucauuccagccugggcgacagag

SEQ ID NO: 263054 - RNA, 32 nt, Human
ugugccacuucccuccagccugggcaauagag

SEQ ID NO: 263055 - RNA, 32 nt, Human
ugugccagagcugugguugaggaggagccagu

SEQ ID NO: 263056 - RNA, 32 nt, Human
ugugccagaggacccccagaacuaagaaggga

SEQ ID NO: 263057 - RNA, 32 nt, Human
ugugccagcacggucuccugugcccaccagcc

SEQ ID NO: 263058 - RNA, 32 nt, Human
ugugccagcagaaaugucucuccucuagguau

SEQ ID NO: 263059 - RNA, 32 nt, Human
ugugccagcaguggcuccucucugccuuugag

SEQ ID NO: 263060 - RNA, 32 nt, Human
ugugccagcccugcucucagcacuucccaugu

SEQ ID NO: 263061 - RNA, 32 nt, Human
ugugccagcccuggcccggcugccacaccucu

SEQ ID NO: 263062 - RNA, 32 nt, Human
ugugccagccuccacccucacgccauuuccag

SEQ ID NO: 263063 - RNA, 32 nt, Human
ugugccagccuccuugguuguucuugggccac

SEQ ID NO: 263064 - RNA, 32 nt, Human
ugugccagccugacauggaaauggaggcaaac

SEQ ID NO: 263065 - RNA, 32 nt, Human
ugugccagcuacucgggaggcugaggcaagag

SEQ ID NO: 263066 - RNA, 32 nt, Human
ugugccagcugguucccccaagccagcucaug

SEQ ID NO: 263067 - RNA, 32 nt, Human
ugugccagcugguuuagcauucaauauggaaa

SEQ ID NO: 263068 - RNA, 32 nt, Human
ugugccaggcacuaugcuaagcacuuuacaua

SEQ ID NO: 263069 - RNA, 32 nt, Human
ugugccaggcacugugcugagugccauacaua

SEQ ID NO: 263070 - RNA, 21 nt, Human
ugugccaggccagagugcagu

SEQ ID NO: 263071 - RNA, 22 nt, Human
ugugccaggccagagugcagug

SEQ ID NO: 263072 - RNA, 32 nt, Human
ugugccaggccagagugcaguggugcaaucac

SEQ ID NO: 263073 - RNA, 32 nt, Human
ugugccaggcucuguucuaagcacuuugugag

SEQ ID NO: 263074 - RNA, 32 nt, Human
ugugccaggggucuucagccccggcugauggc

SEQ ID NO: 263075 - RNA, 32 nt, Human
ugugccagguacuguucugagcacuuuacaaa

SEQ ID NO: 263076 - RNA, 32 nt, Human
ugugccagguugaagagagugugccagugaca

SEQ ID NO: 263077 - RNA, 32 nt, Human
ugugccagugcacuccaggcuggacgacagag

SEQ ID NO: 263078 - RNA, 32 nt, Human
ugugccagugcacuccggccugggugacagag

SEQ ID NO: 263079 - RNA, 32 nt, Human
ugugccauagcaccuggucucaaaauccuaaa

SEQ ID NO: 263080 - RNA, 32 nt, Human
ugugccaugcguaaggugagucaaaccaaacc

SEQ ID NO: 263081 - RNA, 32 nt, Human
ugugccauguucguaaggcagcuucugaauug

SEQ ID NO: 263082 - RNA, 32 nt, Human
ugugccauugcacaccagucugggugacagag

SEQ ID NO: 263083 - RNA, 32 nt, Human
ugugccauugcacuacagccuggucaacagag

SEQ ID NO: 263084 - RNA, 32 nt, Human
ugugccauugcacuccaaccugggcaacaaga

SEQ ID NO: 263085 - RNA, 32 nt, Human
ugugccauugcacuccaagccugggcaacaga

SEQ ID NO: 263086 - RNA, 32 nt, Human
ugugccauugcacuccagccuggacaacaaga

SEQ ID NO: 263087 - RNA, 32 nt, Human
ugugccauugcacuccagccugggcaacaaga

SEQ ID NO: 263088 - RNA, 32 nt, Human
ugugccauugcacuccagccugggcaacagag

SEQ ID NO: 263089 - RNA, 32 nt, Human
ugugccauugcacuccagccugggcaacgagc

SEQ ID NO: 263090 - RNA, 32 nt, Human
ugugccauugcacuccagccugggcgacaagc

SEQ ID NO: 263091 - RNA, 32 nt, Human
ugugccauugcacuccagccugggcgacagag

SEQ ID NO: 263092 - RNA, 32 nt, Human
ugugccauugcacuccagccugggcgacagug

SEQ ID NO: 263093 - RNA, 32 nt, Human
ugugccauugcacuccagccugggcuacaaga

SEQ ID NO: 263094 - RNA, 32 nt, Human
ugugccauugcacuccagccugggugacagag

SEQ ID NO: 263095 - RNA, 32 nt, Human
ugugccauugcacuccagccugggugauaaga

SEQ ID NO: 263096 - RNA, 32 nt, Human
ugugccauugcacuccagucggguuaacagag

SEQ ID NO: 263097 - RNA, 32 nt, Human
ugugccauugcacucuagccugggcaacagga

SEQ ID NO: 263098 - RNA, 32 nt, Human
ugugccauugcacugcagccuggaugacagag

SEQ ID NO: 263099 - RNA, 32 nt, Human
ugugccauuguacuccagccugggcgacaaaa

SEQ ID NO: 263100 - RNA, 32 nt, Human
ugugccauuucucaugccaggagugccugucc

SEQ ID NO: 263101 - RNA, 32 nt, Human
ugugccauuuuauccaugguuguacuucuuuu

SEQ ID NO: 263102 - RNA, 28 nt, Human
ugugcccacgcugcugccugcuccagac

SEQ ID NO: 263103 - RNA, 32 nt, Human
ugugcccagaguagcccaggucacuguuaacu

SEQ ID NO: 263104 - RNA, 32 nt, Human
ugugcccagcacuccgccccaugccuugcuaa

SEQ ID NO: 263105 - RNA, 32 nt, Human
ugugcccagccuggaaaccuacagacaaggag

SEQ ID NO: 263106 - RNA, 32 nt, Human
ugugcccagcuuuggucccccuucccaacuuc

SEQ ID NO: 263107 - RNA, 32 nt, Human
ugugcccagcuuuugcaaucuuuuguugcagc

SEQ ID NO: 263108 - RNA, 32 nt, Human
ugugcccaggaguucaagaccagccugggcaa

SEQ ID NO: 263109 - RNA, 32 nt, Human
ugugcccaggcaaauggaaggaaaggaagagg

SEQ ID NO: 263110 - RNA, 20 nt, Human
ugugcccaggcuggagugca

SEQ ID NO: 263111 - RNA, 32 nt, Human
ugugcccauaugaaacaaacuuauuauucauu

SEQ ID NO: 263112 - RNA, 32 nt, Human
ugugcccauaugcacacauauauuuucccgca

SEQ ID NO: 263113 - RNA, 32 nt, Human
ugugcccaucuccugcuuucugcgccaaggga

SEQ ID NO: 263114 - RNA, 19 nt, Human
ugugcccaugagucccugu

SEQ ID NO: 263115 - RNA, 19 nt, Human
ugugccccaacccaggugg

SEQ ID NO: 263116 - RNA, 21 nt, Human
ugugccccaccacagauucug

SEQ ID NO: 263117 - RNA, 32 nt, Human
ugugccccaccaggauuggccugcugcuaggg

SEQ ID NO: 263118 - RNA, 32 nt, Human
ugugccccagaacaccagagauuucaacuuag

SEQ ID NO: 263119 - RNA, 32 nt, Human
ugugccccagcucuccccgagggcucugugcc

SEQ ID NO: 263120 - RNA, 32 nt, Human
ugugccccagcuguuccagcagcuugucuggc

SEQ ID NO: 263121 - RNA, 32 nt, Human
ugugccccaggccagaauaaagaauagagugu

SEQ ID NO: 263122 - RNA, 32 nt, Human
ugugcccccaacauggccagaaauauuugggu

SEQ ID NO: 263123 - RNA, 32 nt, Human
ugugcccccaagugaugggcagaaggagagaa

SEQ ID NO: 263124 - RNA, 32 nt, Human
ugugcccccacaggaaccagagguaggauggg

SEQ ID NO: 263125 - RNA, 22 nt, Human
ugugcccccgagcugcccccac

SEQ ID NO: 263126 - RNA, 23 nt, Human
ugugcccccugaaacagcugcca

SEQ ID NO: 263127 - RNA, 23 nt, Human
ugugcccccuucaagccugugca

SEQ ID NO: 263128 - RNA, 32 nt, Human
ugugccccuccaccaccucuccaucccaggga

SEQ ID NO: 263129 - RNA, 32 nt, Human
ugugccccuccugccccgaaagugcugacuau

SEQ ID NO: 263130 - RNA, 32 nt, Human
ugugccccuccugcccugcaggcuguccuccc

SEQ ID NO: 263131 - RNA, 18 nt, Human
ugugccccuccuuccugu

SEQ ID NO: 263132 - RNA, 22 nt, Human
ugugccccucuaagagugcaca

SEQ ID NO: 263133 - RNA, 32 nt, Human
ugugccccucuaagagugcacacacacgcaca

SEQ ID NO: 263134 - RNA, 32 nt, Human
ugugccccugcacuccagccugagcgacagug

SEQ ID NO: 263135 - RNA, 32 nt, Human
ugugccccugcaggaccucagagucauccccc

SEQ ID NO: 263136 - RNA, 32 nt, Human
ugugccccugcauucuagccugggugacagug

SEQ ID NO: 263137 - RNA, 32 nt, Human
ugugccccugccucucccugugucccuucccc

SEQ ID NO: 263138 - RNA, 32 nt, Human
ugugccccugcuccccacgucugaacguggac

SEQ ID NO: 263139 - RNA, 32 nt, Human
ugugccccugcucugcccaguugggcugagug

SEQ ID NO: 263140 - RNA, 32 nt, Human
ugugccccugcucugccccauccuggcuggca

SEQ ID NO: 263141 - RNA, 32 nt, Human
ugugccccuucucucaucucuuagcuccccuc

SEQ ID NO: 263142 - RNA, 32 nt, Human
ugugccccuugccccacugccugccagcuguc

SEQ ID NO: 263143 - RNA, 32 nt, Human
ugugcccgagguuccugucaauacagguuuua

SEQ ID NO: 263144 - RNA, 32 nt, Human
ugugcccgccccugccuuucucuuccuccauc

SEQ ID NO: 263145 - RNA, 32 nt, Human
ugugcccgcgggaccugugugugugcaaguuu

SEQ ID NO: 263146 - RNA, 32 nt, Human
ugugcccgcgugcaugaggcccugccacaauu

SEQ ID NO: 263147 - RNA, 32 nt, Human
ugugcccuaaagccucacuguccagagcuguu

SEQ ID NO: 263148 - RNA, 32 nt, Human
ugugcccuaacuuuucuuuccuugauguggga

SEQ ID NO: 263149 - RNA, 32 nt, Human
ugugcccucaccaagccaugcgagccccgggc

SEQ ID NO: 263150 - RNA, 32 nt, Human
ugugcccucagggacuggcagagcaagaggcc

SEQ ID NO: 263151 - RNA, 32 nt, Human
ugugcccuccucuuccuuccucuuuauaggga

SEQ ID NO: 263152 - RNA, 28 nt, Human
ugugcccugagagcugccucucaauccc

SEQ ID NO: 263153 - RNA, 32 nt, Human
ugugcccugcagcagcccaagugcuuuaaagc

SEQ ID NO: 263154 - RNA, 32 nt, Human
ugugcccugcauuuagucugccuuguuccuau

SEQ ID NO: 263155 - RNA, 32 nt, Human
ugugcccugccccucaugcucagaccucuccc

SEQ ID NO: 263156 - RNA, 32 nt, Human
ugugcccugccuggcauuggcccuguggccau

SEQ ID NO: 263157 - RNA, 24 nt, Human
ugugcccuggcacuaagacuggca

SEQ ID NO: 263158 - RNA, 32 nt, Human
ugugcccugggagcugagaugcacgucagugg

SEQ ID NO: 263159 - RNA, 32 nt, Human
ugugcccugggcugggcacacccccgggaagg

SEQ ID NO: 263160 - RNA, 32 nt, Human
ugugcccuuaugcuauagccugggcaagagcg

SEQ ID NO: 263161 - RNA, 32 nt, Human
ugugcccuuucucuggccuuacugaacugcug

SEQ ID NO: 263162 - RNA, 31 nt, Human
ugugccgaccucucugggccucaguuuuccc

SEQ ID NO: 263163 - RNA, 32 nt, Human
ugugccgcaaccaccucagccuggaugacgga

SEQ ID NO: 263164 - RNA, 32 nt, Human
ugugccgcgcacuugaggaggcugugguggug

SEQ ID NO: 263165 - RNA, 32 nt, Human
ugugccgcugcacuccagccuggcgacaaagc

SEQ ID NO: 263166 - RNA, 32 nt, Human
ugugccgcugcaucgcucucucccgggaaaga

SEQ ID NO: 263167 - RNA, 32 nt, Human
ugugccgcuuugggcaaguugcuuaccugucu

SEQ ID NO: 263168 - RNA, 32 nt, Human
ugugccggaggaguuccagucaccgagcgagg

SEQ ID NO: 263169 - RNA, 32 nt, Human
ugugccggcgcacgccuggaaucccagcacug

SEQ ID NO: 263170 - RNA, 22 nt, Human
ugugccgggcacuguagcuuua

SEQ ID NO: 263171 - RNA, 32 nt, Human
ugugccggggguguuugcugagggcuuccugu

SEQ ID NO: 263172 - RNA, 32 nt, Human
ugugccgggguguccuggaaucugugccagga

SEQ ID NO: 263173 - RNA, 32 nt, Human
ugugccggugccuggagcugcccacaccacug

SEQ ID NO: 263174 - RNA, 32 nt, Human
ugugccguagacacaaagaagggaacaauaga

SEQ ID NO: 263175 - RNA, 32 nt, Human
ugugccgugcuagaguccucagggagggagug

SEQ ID NO: 263176 - RNA, 32 nt, Human
ugugccuaacagcaaagcaugccacaagaggc

SEQ ID NO: 263177 - RNA, 32 nt, Human
ugugccuaccucagauagacagugccagaauu

SEQ ID NO: 263178 - RNA, 32 nt, Human
ugugccuaguggcaccugggcuggggaggaca

SEQ ID NO: 263179 - RNA, 32 nt, Human
ugugccuauaaucccagcuacuugggaggcua

SEQ ID NO: 263180 - RNA, 32 nt, Human
ugugccuauagucccagcuacuugggaggugg

SEQ ID NO: 263181 - RNA, 32 nt, Human
ugugccucaacucaccaaccacccuccugccu

SEQ ID NO: 263182 - RNA, 32 nt, Human
ugugccucaauccucuuuccaagcaggccuca

SEQ ID NO: 263183 - RNA, 32 nt, Human
ugugccucacacuccagccuggguaacagagu

SEQ ID NO: 263184 - RNA, 32 nt, Human
ugugccucacagcgcugugagccagacccucc

SEQ ID NO: 263185 - RNA, 32 nt, Human
ugugccucacaguaaaccagcaccccaaauuu

SEQ ID NO: 263186 - RNA, 32 nt, Human
ugugccucagaagccuguuuaguuuuccuccc

SEQ ID NO: 263187 - RNA, 32 nt, Human
ugugccucagcccacaggccacugugauaaug

SEQ ID NO: 263188 - RNA, 32 nt, Human
ugugccuccaaggacugucuggcaaugacuug

SEQ ID NO: 263189 - RNA, 32 nt, Human
ugugccuccauggccuagggcgguuggcaaau

SEQ ID NO: 263190 - RNA, 32 nt, Human
ugugccucccaggccugcugugguucugacac

SEQ ID NO: 263191 - RNA, 32 nt, Human
ugugccuccuagagugcagggauuacaggcgu

SEQ ID NO: 263192 - RNA, 32 nt, Human
ugugccuccugccucagaugcggccugugcca

SEQ ID NO: 263193 - RNA, 32 nt, Human
ugugccucguagaguuauuuuucuugaagagg

SEQ ID NO: 263194 - RNA, 32 nt, Human
ugugccucguugucugccuccuggggcuguua

SEQ ID NO: 263195 - RNA, 32 nt, Human
ugugccucuagucccagcuacuugggaggcug

SEQ ID NO: 263196 - RNA, 28 nt, Human
ugugccucucaugcugccuccucugccc

SEQ ID NO: 263197 - RNA, 22 nt, Human
ugugccucuccccaggaagcau

SEQ ID NO: 263198 - RNA, 32 nt, Human
ugugccucuccccucagugucccuucugacag

SEQ ID NO: 263199 - RNA, 32 nt, Human
ugugccucucucucccaacugcugcuuaaaau

SEQ ID NO: 263200 - RNA, 32 nt, Human
ugugccucucucuguugcccaggcuggagugc

SEQ ID NO: 263201 - RNA, 32 nt, Human
ugugccucucugggagaaaggagagaggauaa

SEQ ID NO: 263202 - RNA, 32 nt, Human
ugugccugauucaucucucccugccgaaaaug

SEQ ID NO: 263203 - RNA, 32 nt, Human
ugugccugcacucccagcaugccaugcaguca

SEQ ID NO: 263204 - RNA, 32 nt, Human
ugugccugcaggcagggaugcugcaggacucc

SEQ ID NO: 263205 - RNA, 32 nt, Human
ugugccugccacucaauaaacagugucugcgc

SEQ ID NO: 263206 - RNA, 32 nt, Human
ugugccugccuccaccucuuuaacgagccucu

SEQ ID NO: 263207 - RNA, 32 nt, Human
ugugccugcucacaccugcuccugcaggcaca

SEQ ID NO: 263208 - RNA, 32 nt, Human
ugugccugcuccaacugauggguaaugucugc

SEQ ID NO: 263209 - RNA, 32 nt, Human
ugugccugcucccagccucuugcucagagcua

SEQ ID NO: 263210 - RNA, 32 nt, Human
ugugccugcuuguggagaccaggcugggccua

SEQ ID NO: 263211 - RNA, 32 nt, Human
ugugccuggaccaucgcugccugccagcuucu

SEQ ID NO: 263212 - RNA, 32 nt, Human
ugugccuggacccagagagugugggacucccc

SEQ ID NO: 263213 - RNA, 32 nt, Human
ugugccuggagauaccauuguggacccuggag

SEQ ID NO: 263214 - RNA, 32 nt, Human
ugugccuggagaugacucucugcuauucauga

SEQ ID NO: 263215 - RNA, 32 nt, Human
ugugccuggagucccagcuacucaggaggcug

SEQ ID NO: 263216 - RNA, 32 nt, Human
ugugccuggccagaaauuguuuugaaaggcua

SEQ ID NO: 263217 - RNA, 32 nt, Human
ugugccugggguccacagagccgggaggucac

SEQ ID NO: 263218 - RNA, 32 nt, Human
ugugccuggucuguaacaguuuccaggccagc

SEQ ID NO: 263219 - RNA, 32 nt, Human
ugugccuggugacuuccugucccugggacagu

SEQ ID NO: 263220 - RNA, 23 nt, Human
ugugccuguaaucccagaacuuu

SEQ ID NO: 263221 - RNA, 32 nt, Human
ugugccuguaaucccagcuacucgggagguug

SEQ ID NO: 263222 - RNA, 32 nt, Human
ugugccuguaaucccagcuacuugggaggcug

SEQ ID NO: 263223 - RNA, 32 nt, Human
ugugccuguaaucccagcuauuugggaggcug

SEQ ID NO: 263224 - RNA, 32 nt, Human
ugugccuguaaucccagcuucuugggaagcug

SEQ ID NO: 263225 - RNA, 23 nt, Human
ugugccuguaaucucagcacuuu

SEQ ID NO: 263226 - RNA, 32 nt, Human
ugugccuguagucccagauacuugggaggcug

SEQ ID NO: 263227 - RNA, 32 nt, Human
ugugccuguagucccagcuacaugggaggcug

SEQ ID NO: 263228 - RNA, 32 nt, Human
ugugccuguagucccagcuacuauggagguug

SEQ ID NO: 263229 - RNA, 32 nt, Human
ugugccuguagucccagcuacucaggaggcug

SEQ ID NO: 263230 - RNA, 32 nt, Human
ugugccuguagucccagcuacucaggagucug

SEQ ID NO: 263231 - RNA, 32 nt, Human
ugugccuguagucccagcuacucgggaggcug

SEQ ID NO: 263232 - RNA, 32 nt, Human
ugugccuguagucccagcuacucuggagucug

SEQ ID NO: 263233 - RNA, 32 nt, Human
ugugccuguagucccagcuacuuaggaggcug

SEQ ID NO: 263234 - RNA, 32 nt, Human
ugugccuguagucccagcuacuugagaggcug

SEQ ID NO: 263235 - RNA, 32 nt, Human
ugugccuguagucccagcuacuugggaggcug

SEQ ID NO: 263236 - RNA, 32 nt, Human
ugugccuguagucccagcuacuugggagggcu

SEQ ID NO: 263237 - RNA, 32 nt, Human
ugugccuguagucccagcuacuugugaggcug

SEQ ID NO: 263238 - RNA, 32 nt, Human
ugugccuguagucccagcuauucuagaggcug

SEQ ID NO: 263239 - RNA, 32 nt, Human
ugugccuguagucccagcugcuugggaggcug

SEQ ID NO: 263240 - RNA, 32 nt, Human
ugugccuguagucccaggcugaggcaagagaa

SEQ ID NO: 263241 - RNA, 32 nt, Human
ugugccuguaguucagcuacucagggggcuga

SEQ ID NO: 263242 - RNA, 32 nt, Human
ugugccuguaguuccagcuacucaggaggcug

SEQ ID NO: 263243 - RNA, 32 nt, Human
ugugccugugccaggacagcugugcucucaga

SEQ ID NO: 263244 - RNA, 32 nt, Human
ugugccuguggucccagcuacucaggaggcug

SEQ ID NO: 263245 - RNA, 32 nt, Human
ugugccugugugugugggugcacauuugugug

SEQ ID NO: 263246 - RNA, 22 nt, Human
ugugccuguugcuguuaacuuu

SEQ ID NO: 263247 - RNA, 32 nt, Human
ugugccuguuucuucaugcaugcaguggggau

SEQ ID NO: 263248 - RNA, 32 nt, Human
ugugccuuaaucuucccuccccugugcugccc

SEQ ID NO: 263249 - RNA, 32 nt, Human
ugugccuucagggcaucuugaaaugucccgcu

SEQ ID NO: 263250 - RNA, 32 nt, Human
ugugccuucuguguguauugugcauuaaccuc

SEQ ID NO: 263251 - RNA, 32 nt, Human
ugugccuucuugcugcucuuagauuuauuuca

SEQ ID NO: 263252 - RNA, 32 nt, Human
ugugccuugcagagaugcacgugugcauuuca

SEQ ID NO: 263253 - RNA, 32 nt, Human
ugugccuugccucugcccuccacgccgccgcc

SEQ ID NO: 263254 - RNA, 32 nt, Human
ugugccuuggugacugucaaauaaaagcaagu

SEQ ID NO: 263255 - RNA, 32 nt, Human
ugugccuuguagaauugcauugucuauacaug

SEQ ID NO: 263256 - RNA, 20 nt, Human
ugugccuuuaaccagcuuua

SEQ ID NO: 263257 - RNA, 23 nt, Human
ugugccuuuaccuuguagcuuua

SEQ ID NO: 263258 - RNA, 32 nt, Human
ugugccuuuccagcuucuagaggcugccugcg

SEQ ID NO: 263259 - RNA, 20 nt, Human
ugugccuuucuguuagcuuu

SEQ ID NO: 263260 - RNA, 32 nt, Human
ugugccuuugugcaagcugcucccucuaccug

SEQ ID NO: 263261 - RNA, 32 nt, Human
ugugccuuuuaggagcuuuauguuuagaaacu

SEQ ID NO: 263262 - RNA, 32 nt, Human
ugugcgacccuccagggaugcaggggauccag

SEQ ID NO: 263263 - RNA, 32 nt, Human
ugugcgacuucaggcauaucacugccuucucu

SEQ ID NO: 263264 - RNA, 32 nt, Human
ugugcgagaaccuguucuuccugugcugcaca

SEQ ID NO: 263265 - RNA, 32 nt, Human
ugugcgagaccaccccuauuaggcccugggga

SEQ ID NO: 263266 - RNA, 32 nt, Human
ugugcgagcaugcaaggccccauggccucaca

SEQ ID NO: 263267 - RNA, 32 nt, Human
ugugcgaggaggugaaggccacagugacccaa

SEQ ID NO: 263268 - RNA, 32 nt, Human
ugugcgagugugugugcacauguuacaaaggc

SEQ ID NO: 263269 - RNA, 32 nt, Human
ugugcgcaaauucugguucuucccaagcucua

SEQ ID NO: 263270 - RNA, 32 nt, Human
ugugcgcaacaccuagagcccaaaaauaagca

SEQ ID NO: 263271 - RNA, 32 nt, Human
ugugcgcacaugcauguauaccugcacccugu

SEQ ID NO: 263272 - RNA, 32 nt, Human
ugugcgcagagcugucauagggucccuuuguc

SEQ ID NO: 263273 - RNA, 32 nt, Human
ugugcgcagccaguuuucuggcugaggaucgc

SEQ ID NO: 263274 - RNA, 32 nt, Human
ugugcgcagggugggagaaggggaaagaaucu

SEQ ID NO: 263275 - RNA, 32 nt, Human
ugugcgcaugcuugcuugaggcauuuuucucu

SEQ ID NO: 263276 - RNA, 32 nt, Human
ugugcgcauguguguuugcauguaggagaacg

SEQ ID NO: 263277 - RNA, 32 nt, Human
ugugcgccaguacuccuggcugugcugugguu

SEQ ID NO: 263278 - RNA, 32 nt, Human
ugugcgccuguaaucccagcuacucuggaggc

SEQ ID NO: 263279 - RNA, 32 nt, Human
ugugcgccuguaaucccagcuacuugggaggc

SEQ ID NO: 263280 - RNA, 32 nt, Human
ugugcgcgcacacaccacacaugcacacacgu

SEQ ID NO: 263281 - RNA, 32 nt, Human
ugugcgcguaugugcgcacauauguguaugug

SEQ ID NO: 263282 - RNA, 32 nt, Human
ugugcgcgugcuggugggcaugugagaugagu

SEQ ID NO: 263283 - RNA, 32 nt, Human
ugugcgcgugucucccugccaguuacccaggc

SEQ ID NO: 263284 - RNA, 32 nt, Human
ugugcgcgugugugugcgugugcgcacgcucu

SEQ ID NO: 263285 - RNA, 32 nt, Human
ugugcgcuacagacaccuucuggaagcugcgg

SEQ ID NO: 263286 - RNA, 32 nt, Human
ugugcgcuguggugcaccugucuucucuacua

SEQ ID NO: 263287 - RNA, 32 nt, Human
ugugcggaacacauaguuaagugcuugauaaa

SEQ ID NO: 263288 - RNA, 32 nt, Human
ugugcggaauacagaaaaugcagcuccagcuc

SEQ ID NO: 263289 - RNA, 32 nt, Human
ugugcggaugacugucaaggucacugagaccu

SEQ ID NO: 263290 - RNA, 32 nt, Human
ugugcggccgccgcgcuccgagguccccgggc

SEQ ID NO: 263291 - RNA, 32 nt, Human
ugugcggcucacugcgcggucccucucagcuc

SEQ ID NO: 263292 - RNA, 32 nt, Human
ugugcggcugacagccugacucccggguccug

SEQ ID NO: 263293 - RNA, 32 nt, Human
ugugcggcugcagacagcacagccugagggua

SEQ ID NO: 263294 - RNA, 32 nt, Human
ugugcggcugugugugcacgcgugugcaggag

SEQ ID NO: 263295 - RNA, 32 nt, Human
ugugcggggccaggcugggagcccaugcagua

SEQ ID NO: 263296 - RNA, 32 nt, Human
ugugcggugaagaucuguggagauggagcugg

SEQ ID NO: 263297 - RNA, 32 nt, Human
ugugcggugcaggauggcguggcuguggaggu

SEQ ID NO: 263298 - RNA, 32 nt, Human
ugugcgucauccuaaaccaucuaccucagaaa

SEQ ID NO: 263299 - RNA, 32 nt, Human
ugugcgucugugugugcgcgucugugcaugug

SEQ ID NO: 263300 - RNA, 32 nt, Human
ugugcgugaguguguggccccuguuuauuccc

SEQ ID NO: 263301 - RNA, 32 nt, Human
ugugcgugcaugugugcacuuacacacaugag

SEQ ID NO: 263302 - RNA, 32 nt, Human
ugugcgugcccucuacacaccuugucauggcc

SEQ ID NO: 263303 - RNA, 32 nt, Human
ugugcgugccuuggucgcuucuguagcuccga

SEQ ID NO: 263304 - RNA, 29 nt, Human
ugugcgugcgugugugugcgugugugggc

SEQ ID NO: 263305 - RNA, 32 nt, Human
ugugcguggggcucugcaggcccagccagucc

SEQ ID NO: 263306 - RNA, 32 nt, Human
ugugcgugugcaaauaugacucaauucacgua

SEQ ID NO: 263307 - RNA, 29 nt, Human
ugugcgugugcgugugugcaggggugaga

SEQ ID NO: 263308 - RNA, 32 nt, Human
ugugcgugugguuuguuccuucuccuugccgg

SEQ ID NO: 263309 - RNA, 32 nt, Human
ugugcguguguauguauguguauguauaugca

SEQ ID NO: 263310 - RNA, 32 nt, Human
ugugcguguguccaugugugugcagugugugc

SEQ ID NO: 263311 - RNA, 32 nt, Human
ugugcgugugugguccccagccccagacugga

SEQ ID NO: 263312 - RNA, 32 nt, Human
ugugcgugugugugcaugcacacgcauguaug

SEQ ID NO: 263313 - RNA, 32 nt, Human
ugugcgugugugugcuugugugugcgcacgug

SEQ ID NO: 263314 - RNA, 32 nt, Human
ugugcguuguggggugggggaggggguccacc

SEQ ID NO: 263315 - RNA, 32 nt, Human
ugugcuaaauccuagcagacacugccuugaag

SEQ ID NO: 263316 - RNA, 31 nt, Human
ugugcuaacuguucccagacagcagagcaag

SEQ ID NO: 263317 - RNA, 32 nt, Human
ugugcuaccaacuuacugcucuuuuguaaauu

SEQ ID NO: 263318 - RNA, 32 nt, Human
ugugcuacuaucugaaacucauuuuaccuaac

SEQ ID NO: 263319 - RNA, 32 nt, Human
ugugcuacucuacuccagccugggcaacacag

SEQ ID NO: 263320 - RNA, 32 nt, Human
ugugcuacugaacuucagaggugaucaauaaa

SEQ ID NO: 263321 - RNA, 32 nt, Human
ugugcuacugcacuccaaucuggcaacagagc

SEQ ID NO: 263322 - RNA, 32 nt, Human
ugugcuacugcacuccagccugggcaacagag

SEQ ID NO: 263323 - RNA, 32 nt, Human
ugugcuacugcacucuagauugggugacagag

SEQ ID NO: 263324 - RNA, 32 nt, Human
ugugcuacuguuggagacacgaggcccccagg

SEQ ID NO: 263325 - RNA, 32 nt, Human
ugugcuacuucaacauaagauuggacaugcuc

SEQ ID NO: 263326 - RNA, 20 nt, Human
ugugcuagcgccugccugug

SEQ ID NO: 263327 - RNA, 32 nt, Human
ugugcuagcuaguggggauguggcagugggga

SEQ ID NO: 263328 - RNA, 20 nt, Human
ugugcuaguaagcccugugg

SEQ ID NO: 263329 - RNA, 32 nt, Human
ugugcuaguuccgagcuagguaugacagggac

SEQ ID NO: 263330 - RNA, 32 nt, Human
ugugcuaucuucucuucuauccaaguagaaug

SEQ ID NO: 263331 - RNA, 32 nt, Human
ugugcuauucagccaauagugcugcuggccca

SEQ ID NO: 263332 - RNA, 18 nt, Human
ugugcuauugagauucca

SEQ ID NO: 263333 - RNA, 32 nt, Human
ugugcuauugcacuccagccugggugacagac

SEQ ID NO: 263334 - RNA, 32 nt, Human
ugugcuauuucauaucuguacuccaggcagaa

SEQ ID NO: 263335 - RNA, 32 nt, Human
ugugcuauuugcacucuagccugggugacaga

SEQ ID NO: 263336 - RNA, 32 nt, Human
ugugcucaaccgugggcucccagcacaccccc

SEQ ID NO: 263337 - RNA, 32 nt, Human
ugugcucacagaaacaugcgcuguaaugaauc

SEQ ID NO: 263338 - RNA, 32 nt, Human
ugugcucacccaggcugagggugccuuugugg

SEQ ID NO: 263339 - RNA, 32 nt, Human
ugugcucacuggguggagcuguggcagggggc

SEQ ID NO: 263340 - RNA, 32 nt, Human
ugugcucagagcugcugugugucauccugugu

SEQ ID NO: 263341 - RNA, 32 nt, Human
ugugcucagaggaggugagaggagaggaagga

SEQ ID NO: 263342 - RNA, 32 nt, Human
ugugcucagaugauccuuuucaucucagccuc

SEQ ID NO: 263343 - RNA, 18 nt, Human
ugugcucagcucuggaca

SEQ ID NO: 263344 - RNA, 32 nt, Human
ugugcucaggaaaccucacccaccucagcccu

SEQ ID NO: 263345 - RNA, 32 nt, Human
ugugcucaggaucagcagagcaggcaggcaga

SEQ ID NO: 263346 - RNA, 32 nt, Human
ugugcucaggggacaaucuccccucaaccgca

SEQ ID NO: 263347 - RNA, 32 nt, Human
ugugcucagugcacuggggauuuggagagaga

SEQ ID NO: 263348 - RNA, 32 nt, Human
ugugcucaucagagaccccagccuggggaaca

SEQ ID NO: 263349 - RNA, 32 nt, Human
ugugcucauccugaacuguuacuccaaaucca

SEQ ID NO: 263350 - RNA, 19 nt, Human
ugugcucaugcuggaagca

SEQ ID NO: 263351 - RNA, 32 nt, Human
ugugcuccaccaacuuuuuaguauaugaguca

SEQ ID NO: 263352 - RNA, 32 nt, Human
ugugcuccaccagggucaccaacugucccaau

SEQ ID NO: 263353 - RNA, 32 nt, Human
ugugcuccagccugggcaacaaagugagacuc

SEQ ID NO: 263354 - RNA, 32 nt, Human
ugugcuccagccugggcaacaagagugaaacu

SEQ ID NO: 263355 - RNA, 32 nt, Human
ugugcuccagccugggcaacagagugagacua

SEQ ID NO: 263356 - RNA, 32 nt, Human
ugugcuccagccugggcaacagagugagacuc

SEQ ID NO: 263357 - RNA, 32 nt, Human
ugugcucccaccacugcacuccagccugggaa

SEQ ID NO: 263358 - RNA, 32 nt, Human
ugugcucccagcagcucagacagggaaaggau

SEQ ID NO: 263359 - RNA, 32 nt, Human
ugugcucccagccuugaggcugcaguaggacu

SEQ ID NO: 263360 - RNA, 32 nt, Human
ugugcucccucgcuccuuccucugcauugccc

SEQ ID NO: 263361 - RNA, 32 nt, Human
ugugcucccugaccaaugacagagccugaaaa

SEQ ID NO: 263362 - RNA, 32 nt, Human
ugugcucccugcacuccacucaaguugagagu

SEQ ID NO: 263363 - RNA, 32 nt, Human
ugugcucccuuucucuccucucuccuuuucua

SEQ ID NO: 263364 - RNA, 32 nt, Human
ugugcuccgaggaucccaggaggaaggauggg

SEQ ID NO: 263365 - RNA, 32 nt, Human
ugugcuccuccaggucucacucaggcucacuc

SEQ ID NO: 263366 - RNA, 32 nt, Human
ugugcuccugcuacacugacagacugauugcg

SEQ ID NO: 263367 - RNA, 32 nt, Human
ugugcuccuuggagcuggugugcaguguccug

SEQ ID NO: 263368 - RNA, 32 nt, Human
ugugcucgauuucucacugggccuuagcugcc

SEQ ID NO: 263369 - RNA, 32 nt, Human
ugugcucgccuugccacaucugugucucugga

SEQ ID NO: 263370 - RNA, 32 nt, Human
ugugcucgggccccaacuccugacugggugca

SEQ ID NO: 263371 - RNA, 20 nt, Human
ugugcucggucuccaccugu

SEQ ID NO: 263372 - RNA, 32 nt, Human
ugugcucggucuccaccugucucccauucugu

SEQ ID NO: 263373 - RNA, 32 nt, Human
ugugcucguggacugaggcugcgcugcccggg

SEQ ID NO: 263374 - RNA, 32 nt, Human
ugugcucuaaacagugggaguaccaaagaaau

SEQ ID NO: 263375 - RNA, 32 nt, Human
ugugcucucaaaugagaggaacaggagugaca

SEQ ID NO: 263376 - RNA, 32 nt, Human
ugugcucuccagaacccaacugccucaucccg

SEQ ID NO: 263377 - RNA, 32 nt, Human
ugugcucucccagggcguccgcugggugggag

SEQ ID NO: 263378 - RNA, 32 nt, Human
ugugcucuccccaguaguggaaugcggggagg

SEQ ID NO: 263379 - RNA, 32 nt, Human
ugugcucucucccgucucuuccauucucuaug

SEQ ID NO: 263380 - RNA, 32 nt, Human
ugugcucucugcagcuacaaaacaucuuggca

SEQ ID NO: 263381 - RNA, 32 nt, Human
ugugcucugaaaugcuaaugucaacuacaaau

SEQ ID NO: 263382 - RNA, 32 nt, Human
ugugcucugauggcacccaucuguacuccagc

SEQ ID NO: 263383 - RNA, 32 nt, Human
ugugcucugcaguguccucccaacugaaaaca

SEQ ID NO: 263384 - RNA, 32 nt, Human
ugugcucugcucugcccugccaggcugcccuu

SEQ ID NO: 263385 - RNA, 32 nt, Human
ugugcucuggaaaguaacugcagccaccaggu

SEQ ID NO: 263386 - RNA, 32 nt, Human
ugugcucugggcccuuucucuuuuuccagcca

SEQ ID NO: 263387 - RNA, 32 nt, Human
ugugcucugguggaacaaguugggagaggcug

SEQ ID NO: 263388 - RNA, 32 nt, Human
ugugcucugucacccaggcuggagugcaaugg

SEQ ID NO: 263389 - RNA, 32 nt, Human
ugugcucugucugucugucuuugucugucugu

SEQ ID NO: 263390 - RNA, 32 nt, Human
ugugcucuucuucaggacucaggcuucuccau

SEQ ID NO: 263391 - RNA, 32 nt, Human
ugugcugaaauguuaucuacucagagaagaca

SEQ ID NO: 263392 - RNA, 32 nt, Human
ugugcugaacaaggacauuugcuucucagaua

SEQ ID NO: 263393 - RNA, 32 nt, Human
ugugcugaacccaguaacucgucauuugauuu

SEQ ID NO: 263394 - RNA, 28 nt, Human
ugugcugaaucaacagucauugcagauc

SEQ ID NO: 263395 - RNA, 32 nt, Human
ugugcugaccaugggcccugagcguccuaccc

SEQ ID NO: 263396 - RNA, 32 nt, Human
ugugcugacggcacagaugaggaggacugccc

SEQ ID NO: 263397 - RNA, 32 nt, Human
ugugcugacuccaugucccaggaccucauuuc

SEQ ID NO: 263398 - RNA, 32 nt, Human
ugugcugagagggagaggagcagagaugcugc

SEQ ID NO: 263399 - RNA, 23 nt, Human
ugugcugagagugacucgccgug

SEQ ID NO: 263400 - RNA, 32 nt, Human
ugugcugagauugcaggcaugagccacugcgc

SEQ ID NO: 263401 - RNA, 32 nt, Human
ugugcugagcaugguccuggacccggagcugg

SEQ ID NO: 263402 - RNA, 30 nt, Human
ugugcugagcucuccaugucgcuguugccg

SEQ ID NO: 263403 - RNA, 32 nt, Human
ugugcugaggaggauuaguaaaagaggaagga

SEQ ID NO: 263404 - RNA, 32 nt, Human
ugugcugaggaggauuaguaaaagaggaaggc

SEQ ID NO: 263405 - RNA, 32 nt, Human
ugugcugaguguuuuccucccuuugccucuac

SEQ ID NO: 263406 - RNA, 19 nt, Human
ugugcugauaagcuugaaa

SEQ ID NO: 263407 - RNA, 32 nt, Human
ugugcugaucuuggaggcagaguggcugccug

SEQ ID NO: 263408 - RNA, 32 nt, Human
ugugcugauguggccguugguggucagguaag

SEQ ID NO: 263409 - RNA, 32 nt, Human
ugugcugcaagcugacuccagccuugggcuca

SEQ ID NO: 263410 - RNA, 32 nt, Human
ugugcugcaagcugacuccagccuugggguca

SEQ ID NO: 263411 - RNA, 32 nt, Human
ugugcugcacgggacccagcuccuuuugcugg

SEQ ID NO: 263412 - RNA, 32 nt, Human
ugugcugcaggcucccccugaggccccucucc

SEQ ID NO: 263413 - RNA, 32 nt, Human
ugugcugcaggugcacaaagucaccgaggacc

SEQ ID NO: 263414 - RNA, 32 nt, Human
ugugcugcaucccaccagccugagcaagacgc

SEQ ID NO: 263415 - RNA, 32 nt, Human
ugugcugccaacacccccugaggcuccuaggc

SEQ ID NO: 263416 - RNA, 32 nt, Human
ugugcugccaccccggccucugaguaagacuc

SEQ ID NO: 263417 - RNA, 32 nt, Human
ugugcugccauccuguggccauugcaggaagu

SEQ ID NO: 263418 - RNA, 32 nt, Human
ugugcugcccaccauggcacacugcuucucca

SEQ ID NO: 263419 - RNA, 32 nt, Human
ugugcugccgccaccucugcuccagagugucc

SEQ ID NO: 263420 - RNA, 32 nt, Human
ugugcugccgccgcccguggccgccccucucc

SEQ ID NO: 263421 - RNA, 32 nt, Human
ugugcugccugguuugaccucaucucaccugg

SEQ ID NO: 263422 - RNA, 32 nt, Human
ugugcugcgccugcaggcagagcuggagcccc

SEQ ID NO: 263423 - RNA, 32 nt, Human
ugugcugcuaccuuccaugcagggcguugagg

SEQ ID NO: 263424 - RNA, 32 nt, Human
ugugcugcugcaaguccuccugggcuuccuuc

SEQ ID NO: 263425 - RNA, 32 nt, Human
ugugcugcugcacuccagccugggagacagag

SEQ ID NO: 263426 - RNA, 32 nt, Human
ugugcugcugcacuccagccugggugaaaaag

SEQ ID NO: 263427 - RNA, 32 nt, Human
ugugcugcugggacccaagaguggggcgucgc

SEQ ID NO: 263428 - RNA, 32 nt, Human
ugugcugcugugaugcugguccuucaucuuag

SEQ ID NO: 263429 - RNA, 32 nt, Human
ugugcuggaagcuucccugagcaacagaccag

SEQ ID NO: 263430 - RNA, 32 nt, Human
ugugcuggagugaggggaagaagcuguuacag

SEQ ID NO: 263431 - RNA, 32 nt, Human
ugugcuggcauuucucacccuuucaucuuuag

SEQ ID NO: 263432 - RNA, 32 nt, Human
ugugcuggcuccugccccuuccugcuuuugca

SEQ ID NO: 263433 - RNA, 32 nt, Human
ugugcuggcugagcugcaagaggcucuauggc

SEQ ID NO: 263434 - RNA, 32 nt, Human
ugugcuggcugccuccugaaggaagcccuccu

SEQ ID NO: 263435 - RNA, 32 nt, Human
ugugcugggaaagacuuucugggcaaaaggaa

SEQ ID NO: 263436 - RNA, 32 nt, Human
ugugcugggaagaagagaccugggcuuggaag

SEQ ID NO: 263437 - RNA, 32 nt, Human
ugugcugggauuacaggcaugagccaccgcac

SEQ ID NO: 263438 - RNA, 32 nt, Human
ugugcugggauuacaggcaugagcuacuaugc

SEQ ID NO: 263439 - RNA, 32 nt, Human
ugugcugggcuucauuuacauuuuaacugucu

SEQ ID NO: 263440 - RNA, 32 nt, Human
ugugcuggggccacgacuugcccacauaugug

SEQ ID NO: 263441 - RNA, 32 nt, Human
ugugcuggguuaacagcuuccuucccuuucug

SEQ ID NO: 263442 - RNA, 32 nt, Human
ugugcugguaacuugggcugaccuaccuacag

SEQ ID NO: 263443 - RNA, 32 nt, Human
ugugcugguacccagacugcagucaucaccag

SEQ ID NO: 263444 - RNA, 32 nt, Human
ugugcuggugcaugccuguaaucucagcuacu

SEQ ID NO: 263445 - RNA, 32 nt, Human
ugugcuggugggcgccuguaaucccagcuacu

SEQ ID NO: 263446 - RNA, 32 nt, Human
ugugcuguaaaauacagauuuggaagaaauga

SEQ ID NO: 263447 - RNA, 32 nt, Human
ugugcuguagcuccagccgggaugaggacugc

SEQ ID NO: 263448 - RNA, 32 nt, Human
ugugcugucccaggaagugucuggcgggcgug

SEQ ID NO: 263449 - RNA, 32 nt, Human
ugugcuguccuauccagccucucacagcugcc

SEQ ID NO: 263450 - RNA, 32 nt, Human
ugugcuguccugccucagaugcagagagagca

SEQ ID NO: 263451 - RNA, 20 nt, Human
ugugcuguccuuugcuguca

SEQ ID NO: 263452 - RNA, 32 nt, Human
ugugcugucgucaugccucaaacccgauccca

SEQ ID NO: 263453 - RNA, 32 nt, Human
ugugcugugaauucaguggggagcuguagcgg

SEQ ID NO: 263454 - RNA, 32 nt, Human
ugugcugugcucaagcgggcagccagggcuga

SEQ ID NO: 263455 - RNA, 32 nt, Human
ugugcuguuccuucuugccucuaacuuguaaa

SEQ ID NO: 263456 - RNA, 24 nt, Human
ugugcuguugcuuuucaucuuagu

SEQ ID NO: 263457 - RNA, 32 nt, Human
ugugcuuaaauauucuaggaguagaagcacuc

SEQ ID NO: 263458 - RNA, 32 nt, Human
ugugcuuaauccauuucugcagacacaacuca

SEQ ID NO: 263459 - RNA, 32 nt, Human
ugugcuuaugugaaccccuuggugaagguccc

SEQ ID NO: 263460 - RNA, 32 nt, Human
ugugcuuauucauacaagacaggaagcacggu

SEQ ID NO: 263461 - RNA, 32 nt, Human
ugugcuuauuuuguacugcagaauuccaauaa

SEQ ID NO: 263462 - RNA, 26 nt, Human
ugugcuucaaacugucuuaaacaaug

SEQ ID NO: 263463 - RNA, 32 nt, Human
ugugcuucagccccggccccagcuucagcucu

SEQ ID NO: 263464 - RNA, 32 nt, Human
ugugcuucaggcccuccaaaccccuguguucc

SEQ ID NO: 263465 - RNA, 32 nt, Human
ugugcuucauuuccuucugggcauuuuucauu

SEQ ID NO: 263466 - RNA, 32 nt, Human
ugugcuucccagccccaggguuucccuccuuc

SEQ ID NO: 263467 - RNA, 32 nt, Human
ugugcuuccggaggcucccuguguccuggagg

SEQ ID NO: 263468 - RNA, 32 nt, Human
ugugcuuccuucacuucaccuccauccucugu

SEQ ID NO: 263469 - RNA, 32 nt, Human
ugugcuucuccaggauacuuuagccucaauau

SEQ ID NO: 263470 - RNA, 32 nt, Human
ugugcuucucucuccgguacgugcccagcuca

SEQ ID NO: 263471 - RNA, 32 nt, Human
ugugcuucugggucagguggggacuuggagaa

SEQ ID NO: 263472 - RNA, 32 nt, Human
ugugcuugaacccagggcugugcugguguagg

SEQ ID NO: 263473 - RNA, 32 nt, Human
ugugcuugacucugcuucuugccacaucuucu

SEQ ID NO: 263474 - RNA, 32 nt, Human
ugugcuugagcucugguuugagagcuggcgcu

SEQ ID NO: 263475 - RNA, 32 nt, Human
ugugcuugaucugacauuuguauacauaaaag

SEQ ID NO: 263476 - RNA, 32 nt, Human
ugugcuugcagcccucaugagaaggcucagaa

SEQ ID NO: 263477 - RNA, 32 nt, Human
ugugcuugccuagggccucugugauggacauc

SEQ ID NO: 263478 - RNA, 32 nt, Human
ugugcuugcuucccgaagcagugagaagccag

SEQ ID NO: 263479 - RNA, 32 nt, Human
ugugcuugcuucuccuuuccugaggccuucaa

SEQ ID NO: 263480 - RNA, 32 nt, Human
ugugcuuggauacagggagcagccaggagacu

SEQ ID NO: 263481 - RNA, 32 nt, Human
ugugcuuggauguuaguucuccacccucgagg

SEQ ID NO: 263482 - RNA, 32 nt, Human
ugugcuuggcccacagucuggcucaugaugug

SEQ ID NO: 263483 - RNA, 32 nt, Human
ugugcuugggaugacgggugccucccaagagc

SEQ ID NO: 263484 - RNA, 32 nt, Human
ugugcuugggcccuguuuccagugugagguca

SEQ ID NO: 263485 - RNA, 32 nt, Human
ugugcuuguaaucccagcuacuugggaggcug

SEQ ID NO: 263486 - RNA, 32 nt, Human
ugugcuuguagucccagcuacuuaggaggcug

SEQ ID NO: 263487 - RNA, 32 nt, Human
ugugcuuguagucccagcuacuuuggaggcug

SEQ ID NO: 263488 - RNA, 32 nt, Human
ugugcuuguucuuuuaaauucuccuguuucag

SEQ ID NO: 263489 - RNA, 32 nt, Human
ugugcuuuacgauagcuuagugcaaugugcac

SEQ ID NO: 263490 - RNA, 32 nt, Human
ugugcuuucaaaggcaagacuugucuguaauu

SEQ ID NO: 263491 - RNA, 32 nt, Human
ugugcuuucccaagcguuccaccacccucuca

SEQ ID NO: 263492 - RNA, 32 nt, Human
ugugcuuuccucccucuccccugcccaccuca

SEQ ID NO: 263493 - RNA, 32 nt, Human
ugugcuuucucaggaaccuuucaagcggccag

SEQ ID NO: 263494 - RNA, 32 nt, Human
ugugcuuugaagagagugaauuuuggauaguc

SEQ ID NO: 263495 - RNA, 32 nt, Human
ugugcuuuucagcuugacacagguuuggagua

SEQ ID NO: 263496 - RNA, 32 nt, Human
ugugcuuuucuccaagucagcacccaaagguc

SEQ ID NO: 263497 - RNA, 32 nt, Human
ugugcuuuugcaccauugaguugacugccucu

SEQ ID NO: 263498 - RNA, 32 nt, Human
ugugcuuuugcacuugcagacugcucuaccuc

SEQ ID NO: 263499 - RNA, 32 nt, Human
ugugcuuuuggguggaaguuaggagaauguuu

SEQ ID NO: 263500 - RNA, 32 nt, Human
ugugcuuuuuaagccauuuccccaaaugggac

SEQ ID NO: 263501 - RNA, 21 nt, Human
uguggaaaaacugccuuccac

SEQ ID NO: 263502 - RNA, 21 nt, Human
uguggaaaaauugucuuccac

SEQ ID NO: 263503 - RNA, 32 nt, Human
uguggaaaaccugaagcuucccagccccacuu

SEQ ID NO: 263504 - RNA, 23 nt, Human
uguggaaaagaauggagagggga

SEQ ID NO: 263505 - RNA, 32 nt, Human
uguggaaacaucuauccuauagaucauccuau

SEQ ID NO: 263506 - RNA, 32 nt, Human
uguggaaacucaaaccguuaggcuccagucau

SEQ ID NO: 263507 - RNA, 32 nt, Human
uguggaaacuucagucccucaggcuggcagcu

SEQ ID NO: 263508 - RNA, 32 nt, Human
uguggaaagacaggagguguggggaaggaggg

SEQ ID NO: 263509 - RNA, 32 nt, Human
uguggaaagacuguuuuccauauguuauacuc

SEQ ID NO: 263510 - RNA, 32 nt, Human
uguggaaagccagaaagagaugaagggcaggc

SEQ ID NO: 263511 - RNA, 32 nt, Human
uguggaaagcuuuuagcacaguaucuggugau

SEQ ID NO: 263512 - RNA, 32 nt, Human
uguggaaagguugguucagugggggcuauucu

SEQ ID NO: 263513 - RNA, 32 nt, Human
uguggaaaucucacugggucucucucaaggcc

SEQ ID NO: 263514 - RNA, 32 nt, Human
uguggaacauaacaagaccccgucucuacuau

SEQ ID NO: 263515 - RNA, 32 nt, Human
uguggaaccuggaggcuccugaugccuuugac

SEQ ID NO: 263516 - RNA, 32 nt, Human
uguggaacuaugagccaauuaaaccucuuuuc

SEQ ID NO: 263517 - RNA, 32 nt, Human
uguggaacugugagucaauuacacucuuucca

SEQ ID NO: 263518 - RNA, 32 nt, Human
uguggaagagaaggaacccucacacaccacug

SEQ ID NO: 263519 - RNA, 21 nt, Human
uguggaagagaccuacuugca

SEQ ID NO: 263520 - RNA, 32 nt, Human
uguggaagaucuuguagggaaaagccaacggu

SEQ ID NO: 263521 - RNA, 32 nt, Human
uguggaagauucugagaaagaaaauaguuucc

SEQ ID NO: 263522 - RNA, 32 nt, Human
uguggaagcagcuucagguaggugagcucgug

SEQ ID NO: 263523 - RNA, 32 nt, Human
uguggaagcucugccuuuuugacuucauacuu

SEQ ID NO: 263524 - RNA, 32 nt, Human
uguggaaggcagcagagcggacuggugaggag

SEQ ID NO: 263525 - RNA, 20 nt, Human
uguggaaggcuucccuucau

SEQ ID NO: 263526 - RNA, 21 nt, Human
uguggaagggggaaaagggga

SEQ ID NO: 263527 - RNA, 32 nt, Human
uguggaaggucacucuguggccguguuccccu

SEQ ID NO: 263528 - RNA, 32 nt, Human
uguggaagguucugagaaagaaaauaguuucc

SEQ ID NO: 263529 - RNA, 32 nt, Human
uguggaagugagaaggagucacugugaugcuu

SEQ ID NO: 263530 - RNA, 24 nt, Human
uguggaauccaaucugucuuccau

SEQ ID NO: 263531 - RNA, 32 nt, Human
uguggaauccccaacuucauuagcuucugugg

SEQ ID NO: 263532 - RNA, 32 nt, Human
uguggaauccugcaaaugaucacaaagaaaga

SEQ ID NO: 263533 - RNA, 32 nt, Human
uguggaaucuggagugagggguaaaagcugau

SEQ ID NO: 263534 - RNA, 32 nt, Human
uguggaaugauacuucugaaaucaaaauuccu

SEQ ID NO: 263535 - RNA, 32 nt, Human
uguggaaugccccuggccagcaaggggugcuu

SEQ ID NO: 263536 - RNA, 32 nt, Human
uguggaauugagcagagaaccugcucucggag

SEQ ID NO: 263537 - RNA, 32 nt, Human
uguggaauuggggugaggggagcaagggaagc

SEQ ID NO: 263538 - RNA, 25 nt, Human
uguggacaaagugucuguuuucuac

SEQ ID NO: 263539 - RNA, 22 nt, Human
uguggacaacaagcgcugcuac

SEQ ID NO: 263540 - RNA, 32 nt, Human
uguggacaacacaguaagacccugucucuaca

SEQ ID NO: 263541 - RNA, 19 nt, Human
uguggacaagacaccucca

SEQ ID NO: 263542 - RNA, 22 nt, Human
uguggacaagagcugguuucua

SEQ ID NO: 263543 - RNA, 22 nt, Human
uguggacaagcucacuauucac

SEQ ID NO: 263544 - RNA, 31 nt, Human
uguggacaaguguucuaugagcagagacugg

SEQ ID NO: 263545 - RNA, 21 nt, Human
uguggacaaugggcuuuucau

SEQ ID NO: 263546 - RNA, 19 nt, Human
uguggacaauuggccucca

SEQ ID NO: 263547 - RNA, 26 nt, Human
uguggacacacugccugcucuuccau

SEQ ID NO: 263548 - RNA, 22 nt, Human
uguggacacagaggcuuuccau

SEQ ID NO: 263549 - RNA, 32 nt, Human
uguggacacagcacuccaacuuacuccagggc

SEQ ID NO: 263550 - RNA, 32 nt, Human
uguggacacagcuguuucuguuccugaacuag

SEQ ID NO: 263551 - RNA, 32 nt, Human
uguggacacaggcuggagucagguucgccauc

SEQ ID NO: 263552 - RNA, 20 nt, Human
uguggacacauccucuccac

SEQ ID NO: 263553 - RNA, 20 nt, Human
uguggacaccaccucuccau

SEQ ID NO: 263554 - RNA, 23 nt, Human
uguggacacuuacuguccucuac

SEQ ID NO: 263555 - RNA, 20 nt, Human
uguggacagacaacuacaaa

SEQ ID NO: 263556 - RNA, 32 nt, Human
uguggacagacacuacuugccuuugugguuua

SEQ ID NO: 263557 - RNA, 21 nt, Human
uguggacagagccccagucac

SEQ ID NO: 263558 - RNA, 32 nt, Human
uguggacagaggaaccaacaucugccaccucu

SEQ ID NO: 263559 - RNA, 32 nt, Human
uguggacagcaaggcuggaguugugaacccaa

SEQ ID NO: 263560 - RNA, 20 nt, Human
uguggacagccagcccccgc

SEQ ID NO: 263561 - RNA, 19 nt, Human
uguggacagccaucuucac

SEQ ID NO: 263562 - RNA, 22 nt, Human
uguggacagcccaccccuccgc

SEQ ID NO: 263563 - RNA, 32 nt, Human
uguggacaggcagcggcggcuggcgacgaacg

SEQ ID NO: 263564 - RNA, 32 nt, Human
uguggacaggcagggagaugcaugcgagugca

SEQ ID NO: 263565 - RNA, 32 nt, Human
uguggacaggcugacacguaccaguccccacu

SEQ ID NO: 263566 - RNA, 23 nt, Human
uguggacagucucuugaagcugg

SEQ ID NO: 263567 - RNA, 32 nt, Human
uguggacagugaacuguggcccacuguuaggg

SEQ ID NO: 263568 - RNA, 32 nt, Human
uguggacagugaacuguggcccacuguugggg

SEQ ID NO: 263569 - RNA, 20 nt, Human
uguggacauaagcucuuucu

SEQ ID NO: 263570 - RNA, 32 nt, Human
uguggacauacugacgcuccuccaugaagcag

SEQ ID NO: 263571 - RNA, 32 nt, Human
uguggacauagagagaggggaaggguuggaaa

SEQ ID NO: 263572 - RNA, 18 nt, Human
uguggacauccccuccac

SEQ ID NO: 263573 - RNA, 19 nt, Human
uguggacaucucccuguac

SEQ ID NO: 263574 - RNA, 19 nt, Human
uguggacaucuuuuuccac

SEQ ID NO: 263575 - RNA, 18 nt, Human
uguggacaugugcccuuc

SEQ ID NO: 263576 - RNA, 21 nt, Human
uguggacauuacucccucuua

SEQ ID NO: 263577 - RNA, 21 nt, Human
uguggacauugguuucuccau

SEQ ID NO: 263578 - RNA, 24 nt, Human
uguggacauuguugugaaauuggu

SEQ ID NO: 263579 - RNA, 22 nt, Human
uguggacauuuagcaucuccau

SEQ ID NO: 263580 - RNA, 20 nt, Human
uguggaccaaguccuuccau

SEQ ID NO: 263581 - RNA, 32 nt, Human
uguggaccacaucuccucaguugcugauucag

SEQ ID NO: 263582 - RNA, 32 nt, Human
uguggaccagaacuuucaccuugugaaugcau

SEQ ID NO: 263583 - RNA, 32 nt, Human
uguggaccagaacuuugaccuugugaaugcau

SEQ ID NO: 263584 - RNA, 32 nt, Human
uguggaccagagaaugauagugggacuuccug

SEQ ID NO: 263585 - RNA, 32 nt, Human
uguggaccaguaggacucaagguggacgugcg

SEQ ID NO: 263586 - RNA, 32 nt, Human
uguggacccacccuuccucuauaaguaccagc

SEQ ID NO: 263587 - RNA, 32 nt, Human
uguggacccaggaggcagagcuugcagugagc

SEQ ID NO: 263588 - RNA, 32 nt, Human
uguggaccccagagaagguggcagguggcccc

SEQ ID NO: 263589 - RNA, 32 nt, Human
uguggaccccugucugggccacccuagugugc

SEQ ID NO: 263590 - RNA, 23 nt, Human
uguggaccccuuugccuucacac

SEQ ID NO: 263591 - RNA, 32 nt, Human
uguggacccgagaagcagagagcgagaggggg

SEQ ID NO: 263592 - RNA, 32 nt, Human
uguggacccggcccuggcggcggagucagggu

SEQ ID NO: 263593 - RNA, 32 nt, Human
uguggacccucagaccccuaaauggggccguc

SEQ ID NO: 263594 - RNA, 32 nt, Human
uguggacccugacucacagcagaaucauucag

SEQ ID NO: 263595 - RNA, 32 nt, Human
uguggaccgcaggaucucagcacucugaccca

SEQ ID NO: 263596 - RNA, 22 nt, Human
uguggaccuaaagaggugggga

SEQ ID NO: 263597 - RNA, 32 nt, Human
uguggaccucagggaagccaggggcagcuguc

SEQ ID NO: 263598 - RNA, 32 nt, Human
uguggaccucucuugucuccccaccacuccag

SEQ ID NO: 263599 - RNA, 32 nt, Human
uguggaccuucaggaagccuuucuaggaagag

SEQ ID NO: 263600 - RNA, 32 nt, Human
uguggacggggcugggaaaaugaauaagaauu

SEQ ID NO: 263601 - RNA, 32 nt, Human
uguggacggugaccggcucacucugcggcgcc

SEQ ID NO: 263602 - RNA, 32 nt, Human
uguggacgugccuccuuccucuucaccuugug

SEQ ID NO: 263603 - RNA, 18 nt, Human
uguggacgugcuuugggg

SEQ ID NO: 263604 - RNA, 32 nt, Human
uguggacgugugcagaggugggggugcugagc

SEQ ID NO: 263605 - RNA, 32 nt, Human
uguggacuacagcuuauucagccugggaaaaa

SEQ ID NO: 263606 - RNA, 32 nt, Human
uguggacucaccugaggaagggaaggaaggga

SEQ ID NO: 263607 - RNA, 32 nt, Human
uguggacucccagcuaagcagaaaacuauugu

SEQ ID NO: 263608 - RNA, 32 nt, Human
uguggacucccgcuucccugcacugcugcucc

SEQ ID NO: 263609 - RNA, 32 nt, Human
uguggacuccuaaccaugcuaaccucacuggc

SEQ ID NO: 263610 - RNA, 22 nt, Human
uguggacuccugucccgggacu

SEQ ID NO: 263611 - RNA, 32 nt, Human
uguggacucugcucacuaccugggugacagga

SEQ ID NO: 263612 - RNA, 32 nt, Human
uguggacugaagaagaaagaaaacaauucaaa

SEQ ID NO: 263613 - RNA, 24 nt, Human
uguggacugaagcugacccuccau

SEQ ID NO: 263614 - RNA, 32 nt, Human
uguggacuuauucauuccucacaaugaggcua

SEQ ID NO: 263615 - RNA, 32 nt, Human
uguggacuuuaaacaaugaaacuuuuucaaaa

SEQ ID NO: 263616 - RNA, 32 nt, Human
uguggagaagcuggggagaaggcgugggagga

SEQ ID NO: 263617 - RNA, 32 nt, Human
uguggagaagguagcccaggagcagggcggcc

SEQ ID NO: 263618 - RNA, 32 nt, Human
uguggagacaacagugugucccaaugacuuuc

SEQ ID NO: 263619 - RNA, 32 nt, Human
uguggagacaacagugugucccaaugacuuuu

SEQ ID NO: 263620 - RNA, 32 nt, Human
uguggagacagugguucccugaugaaaaacug

SEQ ID NO: 263621 - RNA, 32 nt, Human
uguggagagaggaguccucacuugucuuccuu

SEQ ID NO: 263622 - RNA, 32 nt, Human
uguggagagcacgucuucucugccgcgcccuc

SEQ ID NO: 263623 - RNA, 32 nt, Human
uguggagagcugcagccaacuccaggguuucc

SEQ ID NO: 263624 - RNA, 32 nt, Human
uguggagaggagagaaugagagaguguggaaa

SEQ ID NO: 263625 - RNA, 32 nt, Human
uguggagagggagggaaugcagaggaaagaau

SEQ ID NO: 263626 - RNA, 19 nt, Human
uguggagauaagaagggga

SEQ ID NO: 263627 - RNA, 32 nt, Human
uguggagaucucaaacuuucuguacucagaag

SEQ ID NO: 263628 - RNA, 32 nt, Human
uguggagaugcagagguaaaagugugagcagu

SEQ ID NO: 263629 - RNA, 32 nt, Human
uguggagauggcaguguaucuaccucacaaag

SEQ ID NO: 263630 - RNA, 32 nt, Human
uguggagcaaaagguggccaugucugugagcu

SEQ ID NO: 263631 - RNA, 32 nt, Human
uguggagcaagaaaggauuuggggaagcuugg

SEQ ID NO: 263632 - RNA, 32 nt, Human
uguggagcacaauccugacuguaccugugaug

SEQ ID NO: 263633 - RNA, 32 nt, Human
uguggagcagcagggcuggagaucucugcagu

SEQ ID NO: 263634 - RNA, 32 nt, Human
uguggagcagggccaacuggaaagacguguuu

SEQ ID NO: 263635 - RNA, 32 nt, Human
uguggagcagggccacgugagguaccugagca

SEQ ID NO: 263636 - RNA, 32 nt, Human
uguggagcauugagggaguugcuucuuaggcc

SEQ ID NO: 263637 - RNA, 32 nt, Human
uguggagccagccacccucaccaggugccuuc

SEQ ID NO: 263638 - RNA, 32 nt, Human
uguggagcccacccuucuugcuccuccacacu

SEQ ID NO: 263639 - RNA, 32 nt, Human
uguggagccgcuggggcugcagccaccggauc

SEQ ID NO: 263640 - RNA, 32 nt, Human
uguggagcucacuuaggcagggccucuggcug

SEQ ID NO: 263641 - RNA, 32 nt, Human
uguggagcugugguaagagccucgggcgcauu

SEQ ID NO: 263642 - RNA, 32 nt, Human
uguggagcuuucuaguagguguccuucauagc

SEQ ID NO: 263643 - RNA, 32 nt, Human
uguggaggacaggccagagaggaggccagcag

SEQ ID NO: 263644 - RNA, 32 nt, Human
uguggaggagaaacucuuggccuaucaagugc

SEQ ID NO: 263645 - RNA, 19 nt, Human
uguggaggaggaagauggg

SEQ ID NO: 263646 - RNA, 32 nt, Human
uguggaggagguggaugcagccaugaauacaa

SEQ ID NO: 263647 - RNA, 32 nt, Human
uguggaggagguggcuuccagcagggugcugg

SEQ ID NO: 263648 - RNA, 23 nt, Human
uguggaggagguuguugcuuuau

SEQ ID NO: 263649 - RNA, 32 nt, Human
uguggaggauggaggugaccggggacgccggg

SEQ ID NO: 263650 - RNA, 32 nt, Human
uguggaggccaguucuggagcuauugcagccu

SEQ ID NO: 263651 - RNA, 32 nt, Human
uguggaggccucucccuggugugggcccacag

SEQ ID NO: 263652 - RNA, 16 nt, Human
uguggaggcggcgcga

SEQ ID NO: 263653 - RNA, 32 nt, Human
uguggaggcucacaccuguaaucucagcauuu

SEQ ID NO: 263654 - RNA, 32 nt, Human
uguggaggcugaauccuugaaggaggagguga

SEQ ID NO: 263655 - RNA, 32 nt, Human
uguggaggcugaggggucgggggaagaaaaca

SEQ ID NO: 263656 - RNA, 32 nt, Human
uguggagggagccacagagagggguccaggcu

SEQ ID NO: 263657 - RNA, 32 nt, Human
uguggagggcaaaaggagauaccaucccaggc

SEQ ID NO: 263658 - RNA, 32 nt, Human
uguggagggcucugucuguugcugaggaccaa

SEQ ID NO: 263659 - RNA, 32 nt, Human
uguggaggggagugccugguuggaucccacac

SEQ ID NO: 263660 - RNA, 32 nt, Human
uguggaggggcaggagcgugaugcagacaagg

SEQ ID NO: 263661 - RNA, 32 nt, Human
uguggaggggcccucugguaugugugucccug

SEQ ID NO: 263662 - RNA, 32 nt, Human
uguggagggugcaggaggaaggcauggacucg

SEQ ID NO: 263663 - RNA, 32 nt, Human
uguggagguacaugccuguaaucccagcuacu

SEQ ID NO: 263664 - RNA, 32 nt, Human
uguggagguagacaagcauuguacugagacag

SEQ ID NO: 263665 - RNA, 32 nt, Human
uguggagguagcuuuaacuugguucuguguaa

SEQ ID NO: 263666 - RNA, 32 nt, Human
uguggagguccucaggaguggagagaaugagu

SEQ ID NO: 263667 - RNA, 32 nt, Human
uguggaggugcugaagcccacaguuccacaca

SEQ ID NO: 263668 - RNA, 32 nt, Human
uguggagguucuuuugagucacacacaaagca

SEQ ID NO: 263669 - RNA, 22 nt, Human
uguggaguagcuguucuuucac

SEQ ID NO: 263670 - RNA, 32 nt, Human
uguggaguaggggaaagguucugcaaguugcc

SEQ ID NO: 263671 - RNA, 32 nt, Human
uguggaguggcauuuuagaugcccucacgaau

SEQ ID NO: 263672 - RNA, 32 nt, Human
uguggaguggggagguugggccuggacccuca

SEQ ID NO: 263673 - RNA, 32 nt, Human
uguggagugucaccgcguguacauacuguaaa

SEQ ID NO: 263674 - RNA, 32 nt, Human
uguggagugucagacggaggaggacuuaguga

SEQ ID NO: 263675 - RNA, 32 nt, Human
uguggaguguuugaauucugucucuaucauuu

SEQ ID NO: 263676 - RNA, 21 nt, Human
uguggauacagugcccaccgc

SEQ ID NO: 263677 - RNA, 32 nt, Human
uguggauagagaagcaggaagagcacuggacu

SEQ ID NO: 263678 - RNA, 32 nt, Human
uguggauagugaacuguggcccacuguuaggg

SEQ ID NO: 263679 - RNA, 32 nt, Human
uguggauaucucacagcacaaaguucaaaugu

SEQ ID NO: 263680 - RNA, 32 nt, Human
uguggauaucucacagcacaaaguucaagugu

SEQ ID NO: 263681 - RNA, 32 nt, Human
uguggauaucuucucucaucuuaugauuuguc

SEQ ID NO: 263682 - RNA, 32 nt, Human
uguggauaugccacaaaacacaagugguaugc

SEQ ID NO: 263683 - RNA, 32 nt, Human
uguggaucagcauuuuagaaacuacaaauaua

SEQ ID NO: 263684 - RNA, 32 nt, Human
uguggauccccugagaucuggcuucccaagag

SEQ ID NO: 263685 - RNA, 32 nt, Human
uguggaucccugggaacgcagagcaggaaugc

SEQ ID NO: 263686 - RNA, 32 nt, Human
uguggauccucuuguugaccucauauuggacu

SEQ ID NO: 263687 - RNA, 32 nt, Human
uguggaucgcccugggcugggcaccagugaca

SEQ ID NO: 263688 - RNA, 32 nt, Human
uguggaucuacaugggaagacuacccauauua

SEQ ID NO: 263689 - RNA, 32 nt, Human
uguggaucucugcuuuuguuuuguaccuagua

SEQ ID NO: 263690 - RNA, 21 nt, Human
uguggaucugcgcccauccca

SEQ ID NO: 263691 - RNA, 32 nt, Human
uguggaucugugacccugggcgcugaaaaugg

SEQ ID NO: 263692 - RNA, 32 nt, Human
uguggaucuguucaaaguagucacuguauaua

SEQ ID NO: 263693 - RNA, 32 nt, Human
uguggaucuguuccuaguauaggcaacauaau

SEQ ID NO: 263694 - RNA, 24 nt, Human
uguggaugaacugagacccuccau

SEQ ID NO: 263695 - RNA, 32 nt, Human
uguggaugacagagcgagacccugccucaaaa

SEQ ID NO: 263696 - RNA, 32 nt, Human
uguggaugacucuugccauuuccuaagagaua

SEQ ID NO: 263697 - RNA, 21 nt, Human
uguggaugccucuuccuccac

SEQ ID NO: 263698 - RNA, 32 nt, Human
uguggaugccugccugcccugcccugugcugu

SEQ ID NO: 263699 - RNA, 32 nt, Human
uguggaugcuguugccaagacugcaaaccacu

SEQ ID NO: 263700 - RNA, 21 nt, Human
uguggauggagcuaucucuac

SEQ ID NO: 263701 - RNA, 22 nt, Human
uguggauggauggacucugggg

SEQ ID NO: 263702 - RNA, 32 nt, Human
uguggaugggaaacugcuccagcuccaagagg

SEQ ID NO: 263703 - RNA, 24 nt, Human
uguggauggucacugccccuccac

SEQ ID NO: 263704 - RNA, 32 nt, Human
uguggauggugagagagagggcucagaagcag

SEQ ID NO: 263705 - RNA, 32 nt, Human
uguggauguagugcuuuuacuuuacagauuga

SEQ ID NO: 263706 - RNA, 32 nt, Human
uguggaugucuauaacuucauccucaguaugu

SEQ ID NO: 263707 - RNA, 19 nt, Human
uguggaugugaggugggga

SEQ ID NO: 263708 - RNA, 32 nt, Human
uguggaugugguuucugccuaugggaggaggu

SEQ ID NO: 263709 - RNA, 32 nt, Human
uguggauguucaggccuagcuccaaccaagag

SEQ ID NO: 263710 - RNA, 32 nt, Human
uguggauuaggcucuggcuucugugauggugc

SEQ ID NO: 263711 - RNA, 32 nt, Human
uguggauucaccccaucucccaaauaaaguuu

SEQ ID NO: 263712 - RNA, 32 nt, Human
uguggauuccacuggcauccagccucccacag

SEQ ID NO: 263713 - RNA, 17 nt, Human
uguggauuccugauccc

SEQ ID NO: 263714 - RNA, 32 nt, Human
uguggauucugaggcccugcccaaugagacuc

SEQ ID NO: 263715 - RNA, 32 nt, Human
uguggauugcggcagcagaggcugcagccuaa

SEQ ID NO: 263716 - RNA, 32 nt, Human
uguggauugugaaaucaaaaucuggagaaaug

SEQ ID NO: 263717 - RNA, 32 nt, Human
uguggauuuaucucccuuuggucuuugauguu

SEQ ID NO: 263718 - RNA, 32 nt, Human
uguggauuucccacccuuagaagcucuacuaa

SEQ ID NO: 263719 - RNA, 32 nt, Human
uguggauuuccugccagcaccagucagagauu

SEQ ID NO: 263720 - RNA, 18 nt, Human
uguggauuucugcccucc

SEQ ID NO: 263721 - RNA, 32 nt, Human
uguggauuugaggaccucugcagaccaucaga

SEQ ID NO: 263722 - RNA, 32 nt, Human
uguggcaaaaccacgacaccacugagaaaguc

SEQ ID NO: 263723 - RNA, 32 nt, Human
uguggcaaagcagcaacuauucacaaaauauc

SEQ ID NO: 263724 - RNA, 32 nt, Human
uguggcaaagcuuuuaaccaguccucaaacuu

SEQ ID NO: 263725 - RNA, 32 nt, Human
uguggcaaagcuuuuaaccaguccucaacccu

SEQ ID NO: 263726 - RNA, 32 nt, Human
uguggcaaagcuuuuaaccaguccucacaccu

SEQ ID NO: 263727 - RNA, 32 nt, Human
uguggcaaaggcuuuaauuaguucucaucccu

SEQ ID NO: 263728 - RNA, 25 nt, Human
uguggcaaauugugcagaguaguuu

SEQ ID NO: 263729 - RNA, 32 nt, Human
uguggcaacaccuuucucagaaaauccgaccu

SEQ ID NO: 263730 - RNA, 32 nt, Human
uguggcaagggaggggagggcaggagggcucg

SEQ ID NO: 263731 - RNA, 32 nt, Human
uguggcaagugacaaagauagcuguaugcuca

SEQ ID NO: 263732 - RNA, 32 nt, Human
uguggcaaguuacuuccucuccccaggucucu

SEQ ID NO: 263733 - RNA, 32 nt, Human
uguggcaauggcuguggcgauggcuacagcaa

SEQ ID NO: 263734 - RNA, 24 nt, Human
uguggcacaggaaagcugcccucu

SEQ ID NO: 263735 - RNA, 32 nt, Human
uguggcacaggcauugucuuuucuuugaaaua

SEQ ID NO: 263736 - RNA, 20 nt, Human
uguggcacauuccccuucac

SEQ ID NO: 263737 - RNA, 32 nt, Human
uguggcaccagccgguccugcccacgcuucag

SEQ ID NO: 263738 - RNA, 32 nt, Human
uguggcaccagcugcaccuguaccagcugccc

SEQ ID NO: 263739 - RNA, 32 nt, Human
uguggcaccaugagcuucaugguggcagaaga

SEQ ID NO: 263740 - RNA, 32 nt, Human
uguggcaccccagcucacugggagucucagga

SEQ ID NO: 263741 - RNA, 21 nt, Human
uguggcaccuagcauggugca

SEQ ID NO: 263742 - RNA, 32 nt, Human
uguggcacucuugccaguccuugacauugucg

SEQ ID NO: 263743 - RNA, 32 nt, Human
uguggcacugcacuccagucugggugacagag

SEQ ID NO: 263744 - RNA, 32 nt, Human
uguggcacuuccuggucuaaagcucugcuaga

SEQ ID NO: 263745 - RNA, 32 nt, Human
uguggcagaggaagcaugagguggggccuggc

SEQ ID NO: 263746 - RNA, 32 nt, Human
uguggcagaggcugggggagggaugcagugac

SEQ ID NO: 263747 - RNA, 32 nt, Human
uguggcagaguguucaguuagcauuaaagccc

SEQ ID NO: 263748 - RNA, 32 nt, Human
uguggcagaucauccaugauuuguuucccgug

SEQ ID NO: 263749 - RNA, 32 nt, Human
uguggcagcaagagccgccaguucgggaccac

SEQ ID NO: 263750 - RNA, 32 nt, Human
uguggcagcagcgagauuuccaaaaagaugaa

SEQ ID NO: 263751 - RNA, 32 nt, Human
uguggcagcucaugacuguaaucccagcacuu

SEQ ID NO: 263752 - RNA, 32 nt, Human
uguggcagcuuaugucuguaaucccagcacuu

SEQ ID NO: 263753 - RNA, 32 nt, Human
uguggcaggaaggacacagccggcuccugacg

SEQ ID NO: 263754 - RNA, 32 nt, Human
uguggcaggaggacaggaaugcaguggaacca

SEQ ID NO: 263755 - RNA, 32 nt, Human
uguggcaggagguuuuggacucgaugaguuuc

SEQ ID NO: 263756 - RNA, 32 nt, Human
uguggcaggcaggggugguaguaguagugaau

SEQ ID NO: 263757 - RNA, 32 nt, Human
uguggcaggcuggaguuauugaagcagagugg

SEQ ID NO: 263758 - RNA, 32 nt, Human
uguggcagggcugcccuggguuucucuuacuc

SEQ ID NO: 263759 - RNA, 32 nt, Human
uguggcaggggugagaguggagcugagugggg

SEQ ID NO: 263760 - RNA, 32 nt, Human
uguggcaggugucauuugcuaguagaauuugu

SEQ ID NO: 263761 - RNA, 32 nt, Human
uguggcagugagaagaagcaucgagggcgagg

SEQ ID NO: 263762 - RNA, 32 nt, Human
uguggcagugaugacugaagacuuuauuaaaa

SEQ ID NO: 263763 - RNA, 32 nt, Human
uguggcagugaugggguuuacuuucaugaauu

SEQ ID NO: 263764 - RNA, 32 nt, Human
uguggcagugccuauguucucuccuaggcaga

SEQ ID NO: 263765 - RNA, 32 nt, Human
uguggcagugccuguguucucuccuaggcagg

SEQ ID NO: 263766 - RNA, 32 nt, Human
uguggcagugccuguguucucuccuagguagg

SEQ ID NO: 263767 - RNA, 32 nt, Human
uguggcaguguuuaaaugcucuucugaaggcu

SEQ ID NO: 263768 - RNA, 21 nt, Human
uguggcauaguaauuuuuaua

SEQ ID NO: 263769 - RNA, 32 nt, Human
uguggcauauuuuuaggccucuccuaaaccca

SEQ ID NO: 263770 - RNA, 32 nt, Human
uguggcaucauccucucagcagucuuccuguc

SEQ ID NO: 263771 - RNA, 19 nt, Human
uguggcauccagacucccu

SEQ ID NO: 263772 - RNA, 20 nt, Human
uguggcaucgcagucucuua

SEQ ID NO: 263773 - RNA, 32 nt, Human
uguggcaucuacccucccucccugcugccaga

SEQ ID NO: 263774 - RNA, 32 nt, Human
uguggcaucucucccuucucucucuugcucuu

SEQ ID NO: 263775 - RNA, 32 nt, Human
uguggcaucuuccucuaguccuucccaccucc

SEQ ID NO: 263776 - RNA, 32 nt, Human
uguggcaugacugacauacauacucaaauaua

SEQ ID NO: 263777 - RNA, 32 nt, Human
uguggcaugucauaagagaaacagaugugcau

SEQ ID NO: 263778 - RNA, 32 nt, Human
uguggcaugucccaggagggugugcaugugug

SEQ ID NO: 263779 - RNA, 32 nt, Human
uguggcauuauccacaaccaucauguuucuua

SEQ ID NO: 263780 - RNA, 32 nt, Human
uguggcauugaaggaacaaagauacaggggca

SEQ ID NO: 263781 - RNA, 32 nt, Human
uguggcauugcacuccagccugggugguagau

SEQ ID NO: 263782 - RNA, 31 nt, Human
uguggcauugucaccuucacagcagacagag

SEQ ID NO: 263783 - RNA, 20 nt, Human
uguggcauuucauucacuua

SEQ ID NO: 263784 - RNA, 32 nt, Human
uguggccaaacagugcccagcuuaagcauccc

SEQ ID NO: 263785 - RNA, 20 nt, Human
uguggccaagcacaucuuug

SEQ ID NO: 263786 - RNA, 32 nt, Human
uguggccaagccuuucccucccuaccugauca

SEQ ID NO: 263787 - RNA, 20 nt, Human
uguggccaagcugcccccau

SEQ ID NO: 263788 - RNA, 32 nt, Human
uguggccacagcuuuuuggguuuggaauggag

SEQ ID NO: 263789 - RNA, 32 nt, Human
uguggccacugcaguucaucgagucuucaggg

SEQ ID NO: 263790 - RNA, 32 nt, Human
uguggccacuuacccuauccuuacccuccuua

SEQ ID NO: 263791 - RNA, 32 nt, Human
uguggccagaauacaacccuggaguuggcaag

SEQ ID NO: 263792 - RNA, 32 nt, Human
uguggccagaggacaggggaagcugaaggccc

SEQ ID NO: 263793 - RNA, 32 nt, Human
uguggccagccccuuggcaccagcaccaccac

SEQ ID NO: 263794 - RNA, 32 nt, Human
uguggccagcuguccagcccagcccugugugu

SEQ ID NO: 263795 - RNA, 32 nt, Human
uguggccaggaggcgagaagguggcuguuccc

SEQ ID NO: 263796 - RNA, 32 nt, Human
uguggccaggaguugggagaccagccugggga

SEQ ID NO: 263797 - RNA, 32 nt, Human
uguggccaggcacgccuguaaucccagcacuu

SEQ ID NO: 263798 - RNA, 32 nt, Human
uguggccaggcagggcggaggccugcugugca

SEQ ID NO: 263799 - RNA, 32 nt, Human
uguggccaggccccaccuguguuuccaagucg

SEQ ID NO: 263800 - RNA, 32 nt, Human
uguggccagggacacaggcuuggggcccaccc

SEQ ID NO: 263801 - RNA, 32 nt, Human
uguggccaguacuccggccuccuagcugcuac

SEQ ID NO: 263802 - RNA, 32 nt, Human
uguggccaguacucgggacagacuaagggcgc

SEQ ID NO: 263803 - RNA, 32 nt, Human
uguggccaugccacggagggggcaguggacaa

SEQ ID NO: 263804 - RNA, 32 nt, Human
uguggccaugucuguguacgcagggggccggg

SEQ ID NO: 263805 - RNA, 32 nt, Human
uguggccauucaaccugccaggacuaacauuu

SEQ ID NO: 263806 - RNA, 32 nt, Human
uguggccauuucugcagccuccuggccucacc

SEQ ID NO: 263807 - RNA, 32 nt, Human
uguggcccaacaagaggaagcucuccccugac

SEQ ID NO: 263808 - RNA, 32 nt, Human
uguggcccacacccagccugguggacauggaa

SEQ ID NO: 263809 - RNA, 19 nt, Human
uguggcccaccaguguaau

SEQ ID NO: 263810 - RNA, 24 nt, Human
uguggcccagccuggaguacagug

SEQ ID NO: 263811 - RNA, 24 nt, Human
uguggcccaggcugaagugcagug

SEQ ID NO: 263812 - RNA, 23 nt, Human
uguggcccaggcuggagugcagu

SEQ ID NO: 263813 - RNA, 24 nt, Human
uguggcccaggcuggagugcagug

SEQ ID NO: 263814 - RNA, 32 nt, Human
uguggcccagggaagccaaaagacuggccacc

SEQ ID NO: 263815 - RNA, 32 nt, Human
uguggcccauaucuuggucacucugaagcaca

SEQ ID NO: 263816 - RNA, 32 nt, Human
uguggcccaucugccaccaucugugccuacag

SEQ ID NO: 263817 - RNA, 32 nt, Human
uguggcccaugugcugcauccucugcccucag

SEQ ID NO: 263818 - RNA, 19 nt, Human
uguggcccccgggacccca

SEQ ID NO: 263819 - RNA, 32 nt, Human
uguggccccgggacccagcagagcugggggag

SEQ ID NO: 263820 - RNA, 32 nt, Human
uguggccccucagggccuugaguggcacgcug

SEQ ID NO: 263821 - RNA, 32 nt, Human
uguggccccuccauuuuccccauuuucuuauc

SEQ ID NO: 263822 - RNA, 32 nt, Human
uguggccccugccugugccagccaugggcucg

SEQ ID NO: 263823 - RNA, 32 nt, Human
uguggcccgggggccucuucuggaccaggaaa

SEQ ID NO: 263824 - RNA, 20 nt, Human
uguggcccucacugaugccc

SEQ ID NO: 263825 - RNA, 32 nt, Human
uguggcccuccccucccaccucccuguguaua

SEQ ID NO: 263826 - RNA, 32 nt, Human
uguggcccugcaguugaccugagcugcuucac

SEQ ID NO: 263827 - RNA, 32 nt, Human
uguggcccuggccgugaucuccaccuuucugu

SEQ ID NO: 263828 - RNA, 32 nt, Human
uguggcccuuccauugucagccuggaccugcc

SEQ ID NO: 263829 - RNA, 32 nt, Human
uguggcccuuccucccccucauugaggacuua

SEQ ID NO: 263830 - RNA, 32 nt, Human
uguggcccuuuagaaacacacagcuccauuuc

SEQ ID NO: 263831 - RNA, 32 nt, Human
uguggcccuuugacuuugugaaugagcacaau

SEQ ID NO: 263832 - RNA, 32 nt, Human
uguggccucacugcaacacaaagcuccaccag

SEQ ID NO: 263833 - RNA, 19 nt, Human
uguggccucagaagcagga

SEQ ID NO: 263834 - RNA, 32 nt, Human
uguggccucagaccucugggccugugugagcu

SEQ ID NO: 263835 - RNA, 32 nt, Human
uguggccucaggaggcaguggcuuggagcaga

SEQ ID NO: 263836 - RNA, 32 nt, Human
uguggccuccaaugcuagugcugugcaguuuu

SEQ ID NO: 263837 - RNA, 32 nt, Human
uguggccucuaucugcuaccaucuguguuuua

SEQ ID NO: 263838 - RNA, 32 nt, Human
uguggccucugacuucucuuucuucagccuuu

SEQ ID NO: 263839 - RNA, 32 nt, Human
uguggccucugcucuguacucccucuugcucu

SEQ ID NO: 263840 - RNA, 32 nt, Human
uguggccucuggggaucugcugggcagauguc

SEQ ID NO: 263841 - RNA, 32 nt, Human
uguggccucuugcuccuccuuccagauccccg

SEQ ID NO: 263842 - RNA, 21 nt, Human
uguggccugaagggaugggga

SEQ ID NO: 263843 - RNA, 32 nt, Human
uguggccugcaaugccaggccaugugccccuc

SEQ ID NO: 263844 - RNA, 32 nt, Human
uguggccugcagcccugcgcagggccagugcc

SEQ ID NO: 263845 - RNA, 28 nt, Human
uguggccugcaugcugccugaucuugcc

SEQ ID NO: 263846 - RNA, 32 nt, Human
uguggccugcuguuucuguugucuuguauguc

SEQ ID NO: 263847 - RNA, 32 nt, Human
uguggccuggaggggcuugcaacaaggaggca

SEQ ID NO: 263848 - RNA, 32 nt, Human
uguggccuggccagagccccuugcauaucccc

SEQ ID NO: 263849 - RNA, 22 nt, Human
uguggccugggagagcugggga

SEQ ID NO: 263850 - RNA, 32 nt, Human
uguggccugguggggcucugcaggcucccucg

SEQ ID NO: 263851 - RNA, 32 nt, Human
uguggccuguaaucccagcuacucgggaggcu

SEQ ID NO: 263852 - RNA, 32 nt, Human
uguggccugucuccuccacucuccuccucacc

SEQ ID NO: 263853 - RNA, 32 nt, Human
uguggccugugacuacuguauuggacaguuca

SEQ ID NO: 263854 - RNA, 32 nt, Human
uguggccuguguauuugcaauuuuucuuuguc

SEQ ID NO: 263855 - RNA, 32 nt, Human
uguggccuuaggaaagcaaaagagcacuuuuu

SEQ ID NO: 263856 - RNA, 32 nt, Human
uguggccuuaggagucaaauagucucugcaug

SEQ ID NO: 263857 - RNA, 32 nt, Human
uguggccuuccuauugugucuuguguuuuggu

SEQ ID NO: 263858 - RNA, 32 nt, Human
uguggccuugugcaaucucugccucucugacc

SEQ ID NO: 263859 - RNA, 32 nt, Human
uguggccuuugggcucugccaucuggggugug

SEQ ID NO: 263860 - RNA, 32 nt, Human
uguggccuuuuuauuuuuccuaauccacgccg

SEQ ID NO: 263861 - RNA, 32 nt, Human
uguggcgagaggaacacuugagccuggaaaag

SEQ ID NO: 263862 - RNA, 22 nt, Human
uguggcgcgcggcuguccccau

SEQ ID NO: 263863 - RNA, 32 nt, Human
uguggcggaguuuggagguuggagagaaaucc

SEQ ID NO: 263864 - RNA, 32 nt, Human
uguggcggcgagcaccuguaaucccagcuacu

SEQ ID NO: 263865 - RNA, 32 nt, Human
uguggcgggaggugaggcgggagguucagcag

SEQ ID NO: 263866 - RNA, 32 nt, Human
uguggcgggcaggccagcucccaggacgucuc

SEQ ID NO: 263867 - RNA, 32 nt, Human
uguggcgggcucaggggcuccugcugagcaaa

SEQ ID NO: 263868 - RNA, 32 nt, Human
uguggcggugcacaccuguagucccagcugcu

SEQ ID NO: 263869 - RNA, 32 nt, Human
uguggcggugcgugccuguaaucccagcuauu

SEQ ID NO: 263870 - RNA, 32 nt, Human
uguggcgguggccacagaccauguagccuucc

SEQ ID NO: 263871 - RNA, 32 nt, Human
uguggcuaaaguuauuuaugugguguuauaug

SEQ ID NO: 263872 - RNA, 32 nt, Human
uguggcuaaguguggggaccagacaggacucg

SEQ ID NO: 263873 - RNA, 32 nt, Human
uguggcuagccacugugcuccagccugggcaa

SEQ ID NO: 263874 - RNA, 32 nt, Human
uguggcuagcuucugggcaagucccucugcuc

SEQ ID NO: 263875 - RNA, 32 nt, Human
uguggcuauggguuuucauuuguaacuccauc

SEQ ID NO: 263876 - RNA, 32 nt, Human
uguggcuauugggaacaagcugggcaaaagca

SEQ ID NO: 263877 - RNA, 32 nt, Human
uguggcucaagaaggaaggggaaucauguacc

SEQ ID NO: 263878 - RNA, 32 nt, Human
uguggcucacguguugggagguuguggucugc

SEQ ID NO: 263879 - RNA, 32 nt, Human
uguggcucagcaccuagcaaauaugucacaau

SEQ ID NO: 263880 - RNA, 32 nt, Human
uguggcuccagccccagggauucugagucuga

SEQ ID NO: 263881 - RNA, 21 nt, Human
uguggcuccagcccggccugg

SEQ ID NO: 263882 - RNA, 32 nt, Human
uguggcuccagcugcucaaagacgagccuuca

SEQ ID NO: 263883 - RNA, 32 nt, Human
uguggcuccggaaaggcguuugggaugccaac

SEQ ID NO: 263884 - RNA, 32 nt, Human
uguggcucgucccuccuccccaucucggcccu

SEQ ID NO: 263885 - RNA, 32 nt, Human
uguggcucucagcucucaaggcuguuuucccc

SEQ ID NO: 263886 - RNA, 22 nt, Human
uguggcucucuuuucaucuuug

SEQ ID NO: 263887 - RNA, 32 nt, Human
uguggcucugaaaaugaagauuuggaaggaga

SEQ ID NO: 263888 - RNA, 32 nt, Human
uguggcucugaucaguuuccuccaacuccugg

SEQ ID NO: 263889 - RNA, 32 nt, Human
uguggcucugcagccccugcuccuuucugcgg

SEQ ID NO: 263890 - RNA, 32 nt, Human
uguggcucugucccuguguugccuuccacaga

SEQ ID NO: 263891 - RNA, 32 nt, Human
uguggcucuuacguguuuucuuugcuaaaaua

SEQ ID NO: 263892 - RNA, 20 nt, Human
uguggcucuucucaucuuug

SEQ ID NO: 263893 - RNA, 24 nt, Human
uguggcucuuguuuucauuuuugu

SEQ ID NO: 263894 - RNA, 32 nt, Human
uguggcugaagcuggcggaucgcuugaggccc

SEQ ID NO: 263895 - RNA, 32 nt, Human
uguggcugacaccugggcuaccuccaaccuac

SEQ ID NO: 263896 - RNA, 32 nt, Human
uguggcugacuugguacagaagacggcaaagg

SEQ ID NO: 263897 - RNA, 32 nt, Human
uguggcugagcagacuccagggccagggccag

SEQ ID NO: 263898 - RNA, 32 nt, Human
uguggcugagucucugacagcugugagugugu

SEQ ID NO: 263899 - RNA, 32 nt, Human
uguggcugaugugucuggaaaugauguaguuc

SEQ ID NO: 263900 - RNA, 32 nt, Human
uguggcugcaagcaaggggcuagaaguucacc

SEQ ID NO: 263901 - RNA, 32 nt, Human
uguggcugcacucauuuucucaguugguacuu

SEQ ID NO: 263902 - RNA, 32 nt, Human
uguggcugccacggccuccuggcuccagaggc

SEQ ID NO: 263903 - RNA, 32 nt, Human
uguggcugcccgaggcgguagagcggagaaag

SEQ ID NO: 263904 - RNA, 32 nt, Human
uguggcugcccuuugugauucccucagaucug

SEQ ID NO: 263905 - RNA, 32 nt, Human
uguggcugcucaauaaacacuuguugaaccau

SEQ ID NO: 263906 - RNA, 32 nt, Human
uguggcugcuuugcacggcaguggcaagggcc

SEQ ID NO: 263907 - RNA, 32 nt, Human
uguggcuggaaacccaggcagggcugcaccac

SEQ ID NO: 263908 - RNA, 32 nt, Human
uguggcuggaacccugcaccaaggcgaccgcu

SEQ ID NO: 263909 - RNA, 32 nt, Human
uguggcuggaaccuuuauaaagugaccaagca

SEQ ID NO: 263910 - RNA, 32 nt, Human
uguggcuggagugcugcaggugucaaggaaau

SEQ ID NO: 263911 - RNA, 32 nt, Human
uguggcuggauuaagagcagccuagcagcuug

SEQ ID NO: 263912 - RNA, 29 nt, Human
uguggcuggcugcuucccuuccuuccauc

SEQ ID NO: 263913 - RNA, 32 nt, Human
uguggcuggcugcuucccuuccuuccaucccc

SEQ ID NO: 263914 - RNA, 32 nt, Human
uguggcugggagagugggagggaagcccucag

SEQ ID NO: 263915 - RNA, 32 nt, Human
uguggcugggaggagcucuggggaagaugggc

SEQ ID NO: 263916 - RNA, 32 nt, Human
uguggcugggcugggcugggcggggcggccug

SEQ ID NO: 263917 - RNA, 32 nt, Human
uguggcuggggaggcccuggcagcaggaagcc

SEQ ID NO: 263918 - RNA, 32 nt, Human
uguggcugggucuucgaggagccgaaccaaug

SEQ ID NO: 263919 - RNA, 32 nt, Human
uguggcuguagucccagcuacucgggaggcug

SEQ ID NO: 263920 - RNA, 32 nt, Human
uguggcuguagucccagcuacuuuggaggcug

SEQ ID NO: 263921 - RNA, 32 nt, Human
uguggcugucauucucccagggcagaacccug

SEQ ID NO: 263922 - RNA, 32 nt, Human
uguggcugugaguggggacagcuccucgggac

SEQ ID NO: 263923 - RNA, 32 nt, Human
uguggcugugccugugggucucuagaaccauc

SEQ ID NO: 263924 - RNA, 32 nt, Human
uguggcuguggcugaagcuggcggaucgcuug

SEQ ID NO: 263925 - RNA, 32 nt, Human
uguggcugugggcuccgagcaugggcgcagua

SEQ ID NO: 263926 - RNA, 32 nt, Human
uguggcuguguggagcucagcuguguugugug

SEQ ID NO: 263927 - RNA, 32 nt, Human
uguggcuuacccaggauggaaacacugcaguu

SEQ ID NO: 263928 - RNA, 32 nt, Human
uguggcuuacugcaauaauguuucuuugauca

SEQ ID NO: 263929 - RNA, 32 nt, Human
uguggcuuaguuguagaagcaggugugucucu

SEQ ID NO: 263930 - RNA, 32 nt, Human
uguggcuuauucuucuagcugccaacccaaau

SEQ ID NO: 263931 - RNA, 32 nt, Human
uguggcuuauuuucucaauccuugauuccuuc

SEQ ID NO: 263932 - RNA, 32 nt, Human
uguggcuucagccgugguccuccugggaccgg

SEQ ID NO: 263933 - RNA, 32 nt, Human
uguggcuucaggggaaugcaccaaggcucuca

SEQ ID NO: 263934 - RNA, 32 nt, Human
uguggcuucauacccacucccugucaaugcag

SEQ ID NO: 263935 - RNA, 32 nt, Human
uguggcuuccagagccccucuucagcuccagg

SEQ ID NO: 263936 - RNA, 32 nt, Human
uguggcuucuccagccuuucucccucacauca

SEQ ID NO: 263937 - RNA, 32 nt, Human
uguggcuucugcucugagggcuuguguuccca

SEQ ID NO: 263938 - RNA, 32 nt, Human
uguggcuuggggucgggagugcaggaggcgaa

SEQ ID NO: 263939 - RNA, 32 nt, Human
uguggcuugugugcuggagguuguggccugcg

SEQ ID NO: 263940 - RNA, 32 nt, Human
uguggcuugugugcuggagguuguggucuacg

SEQ ID NO: 263941 - RNA, 32 nt, Human
uguggcuuugaagacccucacugugaaguugg

SEQ ID NO: 263942 - RNA, 32 nt, Human
uguggcuuuggugagagagugugcagagagca

SEQ ID NO: 263943 - RNA, 18 nt, Human
ugugggaaaaagagcugg

SEQ ID NO: 263944 - RNA, 20 nt, Human
ugugggaaaagcccuggggg

SEQ ID NO: 263945 - RNA, 32 nt, Human
ugugggaaaauaucccucccaccugcaacagc

SEQ ID NO: 263946 - RNA, 20 nt, Human
ugugggaaacugagagggga

SEQ ID NO: 263947 - RNA, 32 nt, Human
ugugggaaagacuacagacaauaggaaucuuu

SEQ ID NO: 263948 - RNA, 22 nt, Human
ugugggaaagccuugugcugca

SEQ ID NO: 263949 - RNA, 19 nt, Human
ugugggaaaggaaugugga

SEQ ID NO: 263950 - RNA, 32 nt, Human
ugugggaaaugaguugagaccauggacuuggg

SEQ ID NO: 263951 - RNA, 18 nt, Human
ugugggaacgagagggga

SEQ ID NO: 263952 - RNA, 32 nt, Human
ugugggaacggucuuccuccagccuggugccc

SEQ ID NO: 263953 - RNA, 32 nt, Human
ugugggaagaugaagaugguuuggagguguaa

SEQ ID NO: 263954 - RNA, 20 nt, Human
ugugggaagcagcucuccac

SEQ ID NO: 263955 - RNA, 32 nt, Human
ugugggaaggcagaggaucucugaggaguucc

SEQ ID NO: 263956 - RNA, 21 nt, Human
ugugggaaggggaaauggagg

SEQ ID NO: 263957 - RNA, 21 nt, Human
ugugggaaggggagauaaggg

SEQ ID NO: 263958 - RNA, 21 nt, Human
ugugggaaggguugccaggga

SEQ ID NO: 263959 - RNA, 32 nt, Human
ugugggaagguaaagaaacuugcuggacaagu

SEQ ID NO: 263960 - RNA, 32 nt, Human
ugugggaaugacuggggugaggcagggucaag

SEQ ID NO: 263961 - RNA, 32 nt, Human
ugugggaauuaugggagcuacaauucaagaug

SEQ ID NO: 263962 - RNA, 32 nt, Human
ugugggaauucugggagauacaauucaaguug

SEQ ID NO: 263963 - RNA, 32 nt, Human
ugugggacaggggcgauggugccuggucucug

SEQ ID NO: 263964 - RNA, 32 nt, Human
ugugggaccagcccugccaacuuccaucgugg

SEQ ID NO: 263965 - RNA, 32 nt, Human
ugugggacccuccaggugcacagugacaguca

SEQ ID NO: 263966 - RNA, 32 nt, Human
ugugggacccuugagaugcuuccacucugauu

SEQ ID NO: 263967 - RNA, 32 nt, Human
ugugggacggaggacccaggagacccagaauc

SEQ ID NO: 263968 - RNA, 32 nt, Human
ugugggacggcgugaaugugggguggaaggga

SEQ ID NO: 263969 - RNA, 24 nt, Human
ugugggacggggcugcuucucuac

SEQ ID NO: 263970 - RNA, 32 nt, Human
ugugggacucagaaagggaagcagaacugagg

SEQ ID NO: 263971 - RNA, 32 nt, Human
ugugggacugaggagagcagagcagagagcac

SEQ ID NO: 263972 - RNA, 18 nt, Human
ugugggagaagauuccag

SEQ ID NO: 263973 - RNA, 32 nt, Human
ugugggagaauccauuuccuggcucuggaggc

SEQ ID NO: 263974 - RNA, 32 nt, Human
ugugggagaccggccugccaggaggacccagg

SEQ ID NO: 263975 - RNA, 21 nt, Human
ugugggagagacuuauaggca

SEQ ID NO: 263976 - RNA, 32 nt, Human
ugugggagagaggcagaaaaaggagcagcucc

SEQ ID NO: 263977 - RNA, 32 nt, Human
ugugggagagcugaggucuagaaaggaggagu

SEQ ID NO: 263978 - RNA, 32 nt, Human
ugugggagaggucaccuuuaacacagcaacag

SEQ ID NO: 263979 - RNA, 32 nt, Human
ugugggagagguguggacagcaacuguggggg

SEQ ID NO: 263980 - RNA, 32 nt, Human
ugugggagaucuuacaagucaccccucauagg

SEQ ID NO: 263981 - RNA, 32 nt, Human
ugugggagcaggaagugaggcugcggcagcag

SEQ ID NO: 263982 - RNA, 32 nt, Human
ugugggagcagguggaggguggagaccuaaac

SEQ ID NO: 263983 - RNA, 32 nt, Human
ugugggagcccggggcccagacuccugcggcc

SEQ ID NO: 263984 - RNA, 32 nt, Human
ugugggagcgccuggcccucccucccuagccc

SEQ ID NO: 263985 - RNA, 32 nt, Human
ugugggaggaaugggggauuugggaggugaug

SEQ ID NO: 263986 - RNA, 32 nt, Human
ugugggaggagccagagagggaccuggcucug

SEQ ID NO: 263987 - RNA, 32 nt, Human
ugugggaggauguaaauaucuuguuucuccuc

SEQ ID NO: 263988 - RNA, 32 nt, Human
ugugggaggcagagagaggagcaggggccaug

SEQ ID NO: 263989 - RNA, 32 nt, Human
ugugggaggcggacagcagugaccaccucccc

SEQ ID NO: 263990 - RNA, 32 nt, Human
ugugggaggcggagguugcagugagucagauc

SEQ ID NO: 263991 - RNA, 32 nt, Human
ugugggaggcuaaggugggaggaucguuucag

SEQ ID NO: 263992 - RNA, 32 nt, Human
ugugggagggacccagugggagguaacugaau

SEQ ID NO: 263993 - RNA, 32 nt, Human
ugugggagggcagcgcacugacuggggccugg

SEQ ID NO: 263994 - RNA, 32 nt, Human
ugugggagggccugccccugcccccaccuccu

SEQ ID NO: 263995 - RNA, 32 nt, Human
ugugggagggccuguggauguccugaguggug

SEQ ID NO: 263996 - RNA, 32 nt, Human
ugugggagggcugggcuaggaauggccuugga

SEQ ID NO: 263997 - RNA, 32 nt, Human
ugugggagguuauguuuauuugagacuucucc

SEQ ID NO: 263998 - RNA, 32 nt, Human
ugugggagugcagagaaagaaagggaaacugg

SEQ ID NO: 263999 - RNA, 32 nt, Human
ugugggagugguggcauugagaagacuaccua

SEQ ID NO: 264000 - RNA, 32 nt, Human
ugugggauacagaaucaaagagccucaucuuu

SEQ ID NO: 264001 - RNA, 32 nt, Human
ugugggauccugcugugagcggcaccaguggg

SEQ ID NO: 264002 - RNA, 32 nt, Human
ugugggaugagcuccagcauggggugagguac

SEQ ID NO: 264003 - RNA, 32 nt, Human
ugugggauugggaagcgcaggagcuucaggac

SEQ ID NO: 264004 - RNA, 19 nt, Human
ugugggcaaagugccugcc

SEQ ID NO: 264005 - RNA, 32 nt, Human
ugugggcaacacagcaagaccccaucucuuaa

SEQ ID NO: 264006 - RNA, 22 nt, Human
ugugggcaacagugucucccgc

SEQ ID NO: 264007 - RNA, 32 nt, Human
ugugggcaacaucgaggagcuggcugcugaau

SEQ ID NO: 264008 - RNA, 22 nt, Human
ugugggcaaccaggcccugcau

SEQ ID NO: 264009 - RNA, 24 nt, Human
ugugggcaagagcuggcccuccau

SEQ ID NO: 264010 - RNA, 20 nt, Human
ugugggcaagcagccgccgc

SEQ ID NO: 264011 - RNA, 32 nt, Human
ugugggcaagggacaugaagccugaaguuuuu

SEQ ID NO: 264012 - RNA, 26 nt, Human
ugugggcaagggcucagccucucugc

SEQ ID NO: 264013 - RNA, 32 nt, Human
ugugggcacacaguugggucuuaggggaaaaa

SEQ ID NO: 264014 - RNA, 32 nt, Human
ugugggcacagcugugguuugggugcugagca

SEQ ID NO: 264015 - RNA, 32 nt, Human
ugugggcacaugggcacauacagacucacaua

SEQ ID NO: 264016 - RNA, 32 nt, Human
ugugggcaccugguggccaagccucaguuucc

SEQ ID NO: 264017 - RNA, 21 nt, Human
ugugggcacugacccugccac

SEQ ID NO: 264018 - RNA, 32 nt, Human
ugugggcagaacugaaagaucacugcagugga

SEQ ID NO: 264019 - RNA, 20 nt, Human
ugugggcagaaggaugggga

SEQ ID NO: 264020 - RNA, 21 nt, Human
ugugggcagagccugcccugc

SEQ ID NO: 264021 - RNA, 32 nt, Human
ugugggcagagggucugaaaggugggcuuugg

SEQ ID NO: 264022 - RNA, 19 nt, Human
ugugggcagcagcccccau

SEQ ID NO: 264023 - RNA, 32 nt, Human
ugugggcagccacagaugcccccaaaucagag

SEQ ID NO: 264024 - RNA, 32 nt, Human
ugugggcagccuggguuugcaggccugcacag

SEQ ID NO: 264025 - RNA, 32 nt, Human
ugugggcagcuucugaguggugacacagcaag

SEQ ID NO: 264026 - RNA, 32 nt, Human
ugugggcaggcaggcagggcauagcgacagug

SEQ ID NO: 264027 - RNA, 32 nt, Human
ugugggcagggcgcgcucucuccucugagcag

SEQ ID NO: 264028 - RNA, 22 nt, Human
ugugggcagggcugguuccucc

SEQ ID NO: 264029 - RNA, 23 nt, Human
ugugggcaggggcugcauuuuau

SEQ ID NO: 264030 - RNA, 32 nt, Human
ugugggcagguguggggguuggucuagcuaag

SEQ ID NO: 264031 - RNA, 32 nt, Human
ugugggcaguauucaggaagagcuacuucaaa

SEQ ID NO: 264032 - RNA, 32 nt, Human
ugugggcaucuucugcccaugggcuccauuug

SEQ ID NO: 264033 - RNA, 32 nt, Human
ugugggcaugagcugcugugcccagccuccau

SEQ ID NO: 264034 - RNA, 32 nt, Human
ugugggcauguuauucuuggugcugccugggg

SEQ ID NO: 264035 - RNA, 32 nt, Human
ugugggcauguuuacugccacuggccuagagg

SEQ ID NO: 264036 - RNA, 32 nt, Human
ugugggccacggucacugcgcccgcuugguuc

SEQ ID NO: 264037 - RNA, 32 nt, Human
ugugggccaugagacagaaagaaagacugaaa

SEQ ID NO: 264038 - RNA, 22 nt, Human
ugugggccaugcugucuuccau

SEQ ID NO: 264039 - RNA, 32 nt, Human
ugugggccaugguacauacugcauuugcauca

SEQ ID NO: 264040 - RNA, 32 nt, Human
ugugggcccaggacaggaggcugagaaggagc

SEQ ID NO: 264041 - RNA, 21 nt, Human
ugugggcccaggagauggaga

SEQ ID NO: 264042 - RNA, 32 nt, Human
ugugggcccggccuggccacagcggggaccag

SEQ ID NO: 264043 - RNA, 32 nt, Human
ugugggcccucugagcaacuuugcagcacccu

SEQ ID NO: 264044 - RNA, 28 nt, Human
ugugggccuaaauuugccucauucagac

SEQ ID NO: 264045 - RNA, 32 nt, Human
ugugggccucacaacucgugaccucagcuaug

SEQ ID NO: 264046 - RNA, 32 nt, Human
ugugggccucaguucuugcaguaguugugaau

SEQ ID NO: 264047 - RNA, 32 nt, Human
ugugggccucaguuuccccauuuuauaaaguu

SEQ ID NO: 264048 - RNA, 32 nt, Human
ugugggccucauucugccaaagcuggaccaag

SEQ ID NO: 264049 - RNA, 32 nt, Human
ugugggccugaagcaguuccacacugagcgcc

SEQ ID NO: 264050 - RNA, 32 nt, Human
ugugggccugcaacuuucuccauucccagcug

SEQ ID NO: 264051 - RNA, 32 nt, Human
ugugggccuguggccuuccuggcuguggcuac

SEQ ID NO: 264052 - RNA, 32 nt, Human
ugugggccuuucugucccaccccugucagcac

SEQ ID NO: 264053 - RNA, 18 nt, Human
ugugggcgaagcugcccu

SEQ ID NO: 264054 - RNA, 22 nt, Human
ugugggcgggccugucuuucac

SEQ ID NO: 264055 - RNA, 21 nt, Human
ugugggcgugagcuucuuuau

SEQ ID NO: 264056 - RNA, 32 nt, Human
ugugggcuagaggcugaccagcagcguuuauu

SEQ ID NO: 264057 - RNA, 32 nt, Human
ugugggcucaaaagcaucaucaugcccacgag

SEQ ID NO: 264058 - RNA, 32 nt, Human
ugugggcucacugcaaccucugccuuccaggu

SEQ ID NO: 264059 - RNA, 32 nt, Human
ugugggcucccagggcauaugucugcacgcug

SEQ ID NO: 264060 - RNA, 32 nt, Human
ugugggcucccugguccacuugcucagccccc

SEQ ID NO: 264061 - RNA, 23 nt, Human
ugugggcucgcguggggccugcg

SEQ ID NO: 264062 - RNA, 32 nt, Human
ugugggcucucuccaguaccagacucauuuca

SEQ ID NO: 264063 - RNA, 32 nt, Human
ugugggcucugcuucuccuccuggccucuguc

SEQ ID NO: 264064 - RNA, 24 nt, Human
ugugggcugaacugugcccuccac

SEQ ID NO: 264065 - RNA, 31 nt, Human
ugugggcugaagaacuaccuguuggguacug

SEQ ID NO: 264066 - RNA, 32 nt, Human
ugugggcugaagcacuagcuuuuugguagcua

SEQ ID NO: 264067 - RNA, 18 nt, Human
ugugggcugaccaggacc

SEQ ID NO: 264068 - RNA, 20 nt, Human
ugugggcugacugcccuccg

SEQ ID NO: 264069 - RNA, 32 nt, Human
ugugggcugagggcaucuccaaagcuggccug

SEQ ID NO: 264070 - RNA, 32 nt, Human
ugugggcugcagcugcucgagggacuccgccc

SEQ ID NO: 264071 - RNA, 32 nt, Human
ugugggcugcaugggggcaggguggggccucu

SEQ ID NO: 264072 - RNA, 32 nt, Human
ugugggcugcucccucuccgugcucugccugg

SEQ ID NO: 264073 - RNA, 32 nt, Human
ugugggcugggaaggaggaggaggacccugca

SEQ ID NO: 264074 - RNA, 32 nt, Human
ugugggcuguaagcaagcucaggcuagucucc

SEQ ID NO: 264075 - RNA, 32 nt, Human
ugugggcugugauaggagagggcagagcccau

SEQ ID NO: 264076 - RNA, 32 nt, Human
ugugggcuuccaggaacuggagccuggggagg

SEQ ID NO: 264077 - RNA, 32 nt, Human
ugugggcuuguguuuugucacugugaaggggg

SEQ ID NO: 264078 - RNA, 24 nt, Human
uguggggaaaaggaaagauggggg

SEQ ID NO: 264079 - RNA, 31 nt, Human
uguggggaaaaggaaagaugggggacacuuc

SEQ ID NO: 264080 - RNA, 19 nt, Human
uguggggaaaguauguaga

SEQ ID NO: 264081 - RNA, 32 nt, Human
uguggggaaagugggcuuugaacgggauccaa

SEQ ID NO: 264082 - RNA, 22 nt, Human
uguggggaagaaaagauagggg

SEQ ID NO: 264083 - RNA, 32 nt, Human
uguggggaagagauaggaaccagcaggauggc

SEQ ID NO: 264084 - RNA, 21 nt, Human
uguggggaagcaggaacggga

SEQ ID NO: 264085 - RNA, 32 nt, Human
uguggggaagcccauuccucugccaggcucua

SEQ ID NO: 264086 - RNA, 18 nt, Human
uguggggaagguaugggg

SEQ ID NO: 264087 - RNA, 32 nt, Human
uguggggacagagccacaucuugaaugugaga

SEQ ID NO: 264088 - RNA, 32 nt, Human
uguggggacuugggggacaguaaucaaguaau

SEQ ID NO: 264089 - RNA, 21 nt, Human
uguggggagaauggacaagga

SEQ ID NO: 264090 - RNA, 20 nt, Human
uguggggagacagguggaga

SEQ ID NO: 264091 - RNA, 30 nt, Human
uguggggagagccacagggccagguggaca

SEQ ID NO: 264092 - RNA, 32 nt, Human
uguggggagagggaaggaggaagucaguuauu

SEQ ID NO: 264093 - RNA, 32 nt, Human
uguggggagaggggaaggaucagggggccagg

SEQ ID NO: 264094 - RNA, 32 nt, Human
uguggggagaggguacuggggaggcagcggcu

SEQ ID NO: 264095 - RNA, 32 nt, Human
uguggggagagugagguugcuggagccacggc

SEQ ID NO: 264096 - RNA, 26 nt, Human
uguggggagaguggaagaggcaggga

SEQ ID NO: 264097 - RNA, 32 nt, Human
uguggggaggagagagaaugggguacuagcac

SEQ ID NO: 264098 - RNA, 23 nt, Human
uguggggaggagagagaugcaga

SEQ ID NO: 264099 - RNA, 32 nt, Human
uguggggaggaguggcuggggcugugcgcucc

SEQ ID NO: 264100 - RNA, 32 nt, Human
uguggggaggauggaggcaggagcuggucugg

SEQ ID NO: 264101 - RNA, 32 nt, Human
uguggggaggccguccucgggguggggugggg

SEQ ID NO: 264102 - RNA, 32 nt, Human
uguggggaggcugagggcgcuggucagagccc

SEQ ID NO: 264103 - RNA, 21 nt, Human
uguggggagggaaaaugagga

SEQ ID NO: 264104 - RNA, 18 nt, Human
uguggggaggggaggaga

SEQ ID NO: 264105 - RNA, 32 nt, Human
uguggggaggggcagaugacuugcagcuccgg

SEQ ID NO: 264106 - RNA, 32 nt, Human
uguggggaggggcaguguuagagcagggcugg

SEQ ID NO: 264107 - RNA, 22 nt, Human
uguggggaggugggacugagga

SEQ ID NO: 264108 - RNA, 20 nt, Human
uguggggagguggguggaga

SEQ ID NO: 264109 - RNA, 22 nt, Human
uguggggaucacugagaugagg

SEQ ID NO: 264110 - RNA, 32 nt, Human
uguggggauccuauaauaaaagugaaugacua

SEQ ID NO: 264111 - RNA, 32 nt, Human
uguggggaugaaauaagccccaguuucucaga

SEQ ID NO: 264112 - RNA, 18 nt, Human
uguggggaugaaaugggg

SEQ ID NO: 264113 - RNA, 32 nt, Human
uguggggaugggaagagagaguuggggaaaga

SEQ ID NO: 264114 - RNA, 20 nt, Human
uguggggauggugauggaga

SEQ ID NO: 264115 - RNA, 32 nt, Human
uguggggcaaggcagugagugaagaguuggga

SEQ ID NO: 264116 - RNA, 32 nt, Human
uguggggcaggcaccugguaccaaggguaacc

SEQ ID NO: 264117 - RNA, 32 nt, Human
uguggggcaggcaggauguggugcaggcaggu

SEQ ID NO: 264118 - RNA, 32 nt, Human
uguggggcagggcagugagugaagaguuggga

SEQ ID NO: 264119 - RNA, 21 nt, Human
uguggggccccagagagggga

SEQ ID NO: 264120 - RNA, 32 nt, Human
uguggggcgacagggucugucuuguucugucu

SEQ ID NO: 264121 - RNA, 31 nt, Human
uguggggcgggggucuauacauuccugagau

SEQ ID NO: 264122 - RNA, 32 nt, Human
uguggggcgggugggaugcacagagcacagcg

SEQ ID NO: 264123 - RNA, 32 nt, Human
uguggggcggugagcgccggcccagccugaug

SEQ ID NO: 264124 - RNA, 32 nt, Human
uguggggcucaagggggccucaccuggaggug

SEQ ID NO: 264125 - RNA, 31 nt, Human
uguggggcucagagcagaaccaaagcaugau

SEQ ID NO: 264126 - RNA, 32 nt, Human
uguggggcucauuuugccagggccaagcuacc

SEQ ID NO: 264127 - RNA, 32 nt, Human
uguggggcucugccaugaggaagucacagcag

SEQ ID NO: 264128 - RNA, 20 nt, Human
uguggggcuggagagauggg

SEQ ID NO: 264129 - RNA, 23 nt, Human
uguggggcuggagcugcucccac

SEQ ID NO: 264130 - RNA, 32 nt, Human
uguggggcuggccccuuuucucccucugagac

SEQ ID NO: 264131 - RNA, 32 nt, Human
ugugggggagagagugagggguugggggaucg

SEQ ID NO: 264132 - RNA, 32 nt, Human
ugugggggagaguucaggaucaggcugcuuga

SEQ ID NO: 264133 - RNA, 32 nt, Human
ugugggggagggagggagacgugaagccuauu

SEQ ID NO: 264134 - RNA, 32 nt, Human
ugugggggcaggggcuccuggcucagagccgu

SEQ ID NO: 264135 - RNA, 32 nt, Human
ugugggggcaguguccauccacaaaggggcag

SEQ ID NO: 264136 - RNA, 32 nt, Human
ugugggggcccgugggagggaggcagaccccu

SEQ ID NO: 264137 - RNA, 32 nt, Human
ugugggggcucacgccuguaaucccagcacuu

SEQ ID NO: 264138 - RNA, 32 nt, Human
ugugggggugacgguggccacugugaggagcu

SEQ ID NO: 264139 - RNA, 32 nt, Human
ugugggggugcaguguggaggaaggcacguga

SEQ ID NO: 264140 - RNA, 20 nt, Human
ugugggggugggaguggaga

SEQ ID NO: 264141 - RNA, 32 nt, Human
ugugggggugugagccgcggugcccaaggcug

SEQ ID NO: 264142 - RNA, 32 nt, Human
uguggggguuuccagcccugagguugaggaca

SEQ ID NO: 264143 - RNA, 32 nt, Human
uguggggucugaggaagccauuugagucuggc

SEQ ID NO: 264144 - RNA, 19 nt, Human
uguggggugggagugggga

SEQ ID NO: 264145 - RNA, 20 nt, Human
uguggggugggcagugggga

SEQ ID NO: 264146 - RNA, 22 nt, Human
ugugggguggggggagcgggga

SEQ ID NO: 264147 - RNA, 32 nt, Human
uguggggugggggugggagcagguguguguaa

SEQ ID NO: 264148 - RNA, 32 nt, Human
uguggggugggguauggggaggagaaccuuca

SEQ ID NO: 264149 - RNA, 32 nt, Human
uguggggugguauuuugcauugcaaggagacg

SEQ ID NO: 264150 - RNA, 32 nt, Human
ugugggguugauaccccaacucccucuacccu

SEQ ID NO: 264151 - RNA, 32 nt, Human
uguggguaaaauuucgcagaaugugauaagag

SEQ ID NO: 264152 - RNA, 32 nt, Human
uguggguaaccagcaggcaggccaaagacugg

SEQ ID NO: 264153 - RNA, 32 nt, Human
uguggguaagguaagguguaugugaaacaaau

SEQ ID NO: 264154 - RNA, 31 nt, Human
uguggguagaggaaagagugaucuggugucg

SEQ ID NO: 264155 - RNA, 32 nt, Human
uguggguauguauguguguauguauguauccg

SEQ ID NO: 264156 - RNA, 32 nt, Human
ugugggucccaggauggaggagccccaggccg

SEQ ID NO: 264157 - RNA, 32 nt, Human
uguggguccccuguaccuuucucccccaacag

SEQ ID NO: 264158 - RNA, 32 nt, Human
ugugggucucuccugcagagggugggggucuc

SEQ ID NO: 264159 - RNA, 19 nt, Human
ugugggugaagagagaggg

SEQ ID NO: 264160 - RNA, 32 nt, Human
ugugggugagagaagggacuagacuccuaagc

SEQ ID NO: 264161 - RNA, 32 nt, Human
ugugggugagcugggccuugucuagccccugc

SEQ ID NO: 264162 - RNA, 32 nt, Human
ugugggugaggguggccaugcuuauggccauc

SEQ ID NO: 264163 - RNA, 32 nt, Human
ugugggugccagaggccagcucucccccucca

SEQ ID NO: 264164 - RNA, 32 nt, Human
ugugggugcccuuuccugauuggcuggcucag

SEQ ID NO: 264165 - RNA, 32 nt, Human
ugugggugccuuaucagggcugggauacuucu

SEQ ID NO: 264166 - RNA, 32 nt, Human
uguggguggaagccucagaggccuugggagcu

SEQ ID NO: 264167 - RNA, 32 nt, Human
uguggguggagagaggagugaguuuguuuagg

SEQ ID NO: 264168 - RNA, 32 nt, Human
uguggguggaguggggacaagcgguggagaag

SEQ ID NO: 264169 - RNA, 32 nt, Human
uguggguggauggguggauugccuggguucca

SEQ ID NO: 264170 - RNA, 22 nt, Human
ugugggugggcaaggccagggc

SEQ ID NO: 264171 - RNA, 32 nt, Human
ugugggugggggagggagagggcaguuuguag

SEQ ID NO: 264172 - RNA, 32 nt, Human
ugugggugggguggagggugaaauucuugguc

SEQ ID NO: 264173 - RNA, 31 nt, Human
ugugggugggugggcugaauggggaggaaau

SEQ ID NO: 264174 - RNA, 32 nt, Human
ugugggugguucugagcuguuuggcuucaguu

SEQ ID NO: 264175 - RNA, 32 nt, Human
ugugggugguuuuaguggcauguaggacguga

SEQ ID NO: 264176 - RNA, 32 nt, Human
ugugggugucugcaggcccgaauggaagcccc

SEQ ID NO: 264177 - RNA, 29 nt, Human
ugugggugucuguuuggucaggauguuag

SEQ ID NO: 264178 - RNA, 32 nt, Human
ugugggugugagccaccgcgcucagucuuguu

SEQ ID NO: 264179 - RNA, 32 nt, Human
ugugggugugagccagccgcguggcccugggc

SEQ ID NO: 264180 - RNA, 32 nt, Human
uguggguguggcaguuacagggcccaggugag

SEQ ID NO: 264181 - RNA, 32 nt, Human
uguggguguguguggcugcacgugucacuggg

SEQ ID NO: 264182 - RNA, 19 nt, Human
uguggguguugccuuccau

SEQ ID NO: 264183 - RNA, 32 nt, Human
uguggguguuguugccuuccucugucugacag

SEQ ID NO: 264184 - RNA, 32 nt, Human
uguggguguuuccuccucugauuugcaucauu

SEQ ID NO: 264185 - RNA, 32 nt, Human
uguggguuaagaauaggcuagagcagacauug

SEQ ID NO: 264186 - RNA, 32 nt, Human
uguggguucgagguggaggcugcagcugaagg

SEQ ID NO: 264187 - RNA, 32 nt, Human
uguggguucugugucugucuguucaucccagg

SEQ ID NO: 264188 - RNA, 32 nt, Human
uguggguugaagcacuggacaaugccacauac

SEQ ID NO: 264189 - RNA, 32 nt, Human
uguggguugacuuucacccaucuggaguugcu

SEQ ID NO: 264190 - RNA, 20 nt, Human
uguggguugcaagaggggga

SEQ ID NO: 264191 - RNA, 23 nt, Human
uguggguuggacuuugaagcugg

SEQ ID NO: 264192 - RNA, 32 nt, Human
uguggguuuauuauaaggcggagcucggcggg

SEQ ID NO: 264193 - RNA, 32 nt, Human
uguggguuuggaaucuuggauuuucccccuuu

SEQ ID NO: 264194 - RNA, 29 nt, Human
uguggguuuguguguguggaugugguuuc

SEQ ID NO: 264195 - RNA, 32 nt, Human
ugugguaacacauaggaacugagggagaggac

SEQ ID NO: 264196 - RNA, 32 nt, Human
ugugguaacccaggaaccacagccaaugggaa

SEQ ID NO: 264197 - RNA, 32 nt, Human
ugugguaagcugggaguaucacucuggaagaa

SEQ ID NO: 264198 - RNA, 32 nt, Human
ugugguaauguucaccugcagucccagcuacu

SEQ ID NO: 264199 - RNA, 32 nt, Human
ugugguaauuuccuugccaguuucugagauau

SEQ ID NO: 264200 - RNA, 21 nt, Human
ugugguaauuuguuggcuuua

SEQ ID NO: 264201 - RNA, 32 nt, Human
ugugguacccuggcugcccaggccagugcugc

SEQ ID NO: 264202 - RNA, 32 nt, Human
ugugguacuaccuucaggcauuugguaacuca

SEQ ID NO: 264203 - RNA, 32 nt, Human
ugugguagagcuugguaaaagacugaauacau

SEQ ID NO: 264204 - RNA, 32 nt, Human
ugugguagcaggcacccguaaucccagcuacu

SEQ ID NO: 264205 - RNA, 32 nt, Human
ugugguagcaggcaccuguagucuuagcuacu

SEQ ID NO: 264206 - RNA, 32 nt, Human
ugugguagcccacgccucuaaucccagcacuu

SEQ ID NO: 264207 - RNA, 32 nt, Human
ugugguagccccagcaguucucagggugcuga

SEQ ID NO: 264208 - RNA, 32 nt, Human
ugugguagccucagaagcagagcuguuuggca

SEQ ID NO: 264209 - RNA, 32 nt, Human
ugugguagcgcacaccuguagucacagcuacu

SEQ ID NO: 264210 - RNA, 32 nt, Human
ugugguagcgcacaccuguggucccaacuacu

SEQ ID NO: 264211 - RNA, 32 nt, Human
ugugguagcucaagccuguaaucccagcacuu

SEQ ID NO: 264212 - RNA, 32 nt, Human
ugugguagcucacaccuauaaucccagcaccu

SEQ ID NO: 264213 - RNA, 32 nt, Human
ugugguagcucacaccuauaaucccagcacuu

SEQ ID NO: 264214 - RNA, 32 nt, Human
ugugguagcucacaccuguaauucccagcgcu

SEQ ID NO: 264215 - RNA, 32 nt, Human
ugugguagcucaugccuauaaucccaggacuu

SEQ ID NO: 264216 - RNA, 32 nt, Human
ugugguagcuuacaccuauaaucccagcacuu

SEQ ID NO: 264217 - RNA, 32 nt, Human
ugugguaggaguaggccaggagagugagcugu

SEQ ID NO: 264218 - RNA, 32 nt, Human
ugugguagggguuuuccagagugugggcauua

SEQ ID NO: 264219 - RNA, 32 nt, Human
ugugguagguggaucacuugaggucaggaguu

SEQ ID NO: 264220 - RNA, 32 nt, Human
ugugguaguuagcgggcaggagagcgacaucu

SEQ ID NO: 264221 - RNA, 32 nt, Human
ugugguaguucacaccuguaaucccagcacuu

SEQ ID NO: 264222 - RNA, 32 nt, Human
ugugguauaguauuaguggaaagugauuugua

SEQ ID NO: 264223 - RNA, 32 nt, Human
ugugguauauacuuucuccuacucuagcaaac

SEQ ID NO: 264224 - RNA, 32 nt, Human
ugugguaugggagggguuggaaaccaaguugu

SEQ ID NO: 264225 - RNA, 32 nt, Human
uguggucaaaaauauaaggauuuugaacuaau

SEQ ID NO: 264226 - RNA, 32 nt, Human
uguggucaaaaauauaaggauuuugaauuaau

SEQ ID NO: 264227 - RNA, 32 nt, Human
uguggucaaaacugagccucacugaaacaauu

SEQ ID NO: 264228 - RNA, 32 nt, Human
uguggucaaaggacaggcgaggagcugugggc

SEQ ID NO: 264229 - RNA, 32 nt, Human
uguggucaacgaauacuacuacaggaagaagu

SEQ ID NO: 264230 - RNA, 32 nt, Human
uguggucaagaguucaagaccagccuggccau

SEQ ID NO: 264231 - RNA, 32 nt, Human
uguggucacaaaccuucuuggucaccaccucu

SEQ ID NO: 264232 - RNA, 32 nt, Human
uguggucacaccacuguauuccagccugggug

SEQ ID NO: 264233 - RNA, 32 nt, Human
uguggucacagcccuuccuggaggcaugagga

SEQ ID NO: 264234 - RNA, 31 nt, Human
uguggucacagcugccagguaccuaagcaag

SEQ ID NO: 264235 - RNA, 32 nt, Human
uguggucacaugcuuuagccauacacauggua

SEQ ID NO: 264236 - RNA, 32 nt, Human
uguggucacuugaggaggcgagucuagcagau

SEQ ID NO: 264237 - RNA, 22 nt, Human
uguggucagacuugcucucuau

SEQ ID NO: 264238 - RNA, 32 nt, Human
uguggucagagccacagucaggggccuucuga

SEQ ID NO: 264239 - RNA, 32 nt, Human
uguggucagcugucugcuuuccuugcucagca

SEQ ID NO: 264240 - RNA, 32 nt, Human
uguggucauggugagaaaacuaaaacuacaug

SEQ ID NO: 264241 - RNA, 32 nt, Human
uguggucaugucccacagcaagcuuuugggau

SEQ ID NO: 264242 - RNA, 32 nt, Human
ugugguccagccagcgcucuuuccagcuguaa

SEQ ID NO: 264243 - RNA, 24 nt, Human
ugugguccaggcaggagugcagug

SEQ ID NO: 264244 - RNA, 32 nt, Human
uguggucccaggagaaggucugggggucacua

SEQ ID NO: 264245 - RNA, 32 nt, Human
ugugguccccucacucagucucucauuuggua

SEQ ID NO: 264246 - RNA, 32 nt, Human
uguggucccgguuacucaggaggcugaggcag

SEQ ID NO: 264247 - RNA, 32 nt, Human
uguggucccucauugaccaaaacaucauuaug

SEQ ID NO: 264248 - RNA, 32 nt, Human
ugugguccggcagugcuaccaugguaauggac

SEQ ID NO: 264249 - RNA, 32 nt, Human
ugugguccuagccacuagaggcugagguggga

SEQ ID NO: 264250 - RNA, 32 nt, Human
ugugguccuagccucuuggagggcugaggugg

SEQ ID NO: 264251 - RNA, 32 nt, Human
uguggucggugcccugcuuccuccuccacucc

SEQ ID NO: 264252 - RNA, 32 nt, Human
uguggucuacuuuccaauugguugucuggcca

SEQ ID NO: 264253 - RNA, 21 nt, Human
uguggucucaagagauggggg

SEQ ID NO: 264254 - RNA, 32 nt, Human
uguggucuccauccugacucuugaacuuaccc

SEQ ID NO: 264255 - RNA, 32 nt, Human
uguggucugcaggcccuggacccgcuggccag

SEQ ID NO: 264256 - RNA, 32 nt, Human
uguggucugucccggcuucacggccugacacg

SEQ ID NO: 264257 - RNA, 32 nt, Human
uguggucuguccucacaugugcacugguaaca

SEQ ID NO: 264258 - RNA, 32 nt, Human
uguggucuuccuugcuugacccucucuacucu

SEQ ID NO: 264259 - RNA, 32 nt, Human
uguggugaauaugcaggaaucauucaugagac

SEQ ID NO: 264260 - RNA, 32 nt, Human
uguggugacguacaccuguaauuccagcuacu

SEQ ID NO: 264261 - RNA, 32 nt, Human
uguggugacucacaccuauaaucccaauacuu

SEQ ID NO: 264262 - RNA, 32 nt, Human
uguggugacucacacuuguaaucccagcaauu

SEQ ID NO: 264263 - RNA, 32 nt, Human
uguggugacucacagccguaaucccagcuacu

SEQ ID NO: 264264 - RNA, 32 nt, Human
uguggugacucaugccuguaauccuaguacuu

SEQ ID NO: 264265 - RNA, 32 nt, Human
uguggugacugagguacaggaaacuacuaauc

SEQ ID NO: 264266 - RNA, 32 nt, Human
uguggugagaaaccucacuguccaugguuaac

SEQ ID NO: 264267 - RNA, 32 nt, Human
uguggugagccccaucauucugcaccucaacu

SEQ ID NO: 264268 - RNA, 32 nt, Human
uguggugaggccaccaggcugaagucagcuca

SEQ ID NO: 264269 - RNA, 32 nt, Human
uguggugagguuggcagagaauauacgauggg

SEQ ID NO: 264270 - RNA, 32 nt, Human
uguggugaugcugucugucugucugagucucg

SEQ ID NO: 264271 - RNA, 32 nt, Human
uguggugauucucaguggcucaucuaauauuu

SEQ ID NO: 264272 - RNA, 32 nt, Human
uguggugcacgugucuccaccuccaaggagag

SEQ ID NO: 264273 - RNA, 32 nt, Human
uguggugcagcccugcuccagccuuggccucu

SEQ ID NO: 264274 - RNA, 32 nt, Human
uguggugcaguaagccaagaucacgccacugc

SEQ ID NO: 264275 - RNA, 32 nt, Human
uguggugcaguuggagaccgaggccccgcgca

SEQ ID NO: 264276 - RNA, 32 nt, Human
uguggugcaugcuguugaguccaacccaaagg

SEQ ID NO: 264277 - RNA, 32 nt, Human
uguggugccacaugccuguaauuccagcuacu

SEQ ID NO: 264278 - RNA, 32 nt, Human
uguggugccagagaaaaguagccagagcggcg

SEQ ID NO: 264279 - RNA, 32 nt, Human
uguggugcccccuccagggcucuggaggaugg

SEQ ID NO: 264280 - RNA, 32 nt, Human
uguggugccgcaugccuguaaucccagcuacu

SEQ ID NO: 264281 - RNA, 32 nt, Human
uguggugccgcgugccuguaaucccagcuacu

SEQ ID NO: 264282 - RNA, 32 nt, Human
uguggugccucacaccuguaaucucagcacuu

SEQ ID NO: 264283 - RNA, 32 nt, Human
uguggugcuaggugaguaugagaagaugucaa

SEQ ID NO: 264284 - RNA, 32 nt, Human
uguggugcuguggaaggagcacuggacuaaag

SEQ ID NO: 264285 - RNA, 32 nt, Human
uguggugcuguggcuggccacgugucaggguu

SEQ ID NO: 264286 - RNA, 32 nt, Human
ugugguggaagcuggaccagaggccgggaggc

SEQ ID NO: 264287 - RNA, 32 nt, Human
ugugguggagccaccaccaaaaugcagauuuu

SEQ ID NO: 264288 - RNA, 32 nt, Human
ugugguggagccagcagaaccacaggagagug

SEQ ID NO: 264289 - RNA, 32 nt, Human
ugugguggagggcgccuguaaucccagcuaau

SEQ ID NO: 264290 - RNA, 32 nt, Human
ugugguggagucuugcugucuccccggcugga

SEQ ID NO: 264291 - RNA, 32 nt, Human
ugugguggaucacaccugcaaucccagcacuu

SEQ ID NO: 264292 - RNA, 31 nt, Human
ugugguggcacaaucucggcucacugcaacc

SEQ ID NO: 264293 - RNA, 32 nt, Human
ugugguggcacacaccaguaaucccagcuacu

SEQ ID NO: 264294 - RNA, 32 nt, Human
ugugguggcacacaccaguaauccuggcuacu

SEQ ID NO: 264295 - RNA, 32 nt, Human
ugugguggcacacaccuguaaucccagcuacu

SEQ ID NO: 264296 - RNA, 32 nt, Human
ugugguggcacacaccuguaaucccaguuacu

SEQ ID NO: 264297 - RNA, 32 nt, Human
ugugguggcacacaccuguagucccagcuacu

SEQ ID NO: 264298 - RNA, 32 nt, Human
ugugguggcacacaccuguagucccagcuagu

SEQ ID NO: 264299 - RNA, 32 nt, Human
ugugguggcacacaccuguagucccagguacu

SEQ ID NO: 264300 - RNA, 32 nt, Human
ugugguggcacacaccuguaguuccagcuacu

SEQ ID NO: 264301 - RNA, 32 nt, Human
ugugguggcacacaccuguguguccagaauug

SEQ ID NO: 264302 - RNA, 32 nt, Human
ugugguggcacacgccuguaaucccagcuacu

SEQ ID NO: 264303 - RNA, 32 nt, Human
ugugguggcacaugccuauaaucccagcuacu

SEQ ID NO: 264304 - RNA, 20 nt, Human
ugugguggcacaugccugua

SEQ ID NO: 264305 - RNA, 32 nt, Human
ugugguggcacaugccuguaauaucagcuacu

SEQ ID NO: 264306 - RNA, 32 nt, Human
ugugguggcacaugccuguaaucccagcuacu

SEQ ID NO: 264307 - RNA, 32 nt, Human
ugugguggcacaugccuguaaucccagcugcu

SEQ ID NO: 264308 - RNA, 32 nt, Human
ugugguggcacaugccuguaaucccaguuagu

SEQ ID NO: 264309 - RNA, 32 nt, Human
ugugguggcacaugccuguaaucgcagcuacu

SEQ ID NO: 264310 - RNA, 32 nt, Human
ugugguggcacgcaccuguaaucccagcugcu

SEQ ID NO: 264311 - RNA, 32 nt, Human
ugugguggcacgcaccuguagucccaacuacu

SEQ ID NO: 264312 - RNA, 32 nt, Human
ugugguggcacgcaccuguagucccagcuacu

SEQ ID NO: 264313 - RNA, 32 nt, Human
ugugguggcacgcgccuguaaucccagcuacu

SEQ ID NO: 264314 - RNA, 32 nt, Human
ugugguggcacgugccuguaaucucagcaacu

SEQ ID NO: 264315 - RNA, 32 nt, Human
ugugguggcacuucucuguaaucucagcuucu

SEQ ID NO: 264316 - RNA, 32 nt, Human
ugugguggcagacaccuguggucccagcuauu

SEQ ID NO: 264317 - RNA, 32 nt, Human
ugugguggcagaggccuguaaucccaguuccu

SEQ ID NO: 264318 - RNA, 32 nt, Human
ugugguggcaggagccuguaaucccagcuaca

SEQ ID NO: 264319 - RNA, 32 nt, Human
ugugguggcaggagccuguaauccuagcuacu

SEQ ID NO: 264320 - RNA, 32 nt, Human
ugugguggcaggcaccugcaaucccagcuaca

SEQ ID NO: 264321 - RNA, 32 nt, Human
ugugguggcaggcaccuguaaucccagcuacu

SEQ ID NO: 264322 - RNA, 32 nt, Human
ugugguggcaggcaccuguagucccagcuacc

SEQ ID NO: 264323 - RNA, 32 nt, Human
ugugguggcaggccccuguaaucccagcuaau

SEQ ID NO: 264324 - RNA, 32 nt, Human
ugugguggcaggcgccugaaaucccagcuacu

SEQ ID NO: 264325 - RNA, 32 nt, Human
ugugguggcaggcuucuguaaucccagcuacu

SEQ ID NO: 264326 - RNA, 32 nt, Human
ugugguggcaggugccuguaaucccagcuacu

SEQ ID NO: 264327 - RNA, 32 nt, Human
ugugguggcagucaccuguagucccagcuacu

SEQ ID NO: 264328 - RNA, 32 nt, Human
ugugguggcauacaccuguagucccagcuacu

SEQ ID NO: 264329 - RNA, 32 nt, Human
ugugguggcauacgccuguaaucccagcuacu

SEQ ID NO: 264330 - RNA, 32 nt, Human
ugugguggcauaggccuguaaucguagcgcuu

SEQ ID NO: 264331 - RNA, 32 nt, Human
ugugguggcaugcaccuguagucccagcuacu

SEQ ID NO: 264332 - RNA, 32 nt, Human
ugugguggcaugcaccuguagucccagcuauu

SEQ ID NO: 264333 - RNA, 32 nt, Human
ugugguggcaugcgccuguaaucccggcuacu

SEQ ID NO: 264334 - RNA, 32 nt, Human
ugugguggcauucaaccacuugugaaccuccu

SEQ ID NO: 264335 - RNA, 32 nt, Human
ugugguggcccacgccuguaaucccagcacuu

SEQ ID NO: 264336 - RNA, 32 nt, Human
ugugguggcccaggaggcggcaggacggccaa

SEQ ID NO: 264337 - RNA, 32 nt, Human
ugugguggccucuccaggcccagaacuuccuc

SEQ ID NO: 264338 - RNA, 32 nt, Human
ugugguggccugggacaagccuggacuucuga

SEQ ID NO: 264339 - RNA, 32 nt, Human
ugugguggcgagcaccuguaaugucagcuacu

SEQ ID NO: 264340 - RNA, 32 nt, Human
ugugguggcgcaagccuguaaucccagcuauu

SEQ ID NO: 264341 - RNA, 20 nt, Human
ugugguggcgcacaccugua

SEQ ID NO: 264342 - RNA, 32 nt, Human
ugugguggcgcacaccuguaaucccagcuacu

SEQ ID NO: 264343 - RNA, 32 nt, Human
ugugguggcgcacaccuguaguagucccagcu

SEQ ID NO: 264344 - RNA, 32 nt, Human
ugugguggcgcacgccuguaaucccagcuacu

SEQ ID NO: 264345 - RNA, 32 nt, Human
ugugguggcgcaugccuguaaucccaacuacu

SEQ ID NO: 264346 - RNA, 32 nt, Human
ugugguggcgcaugccuguaaucccagcuacu

SEQ ID NO: 264347 - RNA, 32 nt, Human
ugugguggcgcaugccuguaaucccagcugcu

SEQ ID NO: 264348 - RNA, 32 nt, Human
ugugguggcgcaugccuguaauccuagcuacu

SEQ ID NO: 264349 - RNA, 32 nt, Human
ugugguggcgcaugucuguaaucccagcuacu

SEQ ID NO: 264350 - RNA, 32 nt, Human
ugugguggcgcgugccuauaaucccagcuacu

SEQ ID NO: 264351 - RNA, 32 nt, Human
ugugguggcgcgugccuguaaucccagcuacu

SEQ ID NO: 264352 - RNA, 32 nt, Human
ugugguggcgcgugccuguaauccuagcuacu

SEQ ID NO: 264353 - RNA, 32 nt, Human
ugugguggcgcgugcuuguaaucccagcuacu

SEQ ID NO: 264354 - RNA, 32 nt, Human
ugugguggcgggcaccuguaaucccagcuacu

SEQ ID NO: 264355 - RNA, 32 nt, Human
ugugguggcgggcaccuguaauccuggcuacu

SEQ ID NO: 264356 - RNA, 32 nt, Human
ugugguggcgggcaccuguagucccagcuacu

SEQ ID NO: 264357 - RNA, 32 nt, Human
ugugguggcgggcaccuguagucccagguacu

SEQ ID NO: 264358 - RNA, 32 nt, Human
ugugguggcgggcaccuguagucgcagccuuu

SEQ ID NO: 264359 - RNA, 32 nt, Human
ugugguggcgggcgcccguaaucccagcuacu

SEQ ID NO: 264360 - RNA, 32 nt, Human
ugugguggcgggcgccuguaaucccagcuacu

SEQ ID NO: 264361 - RNA, 32 nt, Human
ugugguggcgggugccuguaaucccagauagu

SEQ ID NO: 264362 - RNA, 32 nt, Human
ugugguggcgggugccuguaaucccagcuacu

SEQ ID NO: 264363 - RNA, 32 nt, Human
ugugguggcgugcgccuguaaucccagcuacu

SEQ ID NO: 264364 - RNA, 32 nt, Human
ugugguggcgugugccuguaaucccagcuacu

SEQ ID NO: 264365 - RNA, 32 nt, Human
ugugguggcucaagccuguaaucccagcacuu

SEQ ID NO: 264366 - RNA, 32 nt, Human
ugugguggcucacacccagcacuuugggaggc

SEQ ID NO: 264367 - RNA, 32 nt, Human
ugugguggcucacacccauaaucccaacacuu

SEQ ID NO: 264368 - RNA, 32 nt, Human
ugugguggcucacaccugcaaucccagcacuu

SEQ ID NO: 264369 - RNA, 32 nt, Human
ugugguggcucacaccuguaaccccagcacuu

SEQ ID NO: 264370 - RNA, 32 nt, Human
ugugguggcucacaccuguaaucccaaaaccu

SEQ ID NO: 264371 - RNA, 32 nt, Human
ugugguggcucacaccuguaaucccaacacuu

SEQ ID NO: 264372 - RNA, 32 nt, Human
ugugguggcucacaccuguaaucccagcaauu

SEQ ID NO: 264373 - RNA, 32 nt, Human
ugugguggcucacaccuguaaucccagcacuu

SEQ ID NO: 264374 - RNA, 32 nt, Human
ugugguggcucacaccuguaaucccagcuacu

SEQ ID NO: 264375 - RNA, 32 nt, Human
ugugguggcucacaccuguaauccuaacacuu

SEQ ID NO: 264376 - RNA, 32 nt, Human
ugugguggcucacaccuguaaucucggcacuu

SEQ ID NO: 264377 - RNA, 32 nt, Human
ugugguggcucacaccuguaauugcagcacuc

SEQ ID NO: 264378 - RNA, 32 nt, Human
ugugguggcucacaccuguauucccagcacuu

SEQ ID NO: 264379 - RNA, 32 nt, Human
ugugguggcucacaccugugaucccagcacuu

SEQ ID NO: 264380 - RNA, 32 nt, Human
ugugguggcucacacuuguaaucccagcacuu

SEQ ID NO: 264381 - RNA, 32 nt, Human
ugugguggcucacaucuguaaucccagcacuu

SEQ ID NO: 264382 - RNA, 32 nt, Human
ugugguggcucacgcauguaaucccagcacuc

SEQ ID NO: 264383 - RNA, 32 nt, Human
ugugguggcucacgccgguaaucccagcauuu

SEQ ID NO: 264384 - RNA, 32 nt, Human
ugugguggcucacgccuauaaucccagcacuu

SEQ ID NO: 264385 - RNA, 32 nt, Human
ugugguggcucacgccuguaaucccaacacuu

SEQ ID NO: 264386 - RNA, 32 nt, Human
ugugguggcucacgccuguaaucccagcacuu

SEQ ID NO: 264387 - RNA, 32 nt, Human
ugugguggcucacgccuguaaucccagcucuu

SEQ ID NO: 264388 - RNA, 32 nt, Human
ugugguggcucacgccuguaaucccuacacuu

SEQ ID NO: 264389 - RNA, 32 nt, Human
ugugguggcucacgccuguaaucccugcauuu

SEQ ID NO: 264390 - RNA, 32 nt, Human
ugugguggcucacgccuguaauccuagcacuu

SEQ ID NO: 264391 - RNA, 32 nt, Human
ugugguggcucacgccuguaaucgcggcacuu

SEQ ID NO: 264392 - RNA, 32 nt, Human
ugugguggcucacgccuguaauucuagcacuu

SEQ ID NO: 264393 - RNA, 32 nt, Human
ugugguggcucacgucuguaaucccagcaguu

SEQ ID NO: 264394 - RNA, 32 nt, Human
ugugguggcucacuccuguaaucccggcacuu

SEQ ID NO: 264395 - RNA, 32 nt, Human
ugugguggcucaggccuguaaucccaacacuu

SEQ ID NO: 264396 - RNA, 32 nt, Human
ugugguggcucaggccuguaaucccagcacuu

SEQ ID NO: 264397 - RNA, 32 nt, Human
ugugguggcucaggccuguaauccuggcacuu

SEQ ID NO: 264398 - RNA, 32 nt, Human
ugugguggcucauaccuguaaaucccagcacu

SEQ ID NO: 264399 - RNA, 32 nt, Human
ugugguggcucauaccuguaaucccagcacuu

SEQ ID NO: 264400 - RNA, 18 nt, Human
ugugguggcucauaugua

SEQ ID NO: 264401 - RNA, 32 nt, Human
ugugguggcucaugcauguaaucccagcacuu

SEQ ID NO: 264402 - RNA, 32 nt, Human
ugugguggcucaugccuauaaucccagcacuu

SEQ ID NO: 264403 - RNA, 32 nt, Human
ugugguggcucaugccugcaaucccagcacug

SEQ ID NO: 264404 - RNA, 20 nt, Human
ugugguggcucaugccugua

SEQ ID NO: 264405 - RNA, 32 nt, Human
ugugguggcucaugccuguaauagcagcuacu

SEQ ID NO: 264406 - RNA, 32 nt, Human
ugugguggcucaugccuguaaucccaacauuc

SEQ ID NO: 264407 - RNA, 32 nt, Human
ugugguggcucaugccuguaaucccaacucuu

SEQ ID NO: 264408 - RNA, 32 nt, Human
ugugguggcucaugccuguaaucccagcaauu

SEQ ID NO: 264409 - RNA, 32 nt, Human
ugugguggcucaugccuguaaucccagcacuc

SEQ ID NO: 264410 - RNA, 32 nt, Human
ugugguggcucaugccuguaaucccagcacug

SEQ ID NO: 264411 - RNA, 32 nt, Human
ugugguggcucaugccuguaaucccagcacuu

SEQ ID NO: 264412 - RNA, 32 nt, Human
ugugguggcucaugccuguaaucccgacacuu

SEQ ID NO: 264413 - RNA, 32 nt, Human
ugugguggcucaugccuguaauccuagcacuu

SEQ ID NO: 264414 - RNA, 32 nt, Human
ugugguggcucaugccuguaaucucagcuacu

SEQ ID NO: 264415 - RNA, 32 nt, Human
ugugguggcucaugccuguaauuccagcacuu

SEQ ID NO: 264416 - RNA, 32 nt, Human
ugugguggcucccaccuauaaucccagcaguu

SEQ ID NO: 264417 - RNA, 32 nt, Human
ugugguggcuccgaccuguaaucccagcacgu

SEQ ID NO: 264418 - RNA, 32 nt, Human
ugugguggcucguaucuguaaucccagcacuu

SEQ ID NO: 264419 - RNA, 32 nt, Human
ugugguggcugacaccuguaaucccagcacuu

SEQ ID NO: 264420 - RNA, 32 nt, Human
ugugguggcugcuccaugagggugggggugau

SEQ ID NO: 264421 - RNA, 32 nt, Human
ugugguggcuuacaccuguaaucccaacacuu

SEQ ID NO: 264422 - RNA, 32 nt, Human
ugugguggcuuacaccuguaauccuaguacuu

SEQ ID NO: 264423 - RNA, 32 nt, Human
ugugguggcuuaccccuguaaucccagcacuu

SEQ ID NO: 264424 - RNA, 32 nt, Human
ugugguggcuuacgccuguaaucccagcagug

SEQ ID NO: 264425 - RNA, 32 nt, Human
ugugguggcuuaugccuguaaucccacuuugg

SEQ ID NO: 264426 - RNA, 32 nt, Human
ugugguggcuuaugccuguaauccuagaacuu

SEQ ID NO: 264427 - RNA, 32 nt, Human
ugugguggcuuaugccuguaauccuagcgcuu

SEQ ID NO: 264428 - RNA, 32 nt, Human
ugugguggcuuaugcuuguaaucccagaacuu

SEQ ID NO: 264429 - RNA, 32 nt, Human
ugugguggcuucaguccugccccugcaccuga

SEQ ID NO: 264430 - RNA, 32 nt, Human
ugugguggcuuccguuuguugguggaggaggu

SEQ ID NO: 264431 - RNA, 32 nt, Human
ugugguggcuucugccugaaaucccaguacuc

SEQ ID NO: 264432 - RNA, 32 nt, Human
ugugguggcuuguacccguaaucccagcacuu

SEQ ID NO: 264433 - RNA, 32 nt, Human
ugugguggcuuuaaucccagcacuuugggaac

SEQ ID NO: 264434 - RNA, 32 nt, Human
uguggugggacccccuuuagcgggacucagug

SEQ ID NO: 264435 - RNA, 32 nt, Human
uguggugggaggaggagguucgggugcugggu

SEQ ID NO: 264436 - RNA, 32 nt, Human
uguggugggaggauugcuuaagcccaggagcu

SEQ ID NO: 264437 - RNA, 32 nt, Human
uguggugggaggauugcuugaguccaggaggu

SEQ ID NO: 264438 - RNA, 32 nt, Human
uguggugggcgccggcccugcccgaggcccag

SEQ ID NO: 264439 - RNA, 32 nt, Human
uguggugggcggagcucccagucgcauggagc

SEQ ID NO: 264440 - RNA, 32 nt, Human
uguggugggggccuccuguaaucccagcuacu

SEQ ID NO: 264441 - RNA, 32 nt, Human
ugugguggggugcaccuguagucccagcuacu

SEQ ID NO: 264442 - RNA, 32 nt, Human
ugugguggggugcgcuuguaaucccagcuacu

SEQ ID NO: 264443 - RNA, 32 nt, Human
uguggugggucacaucuguaaucucagcucuu

SEQ ID NO: 264444 - RNA, 32 nt, Human
uguggugggugacauauguaaucccagcacuu

SEQ ID NO: 264445 - RNA, 32 nt, Human
ugugguggguuacaccuguaaucccagcacuu

SEQ ID NO: 264446 - RNA, 32 nt, Human
ugugguggguugucugugugcauauguccugc

SEQ ID NO: 264447 - RNA, 32 nt, Human
uguggugguacacgccuauaaucccagcuacu

SEQ ID NO: 264448 - RNA, 32 nt, Human
uguggugguaggcaccuguaauccagguaugu

SEQ ID NO: 264449 - RNA, 32 nt, Human
uguggugguaggcaccuguaaucccagcuacu

SEQ ID NO: 264450 - RNA, 32 nt, Human
uguggugguaugcaccuguagucccggcuacu

SEQ ID NO: 264451 - RNA, 32 nt, Human
ugugguggugagcaccuguaauccuagcuacu

SEQ ID NO: 264452 - RNA, 32 nt, Human
ugugguggugagugccuguaaucccagcuacu

SEQ ID NO: 264453 - RNA, 32 nt, Human
ugugguggugcacaccuguaaucccagcuacu

SEQ ID NO: 264454 - RNA, 32 nt, Human
ugugguggugcacaccuguagucccaacuauu

SEQ ID NO: 264455 - RNA, 32 nt, Human
ugugguggugcacaccuguagucccagcuacu

SEQ ID NO: 264456 - RNA, 32 nt, Human
ugugguggugcacaccuguagucccagguacu

SEQ ID NO: 264457 - RNA, 32 nt, Human
ugugguggugcacaccuguagucucaacuauu

SEQ ID NO: 264458 - RNA, 32 nt, Human
ugugguggugcacaccugugaucccagcuacu

SEQ ID NO: 264459 - RNA, 32 nt, Human
ugugguggugcacaccuguuauccuagcuacu

SEQ ID NO: 264460 - RNA, 32 nt, Human
ugugguggugcacacguauaaucccagcuacu

SEQ ID NO: 264461 - RNA, 32 nt, Human
ugugguggugcacaucuauaaucccaguuacc

SEQ ID NO: 264462 - RNA, 32 nt, Human
ugugguggugcacgccuguaaucccagcuacu

SEQ ID NO: 264463 - RNA, 32 nt, Human
ugugguggugcacgccuguaaucccagcuccu

SEQ ID NO: 264464 - RNA, 32 nt, Human
ugugguggugcacgccuguaauccccagauac

SEQ ID NO: 264465 - RNA, 32 nt, Human
ugugguggugcacuccuguaaucccagcuacu

SEQ ID NO: 264466 - RNA, 32 nt, Human
ugugguggugcaugccuguaaucccagcuacc

SEQ ID NO: 264467 - RNA, 32 nt, Human
ugugguggugcaugccuguaaucccagcuacu

SEQ ID NO: 264468 - RNA, 32 nt, Human
ugugguggugcaugccuguaaucccagcuucu

SEQ ID NO: 264469 - RNA, 32 nt, Human
ugugguggugcaugcuuguaaucccagcuacu

SEQ ID NO: 264470 - RNA, 32 nt, Human
ugugguggugcgcaccuguaaucccagccacu

SEQ ID NO: 264471 - RNA, 32 nt, Human
ugugguggugggcacauguaaucccagcuacu

SEQ ID NO: 264472 - RNA, 32 nt, Human
ugugguggugggcaccuguaaucccaccuacu

SEQ ID NO: 264473 - RNA, 32 nt, Human
ugugguggugggcaccuguaaucccagauacu

SEQ ID NO: 264474 - RNA, 32 nt, Human
ugugguggugggcaccuguaaucccagcuacu

SEQ ID NO: 264475 - RNA, 32 nt, Human
ugugguggugggcaccuguagucccagcuacu

SEQ ID NO: 264476 - RNA, 32 nt, Human
ugugguggugggcaccuguagucucagcuacu

SEQ ID NO: 264477 - RNA, 32 nt, Human
ugugguggugggcgccuguaauuccagcuacu

SEQ ID NO: 264478 - RNA, 32 nt, Human
ugugguggugggcggcuauaaucccagccacu

SEQ ID NO: 264479 - RNA, 32 nt, Human
ugugguggugggugccuguaaucccagcuaca

SEQ ID NO: 264480 - RNA, 32 nt, Human
ugugguggugggugccuguaaucccagcuacu

SEQ ID NO: 264481 - RNA, 32 nt, Human
ugugguggugggugccuguaaucucagcuacu

SEQ ID NO: 264482 - RNA, 32 nt, Human
ugugguggugugcaccuguaaucccagcuacu

SEQ ID NO: 264483 - RNA, 32 nt, Human
ugugguggugugcaccuguagucacagcuacu

SEQ ID NO: 264484 - RNA, 32 nt, Human
ugugguggugugcaccuguagucccagcuacu

SEQ ID NO: 264485 - RNA, 32 nt, Human
ugugguggugugcaccuguagucccagcuauu

SEQ ID NO: 264486 - RNA, 32 nt, Human
ugugguggugugcaccuguaguucuagcuacu

SEQ ID NO: 264487 - RNA, 32 nt, Human
ugugguggugugcgccuauaaucccagcuacu

SEQ ID NO: 264488 - RNA, 32 nt, Human
ugugguggugugugccuauaaucccagcuacu

SEQ ID NO: 264489 - RNA, 32 nt, Human
ugugguggugugugccuguaauuccagcuacu

SEQ ID NO: 264490 - RNA, 32 nt, Human
uguggugguguucaccuuuaaucccagcuacu

SEQ ID NO: 264491 - RNA, 32 nt, Human
uguggugguucacaccuguaauccaagcacuu

SEQ ID NO: 264492 - RNA, 32 nt, Human
uguggugucacgcgccuguaaucccagcuacu

SEQ ID NO: 264493 - RNA, 32 nt, Human
uguggugucaugagccauucuccauguccccu

SEQ ID NO: 264494 - RNA, 32 nt, Human
uguggugucgggcaccuguagucccagcuacu

SEQ ID NO: 264495 - RNA, 32 nt, Human
uguggugugaaaggguaggagagaugcuggag

SEQ ID NO: 264496 - RNA, 32 nt, Human
uguggugugagugacuuccugcaccaucaucu

SEQ ID NO: 264497 - RNA, 32 nt, Human
uguggugugaugcugugucuguauauucuaua

SEQ ID NO: 264498 - RNA, 21 nt, Human
uguggugugcagaggugggga

SEQ ID NO: 264499 - RNA, 32 nt, Human
uguggugugcucuccagcucuucaccuuccuc

SEQ ID NO: 264500 - RNA, 32 nt, Human
uguggugugcugcuguccacagauaaaccagu

SEQ ID NO: 264501 - RNA, 32 nt, Human
ugugguguggagggagugagccagcagcuuaa

SEQ ID NO: 264502 - RNA, 32 nt, Human
ugugguguggccugcugcuuccaggcugcaaa

SEQ ID NO: 264503 - RNA, 32 nt, Human
uguggugugugggcgacuccacaagaccugcc

SEQ ID NO: 264504 - RNA, 32 nt, Human
ugugguguguuucugugccagugcuguaugac

SEQ ID NO: 264505 - RNA, 32 nt, Human
ugugguguucucuucucaaggcuuugaaaucu

SEQ ID NO: 264506 - RNA, 32 nt, Human
ugugguguugcaugccuguaaucccagcuauu

SEQ ID NO: 264507 - RNA, 32 nt, Human
ugugguguugggcaccuguaaucccagcuacu

SEQ ID NO: 264508 - RNA, 32 nt, Human
ugugguguugggguuuggguaggggaggggag

SEQ ID NO: 264509 - RNA, 32 nt, Human
ugugguuaaaguuuuggcaguuuauugauuag

SEQ ID NO: 264510 - RNA, 32 nt, Human
ugugguuaucuugggucauuuggauguuuugu

SEQ ID NO: 264511 - RNA, 28 nt, Human
ugugguucaagugcuuccuuccccauca

SEQ ID NO: 264512 - RNA, 32 nt, Human
ugugguucaucaggugaggaauucuuuaauaa

SEQ ID NO: 264513 - RNA, 32 nt, Human
ugugguucauucuuuucaaaucuauuuuuguu

SEQ ID NO: 264514 - RNA, 24 nt, Human
ugugguuccuggggugcccuccac

SEQ ID NO: 264515 - RNA, 20 nt, Human
ugugguucugcgggugcagg

SEQ ID NO: 264516 - RNA, 32 nt, Human
ugugguugcacacgccuguaaucccagcuacu

SEQ ID NO: 264517 - RNA, 32 nt, Human
ugugguugcccacuuucugcuggucuccgaga

SEQ ID NO: 264518 - RNA, 32 nt, Human
ugugguugcugagggaugagggggaggagaga

SEQ ID NO: 264519 - RNA, 32 nt, Human
ugugguugcuucucuuccuccugcugccgcug

SEQ ID NO: 264520 - RNA, 32 nt, Human
ugugguuggaggaaagaugagugaagggauca

SEQ ID NO: 264521 - RNA, 32 nt, Human
ugugguuggcccaaaaggcaaaaguuugcagc

SEQ ID NO: 264522 - RNA, 32 nt, Human
ugugguuggcucugccuuugcugucuuuaccu

SEQ ID NO: 264523 - RNA, 32 nt, Human
ugugguugucuccguuuauagcacagacuuga

SEQ ID NO: 264524 - RNA, 32 nt, Human
ugugguuuccaaggagcugagaauagaaggaa

SEQ ID NO: 264525 - RNA, 32 nt, Human
ugugguuucuaugcccgcaaguuucaggaagu

SEQ ID NO: 264526 - RNA, 32 nt, Human
ugugguuucugggagcugguucuuaauuuggc

SEQ ID NO: 264527 - RNA, 32 nt, Human
ugugguuugccucauugugcuauuugcccacu

SEQ ID NO: 264528 - RNA, 32 nt, Human
ugugguuuuugucuggagauguuuucauuuuu

SEQ ID NO: 264529 - RNA, 32 nt, Human
uguguaaaacucugcugcuuuccccagcucca

SEQ ID NO: 264530 - RNA, 32 nt, Human
uguguaaaauagauugcuugauccaaaacaga

SEQ ID NO: 264531 - RNA, 32 nt, Human
uguguaaacauuuguuuuaacugugaaaggua

SEQ ID NO: 264532 - RNA, 32 nt, Human
uguguaaagaaagaaaaagggaaguaccaaug

SEQ ID NO: 264533 - RNA, 32 nt, Human
uguguaaagguuucauguucacugugagugaa

SEQ ID NO: 264534 - RNA, 32 nt, Human
uguguaaauacuguauauugcaaaaaucagua

SEQ ID NO: 264535 - RNA, 32 nt, Human
uguguaaaucagaugccagcuguacugccggc

SEQ ID NO: 264536 - RNA, 20 nt, Human
uguguaaaucuaacuacaag

SEQ ID NO: 264537 - RNA, 32 nt, Human
uguguaacaaaccugcacauucagcacaugua

SEQ ID NO: 264538 - RNA, 32 nt, Human
uguguaacaaaccugcauguucugcacaugga

SEQ ID NO: 264539 - RNA, 32 nt, Human
uguguaacacagauucuccucugcgcuaugug

SEQ ID NO: 264540 - RNA, 32 nt, Human
uguguaagacaguaacuuuacacuucagacag

SEQ ID NO: 264541 - RNA, 32 nt, Human
uguguaagagccaacacaugcccagcugcgga

SEQ ID NO: 264542 - RNA, 31 nt, Human
uguguaagcucaagaaccuguugagaggagc

SEQ ID NO: 264543 - RNA, 32 nt, Human
uguguaagcuguguccuaguucuugaacaguu

SEQ ID NO: 264544 - RNA, 32 nt, Human
uguguaaggaaagaaggagggagccggagaag

SEQ ID NO: 264545 - RNA, 32 nt, Human
uguguaaggguaggcuuuguugaaaaagaaag

SEQ ID NO: 264546 - RNA, 32 nt, Human
uguguaagugugauucauuugaaaagaccuug

SEQ ID NO: 264547 - RNA, 32 nt, Human
uguguaauauccacaaucauagacaaccaaag

SEQ ID NO: 264548 - RNA, 32 nt, Human
uguguaaucccagcuacuugggaggcugaggc

SEQ ID NO: 264549 - RNA, 32 nt, Human
uguguaaucucaaauaucugaauauugaaaaa

SEQ ID NO: 264550 - RNA, 19 nt, Human
uguguacacauauguacau

SEQ ID NO: 264551 - RNA, 32 nt, Human
uguguacacaugcuugcacacaugcacacaca

SEQ ID NO: 264552 - RNA, 32 nt, Human
uguguacacucucuaagacauucuccaaauug

SEQ ID NO: 264553 - RNA, 32 nt, Human
uguguacaggaaaauuggaagcacacagugga

SEQ ID NO: 264554 - RNA, 32 nt, Human
uguguacaguuuccuuuugcuucaucuccugc

SEQ ID NO: 264555 - RNA, 24 nt, Human
uguguacauauacuguauauaaua

SEQ ID NO: 264556 - RNA, 23 nt, Human
uguguacauauauauucuacaua

SEQ ID NO: 264557 - RNA, 25 nt, Human
uguguacauaucuauauuguauaua

SEQ ID NO: 264558 - RNA, 32 nt, Human
uguguacauauguauagucauguauuccugca

SEQ ID NO: 264559 - RNA, 32 nt, Human
uguguacauauguauauaauauguauauacaa

SEQ ID NO: 264560 - RNA, 32 nt, Human
uguguacauauguauguuuauguauguguguu

SEQ ID NO: 264561 - RNA, 26 nt, Human
uguguacauauguguauauguauaua

SEQ ID NO: 264562 - RNA, 32 nt, Human
uguguacauguaucuuuuucucgauucaaauc

SEQ ID NO: 264563 - RNA, 32 nt, Human
uguguacaugucugcauguguauauguucgug

SEQ ID NO: 264564 - RNA, 32 nt, Human
uguguacaugugcauguguagauaugugugua

SEQ ID NO: 264565 - RNA, 32 nt, Human
uguguaccaagugcuguccuugacaagaagac

SEQ ID NO: 264566 - RNA, 32 nt, Human
uguguaccacacccugccugcuguggagccca

SEQ ID NO: 264567 - RNA, 20 nt, Human
uguguaccaggaacuauaaa

SEQ ID NO: 264568 - RNA, 32 nt, Human
uguguaccaguuuaaagcuuucacuucauuug

SEQ ID NO: 264569 - RNA, 32 nt, Human
uguguaccauugagaugagaauggguagaugg

SEQ ID NO: 264570 - RNA, 32 nt, Human
uguguacccauacugcagccccaucccauggg

SEQ ID NO: 264571 - RNA, 32 nt, Human
uguguaccccuaaauccucccaccccagcacu

SEQ ID NO: 264572 - RNA, 32 nt, Human
uguguaccccuccacccgcugcgggcugaggg

SEQ ID NO: 264573 - RNA, 32 nt, Human
uguguacccugccucucucugucauagcuaac

SEQ ID NO: 264574 - RNA, 32 nt, Human
uguguaccuauguaacaaaccugcacauucug

SEQ ID NO: 264575 - RNA, 32 nt, Human
uguguaccucauucuucccuuaucacugaagg

SEQ ID NO: 264576 - RNA, 32 nt, Human
uguguaccucauucuuccuggauauggacaag

SEQ ID NO: 264577 - RNA, 32 nt, Human
uguguaccucuugccuuuucugggcuugcguu

SEQ ID NO: 264578 - RNA, 32 nt, Human
uguguaccuggaaugggguggucuuugaccuu

SEQ ID NO: 264579 - RNA, 32 nt, Human
uguguaccuuuucugucauauucagaaaccgu

SEQ ID NO: 264580 - RNA, 32 nt, Human
uguguacgcacauacacacaugcacgcacgca

SEQ ID NO: 264581 - RNA, 32 nt, Human
uguguacgcagggggccggggccccgcgaagc

SEQ ID NO: 264582 - RNA, 32 nt, Human
uguguacggagggucuagccugggugaguacg

SEQ ID NO: 264583 - RNA, 32 nt, Human
uguguacggugcacacacacagugcaucauuu

SEQ ID NO: 264584 - RNA, 32 nt, Human
uguguacucuggagauagauggagaaguguuu

SEQ ID NO: 264585 - RNA, 32 nt, Human
uguguacugaguauugauaaacuuugaauuuu

SEQ ID NO: 264586 - RNA, 32 nt, Human
uguguacuuccaccaugcuccagcucagugau

SEQ ID NO: 264587 - RNA, 32 nt, Human
uguguacuucccuugugucugucuuucuccua

SEQ ID NO: 264588 - RNA, 32 nt, Human
uguguacuugacugcccuagacaguggugacu

SEQ ID NO: 264589 - RNA, 32 nt, Human
uguguacuugauagagcuaaaauaugaucuuu

SEQ ID NO: 264590 - RNA, 32 nt, Human
uguguacuuggcugguacuuaaauucguuuug

SEQ ID NO: 264591 - RNA, 32 nt, Human
uguguacuuguagaacugcuauuagaaggagg

SEQ ID NO: 264592 - RNA, 32 nt, Human
uguguagaaagagguagacgugggagacuuuu

SEQ ID NO: 264593 - RNA, 32 nt, Human
uguguagaauacuuugacuuaauuuucuucca

SEQ ID NO: 264594 - RNA, 32 nt, Human
uguguagacacaaacauauacacagaugugua

SEQ ID NO: 264595 - RNA, 32 nt, Human
uguguagagauggcugagugcaauggcucaca

SEQ ID NO: 264596 - RNA, 32 nt, Human
uguguagagguuguucaacugaaggaauaaau

SEQ ID NO: 264597 - RNA, 32 nt, Human
uguguagauauguguguauauguaucaggaaa

SEQ ID NO: 264598 - RNA, 21 nt, Human
uguguagccaaaaauuacaaa

SEQ ID NO: 264599 - RNA, 32 nt, Human
uguguagcccuggcauagacuugcucgucagg

SEQ ID NO: 264600 - RNA, 32 nt, Human
uguguagcgguuugaauguugguuccaugccu

SEQ ID NO: 264601 - RNA, 32 nt, Human
uguguagcuacacuccaugauuccaagagccc

SEQ ID NO: 264602 - RNA, 32 nt, Human
uguguagcuuauugaugccucuccucuucuug

SEQ ID NO: 264603 - RNA, 32 nt, Human
uguguagcuucucauuuucaucagcacagcau

SEQ ID NO: 264604 - RNA, 32 nt, Human
uguguaggaggaaaugccagacuugcugaguc

SEQ ID NO: 264605 - RNA, 32 nt, Human
uguguaggguuggggagagugcagugauggga

SEQ ID NO: 264606 - RNA, 31 nt, Human
uguguaggugagagaaagagggaggagugag

SEQ ID NO: 264607 - RNA, 32 nt, Human
uguguaguaaagcauuaggagggucauucuug

SEQ ID NO: 264608 - RNA, 32 nt, Human
uguguagugcaaccaucugauaaacuagugug

SEQ ID NO: 264609 - RNA, 32 nt, Human
uguguaguuagacaauguccuguugggugguc

SEQ ID NO: 264610 - RNA, 32 nt, Human
uguguaguuuagauaggucacagaguugcugg

SEQ ID NO: 264611 - RNA, 24 nt, Human
uguguauaaauauauauguauaua

SEQ ID NO: 264612 - RNA, 32 nt, Human
uguguauaaaugcuuaaaguaccaucuuuguu

SEQ ID NO: 264613 - RNA, 32 nt, Human
uguguauaacaauaugguuuacauuuugcuca

SEQ ID NO: 264614 - RNA, 32 nt, Human
uguguauaaguugggggaauuaaguuucaaga

SEQ ID NO: 264615 - RNA, 22 nt, Human
uguguauacauacauccauaua

SEQ ID NO: 264616 - RNA, 32 nt, Human
uguguauagugccaccacaagcuuauggcauc

SEQ ID NO: 264617 - RNA, 32 nt, Human
uguguauagugccaccacagcuuauggcaucu

SEQ ID NO: 264618 - RNA, 32 nt, Human
uguguauaguuauugguuaaaaugacuguuuu

SEQ ID NO: 264619 - RNA, 32 nt, Human
uguguauauaaaugccuuuuccauaucuuaaa

SEQ ID NO: 264620 - RNA, 25 nt, Human
uguguauauacacuauauguauaua

SEQ ID NO: 264621 - RNA, 27 nt, Human
uguguauauacaguauauacauauaua

SEQ ID NO: 264622 - RNA, 23 nt, Human
uguguauauauaaauacauauau

SEQ ID NO: 264623 - RNA, 23 nt, Human
uguguauauauaauauguaugua

SEQ ID NO: 264624 - RNA, 19 nt, Human
uguguauauauaauuugua

SEQ ID NO: 264625 - RNA, 24 nt, Human
uguguauauauacacauaugugug

SEQ ID NO: 264626 - RNA, 26 nt, Human
uguguauauauacagacacauaugua

SEQ ID NO: 264627 - RNA, 21 nt, Human
uguguauauauacauuuuaua

SEQ ID NO: 264628 - RNA, 22 nt, Human
uguguauauauacguguauaua

SEQ ID NO: 264629 - RNA, 22 nt, Human
uguguauauauagauguauaua

SEQ ID NO: 264630 - RNA, 24 nt, Human
uguguauauauauaaauauaugua

SEQ ID NO: 264631 - RNA, 25 nt, Human
uguguauauauauaauauauaugua

SEQ ID NO: 264632 - RNA, 22 nt, Human
uguguauauauauacacacaua

SEQ ID NO: 264633 - RNA, 26 nt, Human
uguguauauauauaccaucccauaua

SEQ ID NO: 264634 - RNA, 24 nt, Human
uguguauauauaugcaaauauaug

SEQ ID NO: 264635 - RNA, 26 nt, Human
uguguauauauauguauguguauaua

SEQ ID NO: 264636 - RNA, 22 nt, Human
uguguauauauauguguauaua

SEQ ID NO: 264637 - RNA, 24 nt, Human
uguguauauauggauaaauauaua

SEQ ID NO: 264638 - RNA, 23 nt, Human
uguguauauauguaauauauaua

SEQ ID NO: 264639 - RNA, 22 nt, Human
uguguauauauguauacauaua

SEQ ID NO: 264640 - RNA, 23 nt, Human
uguguauauauguauauuacaua

SEQ ID NO: 264641 - RNA, 24 nt, Human
uguguauauauguauguguauaua

SEQ ID NO: 264642 - RNA, 22 nt, Human
uguguauauauguguauauaua

SEQ ID NO: 264643 - RNA, 26 nt, Human
uguguauauauguuugcaucuacaua

SEQ ID NO: 264644 - RNA, 26 nt, Human
uguguauauauguuugcauuuacaua

SEQ ID NO: 264645 - RNA, 23 nt, Human
uguguauauauuauacauauaua

SEQ ID NO: 264646 - RNA, 20 nt, Human
uguguauauguauacacaua

SEQ ID NO: 264647 - RNA, 22 nt, Human
uguguauauguauacacauaua

SEQ ID NO: 264648 - RNA, 22 nt, Human
uguguauauguauauguauaua

SEQ ID NO: 264649 - RNA, 32 nt, Human
uguguauauguauguauguguguuucuguaua

SEQ ID NO: 264650 - RNA, 32 nt, Human
uguguauauguguauauaaauauaugugugug

SEQ ID NO: 264651 - RNA, 32 nt, Human
uguguauauuagacauugccacccucaccucu

SEQ ID NO: 264652 - RNA, 32 nt, Human
uguguauauugacaucuuuaucuuccaucagg

SEQ ID NO: 264653 - RNA, 32 nt, Human
uguguaucaacauuauuuaaugucuucuaauu

SEQ ID NO: 264654 - RNA, 32 nt, Human
uguguaucaugcuaagcugcaucucuacucuu

SEQ ID NO: 264655 - RNA, 32 nt, Human
uguguauccacauucuuaccuuugguagucag

SEQ ID NO: 264656 - RNA, 32 nt, Human
uguguauccucagaccaaacugauucauguac

SEQ ID NO: 264657 - RNA, 32 nt, Human
uguguaucugugcacacauacacacgucugug

SEQ ID NO: 264658 - RNA, 32 nt, Human
uguguaugcagauaagcuuucucuucagacuu

SEQ ID NO: 264659 - RNA, 32 nt, Human
uguguaugcauacaucccacuuuuugacccag

SEQ ID NO: 264660 - RNA, 32 nt, Human
uguguaugcccuagagcccuugcucacguuuc

SEQ ID NO: 264661 - RNA, 18 nt, Human
uguguaugcuacuacaaa

SEQ ID NO: 264662 - RNA, 20 nt, Human
uguguaugcugaacuacaga

SEQ ID NO: 264663 - RNA, 32 nt, Human
uguguauggaggaucuagccugggugaguaug

SEQ ID NO: 264664 - RNA, 32 nt, Human
uguguauggagggucuagccugggugaguaug

SEQ ID NO: 264665 - RNA, 32 nt, Human
uguguauguaguguaacuauuuuguacaauag

SEQ ID NO: 264666 - RNA, 32 nt, Human
uguguauguauaugugugugggugcacacauc

SEQ ID NO: 264667 - RNA, 32 nt, Human
uguguauguaugcguauguauguauguaugua

SEQ ID NO: 264668 - RNA, 30 nt, Human
uguguaugucacuuauccuccuuuguccac

SEQ ID NO: 264669 - RNA, 24 nt, Human
uguguauguccauauguacacaua

SEQ ID NO: 264670 - RNA, 32 nt, Human
uguguaugugagugccgaucugugccagaagg

SEQ ID NO: 264671 - RNA, 32 nt, Human
uguguaugugcaaaugucaaauaaucuuuugc

SEQ ID NO: 264672 - RNA, 29 nt, Human
uguguaugugcgugugugcgagugugugc

SEQ ID NO: 264673 - RNA, 32 nt, Human
uguguauguggucugugacaagccuguggcuc

SEQ ID NO: 264674 - RNA, 32 nt, Human
uguguauguguauguguauguguuucauuuac

SEQ ID NO: 264675 - RNA, 32 nt, Human
uguguauguguauuuauauguauguauguaug

SEQ ID NO: 264676 - RNA, 18 nt, Human
uguguauguguguacaca

SEQ ID NO: 264677 - RNA, 24 nt, Human
uguguauguguguacauauauaua

SEQ ID NO: 264678 - RNA, 32 nt, Human
uguguaugugugugugcacgcgcgugcgcgcu

SEQ ID NO: 264679 - RNA, 18 nt, Human
uguguauuaaacuacgaa

SEQ ID NO: 264680 - RNA, 32 nt, Human
uguguauuaguccauuuucacacugcugagaa

SEQ ID NO: 264681 - RNA, 32 nt, Human
uguguauuagugagaggugaagccagcuggac

SEQ ID NO: 264682 - RNA, 32 nt, Human
uguguauuauuugguuucuuuuacuuaccugc

SEQ ID NO: 264683 - RNA, 24 nt, Human
uguguauucacauacauauauaua

SEQ ID NO: 264684 - RNA, 20 nt, Human
uguguauucauuuuauacaa

SEQ ID NO: 264685 - RNA, 20 nt, Human
uguguauuccacggcacaag

SEQ ID NO: 264686 - RNA, 32 nt, Human
uguguauucuacccuguugcaaaggaaauaaa

SEQ ID NO: 264687 - RNA, 32 nt, Human
uguguauucucccaggcacucccuucauaguc

SEQ ID NO: 264688 - RNA, 32 nt, Human
uguguauugagcaucuguaaugugccagcauu

SEQ ID NO: 264689 - RNA, 20 nt, Human
uguguauuggauaauacaaa

SEQ ID NO: 264690 - RNA, 32 nt, Human
uguguauuuaaugcauuauagcaugguggaaa

SEQ ID NO: 264691 - RNA, 32 nt, Human
uguguauuuauauguauguauguaugugugug

SEQ ID NO: 264692 - RNA, 32 nt, Human
uguguauuugcaccacggcaggugccucugug

SEQ ID NO: 264693 - RNA, 32 nt, Human
uguguauuugugaauaacaaacugcacaaccu

SEQ ID NO: 264694 - RNA, 18 nt, Human
uguguauuuugggaccuu

SEQ ID NO: 264695 - RNA, 18 nt, Human
uguguauuuuuacucaaa

SEQ ID NO: 264696 - RNA, 19 nt, Human
uguguauuuuuucuacaga

SEQ ID NO: 264697 - RNA, 19 nt, Human
ugugucaaaaguccccuca

SEQ ID NO: 264698 - RNA, 19 nt, Human
ugugucaaagagaugagga

SEQ ID NO: 264699 - RNA, 32 nt, Human
ugugucaacuucaacauuuacauguauuauuu

SEQ ID NO: 264700 - RNA, 32 nt, Human
ugugucaagaagcaucguccggggaggugaga

SEQ ID NO: 264701 - RNA, 32 nt, Human
ugugucaaucacuccauuuugcucagggaagg

SEQ ID NO: 264702 - RNA, 32 nt, Human
ugugucaaugccacaaaaucguguguccgugg

SEQ ID NO: 264703 - RNA, 32 nt, Human
ugugucacaguagcuuccuuugggaggaugau

SEQ ID NO: 264704 - RNA, 32 nt, Human
ugugucaccacccacaucaauaccuuucaaau

SEQ ID NO: 264705 - RNA, 32 nt, Human
ugugucaccaggauggagugcaguggcaugau

SEQ ID NO: 264706 - RNA, 32 nt, Human
ugugucaccaggcuggagcaguggcacgaucu

SEQ ID NO: 264707 - RNA, 32 nt, Human
ugugucacccacccaccuccuucauuaucagc

SEQ ID NO: 264708 - RNA, 32 nt, Human
ugugucacccaggcuggagugcaguggcacaa

SEQ ID NO: 264709 - RNA, 32 nt, Human
ugugucacccaggcuggagugcaguggcgcaa

SEQ ID NO: 264710 - RNA, 32 nt, Human
ugugucacccaggcuggagugcaguggugcaa

SEQ ID NO: 264711 - RNA, 32 nt, Human
ugugucaccuaggcuggagugcaguggcacaa

SEQ ID NO: 264712 - RNA, 32 nt, Human
ugugucacucacucauacauguccucaggacg

SEQ ID NO: 264713 - RNA, 32 nt, Human
ugugucacugcacuccagccugggcaacaggu

SEQ ID NO: 264714 - RNA, 32 nt, Human
ugugucacugcacuccagcuugggugacagag

SEQ ID NO: 264715 - RNA, 32 nt, Human
ugugucacugcauccauugccaccuccuguuc

SEQ ID NO: 264716 - RNA, 21 nt, Human
ugugucacuggcugccuccac

SEQ ID NO: 264717 - RNA, 32 nt, Human
ugugucagagcccagcccaggaguuugaggcu

SEQ ID NO: 264718 - RNA, 32 nt, Human
ugugucagccucccuccucucccugcagccca

SEQ ID NO: 264719 - RNA, 32 nt, Human
ugugucaggaaagcaugucagagcagagcugc

SEQ ID NO: 264720 - RNA, 32 nt, Human
ugugucaggggugggaccagguggaggacuga

SEQ ID NO: 264721 - RNA, 32 nt, Human
ugugucagucuccugaguagcugggauuacag

SEQ ID NO: 264722 - RNA, 32 nt, Human
ugugucagugccugagauacaccuacaagagc

SEQ ID NO: 264723 - RNA, 32 nt, Human
ugugucauccagagcuggagugcagcggcaca

SEQ ID NO: 264724 - RNA, 32 nt, Human
ugugucaucucugccuugagacugccuugaga

SEQ ID NO: 264725 - RNA, 32 nt, Human
ugugucaucuuccucuuucacacucuugauga

SEQ ID NO: 264726 - RNA, 32 nt, Human
ugugucaucuuugaaucccagauuuuugugag

SEQ ID NO: 264727 - RNA, 31 nt, Human
ugugucaugacuucucaagagaagacagaag

SEQ ID NO: 264728 - RNA, 32 nt, Human
ugugucaugcaggcuggagugcaguggcauga

SEQ ID NO: 264729 - RNA, 32 nt, Human
ugugucaugccugcaaucccagcacuuuggga

SEQ ID NO: 264730 - RNA, 32 nt, Human
ugugucauugcacuccagccugggcaacaaga

SEQ ID NO: 264731 - RNA, 32 nt, Human
ugugucauugcacuccagccugggcgacaaga

SEQ ID NO: 264732 - RNA, 32 nt, Human
ugugucauugcacuccagccuggggaacagag

SEQ ID NO: 264733 - RNA, 32 nt, Human
ugugucauuuugcuucagguauuucuuguccu

SEQ ID NO: 264734 - RNA, 32 nt, Human
uguguccaccuugccuucuuugcagccaagca

SEQ ID NO: 264735 - RNA, 32 nt, Human
uguguccaccuuucucuccucuucccaagccu

SEQ ID NO: 264736 - RNA, 32 nt, Human
uguguccacuaaaaauacaaaauuagccgggu

SEQ ID NO: 264737 - RNA, 32 nt, Human
uguguccagagacauccugaagaggcucgggg

SEQ ID NO: 264738 - RNA, 32 nt, Human
uguguccagaggugugugugaggcugccagaa

SEQ ID NO: 264739 - RNA, 32 nt, Human
uguguccagccgggggaaggaggucaccaagc

SEQ ID NO: 264740 - RNA, 32 nt, Human
uguguccaggcaugcggagcugugagugccug

SEQ ID NO: 264741 - RNA, 32 nt, Human
uguguccagggcagcacaggaggcaggugccc

SEQ ID NO: 264742 - RNA, 32 nt, Human
uguguccagugcuucauggaugggaccauccc

SEQ ID NO: 264743 - RNA, 32 nt, Human
uguguccaucaucaacggcuucacaucggugu

SEQ ID NO: 264744 - RNA, 32 nt, Human
uguguccauggcggcgcuugaccugcgagcgg

SEQ ID NO: 264745 - RNA, 32 nt, Human
uguguccauuaaagugguuuguuguuguuuuu

SEQ ID NO: 264746 - RNA, 32 nt, Human
ugugucccaaggcgcaugcacacacagacgga

SEQ ID NO: 264747 - RNA, 32 nt, Human
ugugucccagcccucugaugguggugagacca

SEQ ID NO: 264748 - RNA, 32 nt, Human
ugugucccaguaggaggucaagaagaucucca

SEQ ID NO: 264749 - RNA, 32 nt, Human
ugugucccaucaugcuuuccacugacccaaaa

SEQ ID NO: 264750 - RNA, 32 nt, Human
uguguccccagaaaaauuugcacacaauguuc

SEQ ID NO: 264751 - RNA, 32 nt, Human
ugugucccccaggcuggagugcaguggcacaa

SEQ ID NO: 264752 - RNA, 32 nt, Human
uguguccccuccgccccugccucccuccugcc

SEQ ID NO: 264753 - RNA, 32 nt, Human
uguguccccuccucccccuccacagccccuga

SEQ ID NO: 264754 - RNA, 32 nt, Human
uguguccccugcagcuccagccccgggcugca

SEQ ID NO: 264755 - RNA, 32 nt, Human
uguguccccugccugcacuggcacuuugucca

SEQ ID NO: 264756 - RNA, 32 nt, Human
ugugucccuuuagucccuuagccauuaucuga

SEQ ID NO: 264757 - RNA, 32 nt, Human
ugugucccuuucucccugucucugccugucuu

SEQ ID NO: 264758 - RNA, 32 nt, Human
ugugucccuuucuccuuccugaccuuccucag

SEQ ID NO: 264759 - RNA, 32 nt, Human
ugugucccuuucucucuccuuagugccuagcu

SEQ ID NO: 264760 - RNA, 32 nt, Human
uguguccgaguggggauggcucugggggccgc

SEQ ID NO: 264761 - RNA, 29 nt, Human
uguguccgucuguguaugugugugucugu

SEQ ID NO: 264762 - RNA, 32 nt, Human
uguguccguggaaggcaccaccagggacugga

SEQ ID NO: 264763 - RNA, 32 nt, Human
uguguccucaaagggccacgaggccugaaagg

SEQ ID NO: 264764 - RNA, 32 nt, Human
uguguccucauagcuuagcucccacuuauaac

SEQ ID NO: 264765 - RNA, 32 nt, Human
uguguccuccacucaggcuggggcucccugag

SEQ ID NO: 264766 - RNA, 32 nt, Human
uguguccuccagggccucugguuuguuguauu

SEQ ID NO: 264767 - RNA, 32 nt, Human
uguguccucccucccucccuuccuugggcaga

SEQ ID NO: 264768 - RNA, 32 nt, Human
uguguccucuacuuccaugaggccuucgagag

SEQ ID NO: 264769 - RNA, 32 nt, Human
uguguccucuacuuuucugaucucccacaagu

SEQ ID NO: 264770 - RNA, 32 nt, Human
uguguccugaguuuccagugcaagucaucugg

SEQ ID NO: 264771 - RNA, 32 nt, Human
uguguccugccucuugccucuuguagaaugca

SEQ ID NO: 264772 - RNA, 32 nt, Human
uguguccugcugugugcagcucgcucuuuccu

SEQ ID NO: 264773 - RNA, 32 nt, Human
uguguccugcuucucacucucuuccauuccca

SEQ ID NO: 264774 - RNA, 32 nt, Human
uguguccuggacagccaggagggaggccccgc

SEQ ID NO: 264775 - RNA, 32 nt, Human
uguguccuggcugaggaaugcacucacagcac

SEQ ID NO: 264776 - RNA, 32 nt, Human
uguguccuggcuggcugggaugcugguggcuc

SEQ ID NO: 264777 - RNA, 32 nt, Human
uguguccugggcuguguguccagcacaugugu

SEQ ID NO: 264778 - RNA, 32 nt, Human
uguguccuucaucacugucacccuccagugac

SEQ ID NO: 264779 - RNA, 32 nt, Human
uguguccuugcacuccuaucuggagauaucac

SEQ ID NO: 264780 - RNA, 32 nt, Human
uguguccuuugagcaagaggaggaacuccugg

SEQ ID NO: 264781 - RNA, 32 nt, Human
ugugucgccaaggcuggagugcaguggugcga

SEQ ID NO: 264782 - RNA, 32 nt, Human
ugugucgcccaggcuggagugcagugagcuga

SEQ ID NO: 264783 - RNA, 32 nt, Human
ugugucgcccaggcuggagugcaguggcguga

SEQ ID NO: 264784 - RNA, 32 nt, Human
ugugucgccuaggcuggagugcaguggcguga

SEQ ID NO: 264785 - RNA, 32 nt, Human
ugugucggcccaacggggucucaggaccuguc

SEQ ID NO: 264786 - RNA, 32 nt, Human
ugugucgggcaucagauggagcacacaggugg

SEQ ID NO: 264787 - RNA, 32 nt, Human
ugugucgguaguggugcccacccuggaugugg

SEQ ID NO: 264788 - RNA, 32 nt, Human
ugugucgucccagcuacuugugaggcugaagc

SEQ ID NO: 264789 - RNA, 32 nt, Human
ugugucguucccuugugucuguugcuuauugg

SEQ ID NO: 264790 - RNA, 32 nt, Human
ugugucuaaaggccugcuccaugacacaggau

SEQ ID NO: 264791 - RNA, 32 nt, Human
ugugucuaauaaaaauacaaaaauuagccggg

SEQ ID NO: 264792 - RNA, 32 nt, Human
ugugucuacaccucucugggccuuggugucgu

SEQ ID NO: 264793 - RNA, 32 nt, Human
ugugucuacuaaaaauacaaaacuagccagga

SEQ ID NO: 264794 - RNA, 32 nt, Human
ugugucuagaggaagccagagacagaaauagg

SEQ ID NO: 264795 - RNA, 32 nt, Human
ugugucuaggugaugucagugggagccaugaa

SEQ ID NO: 264796 - RNA, 32 nt, Human
ugugucuauguguguguuucagcacuuuguaa

SEQ ID NO: 264797 - RNA, 32 nt, Human
ugugucucacccacuacugagauuguucagcc

SEQ ID NO: 264798 - RNA, 32 nt, Human
ugugucucagcucucuggaagguggcccugcc

SEQ ID NO: 264799 - RNA, 18 nt, Human
ugugucucaggcaccuca

SEQ ID NO: 264800 - RNA, 23 nt, Human
ugugucucaggcuggaguacagu

SEQ ID NO: 264801 - RNA, 32 nt, Human
ugugucucagggucuucaguuuuucuauaagu

SEQ ID NO: 264802 - RNA, 32 nt, Human
ugugucucaguuuacagauguuaaggaacuua

SEQ ID NO: 264803 - RNA, 32 nt, Human
ugugucucauuacugcugaaauguccucacau

SEQ ID NO: 264804 - RNA, 32 nt, Human
ugugucucccucuuggacugagcacacaucug

SEQ ID NO: 264805 - RNA, 18 nt, Human
ugugucuccucagaguau

SEQ ID NO: 264806 - RNA, 17 nt, Human
ugugucuccucccagca

SEQ ID NO: 264807 - RNA, 19 nt, Human
ugugucuccugcccgacgc

SEQ ID NO: 264808 - RNA, 32 nt, Human
ugugucuccugccuccacucagcugcuucuca

SEQ ID NO: 264809 - RNA, 18 nt, Human
ugugucuccuggguggca

SEQ ID NO: 264810 - RNA, 18 nt, Human
ugugucuccugucggcag

SEQ ID NO: 264811 - RNA, 31 nt, Human
ugugucucgaguggcuaccuguugggcuugu

SEQ ID NO: 264812 - RNA, 32 nt, Human
ugugucucucacagcuugaaagccugagacag

SEQ ID NO: 264813 - RNA, 32 nt, Human
ugugucucugucaucacuaggaaucacagaua

SEQ ID NO: 264814 - RNA, 32 nt, Human
ugugucucuucucuuuguugcugagaagguag

SEQ ID NO: 264815 - RNA, 32 nt, Human
ugugucucuuucugucagaacugucuucuauu

SEQ ID NO: 264816 - RNA, 32 nt, Human
ugugucucuuugucccugccucccagagcgcc

SEQ ID NO: 264817 - RNA, 32 nt, Human
ugugucucuuuuucuccucucugagccuuugu

SEQ ID NO: 264818 - RNA, 32 nt, Human
ugugucugagaagccgggagccuggacacaaa

SEQ ID NO: 264819 - RNA, 32 nt, Human
ugugucugagcaccuccagcagaugucacucu

SEQ ID NO: 264820 - RNA, 32 nt, Human
ugugucugagcauucugcucccauggacaucc

SEQ ID NO: 264821 - RNA, 32 nt, Human
ugugucugaguacaugugcacacacgugugca

SEQ ID NO: 264822 - RNA, 32 nt, Human
ugugucugcaguuccaaccucuucccugagca

SEQ ID NO: 264823 - RNA, 32 nt, Human
ugugucugcauauugcagaacagcucugagag

SEQ ID NO: 264824 - RNA, 32 nt, Human
ugugucugcccaggcuggcugagcggguggau

SEQ ID NO: 264825 - RNA, 32 nt, Human
ugugucugcccccucuggcauccucugggcgu

SEQ ID NO: 264826 - RNA, 32 nt, Human
ugugucugccuucuuucaugcaucaacguaau

SEQ ID NO: 264827 - RNA, 31 nt, Human
ugugucugcgggagaaggaccaaagcaaucu

SEQ ID NO: 264828 - RNA, 32 nt, Human
ugugucugcuacugcugggacucaggcccucg

SEQ ID NO: 264829 - RNA, 32 nt, Human
ugugucugcuguucuccucuauguguucuugu

SEQ ID NO: 264830 - RNA, 32 nt, Human
ugugucuggaugaagcuggggcugcaagacug

SEQ ID NO: 264831 - RNA, 32 nt, Human
ugugucuggcagcagggagugguguggguacu

SEQ ID NO: 264832 - RNA, 32 nt, Human
ugugucugggauccagggcaaugugaauuuuc

SEQ ID NO: 264833 - RNA, 32 nt, Human
ugugucugggggacugcuggucacuguuucuc

SEQ ID NO: 264834 - RNA, 32 nt, Human
ugugucuguaaucccagcuacucgggaggcug

SEQ ID NO: 264835 - RNA, 32 nt, Human
ugugucuguaguucauuugcaaauaaacauuu

SEQ ID NO: 264836 - RNA, 22 nt, Human
ugugucugucauuucucuuuca

SEQ ID NO: 264837 - RNA, 32 nt, Human
ugugucugucccacccugauccuuuucaauau

SEQ ID NO: 264838 - RNA, 31 nt, Human
ugugucugugagagagccagagagagugaga

SEQ ID NO: 264839 - RNA, 32 nt, Human
ugugucugugaggguguugccaaagaagauua

SEQ ID NO: 264840 - RNA, 32 nt, Human
ugugucugugaucuccucugucuuaauccacg

SEQ ID NO: 264841 - RNA, 32 nt, Human
ugugucugugugaccugagagugauccaucuc

SEQ ID NO: 264842 - RNA, 32 nt, Human
ugugucuguguguguacacacgucccuuugaa

SEQ ID NO: 264843 - RNA, 32 nt, Human
ugugucuguguguguauucauuuuauacaaau

SEQ ID NO: 264844 - RNA, 32 nt, Human
ugugucugugugugugcacgcgcgugcacguc

SEQ ID NO: 264845 - RNA, 32 nt, Human
ugugucugugugugugcaugugcacacaugug

SEQ ID NO: 264846 - RNA, 32 nt, Human
ugugucugugugugugccuggagcugcgcuug

SEQ ID NO: 264847 - RNA, 32 nt, Human
ugugucuguuaccaagcaaagccaguuaaaga

SEQ ID NO: 264848 - RNA, 32 nt, Human
ugugucuguucccaggaguccuucggcggcug

SEQ ID NO: 264849 - RNA, 32 nt, Human
ugugucuuacagagaagagaagagggagucag

SEQ ID NO: 264850 - RNA, 20 nt, Human
ugugucuucacauuuuucua

SEQ ID NO: 264851 - RNA, 32 nt, Human
ugugucuucagauagcccuguccuggugguau

SEQ ID NO: 264852 - RNA, 22 nt, Human
ugugucuucagcuuucuuuugc

SEQ ID NO: 264853 - RNA, 22 nt, Human
ugugucuucaguagacaaguca

SEQ ID NO: 264854 - RNA, 32 nt, Human
ugugucuuccagccccagcugcagccugcucu

SEQ ID NO: 264855 - RNA, 32 nt, Human
ugugucuucuguugcuguagaggacacaaguc

SEQ ID NO: 264856 - RNA, 32 nt, Human
ugugucuugcuucaugauuccucucuccauua

SEQ ID NO: 264857 - RNA, 32 nt, Human
ugugucuuggguucucaccuguugauugggga

SEQ ID NO: 264858 - RNA, 32 nt, Human
ugugucuugguugcugcucuggccagggaggc

SEQ ID NO: 264859 - RNA, 32 nt, Human
ugugucuuuagauagcccuguccuggugguau

SEQ ID NO: 264860 - RNA, 32 nt, Human
ugugucuuuagauggcccuguccuggugguau

SEQ ID NO: 264861 - RNA, 32 nt, Human
ugugucuuuauucgcgggaggccacugucagc

SEQ ID NO: 264862 - RNA, 32 nt, Human
ugugucuuuccaguuacaggcgaugcugccgg

SEQ ID NO: 264863 - RNA, 32 nt, Human
ugugucuuugcaccugggcaucagcugcuugg

SEQ ID NO: 264864 - RNA, 32 nt, Human
ugugugaaaccaaaaugaucacugccuacuug

SEQ ID NO: 264865 - RNA, 32 nt, Human
ugugugaaaccugacaccuagauuuauuugga

SEQ ID NO: 264866 - RNA, 32 nt, Human
ugugugaaaugacuaaccugcagaaagagaug

SEQ ID NO: 264867 - RNA, 32 nt, Human
ugugugaaaugagagaccauggggauucauua

SEQ ID NO: 264868 - RNA, 20 nt, Human
ugugugaacaauacuacaaa

SEQ ID NO: 264869 - RNA, 32 nt, Human
ugugugacagucaugugcacacaugggcgggg

SEQ ID NO: 264870 - RNA, 21 nt, Human
ugugugacccacgcuggccug

SEQ ID NO: 264871 - RNA, 32 nt, Human
ugugugacccagagaaauaaagaugccucagu

SEQ ID NO: 264872 - RNA, 32 nt, Human
ugugugaccuuaggcuggagugcaauggcaug

SEQ ID NO: 264873 - RNA, 32 nt, Human
ugugugaccuugggcaaguuacugaaccucuc

SEQ ID NO: 264874 - RNA, 32 nt, Human
ugugugacugagaagcagccuggguguguaaa

SEQ ID NO: 264875 - RNA, 32 nt, Human
ugugugacugcaaccucauaucaggauuccug

SEQ ID NO: 264876 - RNA, 32 nt, Human
ugugugagaaaaacagacucuguccagguaga

SEQ ID NO: 264877 - RNA, 31 nt, Human
ugugugagacuucucccauuguuaacagauu

SEQ ID NO: 264878 - RNA, 32 nt, Human
ugugugagaggaggaggagagggagaauucug

SEQ ID NO: 264879 - RNA, 32 nt, Human
ugugugagccaccacacccagccugggucucu

SEQ ID NO: 264880 - RNA, 32 nt, Human
ugugugagcuaccacaccagcaaugucuaugc

SEQ ID NO: 264881 - RNA, 32 nt, Human
ugugugagcuccugccgguuucuuggcuguca

SEQ ID NO: 264882 - RNA, 32 nt, Human
ugugugaggaaagagcucaccgcugaagaagg

SEQ ID NO: 264883 - RNA, 32 nt, Human
ugugugaggaagcaggagucagccaccaagug

SEQ ID NO: 264884 - RNA, 32 nt, Human
ugugugaggagcugcuggcuugcagugcgcgu

SEQ ID NO: 264885 - RNA, 32 nt, Human
ugugugagguucgcuuaucaacuaaugauuua

SEQ ID NO: 264886 - RNA, 31 nt, Human
ugugugagugagagagcgagugagugaguga

SEQ ID NO: 264887 - RNA, 32 nt, Human
ugugugagugugacggggguugggguggggcg

SEQ ID NO: 264888 - RNA, 32 nt, Human
ugugugaucccagaggaggggcaguagcuggg

SEQ ID NO: 264889 - RNA, 32 nt, Human
ugugugaucucuucagggugggguggucucug

SEQ ID NO: 264890 - RNA, 32 nt, Human
ugugugaugcuguuagacaagacacugacgcu

SEQ ID NO: 264891 - RNA, 32 nt, Human
ugugugauguagcuuucucucccucagccugc

SEQ ID NO: 264892 - RNA, 32 nt, Human
ugugugaugugcagucccgaagccacacccuc

SEQ ID NO: 264893 - RNA, 32 nt, Human
ugugugauuguaucuuuuccauuaugugacug

SEQ ID NO: 264894 - RNA, 32 nt, Human
ugugugauuuugcuaaaaugcaucaccaacag

SEQ ID NO: 264895 - RNA, 32 nt, Human
ugugugcacaugcuuaaugagcgugcaagugu

SEQ ID NO: 264896 - RNA, 32 nt, Human
ugugugcacgcuuggacacccaccuccaugga

SEQ ID NO: 264897 - RNA, 32 nt, Human
ugugugcagaugcagaaugacaagcugcauuc

SEQ ID NO: 264898 - RNA, 32 nt, Human
ugugugcagcauucaguacacugaaggcauaa

SEQ ID NO: 264899 - RNA, 32 nt, Human
ugugugcagccugagugggguggugcaggccg

SEQ ID NO: 264900 - RNA, 32 nt, Human
ugugugcaggugcaucaccuggaucaugaggu

SEQ ID NO: 264901 - RNA, 32 nt, Human
ugugugcaugaaucugucauauagaggggguc

SEQ ID NO: 264902 - RNA, 21 nt, Human
ugugugcaugcgugugcacac

SEQ ID NO: 264903 - RNA, 32 nt, Human
ugugugcaugugucugucuuuugugaggguua

SEQ ID NO: 264904 - RNA, 32 nt, Human
ugugugcaugugugugcacacgugugcaugug

SEQ ID NO: 264905 - RNA, 32 nt, Human
ugugugcauuagaaaucaguugcuugauagua

SEQ ID NO: 264906 - RNA, 22 nt, Human
ugugugcauugugugugcacac

SEQ ID NO: 264907 - RNA, 26 nt, Human
ugugugcauuugcccauugggguaaa

SEQ ID NO: 264908 - RNA, 32 nt, Human
ugugugccaaugguggaucuuugcuacugaau

SEQ ID NO: 264909 - RNA, 32 nt, Human
ugugugccaccaugcccagacgcccagcuaau

SEQ ID NO: 264910 - RNA, 32 nt, Human
ugugugccaguaugauguuccacccacagaaa

SEQ ID NO: 264911 - RNA, 32 nt, Human
ugugugccaucuccaaugagaaggaauccugc

SEQ ID NO: 264912 - RNA, 32 nt, Human
ugugugccccacuccagccuggggaccccacu

SEQ ID NO: 264913 - RNA, 32 nt, Human
ugugugccccugguggagguggacgacaugau

SEQ ID NO: 264914 - RNA, 32 nt, Human
ugugugcccucagggauacgagauucucuguu

SEQ ID NO: 264915 - RNA, 32 nt, Human
ugugugcccugagccgugaugauccucccauc

SEQ ID NO: 264916 - RNA, 32 nt, Human
ugugugcccugcagggaccugccuuugccucc

SEQ ID NO: 264917 - RNA, 32 nt, Human
ugugugccuaugagauugggugcaguguaucc

SEQ ID NO: 264918 - RNA, 32 nt, Human
ugugugccucagaucuguuccaccccacucac

SEQ ID NO: 264919 - RNA, 32 nt, Human
ugugugccucauuccuuucccaccaagaaucc

SEQ ID NO: 264920 - RNA, 32 nt, Human
ugugugccugggagaggcucugucuccuuccu

SEQ ID NO: 264921 - RNA, 32 nt, Human
ugugugccugggagugaccucacagcugccgg

SEQ ID NO: 264922 - RNA, 32 nt, Human
ugugugccugggaucuccuugccccagccuga

SEQ ID NO: 264923 - RNA, 32 nt, Human
ugugugccuguaaucccggcuacuugggaggc

SEQ ID NO: 264924 - RNA, 32 nt, Human
ugugugccuguaauccuagcuacucgggaggc

SEQ ID NO: 264925 - RNA, 32 nt, Human
ugugugccuguaguucagcuacucagggggcu

SEQ ID NO: 264926 - RNA, 32 nt, Human
ugugugccuuucauucuuacauuucuaaucau

SEQ ID NO: 264927 - RNA, 32 nt, Human
ugugugccuuucuaucuuagguaaagaagaga

SEQ ID NO: 264928 - RNA, 32 nt, Human
ugugugccuuucuuccgccccggugggagccg

SEQ ID NO: 264929 - RNA, 32 nt, Human
ugugugcgcugcagcguugcggggugggagaa

SEQ ID NO: 264930 - RNA, 32 nt, Human
ugugugcgggccuggggguugcaugugucacc

SEQ ID NO: 264931 - RNA, 32 nt, Human
ugugugcgugagcaccaagccagagcccgagg

SEQ ID NO: 264932 - RNA, 32 nt, Human
ugugugcgugagcaccaagccggagcccgagg

SEQ ID NO: 264933 - RNA, 29 nt, Human
ugugugcgugcgugugugcgugucugggc

SEQ ID NO: 264934 - RNA, 32 nt, Human
ugugugcgugugcacacacacuuaaacacgug

SEQ ID NO: 264935 - RNA, 32 nt, Human
ugugugcgugugcacacacgcaaguaugcaca

SEQ ID NO: 264936 - RNA, 32 nt, Human
ugugugcguguguguaaauguguacacacaga

SEQ ID NO: 264937 - RNA, 32 nt, Human
ugugugcguguguguauacauacauccauaua

SEQ ID NO: 264938 - RNA, 32 nt, Human
ugugugcuaagugccauguugggcuccucaca

SEQ ID NO: 264939 - RNA, 32 nt, Human
ugugugcucacucuacacagcauacaagugug

SEQ ID NO: 264940 - RNA, 32 nt, Human
ugugugcucagggcacaugcacacagacauuu

SEQ ID NO: 264941 - RNA, 32 nt, Human
ugugugcucauuuggugcggaccugguaccuc

SEQ ID NO: 264942 - RNA, 32 nt, Human
ugugugcuccucuuuuggauuuacagaaaugu

SEQ ID NO: 264943 - RNA, 32 nt, Human
ugugugcugugaaccccugcacccaaccccac

SEQ ID NO: 264944 - RNA, 32 nt, Human
ugugugcuguggcccaugaugcauggggacag

SEQ ID NO: 264945 - RNA, 32 nt, Human
ugugugcuucccucucuuaugacugugucccu

SEQ ID NO: 264946 - RNA, 32 nt, Human
ugugugcuugccuugucccucgggguagaugc

SEQ ID NO: 264947 - RNA, 29 nt, Human
ugugugcuugcuuccagaaucuucuggau

SEQ ID NO: 264948 - RNA, 32 nt, Human
ugugugcuuguaaucccagcuacuugggaggc

SEQ ID NO: 264949 - RNA, 32 nt, Human
ugugugcuuugcuccugcaucuuguugaggug

SEQ ID NO: 264950 - RNA, 32 nt, Human
uguguggaagagcagccuuccuuugucccugu

SEQ ID NO: 264951 - RNA, 32 nt, Human
uguguggaccugggacacucucuucacuucuc

SEQ ID NO: 264952 - RNA, 32 nt, Human
uguguggagacaggguuuugccauguugccca

SEQ ID NO: 264953 - RNA, 32 nt, Human
uguguggagacuggaagccaggaagcaucugc

SEQ ID NO: 264954 - RNA, 32 nt, Human
uguguggagcacguagugcacagaauacguga

SEQ ID NO: 264955 - RNA, 32 nt, Human
uguguggagcugagacaggcucggcagcggca

SEQ ID NO: 264956 - RNA, 32 nt, Human
uguguggagggagggagggaggggagcauggu

SEQ ID NO: 264957 - RNA, 32 nt, Human
uguguggagugugcugaacacacaccaguuua

SEQ ID NO: 264958 - RNA, 32 nt, Human
uguguggaguuuuccaugaagugcagucccaa

SEQ ID NO: 264959 - RNA, 32 nt, Human
uguguggauacuuguucaauacugcuccaaaa

SEQ ID NO: 264960 - RNA, 32 nt, Human
uguguggaugugugugcaugaaucugucauau

SEQ ID NO: 264961 - RNA, 32 nt, Human
uguguggauuauagcaccuccucuccagccuc

SEQ ID NO: 264962 - RNA, 32 nt, Human
uguguggcacccgcucccucuggcagcgaaug

SEQ ID NO: 264963 - RNA, 32 nt, Human
uguguggcagagccaggacccaggagguguga

SEQ ID NO: 264964 - RNA, 32 nt, Human
uguguggcaggcagggcauggguuuuaguccu

SEQ ID NO: 264965 - RNA, 32 nt, Human
uguguggcauuaucaaaaugaagaggagcaag

SEQ ID NO: 264966 - RNA, 32 nt, Human
uguguggccacucgcaggagaagcacuauccu

SEQ ID NO: 264967 - RNA, 32 nt, Human
uguguggcccaggcuggagugcaguggcgcaa

SEQ ID NO: 264968 - RNA, 32 nt, Human
uguguggccuagguuggagugcaauggcgcaa

SEQ ID NO: 264969 - RNA, 32 nt, Human
uguguggccuucugguugaccucugcccgauc

SEQ ID NO: 264970 - RNA, 32 nt, Human
uguguggcuauuuuuccuuucucuguauucuu

SEQ ID NO: 264971 - RNA, 32 nt, Human
uguguggcuccuggaugggcucguggggcggg

SEQ ID NO: 264972 - RNA, 32 nt, Human
uguguggcuggaccaggugucuccccacgcuu

SEQ ID NO: 264973 - RNA, 32 nt, Human
uguguggcugguggacggugaugaggaaggac

SEQ ID NO: 264974 - RNA, 32 nt, Human
uguguggcuuagaugaaagggagaguaaauuu

SEQ ID NO: 264975 - RNA, 32 nt, Human
uguguggcuuccugccucugcacgccaccccg

SEQ ID NO: 264976 - RNA, 32 nt, Human
uguguggcuuuaaccuccacauccaggucuuu

SEQ ID NO: 264977 - RNA, 32 nt, Human
ugugugggagagaaggaggcccguguugagcu

SEQ ID NO: 264978 - RNA, 32 nt, Human
ugugugggagagagugugugagagggugugcc

SEQ ID NO: 264979 - RNA, 32 nt, Human
ugugugggaggcagagagaggagcaggggcca

SEQ ID NO: 264980 - RNA, 32 nt, Human
ugugugggaggcagguucugcaaagcaagugc

SEQ ID NO: 264981 - RNA, 32 nt, Human
ugugugggauugggggaggaguggggacaaga

SEQ ID NO: 264982 - RNA, 32 nt, Human
ugugugggcccagaugguugagcuugagcagg

SEQ ID NO: 264983 - RNA, 32 nt, Human
ugugugggcucaagaugaagcugaagcaacag

SEQ ID NO: 264984 - RNA, 32 nt, Human
ugugugggcucuggccuggccugguggcuggc

SEQ ID NO: 264985 - RNA, 32 nt, Human
uguguggggaaaggagaugugugagcaauuuc

SEQ ID NO: 264986 - RNA, 32 nt, Human
uguguggggaagcacagacaacaggagacccc

SEQ ID NO: 264987 - RNA, 32 nt, Human
uguguggggaagccggucacauggacacaccu

SEQ ID NO: 264988 - RNA, 32 nt, Human
uguguggggagguggguggagaggugagccca

SEQ ID NO: 264989 - RNA, 32 nt, Human
uguguggggaugugugugugggccuaugcacu

SEQ ID NO: 264990 - RNA, 32 nt, Human
uguguggggcccaguagaaauggucuuguaau

SEQ ID NO: 264991 - RNA, 32 nt, Human
ugugugggggcagagguuaugugggaaaucuc

SEQ ID NO: 264992 - RNA, 31 nt, Human
uguguggggucaaaggauguggccccugcca

SEQ ID NO: 264993 - RNA, 32 nt, Human
uguguggggucaucuaggaauauuucuggcca

SEQ ID NO: 264994 - RNA, 32 nt, Human
uguguggguaaucuggucaguaagauugagac

SEQ ID NO: 264995 - RNA, 32 nt, Human
ugugugggucugcaggugagcagacaggacag

SEQ ID NO: 264996 - RNA, 32 nt, Human
uguguggguggcacagaucugggcaguuagau

SEQ ID NO: 264997 - RNA, 32 nt, Human
uguguggguguguguauaccauguauccacau

SEQ ID NO: 264998 - RNA, 29 nt, Human
uguguggguuuguguguguggaugugguu

SEQ ID NO: 264999 - RNA, 32 nt, Human
uguguggucagggcaccaugaggguguacaga

SEQ ID NO: 265000 - RNA, 32 nt, Human
uguguggugcaggagugccacccccagggccc

SEQ ID NO: 265001 - RNA, 32 nt, Human
uguguggugucguggucacaucucccgcuucc

SEQ ID NO: 265002 - RNA, 32 nt, Human
ugugugguguuuuggauuuggagagaaauauu

SEQ ID NO: 265003 - RNA, 32 nt, Human
uuaaaaucaucaggcuggaagaugaagccaug

SEQ ID NO: 265004 - RNA, 32 nt, Human
uuaaaaucggggcuggaggugcagacgguguc

SEQ ID NO: 265005 - RNA, 32 nt, Human
uuaaaaucguucauagacuucuguaaaaugca

SEQ ID NO: 265006 - RNA, 32 nt, Human
uuaaaaucucaaaugacaugcagugugaguag

SEQ ID NO: 265007 - RNA, 32 nt, Human
uuaaaaucucauaauggauaucucauguuuuc

SEQ ID NO: 265008 - RNA, 32 nt, Human
uuaaaaucuggccccagcuuucuuucuguuag

SEQ ID NO: 265009 - RNA, 32 nt, Human
uuaaaaucuguggcuugccuguucaauucauu

SEQ ID NO: 265010 - RNA, 32 nt, Human
uuaaaaugaagacauuuggguguuucauguca

SEQ ID NO: 265011 - RNA, 32 nt, Human
uuaaaaugacccugaauagaauaggaagaaca

SEQ ID NO: 265012 - RNA, 32 nt, Human
uuaaaaugagccacaaacaguaaagcccuauc

SEQ ID NO: 265013 - RNA, 22 nt, Human
uuaaaaugauaaguaccuuuca

SEQ ID NO: 265014 - RNA, 32 nt, Human
uuaaaaugcacacguagccacgcacagccaga

SEQ ID NO: 265015 - RNA, 32 nt, Human
uuaaaaugcccuuuuaagaccugcagcaguga

SEQ ID NO: 265016 - RNA, 32 nt, Human
uuaaaaugcuuuccucuucuuguccugcuuga

SEQ ID NO: 265017 - RNA, 32 nt, Human
uuaaaauggaaaucauucuccaacgauauaca

SEQ ID NO: 265018 - RNA, 31 nt, Human
uuaaaauggacaacuuuucaccuaaagcugg

SEQ ID NO: 265019 - RNA, 32 nt, Human
uuaaaauggacaccccucagcccgcccucccc

SEQ ID NO: 265020 - RNA, 32 nt, Human
uuaaaauggcauguuuucuuuucaagccguua

SEQ ID NO: 265021 - RNA, 32 nt, Human
uuaaaauguaugaaaagaaaacuuuccccugc

SEQ ID NO: 265022 - RNA, 32 nt, Human
uuaaaaugucuaucucauuugcugccuuuuca

SEQ ID NO: 265023 - RNA, 32 nt, Human
uuaaaaugugagaucagugaacucugguuuua

SEQ ID NO: 265024 - RNA, 32 nt, Human
uuaaaauguggcuaaugccugccuuagggaac

SEQ ID NO: 265025 - RNA, 32 nt, Human
uuaaaauguuucuuauuuucagcacuuacauc

SEQ ID NO: 265026 - RNA, 32 nt, Human
uuaaaauuaaucucuuccgaaaauauccacua

SEQ ID NO: 265027 - RNA, 32 nt, Human
uuaaaauuagucuuuguaguucuaucauuagc

SEQ ID NO: 265028 - RNA, 32 nt, Human
uuaaaauuauauuuaucuuggggccuguggga

SEQ ID NO: 265029 - RNA, 32 nt, Human
uuaaaauucacugagaaaaaugagacuaaauu

SEQ ID NO: 265030 - RNA, 32 nt, Human
uuaaaauuccuuaacuccuuuuugauucaugu

SEQ ID NO: 265031 - RNA, 32 nt, Human
uuaaaauugcaucuugaccaggcacaguggcu

SEQ ID NO: 265032 - RNA, 32 nt, Human
uuaaaauugcccagggaugguggugcacacuu

SEQ ID NO: 265033 - RNA, 32 nt, Human
uuaaaauuggcccagaccagaacccaguuucc

SEQ ID NO: 265034 - RNA, 32 nt, Human
uuaaaauugucaaauauauuuuaugaagaauu

SEQ ID NO: 265035 - RNA, 32 nt, Human
uuaaaauuuaacaucugcaguguucugugaau

SEQ ID NO: 265036 - RNA, 24 nt, Human
uuaaaauuuagcuuggcaaaaugu

SEQ ID NO: 265037 - RNA, 32 nt, Human
uuaaaauuuauuucagggagaagaauugcacc

SEQ ID NO: 265038 - RNA, 32 nt, Human
uuaaaauuucaucuguuaauagaucauuaggu

SEQ ID NO: 265039 - RNA, 32 nt, Human
uuaaaauuuuaacaagacagggcuaagagcca

SEQ ID NO: 265040 - RNA, 32 nt, Human
uuaaaauuuugugacgugucuuuuuccuuuuu

SEQ ID NO: 265041 - RNA, 32 nt, Human
uuaaacaaaacacacaacauguaagcauguaa

SEQ ID NO: 265042 - RNA, 32 nt, Human
uuaaacaaaagcauccagacacacaacaaugu

SEQ ID NO: 265043 - RNA, 32 nt, Human
uuaaacaaacaaaaucaccgaccuugcaaaua

SEQ ID NO: 265044 - RNA, 32 nt, Human
uuaaacaaacuagacauuuucuuacggaaaaa

SEQ ID NO: 265045 - RNA, 32 nt, Human
uuaaacaaagggcccugaaguuugagugcgcc

SEQ ID NO: 265046 - RNA, 32 nt, Human
uuaaacaagucaaauaggccaagugccauggc

SEQ ID NO: 265047 - RNA, 32 nt, Human
uuaaacaauuguucauagcuguguagacauuu

SEQ ID NO: 265048 - RNA, 32 nt, Human
uuaaacacaaaugguaacauauuccaaaacca

SEQ ID NO: 265049 - RNA, 32 nt, Human
uuaaacacaaguguguuguaggagacugcauc

SEQ ID NO: 265050 - RNA, 32 nt, Human
uuaaacacagcagaggauggcgcaggcacccc

SEQ ID NO: 265051 - RNA, 23 nt, Human
uuaaacacaucagaauauuucca

SEQ ID NO: 265052 - RNA, 21 nt, Human
uuaaacacaucagugcuucca

SEQ ID NO: 265053 - RNA, 32 nt, Human
uuaaacacuggcauauauggagagaacaguug

SEQ ID NO: 265054 - RNA, 32 nt, Human
uuaaacacuggugauuucagguguacuugugu

SEQ ID NO: 265055 - RNA, 32 nt, Human
uuaaacacuuugggauacuaaucccuagacau

SEQ ID NO: 265056 - RNA, 32 nt, Human
uuaaacagaacugccuuuuucuacucuuuaug

SEQ ID NO: 265057 - RNA, 32 nt, Human
uuaaacagaaggguaucuccuccaucagaucu

SEQ ID NO: 265058 - RNA, 32 nt, Human
uuaaacagacucuugcucugucauucaggcug

SEQ ID NO: 265059 - RNA, 32 nt, Human
uuaaacagcacuaguacuguacacugguuuuu

SEQ ID NO: 265060 - RNA, 32 nt, Human
uuaaacagcauugacaucaucuguaaaaccau

SEQ ID NO: 265061 - RNA, 32 nt, Human
uuaaacagcucuccaagcuuucacugaagucu

SEQ ID NO: 265062 - RNA, 32 nt, Human
uuaaacaggaucacacuguacccccugccugc

SEQ ID NO: 265063 - RNA, 32 nt, Human
uuaaacaggauuggguugaugguacaacauga

SEQ ID NO: 265064 - RNA, 32 nt, Human
uuaaacaguaaucauuuuugucaaccacucca

SEQ ID NO: 265065 - RNA, 32 nt, Human
uuaaacaguccuuuaaccagcacagccaguua

SEQ ID NO: 265066 - RNA, 32 nt, Human
uuaaacaguuucuaaauaaaauucuguauuuc

SEQ ID NO: 265067 - RNA, 32 nt, Human
uuaaacauagccacgccaccuuggccuucaau

SEQ ID NO: 265068 - RNA, 32 nt, Human
uuaaacaucuuaggucagcuuuaccagugagg

SEQ ID NO: 265069 - RNA, 32 nt, Human
uuaaacaugcugugugccacaggccaguguug

SEQ ID NO: 265070 - RNA, 22 nt, Human
uuaaacauggaaagauacucca

SEQ ID NO: 265071 - RNA, 32 nt, Human
uuaaacauguacaaagggcuacauuuuaauuu

SEQ ID NO: 265072 - RNA, 32 nt, Human
uuaaacauuaacaucacuaucauuuauuuauu

SEQ ID NO: 265073 - RNA, 32 nt, Human
uuaaacauucuuuuaaccuucccccaaagaua

SEQ ID NO: 265074 - RNA, 32 nt, Human
uuaaacauuguuuuaucaagucacuguuaagu

SEQ ID NO: 265075 - RNA, 32 nt, Human
uuaaacauuuccugcgcagcuaaagcaagucu

SEQ ID NO: 265076 - RNA, 32 nt, Human
uuaaaccaaaguuuagaaagagguuuuugaaa

SEQ ID NO: 265077 - RNA, 32 nt, Human
uuaaaccaaggcacuccagccugggugacaga

SEQ ID NO: 265078 - RNA, 32 nt, Human
uuaaaccacaaaacaucaaguauuccaaguuu

SEQ ID NO: 265079 - RNA, 32 nt, Human
uuaaacccaacuccuagcacugaagauguuau

SEQ ID NO: 265080 - RNA, 32 nt, Human
uuaaacccaagugcugcacaaaagcagauacu

SEQ ID NO: 265081 - RNA, 32 nt, Human
uuaaacccacuguauaugauguuuucaaugug

SEQ ID NO: 265082 - RNA, 32 nt, Human
uuaaacccagccgucauucucuccccacucca

SEQ ID NO: 265083 - RNA, 32 nt, Human
uuaaacccagcuguuuacacagcagcuacaaa

SEQ ID NO: 265084 - RNA, 32 nt, Human
uuaaacccaggaggcaaaggcugcagugagcc

SEQ ID NO: 265085 - RNA, 32 nt, Human
uuaaacccaggaggcagagguugcagugagug

SEQ ID NO: 265086 - RNA, 32 nt, Human
uuaaacccaggaggcggagguugcagugagcu

SEQ ID NO: 265087 - RNA, 32 nt, Human
uuaaacccaggaggcggagguugcagugaguu

SEQ ID NO: 265088 - RNA, 32 nt, Human
uuaaacccaggagguggagguugcagugagcc

SEQ ID NO: 265089 - RNA, 32 nt, Human
uuaaacccaggagguggagguugcagugagcu

SEQ ID NO: 265090 - RNA, 32 nt, Human
uuaaacccaggaguucaagaccagccugggua

SEQ ID NO: 265091 - RNA, 32 nt, Human
uuaaacccgggaggcagaggcugcagagagcc

SEQ ID NO: 265092 - RNA, 32 nt, Human
uuaaacccuuuccuccucccauuuggacauuu

SEQ ID NO: 265093 - RNA, 32 nt, Human
uuaaacccuuucuccccacugagucccauuuu

SEQ ID NO: 265094 - RNA, 32 nt, Human
uuaaaccucauuaaaucucuguuuucucaucu

SEQ ID NO: 265095 - RNA, 32 nt, Human
uuaaaccucuuuccuuugcaaauuaccuaguc

SEQ ID NO: 265096 - RNA, 32 nt, Human
uuaaaccugcagcaagcaggcauguugaagag

SEQ ID NO: 265097 - RNA, 32 nt, Human
uuaaaccugcugcaagagccauaacuuugagg

SEQ ID NO: 265098 - RNA, 32 nt, Human
uuaaaccugcuugcuuccuaccacagauucuu

SEQ ID NO: 265099 - RNA, 32 nt, Human
uuaaaccugggagguggagguugcagugaccc

SEQ ID NO: 265100 - RNA, 32 nt, Human
uuaaaccugguaaccagagauuacugguggcu

SEQ ID NO: 265101 - RNA, 32 nt, Human
uuaaaccugugcuuucauguuuaagaaaugag

SEQ ID NO: 265102 - RNA, 32 nt, Human
uuaaacgauucucccaccucagccucucgagu

SEQ ID NO: 265103 - RNA, 32 nt, Human
uuaaacgcaacaaaaggcuacauuuccauggg

SEQ ID NO: 265104 - RNA, 32 nt, Human
uuaaacgcaggagucugcagcugcaaugaacu

SEQ ID NO: 265105 - RNA, 32 nt, Human
uuaaacgcuuaacaucuuccaccgcaacagcu

SEQ ID NO: 265106 - RNA, 32 nt, Human
uuaaacggagucuugcuauaucgcccaggcuc

SEQ ID NO: 265107 - RNA, 32 nt, Human
uuaaacggguggcuccuuuaauauuauuauua

SEQ ID NO: 265108 - RNA, 32 nt, Human
uuaaacgucccagucuagcuuagaggaggacc

SEQ ID NO: 265109 - RNA, 32 nt, Human
uuaaacuaaaaauuuacaagagaagaaaguga

SEQ ID NO: 265110 - RNA, 32 nt, Human
uuaaacuaauucauauuaugacuuuaaagggu

SEQ ID NO: 265111 - RNA, 32 nt, Human
uuaaacuagaauaugagauucaagagauuuaa

SEQ ID NO: 265112 - RNA, 32 nt, Human
uuaaacuauaacuguuucauauuuuucuuuug

SEQ ID NO: 265113 - RNA, 32 nt, Human
uuaaacucaguucugcauccaacuugagaaga

SEQ ID NO: 265114 - RNA, 32 nt, Human
uuaaacucauggggaggggcccuucagagcag

SEQ ID NO: 265115 - RNA, 32 nt, Human
uuaaacucccucucuucuuaaauggaacagcu

SEQ ID NO: 265116 - RNA, 32 nt, Human
uuaaacucuccaggaacuugugcuaugcuggg

SEQ ID NO: 265117 - RNA, 32 nt, Human
uuaaacucucccaccaugauuauguauugcug

SEQ ID NO: 265118 - RNA, 32 nt, Human
uuaaacucuuugucucauugaaaguuugguua

SEQ ID NO: 265119 - RNA, 32 nt, Human
uuaaacugaauuuugcaucuguguacaugaag

SEQ ID NO: 265120 - RNA, 32 nt, Human
uuaaacugacccuucccuuugaguggucuuca

SEQ ID NO: 265121 - RNA, 32 nt, Human
uuaaacugaguguagggaaugggauauugaca

SEQ ID NO: 265122 - RNA, 32 nt, Human
uuaaacuggcggugccaguugcagugaaggug

SEQ ID NO: 265123 - RNA, 32 nt, Human
uuaaacugugcaaauaugaaaauuuuucgagg

SEQ ID NO: 265124 - RNA, 32 nt, Human
uuaaacuguggaagagugacugcuagucccuu

SEQ ID NO: 265125 - RNA, 32 nt, Human
uuaaacuguggaagagugacuguuaagucccu

SEQ ID NO: 265126 - RNA, 32 nt, Human
uuaaacuguuuccccuaagagaaaguucaacg

SEQ ID NO: 265127 - RNA, 32 nt, Human
uuaaacuuaaaacuuuguagaaagcaaacaaa

SEQ ID NO: 265128 - RNA, 20 nt, Human
uuaaacuuacaaguaccgua

SEQ ID NO: 265129 - RNA, 32 nt, Human
uuaaacuuuggaacaagaauguagcuucaacg

SEQ ID NO: 265130 - RNA, 32 nt, Human
uuaaacuuuuguuaugaaauugcugaaauguu

SEQ ID NO: 265131 - RNA, 32 nt, Human
uuaaagaaaaagaaaguaguaccuuaguaugu

SEQ ID NO: 265132 - RNA, 32 nt, Human
uuaaagaaaauggacucaugcacagaacacua

SEQ ID NO: 265133 - RNA, 32 nt, Human
uuaaagaaacacggagcugggccaucgucaga

SEQ ID NO: 265134 - RNA, 32 nt, Human
uuaaagaaagugaaaaauguaaaacacauaca

SEQ ID NO: 265135 - RNA, 32 nt, Human
uuaaagaaccccagaggucaccaacauguuua

SEQ ID NO: 265136 - RNA, 32 nt, Human
uuaaagaacccccuuuccgugccacuggugaa

SEQ ID NO: 265137 - RNA, 32 nt, Human
uuaaagaagaaacaccuuuuacuccaaaugua

SEQ ID NO: 265138 - RNA, 32 nt, Human
uuaaagaagaaagaaaaagaaguuucugaaaa

SEQ ID NO: 265139 - RNA, 32 nt, Human
uuaaagaagaugugcugauugcagccuuacua

SEQ ID NO: 265140 - RNA, 32 nt, Human
uuaaagaaguaguaaggcugggcacuguggcu

SEQ ID NO: 265141 - RNA, 32 nt, Human
uuaaagacagagcaggagcuucuuccaggagu

SEQ ID NO: 265142 - RNA, 32 nt, Human
uuaaagacaugaaugaacucacucuggagaga

SEQ ID NO: 265143 - RNA, 32 nt, Human
uuaaagaccagaaaagacuugcuuuuacccag

SEQ ID NO: 265144 - RNA, 32 nt, Human
uuaaagaccagccugaccgacauggagaaacc

SEQ ID NO: 265145 - RNA, 32 nt, Human
uuaaagaccagccuggccaacaaggugaaacc

SEQ ID NO: 265146 - RNA, 32 nt, Human
uuaaagaccagccuggccaacauggcaaaacc

SEQ ID NO: 265147 - RNA, 32 nt, Human
uuaaagaccagccugggcaacacagcaagacc

SEQ ID NO: 265148 - RNA, 32 nt, Human
uuaaagaccagccuggucaauauagcaagacc

SEQ ID NO: 265149 - RNA, 32 nt, Human
uuaaagaccaggcuguuggcaccagaacuuaa

SEQ ID NO: 265150 - RNA, 32 nt, Human
uuaaagaccauuucuggcugggcagggcacuc

SEQ ID NO: 265151 - RNA, 32 nt, Human
uuaaagaccccagcaccuccagugagacccuu

SEQ ID NO: 265152 - RNA, 32 nt, Human
uuaaagacuaaaacaaaugcacagaucaaggg

SEQ ID NO: 265153 - RNA, 32 nt, Human
uuaaagacugacacagacuuagaaucaaauuu

SEQ ID NO: 265154 - RNA, 32 nt, Human
uuaaagacugauauucaaaugcuguaguguug

SEQ ID NO: 265155 - RNA, 32 nt, Human
uuaaagacugauuuuaaucugacuaugacacu

SEQ ID NO: 265156 - RNA, 32 nt, Human
uuaaagacuguauccaugcugugcucaaggag

SEQ ID NO: 265157 - RNA, 32 nt, Human
uuaaagacuucugcugcugcuaugccucuugg

SEQ ID NO: 265158 - RNA, 32 nt, Human
uuaaagagaaaauaucauaaaugguauacucu

SEQ ID NO: 265159 - RNA, 32 nt, Human
uuaaagagaaacuuucacaaugucuggagccc

SEQ ID NO: 265160 - RNA, 32 nt, Human
uuaaagagaagaggcgagagcaugaagauaaa

SEQ ID NO: 265161 - RNA, 32 nt, Human
uuaaagagagucuggcucugucgcccaggcug

SEQ ID NO: 265162 - RNA, 32 nt, Human
uuaaagagauagcuucucuucuuucugaagau

SEQ ID NO: 265163 - RNA, 32 nt, Human
uuaaagagcagccuggcuaacauggugaaacc

SEQ ID NO: 265164 - RNA, 32 nt, Human
uuaaagaggauucucauaaggaaagcaaugac

SEQ ID NO: 265165 - RNA, 32 nt, Human
uuaaagagggaaagagugagauucagaaaucg

SEQ ID NO: 265166 - RNA, 32 nt, Human
uuaaagagggugaggaagggaaaaggaauauu

SEQ ID NO: 265167 - RNA, 32 nt, Human
uuaaagaguuacuuguagaacacuccauguca

SEQ ID NO: 265168 - RNA, 32 nt, Human
uuaaagauaauuggagguuaagagaauuaguc

SEQ ID NO: 265169 - RNA, 32 nt, Human
uuaaagauagugucccugcuguggaaaaccug

SEQ ID NO: 265170 - RNA, 32 nt, Human
uuaaagaucaaauuauccaugaaauuauagcc

SEQ ID NO: 265171 - RNA, 32 nt, Human
uuaaagaugaaaggguucaguacuggauugag

SEQ ID NO: 265172 - RNA, 32 nt, Human
uuaaagaugaauucccagccugaggugacaca

SEQ ID NO: 265173 - RNA, 32 nt, Human
uuaaagauggcacagacccaaagagugagcaa

SEQ ID NO: 265174 - RNA, 32 nt, Human
uuaaagaugggcaaaagaucugaauagacauu

SEQ ID NO: 265175 - RNA, 32 nt, Human
uuaaagauucacugcgugcuguccucacuugu

SEQ ID NO: 265176 - RNA, 32 nt, Human
uuaaagauuguauuuucacagaguggaaacca

SEQ ID NO: 265177 - RNA, 32 nt, Human
uuaaagcaacagacuucucaauaaaagcaggu

SEQ ID NO: 265178 - RNA, 32 nt, Human
uuaaagcaagaugcgauguccagaguuacaga

SEQ ID NO: 265179 - RNA, 32 nt, Human
uuaaagcaaguuucacacugaacuuaacguuu

SEQ ID NO: 265180 - RNA, 32 nt, Human
uuaaagcacagaucauuaagcaauaaaaacca

SEQ ID NO: 265181 - RNA, 32 nt, Human
uuaaagcacagucugaugacacauuuggcagu

SEQ ID NO: 265182 - RNA, 32 nt, Human
uuaaagcaccuuguggaaucuguuuccuauau

SEQ ID NO: 265183 - RNA, 32 nt, Human
uuaaagccaccaggaaguucacacggggcaga

SEQ ID NO: 265184 - RNA, 32 nt, Human
uuaaagccaccagggcuucuggaacaccuguc

SEQ ID NO: 265185 - RNA, 32 nt, Human
uuaaagccaccugcuuccuccaccccaccuuc

SEQ ID NO: 265186 - RNA, 32 nt, Human
uuaaagccgcuggagcuuggggagagaacauu

SEQ ID NO: 265187 - RNA, 32 nt, Human
uuaaagcucccaccugguggcucauuuuucau

SEQ ID NO: 265188 - RNA, 32 nt, Human
uuaaagcugcaacacagcuggugaugagaggc

SEQ ID NO: 265189 - RNA, 32 nt, Human
uuaaagcugcaagcuuucugucuucaguggau

SEQ ID NO: 265190 - RNA, 32 nt, Human
uuaaagcugcuuccuguuuguugagggucugu

SEQ ID NO: 265191 - RNA, 32 nt, Human
uuaaagcugggaaccuguugggaguucacaag

SEQ ID NO: 265192 - RNA, 32 nt, Human
uuaaagcuuaaauuuaugaaccaccuuugugg

SEQ ID NO: 265193 - RNA, 32 nt, Human
uuaaagcuuuaaaaguuuaacagucuaaaaca

SEQ ID NO: 265194 - RNA, 32 nt, Human
uuaaagcuuucaacauguacaggaaguuggaa

SEQ ID NO: 265195 - RNA, 32 nt, Human
uuaaagcuuuccaugggcucugccccaaggcc

SEQ ID NO: 265196 - RNA, 32 nt, Human
uuaaagcuuuucucccuccuuguucuuguuuu

SEQ ID NO: 265197 - RNA, 32 nt, Human
uuaaaggaaaccacucuuucuacaggaaacaa

SEQ ID NO: 265198 - RNA, 32 nt, Human
uuaaaggaauaagguguugccuggaauuucug

SEQ ID NO: 265199 - RNA, 32 nt, Human
uuaaaggagauucuucucccacccccaacuuu

SEQ ID NO: 265200 - RNA, 32 nt, Human
uuaaaggagccagccagguguaauacagucaa

SEQ ID NO: 265201 - RNA, 32 nt, Human
uuaaaggaggagugcaucuuuggccgacagug

SEQ ID NO: 265202 - RNA, 32 nt, Human
uuaaaggaggggcuaggggagaagcugcagcu

SEQ ID NO: 265203 - RNA, 32 nt, Human
uuaaaggagugagccagucacccaggagaauc

SEQ ID NO: 265204 - RNA, 32 nt, Human
uuaaaggauuucuuccucugggacaccaaagc

SEQ ID NO: 265205 - RNA, 32 nt, Human
uuaaaggcaacuuaugaaggcaaaacaggacu

SEQ ID NO: 265206 - RNA, 32 nt, Human
uuaaaggcaaggaaggauugguauaugauugc

SEQ ID NO: 265207 - RNA, 32 nt, Human
uuaaaggcaaguaugucauauuacugaggcua

SEQ ID NO: 265208 - RNA, 32 nt, Human
uuaaaggccuggaacugggaggaagcuggaga

SEQ ID NO: 265209 - RNA, 32 nt, Human
uuaaaggcuguaauuggagcagcuuuuggcug

SEQ ID NO: 265210 - RNA, 32 nt, Human
uuaaaggcuuugccacauccuuuacauuuggg

SEQ ID NO: 265211 - RNA, 32 nt, Human
uuaaagggaggaaacuccucacagccuuuuua

SEQ ID NO: 265212 - RNA, 32 nt, Human
uuaaagggcacuugggcugaaggaucgcuuug

SEQ ID NO: 265213 - RNA, 31 nt, Human
uuaaaggggcugucucccaaugaaagaggca

SEQ ID NO: 265214 - RNA, 32 nt, Human
uuaaaggguccaguucugauuggagccucuag

SEQ ID NO: 265215 - RNA, 32 nt, Human
uuaaagggucuuuugcagaugguacaaauuag

SEQ ID NO: 265216 - RNA, 32 nt, Human
uuaaagguauuggcauacuccacacaucugua

SEQ ID NO: 265217 - RNA, 32 nt, Human
uuaaaggucaugugaaaacucccacuggaaau

SEQ ID NO: 265218 - RNA, 32 nt, Human
uuaaaggugguuuucgcccuuccucucccaca

SEQ ID NO: 265219 - RNA, 32 nt, Human
uuaaaguaagcauuuuuaaaggauuuauuuua

SEQ ID NO: 265220 - RNA, 32 nt, Human
uuaaagucaaccggagaacccaaaaaucagga

SEQ ID NO: 265221 - RNA, 32 nt, Human
uuaaagucaggaguccaagaccagacucgcca

SEQ ID NO: 265222 - RNA, 32 nt, Human
uuaaagucauucucugccugcauccagccccu

SEQ ID NO: 265223 - RNA, 28 nt, Human
uuaaagugaaaaugcauuuuuaaagggc

SEQ ID NO: 265224 - RNA, 32 nt, Human
uuaaagugaagaaacaauggccagcaaucaca

SEQ ID NO: 265225 - RNA, 32 nt, Human
uuaaagugagagaagagagagaugucccagag

SEQ ID NO: 265226 - RNA, 32 nt, Human
uuaaagugagagcacgccuguacuagagcaag

SEQ ID NO: 265227 - RNA, 32 nt, Human
uuaaagugaggaguucaagaccagccugagca

SEQ ID NO: 265228 - RNA, 32 nt, Human
uuaaagugaggcuguacccacagaucaugcuc

SEQ ID NO: 265229 - RNA, 32 nt, Human
uuaaagugauuugaaaaauacucauucugaac

SEQ ID NO: 265230 - RNA, 32 nt, Human
uuaaagugcugagcuuagugcccagcccaaaa

SEQ ID NO: 265231 - RNA, 32 nt, Human
uuaaaguguagaaaauauugucuugccgaagg

SEQ ID NO: 265232 - RNA, 31 nt, Human
uuaaaguguccaggcaucacagaagcacagg

SEQ ID NO: 265233 - RNA, 32 nt, Human
uuaaagugugguuaugggcaggaagacagacu

SEQ ID NO: 265234 - RNA, 32 nt, Human
uuaaaguuauagcuaauagaugcuguuggggg

SEQ ID NO: 265235 - RNA, 31 nt, Human
uuaaaguucaauaaauacuuuguugaauuua

SEQ ID NO: 265236 - RNA, 32 nt, Human
uuaaaguucaguauuucaugguguuuucaggg

SEQ ID NO: 265237 - RNA, 32 nt, Human
uuaaaguucaguugacuuuccccaccaaaugg

SEQ ID NO: 265238 - RNA, 32 nt, Human
uuaaaguucccuauuugugaauucugggauua

SEQ ID NO: 265239 - RNA, 32 nt, Human
uuaaaguuucauuauuggcaacuagaggguug

SEQ ID NO: 265240 - RNA, 32 nt, Human
uuaaaguuuccucugcucagcaucauuucaug

SEQ ID NO: 265241 - RNA, 32 nt, Human
uuaaaguuugggguaaagauuggcaaacuuuu

SEQ ID NO: 265242 - RNA, 32 nt, Human
uuaaaguuuuugaaauguuuuguuuacuaagu

SEQ ID NO: 265243 - RNA, 32 nt, Human
uuaaauaaaauuaaugggacucuugcaaagua

SEQ ID NO: 265244 - RNA, 32 nt, Human
uuaaauaacacuagucacaaugcaguagcagc

SEQ ID NO: 265245 - RNA, 32 nt, Human
uuaaauaagaugauuauuuggcccaggcugag

SEQ ID NO: 265246 - RNA, 32 nt, Human
uuaaauaaggguacuccaucugccacagaauc

SEQ ID NO: 265247 - RNA, 32 nt, Human
uuaaauaaguuacuugccaguuugugagagca

SEQ ID NO: 265248 - RNA, 32 nt, Human
uuaaauaauagucugauugauacaguuuguac

SEQ ID NO: 265249 - RNA, 32 nt, Human
uuaaauacaaaacuggacaggccaggcauggu

SEQ ID NO: 265250 - RNA, 32 nt, Human
uuaaauacaccaacaugagacaucaguaguca

SEQ ID NO: 265251 - RNA, 32 nt, Human
uuaaauacaggagagacacucaagacagaaau

SEQ ID NO: 265252 - RNA, 32 nt, Human
uuaaauacauauuaguuuuaacuuuuccuacc

SEQ ID NO: 265253 - RNA, 32 nt, Human
uuaaauaccauccuuaauacugggaacagaau

SEQ ID NO: 265254 - RNA, 32 nt, Human
uuaaauacugucugugagaaaccagcugguuu

SEQ ID NO: 265255 - RNA, 32 nt, Human
uuaaauagaguuuccaucuuuugucagcucug

SEQ ID NO: 265256 - RNA, 32 nt, Human
uuaaauagcacagaccuauugugcacaucuuu

SEQ ID NO: 265257 - RNA, 32 nt, Human
uuaaauagccacaguccuuaagccacacacau

SEQ ID NO: 265258 - RNA, 32 nt, Human
uuaaauagguccugagacuguugauagcccca

SEQ ID NO: 265259 - RNA, 32 nt, Human
uuaaauauacaauuaucaagcaaguaugaagu

SEQ ID NO: 265260 - RNA, 32 nt, Human
uuaaauauaucuauauuauuguauuuaaaaug

SEQ ID NO: 265261 - RNA, 32 nt, Human
uuaaauauauuuuaauauuugcccucacaggu

SEQ ID NO: 265262 - RNA, 32 nt, Human
uuaaauaucaaagcaguugucauuuggaaguc

SEQ ID NO: 265263 - RNA, 32 nt, Human
uuaaauaugauccucagacaugcagcugugug

SEQ ID NO: 265264 - RNA, 32 nt, Human
uuaaauauucucuggaaccugauaccugcagu

SEQ ID NO: 265265 - RNA, 32 nt, Human
uuaaauauugaauaaguauucuucaucagcau

SEQ ID NO: 265266 - RNA, 32 nt, Human
uuaaauauuucucuuuuuaaagcuucugccaa

SEQ ID NO: 265267 - RNA, 32 nt, Human
uuaaaucaaaggacaccagaccugaaggacgu

SEQ ID NO: 265268 - RNA, 32 nt, Human
uuaaaucaagagcuuacauaauuuuaaccagu

SEQ ID NO: 265269 - RNA, 32 nt, Human
uuaaaucaaggaggcuguaguagaggcaguuu

SEQ ID NO: 265270 - RNA, 32 nt, Human
uuaaaucaaucaggaaugagucaaucagccuu

SEQ ID NO: 265271 - RNA, 32 nt, Human
uuaaaucaggaaccuuguugcuucugguaucu

SEQ ID NO: 265272 - RNA, 32 nt, Human
uuaaaucagugcaguggccagggagauggaac

SEQ ID NO: 265273 - RNA, 32 nt, Human
uuaaaucaucugcugcugugguuaucuccuau

SEQ ID NO: 265274 - RNA, 32 nt, Human
uuaaaucaugccaggaucaugcacccuuguua

SEQ ID NO: 265275 - RNA, 32 nt, Human
uuaaaucauuaucagguuauuuccuaauguaa

SEQ ID NO: 265276 - RNA, 32 nt, Human
uuaaauccaacucaacuuuauaagcuaaggaa

SEQ ID NO: 265277 - RNA, 32 nt, Human
uuaaauccaacuuuucacagugaagugccuuu

SEQ ID NO: 265278 - RNA, 32 nt, Human
uuaaauccaggauccaaucaagaauuauacgu

SEQ ID NO: 265279 - RNA, 32 nt, Human
uuaaaucuagaacgaacaaaauuucagagcuc

SEQ ID NO: 265280 - RNA, 32 nt, Human
uuaaaucucagcugggauccuggaccugggag

SEQ ID NO: 265281 - RNA, 32 nt, Human
uuaaaucucccagaagaggaaaguggccugcu

SEQ ID NO: 265282 - RNA, 32 nt, Human
uuaaaucucugagcuaacagugaccuuugaua

SEQ ID NO: 265283 - RNA, 32 nt, Human
uuaaaucugccuggcguccccucccucugucu

SEQ ID NO: 265284 - RNA, 32 nt, Human
uuaaaucuuaaauuuaauagagucuagugaaa

SEQ ID NO: 265285 - RNA, 32 nt, Human
uuaaaucuuccuaguaguuuguuuucaccaaa

SEQ ID NO: 265286 - RNA, 32 nt, Human
uuaaaugaacaaguaaccacaucucaggcggc

SEQ ID NO: 265287 - RNA, 32 nt, Human
uuaaaugaacugcuuagcccugcucugaagaa

SEQ ID NO: 265288 - RNA, 32 nt, Human
uuaaaugaagaaaggaguggagggaggggauc

SEQ ID NO: 265289 - RNA, 32 nt, Human
uuaaaugauguaauauuccaggaugcugcugc

SEQ ID NO: 265290 - RNA, 32 nt, Human
uuaaaugauuucauaaggaaaaccacuguuug

SEQ ID NO: 265291 - RNA, 32 nt, Human
uuaaaugcauuuuacuacaaagcacaauucau

SEQ ID NO: 265292 - RNA, 32 nt, Human
uuaaaugccacguuuucauaccaagagucauu

SEQ ID NO: 265293 - RNA, 32 nt, Human
uuaaaugccuccuauagaaauucaaggaaugu

SEQ ID NO: 265294 - RNA, 32 nt, Human
uuaaaugcuaugcagucauuaguagaaaauuu

SEQ ID NO: 265295 - RNA, 32 nt, Human
uuaaauggaaucuguaguuuguuugcaggaga

SEQ ID NO: 265296 - RNA, 32 nt, Human
uuaaauggauuucuaggaaaagcuaccuuaag

SEQ ID NO: 265297 - RNA, 32 nt, Human
uuaaauggcauuuaaaaauuugcugaaugcuu

SEQ ID NO: 265298 - RNA, 32 nt, Human
uuaaauggccccuguuugaacucucaugcuuu

SEQ ID NO: 265299 - RNA, 31 nt, Human
uuaaauggggacuucuuuccccauugcuugu

SEQ ID NO: 265300 - RNA, 32 nt, Human
uuaaauggucaacaguggaaaaguaagggaug

SEQ ID NO: 265301 - RNA, 32 nt, Human
uuaaauggugucggaauuguuguauuuuccuu

SEQ ID NO: 265302 - RNA, 32 nt, Human
uuaaauggugucuuucuauguugcccagggug

SEQ ID NO: 265303 - RNA, 32 nt, Human
uuaaauguaaugcaaccaaguuccucccagau

SEQ ID NO: 265304 - RNA, 32 nt, Human
uuaaauguacuaugccaucauccaccauuuag

SEQ ID NO: 265305 - RNA, 32 nt, Human
uuaaauguauucucucauuugaccuucauacu

SEQ ID NO: 265306 - RNA, 32 nt, Human
uuaaaugucaguugaaaauuauggcuguacua

SEQ ID NO: 265307 - RNA, 32 nt, Human
uuaaauguccauuuuuauucuuuaugcuugaa

SEQ ID NO: 265308 - RNA, 32 nt, Human
uuaaaugucccaggcuggaagguggagcgaga

SEQ ID NO: 265309 - RNA, 32 nt, Human
uuaaaugugaacccaacuuuuccccagggcuu

SEQ ID NO: 265310 - RNA, 24 nt, Human
uuaaaugugaacucaacacuucca

SEQ ID NO: 265311 - RNA, 32 nt, Human
uuaaaugugccagcagguaacauuuacagucu

SEQ ID NO: 265312 - RNA, 32 nt, Human
uuaaaugugcuacccucugccucaaggcuugg

SEQ ID NO: 265313 - RNA, 32 nt, Human
uuaaauguuugcagucagugcaagacaagucu

SEQ ID NO: 265314 - RNA, 32 nt, Human
uuaaauguuuuuccuccuaugcaaucaccauu

SEQ ID NO: 265315 - RNA, 32 nt, Human
uuaaauuaauuauagacagagagaggcauuua

SEQ ID NO: 265316 - RNA, 32 nt, Human
uuaaauuaccccucccugcacacacauacaca

SEQ ID NO: 265317 - RNA, 32 nt, Human
uuaaauuauaaggacugcaugguaauuuauag

SEQ ID NO: 265318 - RNA, 32 nt, Human
uuaaauuauugauuuuuaaauuaugggagcaa

SEQ ID NO: 265319 - RNA, 32 nt, Human
uuaaauuauuuaucaaguguauuugaaaaaua

SEQ ID NO: 265320 - RNA, 32 nt, Human
uuaaauuauuuuuauagagauggggguuuugc

SEQ ID NO: 265321 - RNA, 32 nt, Human
uuaaauucacaucucaaggagggagaacccgg

SEQ ID NO: 265322 - RNA, 32 nt, Human
uuaaauucaguauguuggccugugaguuacgg

SEQ ID NO: 265323 - RNA, 32 nt, Human
uuaaauucaguccuaagaaagaggagugcuug

SEQ ID NO: 265324 - RNA, 32 nt, Human
uuaaauuccaggccuuucaucccccuuccuuc

SEQ ID NO: 265325 - RNA, 32 nt, Human
uuaaauucuccacucuguccaucagauacuau

SEQ ID NO: 265326 - RNA, 32 nt, Human
uuaaauucuguucacucaacaaugccagauga

SEQ ID NO: 265327 - RNA, 32 nt, Human
uuaaauucuuaugugucuuuugugucuuaggc

SEQ ID NO: 265328 - RNA, 32 nt, Human
uuaaauucuuugaaaguggcucccagugcuau

SEQ ID NO: 265329 - RNA, 32 nt, Human
uuaaauugcaauucaccauccccagcccagcc

SEQ ID NO: 265330 - RNA, 32 nt, Human
uuaaauuggcugcuacugucaguuauuuugcu

SEQ ID NO: 265331 - RNA, 32 nt, Human
uuaaauuuagccuugccguauuauuuauaguu

SEQ ID NO: 265332 - RNA, 32 nt, Human
uuaaauuuaguuuuggagaauggaauuuuugc

SEQ ID NO: 265333 - RNA, 23 nt, Human
uuaaauuucagaagauaaauaaa

SEQ ID NO: 265334 - RNA, 32 nt, Human
uuaaauuuccucaccuucacuauugaucugua

SEQ ID NO: 265335 - RNA, 31 nt, Human
uuaaauuugauaaaucuccuguugagugaca

SEQ ID NO: 265336 - RNA, 32 nt, Human
uuaaauuugcccagguuucugacaggugauac

SEQ ID NO: 265337 - RNA, 32 nt, Human
uuaaauuuggguuauuuuugguuagugcaauu

SEQ ID NO: 265338 - RNA, 32 nt, Human
uuaaauuuuaagucuuccagucuuccauguga

SEQ ID NO: 265339 - RNA, 32 nt, Human
uuaaauuuugaaaucuaaacauucuuucccac

SEQ ID NO: 265340 - RNA, 32 nt, Human
uuaaauuuugagacaggcucucacucuguugc

SEQ ID NO: 265341 - RNA, 22 nt, Human
uuaaauuuugugacccaacaaa

SEQ ID NO: 265342 - RNA, 32 nt, Human
uuaaauuuuguuuguauuaagcacuuuuaauu

SEQ ID NO: 265343 - RNA, 32 nt, Human
uuaacaaaacaguccuaaauagcagcccucaa

SEQ ID NO: 265344 - RNA, 32 nt, Human
uuaacaaagauagaguuuacaguuuuugaacu

SEQ ID NO: 265345 - RNA, 32 nt, Human
uuaacaaccacucucgaaauucuaucauuuuu

SEQ ID NO: 265346 - RNA, 21 nt, Human
uuaacaagacccagaggagcu

SEQ ID NO: 265347 - RNA, 32 nt, Human
uuaacaagaggcauuugugcacacacacaggg

SEQ ID NO: 265348 - RNA, 32 nt, Human
uuaacaaggaccuguccaacaugcccugccca

SEQ ID NO: 265349 - RNA, 32 nt, Human
uuaacaagguaggaaguuaggagaucauuuac

SEQ ID NO: 265350 - RNA, 32 nt, Human
uuaacaauaacaaaagccauuuauuuauucca

SEQ ID NO: 265351 - RNA, 32 nt, Human
uuaacaaucuaacaauaauauuucaagugccu

SEQ ID NO: 265352 - RNA, 27 nt, Human
uuaacaaugaacauguaacuucucuca

SEQ ID NO: 265353 - RNA, 19 nt, Human
uuaacaauuggauuucuaa

SEQ ID NO: 265354 - RNA, 32 nt, Human
uuaacaauuugaaaaauuauucuuuaauguau

SEQ ID NO: 265355 - RNA, 32 nt, Human
uuaacaauuuguaagaugacugugcaguaaua

SEQ ID NO: 265356 - RNA, 32 nt, Human
uuaacaauuuucaugucccccaccucauguuu

SEQ ID NO: 265357 - RNA, 32 nt, Human
uuaacacaaucccaccaugagggauggguaaa

SEQ ID NO: 265358 - RNA, 32 nt, Human
uuaacacaauuugcgucuucugaucccauucc

SEQ ID NO: 265359 - RNA, 32 nt, Human
uuaacacagccgggcuugggggcagucaggag

SEQ ID NO: 265360 - RNA, 32 nt, Human
uuaacacagcucagggaugacaaccaggaugg

SEQ ID NO: 265361 - RNA, 32 nt, Human
uuaacacaggcagacgggaccugaaggggccg

SEQ ID NO: 265362 - RNA, 32 nt, Human
uuaacacaucguugguuugaaaacuuccauuu

SEQ ID NO: 265363 - RNA, 32 nt, Human
uuaacacauuuaagaaguagguguguggccuu

SEQ ID NO: 265364 - RNA, 32 nt, Human
uuaacacccugagaccaucuucccacuuccaa

SEQ ID NO: 265365 - RNA, 32 nt, Human
uuaacaccuaaccccaaaggcucuuuuaagag

SEQ ID NO: 265366 - RNA, 32 nt, Human
uuaacaccucaccaaguucuuccagcaaaaug

SEQ ID NO: 265367 - RNA, 32 nt, Human
uuaacaccuggcaacagucuccccucauccug

SEQ ID NO: 265368 - RNA, 32 nt, Human
uuaacacuagaaaacauuccaaaacuuuaagg

SEQ ID NO: 265369 - RNA, 32 nt, Human
uuaacacuagggacugcguccauguacuagua

SEQ ID NO: 265370 - RNA, 32 nt, Human
uuaacacuaguaacagugaaagcacaagauuu

SEQ ID NO: 265371 - RNA, 32 nt, Human
uuaacacucauuuuuacucccauugcucaaca

SEQ ID NO: 265372 - RNA, 32 nt, Human
uuaacacucugugacagagcugcagaccccug

SEQ ID NO: 265373 - RNA, 32 nt, Human
uuaacacugagcugucauguuuuaaagcuugc

SEQ ID NO: 265374 - RNA, 32 nt, Human
uuaacacugaguaggcaguugguuaaagaagc

SEQ ID NO: 265375 - RNA, 32 nt, Human
uuaacacuuggcucaaaccucuaggucauacu

SEQ ID NO: 265376 - RNA, 32 nt, Human
uuaacagaaaguaaauauguauaaaauuugaa

SEQ ID NO: 265377 - RNA, 32 nt, Human
uuaacagaacaacagggugaaaccccaucucu

SEQ ID NO: 265378 - RNA, 32 nt, Human
uuaacagacguguccugguaaauaugauuuuu

SEQ ID NO: 265379 - RNA, 32 nt, Human
uuaacagauagaguguggcuucauuuguccau

SEQ ID NO: 265380 - RNA, 32 nt, Human
uuaacagauuuccucuggaaugucuucccuac

SEQ ID NO: 265381 - RNA, 32 nt, Human
uuaacagcaagcuuuuucuuuuauguaaaaua

SEQ ID NO: 265382 - RNA, 32 nt, Human
uuaacagcccuccacuccagauggauauccag

SEQ ID NO: 265383 - RNA, 32 nt, Human
uuaacagcucauaucaggagcugugauaagua

SEQ ID NO: 265384 - RNA, 32 nt, Human
uuaacagcuuaauuuuucucuuuuacuccaua

SEQ ID NO: 265385 - RNA, 32 nt, Human
uuaacaggagggcagagggcaggggacagacg

SEQ ID NO: 265386 - RNA, 32 nt, Human
uuaacaggcaggcaaggggugcggggaccagg

SEQ ID NO: 265387 - RNA, 32 nt, Human
uuaacaggcuaaaaaugccacuuuuuggcugg

SEQ ID NO: 265388 - RNA, 32 nt, Human
uuaacagggagaaaguaguggcuucccuuuuc

SEQ ID NO: 265389 - RNA, 32 nt, Human
uuaacagggagggccugagaaaagaaugggag

SEQ ID NO: 265390 - RNA, 32 nt, Human
uuaacagucugucaguuacacuguacauuagg

SEQ ID NO: 265391 - RNA, 22 nt, Human
uuaacagugaaaucugaucaua

SEQ ID NO: 265392 - RNA, 32 nt, Human
uuaacagugccuggcuuggugccuggcaccua

SEQ ID NO: 265393 - RNA, 32 nt, Human
uuaacaguuuuuccugaguuuacugaagaaau

SEQ ID NO: 265394 - RNA, 32 nt, Human
uuaacauacacccaagcccacccggcccgucg

SEQ ID NO: 265395 - RNA, 32 nt, Human
uuaacaucacccagauuucuucaguuauaaau

SEQ ID NO: 265396 - RNA, 32 nt, Human
uuaacaucauuuccacagaccccucugcccug

SEQ ID NO: 265397 - RNA, 32 nt, Human
uuaacaucccacaacaaccacccggaagccug

SEQ ID NO: 265398 - RNA, 32 nt, Human
uuaacaucccuguuaugcugguuucucuuaaa

SEQ ID NO: 265399 - RNA, 32 nt, Human
uuaacauccuccugccugaaaacaaauagguc

SEQ ID NO: 265400 - RNA, 32 nt, Human
uuaacaucuacaaucaguugacuuuaagugaa

SEQ ID NO: 265401 - RNA, 32 nt, Human
uuaacaucucagaaaacucugguaaaugauca

SEQ ID NO: 265402 - RNA, 32 nt, Human
uuaacaucuccaacaccaaacaacagucacuu

SEQ ID NO: 265403 - RNA, 32 nt, Human
uuaacaucuggagccuuuguggguggaaauau

SEQ ID NO: 265404 - RNA, 32 nt, Human
uuaacaugauuaacugaccauacuacuaaugu

SEQ ID NO: 265405 - RNA, 32 nt, Human
uuaacaugauuugccuuuuuguguuugcuuuu

SEQ ID NO: 265406 - RNA, 32 nt, Human
uuaacauuacagccacagugaccuuucaaaaa

SEQ ID NO: 265407 - RNA, 32 nt, Human
uuaacauugaaagguaaaaucugauuauuuag

SEQ ID NO: 265408 - RNA, 32 nt, Human
uuaacauuugagucaggcuggggaaggcagac

SEQ ID NO: 265409 - RNA, 32 nt, Human
uuaaccaaccaccaccaccaccaaaaccaguu

SEQ ID NO: 265410 - RNA, 32 nt, Human
uuaaccaagauggggagaggggagggccucag

SEQ ID NO: 265411 - RNA, 32 nt, Human
uuaaccaaggagagaggaagggagcagguuca

SEQ ID NO: 265412 - RNA, 32 nt, Human
uuaaccaaggcagaaagaggugaguaacuugc

SEQ ID NO: 265413 - RNA, 32 nt, Human
uuaaccaaggggaaauacaucagaucugcaac

SEQ ID NO: 265414 - RNA, 32 nt, Human
uuaaccacaagaaaauaaucccacauauacaa

SEQ ID NO: 265415 - RNA, 32 nt, Human
uuaaccacacagucuuucuuagccauuccaaa

SEQ ID NO: 265416 - RNA, 32 nt, Human
uuaaccaccaugggcaaggcagucucucuccc

SEQ ID NO: 265417 - RNA, 32 nt, Human
uuaaccacuguuaagugaucugugaucaaggc

SEQ ID NO: 265418 - RNA, 32 nt, Human
uuaaccagcacauuucuccuguuuacacucgg

SEQ ID NO: 265419 - RNA, 32 nt, Human
uuaaccagcugauuuuucuuagugugaugauu

SEQ ID NO: 265420 - RNA, 32 nt, Human
uuaaccagcuuccugagacaugcacccucaug

SEQ ID NO: 265421 - RNA, 32 nt, Human
uuaaccaggggcaccuguuugagcuggaggug

SEQ ID NO: 265422 - RNA, 32 nt, Human
uuaaccauaguacuccuccccaccucaaguag

SEQ ID NO: 265423 - RNA, 24 nt, Human
uuaaccauaugcaugcaaguguua

SEQ ID NO: 265424 - RNA, 32 nt, Human
uuaaccaucuggcugcuuguccccuggagaaa

SEQ ID NO: 265425 - RNA, 32 nt, Human
uuaaccaucugucaguuacauugcaguauuuu

SEQ ID NO: 265426 - RNA, 32 nt, Human
uuaaccaugcaagcccucccaccucccagggc

SEQ ID NO: 265427 - RNA, 32 nt, Human
uuaaccauuucgacucgagcagugccacuuua

SEQ ID NO: 265428 - RNA, 32 nt, Human
uuaacccaaaaggcggagguugcagugagcca

SEQ ID NO: 265429 - RNA, 32 nt, Human
uuaacccaggaggcagagguugcagugagcug

SEQ ID NO: 265430 - RNA, 32 nt, Human
uuaacccaucccucagcaaacgcagcucuucc

SEQ ID NO: 265431 - RNA, 32 nt, Human
uuaaccccagcaccucagugugggacuggguu

SEQ ID NO: 265432 - RNA, 32 nt, Human
uuaaccccaggagguggggguuguugugagcc

SEQ ID NO: 265433 - RNA, 32 nt, Human
uuaacccccacccuuccagucgggugugaggg

SEQ ID NO: 265434 - RNA, 32 nt, Human
uuaaccccuucuuucacugcauggcccuucaa

SEQ ID NO: 265435 - RNA, 32 nt, Human
uuaaccccuuuucuguguuacagaguaacuuc

SEQ ID NO: 265436 - RNA, 32 nt, Human
uuaacccggaagguggaguuugcagugagccg

SEQ ID NO: 265437 - RNA, 32 nt, Human
uuaacccgggagguggagguugcagugagcug

SEQ ID NO: 265438 - RNA, 32 nt, Human
uuaacccgggcccgggcccaccuuggacuccc

SEQ ID NO: 265439 - RNA, 32 nt, Human
uuaacccggugaauaaauguagauccugccau

SEQ ID NO: 265440 - RNA, 32 nt, Human
uuaacccuaaaauuuuaaggccacggcuugug

SEQ ID NO: 265441 - RNA, 32 nt, Human
uuaacccucgcacuuucuccacuguggagaug

SEQ ID NO: 265442 - RNA, 32 nt, Human
uuaacccugcaagcuguuuccacaucagaacu

SEQ ID NO: 265443 - RNA, 32 nt, Human
uuaacccugcucccaucuccccuucccccacu

SEQ ID NO: 265444 - RNA, 32 nt, Human
uuaacccuuagcaacugaucuuuucacugugu

SEQ ID NO: 265445 - RNA, 32 nt, Human
uuaacccuucuuucuuuucuauuucuccgugu

SEQ ID NO: 265446 - RNA, 32 nt, Human
uuaacccuugcccccaucccucccucuccccu

SEQ ID NO: 265447 - RNA, 32 nt, Human
uuaacccuuguagcccaauccccucucuucgc

SEQ ID NO: 265448 - RNA, 32 nt, Human
uuaacccuuuccucccuucucucccucccucc

SEQ ID NO: 265449 - RNA, 32 nt, Human
uuaaccgaaaccaguuuugcaaucaauuccug

SEQ ID NO: 265450 - RNA, 32 nt, Human
uuaaccgaaacuagcaaucccaggcgguacaa

SEQ ID NO: 265451 - RNA, 32 nt, Human
uuaaccguugcaaagcacacugucuuucucag

SEQ ID NO: 265452 - RNA, 32 nt, Human
uuaaccuaaaagauuguauuuugccaacuuuc

SEQ ID NO: 265453 - RNA, 32 nt, Human
uuaaccuaaaugcuauuuaucucugagccguc

SEQ ID NO: 265454 - RNA, 31 nt, Human
uuaaccuaaguguccaucaauagagaauugg

SEQ ID NO: 265455 - RNA, 31 nt, Human
uuaaccuagguguccaucaauagagaauugg

SEQ ID NO: 265456 - RNA, 32 nt, Human
uuaaccucccaaagugcugggauuacaggugu

SEQ ID NO: 265457 - RNA, 32 nt, Human
uuaaccuccccaagccucaguuucuaccauaa

SEQ ID NO: 265458 - RNA, 32 nt, Human
uuaaccuccccucuccccgggaccgcgcuagg

SEQ ID NO: 265459 - RNA, 32 nt, Human
uuaaccuccuuguugcuuaggaugaggagacu

SEQ ID NO: 265460 - RNA, 32 nt, Human
uuaaccucucccaccaugugaggacaaaguga

SEQ ID NO: 265461 - RNA, 32 nt, Human
uuaaccucugaacucugaccucaggaggcucu

SEQ ID NO: 265462 - RNA, 32 nt, Human
uuaaccugcagacagaacucaguuagucgggg

SEQ ID NO: 265463 - RNA, 32 nt, Human
uuaaccugccuggccgggcgcaauggcucaug

SEQ ID NO: 265464 - RNA, 32 nt, Human
uuaaccugggcaacauaaugauacccugucuc

SEQ ID NO: 265465 - RNA, 22 nt, Human
uuaaccuguaaaggaggcucuu

SEQ ID NO: 265466 - RNA, 32 nt, Human
uuaaccuguauucucuuuccucccagaacuau

SEQ ID NO: 265467 - RNA, 32 nt, Human
uuaaccugugaacuuccuucuccuggcucaga

SEQ ID NO: 265468 - RNA, 23 nt, Human
uuaaccuucucauuugucuccua

SEQ ID NO: 265469 - RNA, 21 nt, Human
uuaaccuucugagugcugcua

SEQ ID NO: 265470 - RNA, 32 nt, Human
uuaaccuuggaggcggagguugcauugagcug

SEQ ID NO: 265471 - RNA, 32 nt, Human
uuaacgagacugauauucaacaggcuucuaag

SEQ ID NO: 265472 - RNA, 32 nt, Human
uuaacgcaacccaggaaugcucucccggagug

SEQ ID NO: 265473 - RNA, 32 nt, Human
uuaacgcaccgacuagacacacaaagcaguug

SEQ ID NO: 265474 - RNA, 32 nt, Human
uuaacgcaggagcuggcagagaaaguggauac

SEQ ID NO: 265475 - RNA, 31 nt, Human
uuaacggagguaaaagaguggcucuguuuga

SEQ ID NO: 265476 - RNA, 32 nt, Human
uuaacgggccuuuuucacuuagaagcugcaca

SEQ ID NO: 265477 - RNA, 32 nt, Human
uuaacgggugugagccacggcgcccagcccag

SEQ ID NO: 265478 - RNA, 32 nt, Human
uuaacgugccuuucugacucaucuccuucucu

SEQ ID NO: 265479 - RNA, 32 nt, Human
uuaacguguagguugagaacaagccuaaagga

SEQ ID NO: 265480 - RNA, 32 nt, Human
uuaacguuuuugaauuacacaugcuuucacua

SEQ ID NO: 265481 - RNA, 32 nt, Human
uuaacuaaaacuugaagaacuaaaacaacaau

SEQ ID NO: 265482 - RNA, 32 nt, Human
uuaacuaauuuaaaccagcagaaaagugcuua

SEQ ID NO: 265483 - RNA, 32 nt, Human
uuaacuacaauucacuguugugagaauauucc

SEQ ID NO: 265484 - RNA, 32 nt, Human
uuaacuacacagaggacccaggggaaacgagc

SEQ ID NO: 265485 - RNA, 32 nt, Human
uuaacuacauaaaaauguuuauaggacaagaa

SEQ ID NO: 265486 - RNA, 32 nt, Human
uuaacuacccccagcccgaggcagggugaggg

SEQ ID NO: 265487 - RNA, 32 nt, Human
uuaacuacucuccugguuauguuggccuuaca

SEQ ID NO: 265488 - RNA, 32 nt, Human
uuaacuacuguauucccacaaggaauccccag

SEQ ID NO: 265489 - RNA, 32 nt, Human
uuaacuagcagcuuuugcuccacccaccagag

SEQ ID NO: 265490 - RNA, 32 nt, Human
uuaacuagcuuaguggacccucugccuuuuug

SEQ ID NO: 265491 - RNA, 32 nt, Human
uuaacuaggcuucaguauaucaguguuuauuu

SEQ ID NO: 265492 - RNA, 32 nt, Human
uuaacuauccuagcccaccaguugucagaaau

SEQ ID NO: 265493 - RNA, 32 nt, Human
uuaacuauccuuccagggcucuuccagaugag

SEQ ID NO: 265494 - RNA, 32 nt, Human
uuaacuauuaguuaaaggugagggaaaaucau

SEQ ID NO: 265495 - RNA, 32 nt, Human
uuaacuauucaucagaggugcuguaauuuuaa

SEQ ID NO: 265496 - RNA, 32 nt, Human
uuaacucaaccagcagcagagccagggcccag

SEQ ID NO: 265497 - RNA, 32 nt, Human
uuaacucaacccagaaccauuggucagaauug

SEQ ID NO: 265498 - RNA, 32 nt, Human
uuaacucacugcaaccuccgcuucccagguaa

SEQ ID NO: 265499 - RNA, 32 nt, Human
uuaacucagcccuucccaucagauaaaaagaa

SEQ ID NO: 265500 - RNA, 32 nt, Human
uuaacucaggccuuuuuaagaggaaucacaau

SEQ ID NO: 265501 - RNA, 32 nt, Human
uuaacucaggcucguucuagggacucauucau

SEQ ID NO: 265502 - RNA, 32 nt, Human
uuaacucauagccucaaacuccuggucucaag

SEQ ID NO: 265503 - RNA, 32 nt, Human
uuaacucaugccaagcaucucagcuugggguc

SEQ ID NO: 265504 - RNA, 32 nt, Human
uuaacuccaagugccuuuuugacagugacaac

SEQ ID NO: 265505 - RNA, 32 nt, Human
uuaacucccgagaagagaguccuugugcacag

SEQ ID NO: 265506 - RNA, 32 nt, Human
uuaacucccuccaccagccugcugacagacac

SEQ ID NO: 265507 - RNA, 32 nt, Human
uuaacucuacuuccucuucagucugugguacu

SEQ ID NO: 265508 - RNA, 32 nt, Human
uuaacucuacuuuuacauccccaaaccaccuu

SEQ ID NO: 265509 - RNA, 32 nt, Human
uuaacucugagugccuugccagcacuaacauu

SEQ ID NO: 265510 - RNA, 32 nt, Human
uuaacucugcuguguguuaggcaauccuguaa

SEQ ID NO: 265511 - RNA, 32 nt, Human
uuaacucugggaguuggggacaguuuguauuc

SEQ ID NO: 265512 - RNA, 32 nt, Human
uuaacucuguaagaugcaaagagguuggauca

SEQ ID NO: 265513 - RNA, 32 nt, Human
uuaacucuucacugcuagacccaguuguguuc

SEQ ID NO: 265514 - RNA, 32 nt, Human
uuaacucuugacugccaagguuuccaagugag

SEQ ID NO: 265515 - RNA, 32 nt, Human
uuaacucuuguccaggcuggaggagugcaguc

SEQ ID NO: 265516 - RNA, 32 nt, Human
uuaacugaaaacuuacuuaauaguuuagaaga

SEQ ID NO: 265517 - RNA, 32 nt, Human
uuaacugaaagcuuccaagaauuuaaaaugag

SEQ ID NO: 265518 - RNA, 32 nt, Human
uuaacugaagugacagauuagaguuagaagug

SEQ ID NO: 265519 - RNA, 32 nt, Human
uuaacugaaguguuuaaaaagcugcauuucug

SEQ ID NO: 265520 - RNA, 32 nt, Human
uuaacugagccuccauuagugcacugagacca

SEQ ID NO: 265521 - RNA, 32 nt, Human
uuaacugaguccauuuaacuugcuuucuuuuu

SEQ ID NO: 265522 - RNA, 32 nt, Human
uuaacugaugacauuccaccacugugacuugu

SEQ ID NO: 265523 - RNA, 31 nt, Human
uuaacugcacuuuucauuacgugaauggaac

SEQ ID NO: 265524 - RNA, 32 nt, Human
uuaacugccaugagcccuaaagaagguuugcu

SEQ ID NO: 265525 - RNA, 32 nt, Human
uuaacugccuguaacaugaaacuucaaacuaa

SEQ ID NO: 265526 - RNA, 32 nt, Human
uuaacugggaggaauauuugacaguacuuauu

SEQ ID NO: 265527 - RNA, 32 nt, Human
uuaacuggugaagagaaaaaggcugaaaagaa

SEQ ID NO: 265528 - RNA, 32 nt, Human
uuaacugguuccugcaacccacuuuuaggucu

SEQ ID NO: 265529 - RNA, 32 nt, Human
uuaacuguacaucucaguggcuggaggccaug

SEQ ID NO: 265530 - RNA, 32 nt, Human
uuaacugucauuguuguugcccagagccaugg

SEQ ID NO: 265531 - RNA, 32 nt, Human
uuaacuguuuucccuugagauuuccuucuccu

SEQ ID NO: 265532 - RNA, 32 nt, Human
uuaacuuaaauagguacagcccacgcuugaug

SEQ ID NO: 265533 - RNA, 32 nt, Human
uuaacuuagcaggggcauggacuuuauagcac

SEQ ID NO: 265534 - RNA, 32 nt, Human
uuaacuuaguaaaauaguuugauuuuuaccug

SEQ ID NO: 265535 - RNA, 32 nt, Human
uuaacuucacagaaaaacacacaaggcaaagu

SEQ ID NO: 265536 - RNA, 32 nt, Human
uuaacuucacugcaauucuguuucccucauuu

SEQ ID NO: 265537 - RNA, 32 nt, Human
uuaacuucagccaggauugauggcagcugagg

SEQ ID NO: 265538 - RNA, 32 nt, Human
uuaacuuccagaaauaaacguuauauaggaac

SEQ ID NO: 265539 - RNA, 32 nt, Human
uuaacuuccucaucagaacucugcccuuccuu

SEQ ID NO: 265540 - RNA, 32 nt, Human
uuaacuuccuuugaggaagcugccuuauaguu

SEQ ID NO: 265541 - RNA, 32 nt, Human
uuaacuucucucuucacugcaucccaauccau

SEQ ID NO: 265542 - RNA, 32 nt, Human
uuaacuugccucuuacucuuugcccuuuagcu

SEQ ID NO: 265543 - RNA, 32 nt, Human
uuaacuugcuugccgccugccugcuugagcag

SEQ ID NO: 265544 - RNA, 32 nt, Human
uuaacuugcuuugcaagccuacucugaaaaua

SEQ ID NO: 265545 - RNA, 32 nt, Human
uuaacuuggaaaacaugggaagaccuugguga

SEQ ID NO: 265546 - RNA, 32 nt, Human
uuaacuugggaagaagucucagaggaaauuuu

SEQ ID NO: 265547 - RNA, 32 nt, Human
uuaacuuguuccccugcauccuggcauguccc

SEQ ID NO: 265548 - RNA, 32 nt, Human
uuaacuuucucagaccagaggcagaggacuua

SEQ ID NO: 265549 - RNA, 32 nt, Human
uuaacuuucugccucggccucuguggaugcag

SEQ ID NO: 265550 - RNA, 32 nt, Human
uuaacuuugguuuugcucuaguucuuucuuuu

SEQ ID NO: 265551 - RNA, 32 nt, Human
uuaacuuuguacuagacuggccugggccugcc

SEQ ID NO: 265552 - RNA, 32 nt, Human
uuaacuuuuaaaaaucaaaaugaugaaauccc

SEQ ID NO: 265553 - RNA, 32 nt, Human
uuaacuuuuccagaucuaacacuagcuuauuc

SEQ ID NO: 265554 - RNA, 32 nt, Human
uuaacuuuuucuucuuaaaauuauucauagau

SEQ ID NO: 265555 - RNA, 21 nt, Human
uuaagaaaaaauuauuuccau

SEQ ID NO: 265556 - RNA, 32 nt, Human
uuaagaaaaaguucaacccaggucuuguaucc

SEQ ID NO: 265557 - RNA, 32 nt, Human
uuaagaaaaauggagcucuugaaaucaaaaga

SEQ ID NO: 265558 - RNA, 32 nt, Human
uuaagaaaacuagcaaauauaugaaaagaccc

SEQ ID NO: 265559 - RNA, 32 nt, Human
uuaagaaaaugaauuuauucuguuauauuuau

SEQ ID NO: 265560 - RNA, 32 nt, Human
uuaagaaaccaauauuuaaaauguuggucuag

SEQ ID NO: 265561 - RNA, 24 nt, Human
uuaagaaacccugagauuaaaaaa

SEQ ID NO: 265562 - RNA, 32 nt, Human
uuaagaaagaauuggacguuagaaguugucau

SEQ ID NO: 265563 - RNA, 32 nt, Human
uuaagaaaggaaucuagccaaugagguccaag

SEQ ID NO: 265564 - RNA, 32 nt, Human
uuaagaaaguuggaaaggucucuccucccaag

SEQ ID NO: 265565 - RNA, 32 nt, Human
uuaagaaauggagagaaaaauaagcagaaucc

SEQ ID NO: 265566 - RNA, 32 nt, Human
uuaagaaccaggcaaccucugccuucuucccu

SEQ ID NO: 265567 - RNA, 32 nt, Human
uuaagaaccuauugaguggacauucuugguga

SEQ ID NO: 265568 - RNA, 24 nt, Human
uuaagaacgaaggagaaaaaggua

SEQ ID NO: 265569 - RNA, 32 nt, Human
uuaagaacuuaguuuuggucucagggagaagg

SEQ ID NO: 265570 - RNA, 32 nt, Human
uuaagaagaauuugaacauucaggccuugcug

SEQ ID NO: 265571 - RNA, 32 nt, Human
uuaagaagacuuaguaauaauaacaacaauag

SEQ ID NO: 265572 - RNA, 32 nt, Human
uuaagaagagucagcucagagaaagcaagcau

SEQ ID NO: 265573 - RNA, 32 nt, Human
uuaagaagcuaaaaggaaagaaaauaaaucua

SEQ ID NO: 265574 - RNA, 32 nt, Human
uuaagaaggagguggacgaugccuuaguggag

SEQ ID NO: 265575 - RNA, 32 nt, Human
uuaagaaggcauuggcaucugcuuuuaaugga

SEQ ID NO: 265576 - RNA, 32 nt, Human
uuaagaauccuggcucacuucuuuggugauac

SEQ ID NO: 265577 - RNA, 32 nt, Human
uuaagaaugagcugugcugugcaugggucccu

SEQ ID NO: 265578 - RNA, 31 nt, Human
uuaagaauggcggaaccaggaggacgaggag

SEQ ID NO: 265579 - RNA, 32 nt, Human
uuaagaaugggacuaaaaaggccaggcguggu

SEQ ID NO: 265580 - RNA, 32 nt, Human
uuaagaauggucccuggcuggucgcgguggcu

SEQ ID NO: 265581 - RNA, 32 nt, Human
uuaagaauuuggaacugaaacaugaagaggaa

SEQ ID NO: 265582 - RNA, 32 nt, Human
uuaagacaauaugcgcaauccucgccuuuccu

SEQ ID NO: 265583 - RNA, 32 nt, Human
uuaagacacuaguagagcaaagacuuaaucau

SEQ ID NO: 265584 - RNA, 32 nt, Human
uuaagacagagaaacagacagaaagagacaca

SEQ ID NO: 265585 - RNA, 32 nt, Human
uuaagacagaugucuauucauguucuuuagcu

SEQ ID NO: 265586 - RNA, 32 nt, Human
uuaagacaugcacucuugaguccuacaguaac

SEQ ID NO: 265587 - RNA, 32 nt, Human
uuaagacauucuaagucacaggaugagacagg

SEQ ID NO: 265588 - RNA, 32 nt, Human
uuaagaccaaucacagcuugugccucagauca

SEQ ID NO: 265589 - RNA, 32 nt, Human
uuaagaccaccaggagcacacuuguaaguaaa

SEQ ID NO: 265590 - RNA, 32 nt, Human
uuaagaccagccugaccaacauggagaaaccu

SEQ ID NO: 265591 - RNA, 32 nt, Human
uuaagaccagccugaccaacauggugaaaccc

SEQ ID NO: 265592 - RNA, 23 nt, Human
uuaagaccagccuggacaacaua

SEQ ID NO: 265593 - RNA, 32 nt, Human
uuaagaccagccuggccaacauggcaaaaccc

SEQ ID NO: 265594 - RNA, 32 nt, Human
uuaagaccagccuggccaacuuggugaaaccu

SEQ ID NO: 265595 - RNA, 32 nt, Human
uuaagaccagccugggcaacaaagugagaccc

SEQ ID NO: 265596 - RNA, 23 nt, Human
uuaagaccagccugggcaacaua

SEQ ID NO: 265597 - RNA, 32 nt, Human
uuaagaccagccugggcaacauggcaagaccc

SEQ ID NO: 265598 - RNA, 32 nt, Human
uuaagaccagccugggcaacauggugaagccc

SEQ ID NO: 265599 - RNA, 32 nt, Human
uuaagaccagccugggcaacauggugaagccu

SEQ ID NO: 265600 - RNA, 32 nt, Human
uuaagaccagcuugaccaacauggugaaaccc

SEQ ID NO: 265601 - RNA, 32 nt, Human
uuaagaccauccuggcuaacacggugaaaccc

SEQ ID NO: 265602 - RNA, 32 nt, Human
uuaagacccacugaguggccaccagugcaagu

SEQ ID NO: 265603 - RNA, 32 nt, Human
uuaagaccucacuuuuaaaacugccuuaagua

SEQ ID NO: 265604 - RNA, 32 nt, Human
uuaagacuagccuggccaacauggugaaaccc

SEQ ID NO: 265605 - RNA, 32 nt, Human
uuaagacucuaaaccugauuuuugccauggau

SEQ ID NO: 265606 - RNA, 32 nt, Human
uuaagacugaguuucacucuuguugcccaggc

SEQ ID NO: 265607 - RNA, 32 nt, Human
uuaagacuguguauucuaguuuugucaaacug

SEQ ID NO: 265608 - RNA, 18 nt, Human
uuaagacuuuuucuucaa

SEQ ID NO: 265609 - RNA, 32 nt, Human
uuaagagaaagccaaggcacguagaguaggga

SEQ ID NO: 265610 - RNA, 19 nt, Human
uuaagagaaauacuuccau

SEQ ID NO: 265611 - RNA, 32 nt, Human
uuaagagaauugggcuuucuucaucccuuccg

SEQ ID NO: 265612 - RNA, 32 nt, Human
uuaagagacagaggagaaaguggagcggggag

SEQ ID NO: 265613 - RNA, 32 nt, Human
uuaagagacagaguuucgcuuguugcccaggc

SEQ ID NO: 265614 - RNA, 32 nt, Human
uuaagagaggcagaaucuugagcuugaggcac

SEQ ID NO: 265615 - RNA, 32 nt, Human
uuaagagaguaccuaaaauggagagaagaaug

SEQ ID NO: 265616 - RNA, 32 nt, Human
uuaagagauagucaauucuugccuuauaccuc

SEQ ID NO: 265617 - RNA, 32 nt, Human
uuaagagauauuagauauuucuuaauguuuuc

SEQ ID NO: 265618 - RNA, 32 nt, Human
uuaagagauggcauuagagggagcccagucug

SEQ ID NO: 265619 - RNA, 32 nt, Human
uuaagagauguucuuacagcuggccugggcau

SEQ ID NO: 265620 - RNA, 32 nt, Human
uuaagagauuauggcaucagaaacccacaaug

SEQ ID NO: 265621 - RNA, 32 nt, Human
uuaagagcaagggagagcuggccagggacagc

SEQ ID NO: 265622 - RNA, 32 nt, Human
uuaagagcccuagggcaggcuggaccugucaa

SEQ ID NO: 265623 - RNA, 32 nt, Human
uuaagagccugaugcuugagcucugaauucca

SEQ ID NO: 265624 - RNA, 32 nt, Human
uuaagagcuugcugacuuguuuucuugugaaa

SEQ ID NO: 265625 - RNA, 32 nt, Human
uuaagaggaauuggaccaguucugcugccuaa

SEQ ID NO: 265626 - RNA, 32 nt, Human
uuaagaggauugaggaaggcugggaaguuugc

SEQ ID NO: 265627 - RNA, 32 nt, Human
uuaagaggccgaggcgggcagaucaccugagg

SEQ ID NO: 265628 - RNA, 32 nt, Human
uuaagagggucugguacccuugcaggaccuuu

SEQ ID NO: 265629 - RNA, 32 nt, Human
uuaagaguagguaaagacccuuuuguucuuuc

SEQ ID NO: 265630 - RNA, 32 nt, Human
uuaagaguaguaaugaaaaacaugcucagugc

SEQ ID NO: 265631 - RNA, 32 nt, Human
uuaagagugauauuucuaauucacaaaaguua

SEQ ID NO: 265632 - RNA, 32 nt, Human
uuaagagugggggagagcaggcuggcagcucu

SEQ ID NO: 265633 - RNA, 32 nt, Human
uuaagaguuucugcuucccuacaaagaucuuu

SEQ ID NO: 265634 - RNA, 32 nt, Human
uuaagauaaacaaauaugauguucuuugacgu

SEQ ID NO: 265635 - RNA, 32 nt, Human
uuaagauacuuggaauagcuguggaggaagaa

SEQ ID NO: 265636 - RNA, 32 nt, Human
uuaagauagaaaaauauacuucauguauagcc

SEQ ID NO: 265637 - RNA, 32 nt, Human
uuaagauagaagcagcagcugcauagugguaa

SEQ ID NO: 265638 - RNA, 32 nt, Human
uuaagauaggaggaaggagagcaauuucuaag

SEQ ID NO: 265639 - RNA, 32 nt, Human
uuaagauauauguauauaaaguguaugcugua

SEQ ID NO: 265640 - RNA, 32 nt, Human
uuaagaucacauuuugagguaguggggguuag

SEQ ID NO: 265641 - RNA, 32 nt, Human
uuaagaucacccuuuauuuuaaugaaauugua

SEQ ID NO: 265642 - RNA, 32 nt, Human
uuaagaucacgccacuggacugucuaugaacu

SEQ ID NO: 265643 - RNA, 32 nt, Human
uuaagaucagccuggccaacauaaggagaccu

SEQ ID NO: 265644 - RNA, 32 nt, Human
uuaagaucaggaguucaagaccagccuggcca

SEQ ID NO: 265645 - RNA, 32 nt, Human
uuaagaucaggaguucgagaccagccuggcca

SEQ ID NO: 265646 - RNA, 32 nt, Human
uuaagaucauccuggccaacauggugacaccc

SEQ ID NO: 265647 - RNA, 32 nt, Human
uuaagauccgcaauguggagcagcagccacug

SEQ ID NO: 265648 - RNA, 32 nt, Human
uuaagaucuguuuuaaauuuaaaacaaugaau

SEQ ID NO: 265649 - RNA, 32 nt, Human
uuaagauggaguuucccucuguugccaggcua

SEQ ID NO: 265650 - RNA, 32 nt, Human
uuaagauggcuggaauagcacagggaguauau

SEQ ID NO: 265651 - RNA, 32 nt, Human
uuaagaugguaaaaugguucucagggauuccu

SEQ ID NO: 265652 - RNA, 32 nt, Human
uuaagaugugcuugcuucuccuuuccugaggc

SEQ ID NO: 265653 - RNA, 32 nt, Human
uuaagauuacuuuuguauuaucacuauuuaaa

SEQ ID NO: 265654 - RNA, 32 nt, Human
uuaagcaaacgguguggcauggguugagugug

SEQ ID NO: 265655 - RNA, 32 nt, Human
uuaagcaaaugauagaaagggaaguaaggcgu

SEQ ID NO: 265656 - RNA, 20 nt, Human
uuaagcaaauuacuuacugu

SEQ ID NO: 265657 - RNA, 32 nt, Human
uuaagcaacaucuagcaaauguuaugcauaaa

SEQ ID NO: 265658 - RNA, 21 nt, Human
uuaagcaacauuuuauuucca

SEQ ID NO: 265659 - RNA, 32 nt, Human
uuaagcaaggaacuugucaagagaucaugguu

SEQ ID NO: 265660 - RNA, 32 nt, Human
uuaagcaaguggcuuggcuguuaaauucuugg

SEQ ID NO: 265661 - RNA, 32 nt, Human
uuaagcaauuuucuuccucuguggauugauau

SEQ ID NO: 265662 - RNA, 32 nt, Human
uuaagcacaaagcaucuuccuuaaagcacaaa

SEQ ID NO: 265663 - RNA, 32 nt, Human
uuaagcacagaagauuuguggggagguacaca

SEQ ID NO: 265664 - RNA, 32 nt, Human
uuaagcacaugauuuacagcugugaugguuua

SEQ ID NO: 265665 - RNA, 32 nt, Human
uuaagcacccacugcaugucauugugucuagg

SEQ ID NO: 265666 - RNA, 32 nt, Human
uuaagcacccgguggcccuccgaggccuggcg

SEQ ID NO: 265667 - RNA, 32 nt, Human
uuaagcacucuaagagccgagauagcuuccug

SEQ ID NO: 265668 - RNA, 32 nt, Human
uuaagcacuugcagccuucggaggcucugcgc

SEQ ID NO: 265669 - RNA, 32 nt, Human
uuaagcacuuuuaauuuuauccuuccuaaaaa

SEQ ID NO: 265670 - RNA, 32 nt, Human
uuaagcagagacauaagugccuugcauuacac

SEQ ID NO: 265671 - RNA, 17 nt, Human
uuaagcagagagcccau

SEQ ID NO: 265672 - RNA, 19 nt, Human
uuaagcagauacucuccau

SEQ ID NO: 265673 - RNA, 19 nt, Human
uuaagcagauuacuuccau

SEQ ID NO: 265674 - RNA, 18 nt, Human
uuaagcagcaacuuacca

SEQ ID NO: 265675 - RNA, 32 nt, Human
uuaagcagcacuagugaagcccaggcaaccca

SEQ ID NO: 265676 - RNA, 32 nt, Human
uuaagcagccuaucagugauugccauuagacu

SEQ ID NO: 265677 - RNA, 32 nt, Human
uuaagcagcucuugcuaaucagugucucacac

SEQ ID NO: 265678 - RNA, 18 nt, Human
uuaagcagcugcucucca

SEQ ID NO: 265679 - RNA, 32 nt, Human
uuaagcaggaauccuagaagcaaauggauggg

SEQ ID NO: 265680 - RNA, 32 nt, Human
uuaagcagguaaagcagucacugugaagaaaa

SEQ ID NO: 265681 - RNA, 20 nt, Human
uuaagcaguagugcuuccau

SEQ ID NO: 265682 - RNA, 32 nt, Human
uuaagcagugccacacuacaggguagauaugg

SEQ ID NO: 265683 - RNA, 21 nt, Human
uuaagcaguguuggcuuccau

SEQ ID NO: 265684 - RNA, 32 nt, Human
uuaagcaucccuugggcuuuggauuuggagau

SEQ ID NO: 265685 - RNA, 32 nt, Human
uuaagcaucuuuaugaaacaggcacaguaccc

SEQ ID NO: 265686 - RNA, 32 nt, Human
uuaagcaucuuucugcucccgacuuucuggug

SEQ ID NO: 265687 - RNA, 32 nt, Human
uuaagcauuauccugaagacucugccaggaga

SEQ ID NO: 265688 - RNA, 32 nt, Human
uuaagcauucucaguucccuccagaaaaccua

SEQ ID NO: 265689 - RNA, 32 nt, Human
uuaagccaaguggaagcugugcucugacagga

SEQ ID NO: 265690 - RNA, 32 nt, Human
uuaagccaccgcacuccagccugggcgacaga

SEQ ID NO: 265691 - RNA, 32 nt, Human
uuaagccacugccucucccucuggucccacaa

SEQ ID NO: 265692 - RNA, 32 nt, Human
uuaagccaggccugggcugggcucauagacgc

SEQ ID NO: 265693 - RNA, 32 nt, Human
uuaagccagggccccagaucaggugugacgug

SEQ ID NO: 265694 - RNA, 31 nt, Human
uuaagccaguuucagauuuacucugaaaugu

SEQ ID NO: 265695 - RNA, 32 nt, Human
uuaagccauugcccuggcugggguugggcugg

SEQ ID NO: 265696 - RNA, 32 nt, Human
uuaagcccagaaggucgaggcugcagugagcu

SEQ ID NO: 265697 - RNA, 32 nt, Human
uuaagcccaggagacagagguugcagugagcc

SEQ ID NO: 265698 - RNA, 32 nt, Human
uuaagcccaggagcuuaagaccagccugggca

SEQ ID NO: 265699 - RNA, 32 nt, Human
uuaagcccaggagguucaggcugcaguaaggu

SEQ ID NO: 265700 - RNA, 32 nt, Human
uuaagcccaggagucugagaccagccugggca

SEQ ID NO: 265701 - RNA, 32 nt, Human
uuaagcccaggaguucaagaccaaccuggaca

SEQ ID NO: 265702 - RNA, 32 nt, Human
uuaagcccaggaguucaagaccagccugggca

SEQ ID NO: 265703 - RNA, 32 nt, Human
uuaagcccaggaguucgggguuacagugagcu

SEQ ID NO: 265704 - RNA, 32 nt, Human
uuaagcccaggaguuugagaccagcuugggca

SEQ ID NO: 265705 - RNA, 32 nt, Human
uuaagcccaggaguuugagucuguaaugcacu

SEQ ID NO: 265706 - RNA, 32 nt, Human
uuaagcccaucccucgcccccagccugaggug

SEQ ID NO: 265707 - RNA, 32 nt, Human
uuaagcccgggaguucaagaccagccuagccc

SEQ ID NO: 265708 - RNA, 32 nt, Human
uuaagcccguuuucacacugcuguuaaagaca

SEQ ID NO: 265709 - RNA, 32 nt, Human
uuaagcccugcacagggacccccgaagggcug

SEQ ID NO: 265710 - RNA, 32 nt, Human
uuaagcccugcauuucuccaacugacaagugg

SEQ ID NO: 265711 - RNA, 32 nt, Human
uuaagcccugcucgaugcucacagggccccca

SEQ ID NO: 265712 - RNA, 32 nt, Human
uuaagccgagcucuccccuccaguggacaucc

SEQ ID NO: 265713 - RNA, 32 nt, Human
uuaagccucaaauuugaacauguggcuugaau

SEQ ID NO: 265714 - RNA, 23 nt, Human
uuaagccucauucuccuuuuguu

SEQ ID NO: 265715 - RNA, 32 nt, Human
uuaagccucuugucuacauauuuggagagaau

SEQ ID NO: 265716 - RNA, 32 nt, Human
uuaagccuguuaacucuuucuccauucucuuu

SEQ ID NO: 265717 - RNA, 32 nt, Human
uuaagccuucucuaguuccaucauccucugag

SEQ ID NO: 265718 - RNA, 20 nt, Human
uuaagccuuuguauuuccau

SEQ ID NO: 265719 - RNA, 32 nt, Human
uuaagccuuuuguuccccgucugcaccugaag

SEQ ID NO: 265720 - RNA, 32 nt, Human
uuaagcgcagaagaucaagaccagccugggaa

SEQ ID NO: 265721 - RNA, 32 nt, Human
uuaagcguugagccaccaagcugguggcucug

SEQ ID NO: 265722 - RNA, 32 nt, Human
uuaagcuaaaugguauuuucauuuuucucaag

SEQ ID NO: 265723 - RNA, 32 nt, Human
uuaagcuaauaaauauaagaauucuuuuggaa

SEQ ID NO: 265724 - RNA, 32 nt, Human
uuaagcucaggaguuugagaccagccugggca

SEQ ID NO: 265725 - RNA, 32 nt, Human
uuaagcucccagguagcugggauuacgggcgc

SEQ ID NO: 265726 - RNA, 32 nt, Human
uuaagcuccuacucugugcaaaucacucuacu

SEQ ID NO: 265727 - RNA, 32 nt, Human
uuaagcuccucccaguagauuccugaacccaa

SEQ ID NO: 265728 - RNA, 32 nt, Human
uuaagcuccucuuaaagagggcaggaauuaag

SEQ ID NO: 265729 - RNA, 32 nt, Human
uuaagcugagccacggauaccgccacggguuu

SEQ ID NO: 265730 - RNA, 32 nt, Human
uuaagcugagggcagagaacuuggaugcgugc

SEQ ID NO: 265731 - RNA, 32 nt, Human
uuaagcugcauauguaugcugggaaacggcuu

SEQ ID NO: 265732 - RNA, 32 nt, Human
uuaagcugccuggcauguggcacuuugucagg

SEQ ID NO: 265733 - RNA, 31 nt, Human
uuaagcugcucgagucuccuguugaagaaug

SEQ ID NO: 265734 - RNA, 32 nt, Human
uuaagcugcugcaggucggggaggaaggaccu

SEQ ID NO: 265735 - RNA, 32 nt, Human
uuaagcugcugcuuccucuguuucauuggauu

SEQ ID NO: 265736 - RNA, 32 nt, Human
uuaagcugcuggcugggcaaguguucauugac

SEQ ID NO: 265737 - RNA, 25 nt, Human
uuaagcuucacucuccaccaccugg

SEQ ID NO: 265738 - RNA, 32 nt, Human
uuaagcuucccucuccagccuaggguggggaa

SEQ ID NO: 265739 - RNA, 32 nt, Human
uuaagcuuccgccgucucaaccccucacagga

SEQ ID NO: 265740 - RNA, 32 nt, Human
uuaagcuucucuagugcccuuaacuuuuguua

SEQ ID NO: 265741 - RNA, 32 nt, Human
uuaagcuuuuaccccuguccucuuuggccugc

SEQ ID NO: 265742 - RNA, 32 nt, Human
uuaagcuuuucauuuguuacuaauauccauga

SEQ ID NO: 265743 - RNA, 32 nt, Human
uuaaggaaaaguaagggaauaaauuuuugucu

SEQ ID NO: 265744 - RNA, 32 nt, Human
uuaaggaaagggcuaucuuuguucuuuguuag

SEQ ID NO: 265745 - RNA, 32 nt, Human
uuaaggacaaagcuccagaccagugaacgagc

SEQ ID NO: 265746 - RNA, 32 nt, Human
uuaaggacaccaacagguaacuucuuauuccc

SEQ ID NO: 265747 - RNA, 22 nt, Human
uuaaggacaucuguucuuccau

SEQ ID NO: 265748 - RNA, 32 nt, Human
uuaaggacccucccuaccccagcaugaccccg

SEQ ID NO: 265749 - RNA, 32 nt, Human
uuaaggacucucugcuccagccucucacucuc

SEQ ID NO: 265750 - RNA, 32 nt, Human
uuaaggagaaggucaaggcugcagugagccau

SEQ ID NO: 265751 - RNA, 32 nt, Human
uuaaggagcugggaucauccuccgucucaggu

SEQ ID NO: 265752 - RNA, 32 nt, Human
uuaaggaggagaaaggggaagcuuugaccagu

SEQ ID NO: 265753 - RNA, 32 nt, Human
uuaaggagggaugggaaggaaagaguuguguu

SEQ ID NO: 265754 - RNA, 32 nt, Human
uuaaggaucccagcuacuuaauugacuuaugc

SEQ ID NO: 265755 - RNA, 32 nt, Human
uuaaggaucggcucccugucgcgcccgaggag

SEQ ID NO: 265756 - RNA, 32 nt, Human
uuaaggaugaucuugucaaaauacaguacccu

SEQ ID NO: 265757 - RNA, 32 nt, Human
uuaaggauguacaaaaguaugucugcaucgau

SEQ ID NO: 265758 - RNA, 32 nt, Human
uuaaggcaaggugaaggcauugccaagugugu

SEQ ID NO: 265759 - RNA, 32 nt, Human
uuaaggcaagugggguugguggaacuaaaugu

SEQ ID NO: 265760 - RNA, 32 nt, Human
uuaaggcacacuuccuacacacagcuaucagg

SEQ ID NO: 265761 - RNA, 32 nt, Human
uuaaggcacaggcuguugaagcauuuucucag

SEQ ID NO: 265762 - RNA, 32 nt, Human
uuaaggcaggcggaucaccugaggucaggagu

SEQ ID NO: 265763 - RNA, 32 nt, Human
uuaaggcaucaauccagucuuuggcagaggau

SEQ ID NO: 265764 - RNA, 32 nt, Human
uuaaggcaucugacaugcaucaucucauuuaa

SEQ ID NO: 265765 - RNA, 24 nt, Human
uuaaggcauugagggcucuaaaca

SEQ ID NO: 265766 - RNA, 32 nt, Human
uuaaggccagaguucaagaccaaacuggccaa

SEQ ID NO: 265767 - RNA, 32 nt, Human
uuaaggccaggaguucaagaccaccuggccaa

SEQ ID NO: 265768 - RNA, 32 nt, Human
uuaaggccaggaguucgagaccagccugggca

SEQ ID NO: 265769 - RNA, 32 nt, Human
uuaaggccaggaguuugagaccagcuugggca

SEQ ID NO: 265770 - RNA, 32 nt, Human
uuaaggccauggucuuucucugcaguccccag

SEQ ID NO: 265771 - RNA, 32 nt, Human
uuaaggcccacuguuuuacuggggcccauugu

SEQ ID NO: 265772 - RNA, 32 nt, Human
uuaaggcccagcugcgccugugccuugggcuc

SEQ ID NO: 265773 - RNA, 32 nt, Human
uuaaggccuaacuuaaagcccagauccuacag

SEQ ID NO: 265774 - RNA, 32 nt, Human
uuaaggccugaacaaagcacaucuuuccacca

SEQ ID NO: 265775 - RNA, 32 nt, Human
uuaaggccuuucuucccaccccaaguccaaga

SEQ ID NO: 265776 - RNA, 32 nt, Human
uuaaggcgccugccaccaugcccggcuaauuu

SEQ ID NO: 265777 - RNA, 32 nt, Human
uuaaggcgugagccacugcgcccggcccaaga

SEQ ID NO: 265778 - RNA, 32 nt, Human
uuaaggcuauggaagaaaaagugaaagcaaug

SEQ ID NO: 265779 - RNA, 32 nt, Human
uuaaggcuauuguccuuuguuccuucauguau

SEQ ID NO: 265780 - RNA, 32 nt, Human
uuaagggaacccagaagugaauucuuuuguaa

SEQ ID NO: 265781 - RNA, 32 nt, Human
uuaagggaaggaacucuggcuuccagguaucu

SEQ ID NO: 265782 - RNA, 32 nt, Human
uuaagggacgggcacauuuuucaacgauuaag

SEQ ID NO: 265783 - RNA, 32 nt, Human
uuaagggacugcaggccuggcagcaggacaug

SEQ ID NO: 265784 - RNA, 32 nt, Human
uuaagggacuggucaguggcagaauuaacaua

SEQ ID NO: 265785 - RNA, 32 nt, Human
uuaagggacuguccuuggggaggcaggcgggg

SEQ ID NO: 265786 - RNA, 32 nt, Human
uuaagggagagguagagaggggcccgugaagu

SEQ ID NO: 265787 - RNA, 32 nt, Human
uuaagggaggucgucacuggggugggagaaga

SEQ ID NO: 265788 - RNA, 32 nt, Human
uuaagggaugggaagagcaggaaaagaagcug

SEQ ID NO: 265789 - RNA, 19 nt, Human
uuaagggauucuccugccu

SEQ ID NO: 265790 - RNA, 32 nt, Human
uuaagggcaaaggaguuggauugcugaauuac

SEQ ID NO: 265791 - RNA, 32 nt, Human
uuaagggcauuuuuauacucagaacuguccca

SEQ ID NO: 265792 - RNA, 32 nt, Human
uuaagggccacuggaaagcuggagagagcuug

SEQ ID NO: 265793 - RNA, 32 nt, Human
uuaagggcuugauuuccaagggccacaucucu

SEQ ID NO: 265794 - RNA, 32 nt, Human
uuaagggggccuuggaaucuauaguauagaau

SEQ ID NO: 265795 - RNA, 32 nt, Human
uuaagggggugaggaucauuaauucagauaau

SEQ ID NO: 265796 - RNA, 32 nt, Human
uuaagggguaggaagaaaaaccugacugcaaa

SEQ ID NO: 265797 - RNA, 32 nt, Human
uuaagggguggguccuucccaucaagcugauu

SEQ ID NO: 265798 - RNA, 32 nt, Human
uuaagggguuuauuuuacaaacugugcgccug

SEQ ID NO: 265799 - RNA, 32 nt, Human
uuaaggguagccaagaccuugcaugguagagu

SEQ ID NO: 265800 - RNA, 32 nt, Human
uuaaggguuaauaauguagagaggagggagga

SEQ ID NO: 265801 - RNA, 32 nt, Human
uuaagguacugagggcaggagaaguuaaugua

SEQ ID NO: 265802 - RNA, 32 nt, Human
uuaaggucaggaauucuagaccagccugggca

SEQ ID NO: 265803 - RNA, 32 nt, Human
uuaaggucaggaguucaagaccaggcugguca

SEQ ID NO: 265804 - RNA, 32 nt, Human
uuaaggucaggaguucaggaccagccuggcca

SEQ ID NO: 265805 - RNA, 32 nt, Human
uuaaggucaggaguucgagaccagccuggcca

SEQ ID NO: 265806 - RNA, 32 nt, Human
uuaaggucaggaguuugagaccagccuggcca

SEQ ID NO: 265807 - RNA, 32 nt, Human
uuaagguccuuucuaaauuccuccauugugag

SEQ ID NO: 265808 - RNA, 32 nt, Human
uuaaggucgagaguccaagaccagccuggcca

SEQ ID NO: 265809 - RNA, 32 nt, Human
uuaaggucugcagccuuaauucuaccugcaaa

SEQ ID NO: 265810 - RNA, 32 nt, Human
uuaaggugauuuuuacagaaaugugauuuugc

SEQ ID NO: 265811 - RNA, 32 nt, Human
uuaaggugugagccacugugcccagccuauua

SEQ ID NO: 265812 - RNA, 32 nt, Human
uuaagguuccccuugagucuccugggcuacaa

SEQ ID NO: 265813 - RNA, 32 nt, Human
uuaagguuguuacugcccagcucagccagaaa

SEQ ID NO: 265814 - RNA, 32 nt, Human
uuaagguuuaacugguuuugcuuuuguuuauc

SEQ ID NO: 265815 - RNA, 32 nt, Human
uuaagguuugugaagaguauuugcauuguguc

SEQ ID NO: 265816 - RNA, 32 nt, Human
uuaaguaaaaucaguaagaccaaaccacugga

SEQ ID NO: 265817 - RNA, 32 nt, Human
uuaaguaaacauccuccuccucucuacacccc

SEQ ID NO: 265818 - RNA, 32 nt, Human
uuaaguaacuauaaugaaaucugcugcaaaau

SEQ ID NO: 265819 - RNA, 32 nt, Human
uuaaguaaguaaaauuaauuuuuccauuuggu

SEQ ID NO: 265820 - RNA, 32 nt, Human
uuaaguacaccaugcagcaauguaauaaaaac

SEQ ID NO: 265821 - RNA, 32 nt, Human
uuaaguacauggucaaguauuaacagcacaag

SEQ ID NO: 265822 - RNA, 32 nt, Human
uuaaguacauggucaaguguuaacagcacaag

SEQ ID NO: 265823 - RNA, 17 nt, Human
uuaaguacugcuuccau

SEQ ID NO: 265824 - RNA, 32 nt, Human
uuaaguacuuugcugaaugucauuuuaaagca

SEQ ID NO: 265825 - RNA, 32 nt, Human
uuaaguagaaguagcuuuuuaugcaaauacau

SEQ ID NO: 265826 - RNA, 19 nt, Human
uuaaguagagcucuggaca

SEQ ID NO: 265827 - RNA, 21 nt, Human
uuaaguagcugagacuacagg

SEQ ID NO: 265828 - RNA, 20 nt, Human
uuaaguagguucauuuccau

SEQ ID NO: 265829 - RNA, 32 nt, Human
uuaaguauacagaacuacaguaaugaaugugu

SEQ ID NO: 265830 - RNA, 19 nt, Human
uuaaguauauaacuuccau

SEQ ID NO: 265831 - RNA, 32 nt, Human
uuaaguauuuuguuugguuugaacucaaucag

SEQ ID NO: 265832 - RNA, 32 nt, Human
uuaagucaacauccuuuaaagcuaagaguaug

SEQ ID NO: 265833 - RNA, 32 nt, Human
uuaagucaagagaucaagaccauccuggccaa

SEQ ID NO: 265834 - RNA, 32 nt, Human
uuaagucaagugagcgggaucgcuugaaagcu

SEQ ID NO: 265835 - RNA, 32 nt, Human
uuaagucaggacugagcacacaggugaacucc

SEQ ID NO: 265836 - RNA, 32 nt, Human
uuaagucaucacauuaaacauuguaauacuag

SEQ ID NO: 265837 - RNA, 32 nt, Human
uuaaguccaggaguucaagaccagccugggua

SEQ ID NO: 265838 - RNA, 32 nt, Human
uuaaguccaguucuuugccucaggggucucgu

SEQ ID NO: 265839 - RNA, 32 nt, Human
uuaagucccaaagaaagaggcagaggagcgac

SEQ ID NO: 265840 - RNA, 32 nt, Human
uuaagucccauguuacugcuguuugcuuuuac

SEQ ID NO: 265841 - RNA, 32 nt, Human
uuaaguccucagguuuggcccagauuccaguu

SEQ ID NO: 265842 - RNA, 32 nt, Human
uuaaguccuggguggacugagagaugguuugc

SEQ ID NO: 265843 - RNA, 32 nt, Human
uuaaguccuuaaugaagagccagcccaaguag

SEQ ID NO: 265844 - RNA, 32 nt, Human
uuaagucuacaggggcugggugaccucuuuuu

SEQ ID NO: 265845 - RNA, 22 nt, Human
uuaagucucagaacuuaacaga

SEQ ID NO: 265846 - RNA, 32 nt, Human
uuaagucugagagguugcuggaaaggacuguu

SEQ ID NO: 265847 - RNA, 32 nt, Human
uuaagucugggagguugaggcugcagugagcu

SEQ ID NO: 265848 - RNA, 32 nt, Human
uuaagugaauaaagcacacagacagugcuacu

SEQ ID NO: 265849 - RNA, 32 nt, Human
uuaagugaucaaaaguaaauguucucuuugcc

SEQ ID NO: 265850 - RNA, 32 nt, Human
uuaagugaucccaugaaauaaaagucgauaau

SEQ ID NO: 265851 - RNA, 32 nt, Human
uuaagugauugcacuuuugcucaaauugaagu

SEQ ID NO: 265852 - RNA, 32 nt, Human
uuaagugcaauuuccccucuguguccucuccc

SEQ ID NO: 265853 - RNA, 32 nt, Human
uuaagugcacacaagcauuucagaacucaggu

SEQ ID NO: 265854 - RNA, 32 nt, Human
uuaagugcagugguaugaucaugagcucacug

SEQ ID NO: 265855 - RNA, 32 nt, Human
uuaagugccaggcugggcacaauggcucgugc

SEQ ID NO: 265856 - RNA, 32 nt, Human
uuaaguggaagcaggaggcuuugaugaccaag

SEQ ID NO: 265857 - RNA, 32 nt, Human
uuaaguggaauauucuaauaagcuaccuuuug

SEQ ID NO: 265858 - RNA, 32 nt, Human
uuaaguggagagugcuuccagcugagaugauu

SEQ ID NO: 265859 - RNA, 32 nt, Human
uuaaguggaggcagagucaguucugaggcguc

SEQ ID NO: 265860 - RNA, 31 nt, Human
uuaaguggcuuucagcaaaccucagucauau

SEQ ID NO: 265861 - RNA, 32 nt, Human
uuaaguggucuuucuuucucuccugucucuug

SEQ ID NO: 265862 - RNA, 17 nt, Human
uuaagugguuaccucca

SEQ ID NO: 265863 - RNA, 28 nt, Human
uuaaguguaacuucugccgccaguguga

SEQ ID NO: 265864 - RNA, 32 nt, Human
uuaagugugcugugugcacauguguacacaca

SEQ ID NO: 265865 - RNA, 32 nt, Human
uuaaguguggcacauaaggaucugcagaauuu

SEQ ID NO: 265866 - RNA, 21 nt, Human
uuaagugugugcuaaacaacu

SEQ ID NO: 265867 - RNA, 24 nt, Human
uuaaguguguguuaaacaacuaca

SEQ ID NO: 265868 - RNA, 32 nt, Human
uuaaguguucagaaagaaaaaggagcuuauuu

SEQ ID NO: 265869 - RNA, 22 nt, Human
uuaaguguuggaaccaacacca

SEQ ID NO: 265870 - RNA, 32 nt, Human
uuaaguuacaguuuaagcacccuucaguauua

SEQ ID NO: 265871 - RNA, 32 nt, Human
uuaaguuacuuuucucagcccaaaggagacug

SEQ ID NO: 265872 - RNA, 32 nt, Human
uuaaguuauuaaggaagggaugauuuggagac

SEQ ID NO: 265873 - RNA, 32 nt, Human
uuaaguuauuauuuguauugugcaaaaauuuu

SEQ ID NO: 265874 - RNA, 32 nt, Human
uuaaguucagggccuaggaaggggagcauuca

SEQ ID NO: 265875 - RNA, 32 nt, Human
uuaaguucaguuauuagucugugaagugcuuu

SEQ ID NO: 265876 - RNA, 32 nt, Human
uuaaguucaucucuacgccugcccugguuaag

SEQ ID NO: 265877 - RNA, 32 nt, Human
uuaaguucauuucucuuuuacacuuuuguacu

SEQ ID NO: 265878 - RNA, 32 nt, Human
uuaaguucuacucagaaucauaacaucuggca

SEQ ID NO: 265879 - RNA, 32 nt, Human
uuaaguucuaggguacacgugcacaacgugca

SEQ ID NO: 265880 - RNA, 32 nt, Human
uuaaguucuaggguacaggugcacaacgugca

SEQ ID NO: 265881 - RNA, 32 nt, Human
uuaaguucuaggguacaugugcacaacgugca

SEQ ID NO: 265882 - RNA, 32 nt, Human
uuaaguucuaggguacaugugcacaaugugca

SEQ ID NO: 265883 - RNA, 32 nt, Human
uuaaguucuggcuuuuaucuuuacuauuuucu

SEQ ID NO: 265884 - RNA, 32 nt, Human
uuaaguuggaacaguauuuucccauugacuac

SEQ ID NO: 265885 - RNA, 32 nt, Human
uuaaguuggacaagacuuagcacaagaaacca

SEQ ID NO: 265886 - RNA, 32 nt, Human
uuaaguugucuggacugaaaagucauuucuuu

SEQ ID NO: 265887 - RNA, 32 nt, Human
uuaaguuguuccucuguuaucaugccugaauu

SEQ ID NO: 265888 - RNA, 23 nt, Human
uuaaguuucagguuaccagcaaa

SEQ ID NO: 265889 - RNA, 32 nt, Human
uuaaguuugcaguuacaggccaguucuccagc

SEQ ID NO: 265890 - RNA, 32 nt, Human
uuaaguuugguagaagaugagaacaaaauaac

SEQ ID NO: 265891 - RNA, 18 nt, Human
uuaaguuuguacuuccau

SEQ ID NO: 265892 - RNA, 32 nt, Human
uuaaguuugugagguguggugggugaaacuaa

SEQ ID NO: 265893 - RNA, 32 nt, Human
uuaaguuuguguuuuuagguuuacuuacauac

SEQ ID NO: 265894 - RNA, 32 nt, Human
uuaaguuuucuuucuguuucuaagacaacagu

SEQ ID NO: 265895 - RNA, 32 nt, Human
uuaauaaaaugaaaacaggcugggacaguggu

SEQ ID NO: 265896 - RNA, 32 nt, Human
uuaauaaacaauuuauacugaagagaaacccu

SEQ ID NO: 265897 - RNA, 32 nt, Human
uuaauaaacuugacugaauucauuuacaaaaa

SEQ ID NO: 265898 - RNA, 32 nt, Human
uuaauaaagacaggguuucaccauguuggcca

SEQ ID NO: 265899 - RNA, 32 nt, Human
uuaauaaagacggguuucaccauguuggccag

SEQ ID NO: 265900 - RNA, 32 nt, Human
uuaauaaagcacaaaacccacacagauugucu

SEQ ID NO: 265901 - RNA, 32 nt, Human
uuaauaaagcugcugggcaguggugcagcauu

SEQ ID NO: 265902 - RNA, 31 nt, Human
uuaauaaauacuucugacacuacauuuaaau

SEQ ID NO: 265903 - RNA, 32 nt, Human
uuaauaaauacuucuggucugauaccuaagga

SEQ ID NO: 265904 - RNA, 32 nt, Human
uuaauaaauaguaauauaucaucuuuuuaggg

SEQ ID NO: 265905 - RNA, 32 nt, Human
uuaauaaaugcuggauggaugcaggaaggaau

SEQ ID NO: 265906 - RNA, 32 nt, Human
uuaauaaaugggccaccucccucuucuucaag

SEQ ID NO: 265907 - RNA, 28 nt, Human
uuaauaaccaguguugccucauucagcu

SEQ ID NO: 265908 - RNA, 32 nt, Human
uuaauaaccuccccuucucucucuacauguuc

SEQ ID NO: 265909 - RNA, 32 nt, Human
uuaauaaccugcauuguugcugucugccaaau

SEQ ID NO: 265910 - RNA, 32 nt, Human
uuaauaacuccuucccagaagcuguaucauga

SEQ ID NO: 265911 - RNA, 32 nt, Human
uuaauaagagguaauacccaucuaggaaagaa

SEQ ID NO: 265912 - RNA, 32 nt, Human
uuaauaagaguauaaaauguuaaucaagaguc

SEQ ID NO: 265913 - RNA, 32 nt, Human
uuaauaagcacaauaaauaucuuuuuggauac

SEQ ID NO: 265914 - RNA, 32 nt, Human
uuaauaagccuccugaagaaguugaagcaauu

SEQ ID NO: 265915 - RNA, 32 nt, Human
uuaauaagcuguuaaugcagccuugcacucag

SEQ ID NO: 265916 - RNA, 32 nt, Human
uuaauaaggaagcagagaguaugggauagaga

SEQ ID NO: 265917 - RNA, 32 nt, Human
uuaauaauugaaucagauuuaagggcucuguc

SEQ ID NO: 265918 - RNA, 32 nt, Human
uuaauacaaucagcucaugaaugcacagcuau

SEQ ID NO: 265919 - RNA, 32 nt, Human
uuaauacagccagcuaucauugcccauuugua

SEQ ID NO: 265920 - RNA, 32 nt, Human
uuaauacaggagacccaacaaugaguggacaa

SEQ ID NO: 265921 - RNA, 32 nt, Human
uuaauacagguuguuucuauuuuacuuuuucu

SEQ ID NO: 265922 - RNA, 32 nt, Human
uuaauacauauaugaguacugaaaaauuaagu

SEQ ID NO: 265923 - RNA, 32 nt, Human
uuaauacccacuggguaacagugguuacccau

SEQ ID NO: 265924 - RNA, 32 nt, Human
uuaauaccugggaggcggagauugcagugagc

SEQ ID NO: 265925 - RNA, 32 nt, Human
uuaauacugcaacugcucccuuuugcccaguc

SEQ ID NO: 265926 - RNA, 32 nt, Human
uuaauacugggagcuucucugccuccugaucc

SEQ ID NO: 265927 - RNA, 32 nt, Human
uuaauacuucauuuggugcuggucuauuuuga

SEQ ID NO: 265928 - RNA, 32 nt, Human
uuaauacuuggaguuuaacugccuucccuuug

SEQ ID NO: 265929 - RNA, 32 nt, Human
uuaauagaaaaaucacuuguaugcuuauauuu

SEQ ID NO: 265930 - RNA, 32 nt, Human
uuaauagaaagccucauugaauggcuuucagc

SEQ ID NO: 265931 - RNA, 32 nt, Human
uuaauagaauuccugcaucuucugccacuccc

SEQ ID NO: 265932 - RNA, 32 nt, Human
uuaauagaauugguuucucccuucucugaugu

SEQ ID NO: 265933 - RNA, 32 nt, Human
uuaauagacggaagucuugcucugucaugcag

SEQ ID NO: 265934 - RNA, 32 nt, Human
uuaauagagacagggucucacuaucuugucca

SEQ ID NO: 265935 - RNA, 32 nt, Human
uuaauagagacagggucucgcaguguugccca

SEQ ID NO: 265936 - RNA, 32 nt, Human
uuaauagagacagggucuugcuucuguggccc

SEQ ID NO: 265937 - RNA, 32 nt, Human
uuaauagagacaggguuucacaauguugacca

SEQ ID NO: 265938 - RNA, 32 nt, Human
uuaauagagacaggguuucaccauguuagcca

SEQ ID NO: 265939 - RNA, 32 nt, Human
uuaauagagaccgguuuugccauguuggccag

SEQ ID NO: 265940 - RNA, 32 nt, Human
uuaauagagacggguuucaccacguuggccag

SEQ ID NO: 265941 - RNA, 32 nt, Human
uuaauagagauggauuucaccauguuggucaa

SEQ ID NO: 265942 - RNA, 32 nt, Human
uuaauagaggcagggucuugcuguauugccca

SEQ ID NO: 265943 - RNA, 32 nt, Human
uuaauagcauugggauauagucacuguaaugg

SEQ ID NO: 265944 - RNA, 32 nt, Human
uuaauagcuauuauagaccuguauuuacugua

SEQ ID NO: 265945 - RNA, 32 nt, Human
uuaauagcucuggugauccuguuggcuuuggg

SEQ ID NO: 265946 - RNA, 32 nt, Human
uuaauagcucuuuaacugcuguccucauuagg

SEQ ID NO: 265947 - RNA, 32 nt, Human
uuaauagcugcuucuguggauauggcugggga

SEQ ID NO: 265948 - RNA, 32 nt, Human
uuaauagcuguggcauaaaguuuccaacuaag

SEQ ID NO: 265949 - RNA, 32 nt, Human
uuaauaggaagcuuccaaaagaagaaaacccc

SEQ ID NO: 265950 - RNA, 32 nt, Human
uuaauaggaggccucuggucucugccugcccu

SEQ ID NO: 265951 - RNA, 32 nt, Human
uuaauagggccgggaguggaggcucaagccug

SEQ ID NO: 265952 - RNA, 32 nt, Human
uuaauagggggagaggagagaagaccccaguu

SEQ ID NO: 265953 - RNA, 32 nt, Human
uuaauaguaaaaacacauuccuagguggagac

SEQ ID NO: 265954 - RNA, 32 nt, Human
uuaauaguggcaaaugaaagcauaagcuuaag

SEQ ID NO: 265955 - RNA, 32 nt, Human
uuaauaguguaauauccacagaugcauaagua

SEQ ID NO: 265956 - RNA, 32 nt, Human
uuaauauaaaugauuuugauuuggaggccuaa

SEQ ID NO: 265957 - RNA, 32 nt, Human
uuaauauaaguaugucccaagucuuaaaagag

SEQ ID NO: 265958 - RNA, 32 nt, Human
uuaauauaucuuugccaaguccaaggguacaa

SEQ ID NO: 265959 - RNA, 32 nt, Human
uuaauauaugugaaaguauggaggagaugugc

SEQ ID NO: 265960 - RNA, 32 nt, Human
uuaauaucaguuguugcccaagacagaucuca

SEQ ID NO: 265961 - RNA, 32 nt, Human
uuaauaucccacuugagaaaaauugugagacu

SEQ ID NO: 265962 - RNA, 32 nt, Human
uuaauauccugccuuuuaccuucaguaaacac

SEQ ID NO: 265963 - RNA, 32 nt, Human
uuaauaucugcucuccucuugggagugaggac

SEQ ID NO: 265964 - RNA, 32 nt, Human
uuaauaugcccuuuugccgaugcauacuauua

SEQ ID NO: 265965 - RNA, 32 nt, Human
uuaauaugcuggcaacagaaucauugaaacag

SEQ ID NO: 265966 - RNA, 32 nt, Human
uuaauaugcuguugaaccuacucuguuccuug

SEQ ID NO: 265967 - RNA, 32 nt, Human
uuaauaugcuuuuguugaaaccacagcuuuug

SEQ ID NO: 265968 - RNA, 32 nt, Human
uuaauauggaaaugcauuuagagaagcccagu

SEQ ID NO: 265969 - RNA, 32 nt, Human
uuaauauggaaaugugauuccuacuaaguugu

SEQ ID NO: 265970 - RNA, 32 nt, Human
uuaauauggagaagaaaacuauauuggcugau

SEQ ID NO: 265971 - RNA, 32 nt, Human
uuaauauggggacaaugaagacaagcacacag

SEQ ID NO: 265972 - RNA, 32 nt, Human
uuaauaugugagagacaacagcuggguuuucc

SEQ ID NO: 265973 - RNA, 32 nt, Human
uuaauauguuacauuuguuuaguuuccacgua

SEQ ID NO: 265974 - RNA, 32 nt, Human
uuaauauuaaauauaugauuagccaggcacgg

SEQ ID NO: 265975 - RNA, 32 nt, Human
uuaauauuauucacauuucaugucacaaauuu

SEQ ID NO: 265976 - RNA, 32 nt, Human
uuaauauucccaaugaaauccuguucuuuaau

SEQ ID NO: 265977 - RNA, 32 nt, Human
uuaauauugauaguuucacauccagguuucua

SEQ ID NO: 265978 - RNA, 32 nt, Human
uuaauauugauuggggguggggagaaagaaaa

SEQ ID NO: 265979 - RNA, 32 nt, Human
uuaauauugcaacuuucaccacagggccucug

SEQ ID NO: 265980 - RNA, 32 nt, Human
uuaauauuuaaugcccuuggauuugggaaauc

SEQ ID NO: 265981 - RNA, 32 nt, Human
uuaauauuuacagguuuaccagaucuggaaca

SEQ ID NO: 265982 - RNA, 32 nt, Human
uuaauauuucccaagugucuguugacucauug

SEQ ID NO: 265983 - RNA, 32 nt, Human
uuaaucaaauuacccacccaaggcuucuagaa

SEQ ID NO: 265984 - RNA, 31 nt, Human
uuaaucaauaaaguaugucuguugaagcaag

SEQ ID NO: 265985 - RNA, 32 nt, Human
uuaaucaccaugggaaacuguugugggcgcug

SEQ ID NO: 265986 - RNA, 32 nt, Human
uuaaucacuauuguuccagcaguuuucaaguc

SEQ ID NO: 265987 - RNA, 32 nt, Human
uuaaucacuucugaccuaagguccucauugag

SEQ ID NO: 265988 - RNA, 32 nt, Human
uuaaucagaccagcccaugaguguauaacaaa

SEQ ID NO: 265989 - RNA, 32 nt, Human
uuaaucagagguggcuuaauuacauugaaauu

SEQ ID NO: 265990 - RNA, 32 nt, Human
uuaaucagccagaaggugcagugugacuauga

SEQ ID NO: 265991 - RNA, 24 nt, Human
uuaaucaguccucacaccuuucua

SEQ ID NO: 265992 - RNA, 21 nt, Human
uuaaucagucugcacauccug

SEQ ID NO: 265993 - RNA, 32 nt, Human
uuaaucauccccaguguccaggcacagaguag

SEQ ID NO: 265994 - RNA, 32 nt, Human
uuaauccacugcauccaucuaggauuuauuuu

SEQ ID NO: 265995 - RNA, 32 nt, Human
uuaauccagugaucuuuuaggccaaggaaaua

SEQ ID NO: 265996 - RNA, 32 nt, Human
uuaauccaguguguuucaaacuuuguuugaau

SEQ ID NO: 265997 - RNA, 32 nt, Human
uuaaucccacuagacuauuuuaagaaguuaag

SEQ ID NO: 265998 - RNA, 32 nt, Human
uuaaucccagcacuuugggagacugagguggg

SEQ ID NO: 265999 - RNA, 32 nt, Human
uuaaucccagcacuuugggaggcugaggaagg

SEQ ID NO: 266000 - RNA, 32 nt, Human
uuaaucccagcacuuugggaggcugaguugcu

SEQ ID NO: 266001 - RNA, 32 nt, Human
uuaaucccagcacuuugggaggucaagauggg

SEQ ID NO: 266002 - RNA, 32 nt, Human
uuaauccccuucagccccuagcucuuuuauuc

SEQ ID NO: 266003 - RNA, 32 nt, Human
uuaaucccucauauucaauuucaucaagccuu

SEQ ID NO: 266004 - RNA, 32 nt, Human
uuaauccucaggcaaaugcuacacccguaccc

SEQ ID NO: 266005 - RNA, 32 nt, Human
uuaauccucccuuccucccuauuaaccuagag

SEQ ID NO: 266006 - RNA, 32 nt, Human
uuaauccucuacuacugccugcucuucauuuu

SEQ ID NO: 266007 - RNA, 23 nt, Human
uuaauccuugauaagaguugcuu

SEQ ID NO: 266008 - RNA, 32 nt, Human
uuaaucgacuccugcaaaucuauaccagugag

SEQ ID NO: 266009 - RNA, 32 nt, Human
uuaaucguccugcugcugcugccguuccggug

SEQ ID NO: 266010 - RNA, 32 nt, Human
uuaaucuaccugcuuugucuaaauccucugaa

SEQ ID NO: 266011 - RNA, 32 nt, Human
uuaaucuacuccugaaugacuuggguaaacaa

SEQ ID NO: 266012 - RNA, 32 nt, Human
uuaaucucauuucuggacucuuuaaguucuac

SEQ ID NO: 266013 - RNA, 32 nt, Human
uuaaucucucagccacaaaccucaguuuccaa

SEQ ID NO: 266014 - RNA, 32 nt, Human
uuaaucucugcaguuuauucucucuuaaggaa

SEQ ID NO: 266015 - RNA, 31 nt, Human
uuaaucugauauuauauuuguugaaauagaa

SEQ ID NO: 266016 - RNA, 32 nt, Human
uuaaucugcacaguuuaucuucugccaaaaua

SEQ ID NO: 266017 - RNA, 32 nt, Human
uuaaucugcauucuguuuccucuucuaguugu

SEQ ID NO: 266018 - RNA, 32 nt, Human
uuaaucugccuggcguccccucccucugucuu

SEQ ID NO: 266019 - RNA, 32 nt, Human
uuaaucuuaaaauugguggucauuucaauggu

SEQ ID NO: 266020 - RNA, 32 nt, Human
uuaaucuuauacagaagaaacuaacuuagaaa

SEQ ID NO: 266021 - RNA, 32 nt, Human
uuaaucuugagucuggcagcaauuuguaaagg

SEQ ID NO: 266022 - RNA, 32 nt, Human
uuaaucuugauacuaaggauuuguuacuuuuu

SEQ ID NO: 266023 - RNA, 32 nt, Human
uuaaucuugcagaagagguucaacauauuaac

SEQ ID NO: 266024 - RNA, 32 nt, Human
uuaaugaaaacuacuuuugucuucaucauaaa

SEQ ID NO: 266025 - RNA, 32 nt, Human
uuaaugaaaaugucagaaaccaguuaugugaa

SEQ ID NO: 266026 - RNA, 32 nt, Human
uuaaugaacacgugucucacacacaaaaagaa

SEQ ID NO: 266027 - RNA, 32 nt, Human
uuaaugaacuauaccuguuaaguuccaaaggu

SEQ ID NO: 266028 - RNA, 32 nt, Human
uuaaugaacuucuuuucaugauguagggaaag

SEQ ID NO: 266029 - RNA, 32 nt, Human
uuaaugaaugaccagcagcagcuuucagcucu

SEQ ID NO: 266030 - RNA, 32 nt, Human
uuaaugacacugguuucauguaguuuucaaga

SEQ ID NO: 266031 - RNA, 32 nt, Human
uuaaugacagaacuuggcuaauggaauucaca

SEQ ID NO: 266032 - RNA, 32 nt, Human
uuaaugaccaggcucuaugugcugcuguagug

SEQ ID NO: 266033 - RNA, 32 nt, Human
uuaaugagacagagucucucucugucaccuag

SEQ ID NO: 266034 - RNA, 32 nt, Human
uuaaugagauacuuugcuuccucauucaacau

SEQ ID NO: 266035 - RNA, 32 nt, Human
uuaaugagcaaggacaaccugccccuccccag

SEQ ID NO: 266036 - RNA, 32 nt, Human
uuaaugaggagggggagaaggagcaggaauau

SEQ ID NO: 266037 - RNA, 32 nt, Human
uuaaugagugaccaguguccauguuuaugcau

SEQ ID NO: 266038 - RNA, 32 nt, Human
uuaaugaucuuucacaagagcuguuuggccuu

SEQ ID NO: 266039 - RNA, 32 nt, Human
uuaaugauucaccaauuucuugcauuaauuug

SEQ ID NO: 266040 - RNA, 32 nt, Human
uuaaugauugagguauuuguuuaaaauucagu

SEQ ID NO: 266041 - RNA, 32 nt, Human
uuaaugcaacccagguaugcuccaugcauauc

SEQ ID NO: 266042 - RNA, 32 nt, Human
uuaaugcacauccuuaucucauugcuggcuuc

SEQ ID NO: 266043 - RNA, 32 nt, Human
uuaaugcagauggcaagugcaccaaggagaag

SEQ ID NO: 266044 - RNA, 31 nt, Human
uuaaugcaguuucacuuauguuaaauguugc

SEQ ID NO: 266045 - RNA, 32 nt, Human
uuaaugcauauggggaaacugaggcccagauu

SEQ ID NO: 266046 - RNA, 32 nt, Human
uuaaugcauuugcccaauauuuuacauuguua

SEQ ID NO: 266047 - RNA, 32 nt, Human
uuaaugccacaacagcuacgucaugggauuga

SEQ ID NO: 266048 - RNA, 32 nt, Human
uuaaugccagaagaaaaguuaccagaauuuau

SEQ ID NO: 266049 - RNA, 32 nt, Human
uuaaugccagccuggggcucucagcaggagga

SEQ ID NO: 266050 - RNA, 32 nt, Human
uuaaugccagcgcauugagggagaugucccca

SEQ ID NO: 266051 - RNA, 32 nt, Human
uuaaugcccagccagccaccccugccacucac

SEQ ID NO: 266052 - RNA, 32 nt, Human
uuaaugccugccuuaaggggugagugagugcu

SEQ ID NO: 266053 - RNA, 32 nt, Human
uuaaugccuuuggccuuccauucugacuucuc

SEQ ID NO: 266054 - RNA, 32 nt, Human
uuaaugcgggcagcaccuacagcaacuuggaa

SEQ ID NO: 266055 - RNA, 32 nt, Human
uuaaugcuaaauaugugcuaaauacuggauua

SEQ ID NO: 266056 - RNA, 32 nt, Human
uuaaugcucucugaagaaaggcaacaucuuuu

SEQ ID NO: 266057 - RNA, 32 nt, Human
uuaaugcucuggacuugccuccagagacugcu

SEQ ID NO: 266058 - RNA, 32 nt, Human
uuaaugcugcucccagucuucuguccauacca

SEQ ID NO: 266059 - RNA, 32 nt, Human
uuaaugcuugaaggaugguuugggaggcaggg

SEQ ID NO: 266060 - RNA, 32 nt, Human
uuaauggaauacagucauguccacucaagacg

SEQ ID NO: 266061 - RNA, 32 nt, Human
uuaauggagagggcggcgaagaggacccgcag

SEQ ID NO: 266062 - RNA, 32 nt, Human
uuaauggaucugauuugucuccacucuuugcc

SEQ ID NO: 266063 - RNA, 32 nt, Human
uuaauggcugccgacaaugaacugucugucug

SEQ ID NO: 266064 - RNA, 32 nt, Human
uuaauggcuuuccucucucuuguuuuaccuua

SEQ ID NO: 266065 - RNA, 32 nt, Human
uuaaugggcucaaggucaccuaccugaccuac

SEQ ID NO: 266066 - RNA, 32 nt, Human
uuaaugguaaaagagaaaaggagagagguuga

SEQ ID NO: 266067 - RNA, 32 nt, Human
uuaaugguacuccuauaauuuuugauugugag

SEQ ID NO: 266068 - RNA, 32 nt, Human
uuaauggugagcuuuuaaaaauguaggauaga

SEQ ID NO: 266069 - RNA, 32 nt, Human
uuaaugguuacaacucccaccccaccaaagug

SEQ ID NO: 266070 - RNA, 32 nt, Human
uuaaugucacaucugccuuuggagauuacaaa

SEQ ID NO: 266071 - RNA, 32 nt, Human
uuaaugucauuucuuccugaggaaggaagauu

SEQ ID NO: 266072 - RNA, 32 nt, Human
uuaaugucucauuccccuugaggccagcugcu

SEQ ID NO: 266073 - RNA, 32 nt, Human
uuaaugucuuaaugauuggugcugcuaacuug

SEQ ID NO: 266074 - RNA, 32 nt, Human
uuaaugugagaaggaagggaggaguaggaauc

SEQ ID NO: 266075 - RNA, 32 nt, Human
uuaaugugauuguguauucuguuuacauuaaa

SEQ ID NO: 266076 - RNA, 32 nt, Human
uuaauguggaaaugauguuucauaagaauucu

SEQ ID NO: 266077 - RNA, 31 nt, Human
uuaauguggacaauuuacacacccaacacau

SEQ ID NO: 266078 - RNA, 32 nt, Human
uuaauguggacaauuuacacacccaacacaua

SEQ ID NO: 266079 - RNA, 32 nt, Human
uuaauguggauuuccuccuuccuuccaaguuc

SEQ ID NO: 266080 - RNA, 32 nt, Human
uuaauguggcucacaaucuuauccaaucuuuc

SEQ ID NO: 266081 - RNA, 31 nt, Human
uuaauguggguggagauggggaugauuguag

SEQ ID NO: 266082 - RNA, 32 nt, Human
uuaauguguccccugaguuggagcucauucug

SEQ ID NO: 266083 - RNA, 32 nt, Human
uuaauguguuucuccccaugguccuauuucuc

SEQ ID NO: 266084 - RNA, 32 nt, Human
uuaauguuaagcaauuccaccacacuucugaa

SEQ ID NO: 266085 - RNA, 32 nt, Human
uuaauguuaccugaacauguggugaggucagc

SEQ ID NO: 266086 - RNA, 32 nt, Human
uuaauguucauuuugauuuauuuuaaaucuuu

SEQ ID NO: 266087 - RNA, 32 nt, Human
uuaauguuccaagucagcugugccucacacaa

SEQ ID NO: 266088 - RNA, 32 nt, Human
uuaauguuccucgucgggcaaaagauaaggau

SEQ ID NO: 266089 - RNA, 32 nt, Human
uuaauguugaugucuucauuggaugggucaua

SEQ ID NO: 266090 - RNA, 32 nt, Human
uuaauguuggguuuugguagaugaggaaagca

SEQ ID NO: 266091 - RNA, 32 nt, Human
uuaauguuucuguccuuucugugaauuauuga

SEQ ID NO: 266092 - RNA, 32 nt, Human
uuaauguuuuuccccaugaaccacaguuuuua

SEQ ID NO: 266093 - RNA, 32 nt, Human
uuaauuaaaauacaagaagcagcugaggaaag

SEQ ID NO: 266094 - RNA, 32 nt, Human
uuaauuaaagcccacaauccuccuggggagag

SEQ ID NO: 266095 - RNA, 32 nt, Human
uuaauuaaauuucacaauauaaaguucuacag

SEQ ID NO: 266096 - RNA, 32 nt, Human
uuaauuaaguaggucuuuggggcaguuaguuc

SEQ ID NO: 266097 - RNA, 32 nt, Human
uuaauuacaauguaauagaagcuuaaaauaaa

SEQ ID NO: 266098 - RNA, 32 nt, Human
uuaauuaccaaaacucuccugcaucagagcau

SEQ ID NO: 266099 - RNA, 32 nt, Human
uuaauuacuggacucucuuagcacaggaaggu

SEQ ID NO: 266100 - RNA, 32 nt, Human
uuaauuacuugggcaucccaggaagcuuucca

SEQ ID NO: 266101 - RNA, 32 nt, Human
uuaauuagaaucgagcuggcuuuguauuauau

SEQ ID NO: 266102 - RNA, 32 nt, Human
uuaauuagacauuguuauuaacaggaacagug

SEQ ID NO: 266103 - RNA, 32 nt, Human
uuaauuaggcagccuggagaaaaccagagauc

SEQ ID NO: 266104 - RNA, 32 nt, Human
uuaauuauacaacuccauuuuuguauuugcau

SEQ ID NO: 266105 - RNA, 32 nt, Human
uuaauuauaggagagaaagagagaaacuucag

SEQ ID NO: 266106 - RNA, 32 nt, Human
uuaauuauauuggcaaugaagcacuuucaaug

SEQ ID NO: 266107 - RNA, 32 nt, Human
uuaauuaucaagucuguuuugggaaacacuuu

SEQ ID NO: 266108 - RNA, 32 nt, Human
uuaauuaugagggagaaaauguuucucugcug

SEQ ID NO: 266109 - RNA, 32 nt, Human
uuaauuaugcacuuuguccucuggaccauuuu

SEQ ID NO: 266110 - RNA, 32 nt, Human
uuaauuauggcacaguaacaggaaaagguugu

SEQ ID NO: 266111 - RNA, 32 nt, Human
uuaauuauuguaaaaaguccaagcagaucaau

SEQ ID NO: 266112 - RNA, 32 nt, Human
uuaauucaacccagccaugcaaugccaaauaa

SEQ ID NO: 266113 - RNA, 32 nt, Human
uuaauucaacuccugagguccugaaggaacuu

SEQ ID NO: 266114 - RNA, 32 nt, Human
uuaauucacauuuccacuagcacuacacgaua

SEQ ID NO: 266115 - RNA, 32 nt, Human
uuaauucagcaacccucaguacauacuaagua

SEQ ID NO: 266116 - RNA, 32 nt, Human
uuaauucagccccucugaaaagcacauacagu

SEQ ID NO: 266117 - RNA, 32 nt, Human
uuaauucaugaggagggugggggagggaggug

SEQ ID NO: 266118 - RNA, 32 nt, Human
uuaauuccacacacaccacagagcugguuuua

SEQ ID NO: 266119 - RNA, 32 nt, Human
uuaauuccaccagcaaagcuggcgaggcaggg

SEQ ID NO: 266120 - RNA, 32 nt, Human
uuaauuccagagaauuuuuaucacccaaauaa

SEQ ID NO: 266121 - RNA, 32 nt, Human
uuaauuccaguaaaauaacagcaaugacaaug

SEQ ID NO: 266122 - RNA, 32 nt, Human
uuaauucccgccuuaugccucagucuauucug

SEQ ID NO: 266123 - RNA, 32 nt, Human
uuaauuccuacguacaugcgcccacaucucgu

SEQ ID NO: 266124 - RNA, 32 nt, Human
uuaauuccucuccaaucucuccuagcagcguc

SEQ ID NO: 266125 - RNA, 32 nt, Human
uuaauuccuggucuaguuuccugggccuugug

SEQ ID NO: 266126 - RNA, 32 nt, Human
uuaauuccuugcauagucucucuugucaaguc

SEQ ID NO: 266127 - RNA, 32 nt, Human
uuaauucucaacuacuguacucauuuaguaga

SEQ ID NO: 266128 - RNA, 32 nt, Human
uuaauucucaguugauacaaaggcuuauaauc

SEQ ID NO: 266129 - RNA, 32 nt, Human
uuaauucuccagccacuuuuggugccaacuua

SEQ ID NO: 266130 - RNA, 32 nt, Human
uuaauucugcugucugcucuucucuaaugcug

SEQ ID NO: 266131 - RNA, 32 nt, Human
uuaauucugggagaaaugagauaaaagaugua

SEQ ID NO: 266132 - RNA, 32 nt, Human
uuaauucugugcuaugucaauggcaguuuuca

SEQ ID NO: 266133 - RNA, 32 nt, Human
uuaauucuguuuagaugaucuguccauuguug

SEQ ID NO: 266134 - RNA, 32 nt, Human
uuaauucuuagcaagcuccuuguucucuacug

SEQ ID NO: 266135 - RNA, 32 nt, Human
uuaauucuucaaggacuuugacauuuguuuau

SEQ ID NO: 266136 - RNA, 32 nt, Human
uuaauucuucaguuauugaaaguagaguccaa

SEQ ID NO: 266137 - RNA, 32 nt, Human
uuaauucuugccuuauaccucagucuauuaug

SEQ ID NO: 266138 - RNA, 32 nt, Human
uuaauucuuguucuuugcaccucucucuccac

SEQ ID NO: 266139 - RNA, 32 nt, Human
uuaauugaaauccugggucucuuggccugucc

SEQ ID NO: 266140 - RNA, 32 nt, Human
uuaauugaagugagauuuuucuggccugagac

SEQ ID NO: 266141 - RNA, 32 nt, Human
uuaauugaauacuguuucuucagucaugguua

SEQ ID NO: 266142 - RNA, 32 nt, Human
uuaauugacucugccuagauaggucucauuaa

SEQ ID NO: 266143 - RNA, 32 nt, Human
uuaauugaugaaacugugcauaaguuuacaug

SEQ ID NO: 266144 - RNA, 32 nt, Human
uuaauugauuuuccuuugggguuccagauaau

SEQ ID NO: 266145 - RNA, 32 nt, Human
uuaauugcacauacagauguuugcuggguaua

SEQ ID NO: 266146 - RNA, 32 nt, Human
uuaauugccaaccaggaggaguugggcuguau

SEQ ID NO: 266147 - RNA, 32 nt, Human
uuaauugcuagcaaggcugagcacuuuuccau

SEQ ID NO: 266148 - RNA, 32 nt, Human
uuaauugcuugcucugcuaauauuucagcuuc

SEQ ID NO: 266149 - RNA, 32 nt, Human
uuaauuggauugauuauaauaccaccuuaagc

SEQ ID NO: 266150 - RNA, 32 nt, Human
uuaauuggcugacaguuuugcaggcuguacaa

SEQ ID NO: 266151 - RNA, 32 nt, Human
uuaauuggcuuggaaaggggucagcaggguga

SEQ ID NO: 266152 - RNA, 32 nt, Human
uuaauugguguuuucuuauugcacugaauuca

SEQ ID NO: 266153 - RNA, 32 nt, Human
uuaauuguaacugucaguuugcacuggucggu

SEQ ID NO: 266154 - RNA, 32 nt, Human
uuaauuguguaacuguucuuugcagugaagau

SEQ ID NO: 266155 - RNA, 32 nt, Human
uuaauuguguuuuagaacauccccggacacuc

SEQ ID NO: 266156 - RNA, 32 nt, Human
uuaauuguucucaaacauugcaagaaauucgu

SEQ ID NO: 266157 - RNA, 32 nt, Human
uuaauuguugaaugauuaagucucuaaguauc

SEQ ID NO: 266158 - RNA, 32 nt, Human
uuaauuguuggauagaaaaaucauuggauaga

SEQ ID NO: 266159 - RNA, 32 nt, Human
uuaauuguuggggagaggaggaugagcagaac

SEQ ID NO: 266160 - RNA, 32 nt, Human
uuaauuguuuucuuggcacucucucccuucuc

SEQ ID NO: 266161 - RNA, 32 nt, Human
uuaauuuaaaaagggaaccuuggagaauucuu

SEQ ID NO: 266162 - RNA, 32 nt, Human
uuaauuuaaagaaaaagaaaauuagcaguauc

SEQ ID NO: 266163 - RNA, 32 nt, Human
uuaauuuaaauacccaaccucuccaucacagc

SEQ ID NO: 266164 - RNA, 32 nt, Human
uuaauuuacauacuuguuuguagauucuguuu

SEQ ID NO: 266165 - RNA, 32 nt, Human
uuaauuuaugcucacaccuuacugcacagaaa

SEQ ID NO: 266166 - RNA, 32 nt, Human
uuaauuuaugugaaagaguucuggauucaaau

SEQ ID NO: 266167 - RNA, 32 nt, Human
uuaauuucaaaauauuugucauucaagucccu

SEQ ID NO: 266168 - RNA, 32 nt, Human
uuaauuucaaagaagacuuacaugggggagaa

SEQ ID NO: 266169 - RNA, 32 nt, Human
uuaauuucaccugaauaucauaaugcuuaaag

SEQ ID NO: 266170 - RNA, 32 nt, Human
uuaauuucagucuuggugguucuaucaggggu

SEQ ID NO: 266171 - RNA, 32 nt, Human
uuaauuucauguucacagcacuguguagagca

SEQ ID NO: 266172 - RNA, 31 nt, Human
uuaauuuccauaacuaaaguguucagacugg

SEQ ID NO: 266173 - RNA, 32 nt, Human
uuaauuuccuucucugcuucugaccaagcuaa

SEQ ID NO: 266174 - RNA, 32 nt, Human
uuaauuuccuuucugcaaauuaaaacuaauga

SEQ ID NO: 266175 - RNA, 32 nt, Human
uuaauuucugggcugcugagguucuagaauag

SEQ ID NO: 266176 - RNA, 32 nt, Human
uuaauuucuucuucuuuuccuuuuggcaaagc

SEQ ID NO: 266177 - RNA, 32 nt, Human
uuaauuucuuuucuauuccaucaucugcccuu

SEQ ID NO: 266178 - RNA, 32 nt, Human
uuaauuugcaccaguaaacuucaagcugcuuu

SEQ ID NO: 266179 - RNA, 32 nt, Human
uuaauuuguacaaaaagaacucuuuauaaggu

SEQ ID NO: 266180 - RNA, 32 nt, Human
uuaauuugucugaguccuggaccucagccuag

SEQ ID NO: 266181 - RNA, 32 nt, Human
uuaauuuuaaaaagucauaaaagcuuucaaac

SEQ ID NO: 266182 - RNA, 32 nt, Human
uuaauuuuagguuugaaauauauuugguaauc

SEQ ID NO: 266183 - RNA, 32 nt, Human
uuaauuuuaguguuguuucucacaucagcuuc

SEQ ID NO: 266184 - RNA, 32 nt, Human
uuaauuuuauauacaguaaaagccuggguugu

SEQ ID NO: 266185 - RNA, 32 nt, Human
uuaauuuuauucauuaucccuagauagcuauu

SEQ ID NO: 266186 - RNA, 32 nt, Human
uuaauuuuccagaaccaggaaugaguaucuaa

SEQ ID NO: 266187 - RNA, 32 nt, Human
uuaauuuuccugaagcuugcaggauagauuga

SEQ ID NO: 266188 - RNA, 32 nt, Human
uuaauuuucuauccucccuuacuauccuccuu

SEQ ID NO: 266189 - RNA, 32 nt, Human
uuaauuuucucauucuguugcuguugaacgua

SEQ ID NO: 266190 - RNA, 21 nt, Human
uuaauuuuguaucuacugaua

SEQ ID NO: 266191 - RNA, 32 nt, Human
uuaauuuugucuuccucacuuuucaccuuagu

SEQ ID NO: 266192 - RNA, 32 nt, Human
uuaauuuuguugaagcauuucaagaugagcua

SEQ ID NO: 266193 - RNA, 32 nt, Human
uuaauuuuuauuacugaaaaacauggaaauca

SEQ ID NO: 266194 - RNA, 32 nt, Human
uuaauuuuugagacagagucucgcucugucgc

SEQ ID NO: 266195 - RNA, 32 nt, Human
uuacaaaaauaacacuaaacucucaacacuuu

SEQ ID NO: 266196 - RNA, 32 nt, Human
uuacaaaaaugcuuacaauccaggcauucuuu

SEQ ID NO: 266197 - RNA, 32 nt, Human
uuacaaaaauuagccgagcaugguggcgcaug

SEQ ID NO: 266198 - RNA, 32 nt, Human
uuacaaaaauuagccggccaugguggcaggug

SEQ ID NO: 266199 - RNA, 32 nt, Human
uuacaaaaauuagccgggcaugguggcacaug

SEQ ID NO: 266200 - RNA, 32 nt, Human
uuacaaaaauuagcugcgugugguggcaggcc

SEQ ID NO: 266201 - RNA, 32 nt, Human
uuacaaaaauuagcuggcaugguggugcaugc

SEQ ID NO: 266202 - RNA, 32 nt, Human
uuacaaaacguuagaaaaauuagccaggugug

SEQ ID NO: 266203 - RNA, 32 nt, Human
uuacaaaagaaaaggaccagauugaggcagcg

SEQ ID NO: 266204 - RNA, 32 nt, Human
uuacaaaagauaaucaaaagcaugaaagcacu

SEQ ID NO: 266205 - RNA, 32 nt, Human
uuacaaaaggaaacccagagcagcuugaugag

SEQ ID NO: 266206 - RNA, 32 nt, Human
uuacaaaauugcuggcugggugcaguggcuua

SEQ ID NO: 266207 - RNA, 32 nt, Human
uuacaaacagaagaguagcaucagagcccuga

SEQ ID NO: 266208 - RNA, 32 nt, Human
uuacaaaccaaaauuauuuuacagcaacgaaa

SEQ ID NO: 266209 - RNA, 32 nt, Human
uuacaaacgggaccauauuuugcuucgaaaug

SEQ ID NO: 266210 - RNA, 32 nt, Human
uuacaaacuauguauaguauguauguuuugug

SEQ ID NO: 266211 - RNA, 32 nt, Human
uuacaaacugguuuuaaauauuggacauacug

SEQ ID NO: 266212 - RNA, 32 nt, Human
uuacaaagagcaauuuugagcugugacuuuuu

SEQ ID NO: 266213 - RNA, 32 nt, Human
uuacaaaggaacaaagaagggaaaagguauuu

SEQ ID NO: 266214 - RNA, 32 nt, Human
uuacaaaggugaaacccaggaggagagugugg

SEQ ID NO: 266215 - RNA, 32 nt, Human
uuacaaauccacugcuaucuucuucuguccug

SEQ ID NO: 266216 - RNA, 32 nt, Human
uuacaaaucuggucaaaacaccuguccauuuc

SEQ ID NO: 266217 - RNA, 32 nt, Human
uuacaaaugaaagaaggccaaaagccacuuua

SEQ ID NO: 266218 - RNA, 32 nt, Human
uuacaaaugcugacugaacacuagcauaccug

SEQ ID NO: 266219 - RNA, 32 nt, Human
uuacaaccaagaaauaauaguaugaagcggau

SEQ ID NO: 266220 - RNA, 32 nt, Human
uuacaaccagcccagccuaggauauggacaga

SEQ ID NO: 266221 - RNA, 32 nt, Human
uuacaacgugacaggaagaggagggagagggu

SEQ ID NO: 266222 - RNA, 32 nt, Human
uuacaacuaaaacugaccagagccccaggaau

SEQ ID NO: 266223 - RNA, 32 nt, Human
uuacaacuauuguucucauauuucucacacua

SEQ ID NO: 266224 - RNA, 32 nt, Human
uuacaacugaccaaaguggcccccucuggggg

SEQ ID NO: 266225 - RNA, 32 nt, Human
uuacaacugaguucugucuggcccagaaccag

SEQ ID NO: 266226 - RNA, 32 nt, Human
uuacaacugccuguucuuucuccaguccuuuu

SEQ ID NO: 266227 - RNA, 32 nt, Human
uuacaacuuacaggaacauuuguacuuuaaga

SEQ ID NO: 266228 - RNA, 32 nt, Human
uuacaacuuauccccacucauuggagugaaca

SEQ ID NO: 266229 - RNA, 32 nt, Human
uuacaacuucagaccggagaaaaggccagagg

SEQ ID NO: 266230 - RNA, 32 nt, Human
uuacaagaagugaaacugcaaguucacuuugc

SEQ ID NO: 266231 - RNA, 32 nt, Human
uuacaagacauagcuaaugagguugcuguaua

SEQ ID NO: 266232 - RNA, 32 nt, Human
uuacaagaggcugaaauugagcaaucagauac

SEQ ID NO: 266233 - RNA, 32 nt, Human
uuacaagagguggagcaugcagaugagcaggu

SEQ ID NO: 266234 - RNA, 32 nt, Human
uuacaagcaaagcaguuccacccaugaccaau

SEQ ID NO: 266235 - RNA, 24 nt, Human
uuacaagcaccagccaccaugccu

SEQ ID NO: 266236 - RNA, 32 nt, Human
uuacaagcaguuuccuuauagcucauguaucu

SEQ ID NO: 266237 - RNA, 24 nt, Human
uuacaagcaugagccaccaugccc

SEQ ID NO: 266238 - RNA, 24 nt, Human
uuacaagcaugcaccaccaugccc

SEQ ID NO: 266239 - RNA, 24 nt, Human
uuacaagcaugcgccaccaugccc

SEQ ID NO: 266240 - RNA, 31 nt, Human
uuacaagcaugcgucaccacagcaggcccaa

SEQ ID NO: 266241 - RNA, 32 nt, Human
uuacaagcgugagccaccacacuaggccuuua

SEQ ID NO: 266242 - RNA, 32 nt, Human
uuacaagcuggacucagggauccuccuggccg

SEQ ID NO: 266243 - RNA, 32 nt, Human
uuacaagcuggacucagggauccuccugggcg

SEQ ID NO: 266244 - RNA, 32 nt, Human
uuacaaggcagcagcaagagaaaaugaggaag

SEQ ID NO: 266245 - RNA, 24 nt, Human
uuacaagggugagccaccaugccc

SEQ ID NO: 266246 - RNA, 32 nt, Human
uuacaaggguguuacugaaaucuggaaggcga

SEQ ID NO: 266247 - RNA, 32 nt, Human
uuacaaguacuguucuaaauguuaacaccugu

SEQ ID NO: 266248 - RNA, 32 nt, Human
uuacaagucagccuaccucucugugaucuggu

SEQ ID NO: 266249 - RNA, 24 nt, Human
uuacaagugcccaccaccaugccc

SEQ ID NO: 266250 - RNA, 32 nt, Human
uuacaaguucccaaaguaaccgucuccaugua

SEQ ID NO: 266251 - RNA, 32 nt, Human
uuacaaguuucagugagaagaauuggaacuuu

SEQ ID NO: 266252 - RNA, 32 nt, Human
uuacaauaagugucugcaggaggaguguccug

SEQ ID NO: 266253 - RNA, 32 nt, Human
uuacaauauuuaaguucucugcuucugcauuu

SEQ ID NO: 266254 - RNA, 32 nt, Human
uuacaaucaaccugcacugagcacuuugugcg

SEQ ID NO: 266255 - RNA, 21 nt, Human
uuacaauccucaaaacuucuu

SEQ ID NO: 266256 - RNA, 32 nt, Human
uuacaaucuccacaaugaaaacaaauagugca

SEQ ID NO: 266257 - RNA, 32 nt, Human
uuacaaucucucucccgucauccacacugaau

SEQ ID NO: 266258 - RNA, 32 nt, Human
uuacaaugacauccuccuccuccaucacucca

SEQ ID NO: 266259 - RNA, 32 nt, Human
uuacaauguuugucccauuucuaagggcuucu

SEQ ID NO: 266260 - RNA, 32 nt, Human
uuacaauucaacuacuuguucuacccagcauu

SEQ ID NO: 266261 - RNA, 32 nt, Human
uuacaauucuaagcugcaucccuguaucaaaa

SEQ ID NO: 266262 - RNA, 32 nt, Human
uuacaauuucucagguaaacaauuguuuucuc

SEQ ID NO: 266263 - RNA, 24 nt, Human
uuacacaaaaauuauuuccagaaa

SEQ ID NO: 266264 - RNA, 32 nt, Human
uuacacaaacaaucucggccuggguaaaugag

SEQ ID NO: 266265 - RNA, 32 nt, Human
uuacacaaauuauaaaaauuagucggguguca

SEQ ID NO: 266266 - RNA, 32 nt, Human
uuacacaacugauccgugugugaggugggagu

SEQ ID NO: 266267 - RNA, 32 nt, Human
uuacacaaggaaauguguggcuuuuguuuugu

SEQ ID NO: 266268 - RNA, 32 nt, Human
uuacacacaucuggacuuucagaucugaaacg

SEQ ID NO: 266269 - RNA, 32 nt, Human
uuacacaccgaaggaauugaaauaaguuacca

SEQ ID NO: 266270 - RNA, 32 nt, Human
uuacacacuuccuauuuagcaaugagcacacc

SEQ ID NO: 266271 - RNA, 32 nt, Human
uuacacacuuuccuguucauagcaauauuaaa

SEQ ID NO: 266272 - RNA, 32 nt, Human
uuacacagacacacaaaugcaccuauuuauac

SEQ ID NO: 266273 - RNA, 32 nt, Human
uuacacagcaaggacugcugugugugggugug

SEQ ID NO: 266274 - RNA, 32 nt, Human
uuacacagcuggucaguagcagacacaagauc

SEQ ID NO: 266275 - RNA, 32 nt, Human
uuacacaguuuccuguaucauaaauccuagug

SEQ ID NO: 266276 - RNA, 32 nt, Human
uuacacaguuuuuaccucccuguauggcaauu

SEQ ID NO: 266277 - RNA, 32 nt, Human
uuacacaucuuacugucaaucuugccuacauu

SEQ ID NO: 266278 - RNA, 32 nt, Human
uuacacaugcuggaaugacuguaauuacucua

SEQ ID NO: 266279 - RNA, 32 nt, Human
uuacacauggacucaaagaagggaacaguaga

SEQ ID NO: 266280 - RNA, 32 nt, Human
uuacacauucgggccugaaaacaaauaugacc

SEQ ID NO: 266281 - RNA, 32 nt, Human
uuacacauucucacaauuguaaaguuuccccu

SEQ ID NO: 266282 - RNA, 32 nt, Human
uuacacauuuucucagaggccuuugugcuccc

SEQ ID NO: 266283 - RNA, 32 nt, Human
uuacaccacugcacuccagucuggaugacaaa

SEQ ID NO: 266284 - RNA, 32 nt, Human
uuacaccacugcacuucagucugugugacuga

SEQ ID NO: 266285 - RNA, 32 nt, Human
uuacaccacugcacuugagccugggcagcaga

SEQ ID NO: 266286 - RNA, 32 nt, Human
uuacaccaguaaucccagcacuuugggaggcu

SEQ ID NO: 266287 - RNA, 32 nt, Human
uuacaccauacagcucaaacuucagaagauuu

SEQ ID NO: 266288 - RNA, 32 nt, Human
uuacaccauugcauuccagccuaggcaacaga

SEQ ID NO: 266289 - RNA, 32 nt, Human
uuacaccauugcauuccagccugggcaacaga

SEQ ID NO: 266290 - RNA, 32 nt, Human
uuacaccauuugcugcucacacuuucugccuu

SEQ ID NO: 266291 - RNA, 32 nt, Human
uuacacccaaguguccugguuaacuugaagca

SEQ ID NO: 266292 - RNA, 32 nt, Human
uuacacccagaacugucucagaggagguucaa

SEQ ID NO: 266293 - RNA, 32 nt, Human
uuacacccagagcguccagaucugccacauag

SEQ ID NO: 266294 - RNA, 32 nt, Human
uuacacccagagguggagcagguggcuuaggg

SEQ ID NO: 266295 - RNA, 32 nt, Human
uuacaccccugcacuccagccugggcggcaga

SEQ ID NO: 266296 - RNA, 32 nt, Human
uuacaccccuggacuccagcuugggugacaca

SEQ ID NO: 266297 - RNA, 32 nt, Human
uuacacccuuguucugucaaagcaauuaaaga

SEQ ID NO: 266298 - RNA, 32 nt, Human
uuacaccuacucagaugaggcagcagcagacc

SEQ ID NO: 266299 - RNA, 32 nt, Human
uuacaccuauaaucccagcaauuugggaggcc

SEQ ID NO: 266300 - RNA, 32 nt, Human
uuacaccuauaaucccagcacuuugggaggcu

SEQ ID NO: 266301 - RNA, 32 nt, Human
uuacaccuccacucagcacucuggacuccacg

SEQ ID NO: 266302 - RNA, 32 nt, Human
uuacaccucuugcugguuugagacgucaauca

SEQ ID NO: 266303 - RNA, 32 nt, Human
uuacaccugagauaaauaauaagcuuagagug

SEQ ID NO: 266304 - RNA, 32 nt, Human
uuacaccugcauguccuuugcauuucagauuc

SEQ ID NO: 266305 - RNA, 32 nt, Human
uuacaccugccuguccuuccugggccccuccu

SEQ ID NO: 266306 - RNA, 32 nt, Human
uuacaccuggacaguagacagggacuucagag

SEQ ID NO: 266307 - RNA, 32 nt, Human
uuacaccuguaaccccagcacuuugggaggcu

SEQ ID NO: 266308 - RNA, 32 nt, Human
uuacaccuguaacccuggcauuuugggaggcc

SEQ ID NO: 266309 - RNA, 32 nt, Human
uuacaccuguaaucccaacacuuugcgaggcc

SEQ ID NO: 266310 - RNA, 32 nt, Human
uuacaccuguaaucccaacacuuugggaagcc

SEQ ID NO: 266311 - RNA, 32 nt, Human
uuacaccuguaaucccagcacuuugggaggcc

SEQ ID NO: 266312 - RNA, 32 nt, Human
uuacaccuguaaucccagcacuuugggaggcu

SEQ ID NO: 266313 - RNA, 32 nt, Human
uuacaccuguaaucccagcuacucaggagggu

SEQ ID NO: 266314 - RNA, 32 nt, Human
uuacaccuguaaucccaguacuuugggaggcc

SEQ ID NO: 266315 - RNA, 32 nt, Human
uuacaccuguaauccuaguacuuugggaggcu

SEQ ID NO: 266316 - RNA, 32 nt, Human
uuacaccuguaaucgcagcauuuugggaggcc

SEQ ID NO: 266317 - RNA, 32 nt, Human
uuacaccuguaaucugagcgcuuugggaggcc

SEQ ID NO: 266318 - RNA, 32 nt, Human
uuacaccuguaauuccagcacuuugggacgcc

SEQ ID NO: 266319 - RNA, 32 nt, Human
uuacaccuguagucccaggcacuuugggaggc

SEQ ID NO: 266320 - RNA, 32 nt, Human
uuacaccugugaucccagcacuuugggaggcc

SEQ ID NO: 266321 - RNA, 32 nt, Human
uuacaccuucauucucuccagcauccucggca

SEQ ID NO: 266322 - RNA, 32 nt, Human
uuacaccuugggcuuggauauugcccagagaa

SEQ ID NO: 266323 - RNA, 32 nt, Human
uuacacgaaagccacagaguugaaagccacag

SEQ ID NO: 266324 - RNA, 32 nt, Human
uuacacgacggcggggacugaggucccucgca

SEQ ID NO: 266325 - RNA, 32 nt, Human
uuacacgauucagccuuagaacugggggcaug

SEQ ID NO: 266326 - RNA, 32 nt, Human
uuacacggcaggcugaggugggaggaucacuu

SEQ ID NO: 266327 - RNA, 32 nt, Human
uuacacgggagaggagaauggauuuauaaaga

SEQ ID NO: 266328 - RNA, 32 nt, Human
uuacacgugaauucuggucuauaguggucaug

SEQ ID NO: 266329 - RNA, 32 nt, Human
uuacacgugccuguagucccagcuacucuaua

SEQ ID NO: 266330 - RNA, 21 nt, Human
uuacacguuuaaaaacuucuu

SEQ ID NO: 266331 - RNA, 26 nt, Human
uuacacuaagccucucucugucuuug

SEQ ID NO: 266332 - RNA, 32 nt, Human
uuacacuauuccucaucacccaacuaaaaaua

SEQ ID NO: 266333 - RNA, 32 nt, Human
uuacacucaggaguucaagaccagucugggca

SEQ ID NO: 266334 - RNA, 32 nt, Human
uuacacucaugaguaaaagcacuccagacauu

SEQ ID NO: 266335 - RNA, 32 nt, Human
uuacacuccagccuggauaacagagcgagacc

SEQ ID NO: 266336 - RNA, 32 nt, Human
uuacacuccagccuggcugacagugcaagacu

SEQ ID NO: 266337 - RNA, 32 nt, Human
uuacacuccagccugggcaacagagcgagacu

SEQ ID NO: 266338 - RNA, 32 nt, Human
uuacacuccagccugggcaacagcguaagacc

SEQ ID NO: 266339 - RNA, 32 nt, Human
uuacacuccagccugggcaacagugacacucu

SEQ ID NO: 266340 - RNA, 32 nt, Human
uuacacuccagccugggugacagagugagacu

SEQ ID NO: 266341 - RNA, 32 nt, Human
uuacacucccaaauugcaggcuuuauuuaaag

SEQ ID NO: 266342 - RNA, 32 nt, Human
uuacacucgggccucagaaguccgugccagug

SEQ ID NO: 266343 - RNA, 32 nt, Human
uuacacucuagaaacccacaggccugggaacu

SEQ ID NO: 266344 - RNA, 32 nt, Human
uuacacugaaacgggaguguucccuggccccu

SEQ ID NO: 266345 - RNA, 32 nt, Human
uuacacugaagcugcaucuauaugucacugac

SEQ ID NO: 266346 - RNA, 32 nt, Human
uuacacugaggugaggcuacaaggggugugua

SEQ ID NO: 266347 - RNA, 32 nt, Human
uuacacuggaggugggggacgggaagggacug

SEQ ID NO: 266348 - RNA, 32 nt, Human
uuacacugggaaaguuuguagaaauuuuaaaa

SEQ ID NO: 266349 - RNA, 32 nt, Human
uuacacugggaaaguuuguggaaauuuuaaaa

SEQ ID NO: 266350 - RNA, 32 nt, Human
uuacacugguaaaauaaacuaguuuuucccau

SEQ ID NO: 266351 - RNA, 32 nt, Human
uuacacuguaccauauagcaaaacuuuuaaac

SEQ ID NO: 266352 - RNA, 32 nt, Human
uuacacugugugaccugcagggcaugagguau

SEQ ID NO: 266353 - RNA, 32 nt, Human
uuacacuuaacuccuucuugcuccacagccua

SEQ ID NO: 266354 - RNA, 32 nt, Human
uuacacuugguugacuacuccggagcagccac

SEQ ID NO: 266355 - RNA, 32 nt, Human
uuacacuuguaacccuagaacuugggaggcug

SEQ ID NO: 266356 - RNA, 32 nt, Human
uuacagaaacuugcccugugccuguguccccc

SEQ ID NO: 266357 - RNA, 32 nt, Human
uuacagaaagaaugggggcuuggggccugagc

SEQ ID NO: 266358 - RNA, 24 nt, Human
uuacagaaagauacccucuccaga

SEQ ID NO: 266359 - RNA, 32 nt, Human
uuacagaacuauucaaagaagcucacagaugg

SEQ ID NO: 266360 - RNA, 32 nt, Human
uuacagaauagcacuucugauaagcuguauua

SEQ ID NO: 266361 - RNA, 32 nt, Human
uuacagacacagaaaaugucagacaacaaaga

SEQ ID NO: 266362 - RNA, 21 nt, Human
uuacagacaugccaccaugcc

SEQ ID NO: 266363 - RNA, 32 nt, Human
uuacagaccagccagccaccauucugcuugcc

SEQ ID NO: 266364 - RNA, 32 nt, Human
uuacagaccuaguuacugggaauucauuacuu

SEQ ID NO: 266365 - RNA, 32 nt, Human
uuacagacugaagggaagcauguccuuacuua

SEQ ID NO: 266366 - RNA, 31 nt, Human
uuacagagaaaccuacaacagaugcuugaug

SEQ ID NO: 266367 - RNA, 32 nt, Human
uuacagagacuggagucaggagagagcaggag

SEQ ID NO: 266368 - RNA, 32 nt, Human
uuacagagccucacaguuacaguuccaagaag

SEQ ID NO: 266369 - RNA, 32 nt, Human
uuacagaggcagaagcaagcucagggagggua

SEQ ID NO: 266370 - RNA, 32 nt, Human
uuacagagucaaaucacuucccaguaaacacc

SEQ ID NO: 266371 - RNA, 32 nt, Human
uuacagagugugagccaccacacccagccagc

SEQ ID NO: 266372 - RNA, 32 nt, Human
uuacagaugagaaaguugaggcuugggaacau

SEQ ID NO: 266373 - RNA, 32 nt, Human
uuacagaugaggaaauggaggugguccagaga

SEQ ID NO: 266374 - RNA, 32 nt, Human
uuacagcaaauugaucuaaaagccacuaauaa

SEQ ID NO: 266375 - RNA, 32 nt, Human
uuacagcaauauugccuucacaguuauaaacu

SEQ ID NO: 266376 - RNA, 32 nt, Human
uuacagcacagaugccauuagaaugugaauug

SEQ ID NO: 266377 - RNA, 32 nt, Human
uuacagcaccagaacccucagcaguugucugc

SEQ ID NO: 266378 - RNA, 32 nt, Human
uuacagcaggaaaauccguggagacagcagau

SEQ ID NO: 266379 - RNA, 32 nt, Human
uuacagcaggugauucagcuacuugaggucgg

SEQ ID NO: 266380 - RNA, 32 nt, Human
uuacagccacacacacagucacacagacgcgu

SEQ ID NO: 266381 - RNA, 32 nt, Human
uuacagccagaccucuggcugcagaggagucu

SEQ ID NO: 266382 - RNA, 32 nt, Human
uuacagccauucuaugaaaaaguguucggaau

SEQ ID NO: 266383 - RNA, 32 nt, Human
uuacagcccauuaggauguguaaagagauggg

SEQ ID NO: 266384 - RNA, 32 nt, Human
uuacagccucugacuuaagcugccucaaggaa

SEQ ID NO: 266385 - RNA, 32 nt, Human
uuacagccugcucuugccuauuaccauaccag

SEQ ID NO: 266386 - RNA, 32 nt, Human
uuacagcgugagccaccgcacccagccgcuug

SEQ ID NO: 266387 - RNA, 32 nt, Human
uuacagcgugagcuaccuggccccuccccaaa

SEQ ID NO: 266388 - RNA, 32 nt, Human
uuacagcuaagcuguaguugcagaguacaugu

SEQ ID NO: 266389 - RNA, 32 nt, Human
uuacagcucugcccugaccccagccccugccc

SEQ ID NO: 266390 - RNA, 32 nt, Human
uuacagcugaaauggaaccaaauguuuguuuu

SEQ ID NO: 266391 - RNA, 32 nt, Human
uuacagcugguucugagccgcuugccuuguga

SEQ ID NO: 266392 - RNA, 32 nt, Human
uuacagcuguugcaacagcagaacuagaauuc

SEQ ID NO: 266393 - RNA, 20 nt, Human
uuacaggaaauggugccuuu

SEQ ID NO: 266394 - RNA, 32 nt, Human
uuacaggaacugagguccagagaggacaugga

SEQ ID NO: 266395 - RNA, 32 nt, Human
uuacaggaagccucucauagaaauugccucca

SEQ ID NO: 266396 - RNA, 32 nt, Human
uuacaggacucugccagcuuuguuaaacuguc

SEQ ID NO: 266397 - RNA, 22 nt, Human
uuacaggagguguccuagccuu

SEQ ID NO: 266398 - RNA, 24 nt, Human
uuacaggagugagccaccaugccc

SEQ ID NO: 266399 - RNA, 32 nt, Human
uuacaggauccccagaaagcuguugaauaagc

SEQ ID NO: 266400 - RNA, 32 nt, Human
uuacaggaugagccacugagcccagcugacuc

SEQ ID NO: 266401 - RNA, 32 nt, Human
uuacaggauugugugaggauugagacugacac

SEQ ID NO: 266402 - RNA, 24 nt, Human
uuacaggcaaacgccaccacaccc

SEQ ID NO: 266403 - RNA, 22 nt, Human
uuacaggcaacugccaccaugc

SEQ ID NO: 266404 - RNA, 24 nt, Human
uuacaggcaacugccaccaugccc

SEQ ID NO: 266405 - RNA, 24 nt, Human
uuacaggcaagagccuccacgccc

SEQ ID NO: 266406 - RNA, 24 nt, Human
uuacaggcaagcaccaccaugccu

SEQ ID NO: 266407 - RNA, 32 nt, Human
uuacaggcaaggacacagcagcugcgagaggu

SEQ ID NO: 266408 - RNA, 32 nt, Human
uuacaggcacaaaaugauggacccaaugcaca

SEQ ID NO: 266409 - RNA, 24 nt, Human
uuacaggcacaaaccaccaugccu

SEQ ID NO: 266410 - RNA, 24 nt, Human
uuacaggcacaagccaccgugccc

SEQ ID NO: 266411 - RNA, 23 nt, Human
uuacaggcacaagcugcugcacc

SEQ ID NO: 266412 - RNA, 24 nt, Human
uuacaggcacacacaaccacgccc

SEQ ID NO: 266413 - RNA, 32 nt, Human
uuacaggcacacacaaccacgcccagcuaauu

SEQ ID NO: 266414 - RNA, 32 nt, Human
uuacaggcacacacagacacagaccagagacu

SEQ ID NO: 266415 - RNA, 32 nt, Human
uuacaggcacacaccaccacaccuggcccagc

SEQ ID NO: 266416 - RNA, 24 nt, Human
uuacaggcacacaccaccacgccc

SEQ ID NO: 266417 - RNA, 32 nt, Human
uuacaggcacacaccaccacgcccagcuaauu

SEQ ID NO: 266418 - RNA, 32 nt, Human
uuacaggcacacaccaccacgcccagcuaguu

SEQ ID NO: 266419 - RNA, 32 nt, Human
uuacaggcacacaccaccacgccuggcuaauu

SEQ ID NO: 266420 - RNA, 24 nt, Human
uuacaggcacacaccaccauaccu

SEQ ID NO: 266421 - RNA, 32 nt, Human
uuacaggcacacaccaccauaccuggcuaauu

SEQ ID NO: 266422 - RNA, 24 nt, Human
uuacaggcacacaccaccaugccc

SEQ ID NO: 266423 - RNA, 24 nt, Human
uuacaggcacacacuaccacgccu

SEQ ID NO: 266424 - RNA, 32 nt, Human
uuacaggcacacacuaccacgccuggcuaauu

SEQ ID NO: 266425 - RNA, 24 nt, Human
uuacaggcacacgacaccaugccu

SEQ ID NO: 266426 - RNA, 24 nt, Human
uuacaggcacacgccaccacaccc

SEQ ID NO: 266427 - RNA, 24 nt, Human
uuacaggcacacgccaccaugccc

SEQ ID NO: 266428 - RNA, 24 nt, Human
uuacaggcacaggccgccacgccc

SEQ ID NO: 266429 - RNA, 24 nt, Human
uuacaggcacaugccaccacaccc

SEQ ID NO: 266430 - RNA, 24 nt, Human
uuacaggcacaugccaccacgccc

SEQ ID NO: 266431 - RNA, 24 nt, Human
uuacaggcacaugccaccaugccc

SEQ ID NO: 266432 - RNA, 24 nt, Human
uuacaggcacaugccaccaugcuc

SEQ ID NO: 266433 - RNA, 24 nt, Human
uuacaggcaccagccaccaugccu

SEQ ID NO: 266434 - RNA, 24 nt, Human
uuacaggcacccaccaccacaccc

SEQ ID NO: 266435 - RNA, 32 nt, Human
uuacaggcacccaccaccacacccagcucauu

SEQ ID NO: 266436 - RNA, 24 nt, Human
uuacaggcacccaccaccacgccu

SEQ ID NO: 266437 - RNA, 24 nt, Human
uuacaggcacccaccaccacgucc

SEQ ID NO: 266438 - RNA, 24 nt, Human
uuacaggcacccaccaccaugccc

SEQ ID NO: 266439 - RNA, 24 nt, Human
uuacaggcacccaccaccaugccu

SEQ ID NO: 266440 - RNA, 24 nt, Human
uuacaggcacccaccacuaugccc

SEQ ID NO: 266441 - RNA, 24 nt, Human
uuacaggcacccacgaccacgcuc

SEQ ID NO: 266442 - RNA, 24 nt, Human
uuacaggcacccacgagcaugccc

SEQ ID NO: 266443 - RNA, 24 nt, Human
uuacaggcacccaucaccacaccc

SEQ ID NO: 266444 - RNA, 32 nt, Human
uuacaggcacccaucaccacacccagcuaauu

SEQ ID NO: 266445 - RNA, 24 nt, Human
uuacaggcaccccccaccaugcuc

SEQ ID NO: 266446 - RNA, 24 nt, Human
uuacaggcacccgccaccacgccc

SEQ ID NO: 266447 - RNA, 24 nt, Human
uuacaggcacccgccaccgugccc

SEQ ID NO: 266448 - RNA, 24 nt, Human
uuacaggcaccuaccaccuugccc

SEQ ID NO: 266449 - RNA, 24 nt, Human
uuacaggcaccugccaccacgccc

SEQ ID NO: 266450 - RNA, 24 nt, Human
uuacaggcaccugccaccacgccu

SEQ ID NO: 266451 - RNA, 24 nt, Human
uuacaggcaccugccaccaugccc

SEQ ID NO: 266452 - RNA, 24 nt, Human
uuacaggcaccugccaccaugccu

SEQ ID NO: 266453 - RNA, 24 nt, Human
uuacaggcaccugccacuaugccc

SEQ ID NO: 266454 - RNA, 24 nt, Human
uuacaggcaccugucaccacaccc

SEQ ID NO: 266455 - RNA, 24 nt, Human
uuacaggcacgcaccaccaugccu

SEQ ID NO: 266456 - RNA, 32 nt, Human
uuacaggcacgcuccaccacacccagcuaauu

SEQ ID NO: 266457 - RNA, 23 nt, Human
uuacaggcacgggccaccagccc

SEQ ID NO: 266458 - RNA, 24 nt, Human
uuacaggcacguaccaccacgccu

SEQ ID NO: 266459 - RNA, 24 nt, Human
uuacaggcacgugccaccacgccc

SEQ ID NO: 266460 - RNA, 24 nt, Human
uuacaggcacuugccaccauuccc

SEQ ID NO: 266461 - RNA, 32 nt, Human
uuacaggcaggcaggggugguuggugucaaca

SEQ ID NO: 266462 - RNA, 24 nt, Human
uuacaggcauaagacaccaugccu

SEQ ID NO: 266463 - RNA, 22 nt, Human
uuacaggcauaagcauugcgcc

SEQ ID NO: 266464 - RNA, 24 nt, Human
uuacaggcauaagccaccgcgccc

SEQ ID NO: 266465 - RNA, 24 nt, Human
uuacaggcauaagccacugagccc

SEQ ID NO: 266466 - RNA, 23 nt, Human
uuacaggcauaagccacugcacc

SEQ ID NO: 266467 - RNA, 24 nt, Human
uuacaggcauacuccaccuugccc

SEQ ID NO: 266468 - RNA, 24 nt, Human
uuacaggcauaugccaccaccccc

SEQ ID NO: 266469 - RNA, 24 nt, Human
uuacaggcaucagccaccacaccc

SEQ ID NO: 266470 - RNA, 24 nt, Human
uuacaggcaucagccaccacaccu

SEQ ID NO: 266471 - RNA, 24 nt, Human
uuacaggcauccgccaccaugccc

SEQ ID NO: 266472 - RNA, 21 nt, Human
uuacaggcaucgcccaugcuc

SEQ ID NO: 266473 - RNA, 25 nt, Human
uuacaggcaucugccaaccaugccu

SEQ ID NO: 266474 - RNA, 24 nt, Human
uuacaggcaucugcuaccacgccu

SEQ ID NO: 266475 - RNA, 24 nt, Human
uuacaggcaugaaccaccgugccc

SEQ ID NO: 266476 - RNA, 24 nt, Human
uuacaggcaugaaucaccaugccu

SEQ ID NO: 266477 - RNA, 24 nt, Human
uuacaggcaugagccaccaaaccc

SEQ ID NO: 266478 - RNA, 24 nt, Human
uuacaggcaugagccaccaagccc

SEQ ID NO: 266479 - RNA, 24 nt, Human
uuacaggcaugagccaccacaccc

SEQ ID NO: 266480 - RNA, 24 nt, Human
uuacaggcaugagccaccacaccu

SEQ ID NO: 266481 - RNA, 24 nt, Human
uuacaggcaugagccaccacaucc

SEQ ID NO: 266482 - RNA, 23 nt, Human
uuacaggcaugagccaccacgcc

SEQ ID NO: 266483 - RNA, 24 nt, Human
uuacaggcaugagccaccacgccc

SEQ ID NO: 266484 - RNA, 24 nt, Human
uuacaggcaugagccaccacgccu

SEQ ID NO: 266485 - RNA, 24 nt, Human
uuacaggcaugagccaccacggcc

SEQ ID NO: 266486 - RNA, 23 nt, Human
uuacaggcaugagccaccaugcc

SEQ ID NO: 266487 - RNA, 24 nt, Human
uuacaggcaugagccaccaugccc

SEQ ID NO: 266488 - RNA, 24 nt, Human
uuacaggcaugagccaccaugccu

SEQ ID NO: 266489 - RNA, 24 nt, Human
uuacaggcaugagccaccgcaccc

SEQ ID NO: 266490 - RNA, 24 nt, Human
uuacaggcaugagccaccgcgccc

SEQ ID NO: 266491 - RNA, 24 nt, Human
uuacaggcaugagccaccgugccc

SEQ ID NO: 266492 - RNA, 24 nt, Human
uuacaggcaugagccaccucaccc

SEQ ID NO: 266493 - RNA, 24 nt, Human
uuacaggcaugagccaccucgccc

SEQ ID NO: 266494 - RNA, 23 nt, Human
uuacaggcaugagccaccugccc

SEQ ID NO: 266495 - RNA, 32 nt, Human
uuacaggcaugagccaccugcccagccauguu

SEQ ID NO: 266496 - RNA, 24 nt, Human
uuacaggcaugagccacuacaccc

SEQ ID NO: 266497 - RNA, 22 nt, Human
uuacaggcaugagccaucgccc

SEQ ID NO: 266498 - RNA, 24 nt, Human
uuacaggcaugagcuaccacgccu

SEQ ID NO: 266499 - RNA, 24 nt, Human
uuacaggcaugagcuacuaugccc

SEQ ID NO: 266500 - RNA, 24 nt, Human
uuacaggcaugagucaccauaucc

SEQ ID NO: 266501 - RNA, 24 nt, Human
uuacaggcaugagucacuacgccc

SEQ ID NO: 266502 - RNA, 24 nt, Human
uuacaggcaugcacaaccacaccc

SEQ ID NO: 266503 - RNA, 32 nt, Human
uuacaggcaugcaccaccacacacagcuaagu

SEQ ID NO: 266504 - RNA, 23 nt, Human
uuacaggcaugcaccaccacacc

SEQ ID NO: 266505 - RNA, 32 nt, Human
uuacaggcaugcaccaccacaccaggcuaauu

SEQ ID NO: 266506 - RNA, 24 nt, Human
uuacaggcaugcaccaccacaccc

SEQ ID NO: 266507 - RNA, 24 nt, Human
uuacaggcaugcaccaccacaccu

SEQ ID NO: 266508 - RNA, 24 nt, Human
uuacaggcaugcaccaccacacuc

SEQ ID NO: 266509 - RNA, 24 nt, Human
uuacaggcaugcaccaccacagcc

SEQ ID NO: 266510 - RNA, 24 nt, Human
uuacaggcaugcaccaccacgccc

SEQ ID NO: 266511 - RNA, 24 nt, Human
uuacaggcaugcaccaccacgccu

SEQ ID NO: 266512 - RNA, 24 nt, Human
uuacaggcaugcaccaccacgcuc

SEQ ID NO: 266513 - RNA, 24 nt, Human
uuacaggcaugcaccaccaugccc

SEQ ID NO: 266514 - RNA, 24 nt, Human
uuacaggcaugcaccaccaugccu

SEQ ID NO: 266515 - RNA, 24 nt, Human
uuacaggcaugcacuaccacaccc

SEQ ID NO: 266516 - RNA, 31 nt, Human
uuacaggcaugcauccccaugcccagcuaau

SEQ ID NO: 266517 - RNA, 24 nt, Human
uuacaggcaugcgccaccacaccc

SEQ ID NO: 266518 - RNA, 24 nt, Human
uuacaggcaugcgccaccacgccu

SEQ ID NO: 266519 - RNA, 24 nt, Human
uuacaggcaugcgccaccacgcuc

SEQ ID NO: 266520 - RNA, 24 nt, Human
uuacaggcaugcgccaccauaccc

SEQ ID NO: 266521 - RNA, 24 nt, Human
uuacaggcaugcgccaccaugacc

SEQ ID NO: 266522 - RNA, 24 nt, Human
uuacaggcaugcgccaccaugccc

SEQ ID NO: 266523 - RNA, 24 nt, Human
uuacaggcaugcgccaccaugccu

SEQ ID NO: 266524 - RNA, 24 nt, Human
uuacaggcaugcgccacuaugccc

SEQ ID NO: 266525 - RNA, 24 nt, Human
uuacaggcaugcgccagcacgccc

SEQ ID NO: 266526 - RNA, 24 nt, Human
uuacaggcaugcgcuaacacaccc

SEQ ID NO: 266527 - RNA, 23 nt, Human
uuacaggcaugcgucaccacgcc

SEQ ID NO: 266528 - RNA, 24 nt, Human
uuacaggcaugcuccaccaugccc

SEQ ID NO: 266529 - RNA, 32 nt, Human
uuacaggcauggccaccacgcccagccaucaa

SEQ ID NO: 266530 - RNA, 24 nt, Human
uuacaggcaugggccaccacgccc

SEQ ID NO: 266531 - RNA, 24 nt, Human
uuacaggcaugggccaccacgccu

SEQ ID NO: 266532 - RNA, 24 nt, Human
uuacaggcauguaccaccacaccc

SEQ ID NO: 266533 - RNA, 24 nt, Human
uuacaggcauguacuaccaugccu

SEQ ID NO: 266534 - RNA, 24 nt, Human
uuacaggcaugugccaccacaccc

SEQ ID NO: 266535 - RNA, 24 nt, Human
uuacaggcaugugccaccacaccu

SEQ ID NO: 266536 - RNA, 24 nt, Human
uuacaggcaugugccaccacacuc

SEQ ID NO: 266537 - RNA, 23 nt, Human
uuacaggcaugugccaccacgcc

SEQ ID NO: 266538 - RNA, 24 nt, Human
uuacaggcaugugccaccacgccc

SEQ ID NO: 266539 - RNA, 24 nt, Human
uuacaggcaugugccaccaugccu

SEQ ID NO: 266540 - RNA, 23 nt, Human
uuacaggcaugugccacccaccc

SEQ ID NO: 266541 - RNA, 24 nt, Human
uuacaggcaugugccaccgcgccc

SEQ ID NO: 266542 - RNA, 22 nt, Human
uuacaggcaugugccacuaccc

SEQ ID NO: 266543 - RNA, 24 nt, Human
uuacaggcaugugccagcaugccc

SEQ ID NO: 266544 - RNA, 24 nt, Human
uuacaggcaugugucaccacaccc

SEQ ID NO: 266545 - RNA, 24 nt, Human
uuacaggcaugugucaccacgccc

SEQ ID NO: 266546 - RNA, 24 nt, Human
uuacaggcaugugucaccaugccc

SEQ ID NO: 266547 - RNA, 32 nt, Human
uuacaggccacagcaaacacaggugugcagga

SEQ ID NO: 266548 - RNA, 22 nt, Human
uuacaggccuauuaacaucaua

SEQ ID NO: 266549 - RNA, 24 nt, Human
uuacaggccucagccaccaugccc

SEQ ID NO: 266550 - RNA, 24 nt, Human
uuacaggccugagccaccaugccc

SEQ ID NO: 266551 - RNA, 32 nt, Human
uuacaggcgcacaccaccacacacagcuaauu

SEQ ID NO: 266552 - RNA, 24 nt, Human
uuacaggcgcacaccaccacgccc

SEQ ID NO: 266553 - RNA, 31 nt, Human
uuacaggcgcaugccaccaugccaggcuaau

SEQ ID NO: 266554 - RNA, 32 nt, Human
uuacaggcgcccaccuccacacccagcuaauu

SEQ ID NO: 266555 - RNA, 24 nt, Human
uuacaggcgcccgccaccacaccc

SEQ ID NO: 266556 - RNA, 24 nt, Human
uuacaggcgcccgccaccacgccc

SEQ ID NO: 266557 - RNA, 24 nt, Human
uuacaggcgcccgccaccaugccc

SEQ ID NO: 266558 - RNA, 32 nt, Human
uuacaggcgcccgccaucacacccggcuaauu

SEQ ID NO: 266559 - RNA, 22 nt, Human
uuacaggcgccucaccaugccu

SEQ ID NO: 266560 - RNA, 24 nt, Human
uuacaggcgccugccaccacaccc

SEQ ID NO: 266561 - RNA, 24 nt, Human
uuacaggcgccugccaccacgccc

SEQ ID NO: 266562 - RNA, 24 nt, Human
uuacaggcgcgagccaccacaccc

SEQ ID NO: 266563 - RNA, 24 nt, Human
uuacaggcgcguaucaccauaccc

SEQ ID NO: 266564 - RNA, 24 nt, Human
uuacaggcgcgugccaccacaccc

SEQ ID NO: 266565 - RNA, 24 nt, Human
uuacaggcgcgugccaccacgccc

SEQ ID NO: 266566 - RNA, 24 nt, Human
uuacaggcguaagccaccacaccc

SEQ ID NO: 266567 - RNA, 24 nt, Human
uuacaggcgucagccaccaugccc

SEQ ID NO: 266568 - RNA, 24 nt, Human
uuacaggcgugaagcaccacgccc

SEQ ID NO: 266569 - RNA, 24 nt, Human
uuacaggcgugagacaccgcgccc

SEQ ID NO: 266570 - RNA, 24 nt, Human
uuacaggcgugagacaccgugccc

SEQ ID NO: 266571 - RNA, 32 nt, Human
uuacaggcgugagacacugcgcccagccucau

SEQ ID NO: 266572 - RNA, 24 nt, Human
uuacaggcgugagccaccacaccc

SEQ ID NO: 266573 - RNA, 24 nt, Human
uuacaggcgugagccaccacgccc

SEQ ID NO: 266574 - RNA, 24 nt, Human
uuacaggcgugagccaccauaccc

SEQ ID NO: 266575 - RNA, 24 nt, Human
uuacaggcgugagccaccaugccc

SEQ ID NO: 266576 - RNA, 32 nt, Human
uuacaggcgugagccacuuacccggccucugc

SEQ ID NO: 266577 - RNA, 32 nt, Human
uuacaggcgugagcuaccaccaugccuggcuu

SEQ ID NO: 266578 - RNA, 31 nt, Human
uuacaggcgugagcugccaugccaggcagau

SEQ ID NO: 266579 - RNA, 24 nt, Human
uuacaggcgugcaccaccacgccc

SEQ ID NO: 266580 - RNA, 24 nt, Human
uuacaggcgugcacuaccacaccc

SEQ ID NO: 266581 - RNA, 24 nt, Human
uuacaggcgugcgccaccacgccc

SEQ ID NO: 266582 - RNA, 32 nt, Human
uuacaggcguggccaccauccccgcccccuca

SEQ ID NO: 266583 - RNA, 24 nt, Human
uuacaggcgugugccaccaugccc

SEQ ID NO: 266584 - RNA, 24 nt, Human
uuacaggcuccugccaccacgccc

SEQ ID NO: 266585 - RNA, 32 nt, Human
uuacaggcugagccaccgcgaccggcccugcu

SEQ ID NO: 266586 - RNA, 32 nt, Human
uuacaggcuggaacagaugagagcccuccugc

SEQ ID NO: 266587 - RNA, 24 nt, Human
uuacaggcuuaagccaccacgccc

SEQ ID NO: 266588 - RNA, 32 nt, Human
uuacagggagcuauugaucuacuagcaucaaa

SEQ ID NO: 266589 - RNA, 32 nt, Human
uuacagggaugguucucccccgugcagggccg

SEQ ID NO: 266590 - RNA, 32 nt, Human
uuacagggcacaggugacagggccggagaaag

SEQ ID NO: 266591 - RNA, 32 nt, Human
uuacagggcuaggauuucaguguugucagagu

SEQ ID NO: 266592 - RNA, 32 nt, Human
uuacagggggaugcauauaacagaucauguau

SEQ ID NO: 266593 - RNA, 32 nt, Human
uuacaggggugagucaccacaccccaccccuu

SEQ ID NO: 266594 - RNA, 32 nt, Human
uuacagggugugagccacugcaccuggccgau

SEQ ID NO: 266595 - RNA, 24 nt, Human
uuacagguacgcaccaccacgccc

SEQ ID NO: 266596 - RNA, 32 nt, Human
uuacagguacgcaccaccaugcccagcuugug

SEQ ID NO: 266597 - RNA, 24 nt, Human
uuacagguaugagccaccacaccc

SEQ ID NO: 266598 - RNA, 24 nt, Human
uuacagguaugagccaccacgccc

SEQ ID NO: 266599 - RNA, 24 nt, Human
uuacagguaugcaccaccacgccc

SEQ ID NO: 266600 - RNA, 32 nt, Human
uuacagguaugcaccaccacgcccagcuaauu

SEQ ID NO: 266601 - RNA, 32 nt, Human
uuacaggucaugcaaauuuaagaaaaggcuaa

SEQ ID NO: 266602 - RNA, 32 nt, Human
uuacagguccugggguccaggagacccagaau

SEQ ID NO: 266603 - RNA, 24 nt, Human
uuacaggugaccgccaccacgccc

SEQ ID NO: 266604 - RNA, 24 nt, Human
uuacaggugagcacuaccacgccc

SEQ ID NO: 266605 - RNA, 24 nt, Human
uuacaggugcaggccaccaugccc

SEQ ID NO: 266606 - RNA, 32 nt, Human
uuacaggugcccaccaccacaccaggcuaauu

SEQ ID NO: 266607 - RNA, 24 nt, Human
uuacaggugcccaccaccacgccc

SEQ ID NO: 266608 - RNA, 24 nt, Human
uuacaggugcccaccaccaugccc

SEQ ID NO: 266609 - RNA, 32 nt, Human
uuacaggugcccgccaccacaccagccuaauu

SEQ ID NO: 266610 - RNA, 24 nt, Human
uuacaggugcccgccaccacgccc

SEQ ID NO: 266611 - RNA, 32 nt, Human
uuacaggugccugccaccacacccagcuaacg

SEQ ID NO: 266612 - RNA, 32 nt, Human
uuacaggugccugccaccacacccagcuaaug

SEQ ID NO: 266613 - RNA, 24 nt, Human
uuacaggugccugccaccacgccc

SEQ ID NO: 266614 - RNA, 24 nt, Human
uuacaggugccugccaccaugccc

SEQ ID NO: 266615 - RNA, 32 nt, Human
uuacaggugcgugccaccacaccaggcugguu

SEQ ID NO: 266616 - RNA, 24 nt, Human
uuacaggugcgugccaccacgccc

SEQ ID NO: 266617 - RNA, 24 nt, Human
uuacagguguaagccaccaugccc

SEQ ID NO: 266618 - RNA, 24 nt, Human
uuacaggugugaaccaccacaccc

SEQ ID NO: 266619 - RNA, 24 nt, Human
uuacaggugugaaccaccaugccc

SEQ ID NO: 266620 - RNA, 32 nt, Human
uuacaggugugaaccaccaugcccagccagag

SEQ ID NO: 266621 - RNA, 24 nt, Human
uuacaggugugagccaccacaccc

SEQ ID NO: 266622 - RNA, 24 nt, Human
uuacaggugugagccaccacgccc

SEQ ID NO: 266623 - RNA, 24 nt, Human
uuacaggugugagccaccaugccc

SEQ ID NO: 266624 - RNA, 24 nt, Human
uuacaggugugcaccaccacaccc

SEQ ID NO: 266625 - RNA, 24 nt, Human
uuacaggugugcaccaccacgccc

SEQ ID NO: 266626 - RNA, 24 nt, Human
uuacaggugugcgccaccacgccc

SEQ ID NO: 266627 - RNA, 24 nt, Human
uuacaggugugcgccaccaugccc

SEQ ID NO: 266628 - RNA, 24 nt, Human
uuacaggugugggccaccaugccc

SEQ ID NO: 266629 - RNA, 24 nt, Human
uuacaggugugugccaccacaccc

SEQ ID NO: 266630 - RNA, 32 nt, Human
uuacaggugugugccaucaugccugacuaauu

SEQ ID NO: 266631 - RNA, 24 nt, Human
uuacagguguguggcaccaugccc

SEQ ID NO: 266632 - RNA, 32 nt, Human
uuacagguucugacaggaacagcauggauucc

SEQ ID NO: 266633 - RNA, 32 nt, Human
uuacagguugguuugcaguguuaacauuuuug

SEQ ID NO: 266634 - RNA, 20 nt, Human
uuacagguuuucuugcagcu

SEQ ID NO: 266635 - RNA, 32 nt, Human
uuacaguaacccucauauuuuaaugguguuac

SEQ ID NO: 266636 - RNA, 32 nt, Human
uuacaguacaguucgagaggaauggaaauugu

SEQ ID NO: 266637 - RNA, 32 nt, Human
uuacaguagagaggaagggaacuccacugugu

SEQ ID NO: 266638 - RNA, 32 nt, Human
uuacaguaugccaguuccacugaagacaugaa

SEQ ID NO: 266639 - RNA, 32 nt, Human
uuacagucaccugaacaaugacccaucaucuc

SEQ ID NO: 266640 - RNA, 24 nt, Human
uuacagucaugagccaccaugccc

SEQ ID NO: 266641 - RNA, 32 nt, Human
uuacagucauuuacacauauuuuugcaugcca

SEQ ID NO: 266642 - RNA, 30 nt, Human
uuacagucugcuccguggcuccuguggccu

SEQ ID NO: 266643 - RNA, 32 nt, Human
uuacagucuguaacuuuccacucuuccuguag

SEQ ID NO: 266644 - RNA, 32 nt, Human
uuacagugaaauggagaauuucaggucuccac

SEQ ID NO: 266645 - RNA, 32 nt, Human
uuacagugaccuggcuggaguuaccuggugca

SEQ ID NO: 266646 - RNA, 32 nt, Human
uuacagugagcuaugauugcaccacugcacuc

SEQ ID NO: 266647 - RNA, 32 nt, Human
uuacagugccacugcaauccagccugggcaac

SEQ ID NO: 266648 - RNA, 32 nt, Human
uuacagugccagugugccuggccaucagcauc

SEQ ID NO: 266649 - RNA, 23 nt, Human
uuacagugccugccaccaugccc

SEQ ID NO: 266650 - RNA, 32 nt, Human
uuacagugccugccaccaugcccagcuaauuu

SEQ ID NO: 266651 - RNA, 32 nt, Human
uuacagugccuguaucuuuuauuuuccugucu

SEQ ID NO: 266652 - RNA, 32 nt, Human
uuacagugcugggagagaggggagaugugggc

SEQ ID NO: 266653 - RNA, 32 nt, Human
uuacaguggauugcucaucucaguccucaaag

SEQ ID NO: 266654 - RNA, 32 nt, Human
uuacagugugccagguccuuuggaggcccuac

SEQ ID NO: 266655 - RNA, 32 nt, Human
uuacaguucacauuuacuaagagcucaaauga

SEQ ID NO: 266656 - RNA, 32 nt, Human
uuacaguucccauagcuguuagagucugguuu

SEQ ID NO: 266657 - RNA, 32 nt, Human
uuacaguuggcccucugugguuaguuccacau

SEQ ID NO: 266658 - RNA, 24 nt, Human
uuacaguugugagccaccaugccc

SEQ ID NO: 266659 - RNA, 32 nt, Human
uuacaguuucaaaucaaaccuugaaauacauc

SEQ ID NO: 266660 - RNA, 32 nt, Human
uuacauaaaaguuggcucaggagucuuagagc

SEQ ID NO: 266661 - RNA, 28 nt, Human
uuacauaaaggaauuuuggugaaacugc

SEQ ID NO: 266662 - RNA, 32 nt, Human
uuacauaaggcaguuacuuaaugugauuuuua

SEQ ID NO: 266663 - RNA, 32 nt, Human
uuacauaaugccguuuauuugagaaacacaua

SEQ ID NO: 266664 - RNA, 32 nt, Human
uuacauaauuugcaauuucaggaauuuaauuu

SEQ ID NO: 266665 - RNA, 23 nt, Human
uuacauacaaacaaauucaugca

SEQ ID NO: 266666 - RNA, 22 nt, Human
uuacauacaggagucccaucca

SEQ ID NO: 266667 - RNA, 32 nt, Human
uuacauacaucuuagugaauucuaucacaugg

SEQ ID NO: 266668 - RNA, 32 nt, Human
uuacauaccaugggauguucccaguguuggug

SEQ ID NO: 266669 - RNA, 32 nt, Human
uuacauacccugggcauguccagaugaacgaa

SEQ ID NO: 266670 - RNA, 32 nt, Human
uuacauaccugcccaauggccaaaggaaccgc

SEQ ID NO: 266671 - RNA, 32 nt, Human
uuacauaccugccuccugcauuggacuaugug

SEQ ID NO: 266672 - RNA, 32 nt, Human
uuacauacuuaagagauaaacauaucaguguu

SEQ ID NO: 266673 - RNA, 32 nt, Human
uuacauagcauuguaaaauacacuucuaggaa

SEQ ID NO: 266674 - RNA, 32 nt, Human
uuacauaggagaugcacuuagccucuaagccu

SEQ ID NO: 266675 - RNA, 32 nt, Human
uuacauagguaaacacaugucaugggguuuug

SEQ ID NO: 266676 - RNA, 32 nt, Human
uuacauagguaaacugcaugucauggggguuu

SEQ ID NO: 266677 - RNA, 32 nt, Human
uuacauauaaucaucuguaucuuaucaugauu

SEQ ID NO: 266678 - RNA, 32 nt, Human
uuacauauacaccauggaauacuacucaguua

SEQ ID NO: 266679 - RNA, 32 nt, Human
uuacauaucuggguuucuauuuuguagauaug

SEQ ID NO: 266680 - RNA, 32 nt, Human
uuacauauguacaaauuguuuuaagcuuuggc

SEQ ID NO: 266681 - RNA, 32 nt, Human
uuacauauucucucugugcauguggggcuguc

SEQ ID NO: 266682 - RNA, 32 nt, Human
uuacaucaaacagugacuuccaguuauucccc

SEQ ID NO: 266683 - RNA, 32 nt, Human
uuacaucacagaaacuguagaaucucuaugcu

SEQ ID NO: 266684 - RNA, 31 nt, Human
uuacaucacagcuuaauguccuggcauuuaa

SEQ ID NO: 266685 - RNA, 32 nt, Human
uuacaucagcaacugucuugagaauucaggga

SEQ ID NO: 266686 - RNA, 32 nt, Human
uuacauccacgucuucugaauguggauuccag

SEQ ID NO: 266687 - RNA, 32 nt, Human
uuacauccagaacgguugggaaaguuagucuu

SEQ ID NO: 266688 - RNA, 32 nt, Human
uuacauccagauauggccaucugugaaacaga

SEQ ID NO: 266689 - RNA, 32 nt, Human
uuacauccugcacuuucucaggaagccguucg

SEQ ID NO: 266690 - RNA, 32 nt, Human
uuacaucugccgcggccacacgcgguggcaug

SEQ ID NO: 266691 - RNA, 32 nt, Human
uuacaucuguaaucccagcacuuugggaggcu

SEQ ID NO: 266692 - RNA, 32 nt, Human
uuacaucugucuggguuuaagugucucaucuu

SEQ ID NO: 266693 - RNA, 32 nt, Human
uuacaucugucuuaacuacuccuucccaggua

SEQ ID NO: 266694 - RNA, 32 nt, Human
uuacaucuuacuccuuaaaaccgccucucgcu

SEQ ID NO: 266695 - RNA, 32 nt, Human
uuacaucuugugaaaauauaugauuuuuaugu

SEQ ID NO: 266696 - RNA, 32 nt, Human
uuacaugaaaguugugcugauaaucucuucuc

SEQ ID NO: 266697 - RNA, 32 nt, Human
uuacaugaacuguaugguauccaucuaucucu

SEQ ID NO: 266698 - RNA, 32 nt, Human
uuacaugaaguacaaaccucucugcuagcucu

SEQ ID NO: 266699 - RNA, 32 nt, Human
uuacaugacuguuucuuuuguaaagagaauca

SEQ ID NO: 266700 - RNA, 31 nt, Human
uuacaugagauucucauuuguaggaggaugu

SEQ ID NO: 266701 - RNA, 32 nt, Human
uuacaugaguuagauguggaggucagagugga

SEQ ID NO: 266702 - RNA, 32 nt, Human
uuacaugcaaaaagauaguagacaauacacag

SEQ ID NO: 266703 - RNA, 32 nt, Human
uuacaugcaugagccacgcgcccagccuagac

SEQ ID NO: 266704 - RNA, 32 nt, Human
uuacaugccaagggcccuaaaaagcaaauuuu

SEQ ID NO: 266705 - RNA, 32 nt, Human
uuacaugccauagguguucuggucuggaugau

SEQ ID NO: 266706 - RNA, 32 nt, Human
uuacaugccucaugucaaaugcagcaucaguc

SEQ ID NO: 266707 - RNA, 32 nt, Human
uuacauggcccaugagagugcuguaaucaagc

SEQ ID NO: 266708 - RNA, 32 nt, Human
uuacauggucuguaaauauuuguauuuaaaaa

SEQ ID NO: 266709 - RNA, 32 nt, Human
uuacaugguuaagguaaaguaagucuccaguu

SEQ ID NO: 266710 - RNA, 32 nt, Human
uuacauguacccuuucuugggaagcuaucgga

SEQ ID NO: 266711 - RNA, 32 nt, Human
uuacauguauauguucaguugugaaggcauga

SEQ ID NO: 266712 - RNA, 32 nt, Human
uuacaugugguguagcaaguguucuugcccaa

SEQ ID NO: 266713 - RNA, 32 nt, Human
uuacauguguaauuacccaucugugaucauuc

SEQ ID NO: 266714 - RNA, 32 nt, Human
uuacauguguuuuugggaacaaggaaaauuuc

SEQ ID NO: 266715 - RNA, 32 nt, Human
uuacauguucuuccaucuccccagccaccuga

SEQ ID NO: 266716 - RNA, 32 nt, Human
uuacauguuugcaugagugucagggcuuuguc

SEQ ID NO: 266717 - RNA, 32 nt, Human
uuacauguuugucuccccuucuagacugugaa

SEQ ID NO: 266718 - RNA, 32 nt, Human
uuacauuagaaguuuucucucuuuucuccacc

SEQ ID NO: 266719 - RNA, 32 nt, Human
uuacauuauagauaaguaguacaugguggaua

SEQ ID NO: 266720 - RNA, 32 nt, Human
uuacauuaugucagaaugcaagcccugccuca

SEQ ID NO: 266721 - RNA, 32 nt, Human
uuacauucucauaacgugauugauaacuuagg

SEQ ID NO: 266722 - RNA, 32 nt, Human
uuacauucucucucaucacuggagcucaguug

SEQ ID NO: 266723 - RNA, 19 nt, Human
uuacauucugcacuucaua

SEQ ID NO: 266724 - RNA, 32 nt, Human
uuacauucuucccugagguuguggcugacaga

SEQ ID NO: 266725 - RNA, 32 nt, Human
uuacauucuucucuuuucuaugaaaggcaggg

SEQ ID NO: 266726 - RNA, 32 nt, Human
uuacauucuuggaaagucuauaugaaaaacaa

SEQ ID NO: 266727 - RNA, 32 nt, Human
uuacauucuuuccaaagaagcuuccuggacac

SEQ ID NO: 266728 - RNA, 32 nt, Human
uuacauuggaaugggugcggggaggccucuuu

SEQ ID NO: 266729 - RNA, 32 nt, Human
uuacauuuaguucccuccuaggacuacuuuaa

SEQ ID NO: 266730 - RNA, 32 nt, Human
uuacauuuauuuuugcacugagaguuuacugu

SEQ ID NO: 266731 - RNA, 32 nt, Human
uuacauuucauucauuuauauuagaguaaaug

SEQ ID NO: 266732 - RNA, 32 nt, Human
uuacauuuggaggacagggacaaggacugagc

SEQ ID NO: 266733 - RNA, 32 nt, Human
uuacauuuuccugcaacucugccuucuugagu

SEQ ID NO: 266734 - RNA, 32 nt, Human
uuacauuuugugguuauacaugauacaucuuu

SEQ ID NO: 266735 - RNA, 32 nt, Human
uuaccaaaaauacaaaaauuagccagguguag

SEQ ID NO: 266736 - RNA, 32 nt, Human
uuaccaaaacucuauuuuuaaaagcuuucaga

SEQ ID NO: 266737 - RNA, 32 nt, Human
uuaccaaacucaugauuuuguagucacaccac

SEQ ID NO: 266738 - RNA, 32 nt, Human
uuaccaaagaaaaauacauacauugcuugguc

SEQ ID NO: 266739 - RNA, 32 nt, Human
uuaccaaagagcucagggaugcagugaaaagc

SEQ ID NO: 266740 - RNA, 26 nt, Human
uuaccaaagaggaaaaaucaaaagag

SEQ ID NO: 266741 - RNA, 32 nt, Human
uuaccaaagcagccgggucagugccuucucac

SEQ ID NO: 266742 - RNA, 32 nt, Human
uuaccaaaguuugcagccuauaccucaauaaa

SEQ ID NO: 266743 - RNA, 32 nt, Human
uuaccaaauagaagacaaugagaagucauacc

SEQ ID NO: 266744 - RNA, 32 nt, Human
uuaccaacauggagaaaccccaucucuacuaa

SEQ ID NO: 266745 - RNA, 32 nt, Human
uuaccaacucgaacacacaucauuucaucuuc

SEQ ID NO: 266746 - RNA, 32 nt, Human
uuaccaaggaaacugccaaggccaggugcagu

SEQ ID NO: 266747 - RNA, 32 nt, Human
uuaccaaggaugaaagaggagccaggccuugg

SEQ ID NO: 266748 - RNA, 32 nt, Human
uuaccaaucagaaaaucgacuccaccuaugag

SEQ ID NO: 266749 - RNA, 32 nt, Human
uuaccaauguauggcuuagaaguuaauaaaaa

SEQ ID NO: 266750 - RNA, 23 nt, Human
uuaccaaugugucaggcaaucug

SEQ ID NO: 266751 - RNA, 32 nt, Human
uuaccaauucugcgucacuaggaagcuauagc

SEQ ID NO: 266752 - RNA, 32 nt, Human
uuaccacacaauauuucaugauucaaauucuu

SEQ ID NO: 266753 - RNA, 32 nt, Human
uuaccacaggaccugggcuucgucuccagggg

SEQ ID NO: 266754 - RNA, 32 nt, Human
uuaccacaucauuguugguaucuuaagaucaa

SEQ ID NO: 266755 - RNA, 17 nt, Human
uuaccacauucuguuca

SEQ ID NO: 266756 - RNA, 32 nt, Human
uuaccaccaagaaguguugaaacaccaaauag

SEQ ID NO: 266757 - RNA, 32 nt, Human
uuaccaccuaguugauaguuaaucucaugcag

SEQ ID NO: 266758 - RNA, 32 nt, Human
uuaccaccucuuccucccccucaaaggaaaaa

SEQ ID NO: 266759 - RNA, 32 nt, Human
uuaccaccugaccucuugcugccagcuaauaa

SEQ ID NO: 266760 - RNA, 32 nt, Human
uuaccacggggccucgcccacccugggcgccc

SEQ ID NO: 266761 - RNA, 32 nt, Human
uuaccacugcacuccagcuugggcgacggagu

SEQ ID NO: 266762 - RNA, 32 nt, Human
uuaccacuguaaauucaagaagcuuuugaaau

SEQ ID NO: 266763 - RNA, 32 nt, Human
uuaccacuguugcucauuuuguaaguauaugu

SEQ ID NO: 266764 - RNA, 32 nt, Human
uuaccacuuuccccaaacaacauaaaagacaa

SEQ ID NO: 266765 - RNA, 32 nt, Human
uuaccagaaagccaaauuuuauaaugcgggug

SEQ ID NO: 266766 - RNA, 32 nt, Human
uuaccagaaguuuaaaucuuuguuaaaauaua

SEQ ID NO: 266767 - RNA, 32 nt, Human
uuaccagaccucacagaguauuggacgucuac

SEQ ID NO: 266768 - RNA, 32 nt, Human
uuaccagacuaaaucaaccacuccagcagagc

SEQ ID NO: 266769 - RNA, 32 nt, Human
uuaccagagccacagcccugcugccucaggac

SEQ ID NO: 266770 - RNA, 32 nt, Human
uuaccagagcccaguaagaacugcugucauga

SEQ ID NO: 266771 - RNA, 32 nt, Human
uuaccagaguauaucucagaacauuuucauga

SEQ ID NO: 266772 - RNA, 32 nt, Human
uuaccagaguguucauacuggagagaaacccu

SEQ ID NO: 266773 - RNA, 32 nt, Human
uuaccagauaaugcuacuuuauuuauacacug

SEQ ID NO: 266774 - RNA, 32 nt, Human
uuaccagaucccucacgacuggucccagcuuc

SEQ ID NO: 266775 - RNA, 32 nt, Human
uuaccagaucuuucuucacgcugugcuacaug

SEQ ID NO: 266776 - RNA, 32 nt, Human
uuaccagaugaaugcugagaaauaaguaauca

SEQ ID NO: 266777 - RNA, 32 nt, Human
uuaccagcacgcugucucagaaaacgaaaacg

SEQ ID NO: 266778 - RNA, 32 nt, Human
uuaccagccgagaaggaauuccuagcuagcuu

SEQ ID NO: 266779 - RNA, 32 nt, Human
uuaccaggaagagacgcuaaguuuuaucagag

SEQ ID NO: 266780 - RNA, 32 nt, Human
uuaccaggaagcagaggagagcuacuuguuua

SEQ ID NO: 266781 - RNA, 32 nt, Human
uuaccaggaggaagagaaagaggacaaaauca

SEQ ID NO: 266782 - RNA, 32 nt, Human
uuaccaggcacuguguguagccccaggguuug

SEQ ID NO: 266783 - RNA, 32 nt, Human
uuaccaggcccagcuguaaaauaaaggcucag

SEQ ID NO: 266784 - RNA, 32 nt, Human
uuaccaggcccaggcugggguggugugaaccc

SEQ ID NO: 266785 - RNA, 32 nt, Human
uuaccagggcccuccgugguccugaauggucu

SEQ ID NO: 266786 - RNA, 31 nt, Human
uuaccaggggagugggaaaaagaguugagca

SEQ ID NO: 266787 - RNA, 32 nt, Human
uuaccaggggagugggaaaaagaguugagcag

SEQ ID NO: 266788 - RNA, 32 nt, Human
uuaccaggugcugaagauaaggaaacccggga

SEQ ID NO: 266789 - RNA, 32 nt, Human
uuaccaguaaacauguaacuagaaagccaggc

SEQ ID NO: 266790 - RNA, 32 nt, Human
uuaccagugaaauagcaaagcuguucuccagg

SEQ ID NO: 266791 - RNA, 32 nt, Human
uuaccagugaccccagagacagagccaggaca

SEQ ID NO: 266792 - RNA, 32 nt, Human
uuaccagugaggaaaccgacacugugagcucu

SEQ ID NO: 266793 - RNA, 32 nt, Human
uuaccagugccacccaugucccuagcucccgg

SEQ ID NO: 266794 - RNA, 32 nt, Human
uuaccaguggacuacaggauuacuugagaguu

SEQ ID NO: 266795 - RNA, 32 nt, Human
uuaccauagcaaccagcaacuccaggguacca

SEQ ID NO: 266796 - RNA, 32 nt, Human
uuaccaucauugaagaugucacucagguggcc

SEQ ID NO: 266797 - RNA, 32 nt, Human
uuaccauccuccuuccuccccuucccauuagc

SEQ ID NO: 266798 - RNA, 32 nt, Human
uuaccaucucagaagucaagcugauggaguau

SEQ ID NO: 266799 - RNA, 32 nt, Human
uuaccaucugaagucccuuccauuguuuucua

SEQ ID NO: 266800 - RNA, 32 nt, Human
uuaccaugaauuuacuuccucccaagaguuug

SEQ ID NO: 266801 - RNA, 32 nt, Human
uuaccaugacaacaugguaauguccauagaca

SEQ ID NO: 266802 - RNA, 17 nt, Human
uuaccaugcauaacaga

SEQ ID NO: 266803 - RNA, 30 nt, Human
uuaccauggaggaucacauguucgguguuc

SEQ ID NO: 266804 - RNA, 32 nt, Human
uuaccauggcaacccuugcauuccacccugag

SEQ ID NO: 266805 - RNA, 32 nt, Human
uuaccauggcuguguguguccaugucugcaag

SEQ ID NO: 266806 - RNA, 32 nt, Human
uuaccauguuggccaggcaggucuccaacucc

SEQ ID NO: 266807 - RNA, 32 nt, Human
uuaccauguuugccaggauggucuugaucucu

SEQ ID NO: 266808 - RNA, 32 nt, Human
uuaccauucauguaacaaaacccagcacauua

SEQ ID NO: 266809 - RNA, 32 nt, Human
uuaccauuuuccuggcaugucagucugaugau

SEQ ID NO: 266810 - RNA, 32 nt, Human
uuaccauuuucuucuuucucaggauuuggugc

SEQ ID NO: 266811 - RNA, 32 nt, Human
uuaccauuuugcuuucccagccuccaaacaua

SEQ ID NO: 266812 - RNA, 32 nt, Human
uuaccauuuugugaaagguuuuugaaaaucga

SEQ ID NO: 266813 - RNA, 32 nt, Human
uuacccaaaggcugcaccugccguguugucug

SEQ ID NO: 266814 - RNA, 32 nt, Human
uuacccaagaguucaaggcugcagugaacuau

SEQ ID NO: 266815 - RNA, 22 nt, Human
uuacccaagcuggagugcagug

SEQ ID NO: 266816 - RNA, 32 nt, Human
uuacccaaggaauucccuaaagaauuagaagu

SEQ ID NO: 266817 - RNA, 32 nt, Human
uuacccaaugugccucugcuucccuggguuug

SEQ ID NO: 266818 - RNA, 32 nt, Human
uuacccacaagaaauacuuauuauccacuugg

SEQ ID NO: 266819 - RNA, 32 nt, Human
uuacccacaagcccaaaccucagggauuucag

SEQ ID NO: 266820 - RNA, 32 nt, Human
uuacccacagaaggaggaaguggaagggacag

SEQ ID NO: 266821 - RNA, 32 nt, Human
uuacccacuccaucuucucuuuccuucuuacu

SEQ ID NO: 266822 - RNA, 32 nt, Human
uuacccacuccccucacaauguuguccacuua

SEQ ID NO: 266823 - RNA, 32 nt, Human
uuacccacucugggaccagcagucuuucugau

SEQ ID NO: 266824 - RNA, 32 nt, Human
uuacccacuguuauuuuaucauucauaauggg

SEQ ID NO: 266825 - RNA, 32 nt, Human
uuacccacuuugugucuccugagagcuccucu

SEQ ID NO: 266826 - RNA, 32 nt, Human
uuacccagaguuuuuauguagcagggaaaaua

SEQ ID NO: 266827 - RNA, 32 nt, Human
uuacccagauggcagaugaucagggcuguauu

SEQ ID NO: 266828 - RNA, 32 nt, Human
uuacccagauuggagugcaguggcgcgaucuc

SEQ ID NO: 266829 - RNA, 32 nt, Human
uuacccagcccggggcaggugcagcccuuccu

SEQ ID NO: 266830 - RNA, 32 nt, Human
uuacccaggacagauaaaaaugauagaauggc

SEQ ID NO: 266831 - RNA, 32 nt, Human
uuacccaggcaggagugcaguggcgugaucuu

SEQ ID NO: 266832 - RNA, 22 nt, Human
uuacccaggccggagugcagug

SEQ ID NO: 266833 - RNA, 32 nt, Human
uuacccaggccggagugcaguggcgcagucuc

SEQ ID NO: 266834 - RNA, 32 nt, Human
uuacccaggcuagagugcaauggcgugauuuu

SEQ ID NO: 266835 - RNA, 32 nt, Human
uuacccaggcuagagugcaguggcgcgaucuc

SEQ ID NO: 266836 - RNA, 32 nt, Human
uuacccaggcuagggugcaguggugugaucau

SEQ ID NO: 266837 - RNA, 22 nt, Human
uuacccaggcuggaauacagug

SEQ ID NO: 266838 - RNA, 22 nt, Human
uuacccaggcuggaaugcagug

SEQ ID NO: 266839 - RNA, 32 nt, Human
uuacccaggcuggaaugcaguggcgcaaucuu

SEQ ID NO: 266840 - RNA, 32 nt, Human
uuacccaggcuggaggacagugaugugaucuc

SEQ ID NO: 266841 - RNA, 22 nt, Human
uuacccaggcuggaguacagug

SEQ ID NO: 266842 - RNA, 32 nt, Human
uuacccaggcuggaguacaguggugucaucaa

SEQ ID NO: 266843 - RNA, 32 nt, Human
uuacccaggcuggagugcaaggcacgaucuug

SEQ ID NO: 266844 - RNA, 22 nt, Human
uuacccaggcuggagugcaaug

SEQ ID NO: 266845 - RNA, 32 nt, Human
uuacccaggcuggagugcaaugaugcgaucuc

SEQ ID NO: 266846 - RNA, 32 nt, Human
uuacccaggcuggagugcaauggagugaucac

SEQ ID NO: 266847 - RNA, 32 nt, Human
uuacccaggcuggagugcaauggcacgcaauc

SEQ ID NO: 266848 - RNA, 32 nt, Human
uuacccaggcuggagugcaauggcgcaaacuu

SEQ ID NO: 266849 - RNA, 22 nt, Human
uuacccaggcuggagugcagug

SEQ ID NO: 266850 - RNA, 32 nt, Human
uuacccaggcuggagugcaguggcacaaucuc

SEQ ID NO: 266851 - RNA, 32 nt, Human
uuacccaggcuggagugcaguggcgcgaucuu

SEQ ID NO: 266852 - RNA, 32 nt, Human
uuacccaggcuggagugcaguggcgugaucuu

SEQ ID NO: 266853 - RNA, 32 nt, Human
uuacccaggcuggagugcagugggugaucuug

SEQ ID NO: 266854 - RNA, 32 nt, Human
uuacccaggcuggagugcaguggugcgaucuc

SEQ ID NO: 266855 - RNA, 32 nt, Human
uuacccaggcuggagugcaguggugcuaucuu

SEQ ID NO: 266856 - RNA, 32 nt, Human
uuacccaggcuggagugcaguggugugaucau

SEQ ID NO: 266857 - RNA, 32 nt, Human
uuacccaggcuggagugcaguggugugaucuc

SEQ ID NO: 266858 - RNA, 32 nt, Human
uuacccaggcuggaguguaguggugccaucuc

SEQ ID NO: 266859 - RNA, 32 nt, Human
uuacccaggcuggucucaacuccugggcucaa

SEQ ID NO: 266860 - RNA, 32 nt, Human
uuacccaggcuggucuugaacucuugggcuca

SEQ ID NO: 266861 - RNA, 32 nt, Human
uuacccaggguggagugcagugguagcgaucu

SEQ ID NO: 266862 - RNA, 31 nt, Human
uuacccaguagcuagaauguuaauggcagaa

SEQ ID NO: 266863 - RNA, 32 nt, Human
uuacccaguugauagaaggacaaggacagaau

SEQ ID NO: 266864 - RNA, 32 nt, Human
uuacccauaccuguucucauccuugaaauaua

SEQ ID NO: 266865 - RNA, 32 nt, Human
uuacccauauugcuuuuagccugcugccagga

SEQ ID NO: 266866 - RNA, 32 nt, Human
uuacccaugcucuguguaccugcagcauaaca

SEQ ID NO: 266867 - RNA, 32 nt, Human
uuacccaugcuggucuugaacuucuggcuuca

SEQ ID NO: 266868 - RNA, 32 nt, Human
uuaccccacugcugcugacugggcagggcccu

SEQ ID NO: 266869 - RNA, 32 nt, Human
uuaccccagaagcagcugguggcgccugaccu

SEQ ID NO: 266870 - RNA, 32 nt, Human
uuaccccagccuacccuuccugcauuucucuu

SEQ ID NO: 266871 - RNA, 32 nt, Human
uuaccccaucccugcaugacugugaagcuggc

SEQ ID NO: 266872 - RNA, 32 nt, Human
uuacccccuccccagaccuguucccuuucuuu

SEQ ID NO: 266873 - RNA, 32 nt, Human
uuacccccuccccuuuuauuuucuuuuugcuu

SEQ ID NO: 266874 - RNA, 32 nt, Human
uuacccccuuacaaaucucuggcaacagagag

SEQ ID NO: 266875 - RNA, 32 nt, Human
uuaccccucacagguuuaagagaccaggucuu

SEQ ID NO: 266876 - RNA, 32 nt, Human
uuaccccugcagcuguggggcuggccagccac

SEQ ID NO: 266877 - RNA, 32 nt, Human
uuaccccuggcagagccaguugcagugcaauu

SEQ ID NO: 266878 - RNA, 32 nt, Human
uuaccccuguaaucccagcacuuugggaggcc

SEQ ID NO: 266879 - RNA, 32 nt, Human
uuaccccuguucugcuuaacagaacugccaag

SEQ ID NO: 266880 - RNA, 32 nt, Human
uuaccccuuccacuccaguaggggacaccuuu

SEQ ID NO: 266881 - RNA, 32 nt, Human
uuaccccuucccacuuugcacuccucaaaugu

SEQ ID NO: 266882 - RNA, 32 nt, Human
uuacccggcagcgagcgcgcaggcccccgcga

SEQ ID NO: 266883 - RNA, 24 nt, Human
uuacccggcaucagaguacucaca

SEQ ID NO: 266884 - RNA, 32 nt, Human
uuacccucaugauuuacuaucuguaagagcau

SEQ ID NO: 266885 - RNA, 32 nt, Human
uuacccuccacuuccuccuccuguuuggcuuc

SEQ ID NO: 266886 - RNA, 32 nt, Human
uuacccuccccaggauggagccccaggaaacc

SEQ ID NO: 266887 - RNA, 32 nt, Human
uuacccuccucucuccccagaugugacuacug

SEQ ID NO: 266888 - RNA, 32 nt, Human
uuacccucugcagcuugucaucccuuccgucu

SEQ ID NO: 266889 - RNA, 32 nt, Human
uuacccucugcagcuuguccucccuuccgucu

SEQ ID NO: 266890 - RNA, 32 nt, Human
uuacccugaccuggacucaggccuguuuagua

SEQ ID NO: 266891 - RNA, 32 nt, Human
uuacccugcaggcagcauuguggugacguaga

SEQ ID NO: 266892 - RNA, 32 nt, Human
uuacccugcccuggcuggcaugugagaagcca

SEQ ID NO: 266893 - RNA, 32 nt, Human
uuacccuggacagcaggaaaccuguauauuca

SEQ ID NO: 266894 - RNA, 32 nt, Human
uuacccuggcaucuuucuuuuaaauuauaucu

SEQ ID NO: 266895 - RNA, 32 nt, Human
uuacccuggggccuggcuuaaaagcaggauug

SEQ ID NO: 266896 - RNA, 32 nt, Human
uuacccuguggaagauuuuauuagaauuaauu

SEQ ID NO: 266897 - RNA, 32 nt, Human
uuacccuguucuguucaucuaaaugcagacau

SEQ ID NO: 266898 - RNA, 32 nt, Human
uuacccuguugaaguucaucucugccugugcc

SEQ ID NO: 266899 - RNA, 32 nt, Human
uuacccuuccaccuuuccauccugccuucuac

SEQ ID NO: 266900 - RNA, 32 nt, Human
uuacccuucccugcgggcucucuccccgacac

SEQ ID NO: 266901 - RNA, 32 nt, Human
uuacccuucucaaaguccuuauuaaguguaaa

SEQ ID NO: 266902 - RNA, 32 nt, Human
uuacccuucuuuccauuucucucuccagucuu

SEQ ID NO: 266903 - RNA, 32 nt, Human
uuaccgagagccaaacagagcccagggagacu

SEQ ID NO: 266904 - RNA, 32 nt, Human
uuaccgaggccuucccuuugauacaguccagg

SEQ ID NO: 266905 - RNA, 32 nt, Human
uuaccgcaagggugggaaggggcugcugcccg

SEQ ID NO: 266906 - RNA, 32 nt, Human
uuaccgcaucuucucagcagcuucugaccacu

SEQ ID NO: 266907 - RNA, 32 nt, Human
uuaccgcccaggcuggagugcagugccaugau

SEQ ID NO: 266908 - RNA, 32 nt, Human
uuaccgcggcaagaacaucccucccagccagc

SEQ ID NO: 266909 - RNA, 32 nt, Human
uuaccggaguuuuagcaaaacagcuagcagau

SEQ ID NO: 266910 - RNA, 32 nt, Human
uuaccggcucaagcaauccucccaucucagcc

SEQ ID NO: 266911 - RNA, 32 nt, Human
uuaccgggaggcaguuccuggcuaacgaagag

SEQ ID NO: 266912 - RNA, 32 nt, Human
uuaccgucaaugcuccuuaccaguuagggaug

SEQ ID NO: 266913 - RNA, 32 nt, Human
uuaccgucaccacucuuacaaaggacaguuua

SEQ ID NO: 266914 - RNA, 32 nt, Human
uuaccgucuccagcuucagccuuuccagaaac

SEQ ID NO: 266915 - RNA, 32 nt, Human
uuaccgucucugcuuauggcuggaccucagcu

SEQ ID NO: 266916 - RNA, 32 nt, Human
uuaccgugggcacugaaggcuuucagggccuc

SEQ ID NO: 266917 - RNA, 32 nt, Human
uuaccguucccuuccuccugccuggaccaugg

SEQ ID NO: 266918 - RNA, 32 nt, Human
uuaccuacaaauucugauguuaaauagaguag

SEQ ID NO: 266919 - RNA, 17 nt, Human
uuaccuacaugauugau

SEQ ID NO: 266920 - RNA, 32 nt, Human
uuaccuaggcugagguuagagagauuggccag

SEQ ID NO: 266921 - RNA, 32 nt, Human
uuaccuagggcuggguggacaacaaggcacag

SEQ ID NO: 266922 - RNA, 32 nt, Human
uuaccuauaguuggacaagcuaaccuaccacc

SEQ ID NO: 266923 - RNA, 28 nt, Human
uuaccuaugugugcugccucauuccugg

SEQ ID NO: 266924 - RNA, 32 nt, Human
uuaccuauugcaacuucuguucagaaauacac

SEQ ID NO: 266925 - RNA, 32 nt, Human
uuaccuauugcugcuacuuguucuguccucug

SEQ ID NO: 266926 - RNA, 32 nt, Human
uuaccuauuugagccccucuagcuacagucug

SEQ ID NO: 266927 - RNA, 32 nt, Human
uuaccucacugcauuccagccugggcaacaga

SEQ ID NO: 266928 - RNA, 32 nt, Human
uuaccucacugcauuccggccugggcaacaga

SEQ ID NO: 266929 - RNA, 32 nt, Human
uuaccucagaugggaaacugaggcccagcaag

SEQ ID NO: 266930 - RNA, 32 nt, Human
uuaccucauucccugccccaggaagggaccca

SEQ ID NO: 266931 - RNA, 32 nt, Human
uuaccuccaaacgaucacuccauuuccucagu

SEQ ID NO: 266932 - RNA, 32 nt, Human
uuaccuccaguaugaagugaauugcaaauccu

SEQ ID NO: 266933 - RNA, 32 nt, Human
uuaccucccaagcuggaguccaguggugagau

SEQ ID NO: 266934 - RNA, 21 nt, Human
uuaccucccacccccucucca

SEQ ID NO: 266935 - RNA, 32 nt, Human
uuaccuccccugccaaguuauggucuugaucu

SEQ ID NO: 266936 - RNA, 32 nt, Human
uuaccuccucaccuaccucuccagucacagcu

SEQ ID NO: 266937 - RNA, 32 nt, Human
uuaccuccuccacucccccugccugcccccag

SEQ ID NO: 266938 - RNA, 32 nt, Human
uuaccuccucgugccuuacagccugggcgccu

SEQ ID NO: 266939 - RNA, 32 nt, Human
uuaccuccuggccucagauauuccagggucau

SEQ ID NO: 266940 - RNA, 32 nt, Human
uuaccucgagcuucucaaccacugcggccuaa

SEQ ID NO: 266941 - RNA, 32 nt, Human
uuaccucucuacuggaacccugaccagaagcc

SEQ ID NO: 266942 - RNA, 32 nt, Human
uuaccucucugagccucgguuacccugucugu

SEQ ID NO: 266943 - RNA, 21 nt, Human
uuaccucuguuuaauuucaaa

SEQ ID NO: 266944 - RNA, 32 nt, Human
uuaccucuuaauucuccuuugccuggaaguga

SEQ ID NO: 266945 - RNA, 32 nt, Human
uuaccucuucugcaggcucugccaugcacgca

SEQ ID NO: 266946 - RNA, 32 nt, Human
uuaccucuuuaaguuucaaucucccaucuccc

SEQ ID NO: 266947 - RNA, 32 nt, Human
uuaccugaagucaggaguuagagaccagccug

SEQ ID NO: 266948 - RNA, 32 nt, Human
uuaccugaaugaggagcucauauuuauuuuca

SEQ ID NO: 266949 - RNA, 32 nt, Human
uuaccugacaacaccacagccucaggccuccu

SEQ ID NO: 266950 - RNA, 32 nt, Human
uuaccugagacccagaggguguaggaauggca

SEQ ID NO: 266951 - RNA, 32 nt, Human
uuaccugauuggcacuucgcagucuaucuccc

SEQ ID NO: 266952 - RNA, 23 nt, Human
uuaccugcagaaauucucucaca

SEQ ID NO: 266953 - RNA, 22 nt, Human
uuaccugcaguggcacccugua

SEQ ID NO: 266954 - RNA, 32 nt, Human
uuaccugcccaaguucuucacugagauugaau

SEQ ID NO: 266955 - RNA, 24 nt, Human
uuaccugcccuaaccccucccuca

SEQ ID NO: 266956 - RNA, 32 nt, Human
uuaccugcguaucuacuaacaaacaugagacc

SEQ ID NO: 266957 - RNA, 32 nt, Human
uuaccugcugggaccugcucccagagaccuuc

SEQ ID NO: 266958 - RNA, 32 nt, Human
uuaccugcugggaccugcucccagagaccuug

SEQ ID NO: 266959 - RNA, 32 nt, Human
uuaccugcuugagugauccugaacuuguugcg

SEQ ID NO: 266960 - RNA, 32 nt, Human
uuaccuggagccuggagccacuuuaaguugua

SEQ ID NO: 266961 - RNA, 32 nt, Human
uuaccuggcaucuucugcccuguucaucuacg

SEQ ID NO: 266962 - RNA, 32 nt, Human
uuaccuggccaagaaggaacacagaggagaac

SEQ ID NO: 266963 - RNA, 32 nt, Human
uuaccuggcccagaaucuggaucucugccccc

SEQ ID NO: 266964 - RNA, 32 nt, Human
uuaccugggacccaccucggcgacggagaccg

SEQ ID NO: 266965 - RNA, 32 nt, Human
uuaccugggaggcagaggguguuaugggagga

SEQ ID NO: 266966 - RNA, 32 nt, Human
uuaccugggaggcugaggcaggagaaucauuu

SEQ ID NO: 266967 - RNA, 32 nt, Human
uuaccugggaguagaaggugggaagaaaugga

SEQ ID NO: 266968 - RNA, 32 nt, Human
uuaccugggauuacaggcaugugccaccacac

SEQ ID NO: 266969 - RNA, 32 nt, Human
uuaccuggggccacucucccacccucucgauc

SEQ ID NO: 266970 - RNA, 32 nt, Human
uuaccugggucccuaagcagucuuaugacccc

SEQ ID NO: 266971 - RNA, 32 nt, Human
uuaccugguacaacacaaugguucuggacugg

SEQ ID NO: 266972 - RNA, 32 nt, Human
uuaccugguccugagagcugagcuguagccuc

SEQ ID NO: 266973 - RNA, 32 nt, Human
uuaccuggugaccaccaucauuguuuucccca

SEQ ID NO: 266974 - RNA, 32 nt, Human
uuaccugguuagcucagacggcuugaggcagu

SEQ ID NO: 266975 - RNA, 32 nt, Human
uuaccugguuggggguuuuggugaggauggca

SEQ ID NO: 266976 - RNA, 32 nt, Human
uuaccuguaacuuccuuuaucucagaagggag

SEQ ID NO: 266977 - RNA, 32 nt, Human
uuaccuguagcuuugggcagauuugcaacagc

SEQ ID NO: 266978 - RNA, 32 nt, Human
uuaccuguauguucaaccuauguuaucaaaca

SEQ ID NO: 266979 - RNA, 18 nt, Human
uuaccugucacacauuga

SEQ ID NO: 266980 - RNA, 19 nt, Human
uuaccugucacaucuuggc

SEQ ID NO: 266981 - RNA, 16 nt, Human
uuaccugucacauuga

SEQ ID NO: 266982 - RNA, 32 nt, Human
uuaccugucagaggaggugacaaggcagucuc

SEQ ID NO: 266983 - RNA, 20 nt, Human
uuaccugucauuguaauuga

SEQ ID NO: 266984 - RNA, 19 nt, Human
uuaccugugagcugacuga

SEQ ID NO: 266985 - RNA, 32 nt, Human
uuaccugugcaggucuccugaugcaggucuca

SEQ ID NO: 266986 - RNA, 32 nt, Human
uuaccuguguccaacauguugagaacucaaaa

SEQ ID NO: 266987 - RNA, 18 nt, Human
uuaccuguguugauugau

SEQ ID NO: 266988 - RNA, 32 nt, Human
uuaccuguucuuuuccagagcugacagcacgg

SEQ ID NO: 266989 - RNA, 32 nt, Human
uuaccuguuucugcugcuagaagauccaggaa

SEQ ID NO: 266990 - RNA, 32 nt, Human
uuaccuguuuugucuggauggcugguuuugag

SEQ ID NO: 266991 - RNA, 32 nt, Human
uuaccuuaagaauugcccaaaaaugaaagaaa

SEQ ID NO: 266992 - RNA, 32 nt, Human
uuaccuuccaguaacauacuucuagucacccc

SEQ ID NO: 266993 - RNA, 32 nt, Human
uuaccuuccucccauggucuccuuccgguucu

SEQ ID NO: 266994 - RNA, 32 nt, Human
uuaccuuccucccauuucucuuccuggguccu

SEQ ID NO: 266995 - RNA, 32 nt, Human
uuaccuucuccaggaacccuccaguggggaag

SEQ ID NO: 266996 - RNA, 32 nt, Human
uuaccuucuccugggagguccugcugcaacuc

SEQ ID NO: 266997 - RNA, 32 nt, Human
uuaccuucuggccccucucuucauucagagau

SEQ ID NO: 266998 - RNA, 32 nt, Human
uuaccuugggcaagccacuuaacagcucgaug

SEQ ID NO: 266999 - RNA, 32 nt, Human
uuaccuuggguaagccauaagcgaaucuuaau

SEQ ID NO: 267000 - RNA, 32 nt, Human
uuaccuugucucaauaaaagguuucuaaugcc

SEQ ID NO: 267001 - RNA, 32 nt, Human
uuaccuuuacauaugaagguuuaaaaauacau

SEQ ID NO: 267002 - RNA, 19 nt, Human
uuaccuuuaguucagccaa

SEQ ID NO: 267003 - RNA, 32 nt, Human
uuaccuuuauaaagaucaggacagguuauguc

SEQ ID NO: 267004 - RNA, 32 nt, Human
uuaccuuuauagccaggugagugcaguuugaa

SEQ ID NO: 267005 - RNA, 32 nt, Human
uuaccuuucacuuucaaaaacaugaccuucca

SEQ ID NO: 267006 - RNA, 32 nt, Human
uuaccuuuccagcccuuugaggagggaccaug

SEQ ID NO: 267007 - RNA, 32 nt, Human
uuaccuuuccccucagcaccugucccacuauc

SEQ ID NO: 267008 - RNA, 32 nt, Human
uuaccuuucuggcuuccaguucccagguguuc

SEQ ID NO: 267009 - RNA, 32 nt, Human
uuaccuuugaacucccugcuucucaucuuuga

SEQ ID NO: 267010 - RNA, 32 nt, Human
uuaccuuugaucccuguaaagcagaaaggacu

SEQ ID NO: 267011 - RNA, 32 nt, Human
uuaccuuugccaagccuuuccuaaugaauucc

SEQ ID NO: 267012 - RNA, 32 nt, Human
uuaccuuugccucugccucucaagcugguacc

SEQ ID NO: 267013 - RNA, 32 nt, Human
uuaccuuuuaguuucagcaguccucaccacca

SEQ ID NO: 267014 - RNA, 32 nt, Human
uuaccuuuuccagugggacaguacagugugag

SEQ ID NO: 267015 - RNA, 32 nt, Human
uuaccuuuucccuuuugugcuuugggggaaac

SEQ ID NO: 267016 - RNA, 32 nt, Human
uuaccuuuugacuggaaccagauggcacugag

SEQ ID NO: 267017 - RNA, 32 nt, Human
uuaccuuuuuggugugcugcuuuuccaggcuc

SEQ ID NO: 267018 - RNA, 32 nt, Human
uuaccuuuuuguauggugaagggaggccuucc

SEQ ID NO: 267019 - RNA, 32 nt, Human
uuacgaaacugcacuccugucuucuggcuuca

SEQ ID NO: 267020 - RNA, 32 nt, Human
uuacgaaaugcuagccagggugcaauggcuca

SEQ ID NO: 267021 - RNA, 32 nt, Human
uuacgaagugccagaagugucuagucauagaa

SEQ ID NO: 267022 - RNA, 32 nt, Human
uuacgacaaacacaaagaaacuauaccauaac

SEQ ID NO: 267023 - RNA, 32 nt, Human
uuacgaccacuggaagccagcacccaaggaag

SEQ ID NO: 267024 - RNA, 32 nt, Human
uuacgacuccuguaaucccagcacuuugggag

SEQ ID NO: 267025 - RNA, 32 nt, Human
uuacgagcagcugugagugaggggacaagggg

SEQ ID NO: 267026 - RNA, 32 nt, Human
uuacgagccggguggaggguuggggaggaaag

SEQ ID NO: 267027 - RNA, 22 nt, Human
uuacgagcuccaucggcagcca

SEQ ID NO: 267028 - RNA, 32 nt, Human
uuacgcacugccucucuaagcuggccucaggu

SEQ ID NO: 267029 - RNA, 32 nt, Human
uuacgcaucagcugccuuagacagcuucuaga

SEQ ID NO: 267030 - RNA, 32 nt, Human
uuacgccacugcaccccaaccugggcgacaga

SEQ ID NO: 267031 - RNA, 32 nt, Human
uuacgccacugcacuaaugucuggugacagag

SEQ ID NO: 267032 - RNA, 32 nt, Human
uuacgccacugcacuccagccugggcaacaca

SEQ ID NO: 267033 - RNA, 32 nt, Human
uuacgccacugcacuccagccugggcaacaga

SEQ ID NO: 267034 - RNA, 32 nt, Human
uuacgccacugcacuccagccugggugacgga

SEQ ID NO: 267035 - RNA, 32 nt, Human
uuacgccacugcauuguagccugggcaacaga

SEQ ID NO: 267036 - RNA, 32 nt, Human
uuacgcccaugacugcagaagacugaacaggu

SEQ ID NO: 267037 - RNA, 32 nt, Human
uuacgccuauaaucccagcacuuugggaggcc

SEQ ID NO: 267038 - RNA, 32 nt, Human
uuacgccuauaaucccagcauuuugggacucc

SEQ ID NO: 267039 - RNA, 32 nt, Human
uuacgccuauaaucccagcuacucaggaggcu

SEQ ID NO: 267040 - RNA, 32 nt, Human
uuacgccuccaccccugcagccuccuggcccg

SEQ ID NO: 267041 - RNA, 32 nt, Human
uuacgccuguaaucccaauacuuugggaggcc

SEQ ID NO: 267042 - RNA, 32 nt, Human
uuacgccuguaaucccagcacugugggaggcc

SEQ ID NO: 267043 - RNA, 32 nt, Human
uuacgccuguaaucccagcacuuugagaggcu

SEQ ID NO: 267044 - RNA, 32 nt, Human
uuacgccuguaaucccagcacuuugggacgcc

SEQ ID NO: 267045 - RNA, 32 nt, Human
uuacgccuguaaucccagcacuuugggaggcc

SEQ ID NO: 267046 - RNA, 32 nt, Human
uuacgccuguaaucccagcacuuugggaggcg

SEQ ID NO: 267047 - RNA, 32 nt, Human
uuacgccuguaaucccagcacuuugggaggcu

SEQ ID NO: 267048 - RNA, 32 nt, Human
uuacgccuguaaucccagcacuuugggaggua

SEQ ID NO: 267049 - RNA, 32 nt, Human
uuacgccuguaaucccagcgcuuugggaggcc

SEQ ID NO: 267050 - RNA, 32 nt, Human
uuacgccuguaaucccaggacuuugggaggcc

SEQ ID NO: 267051 - RNA, 32 nt, Human
uuacgccuguaauccuagcacuuugggaggcc

SEQ ID NO: 267052 - RNA, 32 nt, Human
uuacgccuguaaucucagcacuuugggaggcc

SEQ ID NO: 267053 - RNA, 32 nt, Human
uuacgccuguaauuccagcacuuugggaggcc

SEQ ID NO: 267054 - RNA, 32 nt, Human
uuacgccuguuaucccagcacuuugggagguc

SEQ ID NO: 267055 - RNA, 32 nt, Human
uuacgcuaggucacacagcaguagagcugggc

SEQ ID NO: 267056 - RNA, 32 nt, Human
uuacgcuucccuaguucugccugccugcuugu

SEQ ID NO: 267057 - RNA, 32 nt, Human
uuacgcuucguccuccaccucucccuccaacg

SEQ ID NO: 267058 - RNA, 32 nt, Human
uuacggaaagcacgcuccagacaagcucggca

SEQ ID NO: 267059 - RNA, 32 nt, Human
uuacggacugcaaccuucaaauucagcugugg

SEQ ID NO: 267060 - RNA, 32 nt, Human
uuacggagaguuuccuauguuucacugugcaa

SEQ ID NO: 267061 - RNA, 32 nt, Human
uuacggagcuguguaaaccaguuucucauugc

SEQ ID NO: 267062 - RNA, 32 nt, Human
uuacggaggagaaaggguguggaggaagggag

SEQ ID NO: 267063 - RNA, 32 nt, Human
uuacggcacaguguccagggcagcugggugug

SEQ ID NO: 267064 - RNA, 32 nt, Human
uuacggcacccaugcuuucuuugaggaguuuu

SEQ ID NO: 267065 - RNA, 32 nt, Human
uuacggcauuacauuccauccagccugggcga

SEQ ID NO: 267066 - RNA, 32 nt, Human
uuacggcgaagggagagggaccuuaggggagc

SEQ ID NO: 267067 - RNA, 32 nt, Human
uuacggcucagugcaaccuugaccuccugggc

SEQ ID NO: 267068 - RNA, 32 nt, Human
uuacgggaggcugagagacugagggucuuucu

SEQ ID NO: 267069 - RNA, 32 nt, Human
uuacggucuccucuaugaguuaugucaugcug

SEQ ID NO: 267070 - RNA, 32 nt, Human
uuacguauaauccuuuucuuuucaagaugccu

SEQ ID NO: 267071 - RNA, 32 nt, Human
uuacguaucuuuucuccuccucccuaguguuc

SEQ ID NO: 267072 - RNA, 32 nt, Human
uuacgucacugcauuccagccugggugacaga

SEQ ID NO: 267073 - RNA, 32 nt, Human
uuacgucagaaucucagggaaggaggguccag

SEQ ID NO: 267074 - RNA, 32 nt, Human
uuacgucauuaugggaauaacaucccaucacc

SEQ ID NO: 267075 - RNA, 32 nt, Human
uuacguccuuuggacuggcuucucccaggauu

SEQ ID NO: 267076 - RNA, 32 nt, Human
uuacgugauccucucaccucagccucucaagu

SEQ ID NO: 267077 - RNA, 32 nt, Human
uuacguguaaggagucuaugcauuuuacagua

SEQ ID NO: 267078 - RNA, 32 nt, Human
uuacguguucccuacccugccacccagccacc

SEQ ID NO: 267079 - RNA, 32 nt, Human
uuacguucuuuucucaccuuugauccccucac

SEQ ID NO: 267080 - RNA, 32 nt, Human
uuacguugguggcuuugcagugguugaauaua

SEQ ID NO: 267081 - RNA, 32 nt, Human
uuacuaaaaacacaaaaauuagccaggugugg

SEQ ID NO: 267082 - RNA, 32 nt, Human
uuacuaaaaauacaaaaacaaaaauuagccag

SEQ ID NO: 267083 - RNA, 32 nt, Human
uuacuaaaaauacaaaaacuuagccgggcaug

SEQ ID NO: 267084 - RNA, 32 nt, Human
uuacuaaaaauacaaaaauuagccaggcaugg

SEQ ID NO: 267085 - RNA, 32 nt, Human
uuacuaaaaauacaaaaauuagccaggcgcac

SEQ ID NO: 267086 - RNA, 32 nt, Human
uuacuaaaaauacaaaaauuagccaggcgugg

SEQ ID NO: 267087 - RNA, 32 nt, Human
uuacuaaaaauacaaaaauuagccaggugugg

SEQ ID NO: 267088 - RNA, 32 nt, Human
uuacuaaaaauacaaaaauuagccgggcaugg

SEQ ID NO: 267089 - RNA, 32 nt, Human
uuacuaaaaauacaaaaauuagccgggcgugg

SEQ ID NO: 267090 - RNA, 32 nt, Human
uuacuaaaaauacaaaaauuagcugggcaugg

SEQ ID NO: 267091 - RNA, 32 nt, Human
uuacuaaaaauacaaaaauuagcugggugugg

SEQ ID NO: 267092 - RNA, 32 nt, Human
uuacuaaaaauacaaaaauuagucaggcaugg

SEQ ID NO: 267093 - RNA, 32 nt, Human
uuacuaaaaauacaaaauuagccaggcauggu

SEQ ID NO: 267094 - RNA, 32 nt, Human
uuacuaaaaauacaaaauuagccagguguggu

SEQ ID NO: 267095 - RNA, 32 nt, Human
uuacuaaaaauauaaaaauuagcugggugugg

SEQ ID NO: 267096 - RNA, 32 nt, Human
uuacuaaaagaacauaagucaagggaggauga

SEQ ID NO: 267097 - RNA, 32 nt, Human
uuacuaaaagguagaagacuucauggcuuacu

SEQ ID NO: 267098 - RNA, 32 nt, Human
uuacuaaaauagguaaccaggcgucucacagu

SEQ ID NO: 267099 - RNA, 32 nt, Human
uuacuaaaugaaagaauuaaugaggcagaagg

SEQ ID NO: 267100 - RNA, 32 nt, Human
uuacuaacgcagacuucauuuugguccgguuu

SEQ ID NO: 267101 - RNA, 32 nt, Human
uuacuaaucacaguauugugauuuucagugua

SEQ ID NO: 267102 - RNA, 32 nt, Human
uuacuaauucuuuugagaacuccuaagagacc

SEQ ID NO: 267103 - RNA, 32 nt, Human
uuacuacaaagacaaaugucuguuuuuauuug

SEQ ID NO: 267104 - RNA, 32 nt, Human
uuacuacaagcaguggcagagugaauguccuu

SEQ ID NO: 267105 - RNA, 32 nt, Human
uuacuacacuucaagaaagaucugaagcggaa

SEQ ID NO: 267106 - RNA, 32 nt, Human
uuacuacagccaaauaaucaguguuuuauaug

SEQ ID NO: 267107 - RNA, 32 nt, Human
uuacuaccacugguucuuccucuugggcuuuc

SEQ ID NO: 267108 - RNA, 32 nt, Human
uuacuacccuccugaggaaaucagaaaugauu

SEQ ID NO: 267109 - RNA, 32 nt, Human
uuacuaccuauguaacaaaccugcacauccug

SEQ ID NO: 267110 - RNA, 32 nt, Human
uuacuacgugagcucagaagagcacugggcac

SEQ ID NO: 267111 - RNA, 32 nt, Human
uuacuacugaaucucuaaucaauguucaucau

SEQ ID NO: 267112 - RNA, 32 nt, Human
uuacuacugcugccgucaauggugcuacuaua

SEQ ID NO: 267113 - RNA, 32 nt, Human
uuacuacugcuggggccuuccuucauccucug

SEQ ID NO: 267114 - RNA, 32 nt, Human
uuacuacugcuuuccaauccuuggugauauga

SEQ ID NO: 267115 - RNA, 32 nt, Human
uuacuacuggguuauuaauccugcugacagua

SEQ ID NO: 267116 - RNA, 32 nt, Human
uuacuagaauguacaaaugaacuccagauucu

SEQ ID NO: 267117 - RNA, 32 nt, Human
uuacuagagacaggguuucaccauguuggcca

SEQ ID NO: 267118 - RNA, 32 nt, Human
uuacuagagacaggguuucacuaugugggcug

SEQ ID NO: 267119 - RNA, 32 nt, Human
uuacuagagaucuagcagauaaguggguuaau

SEQ ID NO: 267120 - RNA, 32 nt, Human
uuacuagcuggguaaucauaaauaaauugggc

SEQ ID NO: 267121 - RNA, 32 nt, Human
uuacuaggacaggccuuugugcugaguagcaa

SEQ ID NO: 267122 - RNA, 32 nt, Human
uuacuaggaggcagcuggauggcagauacgag

SEQ ID NO: 267123 - RNA, 32 nt, Human
uuacuagggaggagagaaagggacaaaagcac

SEQ ID NO: 267124 - RNA, 32 nt, Human
uuacuauaaccacaucauaagaauucuggaaa

SEQ ID NO: 267125 - RNA, 32 nt, Human
uuacuauaauaaugauaaggcuguauauaaau

SEQ ID NO: 267126 - RNA, 32 nt, Human
uuacuaucagcuguuugagaccagcugcucgg

SEQ ID NO: 267127 - RNA, 32 nt, Human
uuacuauccccaaaucuguucuguaaauaaua

SEQ ID NO: 267128 - RNA, 32 nt, Human
uuacuaucuuuuccucuccccagaggaacacu

SEQ ID NO: 267129 - RNA, 32 nt, Human
uuacuaugaccuuccaaguuugacuuguauaa

SEQ ID NO: 267130 - RNA, 32 nt, Human
uuacuauguguauguauauagaugugcauaua

SEQ ID NO: 267131 - RNA, 32 nt, Human
uuacuauguugccagagaggaugcugugugcu

SEQ ID NO: 267132 - RNA, 32 nt, Human
uuacuauguuuaccuuuuauaaaacauaaccu

SEQ ID NO: 267133 - RNA, 32 nt, Human
uuacuauuccuucccuuccuaucuccuuucua

SEQ ID NO: 267134 - RNA, 32 nt, Human
uuacuauucugccuagcaaacucaaacuacga

SEQ ID NO: 267135 - RNA, 32 nt, Human
uuacuauugcugauggagccugggggaaccau

SEQ ID NO: 267136 - RNA, 32 nt, Human
uuacuauuguagcugcucacuauacccuccug

SEQ ID NO: 267137 - RNA, 32 nt, Human
uuacuauuuauaaugaauaaacaguuaugaaa

SEQ ID NO: 267138 - RNA, 32 nt, Human
uuacuauuuguacuugaagaaauaaauguuuu

SEQ ID NO: 267139 - RNA, 32 nt, Human
uuacuauuuuauauucuuuccugcuuuuugua

SEQ ID NO: 267140 - RNA, 32 nt, Human
uuacucaagaaugaaguagaacuauuuuuaaa

SEQ ID NO: 267141 - RNA, 32 nt, Human
uuacucaagacucugaggaugacuuggacugg

SEQ ID NO: 267142 - RNA, 32 nt, Human
uuacucacaccuguaaucccagcacuuuggga

SEQ ID NO: 267143 - RNA, 32 nt, Human
uuacucaccaucucacagaggagaaacagaaa

SEQ ID NO: 267144 - RNA, 32 nt, Human
uuacucacugaugguucagccacuuccagaac

SEQ ID NO: 267145 - RNA, 32 nt, Human
uuacucagaccaccuacuucucuagcagcacu

SEQ ID NO: 267146 - RNA, 32 nt, Human
uuacucagcuuuauaacaaauguggcuccaag

SEQ ID NO: 267147 - RNA, 32 nt, Human
uuacucaggaggcugaggcaggagaaucacuu

SEQ ID NO: 267148 - RNA, 32 nt, Human
uuacucaggaggcugaggcaggagaauggcgu

SEQ ID NO: 267149 - RNA, 32 nt, Human
uuacucaggaggcugagucaggagaaucacuu

SEQ ID NO: 267150 - RNA, 32 nt, Human
uuacucaggcuggaguaaaauggugccaugcu

SEQ ID NO: 267151 - RNA, 32 nt, Human
uuacucaggguucaucuguccauggccuuucu

SEQ ID NO: 267152 - RNA, 32 nt, Human
uuacucaguagcugaggcaggagaaucgcuug

SEQ ID NO: 267153 - RNA, 32 nt, Human
uuacucauccaucugcugcccucaguccacuc

SEQ ID NO: 267154 - RNA, 32 nt, Human
uuacucauggcagaaggcaaagcaaaggcagg

SEQ ID NO: 267155 - RNA, 32 nt, Human
uuacucauguacauuggucuuucuacauaguu

SEQ ID NO: 267156 - RNA, 32 nt, Human
uuacucauuucuagggaagaaauucuaaaucc

SEQ ID NO: 267157 - RNA, 22 nt, Human
uuacuccaacaggacugaggga

SEQ ID NO: 267158 - RNA, 32 nt, Human
uuacuccaagcccacaauugccgugaagccca

SEQ ID NO: 267159 - RNA, 32 nt, Human
uuacuccaaucagcuggcaauuuugagcugcc

SEQ ID NO: 267160 - RNA, 32 nt, Human
uuacuccaaugauuagcucuguccucauuguc

SEQ ID NO: 267161 - RNA, 32 nt, Human
uuacuccaccugcucaccccgcaagcugaguc

SEQ ID NO: 267162 - RNA, 32 nt, Human
uuacuccacugcacuccagccugggcaacaga

SEQ ID NO: 267163 - RNA, 32 nt, Human
uuacuccagaggcuaaggcaggagaauugcuu

SEQ ID NO: 267164 - RNA, 32 nt, Human
uuacuccaucggcaggcccgagcccagggacc

SEQ ID NO: 267165 - RNA, 32 nt, Human
uuacuccaugaggacaaauacuggggaggugu

SEQ ID NO: 267166 - RNA, 32 nt, Human
uuacuccaugccaccggagaaacucuggugaa

SEQ ID NO: 267167 - RNA, 32 nt, Human
uuacucccaggauucagcagaagauugcguua

SEQ ID NO: 267168 - RNA, 32 nt, Human
uuacucccaggccuccugucaccagcugugug

SEQ ID NO: 267169 - RNA, 32 nt, Human
uuacucccaguauuauguucauuuaauaaauu

SEQ ID NO: 267170 - RNA, 32 nt, Human
uuacuccccugccucccccuaccccagcccau

SEQ ID NO: 267171 - RNA, 32 nt, Human
uuacuccccuggcugcaaaugcuuuucugaaa

SEQ ID NO: 267172 - RNA, 32 nt, Human
uuacucccuaaacaacacuugacaggcuguug

SEQ ID NO: 267173 - RNA, 32 nt, Human
uuacucccucauaacauaucuacuugcacaau

SEQ ID NO: 267174 - RNA, 32 nt, Human
uuacucccuggcuuccaguccuaggcaaucac

SEQ ID NO: 267175 - RNA, 32 nt, Human
uuacucccuuucucuuacuaccuguggcucau

SEQ ID NO: 267176 - RNA, 32 nt, Human
uuacucccuuucucuuccuaccuguggcucau

SEQ ID NO: 267177 - RNA, 32 nt, Human
uuacuccgucuuugaagccagcauccuagcau

SEQ ID NO: 267178 - RNA, 32 nt, Human
uuacuccucuuuccuuccuuccuccuuuccua

SEQ ID NO: 267179 - RNA, 32 nt, Human
uuacuccugccagcuugggaaaaggccggaga

SEQ ID NO: 267180 - RNA, 32 nt, Human
uuacuccugccuccccauuccuugccugucag

SEQ ID NO: 267181 - RNA, 32 nt, Human
uuacuccuuucccucacuuucuccagugcuca

SEQ ID NO: 267182 - RNA, 32 nt, Human
uuacuccuuugagaauucuuuaacaauauuua

SEQ ID NO: 267183 - RNA, 32 nt, Human
uuacucgcggucaucccggccugggccuuuua

SEQ ID NO: 267184 - RNA, 32 nt, Human
uuacucggaaggcugaggugggcggaugacug

SEQ ID NO: 267185 - RNA, 32 nt, Human
uuacucggccccuacucacauuuccuuggguu

SEQ ID NO: 267186 - RNA, 32 nt, Human
uuacucgggaggaugagucaggagaauugcuu

SEQ ID NO: 267187 - RNA, 32 nt, Human
uuacucgggaggcugagacaggagaaucgcuu

SEQ ID NO: 267188 - RNA, 32 nt, Human
uuacucgggaggcugaggcaggagaaucacuu

SEQ ID NO: 267189 - RNA, 32 nt, Human
uuacucgggaggcugaggcaggagaaucgcuu

SEQ ID NO: 267190 - RNA, 32 nt, Human
uuacucgggaggcugaggcaggaggaucacuu

SEQ ID NO: 267191 - RNA, 32 nt, Human
uuacucggguggcugaggcaggagaaucacuu

SEQ ID NO: 267192 - RNA, 32 nt, Human
uuacucuauuaaaucuagaauuagccgggcau

SEQ ID NO: 267193 - RNA, 32 nt, Human
uuacucucaaauacucaaauauauguuuucau

SEQ ID NO: 267194 - RNA, 32 nt, Human
uuacucucagaggagauucuguugcuuuugaa

SEQ ID NO: 267195 - RNA, 32 nt, Human
uuacucucagcagucagaggcuugcuugcucu

SEQ ID NO: 267196 - RNA, 32 nt, Human
uuacucucaggggcuucucugucaucugacuu

SEQ ID NO: 267197 - RNA, 32 nt, Human
uuacucucauacccuucuccuuaguccuucau

SEQ ID NO: 267198 - RNA, 32 nt, Human
uuacucucgccaggaacaggcuccgacgagau

SEQ ID NO: 267199 - RNA, 32 nt, Human
uuacucucgcccaggcuagagugcaguggcau

SEQ ID NO: 267200 - RNA, 32 nt, Human
uuacucucuccuccuagaaugcugcccuugac

SEQ ID NO: 267201 - RNA, 32 nt, Human
uuacucugaccugccgcagucaccucucacuu

SEQ ID NO: 267202 - RNA, 32 nt, Human
uuacucugagggucaagaauugccgcuuccuu

SEQ ID NO: 267203 - RNA, 32 nt, Human
uuacucugcaaaggaaucuggacuuuauucug

SEQ ID NO: 267204 - RNA, 32 nt, Human
uuacucugcccugggccgccugaggccuggca

SEQ ID NO: 267205 - RNA, 32 nt, Human
uuacucuguugccaggcuggagugcaguggcg

SEQ ID NO: 267206 - RNA, 32 nt, Human
uuacucuguugcuaggcuggagugcaguggug

SEQ ID NO: 267207 - RNA, 32 nt, Human
uuacucuuacugaucaauauaacucugcagac

SEQ ID NO: 267208 - RNA, 32 nt, Human
uuacucuuagagauaagacuucagcaggggcu

SEQ ID NO: 267209 - RNA, 32 nt, Human
uuacucuuagucaaguggaaugugcaugcugg

SEQ ID NO: 267210 - RNA, 32 nt, Human
uuacucuuaucaucuagaaauguaauaugcuu

SEQ ID NO: 267211 - RNA, 32 nt, Human
uuacucuucaucuguagcgugaccucaaggua

SEQ ID NO: 267212 - RNA, 32 nt, Human
uuacucuuccucuaacauuuuugaggaaguuu

SEQ ID NO: 267213 - RNA, 32 nt, Human
uuacucuuccuuuuaaguuuucuaaguacguc

SEQ ID NO: 267214 - RNA, 32 nt, Human
uuacucuugccugugaaccucaugcaugaaag

SEQ ID NO: 267215 - RNA, 32 nt, Human
uuacucuugucacccaggcuggagugcagugg

SEQ ID NO: 267216 - RNA, 32 nt, Human
uuacucuuguugcccaggcuagagugcaaugg

SEQ ID NO: 267217 - RNA, 32 nt, Human
uuacucuuguugcccaggcuggagugcaacgg

SEQ ID NO: 267218 - RNA, 32 nt, Human
uuacucuuuauccugagacuguuuauagcuua

SEQ ID NO: 267219 - RNA, 32 nt, Human
uuacucuuucacuaacuugguguaugaucuug

SEQ ID NO: 267220 - RNA, 32 nt, Human
uuacucuuucugagguccaggguccuuauaug

SEQ ID NO: 267221 - RNA, 32 nt, Human
uuacucuuugugacuucgaaaucuuuucaugu

SEQ ID NO: 267222 - RNA, 32 nt, Human
uuacugaaaacagugccuuucuuuguaagcag

SEQ ID NO: 267223 - RNA, 32 nt, Human
uuacugaaaauacaaaauaauuagccgggugu

SEQ ID NO: 267224 - RNA, 32 nt, Human
uuacugaaaauagaauuggccccauggcuuga

SEQ ID NO: 267225 - RNA, 31 nt, Human
uuacugaaccucucugugccucagucaauag

SEQ ID NO: 267226 - RNA, 32 nt, Human
uuacugaagagggagggagggaggagugcuga

SEQ ID NO: 267227 - RNA, 32 nt, Human
uuacugaaucucucucccuuguuuuuauuacg

SEQ ID NO: 267228 - RNA, 32 nt, Human
uuacugacagaagaguuuggaauaguacaugu

SEQ ID NO: 267229 - RNA, 32 nt, Human
uuacugacccgcuuuccacaucagcccaaggu

SEQ ID NO: 267230 - RNA, 32 nt, Human
uuacugacggaagaaguauugguuccagacuu

SEQ ID NO: 267231 - RNA, 32 nt, Human
uuacugagaaaggugaaaugaaaacaagcuca

SEQ ID NO: 267232 - RNA, 32 nt, Human
uuacugagcuugcacaugauacaugauagcug

SEQ ID NO: 267233 - RNA, 32 nt, Human
uuacugaggaauugaguguaagaguggaauaa

SEQ ID NO: 267234 - RNA, 32 nt, Human
uuacugauacuacaacuuuuguuuucugaugg

SEQ ID NO: 267235 - RNA, 32 nt, Human
uuacugauaguugggaaaagaagauuggguua

SEQ ID NO: 267236 - RNA, 32 nt, Human
uuacugaugcuaaaucacaguacaugcaugau

SEQ ID NO: 267237 - RNA, 32 nt, Human
uuacugcaaaaguucagauggaaaaguaauug

SEQ ID NO: 267238 - RNA, 32 nt, Human
uuacugcagaacaaauuacccccaaauuuagu

SEQ ID NO: 267239 - RNA, 32 nt, Human
uuacugcagcacuguugguguucggagcucuu

SEQ ID NO: 267240 - RNA, 32 nt, Human
uuacugcagccuuugccuccccggcucgagca

SEQ ID NO: 267241 - RNA, 32 nt, Human
uuacugcauaggaaacaaucuaccucaucauu

SEQ ID NO: 267242 - RNA, 32 nt, Human
uuacugcaucacugcaccaucuuuccuauuuc

SEQ ID NO: 267243 - RNA, 32 nt, Human
uuacugcauccagccaggcugcagggagugag

SEQ ID NO: 267244 - RNA, 32 nt, Human
uuacugcauccagcucagcguccaugaucuaa

SEQ ID NO: 267245 - RNA, 32 nt, Human
uuacugcaugccacgcacuguguugggcuuag

SEQ ID NO: 267246 - RNA, 32 nt, Human
uuacugccacaaaucagauuauuugggauuua

SEQ ID NO: 267247 - RNA, 32 nt, Human
uuacugccacagcugcucaccuugucuggcaa

SEQ ID NO: 267248 - RNA, 32 nt, Human
uuacugccaccugaccugaagcagaagaaauc

SEQ ID NO: 267249 - RNA, 32 nt, Human
uuacugccaucaggaaggugcuacuggccucg

SEQ ID NO: 267250 - RNA, 32 nt, Human
uuacugccuccccuucucccugccuccagaau

SEQ ID NO: 267251 - RNA, 32 nt, Human
uuacugcgccaccacaucacaugaccuuaaca

SEQ ID NO: 267252 - RNA, 32 nt, Human
uuacugcuagcccccgggggugccaggggucc

SEQ ID NO: 267253 - RNA, 32 nt, Human
uuacugcuauggaagaaaaauacagagugcuc

SEQ ID NO: 267254 - RNA, 32 nt, Human
uuacugcugcccaccucaccuuuccucugcug

SEQ ID NO: 267255 - RNA, 29 nt, Human
uuacugcugcugcuauugucuuuccuuug

SEQ ID NO: 267256 - RNA, 32 nt, Human
uuacugcuggguuuuggaggcugcgauaaaau

SEQ ID NO: 267257 - RNA, 32 nt, Human
uuacugcuucacagccuccccuggugaagaca

SEQ ID NO: 267258 - RNA, 32 nt, Human
uuacugcuuccuaaggauagauuaucaagaaa

SEQ ID NO: 267259 - RNA, 32 nt, Human
uuacuggaacuccauucacugugaccugaagu

SEQ ID NO: 267260 - RNA, 21 nt, Human
uuacuggaagacuccaugccc

SEQ ID NO: 267261 - RNA, 32 nt, Human
uuacuggagaacugaagagccagcuagccuac

SEQ ID NO: 267262 - RNA, 32 nt, Human
uuacuggagacaggguuucaccauguuggcca

SEQ ID NO: 267263 - RNA, 32 nt, Human
uuacuggagacggguuucaccguguuggccag

SEQ ID NO: 267264 - RNA, 32 nt, Human
uuacuggagagggaacucugugaggagaugcu

SEQ ID NO: 267265 - RNA, 32 nt, Human
uuacuggaguccuccauuguguggccacacag

SEQ ID NO: 267266 - RNA, 32 nt, Human
uuacuggagucuccugaugcugagaugaauag

SEQ ID NO: 267267 - RNA, 32 nt, Human
uuacuggcacacaccaccaugcacaguugcag

SEQ ID NO: 267268 - RNA, 32 nt, Human
uuacuggcacugaguaucacugaauuucuuag

SEQ ID NO: 267269 - RNA, 32 nt, Human
uuacuggcauuaaaaaggugggagaaauggaa

SEQ ID NO: 267270 - RNA, 32 nt, Human
uuacuggcuuugcccugcacaccaauauuccu

SEQ ID NO: 267271 - RNA, 32 nt, Human
uuacuggggagaauagaaagaaaacaauugac

SEQ ID NO: 267272 - RNA, 32 nt, Human
uuacuggggaggaggaagcggacagaggaagc

SEQ ID NO: 267273 - RNA, 32 nt, Human
uuacuggggaggcugaggcaggagaaucacuu

SEQ ID NO: 267274 - RNA, 32 nt, Human
uuacuggggugagggacagcuuacuccauuug

SEQ ID NO: 267275 - RNA, 32 nt, Human
uuacugguggaggguguccagguucuuggcau

SEQ ID NO: 267276 - RNA, 32 nt, Human
uuacuguagucuccauuuagauauuaaaagaa

SEQ ID NO: 267277 - RNA, 32 nt, Human
uuacuguauaaauauaauuuaucauuuguacc

SEQ ID NO: 267278 - RNA, 32 nt, Human
uuacuguauauacuuugccuuuccauaaucac

SEQ ID NO: 267279 - RNA, 32 nt, Human
uuacuguauuuugcuuccuacuuuaugucuaa

SEQ ID NO: 267280 - RNA, 32 nt, Human
uuacugucauugaaggaaaaaugauagccaua

SEQ ID NO: 267281 - RNA, 32 nt, Human
uuacuguccuaaccccagaggcucccugcucu

SEQ ID NO: 267282 - RNA, 32 nt, Human
uuacuguccuagugaauagcuuccaccuccuu

SEQ ID NO: 267283 - RNA, 32 nt, Human
uuacugucugguuuuaacaauuuccuuuauau

SEQ ID NO: 267284 - RNA, 32 nt, Human
uuacugugaaguucuauagaguguuaaauaca

SEQ ID NO: 267285 - RNA, 31 nt, Human
uuacugugcaucucugggcauggccugugug

SEQ ID NO: 267286 - RNA, 32 nt, Human
uuacugugcuguguugcuaaugguuaaagaag

SEQ ID NO: 267287 - RNA, 32 nt, Human
uuacugugcuuuucacaccaucucagagguug

SEQ ID NO: 267288 - RNA, 32 nt, Human
uuacuguggaagguggaagagcugaggagggc

SEQ ID NO: 267289 - RNA, 32 nt, Human
uuacuguuccccaacccacaacuaucuuuuaa

SEQ ID NO: 267290 - RNA, 32 nt, Human
uuacuguugcuuguauuuggacucauuugggg

SEQ ID NO: 267291 - RNA, 32 nt, Human
uuacuguuguugagaagcaacagcccuaucac

SEQ ID NO: 267292 - RNA, 32 nt, Human
uuacuguuucaauaaccucugccucccccacc

SEQ ID NO: 267293 - RNA, 32 nt, Human
uuacuguuuuugcuuuaagcagccugcauaua

SEQ ID NO: 267294 - RNA, 32 nt, Human
uuacuuaaguugaaaaagcuucaacucucaag

SEQ ID NO: 267295 - RNA, 32 nt, Human
uuacuuacagaagaaggacugauacaaagaaa

SEQ ID NO: 267296 - RNA, 32 nt, Human
uuacuuacuacugcacuccugcuuuuguggga

SEQ ID NO: 267297 - RNA, 32 nt, Human
uuacuuagcagaaccacauauuuuagacacuu

SEQ ID NO: 267298 - RNA, 32 nt, Human
uuacuuagccugggugacagagugagacccua

SEQ ID NO: 267299 - RNA, 32 nt, Human
uuacuuagcugcaugagaauaauacuauuaua

SEQ ID NO: 267300 - RNA, 32 nt, Human
uuacuuaggaggcugaggcaggagaaucacau

SEQ ID NO: 267301 - RNA, 32 nt, Human
uuacuuaguggccucuuuaauucuccacggug

SEQ ID NO: 267302 - RNA, 32 nt, Human
uuacuuauaaugaaguauuugggagggugguu

SEQ ID NO: 267303 - RNA, 32 nt, Human
uuacuuaugauacuuuguguaaaaaggaaaaa

SEQ ID NO: 267304 - RNA, 32 nt, Human
uuacuuauggagcaccaaagcauuuggauaaa

SEQ ID NO: 267305 - RNA, 32 nt, Human
uuacuuauucaucccucccucuccuuuaaccc

SEQ ID NO: 267306 - RNA, 32 nt, Human
uuacuucaaauccuuuggucacugugauuuca

SEQ ID NO: 267307 - RNA, 32 nt, Human
uuacuucaaccugggagguugaggcugcagug

SEQ ID NO: 267308 - RNA, 32 nt, Human
uuacuucaagccuccaggauggcaauccaguu

SEQ ID NO: 267309 - RNA, 32 nt, Human
uuacuucaaggcagcaagaauugcuauagaga

SEQ ID NO: 267310 - RNA, 32 nt, Human
uuacuucaagggcagccagcaggccuggaugg

SEQ ID NO: 267311 - RNA, 31 nt, Human
uuacuucaccucucugagccuguuuccucau

SEQ ID NO: 267312 - RNA, 31 nt, Human
uuacuucaccucucugggcuucaguugucuc

SEQ ID NO: 267313 - RNA, 32 nt, Human
uuacuucaccucuuacgccucaguuuucucau

SEQ ID NO: 267314 - RNA, 32 nt, Human
uuacuucacuuccagucuucauucccucaucc

SEQ ID NO: 267315 - RNA, 32 nt, Human
uuacuucaucuuuucuggaguuugagguugug

SEQ ID NO: 267316 - RNA, 32 nt, Human
uuacuucauuaucugcuagugucauccacagc

SEQ ID NO: 267317 - RNA, 25 nt, Human
uuacuuccaagacagacuuuuaaca

SEQ ID NO: 267318 - RNA, 32 nt, Human
uuacuuccgugugcuuucaguuuuuccaucau

SEQ ID NO: 267319 - RNA, 32 nt, Human
uuacuuccuagagugucugcuugaugcaugga

SEQ ID NO: 267320 - RNA, 32 nt, Human
uuacuuccuccaccccucccuaucucaccugc

SEQ ID NO: 267321 - RNA, 32 nt, Human
uuacuuccucuccccucucccauuuugcacug

SEQ ID NO: 267322 - RNA, 32 nt, Human
uuacuuccugcguggcccagcauccaggcugu

SEQ ID NO: 267323 - RNA, 32 nt, Human
uuacuucgugguagcugggcuugcagggaacg

SEQ ID NO: 267324 - RNA, 32 nt, Human
uuacuucuagaggagcuuagaguuuauugcag

SEQ ID NO: 267325 - RNA, 32 nt, Human
uuacuucuauguugaaauaaaauuuaaaauca

SEQ ID NO: 267326 - RNA, 32 nt, Human
uuacuucucaaggauuauuagaaucuuaggua

SEQ ID NO: 267327 - RNA, 32 nt, Human
uuacuucuccaaauaaugaacuaccugauuca

SEQ ID NO: 267328 - RNA, 32 nt, Human
uuacuucuccaucucacuucuggcuuuucuca

SEQ ID NO: 267329 - RNA, 32 nt, Human
uuacuucucccagagaaaggaaaaucuuggaa

SEQ ID NO: 267330 - RNA, 32 nt, Human
uuacuucucgaauugaagcaagugaggccuga

SEQ ID NO: 267331 - RNA, 32 nt, Human
uuacuucucuaacaggaucaccaguuugcucc

SEQ ID NO: 267332 - RNA, 32 nt, Human
uuacuucugggaggucacuggaggccagcuca

SEQ ID NO: 267333 - RNA, 32 nt, Human
uuacuucugucacggauugaagaucggcggau

SEQ ID NO: 267334 - RNA, 32 nt, Human
uuacuucugucugauccugggccuuucuuuca

SEQ ID NO: 267335 - RNA, 32 nt, Human
uuacuugaaaagcuuucagaaagcuuuugaaa

SEQ ID NO: 267336 - RNA, 32 nt, Human
uuacuugagauggaguuugguucuguccccga

SEQ ID NO: 267337 - RNA, 32 nt, Human
uuacuugaggcagcucuugugggugaaaaguu

SEQ ID NO: 267338 - RNA, 32 nt, Human
uuacuugaugaaacaaaacuauaccucugaau

SEQ ID NO: 267339 - RNA, 32 nt, Human
uuacuugaugauuuuuaacuuuuuauuucuaa

SEQ ID NO: 267340 - RNA, 32 nt, Human
uuacuugcaagaugugcaagcacacaagaccu

SEQ ID NO: 267341 - RNA, 32 nt, Human
uuacuugcacacagccacaaagccagccagag

SEQ ID NO: 267342 - RNA, 32 nt, Human
uuacuugcaucccugugucuguauuuacagua

SEQ ID NO: 267343 - RNA, 32 nt, Human
uuacuugccaagcagugcacauuucauaguuu

SEQ ID NO: 267344 - RNA, 32 nt, Human
uuacuugccaaggcaagaucuagagggaaccc

SEQ ID NO: 267345 - RNA, 32 nt, Human
uuacuuggauaccggcauauaaaggagaggac

SEQ ID NO: 267346 - RNA, 32 nt, Human
uuacuugggaggcugaggcaggagaaucgcuu

SEQ ID NO: 267347 - RNA, 32 nt, Human
uuacuugggaggcugaggcaggagaauugcuu

SEQ ID NO: 267348 - RNA, 32 nt, Human
uuacuugggaggcugaggugggaggaucuuuu

SEQ ID NO: 267349 - RNA, 32 nt, Human
uuacuuggguuauuucuugaaugaacauacag

SEQ ID NO: 267350 - RNA, 32 nt, Human
uuacuugguggcuaauaaauguuacauucuuu

SEQ ID NO: 267351 - RNA, 32 nt, Human
uuacuugguuucccuugugcagccuggggcuc

SEQ ID NO: 267352 - RNA, 32 nt, Human
uuacuuguauaugauguagucaccuuaacuau

SEQ ID NO: 267353 - RNA, 32 nt, Human
uuacuugucauagucaauacagcaaguaagua

SEQ ID NO: 267354 - RNA, 32 nt, Human
uuacuugucaucugacaaccacuauuuagcua

SEQ ID NO: 267355 - RNA, 32 nt, Human
uuacuugucugccucuuugaccaccugugaac

SEQ ID NO: 267356 - RNA, 32 nt, Human
uuacuuuaaaaaggcucuggauuuucagaagc

SEQ ID NO: 267357 - RNA, 32 nt, Human
uuacuuuaaaaaguaaccagaauccaagguau

SEQ ID NO: 267358 - RNA, 32 nt, Human
uuacuuuaaagugaauguuuuucucuucagcu

SEQ ID NO: 267359 - RNA, 32 nt, Human
uuacuuuaaugaccauccgcagagccauccug

SEQ ID NO: 267360 - RNA, 32 nt, Human
uuacuuuacugaucaggugacuuugagucaau

SEQ ID NO: 267361 - RNA, 32 nt, Human
uuacuuuacuuugucccagguuggagucccua

SEQ ID NO: 267362 - RNA, 32 nt, Human
uuacuuuagaaaacagacaaaauuuccuuuua

SEQ ID NO: 267363 - RNA, 32 nt, Human
uuacuuuagcauugaagccacuuugaaaccug

SEQ ID NO: 267364 - RNA, 32 nt, Human
uuacuuuaugaauauauucaugacauuuguaa

SEQ ID NO: 267365 - RNA, 32 nt, Human
uuacuuuauuacauaucuuuuauagggaaaca

SEQ ID NO: 267366 - RNA, 32 nt, Human
uuacuuucacaaaagaacacugagaugagaua

SEQ ID NO: 267367 - RNA, 32 nt, Human
uuacuuucaggagccucaacacgagagcucaa

SEQ ID NO: 267368 - RNA, 32 nt, Human
uuacuuuccacuucugggcuguauuuugaugu

SEQ ID NO: 267369 - RNA, 32 nt, Human
uuacuuuccagaaagguuucuaaaguuacaga

SEQ ID NO: 267370 - RNA, 32 nt, Human
uuacuuuccagaugaagagcugagccugauuc

SEQ ID NO: 267371 - RNA, 32 nt, Human
uuacuuuccauccccaagccagccugcccccu

SEQ ID NO: 267372 - RNA, 32 nt, Human
uuacuuucccauucacuagguaaagaaucaug

SEQ ID NO: 267373 - RNA, 32 nt, Human
uuacuuucccuguaauuccuggccugaaagcc

SEQ ID NO: 267374 - RNA, 32 nt, Human
uuacuuuccucugccugccucaguuuaauuau

SEQ ID NO: 267375 - RNA, 32 nt, Human
uuacuuucuaucuguacuccucuccuucucuu

SEQ ID NO: 267376 - RNA, 32 nt, Human
uuacuuucucuuuccuccuuuucaaaucuuuu

SEQ ID NO: 267377 - RNA, 32 nt, Human
uuacuuucugagcaucugcaguacagucuuau

SEQ ID NO: 267378 - RNA, 32 nt, Human
uuacuuucuugaugaugcugccuuuuaaaagc

SEQ ID NO: 267379 - RNA, 32 nt, Human
uuacuuucuuuucuguguuuuuaaguuaauuu

SEQ ID NO: 267380 - RNA, 32 nt, Human
uuacuuucuuuuuccgagauggagucuugcuc

SEQ ID NO: 267381 - RNA, 32 nt, Human
uuacuuugcauaguuucaugagcacuggccag

SEQ ID NO: 267382 - RNA, 32 nt, Human
uuacuuugcuccauguaauuuuaugaauuggc

SEQ ID NO: 267383 - RNA, 32 nt, Human
uuacuuugcucggcgcugcucccaggcaucuc

SEQ ID NO: 267384 - RNA, 32 nt, Human
uuacuuugcugaggccuuacuuccccaguagu

SEQ ID NO: 267385 - RNA, 32 nt, Human
uuacuuugcuugagaauccucuccuuucuuau

SEQ ID NO: 267386 - RNA, 32 nt, Human
uuacuuuggcuaaaaggaggugagcggcacuc

SEQ ID NO: 267387 - RNA, 32 nt, Human
uuacuuugggguccaaggacaggauggucaac

SEQ ID NO: 267388 - RNA, 32 nt, Human
uuacuuuguaauucaaaaggccuguuaaccuu

SEQ ID NO: 267389 - RNA, 32 nt, Human
uuacuuuguucugcuucaaggcuguuuugacu

SEQ ID NO: 267390 - RNA, 32 nt, Human
uuacuuuuaaugcugucuuaaaaugaacauuc

SEQ ID NO: 267391 - RNA, 32 nt, Human
uuacuuuuacuuaaugcuuuuguguuuuguua

SEQ ID NO: 267392 - RNA, 32 nt, Human
uuacuuuucacagaaaagcugcugucuguugg

SEQ ID NO: 267393 - RNA, 24 nt, Human
uuacuuuucuagcagauuuuaaca

SEQ ID NO: 267394 - RNA, 22 nt, Human
uuacuuuucuuguauuuaaaca

SEQ ID NO: 267395 - RNA, 32 nt, Human
uuacuuuugacucacaguguuaggcaagccag

SEQ ID NO: 267396 - RNA, 32 nt, Human
uuacuuuugcaucuuuacuuguggagcugugg

SEQ ID NO: 267397 - RNA, 32 nt, Human
uuacuuuugcugccugugccuuuggugucaua

SEQ ID NO: 267398 - RNA, 32 nt, Human
uuacuuuuuacaaagaaugaaaccaaauggac

SEQ ID NO: 267399 - RNA, 32 nt, Human
uuacuuuuucauuuuggggugaagauucaguu

SEQ ID NO: 267400 - RNA, 23 nt, Human
uuacuuuuugcacaauuuuaaua

SEQ ID NO: 267401 - RNA, 32 nt, Human
uuacuuuuuguauaacgaacaaaugcugucuc

SEQ ID NO: 267402 - RNA, 32 nt, Human
uuagaaaaauggggagaaagcuggaagaacaa

SEQ ID NO: 267403 - RNA, 32 nt, Human
uuagaaaacauguuccccaucuggugcucuua

SEQ ID NO: 267404 - RNA, 32 nt, Human
uuagaaaaggaaaaggauucgaggagaaggga

SEQ ID NO: 267405 - RNA, 32 nt, Human
uuagaaaaucagcagaggcagcaaugauguga

SEQ ID NO: 267406 - RNA, 32 nt, Human
uuagaaaaugucaauauagacauaucacaggg

SEQ ID NO: 267407 - RNA, 32 nt, Human
uuagaaaauguuccuuuuacugagaugcaguu

SEQ ID NO: 267408 - RNA, 32 nt, Human
uuagaaacagaaguggcuggaaacucacaugg

SEQ ID NO: 267409 - RNA, 24 nt, Human
uuagaaacagaguuaaagucucaa

SEQ ID NO: 267410 - RNA, 32 nt, Human
uuagaaacauauaggaauaaugccuaggggaa

SEQ ID NO: 267411 - RNA, 32 nt, Human
uuagaaaccagccuggccaacauggcaaaacc

SEQ ID NO: 267412 - RNA, 32 nt, Human
uuagaaaccagccuggccaacguggugaaacc

SEQ ID NO: 267413 - RNA, 32 nt, Human
uuagaaacccacaaaaucagaaacacaguaca

SEQ ID NO: 267414 - RNA, 32 nt, Human
uuagaaacgaugaaccuguaaucacucuggcc

SEQ ID NO: 267415 - RNA, 32 nt, Human
uuagaaacuaucccuaaauguaaagaucuuuu

SEQ ID NO: 267416 - RNA, 32 nt, Human
uuagaaacucagaaauggaaagggaacaauga

SEQ ID NO: 267417 - RNA, 32 nt, Human
uuagaaacucccacaagcucugccuucccucc

SEQ ID NO: 267418 - RNA, 22 nt, Human
uuagaaacuucaccgucuucaa

SEQ ID NO: 267419 - RNA, 32 nt, Human
uuagaaagaaggaagaagucagcucugagugu

SEQ ID NO: 267420 - RNA, 32 nt, Human
uuagaaagacaaguggguggcuuugauggacg

SEQ ID NO: 267421 - RNA, 32 nt, Human
uuagaaagacaugcauuuauauuuuguuucug

SEQ ID NO: 267422 - RNA, 32 nt, Human
uuagaaagauuuugguaacuaggugucucagg

SEQ ID NO: 267423 - RNA, 32 nt, Human
uuagaaagcgagccucacagggcggcucugga

SEQ ID NO: 267424 - RNA, 32 nt, Human
uuagaaaggaaaaguuuucuucauuuagcugc

SEQ ID NO: 267425 - RNA, 32 nt, Human
uuagaaaggaacacugaacaaaguucaaaagu

SEQ ID NO: 267426 - RNA, 32 nt, Human
uuagaaaggacauuucugccauuguucaggcu

SEQ ID NO: 267427 - RNA, 32 nt, Human
uuagaaagggagguggcggauggagugggaag

SEQ ID NO: 267428 - RNA, 32 nt, Human
uuagaaaguccccagugccgcuguccguauga

SEQ ID NO: 267429 - RNA, 32 nt, Human
uuagaaagucuucugcaaacccauuucugaaa

SEQ ID NO: 267430 - RNA, 32 nt, Human
uuagaaagugauuuuuaugcucgcacuauaaa

SEQ ID NO: 267431 - RNA, 32 nt, Human
uuagaaaguucuuccuuagacaacugaaaccc

SEQ ID NO: 267432 - RNA, 32 nt, Human
uuagaaauaagcaagacagagcaggaaaugga

SEQ ID NO: 267433 - RNA, 32 nt, Human
uuagaaauagccacuugccuauucccuggggc

SEQ ID NO: 267434 - RNA, 32 nt, Human
uuagaaauagcuucaaaagcacuuguguaucu

SEQ ID NO: 267435 - RNA, 32 nt, Human
uuagaaaucccaguuggcacagccugggcaag

SEQ ID NO: 267436 - RNA, 32 nt, Human
uuagaaauccugaagaauucagucuucgucua

SEQ ID NO: 267437 - RNA, 32 nt, Human
uuagaaaucugaagacuuucguuuacagcugu

SEQ ID NO: 267438 - RNA, 32 nt, Human
uuagaaaugcucagacuuccccagaaaugaac

SEQ ID NO: 267439 - RNA, 23 nt, Human
uuagaaauggaugcaaauguuag

SEQ ID NO: 267440 - RNA, 32 nt, Human
uuagaaauugaguugaacaggccaggugcggu

SEQ ID NO: 267441 - RNA, 32 nt, Human
uuagaaauuuccccuuuugcugccucaggauc

SEQ ID NO: 267442 - RNA, 32 nt, Human
uuagaacaaaggacagaguaugaacaccuggg

SEQ ID NO: 267443 - RNA, 32 nt, Human
uuagaacaaugaauuauccagcauucagaucu

SEQ ID NO: 267444 - RNA, 19 nt, Human
uuagaacagaauaccuucc

SEQ ID NO: 267445 - RNA, 32 nt, Human
uuagaacagcugguuacugagcucucaggcca

SEQ ID NO: 267446 - RNA, 32 nt, Human
uuagaacauauauuggagagaagcccuguuau

SEQ ID NO: 267447 - RNA, 32 nt, Human
uuagaacaugaccccacacaaugcugcuugac

SEQ ID NO: 267448 - RNA, 32 nt, Human
uuagaacauucacucuggcugcagagggagaa

SEQ ID NO: 267449 - RNA, 32 nt, Human
uuagaaccucaguucuauuacguuauagucag

SEQ ID NO: 267450 - RNA, 32 nt, Human
uuagaaccugggugggaaguagggaagaagcc

SEQ ID NO: 267451 - RNA, 32 nt, Human
uuagaacggugcuucucagcucugcuuaaaug

SEQ ID NO: 267452 - RNA, 32 nt, Human
uuagaacuacagcugcuaggaacaucccugug

SEQ ID NO: 267453 - RNA, 32 nt, Human
uuagaacucuagcccaggcuuugucaacugua

SEQ ID NO: 267454 - RNA, 32 nt, Human
uuagaacugguuccccucaccacccaaccuac

SEQ ID NO: 267455 - RNA, 32 nt, Human
uuagaacuuugaagggcauuaugauccugacu

SEQ ID NO: 267456 - RNA, 32 nt, Human
uuagaagacagaaaccacacucacaguccaaa

SEQ ID NO: 267457 - RNA, 32 nt, Human
uuagaagaccauagaacaugccagcagguugg

SEQ ID NO: 267458 - RNA, 32 nt, Human
uuagaagagcaacuagcaggugucucagcaga

SEQ ID NO: 267459 - RNA, 32 nt, Human
uuagaagagcccagaggcuggaagcaaacaca

SEQ ID NO: 267460 - RNA, 32 nt, Human
uuagaagagcccagguugaugagcauuuagag

SEQ ID NO: 267461 - RNA, 32 nt, Human
uuagaagagcugcuccccucuguuaggaccag

SEQ ID NO: 267462 - RNA, 32 nt, Human
uuagaagaggaacauggagcugauccaggaca

SEQ ID NO: 267463 - RNA, 32 nt, Human
uuagaagaguaugauacaacauuagagaaaga

SEQ ID NO: 267464 - RNA, 32 nt, Human
uuagaagauauaauuauauuuaaauucaucac

SEQ ID NO: 267465 - RNA, 32 nt, Human
uuagaagaugaggagaggcagcagggauuucc

SEQ ID NO: 267466 - RNA, 32 nt, Human
uuagaagcaaaagacuguaccuaacuggaaug

SEQ ID NO: 267467 - RNA, 32 nt, Human
uuagaagcaaguuagaggaagaaggucuuggg

SEQ ID NO: 267468 - RNA, 32 nt, Human
uuagaagcagagccugaaaacgugacugaauu

SEQ ID NO: 267469 - RNA, 32 nt, Human
uuagaagcaggccacuccccagccugcugcca

SEQ ID NO: 267470 - RNA, 32 nt, Human
uuagaagcagggaaguauuguuagucuagcuu

SEQ ID NO: 267471 - RNA, 32 nt, Human
uuagaagcauuuuuaucuuagcauuucauaag

SEQ ID NO: 267472 - RNA, 32 nt, Human
uuagaagccaccacuggcuuucaggcuugggg

SEQ ID NO: 267473 - RNA, 32 nt, Human
uuagaagccagcccugcuauuuccagccuccu

SEQ ID NO: 267474 - RNA, 32 nt, Human
uuagaagcccuagaaaacaaucuccuggucca

SEQ ID NO: 267475 - RNA, 32 nt, Human
uuagaagcucaugugguuguugcagcauucag

SEQ ID NO: 267476 - RNA, 32 nt, Human
uuagaaggaaggagggggagcccagguaugag

SEQ ID NO: 267477 - RNA, 32 nt, Human
uuagaaggcugcagauaacagaaaggcuuuuu

SEQ ID NO: 267478 - RNA, 32 nt, Human
uuagaagggaaagugguaagggagagugcugg

SEQ ID NO: 267479 - RNA, 32 nt, Human
uuagaagggagcacuugugaucaacgucaguu

SEQ ID NO: 267480 - RNA, 32 nt, Human
uucaacaauguugacagcaucuucaccaggag

SEQ ID NO: 267481 - RNA, 24 nt, Human
uucaacaccagccugagcaacaug

SEQ ID NO: 267482 - RNA, 32 nt, Human
uucaacaccagccugagcaacaugguaaaacc

SEQ ID NO: 267483 - RNA, 32 nt, Human
uucaacaccagccuggccaacauagugaaacc

SEQ ID NO: 267484 - RNA, 24 nt, Human
uucaacaccagccuggccaacaug

SEQ ID NO: 267485 - RNA, 32 nt, Human
uucaacaccagccuggccaacauggaaaaacc

SEQ ID NO: 267486 - RNA, 32 nt, Human
uucaacaccagccuggccaacauggugaaacc

SEQ ID NO: 267487 - RNA, 24 nt, Human
uucaacaccagccugggcaacaug

SEQ ID NO: 267488 - RNA, 32 nt, Human
uucaacaccagccugggccauauugugagaac

SEQ ID NO: 267489 - RNA, 24 nt, Human
uucaacaccagcuugggcaacaua

SEQ ID NO: 267490 - RNA, 20 nt, Human
uucaacacuacaaugcauuu

SEQ ID NO: 267491 - RNA, 32 nt, Human
uucaacacugcagaaugggugaccucaaagau

SEQ ID NO: 267492 - RNA, 32 nt, Human
uucaacagaacaccaggaaggucaagacgcuc

SEQ ID NO: 267493 - RNA, 32 nt, Human
uucaacagacccaggugcaaaaccccacaucc

SEQ ID NO: 267494 - RNA, 32 nt, Human
uucaacagaucugucugucuugagucuaucgu

SEQ ID NO: 267495 - RNA, 32 nt, Human
uucaacagaugaagcugcaaaacaguuuucuu

SEQ ID NO: 267496 - RNA, 32 nt, Human
uucaacaggaggaacagcaugccaccacagua

SEQ ID NO: 267497 - RNA, 32 nt, Human
uucaacaggcugagaggaugccuccaauggac

SEQ ID NO: 267498 - RNA, 32 nt, Human
uucaacagggcaaguguggucucuccaguugg

SEQ ID NO: 267499 - RNA, 32 nt, Human
uucaacaucacugauaguuagagaacugcaaa

SEQ ID NO: 267500 - RNA, 24 nt, Human
uucaacaucagccuggccaacaug

SEQ ID NO: 267501 - RNA, 32 nt, Human
uucaacaucagccuggccaacaugaugaaacc

SEQ ID NO: 267502 - RNA, 23 nt, Human
uucaacaucaugccauuccugcu

SEQ ID NO: 267503 - RNA, 32 nt, Human
uucaacauccuugccaagacuucuccacccuc

SEQ ID NO: 267504 - RNA, 32 nt, Human
uucaacaucuuccuaaucuuucuagugcaguc

SEQ ID NO: 267505 - RNA, 32 nt, Human
uucaacaucuucuggaaucagaggugauuuuu

SEQ ID NO: 267506 - RNA, 32 nt, Human
uucaacaugccugguuuaggcagcagcuuggg

SEQ ID NO: 267507 - RNA, 32 nt, Human
uucaacauggugaggggcuacaagaaaacgcu

SEQ ID NO: 267508 - RNA, 32 nt, Human
uucaacauguuggccaggcuggucaugaacuc

SEQ ID NO: 267509 - RNA, 32 nt, Human
uucaacauuucuuucccucugugaaaugauug

SEQ ID NO: 267510 - RNA, 32 nt, Human
uucaaccaaugccuggaccuguccaccugaga

SEQ ID NO: 267511 - RNA, 32 nt, Human
uucaaccacaguuaaggguaaaagggacugag

SEQ ID NO: 267512 - RNA, 32 nt, Human
uucaaccacguuggccaggcugguuuugaacu

SEQ ID NO: 267513 - RNA, 32 nt, Human
uucaaccacugcacuccacuaagcaacuggca

SEQ ID NO: 267514 - RNA, 32 nt, Human
uucaaccagcuucuuuauaccucuuuucuugc

SEQ ID NO: 267515 - RNA, 22 nt, Human
uucaaccaguggaagagcaagg

SEQ ID NO: 267516 - RNA, 18 nt, Human
uucaaccaguggcuccug

SEQ ID NO: 267517 - RNA, 32 nt, Human
uucaacccagacuuugcugggaucucuuccuu

SEQ ID NO: 267518 - RNA, 32 nt, Human
uucaacccaggaggcagaggcuacagugagcu

SEQ ID NO: 267519 - RNA, 32 nt, Human
uucaacccaggaguucaagaccugccagagca

SEQ ID NO: 267520 - RNA, 32 nt, Human
uucaaccccugcccuuguuuggagcuaaggga

SEQ ID NO: 267521 - RNA, 32 nt, Human
uucaacccuguucccuaauccaacacauuccc

SEQ ID NO: 267522 - RNA, 25 nt, Human
uucaacccuuugaaacagagugaga

SEQ ID NO: 267523 - RNA, 32 nt, Human
uucaaccucagcuguauuccuuguuucuguau

SEQ ID NO: 267524 - RNA, 32 nt, Human
uucaaccucauucaacaccagaaaguucacag

SEQ ID NO: 267525 - RNA, 32 nt, Human
uucaaccuccagccagcuucuugagccuauuu

SEQ ID NO: 267526 - RNA, 32 nt, Human
uucaaccuccuguacagcacccugccaguucu

SEQ ID NO: 267527 - RNA, 32 nt, Human
uucaaccucuuuaucaguucugaggcuggagg

SEQ ID NO: 267528 - RNA, 32 nt, Human
uucaaccugaacaaaucacauucuguccagau

SEQ ID NO: 267529 - RNA, 32 nt, Human
uucaaccugcagcaccuggccacgcuggccac

SEQ ID NO: 267530 - RNA, 32 nt, Human
uucaaccugcauuuaccgaguaccugcugaac

SEQ ID NO: 267531 - RNA, 32 nt, Human
uucaaccugcugcuccuggccugggauaccuu

SEQ ID NO: 267532 - RNA, 32 nt, Human
uucaaccugcuguauccuguggcacugguccc

SEQ ID NO: 267533 - RNA, 32 nt, Human
uucaaccuggcccaguccccugcgucauuccc

SEQ ID NO: 267534 - RNA, 32 nt, Human
uucaaccugggagguugaggcugcagugagcu

SEQ ID NO: 267535 - RNA, 24 nt, Human
uucaaccugggugacagaaccaga

SEQ ID NO: 267536 - RNA, 32 nt, Human
uucaaccuucagcaaccaccauacugaucagu

SEQ ID NO: 267537 - RNA, 32 nt, Human
uucaaccuucaucccuucuguggcaguuagga

SEQ ID NO: 267538 - RNA, 32 nt, Human
uucaaccuuccagggaauacgaccccuucucc

SEQ ID NO: 267539 - RNA, 21 nt, Human
uucaacgagccugggaaugug

SEQ ID NO: 267540 - RNA, 24 nt, Human
uucaacgccagccuggccaacaug

SEQ ID NO: 267541 - RNA, 32 nt, Human
uucaacgccagccuggccaacauggugaaacc

SEQ ID NO: 267542 - RNA, 32 nt, Human
uucaacguggaucccucaacuccggcgacucc

SEQ ID NO: 267543 - RNA, 32 nt, Human
uucaacuagaguugaucaugcaaccaaguucu

SEQ ID NO: 267544 - RNA, 32 nt, Human
uucaacuauuuaacccacuugccuuauuuugu

SEQ ID NO: 267545 - RNA, 32 nt, Human
uucaacucaguuugcaacuauaauagcuacuc

SEQ ID NO: 267546 - RNA, 32 nt, Human
uucaacuccccugguuuuaucaucucuacucu

SEQ ID NO: 267547 - RNA, 32 nt, Human
uucaacuccuuucuuuggacccagaugguuuu

SEQ ID NO: 267548 - RNA, 32 nt, Human
uucaacucucacugcuagaauuccuccaacca

SEQ ID NO: 267549 - RNA, 23 nt, Human
uucaacucugguuuauuaucuua

SEQ ID NO: 267550 - RNA, 32 nt, Human
uucaacugacacagcacuguccccuggcagua

SEQ ID NO: 267551 - RNA, 32 nt, Human
uucaacugaugccugcucgucgugacgggagc

SEQ ID NO: 267552 - RNA, 32 nt, Human
uucaacugccagcuuuaccaaugcagcauuua

SEQ ID NO: 267553 - RNA, 31 nt, Human
uucaacugccucucuuuuugggcuuucauag

SEQ ID NO: 267554 - RNA, 32 nt, Human
uucaacugcuccagacuauugaaguaugcaaa

SEQ ID NO: 267555 - RNA, 32 nt, Human
uucaacugcuugccugaauuuacuccuuucac

SEQ ID NO: 267556 - RNA, 32 nt, Human
uucaacuggaccuucuggaaugugaccuucaa

SEQ ID NO: 267557 - RNA, 32 nt, Human
uucaacuggagacagagaaaccagcuagaggc

SEQ ID NO: 267558 - RNA, 32 nt, Human
uucaacugggcacguguugugauuggucaguc

SEQ ID NO: 267559 - RNA, 32 nt, Human
uucaacugugccagaggaaacagcccuccagu

SEQ ID NO: 267560 - RNA, 32 nt, Human
uucaacuguggacuucugggauuugcagauuu

SEQ ID NO: 267561 - RNA, 32 nt, Human
uucaacuguuuugcacaacagacugcugauuc

SEQ ID NO: 267562 - RNA, 32 nt, Human
uucaacuuaaugucuaauguuuucugacaauu

SEQ ID NO: 267563 - RNA, 32 nt, Human
uucaacuuccucuuccucauuuucuugagaug

SEQ ID NO: 267564 - RNA, 32 nt, Human
uucaacuucgguaaugaggaagaaggagaaag

SEQ ID NO: 267565 - RNA, 32 nt, Human
uucaacuucugaagugaauguggauacagcgc

SEQ ID NO: 267566 - RNA, 32 nt, Human
uucaacuugugucacuuccuccagaaagccua

SEQ ID NO: 267567 - RNA, 32 nt, Human
uucaacuuugacuucuuuugacaaaggacuuu

SEQ ID NO: 267568 - RNA, 32 nt, Human
uucaacuuuggcaucuugccaccagaagaccc

SEQ ID NO: 267569 - RNA, 24 nt, Human
uucaacuuugugucauuuaccuua

SEQ ID NO: 267570 - RNA, 32 nt, Human
uucaagaaagaaaaggagaaggaagaggaaga

SEQ ID NO: 267571 - RNA, 32 nt, Human
uucaagaacagccuagccaacauggugaaacc

SEQ ID NO: 267572 - RNA, 32 nt, Human
uucaagaacagccugaccaacauggugaaacu

SEQ ID NO: 267573 - RNA, 32 nt, Human
uucaagaaccaggcagcccugccaugucacaa

SEQ ID NO: 267574 - RNA, 32 nt, Human
uucaagaacuccagaaaucaggagacggagac

SEQ ID NO: 267575 - RNA, 32 nt, Human
uucaagaaguuaauugcuauguggaaagaagg

SEQ ID NO: 267576 - RNA, 24 nt, Human
uucaagaauagccugggcaacaua

SEQ ID NO: 267577 - RNA, 32 nt, Human
uucaagaauagccugggcaacauagcaagacc

SEQ ID NO: 267578 - RNA, 32 nt, Human
uucaagaauagggagagagaggauggguacca

SEQ ID NO: 267579 - RNA, 32 nt, Human
uucaagaauguggaggccugggccaaggucaa

SEQ ID NO: 267580 - RNA, 32 nt, Human
uucaagacaaaccuggccaacauggugaaacc

SEQ ID NO: 267581 - RNA, 32 nt, Human
uucaagacaagaccagccuggccaacauggug

SEQ ID NO: 267582 - RNA, 32 nt, Human
uucaagacaagccuggccaacauggugaaacc

SEQ ID NO: 267583 - RNA, 32 nt, Human
uucaagacaagccuggccuacaugguugaaac

SEQ ID NO: 267584 - RNA, 32 nt, Human
uucaagacaaggagagccaaagacugauggga

SEQ ID NO: 267585 - RNA, 32 nt, Human
uucaagacaauccuggccaacggcgaaacucu

SEQ ID NO: 267586 - RNA, 32 nt, Human
uucaagacagaagcauuuauuccuucacuucc

SEQ ID NO: 267587 - RNA, 32 nt, Human
uucaagacagagaauuuugauaaauccugaca

SEQ ID NO: 267588 - RNA, 32 nt, Human
uucaagacagccugggcaacauggugaaaccu

SEQ ID NO: 267589 - RNA, 23 nt, Human
uucaagacagccugggcaucaua

SEQ ID NO: 267590 - RNA, 32 nt, Human
uucaagacauuugcuaauuuuguaguuucaug

SEQ ID NO: 267591 - RNA, 32 nt, Human
uucaagaccaaacuggccaauauagugagauc

SEQ ID NO: 267592 - RNA, 32 nt, Human
uucaagaccaaccugacuaacauggugaaacc

SEQ ID NO: 267593 - RNA, 32 nt, Human
uucaagaccaaccuggacaacauagcaagacc

SEQ ID NO: 267594 - RNA, 32 nt, Human
uucaagaccaaccuggccaacauugugaaacc

SEQ ID NO: 267595 - RNA, 32 nt, Human
uucaagaccaaccuggccaauguggcaaaacc

SEQ ID NO: 267596 - RNA, 24 nt, Human
uucaagaccaaccugggcaacaua

SEQ ID NO: 267597 - RNA, 32 nt, Human
uucaagaccaaccugggcaacauagcaacacc

SEQ ID NO: 267598 - RNA, 32 nt, Human
uucaagaccaaccugggcaacauagugagacc

SEQ ID NO: 267599 - RNA, 32 nt, Human
uucaagaccaacuuggacaacauagugagaac

SEQ ID NO: 267600 - RNA, 32 nt, Human
uucaagaccaacuugggcaacauagcaagacc

SEQ ID NO: 267601 - RNA, 32 nt, Human
uucaagaccaaucuggccaacauggugaaacc

SEQ ID NO: 267602 - RNA, 24 nt, Human
uucaagaccaaucugggcaacaua

SEQ ID NO: 267603 - RNA, 32 nt, Human
uucaagaccaaucugggcaacauagcaaaacc

SEQ ID NO: 267604 - RNA, 32 nt, Human
uucaagaccacccuggccaacauggugaaacc

SEQ ID NO: 267605 - RNA, 32 nt, Human
uucaagaccacccuggccaacauggugacacc

SEQ ID NO: 267606 - RNA, 32 nt, Human
uucaagaccacccuggccaacaugguuaaacc

SEQ ID NO: 267607 - RNA, 32 nt, Human
uucaagaccacccuggccaaccuggugaaacc

SEQ ID NO: 267608 - RNA, 32 nt, Human
uucaagaccaccuggccaacauggugaaaccc

SEQ ID NO: 267609 - RNA, 32 nt, Human
uucaagaccagccaaggcaacauagugaggcc

SEQ ID NO: 267610 - RNA, 24 nt, Human
uucaagaccagccagggcaacaug

SEQ ID NO: 267611 - RNA, 32 nt, Human
uucaagaccagccagggcaacauggugagacc

SEQ ID NO: 267612 - RNA, 32 nt, Human
uucaagaccagcccagccaacauggcaaaacc

SEQ ID NO: 267613 - RNA, 32 nt, Human
uucaagaccagcccagccaacauggugaaaac

SEQ ID NO: 267614 - RNA, 32 nt, Human
uucaagaccagcccaggcaacauggugacccc

SEQ ID NO: 267615 - RNA, 32 nt, Human
uucaagaccagcccgggcaauucagugagaug

SEQ ID NO: 267616 - RNA, 32 nt, Human
uucaagaccagccgggccagcauggugaaacc

SEQ ID NO: 267617 - RNA, 32 nt, Human
uucaagaccagccuaaaggucaacauaggcag

SEQ ID NO: 267618 - RNA, 32 nt, Human
uucaagaccagccuagccaacauggugaaacc

SEQ ID NO: 267619 - RNA, 32 nt, Human
uucaagaccagccuagccaagauggugaaacc

SEQ ID NO: 267620 - RNA, 32 nt, Human
uucaagaccagccuagcccacauggccaaacc

SEQ ID NO: 267621 - RNA, 24 nt, Human
uucaagaccagccuaggcaacaua

SEQ ID NO: 267622 - RNA, 32 nt, Human
uucaagaccagccuaggcaacauagugagaug

SEQ ID NO: 267623 - RNA, 24 nt, Human
uucaagaccagccuaggcaacaug

SEQ ID NO: 267624 - RNA, 32 nt, Human
uucaagaccagccuaggcaacauggugaaacc

SEQ ID NO: 267625 - RNA, 32 nt, Human
uucaagaccagccuaggcaacuaagugaaacc

SEQ ID NO: 267626 - RNA, 32 nt, Human
uucaagaccagccuaggcaagauggcaacauc

SEQ ID NO: 267627 - RNA, 24 nt, Human
uucaagaccagccuaggcaaugua

SEQ ID NO: 267628 - RNA, 32 nt, Human
uucaagaccagccuaggcaauguagugacacc

SEQ ID NO: 267629 - RNA, 32 nt, Human
uucaagaccagccuaggccagauggugaaacc

SEQ ID NO: 267630 - RNA, 32 nt, Human
uucaagaccagccuagguaacauagugggacc

SEQ ID NO: 267631 - RNA, 32 nt, Human
uucaagaccagccucaacauggagaaacccca

SEQ ID NO: 267632 - RNA, 32 nt, Human
uucaagaccagccucaucaacauagugagacc

SEQ ID NO: 267633 - RNA, 32 nt, Human
uucaagaccagccugaccaacaucgugaaaug

SEQ ID NO: 267634 - RNA, 32 nt, Human
uucaagaccagccugaccaacaugaagaaacc

SEQ ID NO: 267635 - RNA, 32 nt, Human
uucaagaccagccugaccaacaugacaaaacc

SEQ ID NO: 267636 - RNA, 32 nt, Human
uucaagaccagccugaccaacauggagaaacc

SEQ ID NO: 267637 - RNA, 32 nt, Human
uucaagaccagccugaccaacauggagaaacg

SEQ ID NO: 267638 - RNA, 32 nt, Human
uucaagaccagccugaccaacauggauaaauc

SEQ ID NO: 267639 - RNA, 32 nt, Human
uucaagaccagccugaccaacauggauuaacc

SEQ ID NO: 267640 - RNA, 32 nt, Human
uucaagaccagccugaccaacauggcaaaaca

SEQ ID NO: 267641 - RNA, 32 nt, Human
uucaagaccagccugaccaacauggccaaaaa

SEQ ID NO: 267642 - RNA, 32 nt, Human
uucaagaccagccugaccaacauggcgaaacc

SEQ ID NO: 267643 - RNA, 32 nt, Human
uucaagaccagccugaccaacauggggauacc

SEQ ID NO: 267644 - RNA, 32 nt, Human
uucaagaccagccugaccaacauggugaaacc

SEQ ID NO: 267645 - RNA, 32 nt, Human
uucaagaccagccugaccaacguggagaaacc

SEQ ID NO: 267646 - RNA, 32 nt, Human
uucaagaccagccugaccaacguggagaaacu

SEQ ID NO: 267647 - RNA, 32 nt, Human
uucaagaccagccugacccacauggagaaacg

SEQ ID NO: 267648 - RNA, 32 nt, Human
uucaagaccagccugacgaacauggugaaacc

SEQ ID NO: 267649 - RNA, 32 nt, Human
uucaagaccagccugacuaacauggagaaacc

SEQ ID NO: 267650 - RNA, 32 nt, Human
uucaagaccagccugagaaacauagugagccc

SEQ ID NO: 267651 - RNA, 24 nt, Human
uucaagaccagccugagcaacaua

SEQ ID NO: 267652 - RNA, 32 nt, Human
uucaagaccagccugagcaacauagugagacc

SEQ ID NO: 267653 - RNA, 24 nt, Human
uucaagaccagccugagcaacaug

SEQ ID NO: 267654 - RNA, 32 nt, Human
uucaagaccagccugagcaacaugaugaaacu

SEQ ID NO: 267655 - RNA, 24 nt, Human
uucaagaccagccugagcagcgua

SEQ ID NO: 267656 - RNA, 32 nt, Human
uucaagaccagccugagcagcguagcaagacc

SEQ ID NO: 267657 - RNA, 32 nt, Human
uucaagaccagccugaguaacaugaugagacc

SEQ ID NO: 267658 - RNA, 32 nt, Human
uucaagaccagccugaucaacauggugaaacc

SEQ ID NO: 267659 - RNA, 32 nt, Human
uucaagaccagccugaugaacauggagaaacc

SEQ ID NO: 267660 - RNA, 32 nt, Human
uucaagaccagccugcccaacauagugaaacu

SEQ ID NO: 267661 - RNA, 32 nt, Human
uucaagaccagccugcccaacauggcaaaacc

SEQ ID NO: 267662 - RNA, 32 nt, Human
uucaagaccagccugcccaacauggugaaacc

SEQ ID NO: 267663 - RNA, 32 nt, Human
uucaagaccagccuggacaacacagcagaccc

SEQ ID NO: 267664 - RNA, 32 nt, Human
uucaagaccagccuggacaacauagugagacc

SEQ ID NO: 267665 - RNA, 24 nt, Human
uucaagaccagccuggacaacaug

SEQ ID NO: 267666 - RNA, 32 nt, Human
uucaagaccagccuggacaacauggcaaaacc

SEQ ID NO: 267667 - RNA, 32 nt, Human
uucaagaccagccuggacaacauggugaaacc

SEQ ID NO: 267668 - RNA, 24 nt, Human
uucaagaccagccuggacaauaua

SEQ ID NO: 267669 - RNA, 32 nt, Human
uucaagaccagccuggacaauauagugaaacc

SEQ ID NO: 267670 - RNA, 32 nt, Human
uucaagaccagccuggacagcuuagugagauc

SEQ ID NO: 267671 - RNA, 32 nt, Human
uucaagaccagccuggcaaacauggugaaacg

SEQ ID NO: 267672 - RNA, 32 nt, Human
uucaagaccagccuggccaaacauggugaaac

SEQ ID NO: 267673 - RNA, 32 nt, Human
uucaagaccagccuggccaacaaggcgaaacc

SEQ ID NO: 267674 - RNA, 32 nt, Human
uucaagaccagccuggccaacaaggugaaacc

SEQ ID NO: 267675 - RNA, 32 nt, Human
uucaagaccagccuggccaacacagugaaacc

SEQ ID NO: 267676 - RNA, 32 nt, Human
uucaagaccagccuggccaacacggugaaacc

SEQ ID NO: 267677 - RNA, 32 nt, Human
uucaagaccagccuggccaacagggugaaacc

SEQ ID NO: 267678 - RNA, 24 nt, Human
uucaagaccagccuggccaacaua

SEQ ID NO: 267679 - RNA, 32 nt, Human
uucaagaccagccuggccaacauagugaaaac

SEQ ID NO: 267680 - RNA, 32 nt, Human
uucaagaccagccuggccaacauagugaaacc

SEQ ID NO: 267681 - RNA, 24 nt, Human
uucaagaccagccuggccaacaug

SEQ ID NO: 267682 - RNA, 32 nt, Human
uucaagaccagccuggccaacaugaaaaauac

SEQ ID NO: 267683 - RNA, 32 nt, Human
uucaagaccagccuggccaacaugacaaaacc

SEQ ID NO: 267684 - RNA, 32 nt, Human
uucaagaccagccuggccaacaugacgaaacc

SEQ ID NO: 267685 - RNA, 32 nt, Human
uucaagaccagccuggccaacaugauaaaaca

SEQ ID NO: 267686 - RNA, 32 nt, Human
uucaagaccagccuggccaacaugauaaaauc

SEQ ID NO: 267687 - RNA, 32 nt, Human
uucaagaccagccuggccaacaugaugaaacc

SEQ ID NO: 267688 - RNA, 32 nt, Human
uucaagaccagccuggccaacaugaugagacc

SEQ ID NO: 267689 - RNA, 32 nt, Human
uucaagaccagccuggccaacauggagaaacc

SEQ ID NO: 267690 - RNA, 32 nt, Human
uucaagaccagccuggccaacauggcaaaacc

SEQ ID NO: 267691 - RNA, 32 nt, Human
uucaagaccagccuggccaacauggcaaaauc

SEQ ID NO: 267692 - RNA, 32 nt, Human
uucaagaccagccuggccaacauggcagaaac

SEQ ID NO: 267693 - RNA, 32 nt, Human
uucaagaccagccuggccaacauggcgaaaac

SEQ ID NO: 267694 - RNA, 32 nt, Human
uucaagaccagccuggccaacauggcgaaacc

SEQ ID NO: 267695 - RNA, 32 nt, Human
uucaagaccagccuggccaacauggcgaaauu

SEQ ID NO: 267696 - RNA, 32 nt, Human
uucaagaccagccuggccaacauggcgaauuc

SEQ ID NO: 267697 - RNA, 32 nt, Human
uucaagaccagccuggccaacauggggaaauc

SEQ ID NO: 267698 - RNA, 32 nt, Human
uucaagaccagccuggccaacaugguaaaacc

SEQ ID NO: 267699 - RNA, 32 nt, Human
uucaagaccagccuggccaacauggucccagc

SEQ ID NO: 267700 - RNA, 32 nt, Human
uucaagaccagccuggccaacauggugaaaac

SEQ ID NO: 267701 - RNA, 32 nt, Human
uucaagaccagccuggccaacauggugaaaca

SEQ ID NO: 267702 - RNA, 32 nt, Human
uucaagaccagccuggccaacauggugaaacc

SEQ ID NO: 267703 - RNA, 32 nt, Human
uucaagaccagccuggccaacauggugaaacg

SEQ ID NO: 267704 - RNA, 32 nt, Human
uucaagaccagccuggccaacauggugaaauc

SEQ ID NO: 267705 - RNA, 32 nt, Human
uucaagaccagccuggccaacauggugaaucc

SEQ ID NO: 267706 - RNA, 32 nt, Human
uucaagaccagccuggccaacauggugaauua

SEQ ID NO: 267707 - RNA, 32 nt, Human
uucaagaccagccuggccaacauggugagaca

SEQ ID NO: 267708 - RNA, 32 nt, Human
uucaagaccagccuggccaacaugguggaacc

SEQ ID NO: 267709 - RNA, 32 nt, Human
uucaagaccagccuggccaacaugguguaacc

SEQ ID NO: 267710 - RNA, 32 nt, Human
uucaagaccagccuggccaacaugguguaacg

SEQ ID NO: 267711 - RNA, 32 nt, Human
uucaagaccagccuggccaacaugucagaacu

SEQ ID NO: 267712 - RNA, 32 nt, Human
uucaagaccagccuggccaacaugugaaaccc

SEQ ID NO: 267713 - RNA, 32 nt, Human
uucaagaccagccuggccaaccuggugaaacc

SEQ ID NO: 267714 - RNA, 32 nt, Human
uucaagaccagccuggccaaccuggugaaaug

SEQ ID NO: 267715 - RNA, 24 nt, Human
uucaagaccagccuggccaacgug

SEQ ID NO: 267716 - RNA, 32 nt, Human
uucaagaccagccuggccaacguggcaaauac

SEQ ID NO: 267717 - RNA, 32 nt, Human
uucaagaccagccuggccaacguggugaaacc

SEQ ID NO: 267718 - RNA, 32 nt, Human
uucaagaccagccuggccaacguggugaaagc

SEQ ID NO: 267719 - RNA, 32 nt, Human
uucaagaccagccuggccaacuuggagaaacc

SEQ ID NO: 267720 - RNA, 32 nt, Human
uucaagaccagccuggccaacuuggugaaacc

SEQ ID NO: 267721 - RNA, 32 nt, Human
uucaagaccagccuggccaagauggugaaauc

SEQ ID NO: 267722 - RNA, 32 nt, Human
uucaagaccagccuggccaagaugguggaacc

SEQ ID NO: 267723 - RNA, 32 nt, Human
uucaagaccagccuggccaaggcggcaaaacc

SEQ ID NO: 267724 - RNA, 24 nt, Human
uucaagaccagccuggccaauaug

SEQ ID NO: 267725 - RNA, 32 nt, Human
uucaagaccagccuggccaauauggcaaaacc

SEQ ID NO: 267726 - RNA, 32 nt, Human
uucaagaccagccuggccaauauggugaaaaa

SEQ ID NO: 267727 - RNA, 32 nt, Human
uucaagaccagccuggccaauauggugaaacc

SEQ ID NO: 267728 - RNA, 24 nt, Human
uucaagaccagccuggccaaugua

SEQ ID NO: 267729 - RNA, 32 nt, Human
uucaagaccagccuggccaauguagugaaacc

SEQ ID NO: 267730 - RNA, 24 nt, Human
uucaagaccagccuggccaaugug

SEQ ID NO: 267731 - RNA, 32 nt, Human
uucaagaccagccuggccaaugugaugaaacc

SEQ ID NO: 267732 - RNA, 32 nt, Human
uucaagaccagccuggccaauguggugaaacc

SEQ ID NO: 267733 - RNA, 32 nt, Human
uucaagaccagccuggccacauggugcaaccc

SEQ ID NO: 267734 - RNA, 24 nt, Human
uucaagaccagccuggccagcaua

SEQ ID NO: 267735 - RNA, 32 nt, Human
uucaagaccagccuggccagcauagugaaacc

SEQ ID NO: 267736 - RNA, 24 nt, Human
uucaagaccagccuggccagcaug

SEQ ID NO: 267737 - RNA, 32 nt, Human
uucaagaccagccuggccaucauggugaaacc

SEQ ID NO: 267738 - RNA, 32 nt, Human
uucaagaccagccuggcccaaauggugaaacc

SEQ ID NO: 267739 - RNA, 24 nt, Human
uucaagaccagccuggccgacaug

SEQ ID NO: 267740 - RNA, 32 nt, Human
uucaagaccagccuggccgacauggcgaaacc

SEQ ID NO: 267741 - RNA, 32 nt, Human
uucaagaccagccuggccgggguggugaaacc

SEQ ID NO: 267742 - RNA, 24 nt, Human
uucaagaccagccuggcuaacaug

SEQ ID NO: 267743 - RNA, 32 nt, Human
uucaagaccagccuggcuaacauggcaaaacc

SEQ ID NO: 267744 - RNA, 32 nt, Human
uucaagaccagccuggcuaacauggugaaauc

SEQ ID NO: 267745 - RNA, 32 nt, Human
uucaagaccagccuggcuaacaugugaaacua

SEQ ID NO: 267746 - RNA, 24 nt, Human
uucaagaccagccuggcuaauaug

SEQ ID NO: 267747 - RNA, 32 nt, Human
uucaagaccagccuggcuaauauggugaaacc

SEQ ID NO: 267748 - RNA, 32 nt, Human
uucaagaccagccuggcugacaccgugaaacc

SEQ ID NO: 267749 - RNA, 32 nt, Human
uucaagaccagccugggaaaaauagcaagacc

SEQ ID NO: 267750 - RNA, 24 nt, Human
uucaagaccagccugggaaacaua

SEQ ID NO: 267751 - RNA, 32 nt, Human
uucaagaccagccugggaaacauagcaagauc

SEQ ID NO: 267752 - RNA, 24 nt, Human
uucaagaccagccugggaaacaug

SEQ ID NO: 267753 - RNA, 32 nt, Human
uucaagaccagccugggaaacauggcaaacuc

SEQ ID NO: 267754 - RNA, 24 nt, Human
uucaagaccagccugggaaacgug

SEQ ID NO: 267755 - RNA, 32 nt, Human
uucaagaccagccugggaaacguggggaaauc

SEQ ID NO: 267756 - RNA, 32 nt, Human
uucaagaccagccugggaacacagcgagaccc

SEQ ID NO: 267757 - RNA, 24 nt, Human
uucaagaccagccugggcaaaaua

SEQ ID NO: 267758 - RNA, 32 nt, Human
uucaagaccagccugggcaaaauagcaagacc

SEQ ID NO: 267759 - RNA, 32 nt, Human
uucaagaccagccugggcaaaguagggagacc

SEQ ID NO: 267760 - RNA, 21 nt, Human
uucaagaccagccugggcaac

SEQ ID NO: 267761 - RNA, 22 nt, Human
uucaagaccagccugggcaaca

SEQ ID NO: 267762 - RNA, 32 nt, Human
uucaagaccagccugggcaacacagcaagacc

SEQ ID NO: 267763 - RNA, 32 nt, Human
uucaagaccagccugggcaacacagcaagauc

SEQ ID NO: 267764 - RNA, 32 nt, Human
uucaagaccagccugggcaacacagcgagacc

SEQ ID NO: 267765 - RNA, 32 nt, Human
uucaagaccagccugggcaacacagggaggcu

SEQ ID NO: 267766 - RNA, 32 nt, Human
uucaagaccagccugggcaacacagugacacc

SEQ ID NO: 267767 - RNA, 32 nt, Human
uucaagaccagccugggcaacacagugaggcc

SEQ ID NO: 267768 - RNA, 32 nt, Human
uucaagaccagccugggcaacacagugaguga

SEQ ID NO: 267769 - RNA, 32 nt, Human
uucaagaccagccugggcaacacgaaagcuga

SEQ ID NO: 267770 - RNA, 32 nt, Human
uucaagaccagccugggcaacagaacaagacu

SEQ ID NO: 267771 - RNA, 24 nt, Human
uucaagaccagccugggcaacaua

SEQ ID NO: 267772 - RNA, 32 nt, Human
uucaagaccagccugggcaacauaaugagacc

SEQ ID NO: 267773 - RNA, 32 nt, Human
uucaagaccagccugggcaacauaccaagacc

SEQ ID NO: 267774 - RNA, 32 nt, Human
uucaagaccagccugggcaacauagcaagacc

SEQ ID NO: 267775 - RNA, 32 nt, Human
uucaagaccagccugggcaacauagcaagauc

SEQ ID NO: 267776 - RNA, 32 nt, Human
uucaagaccagccugggcaacauagcgagacc

SEQ ID NO: 267777 - RNA, 32 nt, Human
uucaagaccagccugggcaacauaggaagacu

SEQ ID NO: 267778 - RNA, 32 nt, Human
uucaagaccagccugggcaacauaguaagacc

SEQ ID NO: 267779 - RNA, 32 nt, Human
uucaagaccagccugggcaacauagugaaacc

SEQ ID NO: 267780 - RNA, 32 nt, Human
uucaagaccagccugggcaacauagugagaac

SEQ ID NO: 267781 - RNA, 32 nt, Human
uucaagaccagccugggcaacauagugagaau

SEQ ID NO: 267782 - RNA, 32 nt, Human
uucaagaccagccugggcaacauagugagacc

SEQ ID NO: 267783 - RNA, 32 nt, Human
uucaagaccagccugggcaacauagugagacg

SEQ ID NO: 267784 - RNA, 32 nt, Human
uucaagaccagccugggcaacauagugagacu

SEQ ID NO: 267785 - RNA, 24 nt, Human
uucaagaccagccugggcaacaug

SEQ ID NO: 267786 - RNA, 32 nt, Human
uucaagaccagccugggcaacaugauaccgaa

SEQ ID NO: 267787 - RNA, 32 nt, Human
uucaagaccagccugggcaacauggcaagacc

SEQ ID NO: 267788 - RNA, 32 nt, Human
uucaagaccagccugggcaacauggcgaaaac

SEQ ID NO: 267789 - RNA, 32 nt, Human
uucaagaccagccugggcaacauggcgaaacc

SEQ ID NO: 267790 - RNA, 32 nt, Human
uucaagaccagccugggcaacauggcgagacc

SEQ ID NO: 267791 - RNA, 32 nt, Human
uucaagaccagccugggcaacauggcuauaug

SEQ ID NO: 267792 - RNA, 32 nt, Human
uucaagaccagccugggcaacaugguaaaacu

SEQ ID NO: 267793 - RNA, 32 nt, Human
uucaagaccagccugggcaacauggugaaacc

SEQ ID NO: 267794 - RNA, 32 nt, Human
uucaagaccagccugggcaacauggugaaauc

SEQ ID NO: 267795 - RNA, 32 nt, Human
uucaagaccagccugggcaacauggugagacc

SEQ ID NO: 267796 - RNA, 32 nt, Human
uucaagaccagccugggcaacauggugagauu

SEQ ID NO: 267797 - RNA, 32 nt, Human
uucaagaccagccugggcaacauucccaagcu

SEQ ID NO: 267798 - RNA, 24 nt, Human
uucaagaccagccugggcaacgua

SEQ ID NO: 267799 - RNA, 32 nt, Human
uucaagaccagccugggcaacguagcaagacc

SEQ ID NO: 267800 - RNA, 32 nt, Human
uucaagaccagccugggcaacgugguggugug

SEQ ID NO: 267801 - RNA, 32 nt, Human
uucaagaccagccugggcaacuuagggagaua

SEQ ID NO: 267802 - RNA, 32 nt, Human
uucaagaccagccugggcaacuuagugaggcc

SEQ ID NO: 267803 - RNA, 22 nt, Human
uucaagaccagccugggcaaua

SEQ ID NO: 267804 - RNA, 24 nt, Human
uucaagaccagccugggcaauaua

SEQ ID NO: 267805 - RNA, 32 nt, Human
uucaagaccagccugggcaauauagugagacc

SEQ ID NO: 267806 - RNA, 24 nt, Human
uucaagaccagccugggcaaugua

SEQ ID NO: 267807 - RNA, 32 nt, Human
uucaagaccagccugggcaauguaguaagacc

SEQ ID NO: 267808 - RNA, 32 nt, Human
uucaagaccagccugggcaaugugaugaaacu

SEQ ID NO: 267809 - RNA, 21 nt, Human
uucaagaccagccugggcagc

SEQ ID NO: 267810 - RNA, 24 nt, Human
uucaagaccagccugggcagcaug

SEQ ID NO: 267811 - RNA, 32 nt, Human
uucaagaccagccugggcagcauggugaaacc

SEQ ID NO: 267812 - RNA, 32 nt, Human
uucaagaccagccugggcuacagagcaagacc

SEQ ID NO: 267813 - RNA, 32 nt, Human
uucaagaccagccugggcuacaugacgaaacu

SEQ ID NO: 267814 - RNA, 32 nt, Human
uucaagaccagccuggggaacauagagagacc

SEQ ID NO: 267815 - RNA, 25 nt, Human
uucaagaccagccuggggcaacaua

SEQ ID NO: 267816 - RNA, 24 nt, Human
uucaagaccagccuggguaacaug

SEQ ID NO: 267817 - RNA, 32 nt, Human
uucaagaccagccuggguaacaugggguggaa

SEQ ID NO: 267818 - RNA, 32 nt, Human
uucaagaccagccuggguaacauggugaaauc

SEQ ID NO: 267819 - RNA, 24 nt, Human
uucaagaccagccuggguaucaua

SEQ ID NO: 267820 - RNA, 24 nt, Human
uucaagaccagccuggucaacaua

SEQ ID NO: 267821 - RNA, 32 nt, Human
uucaagaccagccuggucaacauagugagaca

SEQ ID NO: 267822 - RNA, 24 nt, Human
uucaagaccagccuggucaacaug

SEQ ID NO: 267823 - RNA, 32 nt, Human
uucaagaccagccuggucaacauggcaaaagc

SEQ ID NO: 267824 - RNA, 32 nt, Human
uucaagaccagccuggucaacauggugaaacu

SEQ ID NO: 267825 - RNA, 32 nt, Human
uucaagaccagccuggucaacauggugaaauc

SEQ ID NO: 267826 - RNA, 32 nt, Human
uucaagaccagccuggucaacaugucaaaacc

SEQ ID NO: 267827 - RNA, 32 nt, Human
uucaagaccagccuguccaacauggugaaacc

SEQ ID NO: 267828 - RNA, 32 nt, Human
uucaagaccagccuugccaacauggugaaacc

SEQ ID NO: 267829 - RNA, 32 nt, Human
uucaagaccagccuugccaagauggugacacc

SEQ ID NO: 267830 - RNA, 24 nt, Human
uucaagaccagccuuggcaacaug

SEQ ID NO: 267831 - RNA, 32 nt, Human
uucaagaccagccuuggcaacauggugaaacc

SEQ ID NO: 267832 - RNA, 32 nt, Human
uucaagaccagcguggccaacguggcgaaacc

SEQ ID NO: 267833 - RNA, 24 nt, Human
uucaagaccagcgugggcaauaua

SEQ ID NO: 267834 - RNA, 32 nt, Human
uucaagaccagcugaccaacacggugaaaccc

SEQ ID NO: 267835 - RNA, 24 nt, Human
uucaagaccagcuuggccaacaua

SEQ ID NO: 267836 - RNA, 32 nt, Human
uucaagaccagcuuggccaacauagugaaauc

SEQ ID NO: 267837 - RNA, 24 nt, Human
uucaagaccagcuuggccaacaug

SEQ ID NO: 267838 - RNA, 32 nt, Human
uucaagaccagcuuggccaacauggagaaacc

SEQ ID NO: 267839 - RNA, 32 nt, Human
uucaagaccagcuuggccaacauggcgaaacc

SEQ ID NO: 267840 - RNA, 32 nt, Human
uucaagaccagcuuggccaacauggugaaacc

SEQ ID NO: 267841 - RNA, 24 nt, Human
uucaagaccagcuugggcaacaua

SEQ ID NO: 267842 - RNA, 24 nt, Human
uucaagaccagcuugggcaacgua

SEQ ID NO: 267843 - RNA, 24 nt, Human
uucaagaccagcuugggcaagaua

SEQ ID NO: 267844 - RNA, 24 nt, Human
uucaagaccagcuugugcaauaua

SEQ ID NO: 267845 - RNA, 32 nt, Human
uucaagaccaggcuggccaacaugguaaaacc

SEQ ID NO: 267846 - RNA, 32 nt, Human
uucaagaccaggcuggccaacauggugaaacc

SEQ ID NO: 267847 - RNA, 32 nt, Human
uucaagaccaggcuggucaacauggcgaaacc

SEQ ID NO: 267848 - RNA, 32 nt, Human
uucaagaccaguauggccaacaugguaagacc

SEQ ID NO: 267849 - RNA, 32 nt, Human
uucaagaccaguccgagcaacauagcaaaagc

SEQ ID NO: 267850 - RNA, 24 nt, Human
uucaagaccagucugagcaacaug

SEQ ID NO: 267851 - RNA, 32 nt, Human
uucaagaccagucugagcaacauggugagagc

SEQ ID NO: 267852 - RNA, 23 nt, Human
uucaagaccagucuggccaacau

SEQ ID NO: 267853 - RNA, 24 nt, Human
uucaagaccagucuggccaacaua

SEQ ID NO: 267854 - RNA, 32 nt, Human
uucaagaccagucuggccaacauagcaaaacc

SEQ ID NO: 267855 - RNA, 24 nt, Human
uucaagaccagucuggccaacaug

SEQ ID NO: 267856 - RNA, 32 nt, Human
uucaagaccagucuggccaacaugacgaaacc

SEQ ID NO: 267857 - RNA, 32 nt, Human
uucaagaccagucuggccaacauggugaaaug

SEQ ID NO: 267858 - RNA, 24 nt, Human
uucaagaccagucuggccaauaug

SEQ ID NO: 267859 - RNA, 32 nt, Human
uucaagaccagucuggccaauauggagaaacc

SEQ ID NO: 267860 - RNA, 22 nt, Human
uucaagaccagucugggcaaca

SEQ ID NO: 267861 - RNA, 24 nt, Human
uucaagaccagucugggcaacaua

SEQ ID NO: 267862 - RNA, 32 nt, Human
uucaagaccagucugggcaacauagcgagacu

SEQ ID NO: 267863 - RNA, 32 nt, Human
uucaagaccagucugggcaacauagugagacc

SEQ ID NO: 267864 - RNA, 24 nt, Human
uucaagaccagucugggcaacaug

SEQ ID NO: 267865 - RNA, 32 nt, Human
uucaagaccagucugggcaacaugguaaaacc

SEQ ID NO: 267866 - RNA, 32 nt, Human
uucaagaccagucugggcaacauggugagacc

SEQ ID NO: 267867 - RNA, 24 nt, Human
uucaagaccagugugggcaacaug

SEQ ID NO: 267868 - RNA, 32 nt, Human
uucaagaccauccuggccaacacagugaaacc

SEQ ID NO: 267869 - RNA, 32 nt, Human
uucaagaccauccuggccaacauagugaaacc

SEQ ID NO: 267870 - RNA, 32 nt, Human
uucaagaccauguuggccaggcuggucucgaa

SEQ ID NO: 267871 - RNA, 32 nt, Human
uucaagacccuugagguauuguuucaucauuu

SEQ ID NO: 267872 - RNA, 24 nt, Human
uucaagaccggccugagcaacaua

SEQ ID NO: 267873 - RNA, 32 nt, Human
uucaagaccggccugagcaacauagugaggau

SEQ ID NO: 267874 - RNA, 24 nt, Human
uucaagaccggccuggccaacaug

SEQ ID NO: 267875 - RNA, 32 nt, Human
uucaagaccggccuggccaacauggugaaacc

SEQ ID NO: 267876 - RNA, 32 nt, Human
uucaagaccugccuggccaacauggugaaacc

SEQ ID NO: 267877 - RNA, 24 nt, Human
uucaagaccugccuggguaacaua

SEQ ID NO: 267878 - RNA, 32 nt, Human
uucaagaccuucuccccauucugccuccauuc

SEQ ID NO: 267879 - RNA, 32 nt, Human
uucaagacgacagcucuguaucugccauguga

SEQ ID NO: 267880 - RNA, 24 nt, Human
uucaagacgagccugggcaacaug

SEQ ID NO: 267881 - RNA, 24 nt, Human
uucaagacuagccuaggcaacaua

SEQ ID NO: 267882 - RNA, 32 nt, Human
uucaagacuagccuaggcaacauagugagacc

SEQ ID NO: 267883 - RNA, 32 nt, Human
uucaagacuagccugaccaacauggugaaacu

SEQ ID NO: 267884 - RNA, 32 nt, Human
uucaagacuagccuggccaacaaguugaaacc

SEQ ID NO: 267885 - RNA, 32 nt, Human
uucaagacuagccuggccaacaucaugaaacc

SEQ ID NO: 267886 - RNA, 24 nt, Human
uucaagacuagccuggccaacaug

SEQ ID NO: 267887 - RNA, 32 nt, Human
uucaagacuagccuggccaacaugaugaaacc

SEQ ID NO: 267888 - RNA, 32 nt, Human
uucaagacuagccuggccaacauggcaaaacc

SEQ ID NO: 267889 - RNA, 32 nt, Human
uucaagacuagccuggccaacauggugaaacc

SEQ ID NO: 267890 - RNA, 32 nt, Human
uucaagacuagccuggccaacauggugagaca

SEQ ID NO: 267891 - RNA, 32 nt, Human
uucaagacuagccuggccaacauguuguaaac

SEQ ID NO: 267892 - RNA, 24 nt, Human
uucaagacuagccuggcugacaug

SEQ ID NO: 267893 - RNA, 32 nt, Human
uucaagacuagccuggcugacauggugaaacu

SEQ ID NO: 267894 - RNA, 24 nt, Human
uucaagacuagccugggcaacaua

SEQ ID NO: 267895 - RNA, 32 nt, Human
uucaagacuagccugggcaacauagcgagacu

SEQ ID NO: 267896 - RNA, 32 nt, Human
uucaagacuagccugggcaacauagugagacu

SEQ ID NO: 267897 - RNA, 24 nt, Human
uucaagacuagccuggucaacaug

SEQ ID NO: 267898 - RNA, 32 nt, Human
uucaagacuagccuggucaacauggugaaacc

SEQ ID NO: 267899 - RNA, 32 nt, Human
uucaagacuagcguggccaacgugaggaaacc

SEQ ID NO: 267900 - RNA, 32 nt, Human
uucaagagaagcuuccuugaaaagaaacgcuu

SEQ ID NO: 267901 - RNA, 32 nt, Human
uucaagagaagcuuccuuggacaaaaggaccc

SEQ ID NO: 267902 - RNA, 32 nt, Human
uucaagagacuugcagggcuagguagagggcc

SEQ ID NO: 267903 - RNA, 32 nt, Human
uucaagagagcuuucuuccacugacauaaaau

SEQ ID NO: 267904 - RNA, 32 nt, Human
uucaagagauccauccucccaccucagucucc

SEQ ID NO: 267905 - RNA, 22 nt, Human
uucaagagauucucuugccuua

SEQ ID NO: 267906 - RNA, 32 nt, Human
uucaagagcaacuucuccacauguuggguguc

SEQ ID NO: 267907 - RNA, 24 nt, Human
uucaagagcagccuggccaacaug

SEQ ID NO: 267908 - RNA, 32 nt, Human
uucaagagcagccuggccaacauggugaaacc

SEQ ID NO: 267909 - RNA, 32 nt, Human
uucaagagcagccuggccaacauugugaaacc

SEQ ID NO: 267910 - RNA, 32 nt, Human
uucaagagcagccuggccaaccuggugaaacc

SEQ ID NO: 267911 - RNA, 32 nt, Human
uucaagagcagccuggccaagauggugaaacc

SEQ ID NO: 267912 - RNA, 24 nt, Human
uucaagagcagccugggcaacaug

SEQ ID NO: 267913 - RNA, 32 nt, Human
uucaagagcagccugggcaacauggcaaaacc

SEQ ID NO: 267914 - RNA, 24 nt, Human
uucaagagcagccugggcaauaua

SEQ ID NO: 267915 - RNA, 32 nt, Human
uucaagagcagccuggucaacauggugaaacu

SEQ ID NO: 267916 - RNA, 32 nt, Human
uucaagagcagucugggcaacauggugagacc

SEQ ID NO: 267917 - RNA, 32 nt, Human
uucaagagcccaaaaacaguucuccuccaugc

SEQ ID NO: 267918 - RNA, 32 nt, Human
uucaagagcuccaauggggucuccagcugaaa

SEQ ID NO: 267919 - RNA, 32 nt, Human
uucaagaggcagaugaggcucaguuggacucc

SEQ ID NO: 267920 - RNA, 32 nt, Human
uucaagaguaugcccacccagccccaaagcca

SEQ ID NO: 267921 - RNA, 32 nt, Human
uucaagaucaaccuggccaacauacugaaacc

SEQ ID NO: 267922 - RNA, 32 nt, Human
uucaagaucagccugaccaacauggagaaacc

SEQ ID NO: 267923 - RNA, 24 nt, Human
uucaagaucagccugcgcaacaug

SEQ ID NO: 267924 - RNA, 32 nt, Human
uucaagaucagccugcgcaacauggcgaaacc

SEQ ID NO: 267925 - RNA, 32 nt, Human
uucaagaucagccuggccaacauaaggagacc

SEQ ID NO: 267926 - RNA, 24 nt, Human
uucaagaucagccuggccaacaug

SEQ ID NO: 267927 - RNA, 32 nt, Human
uucaagaucagccuggccaacauggcaaaacc

SEQ ID NO: 267928 - RNA, 32 nt, Human
uucaagaucagccuggccaacauggugaaacc

SEQ ID NO: 267929 - RNA, 32 nt, Human
uucaagaucagccuggccuagauggcaaaacc

SEQ ID NO: 267930 - RNA, 24 nt, Human
uucaagaucagccuggcuaacaug

SEQ ID NO: 267931 - RNA, 32 nt, Human
uucaagaucagccuggcuaacauggcgaaacc

SEQ ID NO: 267932 - RNA, 24 nt, Human
uucaagaucagccuggcuaacgug

SEQ ID NO: 267933 - RNA, 32 nt, Human
uucaagaucagccugggaaacauagugagacc

SEQ ID NO: 267934 - RNA, 24 nt, Human
uucaagaucagccugggcaacaua

SEQ ID NO: 267935 - RNA, 32 nt, Human
uucaagaucagccugggcaacauagugaaacc

SEQ ID NO: 267936 - RNA, 32 nt, Human
uucaagaucagccugggcaacauagugagacc

SEQ ID NO: 267937 - RNA, 32 nt, Human
uucaagaucagccugggcaacauggugaaacc

SEQ ID NO: 267938 - RNA, 24 nt, Human
uucaagaucagccugggcaauaua

SEQ ID NO: 267939 - RNA, 32 nt, Human
uucaagaucagccugggcaauauagugaaacc

SEQ ID NO: 267940 - RNA, 24 nt, Human
uucaagaucagccugggcaguaua

SEQ ID NO: 267941 - RNA, 32 nt, Human
uucaagaucagccugggcaguauagcaagacc

SEQ ID NO: 267942 - RNA, 24 nt, Human
uucaagaucagucuggacaacaug

SEQ ID NO: 267943 - RNA, 32 nt, Human
uucaagaucagucuggacaacauggcaaaacc

SEQ ID NO: 267944 - RNA, 22 nt, Human
uucaagaucagucugggcaaca

SEQ ID NO: 267945 - RNA, 32 nt, Human
uucaagaugaaauaaggagaaaccccauaacu

SEQ ID NO: 267946 - RNA, 32 nt, Human
uucaagaugaaucaaaaugauggcugguaaua

SEQ ID NO: 267947 - RNA, 32 nt, Human
uucaagaugacaagaacagagcauuaaaccaa

SEQ ID NO: 267948 - RNA, 31 nt, Human
uucaagaugcugcugguccugcucucagugg

SEQ ID NO: 267949 - RNA, 24 nt, Human
uucaagauuagccuggacaacaug

SEQ ID NO: 267950 - RNA, 32 nt, Human
uucaagauuagccuggacaacauggugaaacc

SEQ ID NO: 267951 - RNA, 32 nt, Human
uucaagauuagccuggccaacuuagugaaacu

SEQ ID NO: 267952 - RNA, 32 nt, Human
uucaagcaaagguccaaaaagacuggagaaau

SEQ ID NO: 267953 - RNA, 32 nt, Human
uucaagcaagaaagccugggcccuuugcaccc

SEQ ID NO: 267954 - RNA, 22 nt, Human
uucaagcaauccucccaucuca

SEQ ID NO: 267955 - RNA, 32 nt, Human
uucaagcaauccucccaucucagccuccugag

SEQ ID NO: 267956 - RNA, 32 nt, Human
uucaagcaauccuucugucucagucuccucag

SEQ ID NO: 267957 - RNA, 32 nt, Human
uucaagcaauucucaugccucagucccccgau

SEQ ID NO: 267958 - RNA, 32 nt, Human
uucaagcaauucuccagccucugccucccgag

SEQ ID NO: 267959 - RNA, 32 nt, Human
uucaagcaauucucccaucucagccuccugag

SEQ ID NO: 267960 - RNA, 22 nt, Human
uucaagcaauucuccugccuca

SEQ ID NO: 267961 - RNA, 32 nt, Human
uucaagcacaauaaucaucacagacuugaguu

SEQ ID NO: 267962 - RNA, 32 nt, Human
uucaagcacugaguuucuauuccaagaucaua

SEQ ID NO: 267963 - RNA, 32 nt, Human
uucaagcacuucagacaaacugugcagaagag

SEQ ID NO: 267964 - RNA, 32 nt, Human
uucaagcacuucuucccuccacccucacucca

SEQ ID NO: 267965 - RNA, 32 nt, Human
uucaagcagcgaguguuggguccucugcuucc

SEQ ID NO: 267966 - RNA, 32 nt, Human
uucaagcaggaaagauuuaacacaacauacua

SEQ ID NO: 267967 - RNA, 22 nt, Human
uucaagcaguucuccugccuca

SEQ ID NO: 267968 - RNA, 31 nt, Human
uucaagcaguuuccugcuucagacuuccaag

SEQ ID NO: 267969 - RNA, 32 nt, Human
uucaagcaucugagagucuuaaaaguggaauu

SEQ ID NO: 267970 - RNA, 32 nt, Human
uucaagccaucuuuaaacagggaucugcacag

SEQ ID NO: 267971 - RNA, 32 nt, Human
uucaagccgggccuggccuacguggggaaggu

SEQ ID NO: 267972 - RNA, 32 nt, Human
uucaagccuagccuggccaacauggugaaacc

SEQ ID NO: 267973 - RNA, 32 nt, Human
uucaagccugccaucaaggacauuucuuaaga

SEQ ID NO: 267974 - RNA, 32 nt, Human
uucaagcgauucucccaucucagccucccgag

SEQ ID NO: 267975 - RNA, 22 nt, Human
uucaagcgauucuccugccuca

SEQ ID NO: 267976 - RNA, 32 nt, Human
uucaagcgauucuccugccucugccucccaag

SEQ ID NO: 267977 - RNA, 20 nt, Human
uucaagcgauucuccugucu

SEQ ID NO: 267978 - RNA, 32 nt, Human
uucaagcgauucucuugccucugccucccgag

SEQ ID NO: 267979 - RNA, 32 nt, Human
uucaagcgauucugccucgaccucucaaguag

SEQ ID NO: 267980 - RNA, 32 nt, Human
uucaagcgauucugcugccucagccucccgag

SEQ ID NO: 267981 - RNA, 32 nt, Human
uucaagcgauucuucugccucagccuucugag

SEQ ID NO: 267982 - RNA, 32 nt, Human
uucaagcgauuuucuugccucugccuccugag

SEQ ID NO: 267983 - RNA, 32 nt, Human
uucaagcucagagaggaugaaggggcaucugg

SEQ ID NO: 267984 - RNA, 32 nt, Human
uucaagcugaacaucugggauguggguggcca

SEQ ID NO: 267985 - RNA, 32 nt, Human
uucaagcugcagauuuguuugucauccuugua

SEQ ID NO: 267986 - RNA, 32 nt, Human
uucaaggaaaaauggcacaauuuuugcucagg

SEQ ID NO: 267987 - RNA, 32 nt, Human
uucaaggaaaagaauucucagcagagcucaag

SEQ ID NO: 267988 - RNA, 32 nt, Human
uucaaggaaagaucugauaucuguaaagcaag

SEQ ID NO: 267989 - RNA, 32 nt, Human
uucaaggacaccugccuucaaagccacugagg

SEQ ID NO: 267990 - RNA, 24 nt, Human
uucaaggacagccuggguaauaua

SEQ ID NO: 267991 - RNA, 32 nt, Human
uucaaggaccaccagccccuuacucuucaagc

SEQ ID NO: 267992 - RNA, 32 nt, Human
uucaaggaccaguuccagagaggaugucacca

SEQ ID NO: 267993 - RNA, 32 nt, Human
uucaaggaccuuucaucuucaggauuuacagu

SEQ ID NO: 267994 - RNA, 32 nt, Human
uucaaggacuccucucuuucuucaccaagaag

SEQ ID NO: 267995 - RNA, 32 nt, Human
uucaaggagaaucaaaaugcaaaacuugggaa

SEQ ID NO: 267996 - RNA, 32 nt, Human
uucaaggagcuugcaguauagugagaaaagcc

SEQ ID NO: 267997 - RNA, 32 nt, Human
uucaaggaggaucgcuugagcaggaguuccag

SEQ ID NO: 267998 - RNA, 32 nt, Human
uucaaggaggcccacugugucuaggcaggcaa

SEQ ID NO: 267999 - RNA, 32 nt, Human
uucaaggaggugaaaaugauggaugacuccuc

SEQ ID NO: 268000 - RNA, 32 nt, Human
uucaaggauaaaaacugccaccccaacacccu

SEQ ID NO: 268001 - RNA, 24 nt, Human
uucaaggauggagaugguuuugcc

SEQ ID NO: 268002 - RNA, 32 nt, Human
uucaaggcaaggggcgggaucuccacuggggg

SEQ ID NO: 268003 - RNA, 32 nt, Human
uucaaggcagcaagaauugcuauagagaucua

SEQ ID NO: 268004 - RNA, 32 nt, Human
uucaaggcagccacggugucucacugcggccc

SEQ ID NO: 268005 - RNA, 32 nt, Human
uucaaggcaggauauaggaggaagggauggug

SEQ ID NO: 268006 - RNA, 32 nt, Human
uucaaggcagugagacaaagaagggagauggg

SEQ ID NO: 268007 - RNA, 32 nt, Human
uucaaggccagcauggacaacauagugaggcc

SEQ ID NO: 268008 - RNA, 24 nt, Human
uucaaggccagccuggacaacaua

SEQ ID NO: 268009 - RNA, 32 nt, Human
uucaaggccagccuggacaacauaguaagacc

SEQ ID NO: 268010 - RNA, 24 nt, Human
uucaaggccagccuggacgacaua

SEQ ID NO: 268011 - RNA, 32 nt, Human
uucaaggccagccuggacgacauagcgagacu

SEQ ID NO: 268012 - RNA, 32 nt, Human
uucaaggccagccuggccaacauggugaaccc

SEQ ID NO: 268013 - RNA, 24 nt, Human
uucaaggccagccuggccaacgug

SEQ ID NO: 268014 - RNA, 32 nt, Human
uucaaggccagccuggccaacgugaugaaacu

SEQ ID NO: 268015 - RNA, 24 nt, Human
uucaaggccagccugggcaacaua

SEQ ID NO: 268016 - RNA, 32 nt, Human
uucaaggccagccugggcaacauagaccucug

SEQ ID NO: 268017 - RNA, 32 nt, Human
uucaaggccagccugggcaacauaguaagacu

SEQ ID NO: 268018 - RNA, 32 nt, Human
uucaaggccagccugggcaacauagugaagcc

SEQ ID NO: 268019 - RNA, 24 nt, Human
uucaaggccagccugggcaacaug

SEQ ID NO: 268020 - RNA, 32 nt, Human
uucaaggccagccugggcaacauggcaaaacc

SEQ ID NO: 268021 - RNA, 32 nt, Human
uucaaggccagccugggcaacauggugaaacc

SEQ ID NO: 268022 - RNA, 32 nt, Human
uucaaggccagccugggcaacauggugucucu

SEQ ID NO: 268023 - RNA, 32 nt, Human
uucaaggccugggaguaaucuucagcucacug

SEQ ID NO: 268024 - RNA, 32 nt, Human
uucaaggcgggcuguaacugguggcauuuguc

SEQ ID NO: 268025 - RNA, 31 nt, Human
uucaaggcuaagagagaaagacugccucuga

SEQ ID NO: 268026 - RNA, 32 nt, Human
uucaaggcuaauaccuacuuguacguacaugu

SEQ ID NO: 268027 - RNA, 22 nt, Human
uucaagggacagcacaaccuca

SEQ ID NO: 268028 - RNA, 32 nt, Human
uucaagggacucucagaucaucaaacccaccc

SEQ ID NO: 268029 - RNA, 22 nt, Human
uucaagggaggacuuccccagc

SEQ ID NO: 268030 - RNA, 32 nt, Human
uucaagggaggcagggccccugugggcacuag

SEQ ID NO: 268031 - RNA, 32 nt, Human
uucaagggaguguugcuucucaacucagccaa

SEQ ID NO: 268032 - RNA, 32 nt, Human
uucaagggaugagcuaugaggcucccugggag

SEQ ID NO: 268033 - RNA, 32 nt, Human
uucaagggauuucccugucucagagcagccuu

SEQ ID NO: 268034 - RNA, 32 nt, Human
uucaagggccuugcccugccccggucuguccg

SEQ ID NO: 268035 - RNA, 32 nt, Human
uucaagggcugcagccagggugaggccucugu

SEQ ID NO: 268036 - RNA, 32 nt, Human
uucaaggggaagaaagagucucggcgggaaaa

SEQ ID NO: 268037 - RNA, 23 nt, Human
uucaaggggccuaccuccugcca

SEQ ID NO: 268038 - RNA, 32 nt, Human
uucaaggucaccagguacaguuguacagguug

SEQ ID NO: 268039 - RNA, 32 nt, Human
uucaaggucaugcagugggucgagcgccugag

SEQ ID NO: 268040 - RNA, 32 nt, Human
uucaagguccgagcucuguccucugucaguca

SEQ ID NO: 268041 - RNA, 32 nt, Human
uucaaggugaagccucaagcgucagccuugga

SEQ ID NO: 268042 - RNA, 32 nt, Human
uucaagguuacaucugcuagcagaguaguguu

SEQ ID NO: 268043 - RNA, 32 nt, Human
uucaaguaaaugacuuuuucuucuauucucua

SEQ ID NO: 268044 - RNA, 32 nt, Human
uucaaguacaagaaggcuuucucuaccauuug

SEQ ID NO: 268045 - RNA, 32 nt, Human
uucaaguaccugcugcucacacaggucugggu

SEQ ID NO: 268046 - RNA, 32 nt, Human
uucaaguagacaguuaaauuaccagaggaucc

SEQ ID NO: 268047 - RNA, 19 nt, Human
uucaagucaaaaauauuua

SEQ ID NO: 268048 - RNA, 32 nt, Human
uucaagucacaugucucucagaccccuggauu

SEQ ID NO: 268049 - RNA, 32 nt, Human
uucaagucagacagaucccugccuuggugggc

SEQ ID NO: 268050 - RNA, 32 nt, Human
uucaagucaguguggccaugaaggggcugccu

SEQ ID NO: 268051 - RNA, 32 nt, Human
uucaagucaugccugagucaagaguugaggag

SEQ ID NO: 268052 - RNA, 24 nt, Human
uucaaguccaaucugggcaacaug

SEQ ID NO: 268053 - RNA, 24 nt, Human
uucaaguccagccugggcuacaua

SEQ ID NO: 268054 - RNA, 32 nt, Human
uucaaguccagccugggcuacauagugagacc

SEQ ID NO: 268055 - RNA, 19 nt, Human
uucaaguccuaaaauauuu

SEQ ID NO: 268056 - RNA, 22 nt, Human
uucaagucuaauaaauucuuaa

SEQ ID NO: 268057 - RNA, 32 nt, Human
uucaagucucugcucaaugucacuucauuaaa

SEQ ID NO: 268058 - RNA, 32 nt, Human
uucaagucugaaagcaggaaaagcacugguac

SEQ ID NO: 268059 - RNA, 32 nt, Human
uucaagucugcagccggcucccagggagaucu

SEQ ID NO: 268060 - RNA, 20 nt, Human
uucaagucuuauguuuuccu

SEQ ID NO: 268061 - RNA, 32 nt, Human
uucaagugacuuuugacuauugccaaaaauca

SEQ ID NO: 268062 - RNA, 22 nt, Human
uucaagugauccucccaccuca

SEQ ID NO: 268063 - RNA, 22 nt, Human
uucaagugauccucccaucuca

SEQ ID NO: 268064 - RNA, 32 nt, Human
uucaagugauccucccaucucagccucccaag

SEQ ID NO: 268065 - RNA, 22 nt, Human
uucaagugauccuccugccuca

SEQ ID NO: 268066 - RNA, 32 nt, Human
uucaagugauccucuugucucaguccccugag

SEQ ID NO: 268067 - RNA, 32 nt, Human
uucaagugaucugcccaccucugccucccaaa

SEQ ID NO: 268068 - RNA, 32 nt, Human
uucaagugauucucaugccucagucccccgag

SEQ ID NO: 268069 - RNA, 32 nt, Human
uucaagugauucuccugccucugccuccugag

SEQ ID NO: 268070 - RNA, 22 nt, Human
uucaagugauucugcugucuca

SEQ ID NO: 268071 - RNA, 32 nt, Human
uucaagugcagccccagguggccaggccucca

SEQ ID NO: 268072 - RNA, 32 nt, Human
uucaagugcugccugcucacugaccaacugcc

SEQ ID NO: 268073 - RNA, 32 nt, Human
uucaaguggcugggaugacuacaggcaugggc

SEQ ID NO: 268074 - RNA, 32 nt, Human
uucaagugggucuggccaaaugugacagaugc

SEQ ID NO: 268075 - RNA, 32 nt, Human
uucaaguuccuagauacaaccuucccaugcug

SEQ ID NO: 268076 - RNA, 20 nt, Human
uucaaguuguacuuguuaua

SEQ ID NO: 268077 - RNA, 32 nt, Human
uucaaguuuacaugauuuuuaaauuugcaaug

SEQ ID NO: 268078 - RNA, 24 nt, Human
uucaaguuuagccugggcaguaua

SEQ ID NO: 268079 - RNA, 32 nt, Human
uucaaguuucauggugauuauagcacagcucc

SEQ ID NO: 268080 - RNA, 23 nt, Human
uucaauaaauacucuuucaugua

SEQ ID NO: 268081 - RNA, 32 nt, Human
uucaauaauguucaacugaucucacagaugag

SEQ ID NO: 268082 - RNA, 32 nt, Human
uucaauacacaguacuuccucccagcauugcu

SEQ ID NO: 268083 - RNA, 32 nt, Human
uucaauacagagguugcuggggucugugacau

SEQ ID NO: 268084 - RNA, 32 nt, Human
uucaauacaucuuucccuuucucuucuucaug

SEQ ID NO: 268085 - RNA, 32 nt, Human
uucaauacauuugccaucaccaucaacguuau

SEQ ID NO: 268086 - RNA, 32 nt, Human
uucaauaccagccugagcaaccuaaugagacc

SEQ ID NO: 268087 - RNA, 32 nt, Human
uucaauaccagccuggccaacauggugaaacc

SEQ ID NO: 268088 - RNA, 32 nt, Human
uucaauaccagccuggccaacguggugaaacc

SEQ ID NO: 268089 - RNA, 24 nt, Human
uucaauaccagccugggcaacaua

SEQ ID NO: 268090 - RNA, 32 nt, Human
uucaauaccagccugggcaacauacggaggcc

SEQ ID NO: 268091 - RNA, 32 nt, Human
uucaauaccauucacagcauucaucaccaacu

SEQ ID NO: 268092 - RNA, 32 nt, Human
uucaauauaggugagaggagaaguuggagggu

SEQ ID NO: 268093 - RNA, 32 nt, Human
uucaauaucaaauuauucauaguggagagaaa

SEQ ID NO: 268094 - RNA, 32 nt, Human
uucaauaucaagacugacuggcaccaacacuu

SEQ ID NO: 268095 - RNA, 32 nt, Human
uucaauauguagaacaggagaaucacuugaug

SEQ ID NO: 268096 - RNA, 32 nt, Human
uucaaucacccucugucucuccugccuucugc

SEQ ID NO: 268097 - RNA, 32 nt, Human
uucaaucacuauucaaucacuacuuuuugccc

SEQ ID NO: 268098 - RNA, 32 nt, Human
uucaaucagaucagauuguuguauuuauucca

SEQ ID NO: 268099 - RNA, 32 nt, Human
uucaaucaguugacacaaggaggcagcuacgg

SEQ ID NO: 268100 - RNA, 32 nt, Human
uucaaucauaauaccugcuguggaugcuucau

SEQ ID NO: 268101 - RNA, 17 nt, Human
uucaauccccuuuccuu

SEQ ID NO: 268102 - RNA, 32 nt, Human
uucaauccccuuuccuuccucuuuuuggguuu

SEQ ID NO: 268103 - RNA, 32 nt, Human
uucaauccuccgggcggcucaggcucaaacau

SEQ ID NO: 268104 - RNA, 32 nt, Human
uucaauccugcaggcagcccgguuuggggaug

SEQ ID NO: 268105 - RNA, 32 nt, Human
uucaaucugggagccuuccuggccagucugag

SEQ ID NO: 268106 - RNA, 32 nt, Human
uucaaucuugacuuccuagucgagugacaagu

SEQ ID NO: 268107 - RNA, 32 nt, Human
uucaaugaagaaaucggagugggaagagacac

SEQ ID NO: 268108 - RNA, 32 nt, Human
uucaaugaauacuggucucuuuccaaagcauu

SEQ ID NO: 268109 - RNA, 32 nt, Human
uucaaugacgcacacuuccuguggcaucccug

SEQ ID NO: 268110 - RNA, 32 nt, Human
uucaaugagauauuccauguaaaagagcuuag

SEQ ID NO: 268111 - RNA, 32 nt, Human
uucaaugagggacuguguugcuaagagcguug

SEQ ID NO: 268112 - RNA, 21 nt, Human
uucaaugauuauuuguauuua

SEQ ID NO: 268113 - RNA, 32 nt, Human
uucaaugcucaagugagucacaucuaccuauu

SEQ ID NO: 268114 - RNA, 32 nt, Human
uucaaugcuggugcuuucuuauugcaacucag

SEQ ID NO: 268115 - RNA, 32 nt, Human
uucaauggaaauucacguugcuuugcauuucu

SEQ ID NO: 268116 - RNA, 21 nt, Human
uucaauggagcuugggcagca

SEQ ID NO: 268117 - RNA, 29 nt, Human
uucaaugggcgaggacacggacacgcgga

SEQ ID NO: 268118 - RNA, 32 nt, Human
uucaaugggcugggggacuuccugcuggucgg

SEQ ID NO: 268119 - RNA, 32 nt, Human
uucaaugucaagacauccagaaagaucugucu

SEQ ID NO: 268120 - RNA, 32 nt, Human
uucaaugucccuggaguugggagggaggaaug

SEQ ID NO: 268121 - RNA, 32 nt, Human
uucaaugugaaaucuuagaaugcaguuuuacc

SEQ ID NO: 268122 - RNA, 32 nt, Human
uucaauguggacaacacaguaagacccugucu

SEQ ID NO: 268123 - RNA, 32 nt, Human
uucaauguugggacucaaaggugaagacacug

SEQ ID NO: 268124 - RNA, 32 nt, Human
uucaauuaaagaaagggaaauacaaggcuaaa

SEQ ID NO: 268125 - RNA, 32 nt, Human
uucaauuagcacucgcugauuggucgcugcuc

SEQ ID NO: 268126 - RNA, 32 nt, Human
uucaauucaaugcacguucacccuagagcuuu

SEQ ID NO: 268127 - RNA, 32 nt, Human
uucaauucaguuauuauauucauuuagcauua

SEQ ID NO: 268128 - RNA, 32 nt, Human
uucaauucauguaacacuguugagugcuuacu

SEQ ID NO: 268129 - RNA, 32 nt, Human
uucaauucucagauuauacauauguuauaaaa

SEQ ID NO: 268130 - RNA, 32 nt, Human
uucaauucuggcuucuugcacuuagcauaaug

SEQ ID NO: 268131 - RNA, 31 nt, Human
uucaauugacuucuguuccuugcuuuuaguu

SEQ ID NO: 268132 - RNA, 32 nt, Human
uucaauuugugaaaucaaagaacugaugcacu

SEQ ID NO: 268133 - RNA, 32 nt, Human
uucaauuuuuaucauuccccuuaucauuagaa

SEQ ID NO: 268134 - RNA, 32 nt, Human
uucacaaaaagcugggccuacugaacaauuca

SEQ ID NO: 268135 - RNA, 18 nt, Human
uucacaaaacuggacuca

SEQ ID NO: 268136 - RNA, 32 nt, Human
uucacaaaaucaguuguacaagagaaggcacc

SEQ ID NO: 268137 - RNA, 32 nt, Human
uucacaaacagagaagcaacauuugaaaguag

SEQ ID NO: 268138 - RNA, 32 nt, Human
uucacaaacaugacaucacccugcagcuugca

SEQ ID NO: 268139 - RNA, 32 nt, Human
uucacaaaggcugaagugggagucagaugaua

SEQ ID NO: 268140 - RNA, 27 nt, Human
uucacaaaguaaauugccacaaccuca

SEQ ID NO: 268141 - RNA, 32 nt, Human
uucacaacaaccuugugaaagacauaggggaa

SEQ ID NO: 268142 - RNA, 32 nt, Human
uucacaacauugaacccaggaggcggagcuug

SEQ ID NO: 268143 - RNA, 32 nt, Human
uucacaaccagaaaccacuaccccucaggggu

SEQ ID NO: 268144 - RNA, 32 nt, Human
uucacaaccagccugaccaacauggagaaacc

SEQ ID NO: 268145 - RNA, 32 nt, Human
uucacaaccagccuggucaacuugguaaaacc

SEQ ID NO: 268146 - RNA, 32 nt, Human
uucacaacccagcagcgcuccaccuccaacuu

SEQ ID NO: 268147 - RNA, 32 nt, Human
uucacaaccgagaugccuuugacauuuugggc

SEQ ID NO: 268148 - RNA, 22 nt, Human
uucacaacuacuuucucucucc

SEQ ID NO: 268149 - RNA, 32 nt, Human
uucacaacuggccuccccuugagguuccucca

SEQ ID NO: 268150 - RNA, 32 nt, Human
uucacaacuuucuucuacucugugccuugagc

SEQ ID NO: 268151 - RNA, 32 nt, Human
uucacaagaagaagaaugaaguccaggaggag

SEQ ID NO: 268152 - RNA, 32 nt, Human
uucacaagagauuacaaaauauacaaaaguuu

SEQ ID NO: 268153 - RNA, 32 nt, Human
uucacaagaggugucagauuaagaugugaaag

SEQ ID NO: 268154 - RNA, 32 nt, Human
uucacaagcuguucuuuguuucauaauuggau

SEQ ID NO: 268155 - RNA, 31 nt, Human
uucacaaggaaacuucugccucaggugggga

SEQ ID NO: 268156 - RNA, 32 nt, Human
uucacaagggauucuacuugacaggcaauugg

SEQ ID NO: 268157 - RNA, 32 nt, Human
uucacaaguagguuuucaccuggucauagcua

SEQ ID NO: 268158 - RNA, 32 nt, Human
uucacaagucuguaaucccagcacuuugggag

SEQ ID NO: 268159 - RNA, 32 nt, Human
uucacaauaaaggagauucacuggguucugca

SEQ ID NO: 268160 - RNA, 32 nt, Human
uucacaaucuguugcauguuguguuucaagua

SEQ ID NO: 268161 - RNA, 32 nt, Human
uucacaaugauuuuguucucugcuccauauuu

SEQ ID NO: 268162 - RNA, 32 nt, Human
uucacaaugguuuuguuucuuuccuucugauc

SEQ ID NO: 268163 - RNA, 32 nt, Human
uucacaaugugaccccgcucccaugggcuccc

SEQ ID NO: 268164 - RNA, 32 nt, Human
uucacaaugugcccaggucagcuguauaaaau

SEQ ID NO: 268165 - RNA, 23 nt, Human
uucacacaacaaccuucugcuca

SEQ ID NO: 268166 - RNA, 21 nt, Human
uucacacaacugauucauuca

SEQ ID NO: 268167 - RNA, 32 nt, Human
uucacacagaacuuuuccauaaacauuguucc

SEQ ID NO: 268168 - RNA, 32 nt, Human
uucacacagcagagucagaaguagaagccaga

SEQ ID NO: 268169 - RNA, 22 nt, Human
uucacacagcuaggucuuuuca

SEQ ID NO: 268170 - RNA, 32 nt, Human
uucacacaguguuauaguuuugccgcuggacu

SEQ ID NO: 268171 - RNA, 32 nt, Human
uucacacauauguacaaauacaugaacacagc

SEQ ID NO: 268172 - RNA, 32 nt, Human
uucacacauuuuaaaaauguuugcuacuuguu

SEQ ID NO: 268173 - RNA, 32 nt, Human
uucacaccacugcacuccagucugggcaacag

SEQ ID NO: 268174 - RNA, 32 nt, Human
uucacaccacugccauuuccuccugggcaaca

SEQ ID NO: 268175 - RNA, 32 nt, Human
uucacaccagcaguguaugaaggauccaguuu

SEQ ID NO: 268176 - RNA, 22 nt, Human
uucacaccauucuccugccuca

SEQ ID NO: 268177 - RNA, 32 nt, Human
uucacacccaccucccacaugaccuuauuuua

SEQ ID NO: 268178 - RNA, 32 nt, Human
uucacacccccauuccuccuggcuccuuaucc

SEQ ID NO: 268179 - RNA, 32 nt, Human
uucacaccgcugcacucaagcuugggugacag

SEQ ID NO: 268180 - RNA, 32 nt, Human
uucacaccuacuuuuuaaaaacaaauauuauu

SEQ ID NO: 268181 - RNA, 32 nt, Human
uucacaccucaucaaacagaacaaauaaguua

SEQ ID NO: 268182 - RNA, 32 nt, Human
uucacaccucuaaucccugcacuuugggaggc

SEQ ID NO: 268183 - RNA, 32 nt, Human
uucacaccuggcccaacaaacuagaagucaca

SEQ ID NO: 268184 - RNA, 32 nt, Human
uucacaccuguaauccaagcacuuugggaggc

SEQ ID NO: 268185 - RNA, 32 nt, Human
uucacaccuguaaucccaacacuuugggaggc

SEQ ID NO: 268186 - RNA, 32 nt, Human
uucacaccuguaaucccagcacuuugggaggc

SEQ ID NO: 268187 - RNA, 32 nt, Human
uucacaccuguaauccccgcacuuuggaaggc

SEQ ID NO: 268188 - RNA, 32 nt, Human
uucacaccuguaaucccggcacuuugggaggc

SEQ ID NO: 268189 - RNA, 32 nt, Human
uucacaccuguaaucccggcauuuugggaggc

SEQ ID NO: 268190 - RNA, 32 nt, Human
uucacaccuguaauccuagaacuuugggaggc

SEQ ID NO: 268191 - RNA, 32 nt, Human
uucacaccuguaauccuagcaguuugggaggc

SEQ ID NO: 268192 - RNA, 32 nt, Human
uucacaccuguaauugcagcacuuugggaggc

SEQ ID NO: 268193 - RNA, 32 nt, Human
uucacaccugucuucuuaaaagccuggcccuu

SEQ ID NO: 268194 - RNA, 32 nt, Human
uucacacggaggcagagguggggaugagguau

SEQ ID NO: 268195 - RNA, 32 nt, Human
uucacacuaagcugagacagcgcagguuagaa

SEQ ID NO: 268196 - RNA, 32 nt, Human
uucacacucacagagguggagcaggggcacgg

SEQ ID NO: 268197 - RNA, 32 nt, Human
uucacacucauuuuuccuuacaacaauucuga

SEQ ID NO: 268198 - RNA, 32 nt, Human
uucacacuccucugcccucgauuugcaugaag

SEQ ID NO: 268199 - RNA, 32 nt, Human
uucacacugccacucuagaaagagcggaaaug

SEQ ID NO: 268200 - RNA, 23 nt, Human
uucacacuggaaucauccaggga

SEQ ID NO: 268201 - RNA, 18 nt, Human
uucacacuggagugaaug

SEQ ID NO: 268202 - RNA, 32 nt, Human
uucacacuggcuuucuuaucugcuccagaucc

SEQ ID NO: 268203 - RNA, 32 nt, Human
uucacagaacggagaacagagcagaaaugacc

SEQ ID NO: 268204 - RNA, 32 nt, Human
uucacagaagacaggucagcugaggggccugc

SEQ ID NO: 268205 - RNA, 24 nt, Human
uucacagaccccgcaacuccugcu

SEQ ID NO: 268206 - RNA, 32 nt, Human
uucacagaccuuaggcaccagacuggaggccc

SEQ ID NO: 268207 - RNA, 32 nt, Human
uucacagacugcucuggugccugguggugcua

SEQ ID NO: 268208 - RNA, 32 nt, Human
uucacagacuuggcacuucuccagaaggagga

SEQ ID NO: 268209 - RNA, 32 nt, Human
uucacagagaucccaagguggggaggaucugc

SEQ ID NO: 268210 - RNA, 32 nt, Human
uucacagagcuccucccaccccuagaccaguu

SEQ ID NO: 268211 - RNA, 32 nt, Human
uucacagaggcagagugggcagggacaaggga

SEQ ID NO: 268212 - RNA, 32 nt, Human
uucacagauacuugaauuaauucauccaaaug

SEQ ID NO: 268213 - RNA, 32 nt, Human
uucacagaucaaggagggucuacuacagagaa

SEQ ID NO: 268214 - RNA, 32 nt, Human
uucacagaugcugcaaguucagggagcguuuu

SEQ ID NO: 268215 - RNA, 32 nt, Human
uucacagauguggaaacugaggcugagaagag

SEQ ID NO: 268216 - RNA, 32 nt, Human
uucacagauucagcucuucucuccuuacauuu

SEQ ID NO: 268217 - RNA, 32 nt, Human
uucacagcacugcacugcagccugggugacaa

SEQ ID NO: 268218 - RNA, 32 nt, Human
uucacagcagcaauaacagccaaaaaguggga

SEQ ID NO: 268219 - RNA, 32 nt, Human
uucacagcaucaucaagucauucuuuggaagu

SEQ ID NO: 268220 - RNA, 32 nt, Human
uucacagccaaggccccuuccacccucuccag

SEQ ID NO: 268221 - RNA, 20 nt, Human
uucacagccagccuaggguc

SEQ ID NO: 268222 - RNA, 32 nt, Human
uucacagccaggagaugcugggccaguuccuc

SEQ ID NO: 268223 - RNA, 32 nt, Human
uucacagccagguaaaauuuaacugguggcuu

SEQ ID NO: 268224 - RNA, 32 nt, Human
uucacagcccaggcaggacagagcagaucaca

SEQ ID NO: 268225 - RNA, 21 nt, Human
uucacagccccagcgcagguc

SEQ ID NO: 268226 - RNA, 22 nt, Human
uucacagccggucucucugcca

SEQ ID NO: 268227 - RNA, 32 nt, Human
uucacagccugccucugguucuauaaacaagu

SEQ ID NO: 268228 - RNA, 31 nt, Human
uucacagcuacucgggagguugaggcaggag

SEQ ID NO: 268229 - RNA, 32 nt, Human
uucacagcuggggaguggagccugggccugag

SEQ ID NO: 268230 - RNA, 32 nt, Human
uucacagcuugaguuaaccuugcuuuuccggg

SEQ ID NO: 268231 - RNA, 32 nt, Human
uucacaggaucuguuugaguccuguccaccgg

SEQ ID NO: 268232 - RNA, 32 nt, Human
uucacaggcagaguaguugaucucacacaacg

SEQ ID NO: 268233 - RNA, 32 nt, Human
uucacaggcagcaaaccuccuggguuugaaaa

SEQ ID NO: 268234 - RNA, 32 nt, Human
uucacaggcuuaaaauguugcuguaauguaga

SEQ ID NO: 268235 - RNA, 32 nt, Human
uucacaggcuucacugaugauaacuccaggua

SEQ ID NO: 268236 - RNA, 32 nt, Human
uucacagggagcaacugauccauuccacaaca

SEQ ID NO: 268237 - RNA, 32 nt, Human
uucacagggagcucuaaucucugugauuacau

SEQ ID NO: 268238 - RNA, 32 nt, Human
uucacagggaggcaaagcugacaugaaccuuu

SEQ ID NO: 268239 - RNA, 32 nt, Human
uucacagggcugugaggauuacagaggauaau

SEQ ID NO: 268240 - RNA, 32 nt, Human
uucacagggugggaaacgaaauucgagggaaa

SEQ ID NO: 268241 - RNA, 23 nt, Human
uucacaggugggccuuuccagcu

SEQ ID NO: 268242 - RNA, 32 nt, Human
uucacagguguauccugaacaccugagacaag

SEQ ID NO: 268243 - RNA, 32 nt, Human
uucacagguucccaaagcuggcccagaugcug

SEQ ID NO: 268244 - RNA, 32 nt, Human
uucacaguaguauaaggguugcagcugaaugg

SEQ ID NO: 268245 - RNA, 32 nt, Human
uucacagugagcugauggucucuacagggagg

SEQ ID NO: 268246 - RNA, 32 nt, Human
uucacagugcccaugguauucaugccaacauu

SEQ ID NO: 268247 - RNA, 32 nt, Human
uucacagugucaggcuggacgccgugauuuca

SEQ ID NO: 268248 - RNA, 32 nt, Human
uucacaguuagaacgcagugcugugcggaggc

SEQ ID NO: 268249 - RNA, 32 nt, Human
uucacaguuagugccauuuaagccuuucuguc

SEQ ID NO: 268250 - RNA, 32 nt, Human
uucacaguuuguuuuucuagaagagaagaaag

SEQ ID NO: 268251 - RNA, 23 nt, Human
uucacauaaggcguugcuccaug

SEQ ID NO: 268252 - RNA, 24 nt, Human
uucacauaaucugaacuuuguuca

SEQ ID NO: 268253 - RNA, 32 nt, Human
uucacauaguuccccaaaggcuuucaacgggg

SEQ ID NO: 268254 - RNA, 22 nt, Human
uucacaucaauaaaauuuacca

SEQ ID NO: 268255 - RNA, 32 nt, Human
uucacaucacuguugcaccaagccacugcaag

SEQ ID NO: 268256 - RNA, 32 nt, Human
uucacaucccagcucugccucugacaaucaga

SEQ ID NO: 268257 - RNA, 32 nt, Human
uucacauccgaaugcauacaggagaaaaaccc

SEQ ID NO: 268258 - RNA, 32 nt, Human
uucacauccucagcaucccugccuccugcauc

SEQ ID NO: 268259 - RNA, 32 nt, Human
uucacauccugggugggacagagcaggacaau

SEQ ID NO: 268260 - RNA, 32 nt, Human
uucacauccuucuccugcucucuuucaauucc

SEQ ID NO: 268261 - RNA, 32 nt, Human
uucacaucucaaggagggagaacccgggcugu

SEQ ID NO: 268262 - RNA, 32 nt, Human
uucacaucucuuuaaaggaaaggaaagaggga

SEQ ID NO: 268263 - RNA, 32 nt, Human
uucacaugaugggcaccugugggaaaccugcc

SEQ ID NO: 268264 - RNA, 32 nt, Human
uucacaugcaggaggccucucucaggugaguc

SEQ ID NO: 268265 - RNA, 32 nt, Human
uucacaugcuccauagcgaccugugggcaacg

SEQ ID NO: 268266 - RNA, 32 nt, Human
uucacaugcuuaucugagaagacuuaaguucu

SEQ ID NO: 268267 - RNA, 32 nt, Human
uucacaugggaaaguauuuuggaaugugucuu

SEQ ID NO: 268268 - RNA, 21 nt, Human
uucacauguaaucuccaguga

SEQ ID NO: 268269 - RNA, 32 nt, Human
uucacauguccucugccuucucccucuucucu

SEQ ID NO: 268270 - RNA, 32 nt, Human
uucacauucccccucggauuagagaugcucaa

SEQ ID NO: 268271 - RNA, 32 nt, Human
uucacauucuuauuguaaccuuccucauuuca

SEQ ID NO: 268272 - RNA, 32 nt, Human
uucacauuggaacaaccuucuuuccagugcua

SEQ ID NO: 268273 - RNA, 32 nt, Human
uucacauuucugcugagagaaggugacuuaac

SEQ ID NO: 268274 - RNA, 32 nt, Human
uucacauuucuuccucuucguggcugcuccuc

SEQ ID NO: 268275 - RNA, 32 nt, Human
uucacauuuguaaucccagcacuuuggaaggc

SEQ ID NO: 268276 - RNA, 32 nt, Human
uucacauuuugcagaaacuuguucacauuucc

SEQ ID NO: 268277 - RNA, 32 nt, Human
uucacauuuuuaaaauguucuagucauuuuga

SEQ ID NO: 268278 - RNA, 32 nt, Human
uucaccaaacagcuagcacucuagcuugcaug

SEQ ID NO: 268279 - RNA, 32 nt, Human
uucaccaaacugucucugccucuuccuggaga

SEQ ID NO: 268280 - RNA, 32 nt, Human
uucaccaaacugucucugccucuucucagaga

SEQ ID NO: 268281 - RNA, 32 nt, Human
uucaccaaagggaccuguuaccuggaccaggu

SEQ ID NO: 268282 - RNA, 32 nt, Human
uucaccaagccgccuccacagugccggugggc

SEQ ID NO: 268283 - RNA, 32 nt, Human
uucaccaaggaaauauugagagagaagucggc

SEQ ID NO: 268284 - RNA, 18 nt, Human
uucaccacacacucacca

SEQ ID NO: 268285 - RNA, 32 nt, Human
uucaccaccacagccaaacgggagaucuugug

SEQ ID NO: 268286 - RNA, 32 nt, Human
uucaccaccacuagugucuguccauggaguua

SEQ ID NO: 268287 - RNA, 32 nt, Human
uucaccaccauccucguucuccagggucaagg

SEQ ID NO: 268288 - RNA, 32 nt, Human
uucaccacccuccaaguccucugaccuaauuu

SEQ ID NO: 268289 - RNA, 32 nt, Human
uucaccaccugucaguaaacgggggagggggc

SEQ ID NO: 268290 - RNA, 32 nt, Human
uucaccacuaagggcaaccuccagguacacuu

SEQ ID NO: 268291 - RNA, 32 nt, Human
uucaccacugcauucuagccugggcaacagag

SEQ ID NO: 268292 - RNA, 32 nt, Human
uucaccacugcucucccagagguccagguccg

SEQ ID NO: 268293 - RNA, 32 nt, Human
uucaccacuguaugccaaggcuuuucaguucu

SEQ ID NO: 268294 - RNA, 32 nt, Human
uucaccagaagauaugcacaagaggcugggca

SEQ ID NO: 268295 - RNA, 32 nt, Human
uucaccagaccagaagccacugguguacagag

SEQ ID NO: 268296 - RNA, 32 nt, Human
uucaccagcaucucucaacagucucagcucgc

SEQ ID NO: 268297 - RNA, 30 nt, Human
uucaccagccucucuugguuccuuccuugg

SEQ ID NO: 268298 - RNA, 20 nt, Human
uucaccagcuccuccuuagc

SEQ ID NO: 268299 - RNA, 21 nt, Human
uucaccagcucuccagcacuu

SEQ ID NO: 268300 - RNA, 32 nt, Human
uucaccagcugaugacacuuccaaagagauua

SEQ ID NO: 268301 - RNA, 32 nt, Human
uucaccagcugcaugaccuugagcagugcacu

SEQ ID NO: 268302 - RNA, 32 nt, Human
uucaccagcugggcugggccagccuggcccug

SEQ ID NO: 268303 - RNA, 20 nt, Human
uucaccagcuuagcuugagc

SEQ ID NO: 268304 - RNA, 32 nt, Human
uucaccaggacccagacccuuggcaagggaua

SEQ ID NO: 268305 - RNA, 21 nt, Human
uucaccagguuuuuggugcca

SEQ ID NO: 268306 - RNA, 32 nt, Human
uucaccaguaggagguuggacuagaugaacuc

SEQ ID NO: 268307 - RNA, 32 nt, Human
uucaccagugcacuccagccugggugacagag

SEQ ID NO: 268308 - RNA, 32 nt, Human
uucaccaguuaagcacaugaguagagaaagag

SEQ ID NO: 268309 - RNA, 32 nt, Human
uucaccauauccaaggaguauaacuagugcug

SEQ ID NO: 268310 - RNA, 32 nt, Human
uucaccaucauuaacagcaaacaaaugggaag

SEQ ID NO: 268311 - RNA, 32 nt, Human
uucaccaucauuaggaaugugaccauuccuau

SEQ ID NO: 268312 - RNA, 32 nt, Human
uucaccauccaucugccccacgcuccaagccu

SEQ ID NO: 268313 - RNA, 32 nt, Human
uucaccaucccuuggccauccuggcccuccca

SEQ ID NO: 268314 - RNA, 32 nt, Human
uucaccaucuuucugauuccgcacccugccua

SEQ ID NO: 268315 - RNA, 31 nt, Human
uucaccauggccuccaaccacccggccuuca

SEQ ID NO: 268316 - RNA, 32 nt, Human
uucaccaugugggccaggcuggucuugaacuc

SEQ ID NO: 268317 - RNA, 32 nt, Human
uucaccauguuaccaggauggucuccaucucc

SEQ ID NO: 268318 - RNA, 32 nt, Human
uucaccauguuaccaggauggucuugaucucc

SEQ ID NO: 268319 - RNA, 32 nt, Human
uucaccauguuagccaggcugaucuugaacuc

SEQ ID NO: 268320 - RNA, 32 nt, Human
uucaccauguucgccaggcuggucuggaacuc

SEQ ID NO: 268321 - RNA, 32 nt, Human
uucaccauguugaccaggcuggucuugaacuc

SEQ ID NO: 268322 - RNA, 32 nt, Human
uucaccauguugaccaggcuggucuugaacug

SEQ ID NO: 268323 - RNA, 32 nt, Human
uucaccauguuggccaggauguucucgaucuc

SEQ ID NO: 268324 - RNA, 32 nt, Human
uucaccauguuggccaggcugaucuggaacuc

SEQ ID NO: 268325 - RNA, 32 nt, Human
uucaccauguuggccaggcuggucaagaacuc

SEQ ID NO: 268326 - RNA, 32 nt, Human
uucaccauguuggccaggcuggucuggaaccc

SEQ ID NO: 268327 - RNA, 32 nt, Human
uucaccauguuggccaggcuggucuggaacuc

SEQ ID NO: 268328 - RNA, 32 nt, Human
uucaccauguuggucaggauggucucaauccu

SEQ ID NO: 268329 - RNA, 32 nt, Human
uucaccauguuguccaggcuggucacgaacuc

SEQ ID NO: 268330 - RNA, 32 nt, Human
uucacccaaugccucacugaucugccccaaug

SEQ ID NO: 268331 - RNA, 32 nt, Human
uucacccacuccacuuuccuccacagaugccu

SEQ ID NO: 268332 - RNA, 32 nt, Human
uucacccacugccucugccucccuggggcaga

SEQ ID NO: 268333 - RNA, 32 nt, Human
uucacccacuggcuucccccuucccacugaag

SEQ ID NO: 268334 - RNA, 18 nt, Human
uucacccagcaccagcgg

SEQ ID NO: 268335 - RNA, 32 nt, Human
uucacccagccacauuuauccaucuuguaaaa

SEQ ID NO: 268336 - RNA, 32 nt, Human
uucacccagcuacucaggaggcugaggcagga

SEQ ID NO: 268337 - RNA, 23 nt, Human
uucacccagguguccaggcaaug

SEQ ID NO: 268338 - RNA, 32 nt, Human
uucacccauacuuccauuucuuuauucaauaa

SEQ ID NO: 268339 - RNA, 32 nt, Human
uucaccccaaagugcugggauuacaggcguga

SEQ ID NO: 268340 - RNA, 32 nt, Human
uucaccccaagcccaccucccuuguccucagc

SEQ ID NO: 268341 - RNA, 32 nt, Human
uucaccccaccaggcuugggaggaagugccug

SEQ ID NO: 268342 - RNA, 32 nt, Human
uucaccccacuuccucugggcccuggcugugg

SEQ ID NO: 268343 - RNA, 32 nt, Human
uucaccccagccuguaguccuccucacuucaa

SEQ ID NO: 268344 - RNA, 24 nt, Human
uucaccccagcuccuucauucaca

SEQ ID NO: 268345 - RNA, 32 nt, Human
uucaccccaguggccugcagaccucagcuucu

SEQ ID NO: 268346 - RNA, 32 nt, Human
uucaccccaugucccagagccucagaacccac

SEQ ID NO: 268347 - RNA, 32 nt, Human
uucaccccauuuucugugguuugggcuccaca

SEQ ID NO: 268348 - RNA, 19 nt, Human
uucacccccaccucagguc

SEQ ID NO: 268349 - RNA, 32 nt, Human
uucacccccucagaaaccacugucauuaguuu

SEQ ID NO: 268350 - RNA, 32 nt, Human
uucaccccggcaggcccugcaguguucgcuug

SEQ ID NO: 268351 - RNA, 32 nt, Human
uucaccccucaccuccagccuggaggagacag

SEQ ID NO: 268352 - RNA, 32 nt, Human
uucaccccuccccuuucaccaccauccucuuu

SEQ ID NO: 268353 - RNA, 32 nt, Human
uucaccccugaacuaagacacagggaguauuu

SEQ ID NO: 268354 - RNA, 32 nt, Human
uucaccccuuccccucucccuugggcucugau

SEQ ID NO: 268355 - RNA, 32 nt, Human
uucaccccuucccucacccucuucuuucguca

SEQ ID NO: 268356 - RNA, 32 nt, Human
uucaccccuuucucucaccccuggagccccgu

SEQ ID NO: 268357 - RNA, 32 nt, Human
uucacccgaaggcagagagacuccagaccccg

SEQ ID NO: 268358 - RNA, 32 nt, Human
uucacccgauccugggcucucccuuccaagcu

SEQ ID NO: 268359 - RNA, 32 nt, Human
uucacccgcacaccguccgcgcacgccugagg

SEQ ID NO: 268360 - RNA, 32 nt, Human
uucacccgggucucccugucucagcaccuccu

SEQ ID NO: 268361 - RNA, 19 nt, Human
uucacccgugugugcaaug

SEQ ID NO: 268362 - RNA, 32 nt, Human
uucacccuacauuccucuccucuucacuagcc

SEQ ID NO: 268363 - RNA, 32 nt, Human
uucacccuccacccccucccccgcucccgccc

SEQ ID NO: 268364 - RNA, 32 nt, Human
uucacccugcccccugggccugaggcccccug

SEQ ID NO: 268365 - RNA, 32 nt, Human
uucacccugggcaacagagugagaccccaucu

SEQ ID NO: 268366 - RNA, 32 nt, Human
uucacccuguucuagaagcacaugguuguccu

SEQ ID NO: 268367 - RNA, 32 nt, Human
uucacccuugcauuccagccugugaaauaaag

SEQ ID NO: 268368 - RNA, 25 nt, Human
uucacccuugugacucucucagagg

SEQ ID NO: 268369 - RNA, 32 nt, Human
uucaccgaggcacugccaccaccagcucuagc

SEQ ID NO: 268370 - RNA, 32 nt, Human
uucaccgaugucagcauuuuacccagagccau

SEQ ID NO: 268371 - RNA, 32 nt, Human
uucaccgcagcuugucugaaacucuuagccug

SEQ ID NO: 268372 - RNA, 32 nt, Human
uucaccgcaggcacuucugaguaccauuccau

SEQ ID NO: 268373 - RNA, 32 nt, Human
uucaccgcaguugaggcuguugcaguggucuc

SEQ ID NO: 268374 - RNA, 32 nt, Human
uucaccgcauuccaggggcugcagcccccugc

SEQ ID NO: 268375 - RNA, 32 nt, Human
uucaccgccauggagaaggcuggggcucauuu

SEQ ID NO: 268376 - RNA, 32 nt, Human
uucaccgcugcucaccaccacacucaaccguc

SEQ ID NO: 268377 - RNA, 32 nt, Human
uucaccggcggcagcaguuucagcgugcaguu

SEQ ID NO: 268378 - RNA, 32 nt, Human
uucaccggcuuccuuauuuuauacguaaaaau

SEQ ID NO: 268379 - RNA, 32 nt, Human
uucaccgucgcgccgacucuccggagggaaac

SEQ ID NO: 268380 - RNA, 30 nt, Human
uucaccgucggcucccugcuccugucagaa

SEQ ID NO: 268381 - RNA, 32 nt, Human
uucaccguguuagccaggauguucucgaucuc

SEQ ID NO: 268382 - RNA, 32 nt, Human
uucaccguguuggccaggcuggucuggaacuc

SEQ ID NO: 268383 - RNA, 32 nt, Human
uucaccuaaguuucugccacagcuccacauga

SEQ ID NO: 268384 - RNA, 32 nt, Human
uucaccuacuggcauccuccagcuucccuggu

SEQ ID NO: 268385 - RNA, 32 nt, Human
uucaccuagagaagacaguauuggcaaucaug

SEQ ID NO: 268386 - RNA, 32 nt, Human
uucaccuagagucuagaacacaauuuaauuua

SEQ ID NO: 268387 - RNA, 32 nt, Human
uucaccuaggugaggugugugcagcaguuggu

SEQ ID NO: 268388 - RNA, 22 nt, Human
uucaccuauuauauuguaccca

SEQ ID NO: 268389 - RNA, 32 nt, Human
uucaccucaccuuucugcaaagcagaaaaagu

SEQ ID NO: 268390 - RNA, 32 nt, Human
uucaccucacuccagccugggugacagcguaa

SEQ ID NO: 268391 - RNA, 32 nt, Human
uucaccuccaaguuuuaccuccugugucuucc

SEQ ID NO: 268392 - RNA, 32 nt, Human
uucaccuccaggaacugucauggauguccaaa

SEQ ID NO: 268393 - RNA, 32 nt, Human
uucaccucccaccaugauucugaggccucccc

SEQ ID NO: 268394 - RNA, 32 nt, Human
uucaccucccgccaugauucugaggccucccc

SEQ ID NO: 268395 - RNA, 32 nt, Human
uucaccucccuccaacccuacauuucuucaga

SEQ ID NO: 268396 - RNA, 32 nt, Human
uucaccuccugccagcaaccccaaacccaagu

SEQ ID NO: 268397 - RNA, 32 nt, Human
uucaccucuaaggggcucugcaacgugauaga

SEQ ID NO: 268398 - RNA, 32 nt, Human
uucaccucugucuguuggaagcaguacuuuuu

SEQ ID NO: 268399 - RNA, 32 nt, Human
uucaccucuuagccuuguucuccucacuagca

SEQ ID NO: 268400 - RNA, 32 nt, Human
uucaccucuuucuccccacugccuacgugccu

SEQ ID NO: 268401 - RNA, 32 nt, Human
uucaccugacuuaaaauauaaaaugcuaaauu

SEQ ID NO: 268402 - RNA, 32 nt, Human
uucaccugaugccucugcagcuacacaauccc

SEQ ID NO: 268403 - RNA, 32 nt, Human
uucaccugcagucccagcuacuugggaggcca

SEQ ID NO: 268404 - RNA, 32 nt, Human
uucaccugcccacuuguccccugcugccugcc

SEQ ID NO: 268405 - RNA, 32 nt, Human
uucaccugcccugugcaugucuggacucacgg

SEQ ID NO: 268406 - RNA, 32 nt, Human
uucaccugcugaugcugcccuggguccagacu

SEQ ID NO: 268407 - RNA, 32 nt, Human
uucaccuggacuaucuaaccaguccuaugaau

SEQ ID NO: 268408 - RNA, 32 nt, Human
uucaccugguauccagcuccagcaacuuagag

SEQ ID NO: 268409 - RNA, 23 nt, Human
uucaccuguaaucccagcacuuu

SEQ ID NO: 268410 - RNA, 32 nt, Human
uucaccuguagucccagcugcucuggaguuug

SEQ ID NO: 268411 - RNA, 32 nt, Human
uucaccuguggacaaccuggcugggggugggg

SEQ ID NO: 268412 - RNA, 32 nt, Human
uucaccuguguuugccaugcaggaacaugagc

SEQ ID NO: 268413 - RNA, 32 nt, Human
uucaccuguuagccaggauggucucaaucucc

SEQ ID NO: 268414 - RNA, 32 nt, Human
uucaccuguucuggaggcaccagaccuugaaa

SEQ ID NO: 268415 - RNA, 32 nt, Human
uucaccuguuuaaaagaaaacauugcaucuca

SEQ ID NO: 268416 - RNA, 32 nt, Human
uucaccuuaccccauagcaucuugcggcccag

SEQ ID NO: 268417 - RNA, 32 nt, Human
uucaccuuauguauuauuuucuauagcucuuc

SEQ ID NO: 268418 - RNA, 32 nt, Human
uucaccuucaccuuacaccgugagugauucca

SEQ ID NO: 268419 - RNA, 32 nt, Human
uucaccuucauaccuuuggugccugcauugua

SEQ ID NO: 268420 - RNA, 21 nt, Human
uucaccuuccagcuuccucag

SEQ ID NO: 268421 - RNA, 23 nt, Human
uucaccuuccccagucccagggg

SEQ ID NO: 268422 - RNA, 32 nt, Human
uucaccuuccucuucguuuacgguuaggacau

SEQ ID NO: 268423 - RNA, 32 nt, Human
uucaccuuccugagagaggaccagcggccaga

SEQ ID NO: 268424 - RNA, 32 nt, Human
uucaccuugccaagacacccacacuacuuugg

SEQ ID NO: 268425 - RNA, 32 nt, Human
uucaccuugccucuggccuuguauuucacacc

SEQ ID NO: 268426 - RNA, 20 nt, Human
uucaccuuggacuuuccagc

SEQ ID NO: 268427 - RNA, 32 nt, Human
uucaccuuuaaucccagcuacuugggaggcug

SEQ ID NO: 268428 - RNA, 23 nt, Human
uucaccuuuccucuccuggcggg

SEQ ID NO: 268429 - RNA, 24 nt, Human
uucaccuuuccucuccuggcgggg

SEQ ID NO: 268430 - RNA, 32 nt, Human
uucacgaagaauucaggggaugugggaagugg

SEQ ID NO: 268431 - RNA, 23 nt, Human
uucacgaaggcuuuguguugcca

SEQ ID NO: 268432 - RNA, 32 nt, Human
uucacgaauguauacucagugcccagcacaua

SEQ ID NO: 268433 - RNA, 32 nt, Human
uucacgaauguuggcccugccuagauguugug

SEQ ID NO: 268434 - RNA, 32 nt, Human
uucacgacaauguugagaaguucccauuauua

SEQ ID NO: 268435 - RNA, 23 nt, Human
uucacgacaguccggguaacaua

SEQ ID NO: 268436 - RNA, 24 nt, Human
uucacgaccagccuggccaacaug

SEQ ID NO: 268437 - RNA, 32 nt, Human
uucacgaccagccuggccaacauggugaaacc

SEQ ID NO: 268438 - RNA, 32 nt, Human
uucacgaccagccuggccaacauugugaaacc

SEQ ID NO: 268439 - RNA, 32 nt, Human
uucacgacuguacauugcuuucagugaccuua

SEQ ID NO: 268440 - RNA, 21 nt, Human
uucacgagcugcuccuugagc

SEQ ID NO: 268441 - RNA, 32 nt, Human
uucacgaggaagcagcacuaaagcacucugaa

SEQ ID NO: 268442 - RNA, 32 nt, Human
uucacgaggguaauccagaugaagguauauca

SEQ ID NO: 268443 - RNA, 32 nt, Human
uucacgaugguuuugugccagcucuuuuuagg

SEQ ID NO: 268444 - RNA, 32 nt, Human
uucacgcacacaggagauggggcaguuaaugc

SEQ ID NO: 268445 - RNA, 32 nt, Human
uucacgccaucccggcgaguccaggggaggag

SEQ ID NO: 268446 - RNA, 22 nt, Human
uucacgccauucuccugccuca

SEQ ID NO: 268447 - RNA, 32 nt, Human
uucacgcccagccucugccucacaguggaccc

SEQ ID NO: 268448 - RNA, 32 nt, Human
uucacgcccucuuguuuccuuuugggcucaaa

SEQ ID NO: 268449 - RNA, 32 nt, Human
uucacgccuguaauccagcacugugggaggcc

SEQ ID NO: 268450 - RNA, 32 nt, Human
uucacgccuguaaucccaauacuuugggaggc

SEQ ID NO: 268451 - RNA, 32 nt, Human
uucacgccuguaaucccagaacucugggaagc

SEQ ID NO: 268452 - RNA, 32 nt, Human
uucacgccuguaaucccagcacuuugagaggc

SEQ ID NO: 268453 - RNA, 32 nt, Human
uucacgccuguaaucccagcacuuugggaggc

SEQ ID NO: 268454 - RNA, 32 nt, Human
uucacgccuguaaucccagcacuuugggaugc

SEQ ID NO: 268455 - RNA, 32 nt, Human
uucacgccuguaaugccagcacuuugggaggc

SEQ ID NO: 268456 - RNA, 32 nt, Human
uucacgccuguaauucuagcacuuugggaggc

SEQ ID NO: 268457 - RNA, 32 nt, Human
uucacgcguucgguccuccuuggcugacucac

SEQ ID NO: 268458 - RNA, 32 nt, Human
uucacgcuuguaaucccaucacuuugggaggc

SEQ ID NO: 268459 - RNA, 32 nt, Human
uucacggaccgggagagagggggcgcggaagg

SEQ ID NO: 268460 - RNA, 32 nt, Human
uucacggagagcaggagcagaggcuuugagaa

SEQ ID NO: 268461 - RNA, 32 nt, Human
uucacggauccaagacuucccaacaagauuca

SEQ ID NO: 268462 - RNA, 32 nt, Human
uucacggcgauucuccccaugggaucuugagg

SEQ ID NO: 268463 - RNA, 32 nt, Human
uucacggcuaaagcaaucguucagagagacag

SEQ ID NO: 268464 - RNA, 32 nt, Human
uucacggcucaagugaagccacguuucacugu

SEQ ID NO: 268465 - RNA, 32 nt, Human
uucacgggacuuccagcuccagcuaccuuugu

SEQ ID NO: 268466 - RNA, 32 nt, Human
uucacggugcgcuggggaagcuucaaaauaua

SEQ ID NO: 268467 - RNA, 32 nt, Human
uucacguagacacaccuggcugccuucuucac

SEQ ID NO: 268468 - RNA, 32 nt, Human
uucacguccaaaaauccacauucuccaucgcu

SEQ ID NO: 268469 - RNA, 32 nt, Human
uucacgugcccaggccuguggguaguggggag

SEQ ID NO: 268470 - RNA, 32 nt, Human
uucacguggagaggaaggauauuuugcgaagc

SEQ ID NO: 268471 - RNA, 32 nt, Human
uucacgugggccggagucggagacugaguuua

SEQ ID NO: 268472 - RNA, 32 nt, Human
uucacguuccaucgugucaucugggucuguua

SEQ ID NO: 268473 - RNA, 32 nt, Human
uucacuacagaugcaaccauuguuaagccuga

SEQ ID NO: 268474 - RNA, 32 nt, Human
uucacuaccucagaucuaaucaauuaguccau

SEQ ID NO: 268475 - RNA, 32 nt, Human
uucacuaggagaggagaaacacaauggccacc

SEQ ID NO: 268476 - RNA, 32 nt, Human
uucacuaggaggucaucaaccgaugguccuca

SEQ ID NO: 268477 - RNA, 32 nt, Human
uucacuauggaaaaacaaauauacaaauauga

SEQ ID NO: 268478 - RNA, 32 nt, Human
uucacuauguuggccaggcuggucuggaacgc

SEQ ID NO: 268479 - RNA, 32 nt, Human
uucacucaaggcccaaggacccuucagucagc

SEQ ID NO: 268480 - RNA, 32 nt, Human
uucacucaauaugcagcuuccuguuucaguag

SEQ ID NO: 268481 - RNA, 32 nt, Human
uucacucaaugccaggcagugcagcauuuagg

SEQ ID NO: 268482 - RNA, 32 nt, Human
uucacucacgucagaagagguuggggcaaaac

SEQ ID NO: 268483 - RNA, 32 nt, Human
uucacucagaccaucugugcucugcccugagu

SEQ ID NO: 268484 - RNA, 32 nt, Human
uucacucagagguuuguccugaggcuuaaaug

SEQ ID NO: 268485 - RNA, 32 nt, Human
uucacucagcaaccaugcccuuagucugaaga

SEQ ID NO: 268486 - RNA, 32 nt, Human
uucacucagucgcccaggcuggagugcagugg

SEQ ID NO: 268487 - RNA, 32 nt, Human
uucacucauagaacauuuguugagcaauuacu

SEQ ID NO: 268488 - RNA, 32 nt, Human
uucacucaugaagaguggggauggcucaguuc

SEQ ID NO: 268489 - RNA, 32 nt, Human
uucacucauggacccuggagccagccacugac

SEQ ID NO: 268490 - RNA, 32 nt, Human
uucacuccaaaauugugugagccaauucccau

SEQ ID NO: 268491 - RNA, 32 nt, Human
uucacuccacacccucuggccuucugccuuga

SEQ ID NO: 268492 - RNA, 21 nt, Human
uucacuccagccugggcaaca

SEQ ID NO: 268493 - RNA, 32 nt, Human
uucacuccagccugggcaacagagugagacuc

SEQ ID NO: 268494 - RNA, 21 nt, Human
uucacuccagccugggcgaca

SEQ ID NO: 268495 - RNA, 32 nt, Human
uucacuccagccugggcgacaagagugaaacu

SEQ ID NO: 268496 - RNA, 32 nt, Human
uucacuccagccugggugacaaagugagacuc

SEQ ID NO: 268497 - RNA, 32 nt, Human
uucacuccagccugggugacggagugagacuc

SEQ ID NO: 268498 - RNA, 32 nt, Human
uucacuccauuccccugucugucugcauuugu

SEQ ID NO: 268499 - RNA, 32 nt, Human
uucacucccaacucugagguugccuaacucuu

SEQ ID NO: 268500 - RNA, 32 nt, Human
uucacucccacugccugggauugcacuggauc

SEQ ID NO: 268501 - RNA, 32 nt, Human
uucacucccaggaccuaccuucugcuaguaaa

SEQ ID NO: 268502 - RNA, 32 nt, Human
uucacuccccuaucccauucucccucucaagg

SEQ ID NO: 268503 - RNA, 32 nt, Human
uucacuccccuccagagagcccugagacccgc

SEQ ID NO: 268504 - RNA, 32 nt, Human
uucacucccgagggugccgcgagcccaggcgg

SEQ ID NO: 268505 - RNA, 32 nt, Human
uucacucccuggaagagagagaggggucuugg

SEQ ID NO: 268506 - RNA, 32 nt, Human
uucacucccuuguuuucccuguugcuaugugu

SEQ ID NO: 268507 - RNA, 32 nt, Human
uucacuccucaggaaguaccauggacagacgc

SEQ ID NO: 268508 - RNA, 32 nt, Human
uucacuccuccccuucuuccaugucuccucag

SEQ ID NO: 268509 - RNA, 32 nt, Human
uucacuccucguucuugugcuugguucuuacu

SEQ ID NO: 268510 - RNA, 32 nt, Human
uucacuccucucccuuucaucucccucugcau

SEQ ID NO: 268511 - RNA, 32 nt, Human
uucacuccuuguuggguaacucagccauggag

SEQ ID NO: 268512 - RNA, 22 nt, Human
uucacuccuuucuccccuucca

SEQ ID NO: 268513 - RNA, 32 nt, Human
uucacucggaucacgcccuccugggcacaggu

SEQ ID NO: 268514 - RNA, 32 nt, Human
uucacucucaggagaacccacagucuaauauu

SEQ ID NO: 268515 - RNA, 32 nt, Human
uucacucucccacuucuguggucaacucccug

SEQ ID NO: 268516 - RNA, 32 nt, Human
uucacucucccuugaucccggccaccugcaga

SEQ ID NO: 268517 - RNA, 32 nt, Human
uucacucuccucccuucuccagccucagggga

SEQ ID NO: 268518 - RNA, 21 nt, Human
uucacucuccucuccccuccc

SEQ ID NO: 268519 - RNA, 32 nt, Human
uucacucugacucugugcaaauuguauuacag

SEQ ID NO: 268520 - RNA, 32 nt, Human
uucacucugccccucacuuccuuuagggcaaa

SEQ ID NO: 268521 - RNA, 32 nt, Human
uucacucugggagagcgaugcuaaguuucucc

SEQ ID NO: 268522 - RNA, 32 nt, Human
uucacucugucacccaggcuggagugcaaugg

SEQ ID NO: 268523 - RNA, 32 nt, Human
uucacucugucacccaggcuggagugcagugg

SEQ ID NO: 268524 - RNA, 32 nt, Human
uucacucugucacccaggcugggaauugcagu

SEQ ID NO: 268525 - RNA, 32 nt, Human
uucacucuguccuuacucugguguuucacugu

SEQ ID NO: 268526 - RNA, 32 nt, Human
uucacucugucgcccaggcuggagugcagugg

SEQ ID NO: 268527 - RNA, 32 nt, Human
uucacucugucucccaggcuggagugcaaugg

SEQ ID NO: 268528 - RNA, 32 nt, Human
uucacucugucucccaggcuggagugcagugg

SEQ ID NO: 268529 - RNA, 32 nt, Human
uucacucuguuccucuucugcagccaccagug

SEQ ID NO: 268530 - RNA, 32 nt, Human
uucacucuguugcccaggcuagagugcacuaa

SEQ ID NO: 268531 - RNA, 32 nt, Human
uucacucuguugcccaggcuggagugcagugg

SEQ ID NO: 268532 - RNA, 32 nt, Human
uucacucuuaccaagaaucuuugaugcagcuu

SEQ ID NO: 268533 - RNA, 32 nt, Human
uucacucuuccuacccucucccuccuaacccu

SEQ ID NO: 268534 - RNA, 32 nt, Human
uucacucuucgaauuugugcuuagcucuuuuc

SEQ ID NO: 268535 - RNA, 32 nt, Human
uucacucuuggagccugcagagcugcgggcug

SEQ ID NO: 268536 - RNA, 32 nt, Human
uucacucuuguccucacagacuuucagccucc

SEQ ID NO: 268537 - RNA, 32 nt, Human
uucacucuugugcccaggcuggagugcaauag

SEQ ID NO: 268538 - RNA, 23 nt, Human
uucacucuuguugcccaagcugg

SEQ ID NO: 268539 - RNA, 23 nt, Human
uucacucuuguugcccacgcugg

SEQ ID NO: 268540 - RNA, 23 nt, Human
uucacucuuguugcccaggcugg

SEQ ID NO: 268541 - RNA, 23 nt, Human
uucacucuuguugccuaggcugg

SEQ ID NO: 268542 - RNA, 23 nt, Human
uucacucuuguugccugggcugg

SEQ ID NO: 268543 - RNA, 32 nt, Human
uucacucuuucauaauauauaggauaaauugu

SEQ ID NO: 268544 - RNA, 32 nt, Human
uucacucuuucgcccaggcuggagugcauugg

SEQ ID NO: 268545 - RNA, 19 nt, Human
uucacugaccccaucucca

SEQ ID NO: 268546 - RNA, 32 nt, Human
uucacugacccuaugauuucacugugaguagg

SEQ ID NO: 268547 - RNA, 32 nt, Human
uucacugcaaccucugccuccugggcucaagc

SEQ ID NO: 268548 - RNA, 32 nt, Human
uucacugcaaccucugccuccuggguucaagc

SEQ ID NO: 268549 - RNA, 32 nt, Human
uucacugcaaccucugccuccuggguucaagu

SEQ ID NO: 268550 - RNA, 32 nt, Human
uucacugcaaucucugccuccuggguuuaagc

SEQ ID NO: 268551 - RNA, 32 nt, Human
uucacugcacuccagucugggugacagagcaa

SEQ ID NO: 268552 - RNA, 32 nt, Human
uucacugcagggacccagacaaguggaucugc

SEQ ID NO: 268553 - RNA, 22 nt, Human
uucacugcauccuggagugcaa

SEQ ID NO: 268554 - RNA, 26 nt, Human
uucacugcaugaaguuguucauuugg

SEQ ID NO: 268555 - RNA, 19 nt, Human
uucacugccucugcuucca

SEQ ID NO: 268556 - RNA, 32 nt, Human
uucacugccugccucuugcggaacuggguuac

SEQ ID NO: 268557 - RNA, 32 nt, Human
uucacuggcucuauaacagucuaccucuacac

SEQ ID NO: 268558 - RNA, 32 nt, Human
uucacuggcugcugccccaggaagacuccucu

SEQ ID NO: 268559 - RNA, 32 nt, Human
uucacugggcucaccugcuucugaaaacggcu

SEQ ID NO: 268560 - RNA, 32 nt, Human
uucacugguggacagugguggggcuugagugc

SEQ ID NO: 268561 - RNA, 32 nt, Human
uucacugguggagcuggaggagccggaggugg

SEQ ID NO: 268562 - RNA, 32 nt, Human
uucacugguggaggcagccguggucugccagg

SEQ ID NO: 268563 - RNA, 32 nt, Human
uucacugguuccagggauuaaggaaugaaccu

SEQ ID NO: 268564 - RNA, 32 nt, Human
uucacuguaguauuuaaauaucuguuacaggu

SEQ ID NO: 268565 - RNA, 32 nt, Human
uucacuguauucucaaccuccuaggcucaaau

SEQ ID NO: 268566 - RNA, 32 nt, Human
uucacugucaccaaggcuuagugcagugacac

SEQ ID NO: 268567 - RNA, 32 nt, Human
uucacuguccccaaaccuauggaaguuguugc

SEQ ID NO: 268568 - RNA, 23 nt, Human
uucacugucuaccuccagaaccu

SEQ ID NO: 268569 - RNA, 32 nt, Human
uucacugucuccauuccauaaaucucuuccug

SEQ ID NO: 268570 - RNA, 32 nt, Human
uucacugugauauuucaggggcagaguguugg

SEQ ID NO: 268571 - RNA, 32 nt, Human
uucacugugucagggaugagccuggcuugggg

SEQ ID NO: 268572 - RNA, 32 nt, Human
uucacuguguccuggcugucucugcugcccau

SEQ ID NO: 268573 - RNA, 32 nt, Human
uucacuguguugcccaggcuagagugcagugg

SEQ ID NO: 268574 - RNA, 24 nt, Human
uucacuguugauguguuuguuugg

SEQ ID NO: 268575 - RNA, 32 nt, Human
uucacuguuuauguucacgugaucucaacagg

SEQ ID NO: 268576 - RNA, 32 nt, Human
uucacuuaccuugccuaguguaucuuaucccu

SEQ ID NO: 268577 - RNA, 23 nt, Human
uucacuuagcaacaaaguaccuu

SEQ ID NO: 268578 - RNA, 32 nt, Human
uucacuuagugguuguguugggaccaaaaccu

SEQ ID NO: 268579 - RNA, 32 nt, Human
uucacuucaaccucaaccucccaggcucaagu

SEQ ID NO: 268580 - RNA, 32 nt, Human
uucacuucaauuuugaccucugucccauagug

SEQ ID NO: 268581 - RNA, 32 nt, Human
uucacuucacuggcucccucaggcugcagccc

SEQ ID NO: 268582 - RNA, 32 nt, Human
uucacuucauuccuugagcugugugaccuugg

SEQ ID NO: 268583 - RNA, 32 nt, Human
uucacuuccccucuaggaggugaugauagggu

SEQ ID NO: 268584 - RNA, 32 nt, Human
uucacuucucacucuuauggucucaaagcuuc

SEQ ID NO: 268585 - RNA, 32 nt, Human
uucacuugaagccaaaugaaagagaugaauaa

SEQ ID NO: 268586 - RNA, 32 nt, Human
uucacuugauacuauaugauaugaaccuuuuu

SEQ ID NO: 268587 - RNA, 21 nt, Human
uucacuugcaugacguuacug

SEQ ID NO: 268588 - RNA, 32 nt, Human
uucacuugcucauccuugcucuaccucaacgu

SEQ ID NO: 268589 - RNA, 21 nt, Human
uucacuuggcacccauuaucu

SEQ ID NO: 268590 - RNA, 32 nt, Human
uucacuuggucugucugucucugucuugguag

SEQ ID NO: 268591 - RNA, 18 nt, Human
uucacuugucuauacuaa

SEQ ID NO: 268592 - RNA, 32 nt, Human
uucacuuguuacuguuacugggagagggagac

SEQ ID NO: 268593 - RNA, 32 nt, Human
uucacuuuacuacauccugccccacauucuga

SEQ ID NO: 268594 - RNA, 32 nt, Human
uucacuuucacucccaugaggaggcuuccagg

SEQ ID NO: 268595 - RNA, 32 nt, Human
uucacuuugcagccuccucuucugucaccaac

SEQ ID NO: 268596 - RNA, 32 nt, Human
uucacuuugcuccucuugcccucugucuucug

SEQ ID NO: 268597 - RNA, 20 nt, Human
uucacuuugguuccagcauc

SEQ ID NO: 268598 - RNA, 32 nt, Human
uucacuuugucaagcaccucaguuacacauuc

SEQ ID NO: 268599 - RNA, 32 nt, Human
uucacuuuguucauuucucuucuguuuucugu

SEQ ID NO: 268600 - RNA, 29 nt, Human
uucacuuuguugcuaucauccuccuuucu

SEQ ID NO: 268601 - RNA, 32 nt, Human
uucacuuuuaaucuuuccuuugaaauuauuaa

SEQ ID NO: 268602 - RNA, 32 nt, Human
uucacuuuuacacuggcauuccugccuacuug

SEQ ID NO: 268603 - RNA, 32 nt, Human
uucacuuuuuauccucccuggagcuacagcug

SEQ ID NO: 268604 - RNA, 32 nt, Human
uucagaaaaagaaucugcauccuggaaaccag

SEQ ID NO: 268605 - RNA, 32 nt, Human
uucagaaaacaguuuccagugccucuggccuu

SEQ ID NO: 268606 - RNA, 32 nt, Human
uucagaaacagcuugagagcuggaauggacag

SEQ ID NO: 268607 - RNA, 32 nt, Human
uucagaaacauguaaaaugaaucaugauuaua

SEQ ID NO: 268608 - RNA, 23 nt, Human
uucagaaacauuguauuguacca

SEQ ID NO: 268609 - RNA, 32 nt, Human
uucagaaacccacuuuguucucagccacgcaa

SEQ ID NO: 268610 - RNA, 32 nt, Human
uucagaaacuggaguaguucuuugccagugca

SEQ ID NO: 268611 - RNA, 32 nt, Human
uucagaaagaaguggggacagagcagaacuuu

SEQ ID NO: 268612 - RNA, 31 nt, Human
uucagaaagagaccuacucugggucauuuaa

SEQ ID NO: 268613 - RNA, 32 nt, Human
uucagaaagggcagaagugggggaagaauaau

SEQ ID NO: 268614 - RNA, 31 nt, Human
uucagaaaggggagagaaagaaguccugugg

SEQ ID NO: 268615 - RNA, 32 nt, Human
uucagaaaucugauuauaacaauagcuccauc

SEQ ID NO: 268616 - RNA, 32 nt, Human
uucagaacacacaaaccaugcucuacuccacc

SEQ ID NO: 268617 - RNA, 32 nt, Human
uucagaacacacaaccuucuaacgugaaccuc

SEQ ID NO: 268618 - RNA, 32 nt, Human
uucagaacauccugggcaccagucaugagucu

SEQ ID NO: 268619 - RNA, 24 nt, Human
uucagaaccacucugggcaacaua

SEQ ID NO: 268620 - RNA, 32 nt, Human
uucagaaccagccuggacaacauagugagacc

SEQ ID NO: 268621 - RNA, 32 nt, Human
uucagaaccaucaaugaauucagauaugggaa

SEQ ID NO: 268622 - RNA, 32 nt, Human
uucagaacccacgcuuucccacccuccuacuu

SEQ ID NO: 268623 - RNA, 23 nt, Human
uucagaacgcaucuguaguguca

SEQ ID NO: 268624 - RNA, 32 nt, Human
uucagaacugaaaacuccaccuuccguugggc

SEQ ID NO: 268625 - RNA, 31 nt, Human
uucagaacugagagagaagaaagaucugugg

SEQ ID NO: 268626 - RNA, 32 nt, Human
uucagaacuugggagcccccagggaggggcua

SEQ ID NO: 268627 - RNA, 32 nt, Human
uucagaacuuguccugauggugucuuauugug

SEQ ID NO: 268628 - RNA, 32 nt, Human
uucagaagagaaggaagaggugcuggaaggau

SEQ ID NO: 268629 - RNA, 32 nt, Human
uucagaagagcagaaagcaucugcugugugag

SEQ ID NO: 268630 - RNA, 32 nt, Human
uucagaagagcagaaaguaucugcugugugag

SEQ ID NO: 268631 - RNA, 32 nt, Human
uucagaagcaucaccaauuauauuucuuucuu

SEQ ID NO: 268632 - RNA, 32 nt, Human
uucagaagcaucccggauaauagauggguaaa

SEQ ID NO: 268633 - RNA, 32 nt, Human
uucagaagcccuaaaacauaccaccuuggcua

SEQ ID NO: 268634 - RNA, 32 nt, Human
uucagaagcugcagcuggucuguuuccagguc

SEQ ID NO: 268635 - RNA, 32 nt, Human
uucagaagcuuggaaaucgacacacaaaacag

SEQ ID NO: 268636 - RNA, 32 nt, Human
uucagaaggccuuuccugugugagacccacau

SEQ ID NO: 268637 - RNA, 31 nt, Human
uucagaaggggaccuguuuucuucaagggaa

SEQ ID NO: 268638 - RNA, 32 nt, Human
uucagaagguguugggauuaucacagguuaag

SEQ ID NO: 268639 - RNA, 32 nt, Human
uucagaaguacaacaucagcucagcaggaacg

SEQ ID NO: 268640 - RNA, 32 nt, Human
uucagaaguaugaaccagcuuucuuuuuauua

SEQ ID NO: 268641 - RNA, 32 nt, Human
uucagaaguccauguuguagcaguuagaauuu

SEQ ID NO: 268642 - RNA, 32 nt, Human
uucagaagucugaccuuagaacaugagagagu

SEQ ID NO: 268643 - RNA, 22 nt, Human
uucagaauaacaaaaauauacc

SEQ ID NO: 268644 - RNA, 32 nt, Human
uucagaauacagguucuuuucuggugucacuu

SEQ ID NO: 268645 - RNA, 32 nt, Human
uucagaauagagugccuuagcuaggccagagg

SEQ ID NO: 268646 - RNA, 32 nt, Human
uucagaauauaacuucaggacaauucaaacua

SEQ ID NO: 268647 - RNA, 24 nt, Human
uucagaaucagccugggcaacaua

SEQ ID NO: 268648 - RNA, 32 nt, Human
uucagaaucagccugggcaacauagcaauacu

SEQ ID NO: 268649 - RNA, 23 nt, Human
uucagaaucaggacacucaagcu

SEQ ID NO: 268650 - RNA, 23 nt, Human
uucagaauccuaguuuaugcaca

SEQ ID NO: 268651 - RNA, 32 nt, Human
uucagaaucugucaaacuuuuguguaucccac

SEQ ID NO: 268652 - RNA, 32 nt, Human
uucagaaugaggaaaagcuguggggaccaaag

SEQ ID NO: 268653 - RNA, 32 nt, Human
uucagaaugauauacacacauauguguauaug

SEQ ID NO: 268654 - RNA, 31 nt, Human
uucagaaugccaccucacguucccccaagaa

SEQ ID NO: 268655 - RNA, 32 nt, Human
uucagaauggagaaacagacagcaaccaagcc

SEQ ID NO: 268656 - RNA, 32 nt, Human
uucagaauggcaggaguugagugugcagggac

SEQ ID NO: 268657 - RNA, 22 nt, Human
uucagaauguaaaaauugggua

SEQ ID NO: 268658 - RNA, 32 nt, Human
uucagaaugucuccuggcauccuaaccaugua

SEQ ID NO: 268659 - RNA, 21 nt, Human
uucagaauuagagaacaugcu

SEQ ID NO: 268660 - RNA, 23 nt, Human
uucagaauuccugguguuucauc

SEQ ID NO: 268661 - RNA, 32 nt, Human
uucagaauuuccaagaguucugucuguucugu

SEQ ID NO: 268662 - RNA, 32 nt, Human
uucagacaacuccaauaccaagaaacugauga

SEQ ID NO: 268663 - RNA, 32 nt, Human
uucagacaacuugcauucuguggaugccagcu

SEQ ID NO: 268664 - RNA, 32 nt, Human
uucagacacauggugagguccauggcucuugu

SEQ ID NO: 268665 - RNA, 32 nt, Human
uucagacacucauccuucauccuuccugcugc

SEQ ID NO: 268666 - RNA, 32 nt, Human
uucagacagagggagguggacggcagggauca

SEQ ID NO: 268667 - RNA, 32 nt, Human
uucagacagauguuuguuucugcucuagucac

SEQ ID NO: 268668 - RNA, 32 nt, Human
uucagacaugauccaguccagccugggcuugg

SEQ ID NO: 268669 - RNA, 21 nt, Human
uucagaccagcagagugaaga

SEQ ID NO: 268670 - RNA, 32 nt, Human
uucagaccaguaaaccagaugcuguagagcag

SEQ ID NO: 268671 - RNA, 21 nt, Human
uucagacccagacgaugccag

SEQ ID NO: 268672 - RNA, 18 nt, Human
uucagaccccaggcugca

SEQ ID NO: 268673 - RNA, 32 nt, Human
uucagaccucgguugcagcccggugccgugag

SEQ ID NO: 268674 - RNA, 32 nt, Human
uucagaccuugggcagaaggaggccuccuugg

SEQ ID NO: 268675 - RNA, 20 nt, Human
uucagacgacacagagcaag

SEQ ID NO: 268676 - RNA, 32 nt, Human
uucagacggaguuucgcucuuguugcccaggc

SEQ ID NO: 268677 - RNA, 32 nt, Human
uucagacuagccuugccaacauggugaaaccc

SEQ ID NO: 268678 - RNA, 32 nt, Human
uucagacuccagcccgcuccagcccggcccga

SEQ ID NO: 268679 - RNA, 32 nt, Human
uucagacugaagauaggccaaggucgucacug

SEQ ID NO: 268680 - RNA, 32 nt, Human
uucagacugauccuuucucugccuguauuucu

SEQ ID NO: 268681 - RNA, 32 nt, Human
uucagacugcaaaggcauccuacugaaggggc

SEQ ID NO: 268682 - RNA, 32 nt, Human
uucagacugcaugggccggccuaggagucuuu

SEQ ID NO: 268683 - RNA, 32 nt, Human
uucagacugcgccauggggcucagcgacgggg

SEQ ID NO: 268684 - RNA, 20 nt, Human
uucagacuggagugcagugg

SEQ ID NO: 268685 - RNA, 32 nt, Human
uucagacuucauccugcaucucccaucaccuc

SEQ ID NO: 268686 - RNA, 32 nt, Human
uucagacuuccuccucagccaccuggccacug

SEQ ID NO: 268687 - RNA, 32 nt, Human
uucagacuugaacaagaaacugggucucacua

SEQ ID NO: 268688 - RNA, 32 nt, Human
uucagacuuggaaaggucacagaaggaaaaua

SEQ ID NO: 268689 - RNA, 32 nt, Human
uucagacuuuggugaugggcaagguuucucga

SEQ ID NO: 268690 - RNA, 32 nt, Human
uucagagaaaccagauauuuuauagaggaaau

SEQ ID NO: 268691 - RNA, 32 nt, Human
uucagagaacuugcuuaaucuuccauauauuc

SEQ ID NO: 268692 - RNA, 32 nt, Human
uucagagaaggcugcagaggccuggguuacac

SEQ ID NO: 268693 - RNA, 16 nt, Human
uucagagacuguucca

SEQ ID NO: 268694 - RNA, 32 nt, Human
uucagagagauagggucucucuauguugcccu

SEQ ID NO: 268695 - RNA, 32 nt, Human
uucagagagaugaugggaggggccagugagga

SEQ ID NO: 268696 - RNA, 32 nt, Human
uucagagagauuuaguuuuacuuuaauggagu

SEQ ID NO: 268697 - RNA, 32 nt, Human
uucagagaggccuuuuggaauguggccccuga

SEQ ID NO: 268698 - RNA, 32 nt, Human
uucagagaucaaggugcucccuauacucccuu

SEQ ID NO: 268699 - RNA, 32 nt, Human
uucagagauccaggccucccaccucagacuca

SEQ ID NO: 268700 - RNA, 32 nt, Human
uucagagaucgcagcugcugugagaauacggu

SEQ ID NO: 268701 - RNA, 32 nt, Human
uucagagcaauauucuucugcauuauaguaag

SEQ ID NO: 268702 - RNA, 32 nt, Human
uucagagcacuuuaaagucugauauuucucga

SEQ ID NO: 268703 - RNA, 32 nt, Human
uucagagcagacagaagcagggugguggcacc

SEQ ID NO: 268704 - RNA, 32 nt, Human
uucagagcagaggcaaacccaccacagggcag

SEQ ID NO: 268705 - RNA, 32 nt, Human
uucagagcagaggcuguuccugcuuugccccu

SEQ ID NO: 268706 - RNA, 32 nt, Human
uucagagcagaggggacugucucagccaugca

SEQ ID NO: 268707 - RNA, 32 nt, Human
uucagagcagccuggccaccauagugagaucc

SEQ ID NO: 268708 - RNA, 32 nt, Human
uucagagcaggcuggagggauuugccacacag

SEQ ID NO: 268709 - RNA, 32 nt, Human
uucagagcaggcuggagggauuugccacagcc

SEQ ID NO: 268710 - RNA, 32 nt, Human
uucagagcaggggagagcuggaaggggcuaga

SEQ ID NO: 268711 - RNA, 32 nt, Human
uucagagcagguaacgccuuuugguuguuuug

SEQ ID NO: 268712 - RNA, 32 nt, Human
uucagagcauuuuuaccucucucuuaaauguu

SEQ ID NO: 268713 - RNA, 32 nt, Human
uucagagcccaggagucagugcuggugguugg

SEQ ID NO: 268714 - RNA, 32 nt, Human
uucagagcccccgccuuugccugcacuccucu

SEQ ID NO: 268715 - RNA, 32 nt, Human
uucagagccuagccaccucccaccccacuuca

SEQ ID NO: 268716 - RNA, 32 nt, Human
uucagagccuccacaccaugaccuccaagaag

SEQ ID NO: 268717 - RNA, 32 nt, Human
uucagagcugcucuccccaguugcacccccug

SEQ ID NO: 268718 - RNA, 32 nt, Human
uucagagcugggucugccccaucaaagagcaa

SEQ ID NO: 268719 - RNA, 32 nt, Human
uucagagcuguguguucaccugggcagauccc

SEQ ID NO: 268720 - RNA, 32 nt, Human
uucagagcuuucccaagagagcugucaguuuu

SEQ ID NO: 268721 - RNA, 20 nt, Human
uucagagcuuucccauuuaa

SEQ ID NO: 268722 - RNA, 32 nt, Human
uucagaggaaguggaguauaguauuuaacauu

SEQ ID NO: 268723 - RNA, 32 nt, Human
uucagaggagaggggcaccagccgggggcccu

SEQ ID NO: 268724 - RNA, 32 nt, Human
uucagaggccauaugucucagcaaguacuggu

SEQ ID NO: 268725 - RNA, 32 nt, Human
uucagaggcugagacaggugggccacaugagc

SEQ ID NO: 268726 - RNA, 32 nt, Human
uucagagggaaaggaggaagcugcguggcauu

SEQ ID NO: 268727 - RNA, 32 nt, Human
uucagagggcagcuccagugagugccaagucc

SEQ ID NO: 268728 - RNA, 32 nt, Human
uucagaggggacccuccagaagcccagccggc

SEQ ID NO: 268729 - RNA, 32 nt, Human
uucagagggggaaacuuucuucuuuuaggagg

SEQ ID NO: 268730 - RNA, 32 nt, Human
uucagagggucuggagugaaccucaggaauuu

SEQ ID NO: 268731 - RNA, 32 nt, Human
uucagaguacugcucaucuuaauuaauuuuug

SEQ ID NO: 268732 - RNA, 26 nt, Human
uucagaguaugggcaaaugcuucugg

SEQ ID NO: 268733 - RNA, 32 nt, Human
uucagagucaaaggccagagagcauggagcug

SEQ ID NO: 268734 - RNA, 32 nt, Human
uucagagucagcuauguguacaggaggcauua

SEQ ID NO: 268735 - RNA, 21 nt, Human
uucagaguccugggcagcgug

SEQ ID NO: 268736 - RNA, 32 nt, Human
uucagagucuauuucucaugugcacugcugaa

SEQ ID NO: 268737 - RNA, 32 nt, Human
uucagagucucacccugucacccaggcuggaa

SEQ ID NO: 268738 - RNA, 32 nt, Human
uucagagucuccgaggaugacgagaacgccgu

SEQ ID NO: 268739 - RNA, 32 nt, Human
uucagagugacggaugaccgggccaagcaauc

SEQ ID NO: 268740 - RNA, 32 nt, Human
uucagaguuagaagcaugaacuuuagaaccag

SEQ ID NO: 268741 - RNA, 32 nt, Human
uucagaguucaaggaagaagcaaaauaucaca

SEQ ID NO: 268742 - RNA, 32 nt, Human
uucagaguuguacacuguguacauuuggcauu

SEQ ID NO: 268743 - RNA, 32 nt, Human
uucagaguuugagauaccuuguuuucauuuuu

SEQ ID NO: 268744 - RNA, 32 nt, Human
uucagauacuuggucauuuacuuaccaaauua

SEQ ID NO: 268745 - RNA, 21 nt, Human
uucagauacuuuauuuucuca

SEQ ID NO: 268746 - RNA, 32 nt, Human
uucagauauaaauacugacaauguauuuugga

SEQ ID NO: 268747 - RNA, 32 nt, Human
uucagauaucuugccagauuguuaacuuccua

SEQ ID NO: 268748 - RNA, 32 nt, Human
uucagaucagggaaaucuccacuucgggaccu

SEQ ID NO: 268749 - RNA, 32 nt, Human
uucagauccaaaagcacaaaauguuguauaua

SEQ ID NO: 268750 - RNA, 32 nt, Human
uucagauccaacaagauauuggauagcaggca

SEQ ID NO: 268751 - RNA, 32 nt, Human
uucagauccaguagcuuuuagggaaggaacua

SEQ ID NO: 268752 - RNA, 32 nt, Human
uucagauccugcaugcugauaaaacuacugac

SEQ ID NO: 268753 - RNA, 32 nt, Human
uucagaucuccaaucccugccaccaccccaac

SEQ ID NO: 268754 - RNA, 22 nt, Human
uucagaucugcagcagagcaag

SEQ ID NO: 268755 - RNA, 32 nt, Human
uucagaugacacugcugcauccuggucacauu

SEQ ID NO: 268756 - RNA, 32 nt, Human
uucagaugaguccuaugggagcuggggaucug

SEQ ID NO: 268757 - RNA, 32 nt, Human
uucagaugcugggauuggcaaugauuuaagca

SEQ ID NO: 268758 - RNA, 32 nt, Human
uucagauggaguuuuguucuuguugcccaggc

SEQ ID NO: 268759 - RNA, 32 nt, Human
uucagauggguuaagauugaaggguggacugg

SEQ ID NO: 268760 - RNA, 32 nt, Human
uucagauggugauucugaagcuuacaucuccc

SEQ ID NO: 268761 - RNA, 32 nt, Human
uucagauggugcgaacagcagagcaggcaagg

SEQ ID NO: 268762 - RNA, 32 nt, Human
uucagauuagacuuuauuuaugugggucuaua

SEQ ID NO: 268763 - RNA, 32 nt, Human
uucagauucccugagguauggcuuggucacuc

SEQ ID NO: 268764 - RNA, 32 nt, Human
uucagauucccuucuguagauuuccuuaaaac

SEQ ID NO: 268765 - RNA, 32 nt, Human
uucagauugaaacaaacaaaaagcuuuugaug

SEQ ID NO: 268766 - RNA, 32 nt, Human
uucagauugguggugucugugccugaaccccc

SEQ ID NO: 268767 - RNA, 32 nt, Human
uucagauuguuuugauuuaggccagguauauu

SEQ ID NO: 268768 - RNA, 32 nt, Human
uucagauuuggagggcauggaucuucugacag

SEQ ID NO: 268769 - RNA, 32 nt, Human
uucagauuuucagcugacauuagcuauaguau

SEQ ID NO: 268770 - RNA, 22 nt, Human
uucagcaaagccugggcaauug

SEQ ID NO: 268771 - RNA, 32 nt, Human
uucagcaagccuuccuucuagagcuccuagaa

SEQ ID NO: 268772 - RNA, 32 nt, Human
uucagcaaucauaagugcugugcauaacuauu

SEQ ID NO: 268773 - RNA, 23 nt, Human
uucagcaauucuaauccacuuug

SEQ ID NO: 268774 - RNA, 32 nt, Human
uucagcaauugcuguucugugugugccugccc

SEQ ID NO: 268775 - RNA, 23 nt, Human
uucagcacaaaaggccucuguaa

SEQ ID NO: 268776 - RNA, 32 nt, Human
uucagcaccauggcugcucauacccugccucg

SEQ ID NO: 268777 - RNA, 20 nt, Human
uucagcaccuuuagcugcau

SEQ ID NO: 268778 - RNA, 32 nt, Human
uucagcacugaucaacaauccugggcaugggc

SEQ ID NO: 268779 - RNA, 32 nt, Human
uucagcacuguguuccuguugucgugguucaa

SEQ ID NO: 268780 - RNA, 32 nt, Human
uucagcacuuaccgauccagagccucccggcc

SEQ ID NO: 268781 - RNA, 32 nt, Human
uucagcacuuccuguuccuauaaacccaaaga

SEQ ID NO: 268782 - RNA, 32 nt, Human
uucagcagaaggcaggguguagggaagcggga

SEQ ID NO: 268783 - RNA, 19 nt, Human
uucagcagaggacuugaua

SEQ ID NO: 268784 - RNA, 32 nt, Human
uucagcagagucaguggccaaagaaaacuuug

SEQ ID NO: 268785 - RNA, 32 nt, Human
uucagcagaucuuucuaccuacuuuggugauc

SEQ ID NO: 268786 - RNA, 22 nt, Human
uucagcagccucccccuugagc

SEQ ID NO: 268787 - RNA, 32 nt, Human
uucagcagccucccccuugagcccccucgcuu

SEQ ID NO: 268788 - RNA, 32 nt, Human
uucagcaggaagcaucucagacaccaaccacu

SEQ ID NO: 268789 - RNA, 32 nt, Human
uucagcaggaucaugccuucugugucuggaag

SEQ ID NO: 268790 - RNA, 32 nt, Human
uucagcagggcuaagucaucagauaugucaga

SEQ ID NO: 268791 - RNA, 20 nt, Human
uucagcagucaggacucuaa

SEQ ID NO: 268792 - RNA, 32 nt, Human
uucagcaguccaggcugaugcaguggcuucaa

SEQ ID NO: 268793 - RNA, 32 nt, Human
uucagcagucuugccagcuuaccaguggacug

SEQ ID NO: 268794 - RNA, 32 nt, Human
uucagcagugaccaccacccacaugacauuuc

SEQ ID NO: 268795 - RNA, 22 nt, Human
uucagcagugccuucuggggug

SEQ ID NO: 268796 - RNA, 31 nt, Human
uucagcauaaagagccuuuguugaaacaucu

SEQ ID NO: 268797 - RNA, 32 nt, Human
uucagcauagcaggacccccaucucuacaaaa

SEQ ID NO: 268798 - RNA, 32 nt, Human
uucagcauauuuauaagacccugcucucuauu

SEQ ID NO: 268799 - RNA, 32 nt, Human
uucagcaucucagucugaagcuucugggacuu

SEQ ID NO: 268800 - RNA, 32 nt, Human
uucagcaucuuaaaaugucucuuuuggcagua

SEQ ID NO: 268801 - RNA, 32 nt, Human
uucagcaugaacaugggcuucuugcugucugu

SEQ ID NO: 268802 - RNA, 31 nt, Human
uucagcaugaguguacugcugaggucagguu

SEQ ID NO: 268803 - RNA, 32 nt, Human
uucagcaugggggugaccaccauguacaucac

SEQ ID NO: 268804 - RNA, 32 nt, Human
uucagcauggugauggagggaggcagaguaac

SEQ ID NO: 268805 - RNA, 32 nt, Human
uucagcauguaauuggggaaacccucgcgucu

SEQ ID NO: 268806 - RNA, 32 nt, Human
uucagcauguuuaaggaaaauagcccacaaug

SEQ ID NO: 268807 - RNA, 22 nt, Human
uucagcauuaacuccugccuca

SEQ ID NO: 268808 - RNA, 32 nt, Human
uucagcauuuccagagaccacaugugagcuuc

SEQ ID NO: 268809 - RNA, 32 nt, Human
uucagcauuucugucauuuacuucugcuauga

SEQ ID NO: 268810 - RNA, 32 nt, Human
uucagcauuugacccuugcugugaauuaagcc

SEQ ID NO: 268811 - RNA, 32 nt, Human
uucagcauuugaguuauugagauccuuauuau

SEQ ID NO: 268812 - RNA, 19 nt, Human
uucagccacagucuuauca

SEQ ID NO: 268813 - RNA, 32 nt, Human
uucagccaccucucuuuuucaguuggcugacu

SEQ ID NO: 268814 - RNA, 32 nt, Human
uucagccacugcaagcccugggccucuggcac

SEQ ID NO: 268815 - RNA, 32 nt, Human
uucagccacuuugccuucucuggacucaguuu

SEQ ID NO: 268816 - RNA, 32 nt, Human
uucagccagaacgauaugucuguccaucuuuc

SEQ ID NO: 268817 - RNA, 31 nt, Human
uucagccagaagcagcaccugcucaagcacc

SEQ ID NO: 268818 - RNA, 32 nt, Human
uucagccagaugcuugccaucucuagggauug

SEQ ID NO: 268819 - RNA, 32 nt, Human
uucagccaggacaacaaauggcuuccaagccu

SEQ ID NO: 268820 - RNA, 32 nt, Human
uucagccauaaagaaagaacaagaucaugccc

SEQ ID NO: 268821 - RNA, 32 nt, Human
uucagccaugcugaugaccacaccccguccag

SEQ ID NO: 268822 - RNA, 24 nt, Human
uucagccauggaugaggaguggga

SEQ ID NO: 268823 - RNA, 32 nt, Human
uucagcccaagcagaaccacagagacaggcca

SEQ ID NO: 268824 - RNA, 32 nt, Human
uucagcccagccugggcacagcacauggaugg

SEQ ID NO: 268825 - RNA, 32 nt, Human
uucagcccaggaauucaagaccagccugggca

SEQ ID NO: 268826 - RNA, 32 nt, Human
uucagcccaggagguggagguugcagugagcg

SEQ ID NO: 268827 - RNA, 32 nt, Human
uucagcccaggaguucgagaccagccugggca

SEQ ID NO: 268828 - RNA, 32 nt, Human
uucagcccaggaguuuaaggcugcagugagcu

SEQ ID NO: 268829 - RNA, 32 nt, Human
uucagcccagugacaccucugauguccccugg

SEQ ID NO: 268830 - RNA, 32 nt, Human
uucagcccauuucucuccauuuccuccucauu

SEQ ID NO: 268831 - RNA, 32 nt, Human
uucagccccaaaacaucucugccugccuuuau

SEQ ID NO: 268832 - RNA, 32 nt, Human
uucagccccaaggacauccuggcugccauacc

SEQ ID NO: 268833 - RNA, 32 nt, Human
uucagcccccgagggcccccaguauuggucgg

SEQ ID NO: 268834 - RNA, 32 nt, Human
uucagccccuaguuaaccucaggacuugguuu

SEQ ID NO: 268835 - RNA, 32 nt, Human
uucagccccuggcagucugcccaccugggugc

SEQ ID NO: 268836 - RNA, 32 nt, Human
uucagccccuucuccccuccccgccuggccag

SEQ ID NO: 268837 - RNA, 32 nt, Human
uucagcccgggagauugaggcugcggugagcu

SEQ ID NO: 268838 - RNA, 32 nt, Human
uucagcccgggagguggagguugcagugagcc

SEQ ID NO: 268839 - RNA, 32 nt, Human
uucagcccuccccuucccagccccaaacugag

SEQ ID NO: 268840 - RNA, 24 nt, Human
uucagcccugccugacagagaagg

SEQ ID NO: 268841 - RNA, 32 nt, Human
uucagcccuguuuugcagcccugggugggggc

SEQ ID NO: 268842 - RNA, 32 nt, Human
uucagccgcugccucuguucucagcgucagug

SEQ ID NO: 268843 - RNA, 32 nt, Human
uucagccgggcaggaaagaugggaugaagccc

SEQ ID NO: 268844 - RNA, 21 nt, Human
uucagccgugggugccccugg

SEQ ID NO: 268845 - RNA, 32 nt, Human
uucagccuacugccucggaucucuccagccga

SEQ ID NO: 268846 - RNA, 32 nt, Human
uucagccuagaagaaaagauaaugaguaaaac

SEQ ID NO: 268847 - RNA, 32 nt, Human
uucagccuaggacguugaggcugcagugagcu

SEQ ID NO: 268848 - RNA, 24 nt, Human
uucagccuaggugacagagugaga

SEQ ID NO: 268849 - RNA, 32 nt, Human
uucagccucagagacaugaagagggcuuuagc

SEQ ID NO: 268850 - RNA, 32 nt, Human
uucagccuccacugugucugucuuuucuuccc

SEQ ID NO: 268851 - RNA, 24 nt, Human
uucagccucccaacagggcagaga

SEQ ID NO: 268852 - RNA, 32 nt, Human
uucagccucgcaguccagcacacacaaacaga

SEQ ID NO: 268853 - RNA, 32 nt, Human
uucagccucuagccuucacuccugggcuccaa

SEQ ID NO: 268854 - RNA, 32 nt, Human
uucagccucucaucugcugcuccgggcugagg

SEQ ID NO: 268855 - RNA, 32 nt, Human
uucagccucugccuuuccacagcuccuccaag

SEQ ID NO: 268856 - RNA, 24 nt, Human
uucagccugagaaccucaagcagg

SEQ ID NO: 268857 - RNA, 32 nt, Human
uucagccugagcaacagagugagacugucuca

SEQ ID NO: 268858 - RNA, 23 nt, Human
uucagccugagcaacagaucaag

SEQ ID NO: 268859 - RNA, 22 nt, Human
uucagccugagcgacagaguga

SEQ ID NO: 268860 - RNA, 32 nt, Human
uucagccugagugcaaccugacucucugcauc

SEQ ID NO: 268861 - RNA, 32 nt, Human
uucagccugauuaugcccuccuggggcuccug

SEQ ID NO: 268862 - RNA, 32 nt, Human
uucagccugcaaaggcuccucuccccacuuga

SEQ ID NO: 268863 - RNA, 21 nt, Human
uucagccugcagcagaggagg

SEQ ID NO: 268864 - RNA, 32 nt, Human
uucagccugccugccuugccuuggggcaggga

SEQ ID NO: 268865 - RNA, 21 nt, Human
uucagccugccuggggugaga

SEQ ID NO: 268866 - RNA, 24 nt, Human
uucagccuggacaacagagugaga

SEQ ID NO: 268867 - RNA, 32 nt, Human
uucagccuggacaacagagugagacccugucu

SEQ ID NO: 268868 - RNA, 32 nt, Human
uucagccuggacaacagagugagacuccaucu

SEQ ID NO: 268869 - RNA, 32 nt, Human
uucagccuggaccccagccucugccaacggcc

SEQ ID NO: 268870 - RNA, 32 nt, Human
uucagccuggagaagggauaugggagcuggag

SEQ ID NO: 268871 - RNA, 32 nt, Human
uucagccuggagaugguggaagagauaaaggc

SEQ ID NO: 268872 - RNA, 24 nt, Human
uucagccuggaugacagagugaga

SEQ ID NO: 268873 - RNA, 32 nt, Human
uucagccuggaugacagagugagacccuguau

SEQ ID NO: 268874 - RNA, 25 nt, Human
uucagccuggaugaugagagugaga

SEQ ID NO: 268875 - RNA, 32 nt, Human
uucagccuggcugacagagcaagacucagucu

SEQ ID NO: 268876 - RNA, 32 nt, Human
uucagccugggaggucaaggcugcagugagcu

SEQ ID NO: 268877 - RNA, 23 nt, Human
uucagccugggcaacaagaguga

SEQ ID NO: 268878 - RNA, 23 nt, Human
uucagccugggcaacagagcaag

SEQ ID NO: 268879 - RNA, 24 nt, Human
uucagccugggcaacagagcaaga

SEQ ID NO: 268880 - RNA, 32 nt, Human
uucagccugggcaacagagcgagacuccaucu

SEQ ID NO: 268881 - RNA, 24 nt, Human
uucagccugggcaacagagugaga

SEQ ID NO: 268882 - RNA, 32 nt, Human
uucagccugggcaacagagugagacuccaucu

SEQ ID NO: 268883 - RNA, 23 nt, Human
uucagccugggcaacauagcaag

SEQ ID NO: 268884 - RNA, 24 nt, Human
uucagccugggcaacauagcaaga

SEQ ID NO: 268885 - RNA, 21 nt, Human
uucagccugggcgaaaguaag

SEQ ID NO: 268886 - RNA, 22 nt, Human
uucagccugggcgaaaguaaga

SEQ ID NO: 268887 - RNA, 31 nt, Human
uucagccugggcgacagagcgagacugcuuc

SEQ ID NO: 268888 - RNA, 24 nt, Human
uucagccugggcgauagagcaaga

SEQ ID NO: 268889 - RNA, 32 nt, Human
uucagccugggcgauagagcaagacucugucu

SEQ ID NO: 268890 - RNA, 24 nt, Human
uucagccugggggauacagugaga

SEQ ID NO: 268891 - RNA, 24 nt, Human
uucagccugggugacagaaagaga

SEQ ID NO: 268892 - RNA, 32 nt, Human
uucagccugggugacagaaagagaccuucucu

SEQ ID NO: 268893 - RNA, 24 nt, Human
uucagccugggugacagaaugaga

SEQ ID NO: 268894 - RNA, 32 nt, Human
uucagccugggugacagaaugagacucugugu

SEQ ID NO: 268895 - RNA, 23 nt, Human
uucagccugggugacagagaagg

SEQ ID NO: 268896 - RNA, 24 nt, Human
uucagccugggugacagagaagga

SEQ ID NO: 268897 - RNA, 32 nt, Human
uucagccugggugacagagaaggacuccgucu

SEQ ID NO: 268898 - RNA, 23 nt, Human
uucagccugggugacagagcaag

SEQ ID NO: 268899 - RNA, 24 nt, Human
uucagccugggugacagagcaaga

SEQ ID NO: 268900 - RNA, 32 nt, Human
uucagccugggugacagagcaagacucuuauc

SEQ ID NO: 268901 - RNA, 32 nt, Human
uucagccugggugacagagcuagacuccaucu

SEQ ID NO: 268902 - RNA, 24 nt, Human
uucagccugggugacagagggaga

SEQ ID NO: 268903 - RNA, 32 nt, Human
uucagccugggugacagagggagacucugucu

SEQ ID NO: 268904 - RNA, 24 nt, Human
uucagccugggugacagagugaga

SEQ ID NO: 268905 - RNA, 32 nt, Human
uucagccugggugacagagugagacagucucc

SEQ ID NO: 268906 - RNA, 32 nt, Human
uucagccugggugacagagugagacccuuucu

SEQ ID NO: 268907 - RNA, 32 nt, Human
uucagccugggugacagagugagacuccaucu

SEQ ID NO: 268908 - RNA, 32 nt, Human
uucagccugggugacagagugagacucugucu

SEQ ID NO: 268909 - RNA, 32 nt, Human
uucagccugggugacauagagagacuccaucu

SEQ ID NO: 268910 - RNA, 24 nt, Human
uucagccugggugccacagcgaga

SEQ ID NO: 268911 - RNA, 32 nt, Human
uucagccuggucaugcuugcucugccacuugc

SEQ ID NO: 268912 - RNA, 22 nt, Human
uucagccuggugacagagcgag

SEQ ID NO: 268913 - RNA, 23 nt, Human
uucagccuggugacagagcgaga

SEQ ID NO: 268914 - RNA, 27 nt, Human
uucagccugugcaaaacaaagcaaugg

SEQ ID NO: 268915 - RNA, 32 nt, Human
uucagccuguucugaauuggugacucugucac

SEQ ID NO: 268916 - RNA, 32 nt, Human
uucagccuuaaggguacuucagucuuaacugu

SEQ ID NO: 268917 - RNA, 32 nt, Human
uucagccuucugagcagcugggauuaugaagg

SEQ ID NO: 268918 - RNA, 32 nt, Human
uucagccuuguggagccugucagucgccauca

SEQ ID NO: 268919 - RNA, 32 nt, Human
uucagccuuucccaagagcagcagaaaaugaa

SEQ ID NO: 268920 - RNA, 32 nt, Human
uucagcgacccauagcucuaagcaggacuauu

SEQ ID NO: 268921 - RNA, 32 nt, Human
uucagcgagaacccuucaaaauucaguguggu

SEQ ID NO: 268922 - RNA, 32 nt, Human
uucagcggauacugccgccaccaagaauccaa

SEQ ID NO: 268923 - RNA, 31 nt, Human
uucagcggcacaaucucagcucacuacaacc

SEQ ID NO: 268924 - RNA, 32 nt, Human
uucagcggcaggcgaagggggcugaggaaagg

SEQ ID NO: 268925 - RNA, 32 nt, Human
uucagcgggaggcagcagaggggaagugguca

SEQ ID NO: 268926 - RNA, 32 nt, Human
uucagcgucauccuugaacgcaggauccggga

SEQ ID NO: 268927 - RNA, 32 nt, Human
uucagcgucuuuuccuagagcuggucaccacu

SEQ ID NO: 268928 - RNA, 23 nt, Human
uucagcuaaagguucuuacacca

SEQ ID NO: 268929 - RNA, 32 nt, Human
uucagcuaacacucagcaccccucccaaagag

SEQ ID NO: 268930 - RNA, 32 nt, Human
uucagcuaacuucuguguaugauaugagguaa

SEQ ID NO: 268931 - RNA, 32 nt, Human
uucagcuacauauaugaacaaauccuuuauua

SEQ ID NO: 268932 - RNA, 32 nt, Human
uucagcuagagucuccuuucugcuccaguucu

SEQ ID NO: 268933 - RNA, 21 nt, Human
uucagcuauguugcuaaagca

SEQ ID NO: 268934 - RNA, 32 nt, Human
uucagcuauuccagauugcugucugugauuuc

SEQ ID NO: 268935 - RNA, 32 nt, Human
uucagcucaauuguaucugacccuucuuuaag

SEQ ID NO: 268936 - RNA, 23 nt, Human
uucagcucaccuggugcaucugg

SEQ ID NO: 268937 - RNA, 32 nt, Human
uucagcucacggcuaccucugccucccggguu

SEQ ID NO: 268938 - RNA, 32 nt, Human
uucagcucacuacaaccucugccuccggguuc

SEQ ID NO: 268939 - RNA, 32 nt, Human
uucagcucacugcaaccuccaccucccaggug

SEQ ID NO: 268940 - RNA, 32 nt, Human
uucagcucacugcaaccuccgccucccagguu

SEQ ID NO: 268941 - RNA, 32 nt, Human
uucagcucacugcaaccucugccucccagguu

SEQ ID NO: 268942 - RNA, 32 nt, Human
uucagcucacugcaaccucugccucccggguu

SEQ ID NO: 268943 - RNA, 32 nt, Human
uucagcucacugcaaccuucgccaccuggguu

SEQ ID NO: 268944 - RNA, 32 nt, Human
uucagcucacugcaaccuucgccucccagcuu

SEQ ID NO: 268945 - RNA, 22 nt, Human
uucagcucacugcaaucuccgc

SEQ ID NO: 268946 - RNA, 32 nt, Human
uucagcucacugcaaucuccgccucccggguu

SEQ ID NO: 268947 - RNA, 32 nt, Human
uucagcucacugcaaucucugccacccagauu

SEQ ID NO: 268948 - RNA, 32 nt, Human
uucagcucagccucacaaguggcaggggaaag

SEQ ID NO: 268949 - RNA, 23 nt, Human
uucagcuccccuccucccagggg

SEQ ID NO: 268950 - RNA, 32 nt, Human
uucagcuccuacuggacccucuugcccagccg

SEQ ID NO: 268951 - RNA, 32 nt, Human
uucagcuccuccuuucuccuacugacacauuu

SEQ ID NO: 268952 - RNA, 32 nt, Human
uucagcuccucguugucuagguggugaaauga

SEQ ID NO: 268953 - RNA, 20 nt, Human
uucagcuccuuugccccugg

SEQ ID NO: 268954 - RNA, 32 nt, Human
uucagcucucacucccuucucaucagcacgug

SEQ ID NO: 268955 - RNA, 24 nt, Human
uucagcucugcaaaggacuucugg

SEQ ID NO: 268956 - RNA, 32 nt, Human
uucagcucugucugcaugaucuaucccagacu

SEQ ID NO: 268957 - RNA, 32 nt, Human
uucagcucuucucucagaaguucagcuguuga

SEQ ID NO: 268958 - RNA, 32 nt, Human
uucagcucuucucuccuuacauuuuacauuca

SEQ ID NO: 268959 - RNA, 32 nt, Human
uucagcucuugcucccuuccucguucaucacc

SEQ ID NO: 268960 - RNA, 22 nt, Human
uucagcucuuucugugcccugg

SEQ ID NO: 268961 - RNA, 20 nt, Human
uucagcugaaagugggggua

SEQ ID NO: 268962 - RNA, 23 nt, Human
uucagcugaggaugugccugaua

SEQ ID NO: 268963 - RNA, 32 nt, Human
uucagcugagucucagaaggggagaaucuccu

SEQ ID NO: 268964 - RNA, 32 nt, Human
uucagcugcauuucacaugccuugcaauggau

SEQ ID NO: 268965 - RNA, 32 nt, Human
uucagcugcccaggcagaggagaauggggucu

SEQ ID NO: 268966 - RNA, 32 nt, Human
uucagcugcccugguggggguugugugagaga

SEQ ID NO: 268967 - RNA, 32 nt, Human
uucagcugccuaagcuguggguucucugaagc

SEQ ID NO: 268968 - RNA, 32 nt, Human
uucagcugcugcaggcucuccugcugcaucuc

SEQ ID NO: 268969 - RNA, 22 nt, Human
uucagcugcuggcagagggagg

SEQ ID NO: 268970 - RNA, 32 nt, Human
uucagcugcuuugacaaaaugacuggcuccug

SEQ ID NO: 268971 - RNA, 32 nt, Human
uucagcugcuuuguuggcagccaggccuggcu

SEQ ID NO: 268972 - RNA, 32 nt, Human
uucagcuggacucugccaucugugggcccagc

SEQ ID NO: 268973 - RNA, 32 nt, Human
uucagcuggagcuuuuugacuucuuagaaaua

SEQ ID NO: 268974 - RNA, 32 nt, Human
uucagcuggggaggggaagagugcuggcuccu

SEQ ID NO: 268975 - RNA, 32 nt, Human
uucagcugugguagaauaccaugcuguguuua

SEQ ID NO: 268976 - RNA, 22 nt, Human
uucagcuguggucggcugaaaa

SEQ ID NO: 268977 - RNA, 21 nt, Human
uucagcuuauaauaaugaaaa

SEQ ID NO: 268978 - RNA, 24 nt, Human
uucagcuuauacccgggcugaaaa

SEQ ID NO: 268979 - RNA, 21 nt, Human
uucagcuucagcaggugaaaa

SEQ ID NO: 268980 - RNA, 32 nt, Human
uucagcuucaugccucuuccacacagcguuuc

SEQ ID NO: 268981 - RNA, 32 nt, Human
uucagcuuccccuguccucuggccacaccgcc

SEQ ID NO: 268982 - RNA, 32 nt, Human
uucagcuuccucagggcagcacgagggucgug

SEQ ID NO: 268983 - RNA, 32 nt, Human
uucagcuuccugcugcuggggccagcgauuuu

SEQ ID NO: 268984 - RNA, 32 nt, Human
uucagcuucugcugggagaaucuugcuaagac

SEQ ID NO: 268985 - RNA, 32 nt, Human
uucagcuucuucucuuauccuuacuuucuuua

SEQ ID NO: 268986 - RNA, 23 nt, Human
uucagcuugggcaacagagcaag

SEQ ID NO: 268987 - RNA, 24 nt, Human
uucagcuugggcaacagagcaaga

SEQ ID NO: 268988 - RNA, 32 nt, Human
uucagcuugggcaagugugugccugugugccg

SEQ ID NO: 268989 - RNA, 21 nt, Human
uucagcuuggggagagagggg

SEQ ID NO: 268990 - RNA, 23 nt, Human
uucagcuuggggugugagugaga

SEQ ID NO: 268991 - RNA, 24 nt, Human
uucagcuugggugacagagccaga

SEQ ID NO: 268992 - RNA, 32 nt, Human
uucagcuugggugacagagccagaccuuauuu

SEQ ID NO: 268993 - RNA, 32 nt, Human
uucagcuugggugaugaagugagaccccuguc

SEQ ID NO: 268994 - RNA, 32 nt, Human
uucagcuuguuggugcgggagcucaggauuuc

SEQ ID NO: 268995 - RNA, 32 nt, Human
uucagcuuucggacucugguucuuggaucgug

SEQ ID NO: 268996 - RNA, 24 nt, Human
uucagcuuugugaguggggcgagg

SEQ ID NO: 268997 - RNA, 32 nt, Human
uucagcuuuuugcuaacuuuuguauuuugaaa

SEQ ID NO: 268998 - RNA, 21 nt, Human
uucaggaaaaggccuggggug

SEQ ID NO: 268999 - RNA, 22 nt, Human
uucaggaaagccugggcaauug

SEQ ID NO: 269000 - RNA, 32 nt, Human
uucaggaaaugccacagauaugaguacuuuuc

SEQ ID NO: 269001 - RNA, 32 nt, Human
uucaggaagauggaggaugaggauucccaggu

SEQ ID NO: 269002 - RNA, 32 nt, Human
uucaggaagggccauauuuucuguugaguaaa

SEQ ID NO: 269003 - RNA, 23 nt, Human
uucaggaagggugucucaggaug

SEQ ID NO: 269004 - RNA, 20 nt, Human
uucaggaauauuuugggaua

SEQ ID NO: 269005 - RNA, 32 nt, Human
uucaggacaucucaagauucagucuugacaau

SEQ ID NO: 269006 - RNA, 32 nt, Human
uucaggaccagccugaccaacauggugaaacc

SEQ ID NO: 269007 - RNA, 32 nt, Human
uucaggaccagccuggccaacaugaugaaacc

SEQ ID NO: 269008 - RNA, 32 nt, Human
uucaggaccagccuggccaauauggugaaacc

SEQ ID NO: 269009 - RNA, 32 nt, Human
uucaggaccagccuggccagcauggugaaacc

SEQ ID NO: 269010 - RNA, 24 nt, Human
uucaggaccagccugggcaacaua

SEQ ID NO: 269011 - RNA, 32 nt, Human
uucaggaccagccugggcaacauagcgagacc

SEQ ID NO: 269012 - RNA, 24 nt, Human
uucaggaccagcuugggcugcgug

SEQ ID NO: 269013 - RNA, 24 nt, Human
uucaggaccaggaaaugguacaug

SEQ ID NO: 269014 - RNA, 32 nt, Human
uucaggaccaggcagagagugaggcugggggu

SEQ ID NO: 269015 - RNA, 32 nt, Human
uucaggacccacccacccuaugccggcuucug

SEQ ID NO: 269016 - RNA, 24 nt, Human
uucaggaccugccugggcaacaug

SEQ ID NO: 269017 - RNA, 24 nt, Human
uucaggacuagccugggcaacaua

SEQ ID NO: 269018 - RNA, 32 nt, Human
uucaggacuagccugggcaacauagcaagauc

SEQ ID NO: 269019 - RNA, 32 nt, Human
uucaggacugcgugaucgugcacuuugugugg

SEQ ID NO: 269020 - RNA, 24 nt, Human
uucaggacuggccuagugaacgua

SEQ ID NO: 269021 - RNA, 32 nt, Human
uucaggagacugagacagagaagacaagugaa

SEQ ID NO: 269022 - RNA, 31 nt, Human
uucaggagacuucucuuucuccaaggacgcc

SEQ ID NO: 269023 - RNA, 32 nt, Human
uucaggagaguuuguugucaggauuuaacacu

SEQ ID NO: 269024 - RNA, 22 nt, Human
uucaggagaugcgcuuggggug

SEQ ID NO: 269025 - RNA, 23 nt, Human
uucaggagauuauauuucacuca

SEQ ID NO: 269026 - RNA, 32 nt, Human
uucaggagcaugacuccagugcugggcucuug

SEQ ID NO: 269027 - RNA, 32 nt, Human
uucaggagccuaagacccucccagagcccagg

SEQ ID NO: 269028 - RNA, 32 nt, Human
uucaggagcucaaggcuggagugucuugacag

SEQ ID NO: 269029 - RNA, 32 nt, Human
uucaggaggaagagaugcccaugaagcagguc

SEQ ID NO: 269030 - RNA, 32 nt, Human
uucaggaggagagaaggaaggagaggugaucu

SEQ ID NO: 269031 - RNA, 32 nt, Human
uucaggaggcggagguugcagugagccaagau

SEQ ID NO: 269032 - RNA, 32 nt, Human
uucaggagguacugugaggaagagcaggcacc

SEQ ID NO: 269033 - RNA, 32 nt, Human
uucaggaggugaggacaagccagagguccuug

SEQ ID NO: 269034 - RNA, 32 nt, Human
uucaggagguggagguugcagugagccgacau

SEQ ID NO: 269035 - RNA, 24 nt, Human
uucaggagguggagguuuuagugg

SEQ ID NO: 269036 - RNA, 32 nt, Human
uucaggaguaauuccccguuuccuucaagagu

SEQ ID NO: 269037 - RNA, 32 nt, Human
uucaggaguuaaaucauucuuccacccagaua

SEQ ID NO: 269038 - RNA, 32 nt, Human
  misc_feature (8)..(8): n is a, c, g, or u
uucagganacucuguaccuaucuggaauccaa

SEQ ID NO: 269039 - RNA, 16 nt, Human
uucaggaucaauguga

SEQ ID NO: 269040 - RNA, 32 nt, Human
uucaggaucagcuggggguauggaauuggcug

SEQ ID NO: 269041 - RNA, 23 nt, Human
uucaggaucagucaaaggcagca

SEQ ID NO: 269042 - RNA, 32 nt, Human
uucaggauccuaauacuuggccaucuccacac

SEQ ID NO: 269043 - RNA, 32 nt, Human
uucaggaugagugaaggcuggagccagggagc

SEQ ID NO: 269044 - RNA, 32 nt, Human
uucaggaugccauuaagaaugccaaaucaaau

SEQ ID NO: 269045 - RNA, 31 nt, Human
uucaggaugccuucuuuagcauuuagaaccc

SEQ ID NO: 269046 - RNA, 32 nt, Human
uucaggauggccaggacuguggauucccagca

SEQ ID NO: 269047 - RNA, 30 nt, Human
uucaggaugggccacagggcgucaagcagc

SEQ ID NO: 269048 - RNA, 32 nt, Human
uucaggauuaauccucuugcaccagcucucag

SEQ ID NO: 269049 - RNA, 32 nt, Human
uucaggcaaagaaucaagggugaagguaaaau

SEQ ID NO: 269050 - RNA, 23 nt, Human
uucaggcaagagugcaguagugu

SEQ ID NO: 269051 - RNA, 32 nt, Human
uucaggcacacccucuggaagcggguccaagg

SEQ ID NO: 269052 - RNA, 32 nt, Human
uucaggcaccuugauggggcucaguggggcca

SEQ ID NO: 269053 - RNA, 32 nt, Human
uucaggcagacugguggcaguggaguagggaa

SEQ ID NO: 269054 - RNA, 32 nt, Human
uucaggcagggugagcaggcaggagcagggga

SEQ ID NO: 269055 - RNA, 32 nt, Human
uucaggcauuuauggggagaaaaggcccuccc

SEQ ID NO: 269056 - RNA, 32 nt, Human
uucaggcauuugcuucaaacaaaaagaagcuu

SEQ ID NO: 269057 - RNA, 31 nt, Human
uucaggccaaugucucagcccaggaaccagg

SEQ ID NO: 269058 - RNA, 32 nt, Human
uucaggccaccugaggcacauccucucugaaa

SEQ ID NO: 269059 - RNA, 32 nt, Human
uucaggccacuuggggucuagaccaugguggu

SEQ ID NO: 269060 - RNA, 32 nt, Human
uucaggccagggcaucccagaggucaaugcgu

SEQ ID NO: 269061 - RNA, 32 nt, Human
uucaggcccaaauuauggcagacaucuugaug

SEQ ID NO: 269062 - RNA, 31 nt, Human
uucaggcccccgccuuggccuguguucuucc

SEQ ID NO: 269063 - RNA, 32 nt, Human
uucaggcccugagaggucucagcucuuggagg

SEQ ID NO: 269064 - RNA, 32 nt, Human
uucaggccugggaaggaagacacugggaggag

SEQ ID NO: 269065 - RNA, 32 nt, Human
uucaggccuguaauuccagcacuuugggaggc

SEQ ID NO: 269066 - RNA, 18 nt, Human
uucaggccuguaguccca

SEQ ID NO: 269067 - RNA, 32 nt, Human
uucaggccugugcauguguguacagcaggagg

SEQ ID NO: 269068 - RNA, 32 nt, Human
uucaggccuguucuagcaucuggccggggcgg

SEQ ID NO: 269069 - RNA, 32 nt, Human
uucaggccuucccuucuccauccugccauguc

SEQ ID NO: 269070 - RNA, 32 nt, Human
uucaggcgaccucugcccucccugccucuccu

SEQ ID NO: 269071 - RNA, 32 nt, Human
uucaggcgugagccaccacacccggccaaaac

SEQ ID NO: 269072 - RNA, 28 nt, Human
uucaggcuaagagcugccucgcucuuug

SEQ ID NO: 269073 - RNA, 32 nt, Human
uucaggcucaggcuccagccuuggcagccuuc

SEQ ID NO: 269074 - RNA, 32 nt, Human
uucaggcucaggcugaagaacugacccacuua

SEQ ID NO: 269075 - RNA, 24 nt, Human
uucaggcucugaacauucccagcg

SEQ ID NO: 269076 - RNA, 32 nt, Human
uucaggcucugccucucccacuaggucuggau

SEQ ID NO: 269077 - RNA, 32 nt, Human
uucaggcugcccauccccuccccaccggcguc

SEQ ID NO: 269078 - RNA, 32 nt, Human
uucaggcugccuggaggaaggacggggcugag

SEQ ID NO: 269079 - RNA, 32 nt, Human
uucaggcugcugugguucucagcagcaauuug

SEQ ID NO: 269080 - RNA, 23 nt, Human
uucaggcuggagcugggggccag

SEQ ID NO: 269081 - RNA, 20 nt, Human
uucaggcuggagugcagugg

SEQ ID NO: 269082 - RNA, 22 nt, Human
uucaggcuggagugcaguggug

SEQ ID NO: 269083 - RNA, 24 nt, Human
uucaggcugggcgaaagagugaga

SEQ ID NO: 269084 - RNA, 19 nt, Human
uucaggcugggugcagugg

SEQ ID NO: 269085 - RNA, 32 nt, Human
uucaggcuucauuccuucccaagagugcuuuu

SEQ ID NO: 269086 - RNA, 32 nt, Human
uucagggaaccauccacacaccugccaacccu

SEQ ID NO: 269087 - RNA, 32 nt, Human
uucagggaaggaguuugauauagcagauuaac

SEQ ID NO: 269088 - RNA, 32 nt, Human
uucagggaauaacauucugagcccucgauggc

SEQ ID NO: 269089 - RNA, 22 nt, Human
uucagggacaaucacccaggga

SEQ ID NO: 269090 - RNA, 32 nt, Human
uucagggacacauaccgccuccagcggggagc

SEQ ID NO: 269091 - RNA, 32 nt, Human
uucagggagagcugggcagacaggugggagau

SEQ ID NO: 269092 - RNA, 32 nt, Human
uucagggagaggggagaucuaagcaggacaga

SEQ ID NO: 269093 - RNA, 32 nt, Human
uucagggagcaggaggagagagccccugaagu

SEQ ID NO: 269094 - RNA, 32 nt, Human
uucagggagccccgcccucccaaaaagccgug

SEQ ID NO: 269095 - RNA, 32 nt, Human
uucagggagcugcagaagcagggggcuggugg

SEQ ID NO: 269096 - RNA, 18 nt, Human
uucagggauauggccaug

SEQ ID NO: 269097 - RNA, 32 nt, Human
uucagggauauguauauguauguuugugugug

SEQ ID NO: 269098 - RNA, 32 nt, Human
uucagggaucagaggccauccuuugugggcuu

SEQ ID NO: 269099 - RNA, 32 nt, Human
uucagggauuacaggcaugagccaccaugccc

SEQ ID NO: 269100 - RNA, 32 nt, Human
uucagggauuccauaaacauuuaaacaauguu

SEQ ID NO: 269101 - RNA, 32 nt, Human
uucagggcaaaguggggccuggauugugggcc

SEQ ID NO: 269102 - RNA, 32 nt, Human
uucagggcagaauauguguuugugacccaaaa

SEQ ID NO: 269103 - RNA, 32 nt, Human
uucagggcauuucucccuccagccagggccca

SEQ ID NO: 269104 - RNA, 24 nt, Human
uucagggccagcccuggcuggcau

SEQ ID NO: 269105 - RNA, 32 nt, Human
uucagggccagcccuggcuggcauggagggug

SEQ ID NO: 269106 - RNA, 32 nt, Human
uucagggccaggcagagagugaggcugggggu

SEQ ID NO: 269107 - RNA, 21 nt, Human
uucagggccagggcguagcgu

SEQ ID NO: 269108 - RNA, 21 nt, Human
uucagggccauugcaaacaua

SEQ ID NO: 269109 - RNA, 32 nt, Human
uucagggcccuccacaucugagguggcucauu

SEQ ID NO: 269110 - RNA, 24 nt, Human
uucagggccgauggggcagucgug

SEQ ID NO: 269111 - RNA, 32 nt, Human
uucagggccuaggaaggggagcauucaggaac

SEQ ID NO: 269112 - RNA, 19 nt, Human
uucagggccucccugccug

SEQ ID NO: 269113 - RNA, 32 nt, Human
uucagggccuccucaagcugguugggccacug

SEQ ID NO: 269114 - RNA, 32 nt, Human
uucagggccugcucucugucaugugaugcuau

SEQ ID NO: 269115 - RNA, 32 nt, Human
uucagggcucagagcagcaaaggccugaagag

SEQ ID NO: 269116 - RNA, 32 nt, Human
uucagggcucaggugauccucccaccucagcc

SEQ ID NO: 269117 - RNA, 32 nt, Human
uucagggcuuccuuccugugugcagccuaggg

SEQ ID NO: 269118 - RNA, 22 nt, Human
uucaggggaaaauuuugggaug

SEQ ID NO: 269119 - RNA, 32 nt, Human
uucaggggacacucaggagucacugcacauua

SEQ ID NO: 269120 - RNA, 32 nt, Human
uucaggggacaugacaucaauagguuucugga

SEQ ID NO: 269121 - RNA, 22 nt, Human
uucaggggauggcagagcuggg

SEQ ID NO: 269122 - RNA, 32 nt, Human
uucaggggucccggaagaguuguuugagguuu

SEQ ID NO: 269123 - RNA, 32 nt, Human
uucaggggucccugugcuggccaagccaguga

SEQ ID NO: 269124 - RNA, 32 nt, Human
uucaggggugacucagaagaaaaagaagcuga

SEQ ID NO: 269125 - RNA, 32 nt, Human
uucaggggugagagucagagagcacugcaaua

SEQ ID NO: 269126 - RNA, 32 nt, Human
uucaggguaggugggcacaggcuuggacuaga

SEQ ID NO: 269127 - RNA, 32 nt, Human
uucaggguccccuuggauuguguagaugcagu

SEQ ID NO: 269128 - RNA, 32 nt, Human
uucagggucuagauggaugggaaaguagaaaa

SEQ ID NO: 269129 - RNA, 32 nt, Human
uucagggugaaauccuaugcuuccauguacau

SEQ ID NO: 269130 - RNA, 32 nt, Human
uucagggugaccuaacaccaccucaugcccug

SEQ ID NO: 269131 - RNA, 32 nt, Human
uucagggugcuccaucagagccagcgggaugg

SEQ ID NO: 269132 - RNA, 32 nt, Human
uucagggugggaugacggaccgcuucugggac

SEQ ID NO: 269133 - RNA, 32 nt, Human
uucaggguguugggcuggagggaguggggugg

SEQ ID NO: 269134 - RNA, 22 nt, Human
uucaggguuagucagcaacaua

SEQ ID NO: 269135 - RNA, 32 nt, Human
uucaggguuuuguccucccaaaccagagucau

SEQ ID NO: 269136 - RNA, 32 nt, Human
uucagguaaguuugcauccaagcaaugucguc

SEQ ID NO: 269137 - RNA, 32 nt, Human
uucagguaucuuuucagcagcacuccacuccu

SEQ ID NO: 269138 - RNA, 32 nt, Human
uucaggucaacacugcacuccagccugggcga

SEQ ID NO: 269139 - RNA, 32 nt, Human
uucaggucagccagcgcccacaaccugacggu

SEQ ID NO: 269140 - RNA, 32 nt, Human
uucaggucaggaguucgagaccagccuggcca

SEQ ID NO: 269141 - RNA, 32 nt, Human
uucaggucauuucuccucucucagacucagug

SEQ ID NO: 269142 - RNA, 32 nt, Human
uucagguccuccuccacaagggccacauuuca

SEQ ID NO: 269143 - RNA, 32 nt, Human
uucagguccucggacaaccucucuccagcucu

SEQ ID NO: 269144 - RNA, 32 nt, Human
uucaggucgggaguuccagaccagccuguuca

SEQ ID NO: 269145 - RNA, 32 nt, Human
uucaggucuccagcuucucugcuucucagcug

SEQ ID NO: 269146 - RNA, 23 nt, Human
uucaggugaccacaauagcaaca

SEQ ID NO: 269147 - RNA, 32 nt, Human
uucaggugaggcccaaugaggucagggaccca

SEQ ID NO: 269148 - RNA, 32 nt, Human
uucagguguccguuauucaggugcaaagaaga

SEQ ID NO: 269149 - RNA, 32 nt, Human
uucaggugugagccacugugcccagcagggau

SEQ ID NO: 269150 - RNA, 32 nt, Human
uucaggugugcaaaggaggggaaagugaagcc

SEQ ID NO: 269151 - RNA, 32 nt, Human
uucagguguuaugccugauuccuucaucauaa

SEQ ID NO: 269152 - RNA, 21 nt, Human
uucagguuacuagguguucug

SEQ ID NO: 269153 - RNA, 24 nt, Human
uucagguuaucuugaagaugccaa

SEQ ID NO: 269154 - RNA, 22 nt, Human
uucagguuaucuuggcaacaug

SEQ ID NO: 269155 - RNA, 32 nt, Human
uucagguuucacuccuaguggaggaggcucuu

SEQ ID NO: 269156 - RNA, 32 nt, Human
uucagguuucagcaugaacaugggcuucuugc

SEQ ID NO: 269157 - RNA, 32 nt, Human
uucagguuugcugucacauaugcaucaucuga

SEQ ID NO: 269158 - RNA, 24 nt, Human
uucaguaaaaauaacaaauacaug

SEQ ID NO: 269159 - RNA, 32 nt, Human
uucaguaagcuacagcuaagcccaucggccgg

SEQ ID NO: 269160 - RNA, 22 nt, Human
uucaguaaguuagugcuucugg

SEQ ID NO: 269161 - RNA, 32 nt, Human
uucaguacaaguuuaaguugcuuucuuugagg

SEQ ID NO: 269162 - RNA, 18 nt, Human
uucaguacccuuggccug

SEQ ID NO: 269163 - RNA, 32 nt, Human
uucaguaccugacagagaacaucugggcgucc

SEQ ID NO: 269164 - RNA, 32 nt, Human
uucaguacugggugguucagcagggaagccag

SEQ ID NO: 269165 - RNA, 32 nt, Human
uucaguacuguagugcucacagggcuuccugg

SEQ ID NO: 269166 - RNA, 28 nt, Human
uucaguagagaccagccuggccaacaug

SEQ ID NO: 269167 - RNA, 32 nt, Human
uucaguagagaugcaguuucacuguguuggcc

SEQ ID NO: 269168 - RNA, 24 nt, Human
uucaguagcagccuaggcaacaug

SEQ ID NO: 269169 - RNA, 32 nt, Human
uucaguagcucugaaggcuggaaaagagagca

SEQ ID NO: 269170 - RNA, 32 nt, Human
uucaguagcugagaacuugagcguagauaugu

SEQ ID NO: 269171 - RNA, 32 nt, Human
uucaguaguaaagacccagcuugaauguaaau

SEQ ID NO: 269172 - RNA, 32 nt, Human
uucaguaguacuucaaagaagauagcuguaua

SEQ ID NO: 269173 - RNA, 32 nt, Human
uucaguaguuccaggacucagggacucaggcc

SEQ ID NO: 269174 - RNA, 32 nt, Human
uucaguaguuuauauuggaaagaaaaacaauu

SEQ ID NO: 269175 - RNA, 32 nt, Human
uucaguaucaguuaaucagaacaaaaagauaa

SEQ ID NO: 269176 - RNA, 32 nt, Human
uucaguaucuucucuaucauaggcccuaaguu

SEQ ID NO: 269177 - RNA, 32 nt, Human
uucaguauuagaugcacuuaaguuagccucca

SEQ ID NO: 269178 - RNA, 32 nt, Human
uucaguauuuggaguucaacacugucucucaa

SEQ ID NO: 269179 - RNA, 32 nt, Human
uucagucaaacaguaaagacuuuauuuaugga

SEQ ID NO: 269180 - RNA, 32 nt, Human
uucagucaaagauacacaaucugaaacagcuu

SEQ ID NO: 269181 - RNA, 32 nt, Human
uucagucaacagaaaaugugauuuucacagau

SEQ ID NO: 269182 - RNA, 32 nt, Human
uucagucaacuuaaaucugaacuuuuucuuaa

SEQ ID NO: 269183 - RNA, 32 nt, Human
uucagucaagugaaaaauuaacauguggacug

SEQ ID NO: 269184 - RNA, 32 nt, Human
uucagucacaggcagaaagggaagcacagggu

SEQ ID NO: 269185 - RNA, 32 nt, Human
uucagucaccucccaccucuugccaccugcug

SEQ ID NO: 269186 - RNA, 32 nt, Human
uucagucagccuguggcacuguucaucugcug

SEQ ID NO: 269187 - RNA, 32 nt, Human
uucagucauaauaccaauaguuaucucaugca

SEQ ID NO: 269188 - RNA, 32 nt, Human
uucagucauccaucuucucuggaggcugcaga

SEQ ID NO: 269189 - RNA, 32 nt, Human
uucagucauuuucugcacgcaucccccuuuau

SEQ ID NO: 269190 - RNA, 32 nt, Human
uucaguccagugccaugccuuagauggaauug

SEQ ID NO: 269191 - RNA, 32 nt, Human
uucaguccauggugcuuuguaacuuuuacguu

SEQ ID NO: 269192 - RNA, 32 nt, Human
uucaguccccuccccucugcccuguuuuguau

SEQ ID NO: 269193 - RNA, 32 nt, Human
uucaguccuaguuuuuacuuuuauucuuaaag

SEQ ID NO: 269194 - RNA, 32 nt, Human
uucaguccuauuacugaugaguuuacaucuuc

SEQ ID NO: 269195 - RNA, 32 nt, Human
uucaguccugcacugcucaccuggguuuacug

SEQ ID NO: 269196 - RNA, 32 nt, Human
uucaguccugcaggaacaggaucaucugucuc

SEQ ID NO: 269197 - RNA, 32 nt, Human
uucaguccugccucuacugucucuccauagcc

SEQ ID NO: 269198 - RNA, 32 nt, Human
uucaguccugcugccugaaucaucucacacca

SEQ ID NO: 269199 - RNA, 28 nt, Human
uucagucgagaccggccuggccaacgug

SEQ ID NO: 269200 - RNA, 32 nt, Human
uucagucucacugccaucuacagccacacugc

SEQ ID NO: 269201 - RNA, 32 nt, Human
uucagucuccaucauggcaugccauacucucc

SEQ ID NO: 269202 - RNA, 32 nt, Human
uucagucugcugaagagcuuggaagacuggag

SEQ ID NO: 269203 - RNA, 32 nt, Human
uucagucuguaggugacuacagaaggaggagg

SEQ ID NO: 269204 - RNA, 24 nt, Human
uucagucugugugacugagcaaga

SEQ ID NO: 269205 - RNA, 32 nt, Human
uucagucugugugacugagcaagacucuuuca

SEQ ID NO: 269206 - RNA, 32 nt, Human
uucagucuucaaagagaaagauaagaaauucu

SEQ ID NO: 269207 - RNA, 32 nt, Human
uucagucuugccuuacacaaaggggaucauaa

SEQ ID NO: 269208 - RNA, 32 nt, Human
uucagucuuuaagagucuguugugcagcggag

SEQ ID NO: 269209 - RNA, 32 nt, Human
uucagugaaagaggaaggaaaggaguagggcu

SEQ ID NO: 269210 - RNA, 32 nt, Human
uucagugaaauggcauugcauauuuauauguu

SEQ ID NO: 269211 - RNA, 32 nt, Human
uucagugaacugcuggaacucacacaugcccu

SEQ ID NO: 269212 - RNA, 32 nt, Human
uucagugaagcacuacgaaaauuugaaaccaa

SEQ ID NO: 269213 - RNA, 32 nt, Human
uucagugacgucauucuucuccaggcuggccc

SEQ ID NO: 269214 - RNA, 32 nt, Human
uucagugagaaggugacccgccuucuucccau

SEQ ID NO: 269215 - RNA, 32 nt, Human
uucagugagacgcccugcacacacagaaagcc

SEQ ID NO: 269216 - RNA, 32 nt, Human
uucagugagguaggccagcuuuuaugacgcac

SEQ ID NO: 269217 - RNA, 32 nt, Human
uucagugcaaucuccgccuccuggguucaaau

SEQ ID NO: 269218 - RNA, 32 nt, Human
uucagugcagaaguccucacacacuaacagau

SEQ ID NO: 269219 - RNA, 32 nt, Human
uucagugcaggacucaaguguacuuguacaga

SEQ ID NO: 269220 - RNA, 32 nt, Human
uucagugcaucuccuagaaaagaaguguugga

SEQ ID NO: 269221 - RNA, 32 nt, Human
uucagugccagggcccugaggaagaaaugggg

SEQ ID NO: 269222 - RNA, 32 nt, Human
uucagugccauggacaugauuuaaacugaaac

SEQ ID NO: 269223 - RNA, 32 nt, Human
uucagugcgugguaggaaagaaagucagguca

SEQ ID NO: 269224 - RNA, 32 nt, Human
uucagugcucugcagaagccucucccccucac

SEQ ID NO: 269225 - RNA, 32 nt, Human
uucagugcuggcauauuuuggaauucugcaca

SEQ ID NO: 269226 - RNA, 32 nt, Human
uucagugcuguccuuccacauuuaauugcauu

SEQ ID NO: 269227 - RNA, 26 nt, Human
uucagugcuguggccugggcaagaua

SEQ ID NO: 269228 - RNA, 32 nt, Human
uucagugcuugcugguguccugggcagcacca

SEQ ID NO: 269229 - RNA, 32 nt, Human
uucagugcuuucuaaguagcagccccugccuc

SEQ ID NO: 269230 - RNA, 32 nt, Human
uucaguggagugaaguucaggaggcauggagc

SEQ ID NO: 269231 - RNA, 31 nt, Human
uucaguggcgcgaucucagcucacuacaagc

SEQ ID NO: 269232 - RNA, 32 nt, Human
uucaguggcuuaaauuauaacguuuuggcuua

SEQ ID NO: 269233 - RNA, 32 nt, Human
uucaguggcuugcaguugcagcaaggaccgaa

SEQ ID NO: 269234 - RNA, 31 nt, Human
uucagugggucaaaauggggagauguacugg

SEQ ID NO: 269235 - RNA, 32 nt, Human
uucagugguggagauggccuucugguaacuga

SEQ ID NO: 269236 - RNA, 32 nt, Human
uucagugguggguggggcagggcagaugaaag

SEQ ID NO: 269237 - RNA, 32 nt, Human
uucaguguagauuuugucuuucuugaacuuaa

SEQ ID NO: 269238 - RNA, 32 nt, Human
uucaguguaugguuuucccugccaaacgguuc

SEQ ID NO: 269239 - RNA, 32 nt, Human
uucagugucuguggcuggagagugugucuuuc

SEQ ID NO: 269240 - RNA, 32 nt, Human
uucagugugguguccagcagugucucccacuc

SEQ ID NO: 269241 - RNA, 32 nt, Human
uucaguguuccucccacugccaacacacccac

SEQ ID NO: 269242 - RNA, 32 nt, Human
uucaguguuguggugacucagggccuucacca

SEQ ID NO: 269243 - RNA, 32 nt, Human
uucaguguuuauggggaaaauaccucauuagu

SEQ ID NO: 269244 - RNA, 32 nt, Human
uucaguguuuugucaaccauuucaaagugucu

SEQ ID NO: 269245 - RNA, 32 nt, Human
uucaguuaccauuguaugcaagagccaagcac

SEQ ID NO: 269246 - RNA, 32 nt, Human
uucaguuaggcagaggaagagcgacugcagug

SEQ ID NO: 269247 - RNA, 32 nt, Human
uucaguuaggcgcucaucaguucuccagagug

SEQ ID NO: 269248 - RNA, 32 nt, Human
uucaguuaucucucgaguuuugaagcugaaca

SEQ ID NO: 269249 - RNA, 32 nt, Human
uucaguuaugagacucuuugcauaguauaggg

SEQ ID NO: 269250 - RNA, 32 nt, Human
uucaguucaagaaauuguucugccugggcaag

SEQ ID NO: 269251 - RNA, 32 nt, Human
uucaguucaguguaugaccaaaagcaauaugu

SEQ ID NO: 269252 - RNA, 32 nt, Human
uucaguucccagagagcagagacucuugggaa

SEQ ID NO: 269253 - RNA, 32 nt, Human
uucaguucccagccaaguaggugcuucauguc

SEQ ID NO: 269254 - RNA, 32 nt, Human
uucaguuccuuaagacugucuggucauaucug

SEQ ID NO: 269255 - RNA, 32 nt, Human
uucaguuccuucccccugacccugacuccuug

SEQ ID NO: 269256 - RNA, 32 nt, Human
uucaguucucauccucuccaucccaauccagu

SEQ ID NO: 269257 - RNA, 28 nt, Human
uucaguucucaugcugccucuuccaaaa

SEQ ID NO: 269258 - RNA, 32 nt, Human
uucaguugaauauaaagaaaugggguuguuug

SEQ ID NO: 269259 - RNA, 32 nt, Human
uucaguuguaugacagucaguauugacaauaa

SEQ ID NO: 269260 - RNA, 32 nt, Human
uucaguugugcaaaugaaagccaucugacagu

SEQ ID NO: 269261 - RNA, 32 nt, Human
uucaguugugguagaauaccgugcuguguuua

SEQ ID NO: 269262 - RNA, 32 nt, Human
uucaguuguuuauuuuaaaugauaucgaucuu

SEQ ID NO: 269263 - RNA, 32 nt, Human
uucaguuguuuugcauaacgucugccuucuuu

SEQ ID NO: 269264 - RNA, 32 nt, Human
uucaguuuacuguuuccaugcuaaacaugauu

SEQ ID NO: 269265 - RNA, 32 nt, Human
uucaguuucauuguuaacgggccuuauucuga

SEQ ID NO: 269266 - RNA, 32 nt, Human
uucaguuucauuuuguuuucccuaauucaagu

SEQ ID NO: 269267 - RNA, 32 nt, Human
uucaguuuccccaaguaccuguuuucauuccc

SEQ ID NO: 269268 - RNA, 32 nt, Human
uucaguuucucuucccuaagaggcugccggag

SEQ ID NO: 269269 - RNA, 23 nt, Human
uucaguuuggggcaggagggaga

SEQ ID NO: 269270 - RNA, 32 nt, Human
uucaguuugucacccaggcuggagugcugugg

SEQ ID NO: 269271 - RNA, 32 nt, Human
uucaguuuuaguuucaaaauguuaacaacuug

SEQ ID NO: 269272 - RNA, 32 nt, Human
uucaguuuugagacucggauuggcucuccuug

SEQ ID NO: 269273 - RNA, 32 nt, Human
uucauaaaauacugcaagcacuucucuucaag

SEQ ID NO: 269274 - RNA, 32 nt, Human
uucauaaacugcacuucuuuacucugguaaag

SEQ ID NO: 269275 - RNA, 31 nt, Human
uucauaaaguuuagagaaaaggaauggaaag

SEQ ID NO: 269276 - RNA, 32 nt, Human
uucauaaaucauagauuucauauuacucagug

SEQ ID NO: 269277 - RNA, 32 nt, Human
uucauaacagcgucugcuauuauuacucaaaa

SEQ ID NO: 269278 - RNA, 32 nt, Human
uucauaagauggaaaugcuauaccuuaccuac

SEQ ID NO: 269279 - RNA, 32 nt, Human
uucauaaggcaguucauacugcagagaaaccc

SEQ ID NO: 269280 - RNA, 32 nt, Human
uucauaaggccugcccucccauguugcaugcc

SEQ ID NO: 269281 - RNA, 32 nt, Human
uucauaauccuuccucuauuaaaaugugaauu

SEQ ID NO: 269282 - RNA, 32 nt, Human
uucauaauguacuaggaaaaacauccugcaau

SEQ ID NO: 269283 - RNA, 32 nt, Human
uucauaauucugaaacaacuugccccaagggu

SEQ ID NO: 269284 - RNA, 32 nt, Human
uucauacaacagaaaccagaaaagcaauacug

SEQ ID NO: 269285 - RNA, 32 nt, Human
uucauacaacaucagugguuacagcuauacua

SEQ ID NO: 269286 - RNA, 32 nt, Human
uucauacaacucaagaguaaauugcucggauu

SEQ ID NO: 269287 - RNA, 32 nt, Human
uucauacacacacgcacacacgcacacaaaca

SEQ ID NO: 269288 - RNA, 32 nt, Human
uucauacacagccugggcuggggguggggugg

SEQ ID NO: 269289 - RNA, 32 nt, Human
uucauacacaugcaaucauacaugcacacuga

SEQ ID NO: 269290 - RNA, 32 nt, Human
uucauacacgugcacacacacgcauacacagg

SEQ ID NO: 269291 - RNA, 24 nt, Human
uucauacacuaaccaaaucucuca

SEQ ID NO: 269292 - RNA, 32 nt, Human
uucauacaggaaaucugugugcacgaggcauu

SEQ ID NO: 269293 - RNA, 32 nt, Human
uucauacauacucugugguaauagagacuuga

SEQ ID NO: 269294 - RNA, 32 nt, Human
uucauaccaacacaggcuucagcacuuccuuu

SEQ ID NO: 269295 - RNA, 32 nt, Human
uucauaccaagaaguuugcugagcaugauguu

SEQ ID NO: 269296 - RNA, 32 nt, Human
uucauaccccaaauauuuucagaaggacauag

SEQ ID NO: 269297 - RNA, 32 nt, Human
uucauaccucuaaugcuagcacuuuuggaggc

SEQ ID NO: 269298 - RNA, 32 nt, Human
uucauaccuguagagcacgaauccaaguagau

SEQ ID NO: 269299 - RNA, 23 nt, Human
uucauacuauauuguauuguacu

SEQ ID NO: 269300 - RNA, 32 nt, Human
uucauacucuucuaaguccucuuccagccuca

SEQ ID NO: 269301 - RNA, 32 nt, Human
uucauacugccuccucccuuguuuuucugucu

SEQ ID NO: 269302 - RNA, 32 nt, Human
uucauacuggagagaagcccuaugcauguaag

SEQ ID NO: 269303 - RNA, 32 nt, Human
uucauagaaacauggaauucucugauuuugag

SEQ ID NO: 269304 - RNA, 32 nt, Human
uucauagaaauuaggcuggagaaagaaggaag

SEQ ID NO: 269305 - RNA, 32 nt, Human
uucauagagacagggacucacuauguugucca

SEQ ID NO: 269306 - RNA, 32 nt, Human
uucauagagacaggggaucucauuauguugcc

SEQ ID NO: 269307 - RNA, 32 nt, Human
uucauagagacagggucucacuguguugucca

SEQ ID NO: 269308 - RNA, 32 nt, Human
uucauagagacaggguuucaccauguuggcca

SEQ ID NO: 269309 - RNA, 32 nt, Human
uucauagagcccagaacaaauaguaauauuuc

SEQ ID NO: 269310 - RNA, 32 nt, Human
uucauagaggcagaggguggggaagggcuggg

SEQ ID NO: 269311 - RNA, 32 nt, Human
uucauagauuuauaugaugauaugacaucugg

SEQ ID NO: 269312 - RNA, 32 nt, Human
uucauagcaaagcaguuuagcccagugacuaa

SEQ ID NO: 269313 - RNA, 32 nt, Human
uucauagcaagccucaucaucauaagccccca

SEQ ID NO: 269314 - RNA, 32 nt, Human
uucauagcucuccuuaguuuacucugccugga

SEQ ID NO: 269315 - RNA, 32 nt, Human
uucauagcugcauuaccauagcuaaacuccuc

SEQ ID NO: 269316 - RNA, 32 nt, Human
uucauaggaaauuaauuuuucuucucaaguau

SEQ ID NO: 269317 - RNA, 23 nt, Human
uucauaggcucucccucauuaca

SEQ ID NO: 269318 - RNA, 32 nt, Human
uucauagggaaagacuugcucgggagcaaguc

SEQ ID NO: 269319 - RNA, 32 nt, Human
uucauaguauuuuuaagugauauccuggugcu

SEQ ID NO: 269320 - RNA, 32 nt, Human
uucauaguguuucuuucaucaucuucauugaa

SEQ ID NO: 269321 - RNA, 32 nt, Human
uucauaguuaccacuuacgcgaguagacagaa

SEQ ID NO: 269322 - RNA, 32 nt, Human
uucauaguuucauuuguucuugcccacaagcu

SEQ ID NO: 269323 - RNA, 32 nt, Human
uucauauacucagguuccaaagggccaacugc

SEQ ID NO: 269324 - RNA, 32 nt, Human
uucauauauguaccugcacauguacccaccug

SEQ ID NO: 269325 - RNA, 22 nt, Human
uucauauauuaaauugcacuua

SEQ ID NO: 269326 - RNA, 32 nt, Human
uucauauauuuuuauagcacuuuuggaaccua

SEQ ID NO: 269327 - RNA, 32 nt, Human
uucauaucaaguccucacccuccuuccacaua

SEQ ID NO: 269328 - RNA, 32 nt, Human
uucauaucauacaguuuucuaaaacaacuuca

SEQ ID NO: 269329 - RNA, 32 nt, Human
uucauauccacugauuuccugauguccauguc

SEQ ID NO: 269330 - RNA, 32 nt, Human
uucauaucccuugggcccucgugacuaguacu

SEQ ID NO: 269331 - RNA, 32 nt, Human
uucauauccuuucuucaaaaaucuaaaugaug

SEQ ID NO: 269332 - RNA, 24 nt, Human
uucauaucuagccuggucaacaua

SEQ ID NO: 269333 - RNA, 32 nt, Human
uucauaucuagccuggucaacauagcaagacc

SEQ ID NO: 269334 - RNA, 32 nt, Human
uucauaucuccugcuguuccaucccagcuuga

SEQ ID NO: 269335 - RNA, 32 nt, Human
uucauaucuguaauccuaacacuuugacaggc

SEQ ID NO: 269336 - RNA, 32 nt, Human
uucauaugaaguacugugccccuucccuucuu

SEQ ID NO: 269337 - RNA, 32 nt, Human
uucauaugaagugcuuuacucccaaccauuga

SEQ ID NO: 269338 - RNA, 32 nt, Human
uucauaugagaacuccuuccucccuuugaaga

SEQ ID NO: 269339 - RNA, 32 nt, Human
uucauaugcuguuuguucuggauuucuuuuaa

SEQ ID NO: 269340 - RNA, 32 nt, Human
uucauauggacagagaaaaugaaagaaaggga

SEQ ID NO: 269341 - RNA, 32 nt, Human
uucauauggcugcuccagccccacuucuuagc

SEQ ID NO: 269342 - RNA, 32 nt, Human
uucauauguacaacaaacuacuuucuucuuca

SEQ ID NO: 269343 - RNA, 32 nt, Human
uucauauuacucugcuuugugcacuuuaugga

SEQ ID NO: 269344 - RNA, 32 nt, Human
uucauauucauuggccaugcuauauucauucu

SEQ ID NO: 269345 - RNA, 32 nt, Human
uucauauuccaaugcuucgucugcucaauuau

SEQ ID NO: 269346 - RNA, 32 nt, Human
uucauauucccuuuugauauguuuaccuuguu

SEQ ID NO: 269347 - RNA, 32 nt, Human
uucauauucguuaauaaacuuugcuacuuugc

SEQ ID NO: 269348 - RNA, 32 nt, Human
uucauauucuauuauugaacaguauuaaugcu

SEQ ID NO: 269349 - RNA, 32 nt, Human
uucauauuugcaccuaagauauuuccaggcug

SEQ ID NO: 269350 - RNA, 32 nt, Human
uucauauuugccaagccauccccaccacccag

SEQ ID NO: 269351 - RNA, 32 nt, Human
uucauauuuguaucagcuuuugugcuaaaacu

SEQ ID NO: 269352 - RNA, 32 nt, Human
uucauauuuuaaacuaguuccauuccacaguu

SEQ ID NO: 269353 - RNA, 20 nt, Human
uucauauuuuuagugcuuca

SEQ ID NO: 269354 - RNA, 24 nt, Human
uucauauuuuucaguagagacggg

SEQ ID NO: 269355 - RNA, 20 nt, Human
uucaucaacauaguaaaaua

SEQ ID NO: 269356 - RNA, 32 nt, Human
uucaucaagauaagcauuucuuuccugaguuc

SEQ ID NO: 269357 - RNA, 32 nt, Human
uucaucaaggaaagccuggugaagccuuuacu

SEQ ID NO: 269358 - RNA, 32 nt, Human
uucaucacaagaaaccuacucuucugucaucu

SEQ ID NO: 269359 - RNA, 22 nt, Human
uucaucacaauucauggugcua

SEQ ID NO: 269360 - RNA, 32 nt, Human
uucaucacacacacccccuuccucccccucau

SEQ ID NO: 269361 - RNA, 32 nt, Human
uucaucaccaguacauuauauguuguaauauu

SEQ ID NO: 269362 - RNA, 32 nt, Human
uucaucacccccaguaaaaccccguacccuug

SEQ ID NO: 269363 - RNA, 32 nt, Human
uucaucacccugaugacaccaggauuugaaau

SEQ ID NO: 269364 - RNA, 32 nt, Human
uucaucacugcaacauuucucugacuagcaau

SEQ ID NO: 269365 - RNA, 32 nt, Human
uucaucagaaucauagcuuggaggcuucauag

SEQ ID NO: 269366 - RNA, 32 nt, Human
uucaucagacacauaccgaacacccucuauuu

SEQ ID NO: 269367 - RNA, 32 nt, Human
uucaucagacaccagaggacacacacagugcu

SEQ ID NO: 269368 - RNA, 32 nt, Human
uucaucagcugaucggccacugccucaccugg

SEQ ID NO: 269369 - RNA, 32 nt, Human
uucaucagcuuugcuaauucugcuuugaggca

SEQ ID NO: 269370 - RNA, 32 nt, Human
uucaucaggaagggaaagggcuuuggggucag

SEQ ID NO: 269371 - RNA, 32 nt, Human
uucaucagggugagggguucuccucugaggug

SEQ ID NO: 269372 - RNA, 32 nt, Human
uucaucaguaacucacuugcccauugagaacc

SEQ ID NO: 269373 - RNA, 32 nt, Human
uucaucagugcagaguuaggccagauucauuu

SEQ ID NO: 269374 - RNA, 32 nt, Human
uucaucaucaggcugcaaugacagaauguggu

SEQ ID NO: 269375 - RNA, 32 nt, Human
uucaucaugaacacauaaccuuuuguugugac

SEQ ID NO: 269376 - RNA, 32 nt, Human
uucaucaugucgaccccaccucuugggugggc

SEQ ID NO: 269377 - RNA, 32 nt, Human
uucaucauguucauuugauacacaagugaacu

SEQ ID NO: 269378 - RNA, 32 nt, Human
uucaucauguuggccaggcuggucuggaacuc

SEQ ID NO: 269379 - RNA, 32 nt, Human
uucaucauuaacauccuucuuuucuauugcuu

SEQ ID NO: 269380 - RNA, 32 nt, Human
uucaucauuucuguauugucuuucaauaaaga

SEQ ID NO: 269381 - RNA, 32 nt, Human
uucaucauuuuccacauacuuuacuucauuua

SEQ ID NO: 269382 - RNA, 32 nt, Human
uucauccaaauguuacccuguaauacuggcau

SEQ ID NO: 269383 - RNA, 32 nt, Human
uucauccacugcauugaguagugaccccgacg

SEQ ID NO: 269384 - RNA, 32 nt, Human
uucauccagaugcacagggccuagagccucag

SEQ ID NO: 269385 - RNA, 32 nt, Human
uucauccagcaaacauugaguaccaauuauuu

SEQ ID NO: 269386 - RNA, 32 nt, Human
uucauccaggacaguggcuacacuucagguag

SEQ ID NO: 269387 - RNA, 32 nt, Human
uucauccaucuauccauccaucauccguccau

SEQ ID NO: 269388 - RNA, 32 nt, Human
uucaucccaacagcccagcaagaaggaggaga

SEQ ID NO: 269389 - RNA, 23 nt, Human
uucaucccaaccccucucagagc

SEQ ID NO: 269390 - RNA, 22 nt, Human
uucaucccaaccgggcaucaca

SEQ ID NO: 269391 - RNA, 22 nt, Human
uucaucccaacugguucucaca

SEQ ID NO: 269392 - RNA, 24 nt, Human
uucaucccacucccuuucauccca

SEQ ID NO: 269393 - RNA, 32 nt, Human
uucaucccagccugggagacagagugagaccc

SEQ ID NO: 269394 - RNA, 32 nt, Human
uucauccccaacaugggucuauuuugugcuua

SEQ ID NO: 269395 - RNA, 32 nt, Human
uucauccccaggcuggagucaggcucagcugu

SEQ ID NO: 269396 - RNA, 32 nt, Human
uucaucccccaagaggaugcggugaaguuuaa

SEQ ID NO: 269397 - RNA, 32 nt, Human
uucauccccugccuccuucaccagccuggcuu

SEQ ID NO: 269398 - RNA, 32 nt, Human
uucaucccuaucagagaacuuucuugaggcuu

SEQ ID NO: 269399 - RNA, 19 nt, Human
uucauccuacccauugcca

SEQ ID NO: 269400 - RNA, 32 nt, Human
uucauccucagcagaacuccugccuggccucu

SEQ ID NO: 269401 - RNA, 32 nt, Human
uucauccucaugggauggugaggggcaggaaa

SEQ ID NO: 269402 - RNA, 32 nt, Human
uucauccugcagcccauccacaaccugcucau

SEQ ID NO: 269403 - RNA, 32 nt, Human
uucauccugccuggcucacgggucuccugucc

SEQ ID NO: 269404 - RNA, 32 nt, Human
uucauccugggguuacgugugauggaugucag

SEQ ID NO: 269405 - RNA, 32 nt, Human
uucauccuuccugcuucccaggccaguagauc

SEQ ID NO: 269406 - RNA, 32 nt, Human
uucauccuuuucuauuucccuagaaccuuaau

SEQ ID NO: 269407 - RNA, 32 nt, Human
uucaucgaggagaacuugguagauggggagaa

SEQ ID NO: 269408 - RNA, 32 nt, Human
uucaucgggaaagaaugagggagggagaauaa

SEQ ID NO: 269409 - RNA, 19 nt, Human
uucaucgggcucucagagg

SEQ ID NO: 269410 - RNA, 32 nt, Human
uucaucgugcuggaguccaagcgucuggacag

SEQ ID NO: 269411 - RNA, 32 nt, Human
uucaucguguuaccaggauggucucggucucc

SEQ ID NO: 269412 - RNA, 32 nt, Human
uucaucuacuccaaccuccacauuuuaccuga

SEQ ID NO: 269413 - RNA, 32 nt, Human
uucaucuagccuggccgcggccuuucgcugag

SEQ ID NO: 269414 - RNA, 32 nt, Human
uucaucuauguugguuucugucucguuccaga

SEQ ID NO: 269415 - RNA, 32 nt, Human
uucaucucaaagccaaagagcugccagguaaa

SEQ ID NO: 269416 - RNA, 32 nt, Human
uucaucucaaggggcccagccuccucuggacu

SEQ ID NO: 269417 - RNA, 32 nt, Human
uucaucucagcuuuugaugguacugaugaguc

SEQ ID NO: 269418 - RNA, 32 nt, Human
uucaucucccaaagugcugggauuacaggcgu

SEQ ID NO: 269419 - RNA, 32 nt, Human
uucaucucccagagaaugggauccuuugcauc

SEQ ID NO: 269420 - RNA, 32 nt, Human
uucaucuccugccaugauucugaggccucccc

SEQ ID NO: 269421 - RNA, 32 nt, Human
uucaucucuaaaacaaaacaaaacaaaauuac

SEQ ID NO: 269422 - RNA, 32 nt, Human
uucaucucugccucucuccaccccaccccaau

SEQ ID NO: 269423 - RNA, 32 nt, Human
uucaucucuuugccccaguuuugccaucugaa

SEQ ID NO: 269424 - RNA, 32 nt, Human
uucaucugacucugguuccuccuucuccucag

SEQ ID NO: 269425 - RNA, 31 nt, Human
uucaucugcacaaugaggcuguugaaaggaa

SEQ ID NO: 269426 - RNA, 32 nt, Human
uucaucugcaccugacaucaacucugcauuug

SEQ ID NO: 269427 - RNA, 32 nt, Human
uucaucugcucuuucaaaaugagugacucuuc

SEQ ID NO: 269428 - RNA, 32 nt, Human
uucaucugcugcugaaacuguguacgacaaag

SEQ ID NO: 269429 - RNA, 32 nt, Human
uucaucugcuguauccucucccauggagacaa

SEQ ID NO: 269430 - RNA, 32 nt, Human
uucaucugcugucuuucucuuuggaaagaauc

SEQ ID NO: 269431 - RNA, 32 nt, Human
uucaucugcuuccuccuuagggaaggcuggga

SEQ ID NO: 269432 - RNA, 32 nt, Human
uucaucuggaaccuggaucuaaggagggaaga

SEQ ID NO: 269433 - RNA, 32 nt, Human
uucaucuggcaccugggcccggagaucaccaa

SEQ ID NO: 269434 - RNA, 32 nt, Human
uucaucuggcuucucucucuuaagugagaaag

SEQ ID NO: 269435 - RNA, 32 nt, Human
uucaucuguaccacacccuggugaaaccuuug

SEQ ID NO: 269436 - RNA, 32 nt, Human
uucaucuguagccugagugaccccaaaaagau

SEQ ID NO: 269437 - RNA, 32 nt, Human
uucaucugucagcucacuccagcuucacaaau

SEQ ID NO: 269438 - RNA, 32 nt, Human
uucaucuguccucauucucugcgccuuucgca

SEQ ID NO: 269439 - RNA, 32 nt, Human
uucaucuuauucuucuugacuuuuggauuuuu

SEQ ID NO: 269440 - RNA, 32 nt, Human
uucaucuucaaacucuucagaagcagcaacag

SEQ ID NO: 269441 - RNA, 32 nt, Human
uucaucuucacugcauagccucaggcuaguga

SEQ ID NO: 269442 - RNA, 32 nt, Human
uucaucuuccaagccuguagcucuugguauac

SEQ ID NO: 269443 - RNA, 32 nt, Human
uucaucuucuaauguccucauccugguuucuu

SEQ ID NO: 269444 - RNA, 32 nt, Human
uucaucuucuuccuuucccuucucccaccuuc

SEQ ID NO: 269445 - RNA, 32 nt, Human
uucaucuuuaacugggcaccugagaugggaac

SEQ ID NO: 269446 - RNA, 32 nt, Human
uucaucuuuauucccuccaucaucuagacuug

SEQ ID NO: 269447 - RNA, 23 nt, Human
uucaucuuugaaaaagucugaga

SEQ ID NO: 269448 - RNA, 32 nt, Human
uucaucuuuguaggaaggucuggccugggguc

SEQ ID NO: 269449 - RNA, 32 nt, Human
uucaucuuuguggccccagagcccagaccaca

SEQ ID NO: 269450 - RNA, 32 nt, Human
uucaugaaaugagugcccaaacuggaaaauuu

SEQ ID NO: 269451 - RNA, 32 nt, Human
uucaugaacaagucccugccucauguuaauug

SEQ ID NO: 269452 - RNA, 21 nt, Human
uucaugaacaucccccuccca

SEQ ID NO: 269453 - RNA, 32 nt, Human
uucaugaagaggcccuccucugccuuucaaaa

SEQ ID NO: 269454 - RNA, 31 nt, Human
uucaugaaggacuucuuuuuguuucuaacua

SEQ ID NO: 269455 - RNA, 32 nt, Human
uucaugaaguauuuuggauuacagguauauua

SEQ ID NO: 269456 - RNA, 32 nt, Human
uucaugaaugugccgagugacuucugacucug

SEQ ID NO: 269457 - RNA, 32 nt, Human
uucaugacacugcacuccagccugggugauag

SEQ ID NO: 269458 - RNA, 32 nt, Human
uucaugacacugcacuccagccuuggcaacaa

SEQ ID NO: 269459 - RNA, 32 nt, Human
uucaugacacugcacuccagccuuggcaacag

SEQ ID NO: 269460 - RNA, 32 nt, Human
uucaugacagcaucauauacgacugaaagaag

SEQ ID NO: 269461 - RNA, 32 nt, Human
uucaugacauagugagggaaagaaaaagcuua

SEQ ID NO: 269462 - RNA, 32 nt, Human
uucaugaccacuuucaggagagccuaggacuc

SEQ ID NO: 269463 - RNA, 24 nt, Human
uucaugaccagccugggcaacaua

SEQ ID NO: 269464 - RNA, 32 nt, Human
uucaugaccagccugggcaacauagcgagacu

SEQ ID NO: 269465 - RNA, 24 nt, Human
uucaugaccagcuuaggcaacaug

SEQ ID NO: 269466 - RNA, 32 nt, Human
uucaugacccgccuggccaacauggugaaacc

SEQ ID NO: 269467 - RNA, 32 nt, Human
uucaugacggcagccaugccucccagaggcca

SEQ ID NO: 269468 - RNA, 32 nt, Human
uucaugacuacugcugcuagcucuucaagcca

SEQ ID NO: 269469 - RNA, 24 nt, Human
uucaugacuggcuuauuucauuua

SEQ ID NO: 269470 - RNA, 24 nt, Human
uucaugacuuaaguuguuggcuca

SEQ ID NO: 269471 - RNA, 32 nt, Human
uucaugacuuccucaaggccaaggccacguuc

SEQ ID NO: 269472 - RNA, 32 nt, Human
uucaugacuuuuccauguaucuaccucacuau

SEQ ID NO: 269473 - RNA, 28 nt, Human
uucaugagcuccagaggucacagcacgc

SEQ ID NO: 269474 - RNA, 32 nt, Human
uucaugagcucucaauuucauggcaggccaua

SEQ ID NO: 269475 - RNA, 32 nt, Human
uucaugaggggaaagggagaagggugguaaau

SEQ ID NO: 269476 - RNA, 32 nt, Human
uucaugaggggaggggcgaggggaagcccacc

SEQ ID NO: 269477 - RNA, 32 nt, Human
uucaugaggugacuucuguuuuggaggugaag

SEQ ID NO: 269478 - RNA, 21 nt, Human
uucaugagguguguugcacuu

SEQ ID NO: 269479 - RNA, 23 nt, Human
uucaugaucacuugggcaguaua

SEQ ID NO: 269480 - RNA, 32 nt, Human
uucaugaucauugcauauuucuugucauugaa

SEQ ID NO: 269481 - RNA, 32 nt, Human
uucaugaugugugugcuggagaucuggcacuc

SEQ ID NO: 269482 - RNA, 32 nt, Human
uucaugcaaaacuguuuucuucuuccuucuca

SEQ ID NO: 269483 - RNA, 28 nt, Human
uucaugcagcugguggaacuagaugugu

SEQ ID NO: 269484 - RNA, 32 nt, Human
uucaugcagggacgccuccaccuuucagccug

SEQ ID NO: 269485 - RNA, 32 nt, Human
uucaugcauccuggccuugccaagguucuggc

SEQ ID NO: 269486 - RNA, 32 nt, Human
uucaugcaugcauucauccgugacacaugagu

SEQ ID NO: 269487 - RNA, 32 nt, Human
uucaugcauuuuuaaagacagaaggccuugaa

SEQ ID NO: 269488 - RNA, 32 nt, Human
uucaugccacaccuccagcagagggccuggaa

SEQ ID NO: 269489 - RNA, 32 nt, Human
uucaugccacucggagcaaccagacuuacagc

SEQ ID NO: 269490 - RNA, 32 nt, Human
uucaugccacugcacuuccagccugggugaca

SEQ ID NO: 269491 - RNA, 32 nt, Human
uucaugccaguaaucccagcacuuucggaggc

SEQ ID NO: 269492 - RNA, 32 nt, Human
uucaugcccauuuucuaucacacugggcucca

SEQ ID NO: 269493 - RNA, 32 nt, Human
uucaugcccgcaaugaacgcugugcuggguuc

SEQ ID NO: 269494 - RNA, 32 nt, Human
uucaugcccuguaauccuagaacuuugggagg

SEQ ID NO: 269495 - RNA, 32 nt, Human
uucaugcccuguaauccuagcacuuugggagg

SEQ ID NO: 269496 - RNA, 32 nt, Human
uucaugccuauaaucccagcacuuugggagac

SEQ ID NO: 269497 - RNA, 32 nt, Human
uucaugccucuuccacacagcguuuccaugca

SEQ ID NO: 269498 - RNA, 32 nt, Human
uucaugccuggaaucccagcacuuugggaggc

SEQ ID NO: 269499 - RNA, 32 nt, Human
uucaugccuggaauccuagcacuuugggaggc

SEQ ID NO: 269500 - RNA, 32 nt, Human
uucaugccuggguggccaaacaacagucuuca

SEQ ID NO: 269501 - RNA, 32 nt, Human
uucaugccuguaauccaagcacuuugagaggc

SEQ ID NO: 269502 - RNA, 32 nt, Human
uucaugccuguaauccagcacuuugggaggcu

SEQ ID NO: 269503 - RNA, 18 nt, Human
uucaugccuguaauccca

SEQ ID NO: 269504 - RNA, 32 nt, Human
uucaugccuguaaucccaacauuuugggaggc

SEQ ID NO: 269505 - RNA, 32 nt, Human
uucaugccuguaaucccaaugcuuugggaggc

SEQ ID NO: 269506 - RNA, 32 nt, Human
uucaugccuguaaucccagcacuaugggaggc

SEQ ID NO: 269507 - RNA, 32 nt, Human
uucaugccuguaaucccagcacuucacuuugg

SEQ ID NO: 269508 - RNA, 32 nt, Human
uucaugccuguaaucccagcacuugggaggcc

SEQ ID NO: 269509 - RNA, 32 nt, Human
uucaugccuguaaucccagcacuuuggaaggc

SEQ ID NO: 269510 - RNA, 32 nt, Human
uucaugccuguaaucccagcacuuugggaggc

SEQ ID NO: 269511 - RNA, 32 nt, Human
uucaugccuguaaucccaguacuuuggaaagc

SEQ ID NO: 269512 - RNA, 32 nt, Human
uucaugccuguaaucccaguacuuugggaggc

SEQ ID NO: 269513 - RNA, 32 nt, Human
uucaugccuguaauccgagugcuuuaggaggc

SEQ ID NO: 269514 - RNA, 32 nt, Human
uucaugccuuaaucccagcacuuugggaggcc

SEQ ID NO: 269515 - RNA, 18 nt, Human
uucaugccuuccugccuc

SEQ ID NO: 269516 - RNA, 32 nt, Human
uucaugccuuugacaagcauuuuugugccccc

SEQ ID NO: 269517 - RNA, 32 nt, Human
uucaugcucagcccugacuggugcuauaggcu

SEQ ID NO: 269518 - RNA, 21 nt, Human
uucaugcuccauuuuuaacca

SEQ ID NO: 269519 - RNA, 32 nt, Human
uucaugcucuccccaucccaguuuuuaggaug

SEQ ID NO: 269520 - RNA, 22 nt, Human
uucaugcucugagccucugcca

SEQ ID NO: 269521 - RNA, 24 nt, Human
uucaugcugaauacuuuucagcca

SEQ ID NO: 269522 - RNA, 21 nt, Human
uucaugcugcaguccaagcca

SEQ ID NO: 269523 - RNA, 32 nt, Human
uucaugcugcugcccaggcuggagugcagugg

SEQ ID NO: 269524 - RNA, 32 nt, Human
uucaugcuguaaucccaucacuuugggaggcc

SEQ ID NO: 269525 - RNA, 32 nt, Human
uucaugcuguagucacuccagaccauggagug

SEQ ID NO: 269526 - RNA, 32 nt, Human
uucaugcuguaugugcccgugccuguagcuuc

SEQ ID NO: 269527 - RNA, 23 nt, Human
uucaugcuuguaucuugcauuca

SEQ ID NO: 269528 - RNA, 32 nt, Human
uucauggaaaugguugacauuacacaugguau

SEQ ID NO: 269529 - RNA, 32 nt, Human
uucauggaacuuggacauacaccaccaggucc

SEQ ID NO: 269530 - RNA, 32 nt, Human
uucauggacaagggguuucaauggacagccug

SEQ ID NO: 269531 - RNA, 32 nt, Human
uucauggacacaaguugauuacaugguuuuua

SEQ ID NO: 269532 - RNA, 28 nt, Human
uucauggagaaauggaaucacacuucaa

SEQ ID NO: 269533 - RNA, 32 nt, Human
uucauggagaggggagaaggaagcuuccaagu

SEQ ID NO: 269534 - RNA, 32 nt, Human
uucauggagcacugacagcagugagucuuccc

SEQ ID NO: 269535 - RNA, 32 nt, Human
uucauggaggcagaugcugguggccucagcgg

SEQ ID NO: 269536 - RNA, 32 nt, Human
uucauggaugaaauugacucuuuuggcuccuc

SEQ ID NO: 269537 - RNA, 32 nt, Human
uucauggcaaagugauugagcugagaauugaa

SEQ ID NO: 269538 - RNA, 23 nt, Human
uucauggcaaugauauguauuca

SEQ ID NO: 269539 - RNA, 32 nt, Human
uucauggcagggacauuugcuuccuucacagg

SEQ ID NO: 269540 - RNA, 32 nt, Human
uucauggcauagaugaugauuuacagacaauu

SEQ ID NO: 269541 - RNA, 32 nt, Human
uucauggcauuugggggcucaccccaccucca

SEQ ID NO: 269542 - RNA, 32 nt, Human
uucauggcucacugcaaccuugacgucccagg

SEQ ID NO: 269543 - RNA, 32 nt, Human
uucauggcucagaagaaagaacauguuuagcu

SEQ ID NO: 269544 - RNA, 21 nt, Human
uucauggcugcuauuuauuca

SEQ ID NO: 269545 - RNA, 23 nt, Human
uucauggcuuaauagugcauuua

SEQ ID NO: 269546 - RNA, 32 nt, Human
uucauggcuucugcuuuuuaaucuuaggcuca

SEQ ID NO: 269547 - RNA, 32 nt, Human
uucauggcuuuuccugagguggcuggaaaccu

SEQ ID NO: 269548 - RNA, 32 nt, Human
uucaugggaagagagaaggaaggcccugggua

SEQ ID NO: 269549 - RNA, 32 nt, Human
uucaugggcuacaacuagcacagggaauuuag

SEQ ID NO: 269550 - RNA, 32 nt, Human
uucaugggcuguggccucugcagcgaccugcc

SEQ ID NO: 269551 - RNA, 32 nt, Human
uucaugggggcucuuucgcugcagccuccacc

SEQ ID NO: 269552 - RNA, 32 nt, Human
uucaugggggcugaggcagaacccaggagcuc

SEQ ID NO: 269553 - RNA, 32 nt, Human
uucaugggguuuuugcccuggagccucagcag

SEQ ID NO: 269554 - RNA, 32 nt, Human
uucauggguccccuaguuaggcccagauaaaa

SEQ ID NO: 269555 - RNA, 32 nt, Human
uucaugguacguauucucuagcacagucugag

SEQ ID NO: 269556 - RNA, 28 nt, Human
uucauggucaucugguuccaaagcccau

SEQ ID NO: 269557 - RNA, 32 nt, Human
uucauggugcuacaauaaccucagaaucuacu

SEQ ID NO: 269558 - RNA, 32 nt, Human
uucauggugcugcuccugcuaugguuccacag

SEQ ID NO: 269559 - RNA, 32 nt, Human
uucaugguuagaaacacaagcuggaggccgga

SEQ ID NO: 269560 - RNA, 32 nt, Human
uucaugguucaaguauuaagcaguucauucua

SEQ ID NO: 269561 - RNA, 23 nt, Human
uucaugguuuauauuuucacuua

SEQ ID NO: 269562 - RNA, 32 nt, Human
uucauguaaaacugaugugugaaugacauugc

SEQ ID NO: 269563 - RNA, 32 nt, Human
uucauguaagugagagggagacagaaagaaag

SEQ ID NO: 269564 - RNA, 32 nt, Human
uucauguaaucuucugugauaauuuggcuugg

SEQ ID NO: 269565 - RNA, 32 nt, Human
uucauguaauuguaugucuguguguguuuuau

SEQ ID NO: 269566 - RNA, 20 nt, Human
uucauguacauccauggugu

SEQ ID NO: 269567 - RNA, 21 nt, Human
uucauguacaugugucuauuc

SEQ ID NO: 269568 - RNA, 32 nt, Human
uucauguaccugcacaugugaccuuugugaac

SEQ ID NO: 269569 - RNA, 32 nt, Human
uucauguauaucuccccuagugacuaucacag

SEQ ID NO: 269570 - RNA, 32 nt, Human
uucauguauaucuccccuagugacuaucacgg

SEQ ID NO: 269571 - RNA, 32 nt, Human
uucauguaucuucugaauucuauccgugaauc

SEQ ID NO: 269572 - RNA, 32 nt, Human
uucauguauucugccaaaagcauuguuuucca

SEQ ID NO: 269573 - RNA, 32 nt, Human
uucauguauuucuuuucugucucuccaaugca

SEQ ID NO: 269574 - RNA, 32 nt, Human
uucauguccagaccucggcaguggcgugcacu

SEQ ID NO: 269575 - RNA, 32 nt, Human
uucauguccccaggaauggaaguggacccuag

SEQ ID NO: 269576 - RNA, 32 nt, Human
uucaugucccuccaagauuugagaucaauuua

SEQ ID NO: 269577 - RNA, 32 nt, Human
uucauguccuuuguagaacaugggugaagcug

SEQ ID NO: 269578 - RNA, 32 nt, Human
uucaugucuaggauaacuugcuuucuucuuuc

SEQ ID NO: 269579 - RNA, 32 nt, Human
uucaugucuguaaucccagcacuuugugaggc

SEQ ID NO: 269580 - RNA, 32 nt, Human
uucaugucuuacugaaacauuuugccagacuu

SEQ ID NO: 269581 - RNA, 32 nt, Human
uucaugucuucauuuugggaugcagcuaauau

SEQ ID NO: 269582 - RNA, 32 nt, Human
uucaugugcccccuacccuccaccccacugcc

SEQ ID NO: 269583 - RNA, 32 nt, Human
uucauguggacacacaaaggcaaacagaucug

SEQ ID NO: 269584 - RNA, 32 nt, Human
uucauguggcaccugccugccauguccacaac

SEQ ID NO: 269585 - RNA, 32 nt, Human
uucauguggcucagugccuuccucucucuacc

SEQ ID NO: 269586 - RNA, 32 nt, Human
uucaugugucaccaaguacuuuucucaugaga

SEQ ID NO: 269587 - RNA, 29 nt, Human
uucaugugucugugcauccuaggaaacaa

SEQ ID NO: 269588 - RNA, 29 nt, Human
uucauguguggcuuuuaagagcagguuug

SEQ ID NO: 269589 - RNA, 32 nt, Human
uucaugugugggcaccagggcugcggcuggaa

SEQ ID NO: 269590 - RNA, 32 nt, Human
uucauguuaaauauucaacaccaaugaucuac

SEQ ID NO: 269591 - RNA, 25 nt, Human
uucauguuaauauuauuuguacuua

SEQ ID NO: 269592 - RNA, 31 nt, Human
uucauguucaauaaauauuggguguauugaa

SEQ ID NO: 269593 - RNA, 32 nt, Human
uucauguucagaaaauucuugcucauccaggc

SEQ ID NO: 269594 - RNA, 32 nt, Human
uucauguuccaggggcgcuuggcaucucccau

SEQ ID NO: 269595 - RNA, 32 nt, Human
uucauguuccuaugcggaucuaaugccacugc

SEQ ID NO: 269596 - RNA, 32 nt, Human
uucauguucucuucucccagcaggccucauug

SEQ ID NO: 269597 - RNA, 32 nt, Human
uucauguuguuuucugugaugugcguugucug

SEQ ID NO: 269598 - RNA, 32 nt, Human
uucauguuuugugucagagaaaacauguacaa

SEQ ID NO: 269599 - RNA, 32 nt, Human
uucauguuuuugaaacagaaccauaaagcaua

SEQ ID NO: 269600 - RNA, 32 nt, Human
uucauuaaauuuuaacagcuguauuuaguuau

SEQ ID NO: 269601 - RNA, 32 nt, Human
uucauuaaccaccaaaccucuaccucuucucu

SEQ ID NO: 269602 - RNA, 32 nt, Human
uucauuaagcuucauugccaauuagcuaggaa

SEQ ID NO: 269603 - RNA, 32 nt, Human
uucauuacaaaugucucagcauugguuaacua

SEQ ID NO: 269604 - RNA, 32 nt, Human
uucauuacacuaucuucucugccuuuguacau

SEQ ID NO: 269605 - RNA, 32 nt, Human
uucauuacagaguccagguggccugcaguuga

SEQ ID NO: 269606 - RNA, 32 nt, Human
uucauuaccaacacugcagauucccauugagu

SEQ ID NO: 269607 - RNA, 32 nt, Human
uucauuaccuguagcuuugggcagauuugcaa

SEQ ID NO: 269608 - RNA, 32 nt, Human
uucauuacucagcuaacauuuagucuacucuu

SEQ ID NO: 269609 - RNA, 32 nt, Human
uucauuacuccuccuccagauaccaacugcug

SEQ ID NO: 269610 - RNA, 32 nt, Human
uucauuacuuuucugaaauucaaacaaauucu

SEQ ID NO: 269611 - RNA, 32 nt, Human
uucauuagcagcuuuuccuccucuucccugca

SEQ ID NO: 269612 - RNA, 32 nt, Human
uucauuagcuucaaagagaagcuguauuuaca

SEQ ID NO: 269613 - RNA, 32 nt, Human
uucauuagucuagacugggaauggggagggga

SEQ ID NO: 269614 - RNA, 32 nt, Human
uucauuauacaugaaauucaacuuuccaaaua

SEQ ID NO: 269615 - RNA, 32 nt, Human
uucauuauaucuaauuauuuugcaguugggca

SEQ ID NO: 269616 - RNA, 32 nt, Human
uucauuauggugcugggaagcucugucuuuga

SEQ ID NO: 269617 - RNA, 32 nt, Human
uucauuauuuggaaauuuagggguagaaaaug

SEQ ID NO: 269618 - RNA, 32 nt, Human
uucauuauuuucuuuucuuucuuccaagugca

SEQ ID NO: 269619 - RNA, 32 nt, Human
uucauucaacaaacacauaggugcuggggaug

SEQ ID NO: 269620 - RNA, 32 nt, Human
uucauucacaucuacgcgccugagugguacug

SEQ ID NO: 269621 - RNA, 32 nt, Human
uucauucacaugcucaucugagaagacuuaag

SEQ ID NO: 269622 - RNA, 21 nt, Human
uucauucaccccuccccuccc

SEQ ID NO: 269623 - RNA, 22 nt, Human
uucauucacuggaauuuacuca

SEQ ID NO: 269624 - RNA, 32 nt, Human
uucauucagagaauauuuaugaaaugccuacu

SEQ ID NO: 269625 - RNA, 32 nt, Human
uucauucagcaaccuugucuaagugguuuaug

SEQ ID NO: 269626 - RNA, 32 nt, Human
uucauucagccuguguguccuaaagccucccu

SEQ ID NO: 269627 - RNA, 32 nt, Human
uucauucagcuggcugugcugugcuguggacc

SEQ ID NO: 269628 - RNA, 32 nt, Human
uucauucagggugucugugcucugacugcaau

SEQ ID NO: 269629 - RNA, 32 nt, Human
uucauucagggugucugugcucugacuguaau

SEQ ID NO: 269630 - RNA, 26 nt, Human
uucauucaguguauccauugguguua

SEQ ID NO: 269631 - RNA, 32 nt, Human
uucauucauccagcaaacauugaguaccaauu

SEQ ID NO: 269632 - RNA, 32 nt, Human
uucauucauuauuaccugacaguauuaaacua

SEQ ID NO: 269633 - RNA, 32 nt, Human
uucauucauucauucauucauccaucagacac

SEQ ID NO: 269634 - RNA, 32 nt, Human
uucauucauuuaccuuauuaagcuuuucuuag

SEQ ID NO: 269635 - RNA, 32 nt, Human
uucauuccacgguccauuccacagcuuguucc

SEQ ID NO: 269636 - RNA, 23 nt, Human
uucauuccagccugggcaacaug

SEQ ID NO: 269637 - RNA, 32 nt, Human
uucauuccagccugggcaacaugagugaaagu

SEQ ID NO: 269638 - RNA, 21 nt, Human
uucauuccagccugggcgaca

SEQ ID NO: 269639 - RNA, 32 nt, Human
uucauuccagguggccagagcgaguggggccg

SEQ ID NO: 269640 - RNA, 32 nt, Human
uucauuccaugaugcauauuacuggauuagau

SEQ ID NO: 269641 - RNA, 32 nt, Human
uucauuccauucccuuucaucugugcucauac

SEQ ID NO: 269642 - RNA, 32 nt, Human
uucauuccauuucugcccacucccucuccucu

SEQ ID NO: 269643 - RNA, 32 nt, Human
uucauucccacauguuuaaagacauucguagg

SEQ ID NO: 269644 - RNA, 32 nt, Human
uucauucccccagggaaacagcaccuguagaa

SEQ ID NO: 269645 - RNA, 32 nt, Human
uucauucccucacuccugccuuucucauuugu

SEQ ID NO: 269646 - RNA, 32 nt, Human
uucauuccucaccuuuauccuguuaucucuau

SEQ ID NO: 269647 - RNA, 32 nt, Human
uucauuccucauaucuauccuuuucuccccuu

SEQ ID NO: 269648 - RNA, 32 nt, Human
uucauuccuccccuggcucuucucccucuuca

SEQ ID NO: 269649 - RNA, 32 nt, Human
uucauuccuccugguuauugguuuguuuguca

SEQ ID NO: 269650 - RNA, 32 nt, Human
uucauuccuugggccagcuucucagguggcuu

SEQ ID NO: 269651 - RNA, 32 nt, Human
uucauucuacacuucccugaaauuccauuuuu

SEQ ID NO: 269652 - RNA, 32 nt, Human
uucauucuagggcagugccaggaaguauauug

SEQ ID NO: 269653 - RNA, 32 nt, Human
uucauucuaucgcccaggcuggagugcaaugg

SEQ ID NO: 269654 - RNA, 32 nt, Human
uucauucuccacgcagccuggugauggcaggc

SEQ ID NO: 269655 - RNA, 32 nt, Human
uucauucucuaaugaaaacaaaacauaaaaac

SEQ ID NO: 269656 - RNA, 32 nt, Human
uucauucugaaggagcagaaacauaaucaauc

SEQ ID NO: 269657 - RNA, 32 nt, Human
uucauucugaaggcuccuguguauacacauua

SEQ ID NO: 269658 - RNA, 18 nt, Human
uucauucugaugccuccc

SEQ ID NO: 269659 - RNA, 26 nt, Human
uucauucugcaggguucucccuccca

SEQ ID NO: 269660 - RNA, 32 nt, Human
uucauucugcaguugucuggaagccugggugg

SEQ ID NO: 269661 - RNA, 32 nt, Human
uucauucugucacccaggcuggagugcaaagg

SEQ ID NO: 269662 - RNA, 32 nt, Human
uucauucuguccuucagggaaggcagaagaaa

SEQ ID NO: 269663 - RNA, 32 nt, Human
uucauucuucacuuaggggaagugaaaucgcu

SEQ ID NO: 269664 - RNA, 32 nt, Human
uucauucuugucccagaauucuguugagaaca

SEQ ID NO: 269665 - RNA, 32 nt, Human
uucauucuuugcagcuuugcuaauccaguugc

SEQ ID NO: 269666 - RNA, 32 nt, Human
uucauucuuugucccucuaguuuugccuuuug

SEQ ID NO: 269667 - RNA, 32 nt, Human
uucauucuuuuccccucucuuuucucauuuau

SEQ ID NO: 269668 - RNA, 32 nt, Human
uucauugaacuuaaagagugaaaaccauguaa

SEQ ID NO: 269669 - RNA, 32 nt, Human
uucauugaucuaugcuuugaguuugcuuucuc

SEQ ID NO: 269670 - RNA, 32 nt, Human
uucauugcacacacccacaaaugcaaaucauu

SEQ ID NO: 269671 - RNA, 31 nt, Human
uucauugcacuuugauuagcagcggaacaag

SEQ ID NO: 269672 - RNA, 32 nt, Human
uucauugcagagcgaggugaccaaacugagga

SEQ ID NO: 269673 - RNA, 32 nt, Human
uucauugcagcugcuuucugcucccucuaugg

SEQ ID NO: 269674 - RNA, 32 nt, Human
uucauugccucucuccccuuggcgucugauga

SEQ ID NO: 269675 - RNA, 32 nt, Human
uucauugcggcugcuuucugcucccuccaugg

SEQ ID NO: 269676 - RNA, 32 nt, Human
uucauugcuaugcuaauuuuuguauuuuucau

SEQ ID NO: 269677 - RNA, 32 nt, Human
uucauugcuuggauucaauccuccgggcggcu

SEQ ID NO: 269678 - RNA, 32 nt, Human
uucauuggccugaccucugcuucucaggcuaa

SEQ ID NO: 269679 - RNA, 32 nt, Human
uucauuggcucccaaucucugauaauaucaag

SEQ ID NO: 269680 - RNA, 32 nt, Human
uucauuggcuucaaaauccaaaaguuuauuuu

SEQ ID NO: 269681 - RNA, 32 nt, Human
uucauuggguuuuauacuggcuuucuuuuugg

SEQ ID NO: 269682 - RNA, 24 nt, Human
uucauuggugaggauuuccuuuga

SEQ ID NO: 269683 - RNA, 32 nt, Human
uucauuguagccuccgccucagccucuggagu

SEQ ID NO: 269684 - RNA, 32 nt, Human
uucauuguauauuugucucugaugcaaaaagg

SEQ ID NO: 269685 - RNA, 32 nt, Human
uucauugucacccaggcuggaguacaguggca

SEQ ID NO: 269686 - RNA, 32 nt, Human
uucauugugaccacucugaaguaagagcaaug

SEQ ID NO: 269687 - RNA, 23 nt, Human
uucauugugcaacuuucuagcca

SEQ ID NO: 269688 - RNA, 32 nt, Human
uucauuguggagagaaaaagcaaaugguauac

SEQ ID NO: 269689 - RNA, 32 nt, Human
uucauuguggagagaaaaagcaaaugguaugc

SEQ ID NO: 269690 - RNA, 32 nt, Human
uucauuguguuauugacauccaugucucucgu

SEQ ID NO: 269691 - RNA, 32 nt, Human
uucauuguucaaauauucauugcacaguggau

SEQ ID NO: 269692 - RNA, 32 nt, Human
uucauuguugaaacuugugagcauuuugaucc

SEQ ID NO: 269693 - RNA, 23 nt, Human
uucauuguuuaaaugguuugccu

SEQ ID NO: 269694 - RNA, 32 nt, Human
uucauuguuugcagcggaucacuggacaucaa

SEQ ID NO: 269695 - RNA, 32 nt, Human
uucauuguuuuacuuuugucuuccucacuagu

SEQ ID NO: 269696 - RNA, 32 nt, Human
uucauuguuuuuaaauuuagacuucuuauuuc

SEQ ID NO: 269697 - RNA, 32 nt, Human
uucauuuaagccuucagaaauaugagccaauu

SEQ ID NO: 269698 - RNA, 32 nt, Human
uucauuuaccucugccccaguuguuucuacua

SEQ ID NO: 269699 - RNA, 32 nt, Human
uucauuuauauuuuccuuacuaauaucuaaua

SEQ ID NO: 269700 - RNA, 32 nt, Human
uucauuucaagaaaaugcauauuuuccaauaa

SEQ ID NO: 269701 - RNA, 32 nt, Human
uucauuucacagucuaauucucccagacuagg

SEQ ID NO: 269702 - RNA, 32 nt, Human
uucauuucacagucuucuauuguuggaccacu

SEQ ID NO: 269703 - RNA, 32 nt, Human
uucauuucacugcacaucuagagaaaaacaaa

SEQ ID NO: 269704 - RNA, 32 nt, Human
uucauuucaguccuuucccccaccucagcguc

SEQ ID NO: 269705 - RNA, 32 nt, Human
uucauuuccaaaacauccaucuuucuccacuu

SEQ ID NO: 269706 - RNA, 32 nt, Human
uucauuuccuggaaguacauaggguuugguuu

SEQ ID NO: 269707 - RNA, 32 nt, Human
uucauuuccugggaaugacagcagaaagguga

SEQ ID NO: 269708 - RNA, 32 nt, Human
uucauuuccuuggggcugcaguuuugugguug

SEQ ID NO: 269709 - RNA, 22 nt, Human
uucauuucggugacagaagaga

SEQ ID NO: 269710 - RNA, 32 nt, Human
uucauuucucauuguggguuuaacuucuaaaa

SEQ ID NO: 269711 - RNA, 32 nt, Human
uucauuucucucugccucaauuccucuaguuu

SEQ ID NO: 269712 - RNA, 32 nt, Human
uucauuucucuguuaagaugcagccauccaug

SEQ ID NO: 269713 - RNA, 19 nt, Human
uucauuucuuccacugcca

SEQ ID NO: 269714 - RNA, 32 nt, Human
uucauuugaaguuugcuuuggcuaaauuuuga

SEQ ID NO: 269715 - RNA, 32 nt, Human
uucauuugagccugaacccccagaggcaggga

SEQ ID NO: 269716 - RNA, 32 nt, Human
uucauuugauauuaucuauauguauguaguug

SEQ ID NO: 269717 - RNA, 32 nt, Human
uucauuugaugcagauauuugcacaaugguuu

SEQ ID NO: 269718 - RNA, 32 nt, Human
uucauuugauuuuguuaagagugcaguauugc

SEQ ID NO: 269719 - RNA, 32 nt, Human
uucauuugauuuuguugcucccucucuccugg

SEQ ID NO: 269720 - RNA, 32 nt, Human
uucauuugcaguaucuacaucgaaugucaaaa

SEQ ID NO: 269721 - RNA, 32 nt, Human
uucauuugcuagugggacuacacauggcuuua

SEQ ID NO: 269722 - RNA, 32 nt, Human
uucauuuggaaaggaaaagucaaccaggcaca

SEQ ID NO: 269723 - RNA, 32 nt, Human
uucauuugggaaagcuaccauugauuugggag

SEQ ID NO: 269724 - RNA, 32 nt, Human
uucauuuguaggaaacugggaaauaaaaaccu

SEQ ID NO: 269725 - RNA, 32 nt, Human
uucauuuguccaugguagcccaucucuccuaa

SEQ ID NO: 269726 - RNA, 32 nt, Human
uucauuugugaguguuaaugugcugcuguuuu

SEQ ID NO: 269727 - RNA, 32 nt, Human
uucauuuguuacuuucagcuauuaaaggauac

SEQ ID NO: 269728 - RNA, 32 nt, Human
uucauuuuacuuccuuuucucugagaaaggua

SEQ ID NO: 269729 - RNA, 32 nt, Human
uucauuuuagcuucaaaacaagcugggcacac

SEQ ID NO: 269730 - RNA, 32 nt, Human
uucauuuuauuucucacuguauuuuccucaac

SEQ ID NO: 269731 - RNA, 32 nt, Human
uucauuuuccaaaugcaggagucuuggugcac

SEQ ID NO: 269732 - RNA, 32 nt, Human
uucauuuucuacacauuucaggauuuguuuua

SEQ ID NO: 269733 - RNA, 32 nt, Human
uucauuuucuuuagaaucauuugcuacuguuu

SEQ ID NO: 269734 - RNA, 32 nt, Human
uucauuuuguuuagguugaggacauacauuca

SEQ ID NO: 269735 - RNA, 32 nt, Human
uucauuuuuaucuguaccgauguaugaaagac

SEQ ID NO: 269736 - RNA, 32 nt, Human
uucauuuuucuccagaguccccaaagccacau

SEQ ID NO: 269737 - RNA, 22 nt, Human
uuccaaaaauacaaacacuagu

SEQ ID NO: 269738 - RNA, 32 nt, Human
uuccaaaacagccuguucucuccucucuccuc

SEQ ID NO: 269739 - RNA, 21 nt, Human
uuccaaaacuguguacuuguc

SEQ ID NO: 269740 - RNA, 32 nt, Human
uuccaaaagagagggauggcuuucccagaaga

SEQ ID NO: 269741 - RNA, 32 nt, Human
uuccaaaagauugcuguagcucucacagggaa

SEQ ID NO: 269742 - RNA, 32 nt, Human
uuccaaaagcuucacguuacagcauggaagcu

SEQ ID NO: 269743 - RNA, 32 nt, Human
uuccaaaagugcugggauuacaggcgugagcc

SEQ ID NO: 269744 - RNA, 32 nt, Human
uuccaaaaugucaccauuccuguaccugguuc

SEQ ID NO: 269745 - RNA, 32 nt, Human
uuccaaaauucagauucugccucugcggauaa

SEQ ID NO: 269746 - RNA, 21 nt, Human
uuccaaaauucccucuucugc

SEQ ID NO: 269747 - RNA, 32 nt, Human
uuccaaacaaaacaaaaaugucucuagguuua

SEQ ID NO: 269748 - RNA, 32 nt, Human
uuccaaacauggauuccucaacaaggccaaaa

SEQ ID NO: 269749 - RNA, 32 nt, Human
uuccaaacugaacuguagaagcagagcagcag

SEQ ID NO: 269750 - RNA, 32 nt, Human
uuccaaagaacccaaguaguauagagaccaaa

SEQ ID NO: 269751 - RNA, 32 nt, Human
uuccaaagagcccaccaccauuucacugacuc

SEQ ID NO: 269752 - RNA, 32 nt, Human
uuccaaagagguggaauuucaucagaauggag

SEQ ID NO: 269753 - RNA, 32 nt, Human
uuccaaagagucaucagaagaggaaaaaugaa

SEQ ID NO: 269754 - RNA, 32 nt, Human
uuccaaagccuuccaaacccaaaaagcuggga

SEQ ID NO: 269755 - RNA, 32 nt, Human
uuccaaagcuugcuuccuuccuccuggcugca

SEQ ID NO: 269756 - RNA, 24 nt, Human
uuccaaaggaaauaccagcuuguc

SEQ ID NO: 269757 - RNA, 32 nt, Human
uuccaaagggagcauuggaggagauugagaua

SEQ ID NO: 269758 - RNA, 21 nt, Human
uuccaaagggauaaucuugca

SEQ ID NO: 269759 - RNA, 20 nt, Human
uuccaaagggguugucuuug

SEQ ID NO: 269760 - RNA, 22 nt, Human
uuccaaagguccauacugguua

SEQ ID NO: 269761 - RNA, 19 nt, Human
uuccaaaggugguacuugu

SEQ ID NO: 269762 - RNA, 32 nt, Human
uuccaaagucacuuccacauuuuggguauuuc

SEQ ID NO: 269763 - RNA, 32 nt, Human
uuccaaaguccccagcaguggcagguguacac

SEQ ID NO: 269764 - RNA, 32 nt, Human
uuccaaaguucuuaucucuagcucagacaucu

SEQ ID NO: 269765 - RNA, 18 nt, Human
uuccaaauaaaacuugag

SEQ ID NO: 269766 - RNA, 21 nt, Human
uuccaaauaaggccuuguuca

SEQ ID NO: 269767 - RNA, 32 nt, Human
uuccaaauauccacuugcagacacuacaaaaa

SEQ ID NO: 269768 - RNA, 23 nt, Human
uuccaaaucacugggauuauagg

SEQ ID NO: 269769 - RNA, 32 nt, Human
uuccaaaucaggaaccacaaucugcccucuaa

SEQ ID NO: 269770 - RNA, 32 nt, Human
uuccaaaucaucugggacaugacccacucccc

SEQ ID NO: 269771 - RNA, 26 nt, Human
uuccaaaugaacuugcacuuguuaua

SEQ ID NO: 269772 - RNA, 27 nt, Human
uuccaaaugguaaaugaacacucacua

SEQ ID NO: 269773 - RNA, 32 nt, Human
uuccaaauguccugaauuccuguucauuaaua

SEQ ID NO: 269774 - RNA, 32 nt, Human
uuccaaauuccauuaaggucagcccaccaugu

SEQ ID NO: 269775 - RNA, 32 nt, Human
uuccaacaaucaggaccccauccugucuguuc

SEQ ID NO: 269776 - RNA, 22 nt, Human
uuccaacacacugcaccacagg

SEQ ID NO: 269777 - RNA, 32 nt, Human
uuccaacaccuugccucuuguuucaccaugaa

SEQ ID NO: 269778 - RNA, 32 nt, Human
uuccaacaucuucguucuuucucacugaccga

SEQ ID NO: 269779 - RNA, 32 nt, Human
uuccaaccacaucugcuggcucugggguccca

SEQ ID NO: 269780 - RNA, 32 nt, Human
uuccaaccaccaccaccugacaacccugcaug

SEQ ID NO: 269781 - RNA, 32 nt, Human
uuccaacccacuggcccagggccaccucuugc

SEQ ID NO: 269782 - RNA, 32 nt, Human
uuccaacccagcccuggacugaggauggaugg

SEQ ID NO: 269783 - RNA, 32 nt, Human
uuccaaccuaagauaguuaacuaccugagacc

SEQ ID NO: 269784 - RNA, 23 nt, Human
uuccaaccucccccacugcggag

SEQ ID NO: 269785 - RNA, 32 nt, Human
uuccaaccuuuuuaucuguucucuccaccuuc

SEQ ID NO: 269786 - RNA, 32 nt, Human
uuccaacggccagcaaaaagugaccggagagg

SEQ ID NO: 269787 - RNA, 32 nt, Human
uuccaacuaauguguauuaugugccuaauuuu

SEQ ID NO: 269788 - RNA, 32 nt, Human
uuccaacuacagccgccaccugcuguccuccu

SEQ ID NO: 269789 - RNA, 32 nt, Human
uuccaacuccacccucuccugccaagcaaucc

SEQ ID NO: 269790 - RNA, 32 nt, Human
uuccaacucuccccauuuuccuguucgacugg

SEQ ID NO: 269791 - RNA, 32 nt, Human
uuccaacuuccucagucuuuucugccucaacu

SEQ ID NO: 269792 - RNA, 32 nt, Human
uuccaacuuccucuugcagcaggaaagaaugc

SEQ ID NO: 269793 - RNA, 23 nt, Human
uuccaacuuguccaaaagcuuuc

SEQ ID NO: 269794 - RNA, 32 nt, Human
uuccaacuuuccauuccccaucaugcuggggg

SEQ ID NO: 269795 - RNA, 32 nt, Human
uuccaacuuucccucccuggggguguaaagga

SEQ ID NO: 269796 - RNA, 32 nt, Human
uuccaacuuugucagucuuuucugccucaacu

SEQ ID NO: 269797 - RNA, 32 nt, Human
uuccaagaaagaggaggagaguugaaaagaga

SEQ ID NO: 269798 - RNA, 32 nt, Human
uuccaagaagucagguugccaaaggaagaagc

SEQ ID NO: 269799 - RNA, 32 nt, Human
uuccaagaaugcugagguuacaggcaccauga

SEQ ID NO: 269800 - RNA, 32 nt, Human
uuccaagacuccaggaaaaacagcuuccaugg

SEQ ID NO: 269801 - RNA, 32 nt, Human
uuccaagagaagcagccccugagggagucugc

SEQ ID NO: 269802 - RNA, 32 nt, Human
uuccaagagacacuuuuccuggaaagccccug

SEQ ID NO: 269803 - RNA, 32 nt, Human
uuccaagauuccagaugugucugugagacaac

SEQ ID NO: 269804 - RNA, 32 nt, Human
uuccaagcaugcaguaucauaagaacuggaaa

SEQ ID NO: 269805 - RNA, 19 nt, Human
uuccaagccaagaacuugg

SEQ ID NO: 269806 - RNA, 32 nt, Human
uuccaagccuccagaacugugagaauucuuuu

SEQ ID NO: 269807 - RNA, 32 nt, Human
uuccaagcuagagggcugggcccuaugacugu

SEQ ID NO: 269808 - RNA, 32 nt, Human
uuccaagcuccaaauccaaggaaacaugcagc

SEQ ID NO: 269809 - RNA, 32 nt, Human
uuccaagcuccaccacuuccuaaaucuuaaga

SEQ ID NO: 269810 - RNA, 32 nt, Human
uuccaaggagacaaaucuccccugccaauuuc

SEQ ID NO: 269811 - RNA, 32 nt, Human
uuccaaggccccaccuucuaucuaagacaauc

SEQ ID NO: 269812 - RNA, 32 nt, Human
uuccaaggcccugaguaccucuugccuuguuu

SEQ ID NO: 269813 - RNA, 19 nt, Human
uuccaaggcucugcuucag

SEQ ID NO: 269814 - RNA, 32 nt, Human
uuccaaggcuguaggaguucuggagcugcugg

SEQ ID NO: 269815 - RNA, 21 nt, Human
uuccaagggaaugggcuugca

SEQ ID NO: 269816 - RNA, 32 nt, Human
uuccaaggggcaggaggagcugggcagaggag

SEQ ID NO: 269817 - RNA, 32 nt, Human
uuccaaggggcuuaugugugccaaguugugug

SEQ ID NO: 269818 - RNA, 20 nt, Human
uuccaaggugcucaccuggu

SEQ ID NO: 269819 - RNA, 32 nt, Human
uuccaaguagagucuggcaguauuaguuuccc

SEQ ID NO: 269820 - RNA, 32 nt, Human
uuccaaguagcugagacuacaggccugugcca

SEQ ID NO: 269821 - RNA, 32 nt, Human
uuccaaguccuuuaacucguugcagucuguau

SEQ ID NO: 269822 - RNA, 32 nt, Human
uuccaagugacuuagccacauuuccuucagug

SEQ ID NO: 269823 - RNA, 32 nt, Human
uuccaagugcagcaacccagcccauggagauu

SEQ ID NO: 269824 - RNA, 32 nt, Human
uuccaaguucccaggucugucugccuaagagc

SEQ ID NO: 269825 - RNA, 32 nt, Human
uuccaaguucucgauuucacaugccuucaaga

SEQ ID NO: 269826 - RNA, 19 nt, Human
uuccaaguugccacccacu

SEQ ID NO: 269827 - RNA, 32 nt, Human
uuccaaguugggacccagaaggugggguuggc

SEQ ID NO: 269828 - RNA, 32 nt, Human
uuccaaguuguucaaacauuuaccaaucauau

SEQ ID NO: 269829 - RNA, 32 nt, Human
uuccaaguuuugcauugaugucugacugccac

SEQ ID NO: 269830 - RNA, 32 nt, Human
uuccaauacauuaucaagcaagcacaaguaug

SEQ ID NO: 269831 - RNA, 32 nt, Human
uuccaauaccgauaacucagaaaccucagggu

SEQ ID NO: 269832 - RNA, 32 nt, Human
uuccaauccagaggaacaagcaugucucucug

SEQ ID NO: 269833 - RNA, 32 nt, Human
uuccaauccuacucuagauuuuuacuuucauu

SEQ ID NO: 269834 - RNA, 32 nt, Human
uuccaauccugggaaggagguggacuugagac

SEQ ID NO: 269835 - RNA, 32 nt, Human
uuccaaugaagccauaugaaccagcugucagu

SEQ ID NO: 269836 - RNA, 32 nt, Human
uuccaaugaaggacagggagcaaagggagacu

SEQ ID NO: 269837 - RNA, 32 nt, Human
uuccaaugacaaaggaaguggugaucagucug

SEQ ID NO: 269838 - RNA, 32 nt, Human
uuccaaugcagaggaaggcuguuguuuaacag

SEQ ID NO: 269839 - RNA, 22 nt, Human
uuccaauguaggauucacuuga

SEQ ID NO: 269840 - RNA, 32 nt, Human
uuccaauuccauccuggcgagauccaagugcu

SEQ ID NO: 269841 - RNA, 32 nt, Human
uuccaauucuggguccauuugcacuagcaaau

SEQ ID NO: 269842 - RNA, 24 nt, Human
uuccaauuggaaagaacaagcaaa

SEQ ID NO: 269843 - RNA, 24 nt, Human
uuccaauugguggccaucucccua

SEQ ID NO: 269844 - RNA, 24 nt, Human
uuccaauuuacugaccaauuugaa

SEQ ID NO: 269845 - RNA, 32 nt, Human
uuccaauuuuaccuucuuuaaaauagguuguu

SEQ ID NO: 269846 - RNA, 32 nt, Human
uuccacaaaggagagaaaggguggaggagggc

SEQ ID NO: 269847 - RNA, 32 nt, Human
uuccacaagagggcuuuuccacacucggugug

SEQ ID NO: 269848 - RNA, 32 nt, Human
uuccacacacaugcaguuccugcuugggugcu

SEQ ID NO: 269849 - RNA, 32 nt, Human
uuccacacagccccugcagggaaaggcuaauc

SEQ ID NO: 269850 - RNA, 32 nt, Human
uuccacacaugguuuguucaagcacacuuaau

SEQ ID NO: 269851 - RNA, 32 nt, Human
uuccacacauuuaaaacauuugaaggaccuaa

SEQ ID NO: 269852 - RNA, 32 nt, Human
uuccacacccuggcaauugugaagagcuggcc

SEQ ID NO: 269853 - RNA, 32 nt, Human
uuccacaccucagggaggccucggugauuuug

SEQ ID NO: 269854 - RNA, 22 nt, Human
uuccacaccuccugccuuuagg

SEQ ID NO: 269855 - RNA, 32 nt, Human
uuccacaccuuaaaaccaucugcucaguuuga

SEQ ID NO: 269856 - RNA, 32 nt, Human
uuccacaccuuauuggccccagaggggcccuc

SEQ ID NO: 269857 - RNA, 32 nt, Human
uuccacacgagacggggcuucagccggggaug

SEQ ID NO: 269858 - RNA, 32 nt, Human
uuccacacgaugacacuggaacugaaugccac

SEQ ID NO: 269859 - RNA, 32 nt, Human
uuccacacucgcauucaagguuccugucuucc

SEQ ID NO: 269860 - RNA, 32 nt, Human
uuccacagacaaggccuccagcacagauggca

SEQ ID NO: 269861 - RNA, 32 nt, Human
uuccacagacagggaaacaagcccagagaggg

SEQ ID NO: 269862 - RNA, 32 nt, Human
uuccacagaguugaccucucugauuuucuacu

SEQ ID NO: 269863 - RNA, 24 nt, Human
uuccacagaugagaagcagaguga

SEQ ID NO: 269864 - RNA, 32 nt, Human
uuccacagcaccugaugaacaugucuucacug

SEQ ID NO: 269865 - RNA, 32 nt, Human
uuccacagccuccaccccugacccccauccuc

SEQ ID NO: 269866 - RNA, 32 nt, Human
uuccacagcuccaccugcaucuucucaucaaa

SEQ ID NO: 269867 - RNA, 32 nt, Human
uuccacagcuccugccguucuccuugccagga

SEQ ID NO: 269868 - RNA, 32 nt, Human
uuccacaggaagcacucacaggcaccacacac

SEQ ID NO: 269869 - RNA, 32 nt, Human
uuccacaggcagcgucuccacagggagagggg

SEQ ID NO: 269870 - RNA, 32 nt, Human
uuccacagggaguaucaggggagccagaggga

SEQ ID NO: 269871 - RNA, 32 nt, Human
uuccacagggaucucucauugggucucuuugg

SEQ ID NO: 269872 - RNA, 32 nt, Human
uuccacagguucuggaauaacucuuacagcuu

SEQ ID NO: 269873 - RNA, 31 nt, Human
uuccacagucucucuggggcuguguccuaca

SEQ ID NO: 269874 - RNA, 32 nt, Human
uuccacagugccuugcauauaguaggcgccca

SEQ ID NO: 269875 - RNA, 32 nt, Human
uuccacaguggcugggugaccacagcagcugc

SEQ ID NO: 269876 - RNA, 32 nt, Human
uuccacaguucugcaggcuggaaauccaagau

SEQ ID NO: 269877 - RNA, 32 nt, Human
uuccacaguugccaccaccucuguggcauuga

SEQ ID NO: 269878 - RNA, 32 nt, Human
uuccacauaguguucgauaaagauugauaaac

SEQ ID NO: 269879 - RNA, 32 nt, Human
uuccacauccuguuggacacagagauauuaug

SEQ ID NO: 269880 - RNA, 32 nt, Human
uuccacaucggcaguuccaauggcuugggccg

SEQ ID NO: 269881 - RNA, 32 nt, Human
uuccacaucucaucuucugucacuaaauaccc

SEQ ID NO: 269882 - RNA, 32 nt, Human
uuccacaucugcuucuggagcacauuucccuc

SEQ ID NO: 269883 - RNA, 32 nt, Human
uuccacaucuuuccucuagucauuuugaaaua

SEQ ID NO: 269884 - RNA, 32 nt, Human
uuccacaugcuggauuauggugguuuuauguu

SEQ ID NO: 269885 - RNA, 32 nt, Human
uuccaccaagcgcccacccaggcugaggucuc

SEQ ID NO: 269886 - RNA, 32 nt, Human
uuccaccaaggccagaagggaaaaaggaagaa

SEQ ID NO: 269887 - RNA, 32 nt, Human
uuccaccacagcucuaucaaggcuugucaagc

SEQ ID NO: 269888 - RNA, 32 nt, Human
uuccaccacagcuggauuccaaugauucagaa

SEQ ID NO: 269889 - RNA, 32 nt, Human
uuccaccacuccuuuuccaucucccagaagcc

SEQ ID NO: 269890 - RNA, 32 nt, Human
uuccaccagaagcuguucgugcagcuggggag

SEQ ID NO: 269891 - RNA, 32 nt, Human
uuccaccagcaggauguggagcagggccacgu

SEQ ID NO: 269892 - RNA, 32 nt, Human
uuccaccaggagucuggagugcaauggcacga

SEQ ID NO: 269893 - RNA, 18 nt, Human
uuccaccaggugcagugg

SEQ ID NO: 269894 - RNA, 32 nt, Human
uuccaccaugcucuccccuucaucaagcuaac

SEQ ID NO: 269895 - RNA, 32 nt, Human
uuccaccaugcuugugagaucuucccagccaa

SEQ ID NO: 269896 - RNA, 32 nt, Human
uuccaccauugcacuccagucugggcaacaga

SEQ ID NO: 269897 - RNA, 32 nt, Human
uuccacccaagccaugggcgcugucgggcacu

SEQ ID NO: 269898 - RNA, 32 nt, Human
uuccacccacagaguggugaaucucucagcca

SEQ ID NO: 269899 - RNA, 32 nt, Human
uuccacccagaaauuccugggcuggaacuggu

SEQ ID NO: 269900 - RNA, 32 nt, Human
uuccacccagaagauaagggagggaguaucgc

SEQ ID NO: 269901 - RNA, 32 nt, Human
uuccacccaucuuuacagcagaagaauacauu

SEQ ID NO: 269902 - RNA, 32 nt, Human
uuccacccaucuuucaaggcuggucccagaag

SEQ ID NO: 269903 - RNA, 32 nt, Human
uuccaccccaacauagaguaguauuugcuuuu

SEQ ID NO: 269904 - RNA, 32 nt, Human
uuccaccccagaggagucuucuguccuccucc

SEQ ID NO: 269905 - RNA, 32 nt, Human
uuccaccccagccccucacaccacucgggaga

SEQ ID NO: 269906 - RNA, 32 nt, Human
uuccaccccagccugccuggacaacccuccuu

SEQ ID NO: 269907 - RNA, 32 nt, Human
uuccaccccaggagucagaacccuggcugcac

SEQ ID NO: 269908 - RNA, 24 nt, Human
uuccacccccaacucccuuccagg

SEQ ID NO: 269909 - RNA, 32 nt, Human
uuccaccccuggaagauggaaauaaaccugcg

SEQ ID NO: 269910 - RNA, 32 nt, Human
uuccacccucacccuucauucuucuaaccagc

SEQ ID NO: 269911 - RNA, 17 nt, Human
uuccacccuccaaccuc

SEQ ID NO: 269912 - RNA, 32 nt, Human
uuccacccuccaccaccccaaccucacauaau

SEQ ID NO: 269913 - RNA, 32 nt, Human
uuccacccuccccuucaacugccccucuaaag

SEQ ID NO: 269914 - RNA, 32 nt, Human
uuccacccugcucugccugccuggggcccugg

SEQ ID NO: 269915 - RNA, 32 nt, Human
uuccaccgagggagguggagcuucaggaugcc

SEQ ID NO: 269916 - RNA, 32 nt, Human
uuccaccggugcaaggagaugucugaauacug

SEQ ID NO: 269917 - RNA, 32 nt, Human
uuccaccgugcuccuauguaacagcugggugg

SEQ ID NO: 269918 - RNA, 32 nt, Human
uuccaccuaagccguugguaggggacuguggc

SEQ ID NO: 269919 - RNA, 32 nt, Human
uuccaccuacagcuugccauccugugaguaua

SEQ ID NO: 269920 - RNA, 19 nt, Human
uuccaccucacacccagga

SEQ ID NO: 269921 - RNA, 32 nt, Human
uuccaccucagccucagaguccagcugcccgg

SEQ ID NO: 269922 - RNA, 32 nt, Human
uuccaccucccccagucaaaaugcuuucuaaa

SEQ ID NO: 269923 - RNA, 32 nt, Human
uuccaccuccccucccuccaucaccucacgcc

SEQ ID NO: 269924 - RNA, 32 nt, Human
uuccaccugacccaaagcucucuagccacccc

SEQ ID NO: 269925 - RNA, 32 nt, Human
uuccaccugcccugucagcccaguuccccagg

SEQ ID NO: 269926 - RNA, 32 nt, Human
uuccaccuggcccagacccuguggggcagcgg

SEQ ID NO: 269927 - RNA, 32 nt, Human
uuccaccuucaucuauccuugugggccgcgug

SEQ ID NO: 269928 - RNA, 32 nt, Human
uuccaccuucucagggcucuggagggggaggg

SEQ ID NO: 269929 - RNA, 32 nt, Human
uuccacgaacuccuccuccauuuccuuuuugg

SEQ ID NO: 269930 - RNA, 18 nt, Human
uuccacgaugaaaaacuu

SEQ ID NO: 269931 - RNA, 32 nt, Human
uuccacgcaccccucuuuauucuggagcauau

SEQ ID NO: 269932 - RNA, 32 nt, Human
uuccacgccgggacaccauguucuccaucaag

SEQ ID NO: 269933 - RNA, 32 nt, Human
uuccacggcccgcacaccaccugccugcaugc

SEQ ID NO: 269934 - RNA, 32 nt, Human
uuccacgggagaggagaaacuuaaagagguuu

SEQ ID NO: 269935 - RNA, 32 nt, Human
uuccacggggaucucucauugggucucuuugg

SEQ ID NO: 269936 - RNA, 32 nt, Human
uuccacggggcuugacaccagagcagcccccg

SEQ ID NO: 269937 - RNA, 17 nt, Human
uuccacgucccuggccu

SEQ ID NO: 269938 - RNA, 32 nt, Human
uuccacgucuuuuucuccugcaaugaacugcu

SEQ ID NO: 269939 - RNA, 31 nt, Human
uuccacgugagugaggauaaagacugggcug

SEQ ID NO: 269940 - RNA, 32 nt, Human
uuccacuaaagugccuauugaaacucuuauca

SEQ ID NO: 269941 - RNA, 32 nt, Human
uuccacuaggugccauggcaaagagggauuaa

SEQ ID NO: 269942 - RNA, 32 nt, Human
uuccacucagcuggaggcucaagagggcuuga

SEQ ID NO: 269943 - RNA, 32 nt, Human
uuccacuccaaccagaagugaauauuugagac

SEQ ID NO: 269944 - RNA, 32 nt, Human
uuccacuccagccugagcaacacagugagacc

SEQ ID NO: 269945 - RNA, 32 nt, Human
uuccacuccgccgcgccuuccucccaguuucc

SEQ ID NO: 269946 - RNA, 32 nt, Human
uuccacuccuccccaucuccaggcgcugggag

SEQ ID NO: 269947 - RNA, 32 nt, Human
uuccacucucagaccuugccucccgggcugcc

SEQ ID NO: 269948 - RNA, 32 nt, Human
uuccacucuggccaaacaggcucuacucucuu

SEQ ID NO: 269949 - RNA, 32 nt, Human
uuccacucugggauauugagcagugcuccuag

SEQ ID NO: 269950 - RNA, 21 nt, Human
uuccacucuucugccuuuagg

SEQ ID NO: 269951 - RNA, 32 nt, Human
uuccacugaaaccucuguucucaugaaggaga

SEQ ID NO: 269952 - RNA, 32 nt, Human
uuccacugaccacccuauacccugaggaaagg

SEQ ID NO: 269953 - RNA, 32 nt, Human
uuccacugagaccccaggcuguuagggguuau

SEQ ID NO: 269954 - RNA, 32 nt, Human
uuccacugaggacauucagccugggaaggagg

SEQ ID NO: 269955 - RNA, 32 nt, Human
uuccacugaggggagcacuggagcagcccuuu

SEQ ID NO: 269956 - RNA, 32 nt, Human
uuccacugcauuucagccugggggauacagug

SEQ ID NO: 269957 - RNA, 32 nt, Human
uuccacugcccuuggugaaucuauuccuagug

SEQ ID NO: 269958 - RNA, 32 nt, Human
uuccacugccuuaaggaugacagucguaggga

SEQ ID NO: 269959 - RNA, 32 nt, Human
uuccacugcuauaaccaccaagccaccuucau

SEQ ID NO: 269960 - RNA, 32 nt, Human
uuccacugcucagcugccgccugguggggcca

SEQ ID NO: 269961 - RNA, 32 nt, Human
uuccacugcugccucuugaaugcagggacaaa

SEQ ID NO: 269962 - RNA, 32 nt, Human
uuccacugcuucuaccuccccucccaggaccc

SEQ ID NO: 269963 - RNA, 32 nt, Human
uuccacugucuucccuggcagcugugaugugu

SEQ ID NO: 269964 - RNA, 32 nt, Human
uuccacuuaugccuccuuuucuccuuauuccu

SEQ ID NO: 269965 - RNA, 32 nt, Human
uuccacuucccaacagcccccaucaagggacc

SEQ ID NO: 269966 - RNA, 32 nt, Human
uuccacuucugcacgucuuccuuuccccauga

SEQ ID NO: 269967 - RNA, 32 nt, Human
uuccacuucuucuguuccaugagcugcagggc

SEQ ID NO: 269968 - RNA, 32 nt, Human
uuccacuuguacugccccauccuugaauccuu

SEQ ID NO: 269969 - RNA, 32 nt, Human
uuccacuuucaucaacuuuccaucucaucgcu

SEQ ID NO: 269970 - RNA, 32 nt, Human
uuccacuuugggaggccgaggcgggcagauca

SEQ ID NO: 269971 - RNA, 32 nt, Human
uuccagaaaacaucuccaaagcuauaccaguc

SEQ ID NO: 269972 - RNA, 32 nt, Human
uuccagaaacucaagaaaaagcucaaacagaa

SEQ ID NO: 269973 - RNA, 32 nt, Human
uuccagaaagaagacgccagggaugaggcugg

SEQ ID NO: 269974 - RNA, 32 nt, Human
uuccagaaagcaggagcagcugugcugcaccc

SEQ ID NO: 269975 - RNA, 32 nt, Human
uuccagaaaggccauguacaagaggaaguacu

SEQ ID NO: 269976 - RNA, 24 nt, Human
uucgagaccagccuggucaauaug

SEQ ID NO: 269977 - RNA, 32 nt, Human
uucgagaccagccuggucaauauggugaaacc

SEQ ID NO: 269978 - RNA, 32 nt, Human
uucgagaccagccugguccacauggcaaaacc

SEQ ID NO: 269979 - RNA, 32 nt, Human
uucgagaccagccuguccaacauggcgaaccu

SEQ ID NO: 269980 - RNA, 32 nt, Human
uucgagaccagccuguucagcauagcaggacc

SEQ ID NO: 269981 - RNA, 32 nt, Human
uucgagaccagccuuaccaacauggagaaacc

SEQ ID NO: 269982 - RNA, 32 nt, Human
uucgagaccagccuugccaacauagugaaacc

SEQ ID NO: 269983 - RNA, 32 nt, Human
uucgagaccagccuuggccaacauggcgaaac

SEQ ID NO: 269984 - RNA, 32 nt, Human
uucgagaccagcguggucaacaugguguaacc

SEQ ID NO: 269985 - RNA, 23 nt, Human
uucgagaccagcugggcaacaug

SEQ ID NO: 269986 - RNA, 32 nt, Human
uucgagaccagcugggcaacauggugaaaccc

SEQ ID NO: 269987 - RNA, 24 nt, Human
uucgagaccagcuuggccaacaug

SEQ ID NO: 269988 - RNA, 32 nt, Human
uucgagaccagcuuggccaacauggugaagcu

SEQ ID NO: 269989 - RNA, 32 nt, Human
uucgagaccagcuuggccaacaugucgaaacu

SEQ ID NO: 269990 - RNA, 24 nt, Human
uucgagaccagcuuggccaauaua

SEQ ID NO: 269991 - RNA, 24 nt, Human
uucgagaccagcuugggcaacaug

SEQ ID NO: 269992 - RNA, 32 nt, Human
uucgagaccagcuugggcaacauggagaaacc

SEQ ID NO: 269993 - RNA, 32 nt, Human
uucgagaccagcuugggcaacauggcgaaacc

SEQ ID NO: 269994 - RNA, 32 nt, Human
uucgagaccagcuugggcaacauggugaaacc

SEQ ID NO: 269995 - RNA, 24 nt, Human
uucgagaccagcuugggcaauaua

SEQ ID NO: 269996 - RNA, 32 nt, Human
uucgagaccaggcuggccaacacggugaaacg

SEQ ID NO: 269997 - RNA, 32 nt, Human
uucgagaccagguuggccaacauggugagacc

SEQ ID NO: 269998 - RNA, 32 nt, Human
uucgagaccagucucaccaacauggagaaacc

SEQ ID NO: 269999 - RNA, 24 nt, Human
uucgagaccagucugagcaacaua

SEQ ID NO: 270000 - RNA, 32 nt, Human
uucgagaccagucuggccaacauagugaaagc

SEQ ID NO: 270001 - RNA, 32 nt, Human
uucgagaccagucuggccaacauagugaaauc

SEQ ID NO: 270002 - RNA, 32 nt, Human
uucgagaccagucuggccaacaucgugaaacc

SEQ ID NO: 270003 - RNA, 24 nt, Human
uucgagaccagucuggccaacaug

SEQ ID NO: 270004 - RNA, 32 nt, Human
uucgagaccagucuggccaacauggcgaaacc

SEQ ID NO: 270005 - RNA, 32 nt, Human
uucgagaccagucuggccaaccuggugaaacc

SEQ ID NO: 270006 - RNA, 32 nt, Human
uucgagaccagucuggcccacauggugaaacc

SEQ ID NO: 270007 - RNA, 32 nt, Human
uucgagaccagucugggcaacauagugaaacc

SEQ ID NO: 270008 - RNA, 24 nt, Human
uucgagaccagucuggucaacaug

SEQ ID NO: 270009 - RNA, 32 nt, Human
uucgagaccagucuggucaacauggugaaacc

SEQ ID NO: 270010 - RNA, 32 nt, Human
uucgagaccauccuggccaacauggcgaaacc

SEQ ID NO: 270011 - RNA, 32 nt, Human
uucgagaccauccuggccaacauggugaaacc

SEQ ID NO: 270012 - RNA, 24 nt, Human
uucgagaccauccugggcaauaug

SEQ ID NO: 270013 - RNA, 32 nt, Human
uucgagaccaucuuggcuaacauggugaaacc

SEQ ID NO: 270014 - RNA, 32 nt, Human
uucgagacccaccuggacaacauagugaaacc

SEQ ID NO: 270015 - RNA, 24 nt, Human
uucgagaccggccuggccaacaug

SEQ ID NO: 270016 - RNA, 32 nt, Human
uucgagaccggccuggccaacauggugaaacc

SEQ ID NO: 270017 - RNA, 24 nt, Human
uucgagaccggccuggccaauaug

SEQ ID NO: 270018 - RNA, 32 nt, Human
uucgagaccggccuggccaauauggugaaacc

SEQ ID NO: 270019 - RNA, 24 nt, Human
uucgagaccggccuggucaacaug

SEQ ID NO: 270020 - RNA, 32 nt, Human
uucgagaccggccuggucaacauggugaaacc

SEQ ID NO: 270021 - RNA, 24 nt, Human
uucgagaccggucuggccaacaug

SEQ ID NO: 270022 - RNA, 32 nt, Human
uucgagaccggucuggccaacauggugaaacc

SEQ ID NO: 270023 - RNA, 32 nt, Human
uucgagaccugccugaccaacaugcugaaacc

SEQ ID NO: 270024 - RNA, 32 nt, Human
uucgagaccugccuggccaacauggcaacacc

SEQ ID NO: 270025 - RNA, 32 nt, Human
uucgagacgacccuggccaacauggugaaauc

SEQ ID NO: 270026 - RNA, 32 nt, Human
uucgagacuagccugaccaacauggagaaacc

SEQ ID NO: 270027 - RNA, 32 nt, Human
uucgagacuagccugaccaacauggugaaacu

SEQ ID NO: 270028 - RNA, 24 nt, Human
uucgagacuagccuggacagcaug

SEQ ID NO: 270029 - RNA, 24 nt, Human
uucgagacuagccuggccaacaug

SEQ ID NO: 270030 - RNA, 32 nt, Human
uucgagacuagccuggccaacaugguaaaacc

SEQ ID NO: 270031 - RNA, 32 nt, Human
uucgagacuagccuggccaacauggugauacc

SEQ ID NO: 270032 - RNA, 24 nt, Human
uucgagacuagccuggccaauaug

SEQ ID NO: 270033 - RNA, 32 nt, Human
uucgagacuagccuggccaauaugguaaaacc

SEQ ID NO: 270034 - RNA, 32 nt, Human
uucgagacuagccuggccaccguggcgaaaca

SEQ ID NO: 270035 - RNA, 32 nt, Human
uucgagacuagccuggcuaauacagugaaacc

SEQ ID NO: 270036 - RNA, 32 nt, Human
uucgagacuagccugggcaacauagcgagacc

SEQ ID NO: 270037 - RNA, 24 nt, Human
uucgagacuagccugggcaacgug

SEQ ID NO: 270038 - RNA, 24 nt, Human
uucgagacuagcuuggccaacaug

SEQ ID NO: 270039 - RNA, 32 nt, Human
uucgagacuagcuuggccaacauggugaaacc

SEQ ID NO: 270040 - RNA, 24 nt, Human
uucgagacuugccugggcggcaua

SEQ ID NO: 270041 - RNA, 32 nt, Human
uucgagagcagagcacaccccuaagugcgugg

SEQ ID NO: 270042 - RNA, 32 nt, Human
uucgagagcagccuggccaacaccgugaaccu

SEQ ID NO: 270043 - RNA, 24 nt, Human
uucgagagcagccuggccaacaug

SEQ ID NO: 270044 - RNA, 32 nt, Human
uucgagagcagccuggccaacaugaugaaacc

SEQ ID NO: 270045 - RNA, 32 nt, Human
uucgagagcagccuggccaacauggcaaaacc

SEQ ID NO: 270046 - RNA, 32 nt, Human
uucgagagcagccuggccaauaugaugaaacc

SEQ ID NO: 270047 - RNA, 24 nt, Human
uucgagagcagccugggcaacaug

SEQ ID NO: 270048 - RNA, 32 nt, Human
uucgagagcagccugggcaacauggugaaagc

SEQ ID NO: 270049 - RNA, 24 nt, Human
uucgagagcagccuggucaacaua

SEQ ID NO: 270050 - RNA, 32 nt, Human
uucgagagcagccuggucaacauagugaaacc

SEQ ID NO: 270051 - RNA, 32 nt, Human
uucgagagcauccuggccaacguggugaaacc

SEQ ID NO: 270052 - RNA, 32 nt, Human
uucgagaucagcauggccaacauggugaagcc

SEQ ID NO: 270053 - RNA, 24 nt, Human
uucgagaucagccuaggcaacaug

SEQ ID NO: 270054 - RNA, 32 nt, Human
uucgagaucagccuaggcaacauggugaaauc

SEQ ID NO: 270055 - RNA, 32 nt, Human
uucgagaucagccugaccaacaugaugaaaug

SEQ ID NO: 270056 - RNA, 32 nt, Human
uucgagaucagccugaccaacauggagaaacc

SEQ ID NO: 270057 - RNA, 32 nt, Human
uucgagaucagccugaccaacauggugaaacc

SEQ ID NO: 270058 - RNA, 32 nt, Human
uucgagaucagccuggacaauacggugagacc

SEQ ID NO: 270059 - RNA, 24 nt, Human
uucgagaucagccuggccaacaug

SEQ ID NO: 270060 - RNA, 32 nt, Human
uucgagaucagccuggccaacauggcaaaacc

SEQ ID NO: 270061 - RNA, 32 nt, Human
uucgagaucagccuggccaacauggugaaacc

SEQ ID NO: 270062 - RNA, 32 nt, Human
uucgagaucagccuggccaacauggugaaauc

SEQ ID NO: 270063 - RNA, 32 nt, Human
uucgagaucagccuggccaauagggugaaacu

SEQ ID NO: 270064 - RNA, 24 nt, Human
uucgagaucagccugggcaucaug

SEQ ID NO: 270065 - RNA, 24 nt, Human
uucgagaucagccuggguaacaua

SEQ ID NO: 270066 - RNA, 32 nt, Human
uucgagaucagccuggguaacauagcgagacc

SEQ ID NO: 270067 - RNA, 32 nt, Human
uucgagaucagcgggaccaacauggugaaacc

SEQ ID NO: 270068 - RNA, 32 nt, Human
uucgagauccacccgugugucuggaagggacu

SEQ ID NO: 270069 - RNA, 32 nt, Human
uucgagaugagccuggccaacauggugaaacc

SEQ ID NO: 270070 - RNA, 32 nt, Human
uucgagauuagccuggccgacauggcaaaacc

SEQ ID NO: 270071 - RNA, 32 nt, Human
uucgagauuagucuggccaacauggugaaacc

SEQ ID NO: 270072 - RNA, 21 nt, Human
uucgagcagaacauucccagc

SEQ ID NO: 270073 - RNA, 32 nt, Human
uucgagcauaagaggcauaugaauggugucuu

SEQ ID NO: 270074 - RNA, 32 nt, Human
uucgagcaucccucggauaggccgggugucag

SEQ ID NO: 270075 - RNA, 32 nt, Human
uucgagcauggaggggcacuggggaagguccc

SEQ ID NO: 270076 - RNA, 32 nt, Human
uucgagccagccugaccaacaugaugaaaccc

SEQ ID NO: 270077 - RNA, 32 nt, Human
uucgagccagugggugucucuccuuugggccu

SEQ ID NO: 270078 - RNA, 32 nt, Human
uucgagcccagccugaccaauaugaugaaacc

SEQ ID NO: 270079 - RNA, 32 nt, Human
uucgagcccagccugaccaauauggugaaacc

SEQ ID NO: 270080 - RNA, 24 nt, Human
uucgagcccagccuggccaacaug

SEQ ID NO: 270081 - RNA, 32 nt, Human
uucgagcccagccuggccaacauggcgaaacc

SEQ ID NO: 270082 - RNA, 32 nt, Human
uucgagcccagccuggccaacauggugaaacc

SEQ ID NO: 270083 - RNA, 32 nt, Human
uucgagcccugaguaugugcccugcuguuacu

SEQ ID NO: 270084 - RNA, 32 nt, Human
uucgagcucuugaccaccuccaauguguaggu

SEQ ID NO: 270085 - RNA, 32 nt, Human
uucgagcugcaacuacaugugugggagagugg

SEQ ID NO: 270086 - RNA, 32 nt, Human
uucgagcuuccacgcaccagccacuccgggga

SEQ ID NO: 270087 - RNA, 32 nt, Human
uucgaggagaagggaaggaugcagcuuugccu

SEQ ID NO: 270088 - RNA, 32 nt, Human
uucgaggagauggagaaguaacagcauguguu

SEQ ID NO: 270089 - RNA, 32 nt, Human
uucgaggaggccagagguggcgaggcaggcuu

SEQ ID NO: 270090 - RNA, 32 nt, Human
uucgaggaggguggggcagggaaagggcuggc

SEQ ID NO: 270091 - RNA, 32 nt, Human
uucgaggccagccugaccaacauggagaaacc

SEQ ID NO: 270092 - RNA, 32 nt, Human
uucgaggccagccugaccaacauggugaaaca

SEQ ID NO: 270093 - RNA, 32 nt, Human
uucgaggccagccugaccaacauggugaaacc

SEQ ID NO: 270094 - RNA, 32 nt, Human
uucgaggccagccugaccaacguggagaaaug

SEQ ID NO: 270095 - RNA, 24 nt, Human
uucgaggccagccuggccaacaug

SEQ ID NO: 270096 - RNA, 32 nt, Human
uucgaggccagccuggccaacaugacaaaacc

SEQ ID NO: 270097 - RNA, 32 nt, Human
uucgaggccagccuggccaacaugaugaaacc

SEQ ID NO: 270098 - RNA, 32 nt, Human
uucgaggccagccuggccaacauggugaaacc

SEQ ID NO: 270099 - RNA, 24 nt, Human
uucgaggccagccuggccaauaug

SEQ ID NO: 270100 - RNA, 24 nt, Human
uucgaggccagccugggcaacaug

SEQ ID NO: 270101 - RNA, 32 nt, Human
uucgaggcccuguacagccaggccaggaccaa

SEQ ID NO: 270102 - RNA, 32 nt, Human
uucgaggccuggccggguugggccuacuucuc

SEQ ID NO: 270103 - RNA, 32 nt, Human
uucgaggccuucccacaggagcguacucacuc

SEQ ID NO: 270104 - RNA, 32 nt, Human
uucgaggccuugcuuuucucucuucuucauuc

SEQ ID NO: 270105 - RNA, 32 nt, Human
uucgaggcgagccuggccaacauggugaaacc

SEQ ID NO: 270106 - RNA, 32 nt, Human
uucgaggcuagauucucgaaagacauccugaa

SEQ ID NO: 270107 - RNA, 32 nt, Human
uucgagggaggcagcgccuaggccagcacgga

SEQ ID NO: 270108 - RNA, 32 nt, Human
uucgagggcagccugaccaacauagugaaacc

SEQ ID NO: 270109 - RNA, 32 nt, Human
uucgaggucagcccggccuacauggugaaacc

SEQ ID NO: 270110 - RNA, 32 nt, Human
uucgaggucaugcuuugagcaaaagccauuaa

SEQ ID NO: 270111 - RNA, 32 nt, Human
uucgaggugggccuggccgugguggugcagga

SEQ ID NO: 270112 - RNA, 32 nt, Human
uucgagguugcagugagccaugaucaugccac

SEQ ID NO: 270113 - RNA, 32 nt, Human
uucgaguagcuggaaugacuacaggcaugggc

SEQ ID NO: 270114 - RNA, 32 nt, Human
uucgagucagcagccuuuggagacggcagacu

SEQ ID NO: 270115 - RNA, 32 nt, Human
uucgaguccagccuggccaacauggugaaacc

SEQ ID NO: 270116 - RNA, 24 nt, Human
uucgaguccagccuggccaauaug

SEQ ID NO: 270117 - RNA, 32 nt, Human
uucgaguccagccuggccaauaugcugaaacc

SEQ ID NO: 270118 - RNA, 24 nt, Human
uucgaguccagccugggcagcaua

SEQ ID NO: 270119 - RNA, 32 nt, Human
uucgaguccagccugggcagcauagugugaga

SEQ ID NO: 270120 - RNA, 32 nt, Human
uucgagucucaaaauaaagaguuccugaugga

SEQ ID NO: 270121 - RNA, 32 nt, Human
uucgaguuaccuaggaacuggaaauguuggug

SEQ ID NO: 270122 - RNA, 32 nt, Human
uucgaguuguacaaaguuaagcauuaaucaga

SEQ ID NO: 270123 - RNA, 32 nt, Human
uucgauaccagccugaccaacauggcgaaacc

SEQ ID NO: 270124 - RNA, 24 nt, Human
uucgauaccagccuggccaacaug

SEQ ID NO: 270125 - RNA, 32 nt, Human
uucgauaccagccuggccaacauggugaaacc

SEQ ID NO: 270126 - RNA, 32 nt, Human
uucgauaccagccuggccaauaugcaaaacca

SEQ ID NO: 270127 - RNA, 32 nt, Human
uucgauaccagccuggccaauaugcgaaacca

SEQ ID NO: 270128 - RNA, 32 nt, Human
uucgauaccagccugggcaacauagugggauc

SEQ ID NO: 270129 - RNA, 32 nt, Human
uucgaucuuggaauugaaaguaaagcuggaaa

SEQ ID NO: 270130 - RNA, 32 nt, Human
uucgauggacgcaaucuuaagccacccuggcc

SEQ ID NO: 270131 - RNA, 32 nt, Human
uucgauucaaagcuucggcaagacgaagaaaa

SEQ ID NO: 270132 - RNA, 32 nt, Human
uucgauucagagcuggaguggaagaagcagcc

SEQ ID NO: 270133 - RNA, 32 nt, Human
uucgauucuuccaaaaucagagacagagugcu

SEQ ID NO: 270134 - RNA, 32 nt, Human
uucgauuucagaagcuggggcaguccagucac

SEQ ID NO: 270135 - RNA, 32 nt, Human
uucgauuuucaccugguucugggaaauaucuu

SEQ ID NO: 270136 - RNA, 32 nt, Human
uucgcaaagaagcugacuucagagggggaaac

SEQ ID NO: 270137 - RNA, 24 nt, Human
uucgcaaccagccuggccaauaug

SEQ ID NO: 270138 - RNA, 32 nt, Human
uucgcaaccagccuggccaauauggugagacc

SEQ ID NO: 270139 - RNA, 32 nt, Human
uucgcacacagcuggcuccaggaaaauacacc

SEQ ID NO: 270140 - RNA, 32 nt, Human
uucgcacaggcagcgggaggaggggcggcgcg

SEQ ID NO: 270141 - RNA, 32 nt, Human
uucgcaccacugcacuccagccugggugauag

SEQ ID NO: 270142 - RNA, 32 nt, Human
uucgcaccucaucaaacagaacaaauaaguua

SEQ ID NO: 270143 - RNA, 32 nt, Human
uucgcacuccauggccuccuguccuggacccc

SEQ ID NO: 270144 - RNA, 32 nt, Human
uucgcacugcuuguugggcucaucaugaagcg

SEQ ID NO: 270145 - RNA, 32 nt, Human
uucgcacuggguugcauugauucccccucuga

SEQ ID NO: 270146 - RNA, 32 nt, Human
uucgcacuuugcccucugccugguggggaggg

SEQ ID NO: 270147 - RNA, 32 nt, Human
uucgcagaagugaggaaggcaaauacucaggg

SEQ ID NO: 270148 - RNA, 32 nt, Human
uucgcagauccuggcggggcugugccaacgcu

SEQ ID NO: 270149 - RNA, 23 nt, Human
uucgcagcccgcuuccggccuca

SEQ ID NO: 270150 - RNA, 32 nt, Human
uucgcagcugucuccccuccgcagcagauacc

SEQ ID NO: 270151 - RNA, 32 nt, Human
uucgcagggcaauuuccuccugugacgguugc

SEQ ID NO: 270152 - RNA, 32 nt, Human
uucgcagggggugggaaugggguggggucacu

SEQ ID NO: 270153 - RNA, 32 nt, Human
uucgcagucacucccaauccugccucacccca

SEQ ID NO: 270154 - RNA, 32 nt, Human
uucgcaucuccuccucgcgcgucuuggacaug

SEQ ID NO: 270155 - RNA, 32 nt, Human
uucgcaucucuccuuuuccugguuagacucug

SEQ ID NO: 270156 - RNA, 32 nt, Human
uucgcaugccacugcacuccagccugggcgac

SEQ ID NO: 270157 - RNA, 32 nt, Human
uucgccacccaggaugguggcaucgggcugcu

SEQ ID NO: 270158 - RNA, 32 nt, Human
uucgccacugcacaccagccugggugacagug

SEQ ID NO: 270159 - RNA, 32 nt, Human
uucgccagcuagaagcgggacugaggcugccu

SEQ ID NO: 270160 - RNA, 32 nt, Human
uucgccaggagggcacguucgcgccgcgccgc

SEQ ID NO: 270161 - RNA, 31 nt, Human
uucgccaugaaaacuaaggcugccuuagcua

SEQ ID NO: 270162 - RNA, 32 nt, Human
uucgccaugaaccuugccaugggugaggaaaa

SEQ ID NO: 270163 - RNA, 32 nt, Human
uucgccauguugaccaggcuggucuugaacuc

SEQ ID NO: 270164 - RNA, 32 nt, Human
uucgccauguugcucaggcugaucucaaacuc

SEQ ID NO: 270165 - RNA, 32 nt, Human
uucgccauguuggccaggcugaucuugaacuc

SEQ ID NO: 270166 - RNA, 32 nt, Human
uucgccauguuugccaggcugguccugaaugc

SEQ ID NO: 270167 - RNA, 32 nt, Human
uucgccauguuuuccaggcugaucuugaaccu

SEQ ID NO: 270168 - RNA, 32 nt, Human
uucgccauugcaucuacucuuugcugcacaca

SEQ ID NO: 270169 - RNA, 32 nt, Human
uucgcccaggcugaguacaguggugcaaucuc

SEQ ID NO: 270170 - RNA, 23 nt, Human
uucgcccaggcuggagugcagug

SEQ ID NO: 270171 - RNA, 32 nt, Human
uucgcccaucacugcccucugacuccaggcca

SEQ ID NO: 270172 - RNA, 32 nt, Human
uucgcccccugcccggcuccgcggcgcggagg

SEQ ID NO: 270173 - RNA, 32 nt, Human
uucgccccucgagggaggugacccuuggccac

SEQ ID NO: 270174 - RNA, 32 nt, Human
uucgccccugaggcccggugacccuucgcccg

SEQ ID NO: 270175 - RNA, 31 nt, Human
uucgcccgcgucucugggcuuuugcucuguc

SEQ ID NO: 270176 - RNA, 32 nt, Human
uucgcccuggucguugcacuccagccugucgc

SEQ ID NO: 270177 - RNA, 19 nt, Human
uucgccgccgccgccgccg

SEQ ID NO: 270178 - RNA, 32 nt, Human
uucgccgcugcuguaguuccccggcuggaugc

SEQ ID NO: 270179 - RNA, 32 nt, Human
uucgccggggucuucugcauccuggccauugg

SEQ ID NO: 270180 - RNA, 32 nt, Human
uucgccgucugcgucucccccacgccgccucg

SEQ ID NO: 270181 - RNA, 32 nt, Human
uucgccgugccucagcgagcaggugugugugg

SEQ ID NO: 270182 - RNA, 32 nt, Human
uucgccuaucaucuggccacaugaggcuguca

SEQ ID NO: 270183 - RNA, 32 nt, Human
uucgccuccaaggacugaauuuugccaauuac

SEQ ID NO: 270184 - RNA, 32 nt, Human
uucgccucccaccaugacucugaggccuacac

SEQ ID NO: 270185 - RNA, 32 nt, Human
uucgccucccgaagugcugggauuacagaugu

SEQ ID NO: 270186 - RNA, 32 nt, Human
uucgccucccgccaugauucugaggccucccu

SEQ ID NO: 270187 - RNA, 32 nt, Human
uucgccucgccaccuugccuguccucaggacg

SEQ ID NO: 270188 - RNA, 32 nt, Human
uucgccucuccucccgggagucuucugccuac

SEQ ID NO: 270189 - RNA, 32 nt, Human
uucgccucugcucucagcuuugcaccucguca

SEQ ID NO: 270190 - RNA, 32 nt, Human
uucgccugcugcugggaccaugggggcugggg

SEQ ID NO: 270191 - RNA, 32 nt, Human
uucgccuuauguucuucuugccggacucuuuu

SEQ ID NO: 270192 - RNA, 32 nt, Human
uucgccuucagccaccauggggaaugggauga

SEQ ID NO: 270193 - RNA, 32 nt, Human
uucgcgaaggagcaaggcugaagaaccagacc

SEQ ID NO: 270194 - RNA, 21 nt, Human
uucgcgaaggugucgcugcca

SEQ ID NO: 270195 - RNA, 32 nt, Human
uucgcgaccagccuacccaacauggugaaacc

SEQ ID NO: 270196 - RNA, 32 nt, Human
uucgcgaccagccugaccaacauggaaaaacc

SEQ ID NO: 270197 - RNA, 32 nt, Human
uucgcgagaaagucacauucggacccuuuggc

SEQ ID NO: 270198 - RNA, 32 nt, Human
uucgcgagcgcuggcuauggguccuggggcgc

SEQ ID NO: 270199 - RNA, 32 nt, Human
uucgcgagugugagagggaagcgccgcggccu

SEQ ID NO: 270200 - RNA, 32 nt, Human
uucgcgcagccuguuguuuuccuuagacaggu

SEQ ID NO: 270201 - RNA, 32 nt, Human
uucgcgcgugagcugcgcgggucgggccuggu

SEQ ID NO: 270202 - RNA, 32 nt, Human
uucgcgcugcgcgccccggccuccagggacuc

SEQ ID NO: 270203 - RNA, 32 nt, Human
uucgcggaggagucgagcagaagaauagaagg

SEQ ID NO: 270204 - RNA, 26 nt, Human
uucgcgggaaggcguuuguggugcca

SEQ ID NO: 270205 - RNA, 22 nt, Human
uucgcggugccagccucugcag

SEQ ID NO: 270206 - RNA, 32 nt, Human
uucgcgucgcagcucuggacugcauggaagag

SEQ ID NO: 270207 - RNA, 32 nt, Human
uucgcguuucaggcgcucguguuuuccgggaa

SEQ ID NO: 270208 - RNA, 32 nt, Human
uucgcguuuggucggccagggagcugccuucc

SEQ ID NO: 270209 - RNA, 32 nt, Human
uucgcucacaauaauacacagccccuggaugg

SEQ ID NO: 270210 - RNA, 32 nt, Human
uucgcucagagaucccgugggguggggcaggg

SEQ ID NO: 270211 - RNA, 32 nt, Human
uucgcuccaagaagaggaaggcgggagcuucu

SEQ ID NO: 270212 - RNA, 32 nt, Human
uucgcuccaagccucaggccaccggcuuggau

SEQ ID NO: 270213 - RNA, 32 nt, Human
uucgcucccucgggaugcaaaggccaacuuca

SEQ ID NO: 270214 - RNA, 32 nt, Human
uucgcuccuauucaacccgggauuuccaggac

SEQ ID NO: 270215 - RNA, 32 nt, Human
uucgcuccuccuggucucuguccucuucccua

SEQ ID NO: 270216 - RNA, 32 nt, Human
uucgcucugcugcccaggcuggaguacaguga

SEQ ID NO: 270217 - RNA, 32 nt, Human
uucgcucugucgcccaggcuggagugcagugg

SEQ ID NO: 270218 - RNA, 32 nt, Human
uucgcucuguugcccaggcuggagugcagugg

SEQ ID NO: 270219 - RNA, 32 nt, Human
uucgcucuguugcccaggcuggaguguaaugg

SEQ ID NO: 270220 - RNA, 22 nt, Human
uucgcucuugcugcuccccuga

SEQ ID NO: 270221 - RNA, 23 nt, Human
uucgcucuugucacccaggcugg

SEQ ID NO: 270222 - RNA, 23 nt, Human
uucgcucuugucauccuggcugg

SEQ ID NO: 270223 - RNA, 22 nt, Human
uucgcucuugucgcccaggcug

SEQ ID NO: 270224 - RNA, 23 nt, Human
uucgcucuugucgcccaggcugg

SEQ ID NO: 270225 - RNA, 23 nt, Human
uucgcucuuguugcccaagcugg

SEQ ID NO: 270226 - RNA, 23 nt, Human
uucgcucuuguugcccaggcgga

SEQ ID NO: 270227 - RNA, 21 nt, Human
uucgcucuuguugcccaggcu

SEQ ID NO: 270228 - RNA, 24 nt, Human
uucgcucuuguugcccaggcuaga

SEQ ID NO: 270229 - RNA, 23 nt, Human
uucgcucuuguugcccaggcugg

SEQ ID NO: 270230 - RNA, 24 nt, Human
uucgcucuuguugcccaggcuuga

SEQ ID NO: 270231 - RNA, 23 nt, Human
uucgcucuuguugcccgggcugg

SEQ ID NO: 270232 - RNA, 23 nt, Human
uucgcucuuguugcucagacugg

SEQ ID NO: 270233 - RNA, 23 nt, Human
uucgcucuuguugcugaggcugg

SEQ ID NO: 270234 - RNA, 23 nt, Human
uucgcucuuguuggcuaggcugg

SEQ ID NO: 270235 - RNA, 23 nt, Human
uucgcucuuguuguccaggcugg

SEQ ID NO: 270236 - RNA, 23 nt, Human
uucgcugacgccgggugagcuga

SEQ ID NO: 270237 - RNA, 32 nt, Human
uucgcugagauggagacgugggcccccgugga

SEQ ID NO: 270238 - RNA, 32 nt, Human
uucgcugaggcuucgccugccuccuuccuccg

SEQ ID NO: 270239 - RNA, 32 nt, Human
uucgcuggacgggaagaagggcugggccgucc

SEQ ID NO: 270240 - RNA, 21 nt, Human
uucgcuggaggggcugggcca

SEQ ID NO: 270241 - RNA, 32 nt, Human
uucgcuggcuuuccagcuuagaaugcaucuca

SEQ ID NO: 270242 - RNA, 32 nt, Human
uucgcugggaguggauuuccacacgugccuuu

SEQ ID NO: 270243 - RNA, 32 nt, Human
uucgcuggggagcaggcgucucuccucagucg

SEQ ID NO: 270244 - RNA, 32 nt, Human
uucgcuggguuugcccagauguuuacgaauaa

SEQ ID NO: 270245 - RNA, 32 nt, Human
uucgcugguacccagauuuccacaggaguuaa

SEQ ID NO: 270246 - RNA, 32 nt, Human
uucgcuguccccucagcgggggccuugaagac

SEQ ID NO: 270247 - RNA, 32 nt, Human
uucgcugucccucccgcacuccuuaggcaaga

SEQ ID NO: 270248 - RNA, 32 nt, Human
uucgcuguguuuuugaaauguugggcauggcc

SEQ ID NO: 270249 - RNA, 31 nt, Human
uucgcuucacuuuuccuggcuguagagcgcu

SEQ ID NO: 270250 - RNA, 32 nt, Human
uucgcuucaguugcucgcuucugggugugcuc

SEQ ID NO: 270251 - RNA, 32 nt, Human
uucgcuuccagcucuuaaaauucuuuaucuuu

SEQ ID NO: 270252 - RNA, 21 nt, Human
uucgcuuccugagucuuuuca

SEQ ID NO: 270253 - RNA, 32 nt, Human
uucgcuugaacagcuucuccugaguccuccuu

SEQ ID NO: 270254 - RNA, 32 nt, Human
uucgcuugagcccaggagguggagguugcagu

SEQ ID NO: 270255 - RNA, 32 nt, Human
uucgcuugaguuaggaaugagaaguagccaca

SEQ ID NO: 270256 - RNA, 32 nt, Human
uucgcuugggguggucucucucacucugcccc

SEQ ID NO: 270257 - RNA, 32 nt, Human
uucgcuuuccagcaccagcuccugggggucac

SEQ ID NO: 270258 - RNA, 32 nt, Human
uucgcuuugucgcccaggcuggagugcaaugc

SEQ ID NO: 270259 - RNA, 32 nt, Human
uucgcuuuucccuaggcuguuccgcguggguu

SEQ ID NO: 270260 - RNA, 32 nt, Human
uucgcuuuuuccucccugccccucucucccuc

SEQ ID NO: 270261 - RNA, 32 nt, Human
uucggaaagacaccuggccagcgguccagagc

SEQ ID NO: 270262 - RNA, 32 nt, Human
uucggaacauggcaacccgugugugucucauc

SEQ ID NO: 270263 - RNA, 32 nt, Human
uucggaauuuuuccugaacaaauaacagaaag

SEQ ID NO: 270264 - RNA, 32 nt, Human
uucggaccagccuggccaacguggugaaaccu

SEQ ID NO: 270265 - RNA, 32 nt, Human
uucggacuggccuggccgacgugguaaaaccc

SEQ ID NO: 270266 - RNA, 32 nt, Human
uucggacugggcagagcacuagaaugcugcag

SEQ ID NO: 270267 - RNA, 32 nt, Human
uucggagaaagccuagguucugggcucagguc

SEQ ID NO: 270268 - RNA, 32 nt, Human
uucggagacggcuucuggaggaacggcuuggc

SEQ ID NO: 270269 - RNA, 32 nt, Human
uucggagagggcgagggccaccaccugcagca

SEQ ID NO: 270270 - RNA, 32 nt, Human
uucggagcaggagacaucccugugagcagaaa

SEQ ID NO: 270271 - RNA, 32 nt, Human
uucggagccuccugccugcacccuccaccucu

SEQ ID NO: 270272 - RNA, 32 nt, Human
uucggagcgggaguguucguugugccagcgac

SEQ ID NO: 270273 - RNA, 32 nt, Human
uucggaggaggcacuccauggagaaagggcuc

SEQ ID NO: 270274 - RNA, 32 nt, Human
uucggaggccaaggcggguggaucacgagguc

SEQ ID NO: 270275 - RNA, 32 nt, Human
uucggaggccgaggaagguagaucacuugagg

SEQ ID NO: 270276 - RNA, 32 nt, Human
uucggaggccgagguggucggaucacgagguu

SEQ ID NO: 270277 - RNA, 32 nt, Human
uucggagggaaggccccagggagccaccugag

SEQ ID NO: 270278 - RNA, 32 nt, Human
uucggagugaagacaucaguaagaagaccuga

SEQ ID NO: 270279 - RNA, 32 nt, Human
uucggauaucuucucaccuauguucccuggcu

SEQ ID NO: 270280 - RNA, 32 nt, Human
uucggaucucacuccauuauuugucagcacca

SEQ ID NO: 270281 - RNA, 32 nt, Human
uucggauggagggagacuagggagcgcggugg

SEQ ID NO: 270282 - RNA, 32 nt, Human
uucggauuagcgguuuauuaagcucuucuaua

SEQ ID NO: 270283 - RNA, 32 nt, Human
uucggauucacuucuggggaugcuguguagcg

SEQ ID NO: 270284 - RNA, 32 nt, Human
uucggauugccuucuuucaauuuccuugugaa

SEQ ID NO: 270285 - RNA, 32 nt, Human
uucggcagugcauuccagccugcagaaaaccu

SEQ ID NO: 270286 - RNA, 32 nt, Human
uucggcaucaucucuucccucucccaucguau

SEQ ID NO: 270287 - RNA, 32 nt, Human
uucggcaucgucuggugaugggucuggccucg

SEQ ID NO: 270288 - RNA, 32 nt, Human
uucggcaugguggcaggcgccuguaaucccag

SEQ ID NO: 270289 - RNA, 32 nt, Human
uucggccagcacaaccuuccucccuacucacg

SEQ ID NO: 270290 - RNA, 31 nt, Human
uucggccaucucucuggccugguuucccucg

SEQ ID NO: 270291 - RNA, 32 nt, Human
uucggccguccugcuucucuguuuccacacgu

SEQ ID NO: 270292 - RNA, 32 nt, Human
uucggccugccugccugccugccugagguccc

SEQ ID NO: 270293 - RNA, 32 nt, Human
uucggcgagguggaaguggagcccagugaggu

SEQ ID NO: 270294 - RNA, 32 nt, Human
uucggcgggaggugggggaacaaggggucuuc

SEQ ID NO: 270295 - RNA, 32 nt, Human
uucggcuagggaggaagguagaguaagagguu

SEQ ID NO: 270296 - RNA, 32 nt, Human
uucggcucacugcaaccuccaccuccuggguu

SEQ ID NO: 270297 - RNA, 32 nt, Human
uucggcucacugcaaccuccuccucccagagg

SEQ ID NO: 270298 - RNA, 32 nt, Human
uucggcucacugcaaccucugccucccaaguu

SEQ ID NO: 270299 - RNA, 32 nt, Human
uucggcucacugcaaccucugucuccuggguu

SEQ ID NO: 270300 - RNA, 32 nt, Human
uucggcucacugcaacuucugccucccggguu

SEQ ID NO: 270301 - RNA, 32 nt, Human
uucggcucagcuggaggaggccagcucuacag

SEQ ID NO: 270302 - RNA, 32 nt, Human
uucggcuccgggcaaauggcugagauggaggu

SEQ ID NO: 270303 - RNA, 32 nt, Human
uucggcuccuggaauuuccaauguauuuauuu

SEQ ID NO: 270304 - RNA, 30 nt, Human
uucggcugagcccacagggcacagacuguu

SEQ ID NO: 270305 - RNA, 32 nt, Human
uucggcugcugucuggacgucuggacccugcc

SEQ ID NO: 270306 - RNA, 32 nt, Human
uucggcuggaacaaaguggcccacauugugga

SEQ ID NO: 270307 - RNA, 32 nt, Human
uucggcuggagagggccagcucgcuucaggag

SEQ ID NO: 270308 - RNA, 32 nt, Human
uucggcuuacucuugccaaguuggaguugccu

SEQ ID NO: 270309 - RNA, 32 nt, Human
uucggcuucugagacggcggcagcagcggcau

SEQ ID NO: 270310 - RNA, 32 nt, Human
uucggcuuguuacugccuuuugucaaauaauc

SEQ ID NO: 270311 - RNA, 32 nt, Human
uucgggaacaaauggugucguaccaaauggcu

SEQ ID NO: 270312 - RNA, 32 nt, Human
uucgggaacccccuuccccgcucuugcccugc

SEQ ID NO: 270313 - RNA, 32 nt, Human
uucgggaacugugaguauuucacuuugcguag

SEQ ID NO: 270314 - RNA, 32 nt, Human
uucgggaagcaggccugcaucuuaccuguaca

SEQ ID NO: 270315 - RNA, 24 nt, Human
uucgggaaguggagguugcaguga

SEQ ID NO: 270316 - RNA, 32 nt, Human
uucgggaaugacacgucuucugaucccaugag

SEQ ID NO: 270317 - RNA, 32 nt, Human
uucgggaccaauauauaguggguacaucaagu

SEQ ID NO: 270318 - RNA, 32 nt, Human
uucgggaccaaucuggccaacauggcgaaacc

SEQ ID NO: 270319 - RNA, 24 nt, Human
uucgggaccagccuagccuacaug

SEQ ID NO: 270320 - RNA, 32 nt, Human
uucgggaccagccuagccuacauggugaaacc

SEQ ID NO: 270321 - RNA, 22 nt, Human
uucgggaccagccuggcaaaca

SEQ ID NO: 270322 - RNA, 24 nt, Human
uucgggaccagccuggccaacaug

SEQ ID NO: 270323 - RNA, 32 nt, Human
uucgggaccagccuggccaacaugaugaaacc

SEQ ID NO: 270324 - RNA, 24 nt, Human
uucgggaccagccugggaaauaua

SEQ ID NO: 270325 - RNA, 32 nt, Human
uucgggaccagccugggaaauauagugaaacu

SEQ ID NO: 270326 - RNA, 32 nt, Human
uucgggaccagccugggcaacauggugaaacc

SEQ ID NO: 270327 - RNA, 24 nt, Human
uucgggaccauccuggccaacaug

SEQ ID NO: 270328 - RNA, 32 nt, Human
uucgggaccauccuggccaacauggugaaacc

SEQ ID NO: 270329 - RNA, 32 nt, Human
uucgggacccucccgcgugccgaacugaucuu

SEQ ID NO: 270330 - RNA, 32 nt, Human
uucgggagccgccugcaccaacgcugccgccg

SEQ ID NO: 270331 - RNA, 22 nt, Human
uucgggaggcggaaaaagauga

SEQ ID NO: 270332 - RNA, 32 nt, Human
uucgggaggcugagacaggagaaucgcuugaa

SEQ ID NO: 270333 - RNA, 32 nt, Human
uucgggagguggagguugcagugagccgaaau

SEQ ID NO: 270334 - RNA, 32 nt, Human
uucgggaggugucuugaggcucagggaguuau

SEQ ID NO: 270335 - RNA, 32 nt, Human
uucgggaucggcugggugaggcugggcaggcc

SEQ ID NO: 270336 - RNA, 23 nt, Human
uucgggaugaguugggcagggug

SEQ ID NO: 270337 - RNA, 23 nt, Human
uucgggaugcagggggcacuaua

SEQ ID NO: 270338 - RNA, 32 nt, Human
uucgggcagagugcgggcuccucuccggcgcc

SEQ ID NO: 270339 - RNA, 32 nt, Human
uucgggcaguggacuguguccauagcugaaaa

SEQ ID NO: 270340 - RNA, 32 nt, Human
uucgggcaguguccgaacggcuucggaggggc

SEQ ID NO: 270341 - RNA, 32 nt, Human
uucgggcaugaagaacagggagcaggugcccc

SEQ ID NO: 270342 - RNA, 22 nt, Human
uucgggccccguaugaccuggg

SEQ ID NO: 270343 - RNA, 21 nt, Human
uucgggcccuccuuugguggg

SEQ ID NO: 270344 - RNA, 32 nt, Human
uucgggccgugacggggcggccagcagggacg

SEQ ID NO: 270345 - RNA, 32 nt, Human
uucgggccucacaccuuagucaacaucaaaga

SEQ ID NO: 270346 - RNA, 32 nt, Human
uucgggccuccaggauauguuugcgggggugg

SEQ ID NO: 270347 - RNA, 32 nt, Human
uucgggccugggacugugucugucgcccaugg

SEQ ID NO: 270348 - RNA, 32 nt, Human
uucgggcucaugcccagacacacucacugccc

SEQ ID NO: 270349 - RNA, 32 nt, Human
uucgggcucccaggccagcgaugcgcucgcgg

SEQ ID NO: 270350 - RNA, 32 nt, Human
uucgggcugauacaaccuguucugaccugcaa

SEQ ID NO: 270351 - RNA, 32 nt, Human
uucgggcugccuccuucucuuccuucauugcc

SEQ ID NO: 270352 - RNA, 28 nt, Human
uucggggaaucccggcuuuggcagcgug

SEQ ID NO: 270353 - RNA, 32 nt, Human
uucggggaggaagcaaacuuguuugcacuaug

SEQ ID NO: 270354 - RNA, 24 nt, Human
uucggggaggguuuuggugggaug

SEQ ID NO: 270355 - RNA, 32 nt, Human
uucggggagguaaucucugagguccucacugc

SEQ ID NO: 270356 - RNA, 21 nt, Human
uucggggagguggguggggug

SEQ ID NO: 270357 - RNA, 32 nt, Human
uucggggaguuaaagugcacucucucaccccu

SEQ ID NO: 270358 - RNA, 32 nt, Human
uucggggcagguugugaggccacagcaaugcu

SEQ ID NO: 270359 - RNA, 32 nt, Human
uucggggcuaccagaaaaauguuuccagaugg

SEQ ID NO: 270360 - RNA, 32 nt, Human
uucgggguaacccagaggcugaugaguguguu

SEQ ID NO: 270361 - RNA, 23 nt, Human
uucggggugcgggcuggggccgg

SEQ ID NO: 270362 - RNA, 32 nt, Human
uucggggugguuuugguccauuucuccagcga

SEQ ID NO: 270363 - RNA, 32 nt, Human
uucgggguugucauuaaguaaguugugaaauu

SEQ ID NO: 270364 - RNA, 32 nt, Human
uucggguaggagagagaggccuaagaggcuca

SEQ ID NO: 270365 - RNA, 24 nt, Human
uucggguccggccugggcaacgua

SEQ ID NO: 270366 - RNA, 32 nt, Human
uucgggugcaggagcaggagauggaacuggua

SEQ ID NO: 270367 - RNA, 24 nt, Human
uucgggugcuggguaagugccaug

SEQ ID NO: 270368 - RNA, 32 nt, Human
uucggguggagcugagccggagacaggcaauu

SEQ ID NO: 270369 - RNA, 31 nt, Human
uucgggugguaauccaucacaugcagcacua

SEQ ID NO: 270370 - RNA, 21 nt, Human
uucgggugucggggcagcaug

SEQ ID NO: 270371 - RNA, 32 nt, Human
uucggucauguuuuagagacaguggaguguaa

SEQ ID NO: 270372 - RNA, 32 nt, Human
uucgguccaacaacaggaaaccugacuggggc

SEQ ID NO: 270373 - RNA, 32 nt, Human
uucggucccccaggaccuccaggugcagaagu

SEQ ID NO: 270374 - RNA, 32 nt, Human
uucggucccuuucuuuuaaugcccauccucau

SEQ ID NO: 270375 - RNA, 32 nt, Human
uucggucuaccacggagggcugugcuguuagg

SEQ ID NO: 270376 - RNA, 32 nt, Human
uucggucuaguucugucaguugcugagagagg

SEQ ID NO: 270377 - RNA, 32 nt, Human
uucggucucuccccagccucuuccuucccccu

SEQ ID NO: 270378 - RNA, 32 nt, Human
uucggucugacaguccuugggguuaagucucc

SEQ ID NO: 270379 - RNA, 32 nt, Human
uucggugguaggggugggagggcgagucaccg

SEQ ID NO: 270380 - RNA, 32 nt, Human
uucgguguggagggguggagugcugugaucuc

SEQ ID NO: 270381 - RNA, 32 nt, Human
uucgguuugugagcaggcccggccgggccagg

SEQ ID NO: 270382 - RNA, 32 nt, Human
uucgguuuuuguuauugaacuguuucauguau

SEQ ID NO: 270383 - RNA, 32 nt, Human
uucguaaaccuaggggaaaccaucucucucac

SEQ ID NO: 270384 - RNA, 22 nt, Human
uucguaacaggugugcauuuca

SEQ ID NO: 270385 - RNA, 32 nt, Human
uucguaagaugcguugaacaaauagcuuuuga

SEQ ID NO: 270386 - RNA, 31 nt, Human
uucguaaucaguaaucucaugccaaggauga

SEQ ID NO: 270387 - RNA, 32 nt, Human
uucguagaucaagaucagcuucacucagaaga

SEQ ID NO: 270388 - RNA, 32 nt, Human
uucguauccuucugggcggugaaggggagagg

SEQ ID NO: 270389 - RNA, 32 nt, Human
uucguauuuguugagccagggauggaaaaaua

SEQ ID NO: 270390 - RNA, 32 nt, Human
uucgucacagccgcgcagugcccauggaggcg

SEQ ID NO: 270391 - RNA, 32 nt, Human
uucgucagcuuugacaccucuuuucugauuua

SEQ ID NO: 270392 - RNA, 32 nt, Human
uucgucccacugcaccgccuggcugagggcgu

SEQ ID NO: 270393 - RNA, 32 nt, Human
uucguccccacacuguggaggaagggaccugu

SEQ ID NO: 270394 - RNA, 19 nt, Human
uucguccccaguugccguc

SEQ ID NO: 270395 - RNA, 32 nt, Human
uucgucccccuccaccacacacaacgccaaga

SEQ ID NO: 270396 - RNA, 32 nt, Human
uucgucccucgggacagagcacagcuugugca

SEQ ID NO: 270397 - RNA, 32 nt, Human
uucguccggagcgccucacagcuuagugcgcc

SEQ ID NO: 270398 - RNA, 32 nt, Human
uucguccucccagggcccagaguguuccccau

SEQ ID NO: 270399 - RNA, 18 nt, Human
uucguccuccucgccuuc

SEQ ID NO: 270400 - RNA, 32 nt, Human
uucguccuccucgccuuccuccuccucgucag

SEQ ID NO: 270401 - RNA, 32 nt, Human
uucguccuggccaggacuuuccuugcccugaa

SEQ ID NO: 270402 - RNA, 32 nt, Human
uucgucggcugucggaaaguucugagcagugg

SEQ ID NO: 270403 - RNA, 32 nt, Human
uucgucgguggcagaggugggcgugggugcug

SEQ ID NO: 270404 - RNA, 32 nt, Human
uucgucuccaucuggugguccagcacaagcag

SEQ ID NO: 270405 - RNA, 32 nt, Human
uucgucucccucucuuuuacccagagacagca

SEQ ID NO: 270406 - RNA, 32 nt, Human
uucgucugacacugagaaagguggugguccgc

SEQ ID NO: 270407 - RNA, 32 nt, Human
uucgucugcaucuucuucucagcugccuuucc

SEQ ID NO: 270408 - RNA, 32 nt, Human
uucgucuuaaacuaguuaugcauuuguaaacu

SEQ ID NO: 270409 - RNA, 32 nt, Human
uucgucuucgguuuuucucuuccuucgcuaac

SEQ ID NO: 270410 - RNA, 32 nt, Human
uucgucuuuaagccucccuugccucagcaagg

SEQ ID NO: 270411 - RNA, 24 nt, Human
uucgugaccagccuggccaauaug

SEQ ID NO: 270412 - RNA, 32 nt, Human
uucgugaccagccuggccaauauggugaaacc

SEQ ID NO: 270413 - RNA, 24 nt, Human
uucgugaccagccuggucaacaug

SEQ ID NO: 270414 - RNA, 32 nt, Human
uucgugaccagccuggucaacauggugaaacc

SEQ ID NO: 270415 - RNA, 32 nt, Human
uucgugacgcagcccgggucucagggaacaug

SEQ ID NO: 270416 - RNA, 32 nt, Human
uucgugacggaguuaucagagacauugagagg

SEQ ID NO: 270417 - RNA, 32 nt, Human
uucgugacggccaccaggacagaaccaccuga

SEQ ID NO: 270418 - RNA, 32 nt, Human
uucgugagcgcagggugcgggccccgccggcc

SEQ ID NO: 270419 - RNA, 32 nt, Human
uucgugaguccccaagccauagcagggcgucu

SEQ ID NO: 270420 - RNA, 32 nt, Human
uucgugauaaacugcaugaaacuccugccguc

SEQ ID NO: 270421 - RNA, 32 nt, Human
uucgugauacagauuccuuugcucacauguuu

SEQ ID NO: 270422 - RNA, 32 nt, Human
uucgugaucagccuggccaacguggagaaacc

SEQ ID NO: 270423 - RNA, 32 nt, Human
uucgugcagcagccgcaaaggaaagcugauuu

SEQ ID NO: 270424 - RNA, 32 nt, Human
uucgugcaggagcugggggacacaguggcugu

SEQ ID NO: 270425 - RNA, 32 nt, Human
uucgugccaucggacuccagccugggugaagg

SEQ ID NO: 270426 - RNA, 32 nt, Human
uucgugccauuacacuccagccugggugacag

SEQ ID NO: 270427 - RNA, 32 nt, Human
uucgugcccagccuguacccacaguggcagcc

SEQ ID NO: 270428 - RNA, 32 nt, Human
uucgugccgcaguaacagacacaguauuuaau

SEQ ID NO: 270429 - RNA, 32 nt, Human
uucgugccuguaaucccagcucuuugggaggc

SEQ ID NO: 270430 - RNA, 32 nt, Human
uucgugcuggaaauuucuccuggguuucuugg

SEQ ID NO: 270431 - RNA, 32 nt, Human
uucgugcugugugcucuggggagcugcaaaag

SEQ ID NO: 270432 - RNA, 32 nt, Human
uucgugcuucucucuccggacucucauuaucc

SEQ ID NO: 270433 - RNA, 32 nt, Human
uucguggcagcacggcccggccccucacccuc

SEQ ID NO: 270434 - RNA, 32 nt, Human
uucguggcauuucuguggcucugcaguguucc

SEQ ID NO: 270435 - RNA, 32 nt, Human
uucguggccugcucucaggaagugggucaagc

SEQ ID NO: 270436 - RNA, 32 nt, Human
uucguggcgcugguggcuccagcuguuaguuu

SEQ ID NO: 270437 - RNA, 32 nt, Human
uucgugggccuuugauuuaccaacacuggaaa

SEQ ID NO: 270438 - RNA, 32 nt, Human
uucguggucacugcacuccagccuggcuacag

SEQ ID NO: 270439 - RNA, 32 nt, Human
uucguggucacugcuccagccucagccagggc

SEQ ID NO: 270440 - RNA, 32 nt, Human
uucguguaggaggcggaggggccgcagcuggg

SEQ ID NO: 270441 - RNA, 32 nt, Human
uucguguaugugacucaaagcauguaaccuua

SEQ ID NO: 270442 - RNA, 32 nt, Human
uucgugucugcccaccucuucucccccaccuc

SEQ ID NO: 270443 - RNA, 32 nt, Human
uucgugucugugcuggagcugcagccugcucg

SEQ ID NO: 270444 - RNA, 32 nt, Human
uucgugugccccgggccccauggagcugcggg

SEQ ID NO: 270445 - RNA, 32 nt, Human
uucgugugccuguagugccagcuacucaggag

SEQ ID NO: 270446 - RNA, 32 nt, Human
uucguguuacuuaagcaaaaucaacuauauag

SEQ ID NO: 270447 - RNA, 32 nt, Human
uucguucaagcgauucucccaccucagccucc

SEQ ID NO: 270448 - RNA, 31 nt, Human
uucguucacagcugaguuaugaagcuggaau

SEQ ID NO: 270449 - RNA, 32 nt, Human
uucguuccauucauccacucugugccuuguca

SEQ ID NO: 270450 - RNA, 32 nt, Human
uucguucugguucugguucugguucuaguucu

SEQ ID NO: 270451 - RNA, 32 nt, Human
uucguucuuccagcaaaggcuuccaagguaca

SEQ ID NO: 270452 - RNA, 32 nt, Human
uucguucuuccuccccucaguggcaguuuggu

SEQ ID NO: 270453 - RNA, 31 nt, Human
uucguugcaacuucucccauccgagucaccu

SEQ ID NO: 270454 - RNA, 32 nt, Human
uucguuuacagcuguugcaacagcagaacuag

SEQ ID NO: 270455 - RNA, 32 nt, Human
uucguuuccagccucaggaauuuauggucgcc

SEQ ID NO: 270456 - RNA, 32 nt, Human
uucguuucuaugagagauuuccucugauagcu

SEQ ID NO: 270457 - RNA, 32 nt, Human
uucguuucuauugcauauauaacugaaauauu

SEQ ID NO: 270458 - RNA, 32 nt, Human
uucguuucuggggcaacugagagcugagcgcu

SEQ ID NO: 270459 - RNA, 32 nt, Human
uucguuuucuagcuauaggaacuaucugggga

SEQ ID NO: 270460 - RNA, 32 nt, Human
uucguuuugucgcccaggcuggagugcagugg

SEQ ID NO: 270461 - RNA, 32 nt, Human
uucguuuuugagacggaguuugcucuuguuga

SEQ ID NO: 270462 - RNA, 32 nt, Human
uucguuuuugcaauaaugacaaaugcccugca

SEQ ID NO: 270463 - RNA, 32 nt, Human
uucuaaaaccaaaagaaaaaccauuuugaaua

SEQ ID NO: 270464 - RNA, 32 nt, Human
uucuaaaaccagcacagaaugauaugacucaa

SEQ ID NO: 270465 - RNA, 32 nt, Human
uucuaaaauugcuuucuugaugcagcuacaag

SEQ ID NO: 270466 - RNA, 32 nt, Human
uucuaaacacagaguguugggccugguuuguu

SEQ ID NO: 270467 - RNA, 32 nt, Human
uucuaaacacaugccaauguuugucuuuuccc

SEQ ID NO: 270468 - RNA, 32 nt, Human
uucuaaacacggcgaggucaccucucacucuu

SEQ ID NO: 270469 - RNA, 32 nt, Human
uucuaaacagcauaaggaagacuugcuccccu

SEQ ID NO: 270470 - RNA, 32 nt, Human
uucuaaagagaaguuugauauuuuguaugcuu

SEQ ID NO: 270471 - RNA, 32 nt, Human
uucuaaaggaagguagauccagcucugcccac

SEQ ID NO: 270472 - RNA, 32 nt, Human
uucuaaaggagaaggugcuaacaauggaaaga

SEQ ID NO: 270473 - RNA, 32 nt, Human
uucuaaaggcagaagcagaaguagcugcuuuu

SEQ ID NO: 270474 - RNA, 32 nt, Human
uucuaaagggcaugacagugaccugggaggua

SEQ ID NO: 270475 - RNA, 32 nt, Human
uucuaaaggggacagaucuugagcaaggcaag

SEQ ID NO: 270476 - RNA, 23 nt, Human
uucuaaagguaaauuauuuguua

SEQ ID NO: 270477 - RNA, 31 nt, Human
uucuaaaggucauauuuacauuuaaaaucaa

SEQ ID NO: 270478 - RNA, 32 nt, Human
uucuaaauaaggagauuuuggaacucucagcu

SEQ ID NO: 270479 - RNA, 32 nt, Human
uucuaaaucaggccaggaaggaggggaaaaga

SEQ ID NO: 270480 - RNA, 21 nt, Human
uucuaaaucaucugguugguu

SEQ ID NO: 270481 - RNA, 32 nt, Human
uucuaaaucuccaaaauaaaacuuuuuaaaau

SEQ ID NO: 270482 - RNA, 32 nt, Human
uucuaaaucugagaucucccuccagggaaucc

SEQ ID NO: 270483 - RNA, 32 nt, Human
uucuaaaugaugucuagcugcuuaccaacuuu

SEQ ID NO: 270484 - RNA, 32 nt, Human
uucuaaaugggagacugcugaggcucuuugca

SEQ ID NO: 270485 - RNA, 32 nt, Human
uucuaaauuauuucuaagguugugcuaauucu

SEQ ID NO: 270486 - RNA, 32 nt, Human
uucuaaauuuagugauaugguaaugaaauugg

SEQ ID NO: 270487 - RNA, 32 nt, Human
uucuaacaaagaaaagaauaaaguauuuauua

SEQ ID NO: 270488 - RNA, 21 nt, Human
uucuaacacaacaaaguggga

SEQ ID NO: 270489 - RNA, 32 nt, Human
uucuaacaggagaaaaguccuguaaggaugau

SEQ ID NO: 270490 - RNA, 32 nt, Human
uucuaacaguaguggaacaggagaaucugggc

SEQ ID NO: 270491 - RNA, 32 nt, Human
uucuaacauauguauuaagccaaacaugagug

SEQ ID NO: 270492 - RNA, 32 nt, Human
uucuaacaugccacucaagugccucuucgugu

SEQ ID NO: 270493 - RNA, 32 nt, Human
uucuaaccauaaaagaaauuauacuggugaga

SEQ ID NO: 270494 - RNA, 32 nt, Human
uucuaacccaaaacaguucuacucacuuccuu

SEQ ID NO: 270495 - RNA, 32 nt, Human
uucuaaccccaaaucuuagaucugccagguag

SEQ ID NO: 270496 - RNA, 32 nt, Human
uucuaaccuugccacuuugagggaaggaaggg

SEQ ID NO: 270497 - RNA, 32 nt, Human
uucuaacgcgguggcucccaagccacauucau

SEQ ID NO: 270498 - RNA, 32 nt, Human
uucuaacuacuaaaaaucaaaaauuuaacuuu

SEQ ID NO: 270499 - RNA, 32 nt, Human
uucuaacuccacuggcuccaugauucucugag

SEQ ID NO: 270500 - RNA, 32 nt, Human
uucuaacuccucccgcccucucuucccauuga

SEQ ID NO: 270501 - RNA, 32 nt, Human
uucuaacucgugaauaguuuaaggaccacauc

SEQ ID NO: 270502 - RNA, 32 nt, Human
uucuaacuuucuuuacuccaucauggcugguu

SEQ ID NO: 270503 - RNA, 32 nt, Human
uucuaagaacuuauagauaacuuaaaacuuuu

SEQ ID NO: 270504 - RNA, 32 nt, Human
uucuaagaaggcagaccaggucuugggcacag

SEQ ID NO: 270505 - RNA, 32 nt, Human
uucuaagaagugaaaaucuacacuccagugag

SEQ ID NO: 270506 - RNA, 32 nt, Human
uucuaagacaacaguaugcugcuauagccguc

SEQ ID NO: 270507 - RNA, 32 nt, Human
uucuaagacuagugaagaacuggaggaguccu

SEQ ID NO: 270508 - RNA, 32 nt, Human
uucuaagaggcaccuccaucgagggccggucu

SEQ ID NO: 270509 - RNA, 32 nt, Human
uucuaagaucagugcuugagacauguugcaga

SEQ ID NO: 270510 - RNA, 32 nt, Human
uucuaagauuauucuccucuauccacagcauu

SEQ ID NO: 270511 - RNA, 32 nt, Human
uucuaagcaauauuuuucaagccagaaguccu

SEQ ID NO: 270512 - RNA, 32 nt, Human
uucuaagcacagauucaucagugagccaaaug

SEQ ID NO: 270513 - RNA, 32 nt, Human
uucuaagcaguuucaucagcauuacuugggaa

SEQ ID NO: 270514 - RNA, 32 nt, Human
uucuaagcauuuucacagccguuucuucauau

SEQ ID NO: 270515 - RNA, 32 nt, Human
uucuaagcuggacgcacagaacagucucuccg

SEQ ID NO: 270516 - RNA, 32 nt, Human
uucuaaggaaggaggugcuggagcaguugaug

SEQ ID NO: 270517 - RNA, 32 nt, Human
uucuaaggacgaaggaaagggccaggcaaggc

SEQ ID NO: 270518 - RNA, 32 nt, Human
uucuaaggagguuucuaauuuuguaauuguua

SEQ ID NO: 270519 - RNA, 32 nt, Human
uucuaaggcugugccaucagcuccuuccuccc

SEQ ID NO: 270520 - RNA, 23 nt, Human
uucuaagggaagguuacuucuca

SEQ ID NO: 270521 - RNA, 32 nt, Human
uucuaagggaggaguacugaagagugacggac

SEQ ID NO: 270522 - RNA, 32 nt, Human
uucuaagggcuaugcaauugaaugaagaagca

SEQ ID NO: 270523 - RNA, 32 nt, Human
uucuaagguagaaaguggaugucauuuucagc

SEQ ID NO: 270524 - RNA, 24 nt, Human
uucuaaguacuaucagagugguga

SEQ ID NO: 270525 - RNA, 32 nt, Human
uucuaaguacuggacaccagccagggcggcag

SEQ ID NO: 270526 - RNA, 32 nt, Human
uucuaaguauggugcucucagguccaaguuca

SEQ ID NO: 270527 - RNA, 24 nt, Human
uucuaaguauucaauuaaguggga

SEQ ID NO: 270528 - RNA, 23 nt, Human
uucuaaguauucaggugaaagga

SEQ ID NO: 270529 - RNA, 32 nt, Human
uucuaagugggaagaggaagggagaggcaagc

SEQ ID NO: 270530 - RNA, 32 nt, Human
uucuaaguuguucacagauuuuuaccugcuaa

SEQ ID NO: 270531 - RNA, 32 nt, Human
uucuaauacaaacucaguucaagcuaauuaag

SEQ ID NO: 270532 - RNA, 32 nt, Human
uucuaauaguuuuugcuuucuguuuugcuguu

SEQ ID NO: 270533 - RNA, 32 nt, Human
uucuaaucauaaaagaaaucauauuggugaga

SEQ ID NO: 270534 - RNA, 32 nt, Human
uucuaauccaacaacaaaagaaaugucuggcu

SEQ ID NO: 270535 - RNA, 32 nt, Human
uucuaaucccaaagacuucgaacccaggaucu

SEQ ID NO: 270536 - RNA, 32 nt, Human
uucuaaucccaaauuaaaacucuaauacaaau

SEQ ID NO: 270537 - RNA, 32 nt, Human
uucuaauccugccuugguguuuauggagacca

SEQ ID NO: 270538 - RNA, 32 nt, Human
uucuaaucuccugccucuccccaacugucccc

SEQ ID NO: 270539 - RNA, 32 nt, Human
uucuaaugacaaaggaaguggugaucagucug

SEQ ID NO: 270540 - RNA, 32 nt, Human
uucuaaugaggagagaaaauauauguauuuuu

SEQ ID NO: 270541 - RNA, 32 nt, Human
uucuaauggaagcaaggacuggagaagcaaag

SEQ ID NO: 270542 - RNA, 32 nt, Human
uucuaauguggaccuuagaauacaguuuugag

SEQ ID NO: 270543 - RNA, 32 nt, Human
uucuaauguguacccaucaguggaaccaggau

SEQ ID NO: 270544 - RNA, 32 nt, Human
uucuaauucaaaggaaucacuuuauuguaaac

SEQ ID NO: 270545 - RNA, 32 nt, Human
uucuaauucauauauuuaacaaacaugauggu

SEQ ID NO: 270546 - RNA, 32 nt, Human
uucuaauugucugguugaggggccacaccacc

SEQ ID NO: 270547 - RNA, 29 nt, Human
uucuaauuguuuugugugccaggggcagu

SEQ ID NO: 270548 - RNA, 32 nt, Human
uucuaauuuucggagaaggcaagugcccucau

SEQ ID NO: 270549 - RNA, 32 nt, Human
uucuaauuuugagcauucaccuugcuaccuuu

SEQ ID NO: 270550 - RNA, 32 nt, Human
uucuacaaaacucuaguaugggcuucugacuu

SEQ ID NO: 270551 - RNA, 32 nt, Human
uucuacaaaagcuuucucccagcauuucuauu

SEQ ID NO: 270552 - RNA, 32 nt, Human
uucuacaaaaugcaaaaauuagcugggcaugg

SEQ ID NO: 270553 - RNA, 32 nt, Human
uucuacaacgugcagagaggugucacaccuuc

SEQ ID NO: 270554 - RNA, 32 nt, Human
uucuacaaggaugccagucauauuggauaagg

SEQ ID NO: 270555 - RNA, 32 nt, Human
uucuacaccagaccugcuuggcaccacaggga

SEQ ID NO: 270556 - RNA, 32 nt, Human
uucuacacccuugaucauuugcaaaccuguaa

SEQ ID NO: 270557 - RNA, 32 nt, Human
uucuacaccugcaugagugaaggauuuccacg

SEQ ID NO: 270558 - RNA, 32 nt, Human
uucuacagauuuuccaggguuuaagcauugcu

SEQ ID NO: 270559 - RNA, 32 nt, Human
uucuacagccuagucagcagauuuaucuuuga

SEQ ID NO: 270560 - RNA, 18 nt, Human
uucuacagcucacuucua

SEQ ID NO: 270561 - RNA, 32 nt, Human
uucuacagcugcagaauguauauaacacaaua

SEQ ID NO: 270562 - RNA, 32 nt, Human
uucuacaggagacuggagucuugcuuugugga

SEQ ID NO: 270563 - RNA, 32 nt, Human
uucuacaggaugaccccuugauauuugcacag

SEQ ID NO: 270564 - RNA, 32 nt, Human
uucuacagugauggggugcuuccuuuuggcuu

SEQ ID NO: 270565 - RNA, 32 nt, Human
uucuacagugguuuuauacugaaggaaaaaca

SEQ ID NO: 270566 - RNA, 32 nt, Human
uucuacagugucuccagauccagacccucuua

SEQ ID NO: 270567 - RNA, 32 nt, Human
uucuacaucaauuuggaacgagaggaguggaa

SEQ ID NO: 270568 - RNA, 32 nt, Human
uucuacaucuuuccucuagucauuuugaaaua

SEQ ID NO: 270569 - RNA, 32 nt, Human
uucuacaugggagcaagacagcugcuacguga

SEQ ID NO: 270570 - RNA, 32 nt, Human
uucuacaugggagcaagacagcugcuagguga

SEQ ID NO: 270571 - RNA, 32 nt, Human
uucuacauggguaccacaggaaccugggggcc

SEQ ID NO: 270572 - RNA, 32 nt, Human
uucuacauucugaaagcacaauuuuccauuca

SEQ ID NO: 270573 - RNA, 32 nt, Human
uucuacauuuugcaugaggccugcagguggcc

SEQ ID NO: 270574 - RNA, 32 nt, Human
uucuaccaaaaauacaaaaauuagccgggcgu

SEQ ID NO: 270575 - RNA, 32 nt, Human
uucuaccaaaaccuguguauuucuugaguuuu

SEQ ID NO: 270576 - RNA, 32 nt, Human
uucuaccaaaacuacaaaaauuagccgggcuc

SEQ ID NO: 270577 - RNA, 32 nt, Human
uucuaccagacucacagagaacugcuggguuu

SEQ ID NO: 270578 - RNA, 32 nt, Human
uucuaccagcacucugccacagcaucccugcc

SEQ ID NO: 270579 - RNA, 32 nt, Human
uucuaccaggcccucacuccccuuccccaugu

SEQ ID NO: 270580 - RNA, 32 nt, Human
uucuaccaguuccuuuccuccccacuucacca

SEQ ID NO: 270581 - RNA, 32 nt, Human
uucuaccaugccacgaagguguauggugucuc

SEQ ID NO: 270582 - RNA, 32 nt, Human
uucuacccaagugcuuuugcuuacagcagaua

SEQ ID NO: 270583 - RNA, 32 nt, Human
uucuacccaggugcuaggaacacuccuucaca

SEQ ID NO: 270584 - RNA, 24 nt, Human
uucuaccccagguuccuuuccuua

SEQ ID NO: 270585 - RNA, 32 nt, Human
uucuacccgcugagugccuacaagaggggaua

SEQ ID NO: 270586 - RNA, 32 nt, Human
uucuacccgugcaggccccaggagagccgcag

SEQ ID NO: 270587 - RNA, 32 nt, Human
uucuacccuagaagcucucugccaucgaugua

SEQ ID NO: 270588 - RNA, 32 nt, Human
uucuacccuccccuauuacauacaucuuucaa

SEQ ID NO: 270589 - RNA, 32 nt, Human
uucuacccugcucugcaccugugcucgacugc

SEQ ID NO: 270590 - RNA, 32 nt, Human
uucuacccuggcucaaccgaccccugucugcc

SEQ ID NO: 270591 - RNA, 32 nt, Human
uucuaccuccacuguauccugcaucccagacc

SEQ ID NO: 270592 - RNA, 32 nt, Human
uucuaccucuacccucuccaacuucuccuggu

SEQ ID NO: 270593 - RNA, 32 nt, Human
uucuaccucuugcugucuguguguucuuaagu

SEQ ID NO: 270594 - RNA, 32 nt, Human
uucuaccugcugcaguugcacugaagugauua

SEQ ID NO: 270595 - RNA, 32 nt, Human
uucuaccugggcagagccugccaaguugaguu

SEQ ID NO: 270596 - RNA, 32 nt, Human
uucuaccuggggaaauggaaaacagaggccac

SEQ ID NO: 270597 - RNA, 32 nt, Human
uucuaccuguauuccagggcuggaccacuuga

SEQ ID NO: 270598 - RNA, 32 nt, Human
uucuacuaaaaauacaaaaaguagcuaggugu

SEQ ID NO: 270599 - RNA, 32 nt, Human
uucuacuaaaaauacaaaaaugagcugggcgu

SEQ ID NO: 270600 - RNA, 32 nt, Human
uucuacuaaaaauacaaaaauuagccaggcgu

SEQ ID NO: 270601 - RNA, 32 nt, Human
uucuacuaaaaauacaaaaauuagccgagugc

SEQ ID NO: 270602 - RNA, 32 nt, Human
uucuacuaaaaauacaaaaauuagccgggcgu

SEQ ID NO: 270603 - RNA, 32 nt, Human
uucuacuaaaaauacaaaaauuagcuaggccu

SEQ ID NO: 270604 - RNA, 32 nt, Human
uucuacuaaaaauacaaaaauuagcuaggcgu

SEQ ID NO: 270605 - RNA, 32 nt, Human
uucuacuaaaaauacaaaaauuagcuggaugc

SEQ ID NO: 270606 - RNA, 32 nt, Human
uucuacuaaaaauacaaaaauuagcugggcau

SEQ ID NO: 270607 - RNA, 32 nt, Human
uucuacuaaaaauacaaaaauuagcuggggcg

SEQ ID NO: 270608 - RNA, 32 nt, Human
uucuacuaaaaauacaaaaauuagcugggugu

SEQ ID NO: 270609 - RNA, 32 nt, Human
uucuacuaaaaauacaaaaauuagucaggcau

SEQ ID NO: 270610 - RNA, 32 nt, Human
uucuacuaaaaauacaaaauuagcugggcaug

SEQ ID NO: 270611 - RNA, 32 nt, Human
uucuacuaaaaaugcaaaaauuagcugggugu

SEQ ID NO: 270612 - RNA, 32 nt, Human
uucuacuaaaaguacagaaauuagcugggugu

SEQ ID NO: 270613 - RNA, 32 nt, Human
uucuacuaauggccucggcuucccucuuucca

SEQ ID NO: 270614 - RNA, 32 nt, Human
uucuacuagaaauacaaagaagagcugguacc

SEQ ID NO: 270615 - RNA, 32 nt, Human
uucuacuagugagucuuuuucucugaaacacu

SEQ ID NO: 270616 - RNA, 32 nt, Human
uucuacuauggcaggagauguggugugcuguu

SEQ ID NO: 270617 - RNA, 32 nt, Human
uucuacucauauccuccccuugguuucaacca

SEQ ID NO: 270618 - RNA, 32 nt, Human
uucuacucccacugcuccuaccacuccagcaa

SEQ ID NO: 270619 - RNA, 32 nt, Human
uucuacuccucggaacguugcugguggggucc

SEQ ID NO: 270620 - RNA, 32 nt, Human
uucuacucuagauggcaacauuggacagaaaa

SEQ ID NO: 270621 - RNA, 32 nt, Human
uucuacucuggcaccacucuccaggcugccau

SEQ ID NO: 270622 - RNA, 32 nt, Human
uucuacucuguucuugcugucucccucuuuac

SEQ ID NO: 270623 - RNA, 32 nt, Human
uucuacucuucuggugggcuuugggguauccc

SEQ ID NO: 270624 - RNA, 32 nt, Human
uucuacugaacugucuuuaaguuuuucauucc

SEQ ID NO: 270625 - RNA, 32 nt, Human
uucuacugagccacccuacagccagaagagau

SEQ ID NO: 270626 - RNA, 32 nt, Human
uucuacugcaaaccuccacauccuggaaucaa

SEQ ID NO: 270627 - RNA, 32 nt, Human
uucuacugcaccugccugcucuggguggcaga

SEQ ID NO: 270628 - RNA, 32 nt, Human
uucuacugcucccuccaggucugggggcuuuu

SEQ ID NO: 270629 - RNA, 32 nt, Human
uucuacugcuucuuauucacacuauaauacau

SEQ ID NO: 270630 - RNA, 32 nt, Human
uucuacugcuuuucaguucccuucccugcugu

SEQ ID NO: 270631 - RNA, 32 nt, Human
uucuacuggauccuguaacagaaagaagacau

SEQ ID NO: 270632 - RNA, 32 nt, Human
uucuacugggaugugugcugagcugaaccaag

SEQ ID NO: 270633 - RNA, 32 nt, Human
uucuacugggcugugggcucagaccucauuuc

SEQ ID NO: 270634 - RNA, 32 nt, Human
uucuacuguaccagcugagcugccuucuuuua

SEQ ID NO: 270635 - RNA, 32 nt, Human
uucuacugugcaacauagugaugauucagaaa

SEQ ID NO: 270636 - RNA, 32 nt, Human
uucuacuguguagaauacuuugacuuaauuuu

SEQ ID NO: 270637 - RNA, 32 nt, Human
uucuacuguuuacaaauaaaacucagccaguc

SEQ ID NO: 270638 - RNA, 32 nt, Human
uucuacuucauauuuugagaauggccaugauu

SEQ ID NO: 270639 - RNA, 32 nt, Human
uucuacuuccuugaguuuugcuguugccaacc

SEQ ID NO: 270640 - RNA, 32 nt, Human
uucuacuugaagcaaagaccuuucucuuucac

SEQ ID NO: 270641 - RNA, 32 nt, Human
uucuacuugagcccucucucucugccacccac

SEQ ID NO: 270642 - RNA, 32 nt, Human
uucuacuugagugagaaaacugggugaaggaa

SEQ ID NO: 270643 - RNA, 32 nt, Human
uucuacuugcccacauaccucauucuuccugg

SEQ ID NO: 270644 - RNA, 32 nt, Human
uucuacuuuauucuguuuuacaauaagcaucc

SEQ ID NO: 270645 - RNA, 32 nt, Human
uucuacuuuccagguccacugguguuuggugu

SEQ ID NO: 270646 - RNA, 32 nt, Human
uucuagaagcagaaauagacugggaagaugca

SEQ ID NO: 270647 - RNA, 32 nt, Human
uucuagaagccgcuguuaccucuuguuuacag

SEQ ID NO: 270648 - RNA, 32 nt, Human
uucuagaagcuggaaaaggcaaaggagcacau

SEQ ID NO: 270649 - RNA, 32 nt, Human
uucuagaaggaggaguuggccauguugaaaug

SEQ ID NO: 270650 - RNA, 32 nt, Human
uucuagacaagaagcauccaaaccacuaucaa

SEQ ID NO: 270651 - RNA, 32 nt, Human
uucuagacaagccugggaaacauagcaagauc

SEQ ID NO: 270652 - RNA, 23 nt, Human
uucuagacacaguguacuuguca

SEQ ID NO: 270653 - RNA, 31 nt, Human
uucuagacauauugaacacauuuaagauuug

SEQ ID NO: 270654 - RNA, 32 nt, Human
uucuagaccagccugaccaacauggagaaacc

SEQ ID NO: 270655 - RNA, 32 nt, Human
uucuagaccagccugaccaacauggugaaacc

SEQ ID NO: 270656 - RNA, 32 nt, Human
uucuagaccagccugaccgacauggagaaacc

SEQ ID NO: 270657 - RNA, 24 nt, Human
uucuagaccagccuggccaacaua

SEQ ID NO: 270658 - RNA, 32 nt, Human
uucuagaccagccuggccaacauauagugaaa

SEQ ID NO: 270659 - RNA, 24 nt, Human
uucuagaccagccuggccaacaug

SEQ ID NO: 270660 - RNA, 32 nt, Human
uucuagaccagccuggccaacaugacccaucu

SEQ ID NO: 270661 - RNA, 24 nt, Human
uucuagaccagccuggccagcaug

SEQ ID NO: 270662 - RNA, 32 nt, Human
uucuagaccagccuggccagcauggugaaaac

SEQ ID NO: 270663 - RNA, 32 nt, Human
uucuagaccagccuggccagcauggugaaacc

SEQ ID NO: 270664 - RNA, 24 nt, Human
uucuagaccagccugggcaacaua

SEQ ID NO: 270665 - RNA, 32 nt, Human
uucuagaccagccugggcaacauagugagacc

SEQ ID NO: 270666 - RNA, 24 nt, Human
uucuagaccagccugggcaacgug

SEQ ID NO: 270667 - RNA, 32 nt, Human
uucuagaccagccugggcaacguggugaaacc

SEQ ID NO: 270668 - RNA, 24 nt, Human
uucuagaccagccuggucaacaug

SEQ ID NO: 270669 - RNA, 32 nt, Human
uucuagaccagccuggucaacauggcgaaacc

SEQ ID NO: 270670 - RNA, 24 nt, Human
uucuagaccagcuuaggcaacaua

SEQ ID NO: 270671 - RNA, 32 nt, Human
uucuagaccagcuuaggcaacauagcaagacc

SEQ ID NO: 270672 - RNA, 32 nt, Human
uucuagaccccaacuacagggaacaggcuuug

SEQ ID NO: 270673 - RNA, 32 nt, Human
uucuagacuguaacccugccucccugcuuccu

SEQ ID NO: 270674 - RNA, 32 nt, Human
uucuagacugugcuacagccugggcgacacag

SEQ ID NO: 270675 - RNA, 32 nt, Human
uucuagagaaauaugugcacauggacacaaag

SEQ ID NO: 270676 - RNA, 32 nt, Human
uucuagagacugggguuucuucauagguuuga

SEQ ID NO: 270677 - RNA, 32 nt, Human
uucuagagagaugucagggcagggcugggcgc

SEQ ID NO: 270678 - RNA, 32 nt, Human
uucuagagaucuuuugaaaauuucacacgauu

SEQ ID NO: 270679 - RNA, 32 nt, Human
uucuagagccagucucugccucccagacgcgg

SEQ ID NO: 270680 - RNA, 32 nt, Human
uucuagagcuaccguggagucucuccagugga

SEQ ID NO: 270681 - RNA, 32 nt, Human
uucuagagcuaugcagcuggagcacugccuuu

SEQ ID NO: 270682 - RNA, 32 nt, Human
uucuagagugacaggcaccagaugggaugggc

SEQ ID NO: 270683 - RNA, 32 nt, Human
uucuagaucgcuucaagccuauacugauggcc

SEQ ID NO: 270684 - RNA, 32 nt, Human
uucuagaucgucuagaucuacuagaccauggg

SEQ ID NO: 270685 - RNA, 32 nt, Human
uucuagauuguggggcucauuuugccagggcc

SEQ ID NO: 270686 - RNA, 18 nt, Human
uucuagcaaagcaggcca

SEQ ID NO: 270687 - RNA, 32 nt, Human
uucuagcaaccaggacaccugccgcagugcca

SEQ ID NO: 270688 - RNA, 32 nt, Human
uucuagcaagugagagagaugggagcuccucu

SEQ ID NO: 270689 - RNA, 32 nt, Human
uucuagcacaaacuguaagaaugcuguuguaa

SEQ ID NO: 270690 - RNA, 32 nt, Human
uucuagcacuccaggaaacugugggagagugu

SEQ ID NO: 270691 - RNA, 32 nt, Human
uucuagcacugguggagaauuauagaauaaag

SEQ ID NO: 270692 - RNA, 32 nt, Human
uucuagcagaucaugccauggagcucacgacg

SEQ ID NO: 270693 - RNA, 32 nt, Human
uucuagcagcugcaaaaugguuuaaugccccc

SEQ ID NO: 270694 - RNA, 32 nt, Human
uucuagcaggagagaacagauggcagauaugg

SEQ ID NO: 270695 - RNA, 32 nt, Human
uucuagcaggcaggaaguccugugcgguguca

SEQ ID NO: 270696 - RNA, 32 nt, Human
uucuagccccugguucuaucccuucuuccgcc

SEQ ID NO: 270697 - RNA, 32 nt, Human
uucuagccuaucuccugugccccugacugagc

SEQ ID NO: 270698 - RNA, 31 nt, Human
uucuagccucauggaauacuguugaaccuau

SEQ ID NO: 270699 - RNA, 32 nt, Human
uucuagccuucccccaucuccugucguuuucg

SEQ ID NO: 270700 - RNA, 32 nt, Human
uucuagccuucgugaaguuguucucguggagg

SEQ ID NO: 270701 - RNA, 32 nt, Human
uucuagcuacgcaggaggauugcuugagccca

SEQ ID NO: 270702 - RNA, 32 nt, Human
uucuagcucagguccaacccucggugggugca

SEQ ID NO: 270703 - RNA, 32 nt, Human
uucuagcucaucucacucugguaaugucuuuc

SEQ ID NO: 270704 - RNA, 32 nt, Human
uucuagcucaucucacucugguaaugucuuug

SEQ ID NO: 270705 - RNA, 32 nt, Human
uucuagcugaaaacuuuuccacaguuuuacau

SEQ ID NO: 270706 - RNA, 32 nt, Human
uucuagcugcaagccagcucuggcuucuggag

SEQ ID NO: 270707 - RNA, 32 nt, Human
uucuagcugcagcuuugcuuccaaugugaccu

SEQ ID NO: 270708 - RNA, 32 nt, Human
uucuagcugccuggggcuggcccugcucagac

SEQ ID NO: 270709 - RNA, 32 nt, Human
uucuagcuugauaaguuaugugcugccuuggc

SEQ ID NO: 270710 - RNA, 32 nt, Human
uucuaggaaagguggagucgguagugagaagc

SEQ ID NO: 270711 - RNA, 32 nt, Human
uucuaggaagcccagacacauggagaaguucu

SEQ ID NO: 270712 - RNA, 32 nt, Human
uucuaggaaguagauguuccauaucuucaaaa

SEQ ID NO: 270713 - RNA, 32 nt, Human
uucuaggagaccccacaugcaggcagauggag

SEQ ID NO: 270714 - RNA, 32 nt, Human
uucuaggagaccccacaugcaggcagguggag

SEQ ID NO: 270715 - RNA, 32 nt, Human
uucuaggagagaagcugguccacccacaggcu

SEQ ID NO: 270716 - RNA, 32 nt, Human
uucuaggagagaggugaaagaaaccuggcaaa

SEQ ID NO: 270717 - RNA, 32 nt, Human
uucuaggagcagaaaucuaucuugccauaccc

SEQ ID NO: 270718 - RNA, 32 nt, Human
uucuaggaggcugagaagcaggagauccaagc

SEQ ID NO: 270719 - RNA, 32 nt, Human
uucuaggaguagugguaucggcgucugcugcg

SEQ ID NO: 270720 - RNA, 32 nt, Human
uucuaggauguucacuucuucuccacaaugaa

SEQ ID NO: 270721 - RNA, 32 nt, Human
uucuaggccaugaggcccauccagugccucgu

SEQ ID NO: 270722 - RNA, 32 nt, Human
uucuaggcccgcccaccccaaccuucuggugg

SEQ ID NO: 270723 - RNA, 32 nt, Human
uucuaggccugcuuuccagacuucugagauag

SEQ ID NO: 270724 - RNA, 32 nt, Human
uucuaggcucaagcaguccuucgucuaagccu

SEQ ID NO: 270725 - RNA, 32 nt, Human
uucuaggcucaagcgauucuccugccucaucc

SEQ ID NO: 270726 - RNA, 32 nt, Human
uucuaggcucacugcaacuucugccucccaug

SEQ ID NO: 270727 - RNA, 32 nt, Human
uucuagggagugagacauuuuugggagcagag

SEQ ID NO: 270728 - RNA, 32 nt, Human
uucuagggccuggcuuccucagccucuucucu

SEQ ID NO: 270729 - RNA, 32 nt, Human
uucuagggcugguucccgucaucuucgggagc

SEQ ID NO: 270730 - RNA, 32 nt, Human
uucuaggggaauggcuguguugagucaaggca

SEQ ID NO: 270731 - RNA, 32 nt, Human
uucuaggggaggcgggugggggagggagggau

SEQ ID NO: 270732 - RNA, 32 nt, Human
uucuaggggaggugguaggcugcaugugccac

SEQ ID NO: 270733 - RNA, 32 nt, Human
uucuagguacugucuucuggaccucagagccc

SEQ ID NO: 270734 - RNA, 32 nt, Human
uucuaggucuccaggucuccccagccuuaguu

SEQ ID NO: 270735 - RNA, 32 nt, Human
uucuagguuugcacugaauugucuuuuguaca

SEQ ID NO: 270736 - RNA, 32 nt, Human
uucuaguaaagugaagauucaagucaguuguu

SEQ ID NO: 270737 - RNA, 21 nt, Human
uucuaguacagcagccaugca

SEQ ID NO: 270738 - RNA, 32 nt, Human
uucuaguauucagggagauuucagaggcuggg

SEQ ID NO: 270739 - RNA, 32 nt, Human
uucuagucacuggccucaaaggaccccacagc

SEQ ID NO: 270740 - RNA, 32 nt, Human
uucuagucucacaaaaaggaagaccagggagg

SEQ ID NO: 270741 - RNA, 32 nt, Human
uucuagucuugaacuccugaccucaggugauc

SEQ ID NO: 270742 - RNA, 32 nt, Human
uucuagugcacucugauccacccugcacacca

SEQ ID NO: 270743 - RNA, 32 nt, Human
uucuagugguaucaaugaagauaguuacagua

SEQ ID NO: 270744 - RNA, 32 nt, Human
uucuagugucuauccauuguaccugcucuuga

SEQ ID NO: 270745 - RNA, 32 nt, Human
uucuaguuaaaauuuugcuaucuuucaaauaa

SEQ ID NO: 270746 - RNA, 19 nt, Human
uucuaguuacauggacucu

SEQ ID NO: 270747 - RNA, 32 nt, Human
uucuaguucaacuuuuauccugcagcaaguaa

SEQ ID NO: 270748 - RNA, 32 nt, Human
uucuaguucagucauuuauuccugcauggagg

SEQ ID NO: 270749 - RNA, 32 nt, Human
uucuaguugccgaagugucugcuucauggugc

SEQ ID NO: 270750 - RNA, 32 nt, Human
uucuaguugcuguaaaugauaucuuauguuuu

SEQ ID NO: 270751 - RNA, 32 nt, Human
uucuaguugucaggaaugcugaagaauuaaca

SEQ ID NO: 270752 - RNA, 32 nt, Human
uucuauaacaaaacaaguagcucuaggaaaag

SEQ ID NO: 270753 - RNA, 32 nt, Human
uucuauaaccucaguccccaaccuuuuuggca

SEQ ID NO: 270754 - RNA, 32 nt, Human
uucuauaaguucuaucagucugauucuuaguu

SEQ ID NO: 270755 - RNA, 32 nt, Human
uucuauaaucauaccccuaacauccaggagac

SEQ ID NO: 270756 - RNA, 32 nt, Human
uucuauaaucuuugaacaugcuggcagaugga

SEQ ID NO: 270757 - RNA, 32 nt, Human
uucuauacaacaaauguuucuucuaacauccc

SEQ ID NO: 270758 - RNA, 32 nt, Human
uucuauacaacugugaaauacagauuuuuacc

SEQ ID NO: 270759 - RNA, 32 nt, Human
uucuauacauguuugcaguguuaagauaauug

SEQ ID NO: 270760 - RNA, 32 nt, Human
uucuauacugauguuuucguuuugccaauaua

SEQ ID NO: 270761 - RNA, 32 nt, Human
uucuauacugauuugaaguggagcuguucaga

SEQ ID NO: 270762 - RNA, 32 nt, Human
uucuauagacuaaaguuggcccagcuuuggaa

SEQ ID NO: 270763 - RNA, 32 nt, Human
uucuauaguacacggcuaucugugcuggcccc

SEQ ID NO: 270764 - RNA, 32 nt, Human
uucuauauuuuuaucacuauagaucauaguua

SEQ ID NO: 270765 - RNA, 32 nt, Human
uucuaucaaaacagcacccugcuugcucacca

SEQ ID NO: 270766 - RNA, 32 nt, Human
uucuaucaaacuaccaauggcauuuuucacag

SEQ ID NO: 270767 - RNA, 32 nt, Human
uucuaucaaucagcuguccugucccugccagc

SEQ ID NO: 270768 - RNA, 32 nt, Human
uucuaucacccaggcuggaguggagugguaug

SEQ ID NO: 270769 - RNA, 32 nt, Human
uucuaucaccucucuccaggaucucugcuguc

SEQ ID NO: 270770 - RNA, 32 nt, Human
uucuaucacugggguuucccauguugcagcac

SEQ ID NO: 270771 - RNA, 32 nt, Human
uucuaucagccugcagaaauguuacacuuucc

SEQ ID NO: 270772 - RNA, 32 nt, Human
uucuaucaguguaucucauuauuucauacugu

SEQ ID NO: 270773 - RNA, 32 nt, Human
uucuauccacaucccuaacaucaugcauucac

SEQ ID NO: 270774 - RNA, 32 nt, Human
uucuaucccaccccucugaucucccauaagug

SEQ ID NO: 270775 - RNA, 32 nt, Human
uucuauccccucaauccucccacccaccaggc

SEQ ID NO: 270776 - RNA, 32 nt, Human
uucuaucccuucacuuucagucuacgucuaaa

SEQ ID NO: 270777 - RNA, 32 nt, Human
uucuauccucuccucuuccucucccauuucuu

SEQ ID NO: 270778 - RNA, 32 nt, Human
uucuaucgcccaggcuggagugcaauggcaca

SEQ ID NO: 270779 - RNA, 32 nt, Human
uucuaucggcagcaauuccaucaagccaagcc

SEQ ID NO: 270780 - RNA, 32 nt, Human
uucuaucggccaggcuggagugcaguggugca

SEQ ID NO: 270781 - RNA, 32 nt, Human
uucuaucuuaucagggccuacaguaacaugcc

SEQ ID NO: 270782 - RNA, 32 nt, Human
uucuaucuucuuuucuugccucccugaccagc

SEQ ID NO: 270783 - RNA, 32 nt, Human
uucuaugaaauaaaccuaguuuagaaauaggg

SEQ ID NO: 270784 - RNA, 32 nt, Human
uucuaugaacagcucagaaggaauccaaaaag

SEQ ID NO: 270785 - RNA, 32 nt, Human
uucuaugaaccuuuggaagaccaccuguguug

SEQ ID NO: 270786 - RNA, 32 nt, Human
uucuaugacagauccccucuggcucaccgagc

SEQ ID NO: 270787 - RNA, 32 nt, Human
uucuaugaccaccgcccccaaccagcugcccc

SEQ ID NO: 270788 - RNA, 32 nt, Human
uucuaugagagauuuccucugauagcucugcu

SEQ ID NO: 270789 - RNA, 32 nt, Human
uucuaugagcuuccaagucccuuuccacuuua

SEQ ID NO: 270790 - RNA, 32 nt, Human
uucuaugaggggcagagcuccugguacaucca

SEQ ID NO: 270791 - RNA, 32 nt, Human
uucuaugaucauugcuuuuucucuuuacaggg

SEQ ID NO: 270792 - RNA, 32 nt, Human
uucuaugcaaaaagaagguggggaagaaagug

SEQ ID NO: 270793 - RNA, 32 nt, Human
uucuaugcaaagcaaaaagccagcagcagccc

SEQ ID NO: 270794 - RNA, 32 nt, Human
uucuaugcagcucagggagacccuaaguuaag

SEQ ID NO: 270795 - RNA, 29 nt, Human
uucuaugcaggaccccaaaaugcagguuu

SEQ ID NO: 270796 - RNA, 32 nt, Human
uucuaugccuuauuugaguuaucacuuggagg

SEQ ID NO: 270797 - RNA, 32 nt, Human
uucuaugcuauauuuugcuauucaaaauuuag

SEQ ID NO: 270798 - RNA, 32 nt, Human
uucuaugcugagccuuagccucccagguuaua

SEQ ID NO: 270799 - RNA, 32 nt, Human
uucuaugcugauuuuacaaaagaucauuuuua

SEQ ID NO: 270800 - RNA, 32 nt, Human
uucuauggagcuugucauaauaauagcagaua

SEQ ID NO: 270801 - RNA, 32 nt, Human
uucuauggccauuacuaacacgcauuguacac

SEQ ID NO: 270802 - RNA, 32 nt, Human
uucuaugggucugagcuguggaaaagggagag

SEQ ID NO: 270803 - RNA, 32 nt, Human
uucuauggguuuuccuuucuuuccuuuaugca

SEQ ID NO: 270804 - RNA, 32 nt, Human
uucuauguauuuguuuaucuacaaauuacagg

SEQ ID NO: 270805 - RNA, 29 nt, Human
uucuaugucccuguggcuauguuuccagu

SEQ ID NO: 270806 - RNA, 32 nt, Human
uucuaugucccuguggcuauguuuccaguguc

SEQ ID NO: 270807 - RNA, 24 nt, Human
uucuaugucuccccaaggcugggg

SEQ ID NO: 270808 - RNA, 32 nt, Human
uucuaugugaaauccaaccuugucgugcauca

SEQ ID NO: 270809 - RNA, 24 nt, Human
uucuaugugcagggauccaaggca

SEQ ID NO: 270810 - RNA, 32 nt, Human
uucuaugugcagggauccaaggcaggcccuag

SEQ ID NO: 270811 - RNA, 32 nt, Human
uucuauguggcaacccuagguaggggagcaca

SEQ ID NO: 270812 - RNA, 29 nt, Human
uucuaugugugaacagcuagucuguaucu

SEQ ID NO: 270813 - RNA, 32 nt, Human
uucuauuaaguuuuagugaaaagccuaauuac

SEQ ID NO: 270814 - RNA, 32 nt, Human
uucuauuauggguagccuuuuuaccaauuaua

SEQ ID NO: 270815 - RNA, 32 nt, Human
uucuauucaaggagaaaacaccauucaguaag

SEQ ID NO: 270816 - RNA, 32 nt, Human
uucuauucacagcaccuccugcuucugccugg

SEQ ID NO: 270817 - RNA, 32 nt, Human
uucuauucacaucuucuccacuugagagagac

SEQ ID NO: 270818 - RNA, 32 nt, Human
uucuauuccauggcuaacuggcgaggggguga

SEQ ID NO: 270819 - RNA, 32 nt, Human
uucuauuccuuucugugucuacacauguucua

SEQ ID NO: 270820 - RNA, 32 nt, Human
uucuauucuacuuccuccauuucaccauuuau

SEQ ID NO: 270821 - RNA, 32 nt, Human
uucuauucucauuccuuucucuccaaugaguu

SEQ ID NO: 270822 - RNA, 32 nt, Human
uucuauucucauuccuuuucccacagcagcau

SEQ ID NO: 270823 - RNA, 32 nt, Human
uucuauucucucuuauagugaccaacaucuuu

SEQ ID NO: 270824 - RNA, 32 nt, Human
uucuauugaauugccuugggauuuccuucucc

SEQ ID NO: 270825 - RNA, 32 nt, Human
uucuauugaguauuauaagauagcuuacauuu

SEQ ID NO: 270826 - RNA, 32 nt, Human
uucuauuggucuuguguuuugcuugauugcuu

SEQ ID NO: 270827 - RNA, 32 nt, Human
uucuauuguuaaaaauaacagaaaucaguuca

SEQ ID NO: 270828 - RNA, 32 nt, Human
uucuauuuauucugucuuucuccucccacacu

SEQ ID NO: 270829 - RNA, 32 nt, Human
uucuauuuccagacuugaaaacauggaggauu

SEQ ID NO: 270830 - RNA, 32 nt, Human
uucuauuuccucaucucccuaaccacuaauua

SEQ ID NO: 270831 - RNA, 32 nt, Human
uucuauuucuucuuucucugguucuucuaaca

SEQ ID NO: 270832 - RNA, 32 nt, Human
uucuauuugaagauugccuuugcacucagugu

SEQ ID NO: 270833 - RNA, 32 nt, Human
uucuauuugcacagguucccuggcacugguag

SEQ ID NO: 270834 - RNA, 32 nt, Human
uucuauuugcauucaaaacugaguguucucuu

SEQ ID NO: 270835 - RNA, 32 nt, Human
uucuauuuuaaucuugcuacuaccguuauaca

SEQ ID NO: 270836 - RNA, 32 nt, Human
uucuauuuuacaccugcauguccuuugcauuu

SEQ ID NO: 270837 - RNA, 32 nt, Human
uucuauuuucagaaagugagaggagggaccgu

SEQ ID NO: 270838 - RNA, 32 nt, Human
uucuauuuucauuuucugcaagccugcguucu

SEQ ID NO: 270839 - RNA, 32 nt, Human
uucuauuuucuuauuuuucuuaggcaacacag

SEQ ID NO: 270840 - RNA, 32 nt, Human
uucuauuuugcguuucuuacugccuucuuuau

SEQ ID NO: 270841 - RNA, 32 nt, Human
uucucaaaacaucacaucacauuagcagaacu

SEQ ID NO: 270842 - RNA, 32 nt, Human
uucucaaacaagaugcuuuguucuccaacaag

SEQ ID NO: 270843 - RNA, 32 nt, Human
uucucaaacuaauucaugaaacagcaacuuuu

SEQ ID NO: 270844 - RNA, 32 nt, Human
uucucaaaguacugggauuauauaggcaugag

SEQ ID NO: 270845 - RNA, 32 nt, Human
uucucaaagugcugggauuacaggcgugagcc

SEQ ID NO: 270846 - RNA, 32 nt, Human
uucucaaaguucugggacuacaggcaugaaau

SEQ ID NO: 270847 - RNA, 32 nt, Human
uucucaacacccuuccuuguccuggaguaugg

SEQ ID NO: 270848 - RNA, 32 nt, Human
uucucaacccuccaggggucaggagugguacc

SEQ ID NO: 270849 - RNA, 32 nt, Human
uucucaagaaugcaucagcuguaccuacaaua

SEQ ID NO: 270850 - RNA, 32 nt, Human
uucucaagccuuuggauucagacugaauuaua

SEQ ID NO: 270851 - RNA, 32 nt, Human
uucucaagcguuucucuucacugugaguuguc

SEQ ID NO: 270852 - RNA, 32 nt, Human
uucucaaggggaagauaaaaugacuaagagga

SEQ ID NO: 270853 - RNA, 28 nt, Human
uucucaauaaaaaugucuuuugcuuuuu

SEQ ID NO: 270854 - RNA, 32 nt, Human
uucucaauaaaccugcauuaguuggcauugca

SEQ ID NO: 270855 - RNA, 32 nt, Human
uucucaauaaauauucagauguccuaagaaua

SEQ ID NO: 270856 - RNA, 32 nt, Human
uucucaauaggccacaggaagagggcauugug

SEQ ID NO: 270857 - RNA, 32 nt, Human
uucucaaugaacacagcuguuuugcugcuaga

SEQ ID NO: 270858 - RNA, 32 nt, Human
uucucaaugcucugauuccaucauguuuucuu

SEQ ID NO: 270859 - RNA, 32 nt, Human
uucucaauguuuucuuuugauuuccucugaca

SEQ ID NO: 270860 - RNA, 24 nt, Human
uucucaauucucugagacucagug

SEQ ID NO: 270861 - RNA, 32 nt, Human
uucucaauugacugcaaccucugcuucccagg

SEQ ID NO: 270862 - RNA, 32 nt, Human
uucucaauuggccagucuucugaucuuuagua

SEQ ID NO: 270863 - RNA, 21 nt, Human
uucucaauuuaucaauggaua

SEQ ID NO: 270864 - RNA, 32 nt, Human
uucucacacaugccacauccauugcagagaug

SEQ ID NO: 270865 - RNA, 32 nt, Human
uucucacacccacacaaauaggcucugccgug

SEQ ID NO: 270866 - RNA, 32 nt, Human
uucucacagaacuucuaucauuuuaaacugac

SEQ ID NO: 270867 - RNA, 32 nt, Human
uucucacagguaaaucuuucagccacagaauc

SEQ ID NO: 270868 - RNA, 32 nt, Human
uucucacaguccuggagacugggaaaucugag

SEQ ID NO: 270869 - RNA, 32 nt, Human
uucucacaguuuuuccccaggaagucuggaga

SEQ ID NO: 270870 - RNA, 32 nt, Human
uucucacaucuucuaaacccugguccauucuc

SEQ ID NO: 270871 - RNA, 32 nt, Human
uucucaccacagugcccauuuuucauccaggg

SEQ ID NO: 270872 - RNA, 32 nt, Human
uucucaccacccugaccuaucuccugcaguca

SEQ ID NO: 270873 - RNA, 23 nt, Human
uucucaccacugucccuauguca

SEQ ID NO: 270874 - RNA, 32 nt, Human
uucucaccaggaaggggguccacccagcaaag

SEQ ID NO: 270875 - RNA, 32 nt, Human
uucucacccaggaguggauuugugguuuggcu

SEQ ID NO: 270876 - RNA, 32 nt, Human
uucucacccaggcuggaaugcaguggcacaau

SEQ ID NO: 270877 - RNA, 32 nt, Human
uucucacccaggcuggacugaucacggcucac

SEQ ID NO: 270878 - RNA, 21 nt, Human
uucucaccccauacucuguca

SEQ ID NO: 270879 - RNA, 22 nt, Human
uucucaccccuagcuucccuca

SEQ ID NO: 270880 - RNA, 23 nt, Human
uucucaccccucugcagccccaa

SEQ ID NO: 270881 - RNA, 32 nt, Human
uucucacccuacucuauuauuuaccuucagau

SEQ ID NO: 270882 - RNA, 23 nt, Human
uucucacccuuaaggacucccaa

SEQ ID NO: 270883 - RNA, 32 nt, Human
uucucaccugcgcguucacacuggcgagaagc

SEQ ID NO: 270884 - RNA, 32 nt, Human
uucucaccugcuccucuaccugcuccacccuc

SEQ ID NO: 270885 - RNA, 21 nt, Human
uucucaccuuccugccuguca

SEQ ID NO: 270886 - RNA, 32 nt, Human
uucucaccuuguucucugccuccagaggauca

SEQ ID NO: 270887 - RNA, 32 nt, Human
uucucacgaggacccuuucuugcccacaguuu

SEQ ID NO: 270888 - RNA, 32 nt, Human
uucucacgccuguaaucccagcacuuugggag

SEQ ID NO: 270889 - RNA, 32 nt, Human
uucucacggggucaaucuuuuguguuuagaga

SEQ ID NO: 270890 - RNA, 32 nt, Human
uucucacggggugaaacaugucuuuaguuccu

SEQ ID NO: 270891 - RNA, 23 nt, Human
uucucacucaauucacauagaua

SEQ ID NO: 270892 - RNA, 32 nt, Human
uucucacucaccugcacaucucagucaagcaa

SEQ ID NO: 270893 - RNA, 32 nt, Human
uucucacucacuguagacccuauauuccuucu

SEQ ID NO: 270894 - RNA, 32 nt, Human
uucucacucuucucugcccuccacagaccucc

SEQ ID NO: 270895 - RNA, 32 nt, Human
uucucacugaagagagaaagcagaagguucua

SEQ ID NO: 270896 - RNA, 22 nt, Human
uucucacugcauccucccugca

SEQ ID NO: 270897 - RNA, 32 nt, Human
uucucacugccuggucacauggugccuaggga

SEQ ID NO: 270898 - RNA, 32 nt, Human
uucucacugguuuuuccaccuuccuccuuccc

SEQ ID NO: 270899 - RNA, 32 nt, Human
uucucacuuccgaguccaugugcagugcuuga

SEQ ID NO: 270900 - RNA, 32 nt, Human
uucucacuuugcaauaaauaguccaguguuuc

SEQ ID NO: 270901 - RNA, 32 nt, Human
uucucagaaaauacuugccuaggaggcucuca

SEQ ID NO: 270902 - RNA, 32 nt, Human
uucucagaaacacuccuucaauauuauauugg

SEQ ID NO: 270903 - RNA, 32 nt, Human
uucucagaacugaccguagucacuguauggaa

SEQ ID NO: 270904 - RNA, 32 nt, Human
uucucagaauaaugacaaguuuucguauuugu

SEQ ID NO: 270905 - RNA, 32 nt, Human
uucucagaccucugaccugugacagaagccca

SEQ ID NO: 270906 - RNA, 32 nt, Human
uucucagagaaaaguggaauuucuugaagauu

SEQ ID NO: 270907 - RNA, 22 nt, Human
uucucagagaauccagcugggc

SEQ ID NO: 270908 - RNA, 32 nt, Human
uucucagagacucacccccagcccugacccua

SEQ ID NO: 270909 - RNA, 32 nt, Human
uucucagagacuguucuacggauuguggugcu

SEQ ID NO: 270910 - RNA, 32 nt, Human
uucucagagagcagguuucuuuauaguuugga

SEQ ID NO: 270911 - RNA, 32 nt, Human
uucucagagauuccuaggaaagcugccuuauu

SEQ ID NO: 270912 - RNA, 32 nt, Human
uucucagagcuggagguugcugggcaccuaaa

SEQ ID NO: 270913 - RNA, 32 nt, Human
uucucagaguauuuccgcagcaaccaacuggc

SEQ ID NO: 270914 - RNA, 32 nt, Human
uucucagauguggccaagcaucacucuucacc

SEQ ID NO: 270915 - RNA, 32 nt, Human
uucucagcagcaguugccuccugauauguguc

SEQ ID NO: 270916 - RNA, 32 nt, Human
uucucagcaggaaccucaugcgaccugugacc

SEQ ID NO: 270917 - RNA, 32 nt, Human
uucucagcauuuuccuuucucugugaucauug

SEQ ID NO: 270918 - RNA, 20 nt, Human
uucucagccaggggagcacu

SEQ ID NO: 270919 - RNA, 32 nt, Human
uucucagccagggggaggacccuucaucuucu

SEQ ID NO: 270920 - RNA, 32 nt, Human
uucucagccuccagaacugugagaaauaaaug

SEQ ID NO: 270921 - RNA, 32 nt, Human
uucucagccuccagucuccaguuccaaggaug

SEQ ID NO: 270922 - RNA, 32 nt, Human
uucucagccucccucaccccagccccuucccc

SEQ ID NO: 270923 - RNA, 32 nt, Human
uucucagcucacugcaaccuccgccucuuggg

SEQ ID NO: 270924 - RNA, 32 nt, Human
uucucagcuccuuugacagacauucaagggca

SEQ ID NO: 270925 - RNA, 32 nt, Human
uucucagcugccaucuccagugccccagaaug

SEQ ID NO: 270926 - RNA, 32 nt, Human
uucucagcugcgccgucuccccaguccccaaa

SEQ ID NO: 270927 - RNA, 32 nt, Human
uucucagcuucgagcauggcuuuuggcuguca

SEQ ID NO: 270928 - RNA, 32 nt, Human
uucucaggaaucacagggccuaccuccuagcc

SEQ ID NO: 270929 - RNA, 32 nt, Human
uucucaggaauguagaaaugaggcagagguua

SEQ ID NO: 270930 - RNA, 32 nt, Human
uucucaggcagguugucccacagcagagacaa

SEQ ID NO: 270931 - RNA, 32 nt, Human
uucucaggcauucugcccuccugggccccucu

SEQ ID NO: 270932 - RNA, 32 nt, Human
uucucaggccacugcauuuagccugggcgaca

SEQ ID NO: 270933 - RNA, 32 nt, Human
uucucaggccaggcacauugagcauugguccu

SEQ ID NO: 270934 - RNA, 32 nt, Human
uucucaggcccagccucagagcagaucuuggc

SEQ ID NO: 270935 - RNA, 32 nt, Human
uucucaggccugacucucagcagcuaugguag

SEQ ID NO: 270936 - RNA, 32 nt, Human
uucucaggccuugcucccccaggaugacccac

SEQ ID NO: 270937 - RNA, 32 nt, Human
uucucaggcugcccaaggcucuucuguaacau

SEQ ID NO: 270938 - RNA, 32 nt, Human
uucucaggcuggccagaagagacaucuugggu

SEQ ID NO: 270939 - RNA, 32 nt, Human
uucucaggcuguagaugaagggguucagcaug

SEQ ID NO: 270940 - RNA, 20 nt, Human
uucucagggacaagaguagu

SEQ ID NO: 270941 - RNA, 24 nt, Human
uucucagggacaggcugguccagu

SEQ ID NO: 270942 - RNA, 32 nt, Human
uucucagggcaaaggaaccuggcucauuugaa

SEQ ID NO: 270943 - RNA, 32 nt, Human
uucucagggcacagcaacugccaaucccgcug

SEQ ID NO: 270944 - RNA, 32 nt, Human
uucucagggcuagcugcuccucucacaggcug

SEQ ID NO: 270945 - RNA, 32 nt, Human
uucucaggggcgccccucccaggcccucaggg

SEQ ID NO: 270946 - RNA, 32 nt, Human
uucucaggguuauuauaauguuaaaugagaua

SEQ ID NO: 270947 - RNA, 28 nt, Human
uucucaggucaugcugccucucccuauc

SEQ ID NO: 270948 - RNA, 32 nt, Human
uucucaggugugaccuacugugcuuggccuaa

SEQ ID NO: 270949 - RNA, 32 nt, Human
uucucagucaccaugcagaagaacacccgccc

SEQ ID NO: 270950 - RNA, 32 nt, Human
uucucagucccaaagaucuaagauaaauaaac

SEQ ID NO: 270951 - RNA, 32 nt, Human
uucucagugagggucagaguggggguggggga

SEQ ID NO: 270952 - RNA, 32 nt, Human
uucucagugagguagauauuaucugcaggacc

SEQ ID NO: 270953 - RNA, 32 nt, Human
uucucagugcucuccuaccccaccucaugccu

SEQ ID NO: 270954 - RNA, 32 nt, Human
uucucaguggacugccuugggcaaaccacugc

SEQ ID NO: 270955 - RNA, 32 nt, Human
uucucaguggguggagugccagggaggaggag

SEQ ID NO: 270956 - RNA, 32 nt, Human
uucucaguuucuuccccacaaaauuuggaauc

SEQ ID NO: 270957 - RNA, 32 nt, Human
uucucaguuucuuuucuguugaaaauccuggg

SEQ ID NO: 270958 - RNA, 32 nt, Human
uucucauacaauauauaguuauuuccuuuguu

SEQ ID NO: 270959 - RNA, 32 nt, Human
uucucauagcucugccuuauagaucauguaaa

SEQ ID NO: 270960 - RNA, 32 nt, Human
uucucauaguuacucaaaccuuuguuuagcau

SEQ ID NO: 270961 - RNA, 32 nt, Human
uucucauauucuugguauuccuccuggaugga

SEQ ID NO: 270962 - RNA, 32 nt, Human
uucucaucacacacacauggaaacccauaggu

SEQ ID NO: 270963 - RNA, 32 nt, Human
uucucaucaucaucaucucugcuacagucaug

SEQ ID NO: 270964 - RNA, 32 nt, Human
uucucaucuggauuaccagcucgaucucuaau

SEQ ID NO: 270965 - RNA, 32 nt, Human
uucucaucuguggagaagauggaaucuuaaaa

SEQ ID NO: 270966 - RNA, 32 nt, Human
uucucaugaaccucuguauugcuuuccuuaaa

SEQ ID NO: 270967 - RNA, 32 nt, Human
uucucaugaugcuucucagaccggcaacauca

SEQ ID NO: 270968 - RNA, 32 nt, Human
uucucaugaugucuuuccuuucaccuccugcg

SEQ ID NO: 270969 - RNA, 32 nt, Human
uucucaugcuacagagaaagauaaggaagaug

SEQ ID NO: 270970 - RNA, 32 nt, Human
uucucaugcuauuucuaccucacuuugguuuu

SEQ ID NO: 270971 - RNA, 32 nt, Human
uucucauggcuuuucagaauucagaauaugga

SEQ ID NO: 270972 - RNA, 32 nt, Human
uucucauguaaacuucagccaggcuguaaguc

SEQ ID NO: 270973 - RNA, 32 nt, Human
uucucaugucccccacuggucuguaccccagg

SEQ ID NO: 270974 - RNA, 32 nt, Human
uucucaugugccugaugugguggagggagaca

SEQ ID NO: 270975 - RNA, 32 nt, Human
uucucauguugccagaccugagguuccucacu

SEQ ID NO: 270976 - RNA, 32 nt, Human
uucucauguuuucuucccuccaccuccacccc

SEQ ID NO: 270977 - RNA, 30 nt, Human
uucucauuaccccuacacaucucuccacgg

SEQ ID NO: 270978 - RNA, 32 nt, Human
uucucauuaugggagcacuugguuaaauuaaa

SEQ ID NO: 270979 - RNA, 32 nt, Human
uucucauuccagcaugagcguuucugagucuc

SEQ ID NO: 270980 - RNA, 32 nt, Human
uucucauuggguggauggaugggugaggaggg

SEQ ID NO: 270981 - RNA, 32 nt, Human
uucucauugugccucuagacccucuuuaaagc

SEQ ID NO: 270982 - RNA, 32 nt, Human
uucucauuuauguauauuguauguuuaacccc

SEQ ID NO: 270983 - RNA, 32 nt, Human
uucucauuucuuuccuguucaucuccuugguc

SEQ ID NO: 270984 - RNA, 24 nt, Human
uucuccaaacccucuaggccucug

SEQ ID NO: 270985 - RNA, 32 nt, Human
uucuccaaacuugccgaaggcuucacagcugg

SEQ ID NO: 270986 - RNA, 32 nt, Human
uucuccaaauggcugcugucuuccucuaguac

SEQ ID NO: 270987 - RNA, 32 nt, Human
uucuccaacauacauccugcauuacaugaaug

SEQ ID NO: 270988 - RNA, 21 nt, Human
uucuccaagaaagguugcaag

SEQ ID NO: 270989 - RNA, 32 nt, Human
uucuccaagaggaggagggcgacgccaaggac

SEQ ID NO: 270990 - RNA, 32 nt, Human
uucuccaagcuccccuccugcucucccucccu

SEQ ID NO: 270991 - RNA, 32 nt, Human
uucuccaaguccugagcuucagaacuagggaa

SEQ ID NO: 270992 - RNA, 22 nt, Human
uucuccaagucuauucugcuuu

SEQ ID NO: 270993 - RNA, 32 nt, Human
uucuccaaguucuccuuuucucuccagaguga

SEQ ID NO: 270994 - RNA, 32 nt, Human
uucuccaauagucacauuggcaaagggagaac

SEQ ID NO: 270995 - RNA, 20 nt, Human
uucuccacacagguaauuca

SEQ ID NO: 270996 - RNA, 23 nt, Human
uucuccacacuuguccuaagcca

SEQ ID NO: 270997 - RNA, 32 nt, Human
uucuccacagccuucuccagccugugugauac

SEQ ID NO: 270998 - RNA, 32 nt, Human
uucuccacauccaggucagguggcguuugcug

SEQ ID NO: 270999 - RNA, 32 nt, Human
uucuccaccacucuugcauucugggugccugc

SEQ ID NO: 271000 - RNA, 32 nt, Human
uucuccaccaugagccucagacuugauaccac

SEQ ID NO: 271001 - RNA, 32 nt, Human
uucuccacccaauggggaaggaaggggguuuc

SEQ ID NO: 271002 - RNA, 19 nt, Human
uucuccacccaccagucag

SEQ ID NO: 271003 - RNA, 32 nt, Human
uucuccaccccucccccauacaaaauccacaa

SEQ ID NO: 271004 - RNA, 32 nt, Human
uucuccaccucucucucacagguacacacaca

SEQ ID NO: 271005 - RNA, 32 nt, Human
uucuccacucuccaccaugcaggacaaacauc

SEQ ID NO: 271006 - RNA, 32 nt, Human
uucuccacugcacuggagcuuugaagaccuaa

SEQ ID NO: 271007 - RNA, 32 nt, Human
uucuccacugcacugugcuagcagcucagcag

SEQ ID NO: 271008 - RNA, 32 nt, Human
uucuccacugugguggucuggauucagugauu

SEQ ID NO: 271009 - RNA, 32 nt, Human
uucuccagacccaccugcugacuuuagacucu

SEQ ID NO: 271010 - RNA, 32 nt, Human
uucuccagagauuacaaaaauguagcuucuca

SEQ ID NO: 271011 - RNA, 32 nt, Human
uucuccagagccuccagauaagaggccaggcu

SEQ ID NO: 271012 - RNA, 24 nt, Human
uucuccagaucucccucugucucc

SEQ ID NO: 271013 - RNA, 32 nt, Human
uucuccagcagcgaggagggaacuccaccgca

SEQ ID NO: 271014 - RNA, 21 nt, Human
uucuccagcagggcggcugca

SEQ ID NO: 271015 - RNA, 32 nt, Human
uucuccagcaucuuugcauugugaauaucuuc

SEQ ID NO: 271016 - RNA, 32 nt, Human
uucuccagccaagcucugagggcccaccuccu

SEQ ID NO: 271017 - RNA, 23 nt, Human
uucuccagccacccagccccaag

SEQ ID NO: 271018 - RNA, 21 nt, Human
uucuccagccagcugcugcag

SEQ ID NO: 271019 - RNA, 32 nt, Human
uucuccagcccugguagcauuugcucagagcc

SEQ ID NO: 271020 - RNA, 21 nt, Human
uucuccagcccuguggucuca

SEQ ID NO: 271021 - RNA, 18 nt, Human
uucuccagccucagccuc

SEQ ID NO: 271022 - RNA, 32 nt, Human
uucuccagccuccacccagcagcccuggauug

SEQ ID NO: 271023 - RNA, 32 nt, Human
uucuccagccuccaccugccugucugauccaa

SEQ ID NO: 271024 - RNA, 32 nt, Human
uucuccagccugggcaacagagugagucccug

SEQ ID NO: 271025 - RNA, 32 nt, Human
uucuccagccugggcaacggagugagacucca

SEQ ID NO: 271026 - RNA, 23 nt, Human
uucuccagccugugugauacaag

SEQ ID NO: 271027 - RNA, 32 nt, Human
uucuccagcucacccccagccugccgauguuu

SEQ ID NO: 271028 - RNA, 32 nt, Human
uucuccagcugaggcaggagaaugccuaccug

SEQ ID NO: 271029 - RNA, 32 nt, Human
uucuccagcuuuugcaguguccuggcauccuu

SEQ ID NO: 271030 - RNA, 30 nt, Human
uucuccaggaagcccagggcaccauccagc

SEQ ID NO: 271031 - RNA, 32 nt, Human
uucuccaggacugacucaacagccgauuugga

SEQ ID NO: 271032 - RNA, 32 nt, Human
uucuccaggauggcagaggcggaauugcacaa

SEQ ID NO: 271033 - RNA, 32 nt, Human
uucuccaggcagcacaugcgguggcucuggga

SEQ ID NO: 271034 - RNA, 24 nt, Human
uucuccaggcaggccuggccucug

SEQ ID NO: 271035 - RNA, 32 nt, Human
uucuccaggcccaguucuuccucccagcuggg

SEQ ID NO: 271036 - RNA, 21 nt, Human
uucuccaggcccucugaguuc

SEQ ID NO: 271037 - RNA, 20 nt, Human
uucuccaggcccugauucuc

SEQ ID NO: 271038 - RNA, 22 nt, Human
uucuccaggccugggcuacagg

SEQ ID NO: 271039 - RNA, 32 nt, Human
uucuccagggcauguugguuucccuggccucu

SEQ ID NO: 271040 - RNA, 32 nt, Human
uucuccaggguggcccaguguccccuucugcc

SEQ ID NO: 271041 - RNA, 24 nt, Human
uucuccaggugauucugaucccug

SEQ ID NO: 271042 - RNA, 32 nt, Human
uucuccaguagcugagcaaugcuugugaaucu

SEQ ID NO: 271043 - RNA, 32 nt, Human
uucuccaguauccugacauguaaagagauucu

SEQ ID NO: 271044 - RNA, 32 nt, Human
uucuccagucugaacaguucagcuacagucug

SEQ ID NO: 271045 - RNA, 32 nt, Human
uucuccagucugucacccuccuuuccugcucc

SEQ ID NO: 271046 - RNA, 32 nt, Human
uucuccaguuugaaaauaaaauagccuuuaaa

SEQ ID NO: 271047 - RNA, 32 nt, Human
uucuccaucgcuucucagccuuuuggcuaaga

SEQ ID NO: 271048 - RNA, 32 nt, Human
uucuccaucucacuaaggguuaaaggcgugca

SEQ ID NO: 271049 - RNA, 32 nt, Human
uucuccaucuccauucuuuugaauuuccucau

SEQ ID NO: 271050 - RNA, 32 nt, Human
uucuccaucuccugggacguagcaggaaauca

SEQ ID NO: 271051 - RNA, 32 nt, Human
uucuccaucuuccucgucuggacgguggucua

SEQ ID NO: 271052 - RNA, 32 nt, Human
uucuccaugagggagaaggaagcagcuagcua

SEQ ID NO: 271053 - RNA, 32 nt, Human
uucuccaugcacugucccugcccacacucgcu

SEQ ID NO: 271054 - RNA, 32 nt, Human
uucuccauggccuuugcacucuuuuugcuuuu

SEQ ID NO: 271055 - RNA, 32 nt, Human
uucuccauggugcuucaauagcauguuauuau

SEQ ID NO: 271056 - RNA, 32 nt, Human
uucuccauucaaggagcuuguagcucugagcu

SEQ ID NO: 271057 - RNA, 32 nt, Human
uucuccauucaggccuugagugguguccuauu

SEQ ID NO: 271058 - RNA, 32 nt, Human
uucuccauucucuuucauauuuuaaccaauuu

SEQ ID NO: 271059 - RNA, 32 nt, Human
uucuccauuuaucucuucguccuuccugccug

SEQ ID NO: 271060 - RNA, 32 nt, Human
uucuccauuugccucuuccuuccuauuucccu

SEQ ID NO: 271061 - RNA, 32 nt, Human
uucucccaagcugcaguacuggggaagggcug

SEQ ID NO: 271062 - RNA, 32 nt, Human
uucucccaccauaacaugaaaacaguguaaga

SEQ ID NO: 271063 - RNA, 32 nt, Human
uucucccacgggaagauucuuaaaacgaagaa

SEQ ID NO: 271064 - RNA, 32 nt, Human
uucucccacuccucacacucuucuacagggau

SEQ ID NO: 271065 - RNA, 32 nt, Human
uucucccagagaaaccaccuuccauccagcgg

SEQ ID NO: 271066 - RNA, 32 nt, Human
uucucccagccuuuuacccucuugccuccugc

SEQ ID NO: 271067 - RNA, 32 nt, Human
uucucccagcuucaaaugcacaauucaucauu

SEQ ID NO: 271068 - RNA, 32 nt, Human
uucucccaggaaccccaguuggggaaggccua

SEQ ID NO: 271069 - RNA, 32 nt, Human
uucucccaggagaggcuggaguguccaaaagc

SEQ ID NO: 271070 - RNA, 32 nt, Human
uucucccaggccugugcacacacccccucagc

SEQ ID NO: 271071 - RNA, 32 nt, Human
uucucccaguggcaggccucugucuuuuugcc

SEQ ID NO: 271072 - RNA, 32 nt, Human
uucucccauacauuccaaaaggaaguucaaca

SEQ ID NO: 271073 - RNA, 32 nt, Human
uucucccaugcacuugcacguccaggacuccu

SEQ ID NO: 271074 - RNA, 32 nt, Human
uucucccauggccauggaauaaaugccaugcu

SEQ ID NO: 271075 - RNA, 32 nt, Human
uucucccauucaaaccauucuaggccugcaau

SEQ ID NO: 271076 - RNA, 32 nt, Human
uucucccauucucccucccucucccuuuucuc

SEQ ID NO: 271077 - RNA, 32 nt, Human
uucucccauuucucccucuccuucccugacac

SEQ ID NO: 271078 - RNA, 32 nt, Human
uucuccccaaaagguguucaugccucccugug

SEQ ID NO: 271079 - RNA, 32 nt, Human
uucuccccaaagacgcacuccagaagucucgc

SEQ ID NO: 271080 - RNA, 32 nt, Human
uucuccccaaaucuagaaauuuuaguucauau

SEQ ID NO: 271081 - RNA, 32 nt, Human
uucuccccacaaccccaaccccagaggaaaag

SEQ ID NO: 271082 - RNA, 32 nt, Human
uucuccccacaucuagaaauuguaguucauau

SEQ ID NO: 271083 - RNA, 32 nt, Human
uucuccccaccccagccccacaccugcuccuu

SEQ ID NO: 271084 - RNA, 32 nt, Human
uucuccccaguccuccagcccaggagggagcc

SEQ ID NO: 271085 - RNA, 32 nt, Human
uucuccccaguucugauaccacuaagaagaag

SEQ ID NO: 271086 - RNA, 32 nt, Human
uucuccccaucccaccugugugcagugcccuu

SEQ ID NO: 271087 - RNA, 32 nt, Human
uucuccccaucugagccagccugcugguguga

SEQ ID NO: 271088 - RNA, 32 nt, Human
uucuccccaucuuuucuucuacauuuuguuau

SEQ ID NO: 271089 - RNA, 32 nt, Human
uucucccccaaagccaagccauuuaaugaccu

SEQ ID NO: 271090 - RNA, 32 nt, Human
uucucccccaucucccccucuccaucuccucu

SEQ ID NO: 271091 - RNA, 32 nt, Human
uucucccccuaaaaaugaauacauaguaggac

SEQ ID NO: 271092 - RNA, 31 nt, Human
uucucccccucucucccuccugugucuugcg

SEQ ID NO: 271093 - RNA, 32 nt, Human
uucuccccuacccagggaacuggaccuggcag

SEQ ID NO: 271094 - RNA, 32 nt, Human
uucuccccuacggcugcuucucaggccucccu

SEQ ID NO: 271095 - RNA, 17 nt, Human
uucuccccucaagggug

SEQ ID NO: 271096 - RNA, 32 nt, Human
uucuccccucacugcugagucucccaggaccc

SEQ ID NO: 271097 - RNA, 32 nt, Human
uucuccccucauuuccucuucuccuuacuaag

SEQ ID NO: 271098 - RNA, 32 nt, Human
uucuccccucccccuccucaccgucuucuccc

SEQ ID NO: 271099 - RNA, 32 nt, Human
uucuccccuccccucuuuccucacccuuuucu

SEQ ID NO: 271100 - RNA, 32 nt, Human
uucuccccugcacucugcucccugcgcgguaa

SEQ ID NO: 271101 - RNA, 32 nt, Human
uucuccccugcagcuuccucugcuucuggaau

SEQ ID NO: 271102 - RNA, 32 nt, Human
uucuccccugcccuauucugcuucacuugcau

SEQ ID NO: 271103 - RNA, 32 nt, Human
uucuccccugcccuuccuccugauggagugug

SEQ ID NO: 271104 - RNA, 32 nt, Human
uucuccccuuccccucccccuccccucccccu

SEQ ID NO: 271105 - RNA, 32 nt, Human
uucuccccuuugagaacauucagugaauacaa

SEQ ID NO: 271106 - RNA, 32 nt, Human
uucucccgacugcggcccccagccugguccac

SEQ ID NO: 271107 - RNA, 32 nt, Human
uucucccgccauucuuuuucugaggucuccug

SEQ ID NO: 271108 - RNA, 32 nt, Human
uucucccggaaccucugcucagccuggugaac

SEQ ID NO: 271109 - RNA, 32 nt, Human
uucucccgguggcucuguguacacgcucugcc

SEQ ID NO: 271110 - RNA, 32 nt, Human
uucucccuacaaccccaggcccagggauagga

SEQ ID NO: 271111 - RNA, 32 nt, Human
uucucccuagaugagcuucacaucucagguaa

SEQ ID NO: 271112 - RNA, 32 nt, Human
uucucccuccaaugcaccaucuguggauagau

SEQ ID NO: 271113 - RNA, 32 nt, Human
uucucccuccagaccuuccucugacccuugcu

SEQ ID NO: 271114 - RNA, 32 nt, Human
uucucccuccccacccccuccaggcccggggc

SEQ ID NO: 271115 - RNA, 32 nt, Human
uucucccucccgcuucccccagccgcggccua

SEQ ID NO: 271116 - RNA, 32 nt, Human
uucucccuccggaucgaugugcugcuguuaac

SEQ ID NO: 271117 - RNA, 32 nt, Human
uucucccuccuaccugucuguaguguuguggg

SEQ ID NO: 271118 - RNA, 32 nt, Human
uucucccuccucccaaccuccacccucaagua

SEQ ID NO: 271119 - RNA, 32 nt, Human
uucucccuccuccuuuuccuguguucucuuaa

SEQ ID NO: 271120 - RNA, 32 nt, Human
uucucccuccuuuccaacuuccuuccuuucuu

SEQ ID NO: 271121 - RNA, 32 nt, Human
uucucccucucccugcugcuucauacugaaac

SEQ ID NO: 271122 - RNA, 32 nt, Human
uucucccucugcaggcucugcagcagcuccug

SEQ ID NO: 271123 - RNA, 32 nt, Human
uucucccucuucucccugagacuucaguuuug

SEQ ID NO: 271124 - RNA, 32 nt, Human
uucucccucuuucauaacuggaugcagcugcu

SEQ ID NO: 271125 - RNA, 32 nt, Human
uucucccugagcuccuggaaggagcaguuacc

SEQ ID NO: 271126 - RNA, 32 nt, Human
uucucccugcaaccucaguccaaggaaccugc

SEQ ID NO: 271127 - RNA, 32 nt, Human
uucucccugcagcugccuagaccccguucaca

SEQ ID NO: 271128 - RNA, 32 nt, Human
uucucccugccugauucucugagcucugggcu

SEQ ID NO: 271129 - RNA, 32 nt, Human
uucucccugcuucuccccuuugucaucucuga

SEQ ID NO: 271130 - RNA, 32 nt, Human
uucucccuggccuucugcuccaagcucuccug

SEQ ID NO: 271131 - RNA, 32 nt, Human
uucucccugggaagguggggccagcaggagau

SEQ ID NO: 271132 - RNA, 32 nt, Human
uucucccugggccuggugaccuccacaggaug

SEQ ID NO: 271133 - RNA, 16 nt, Human
uucucccuguacagug

SEQ ID NO: 271134 - RNA, 32 nt, Human
uucucccugucccuuccuuucuccccuauuuu

SEQ ID NO: 271135 - RNA, 32 nt, Human
uucucccugucucugccugucuuccaagcucc

SEQ ID NO: 271136 - RNA, 32 nt, Human
uucucccugugccuuagagcagguguguacau

SEQ ID NO: 271137 - RNA, 32 nt, Human
uucucccuuauuuugugaucuguaacagggua

SEQ ID NO: 271138 - RNA, 32 nt, Human
uucucccuucccauuucuccccacuuucaucu

SEQ ID NO: 271139 - RNA, 32 nt, Human
uucucccuuuccaaccccuuccuuccuuuucc

SEQ ID NO: 271140 - RNA, 32 nt, Human
uucucccuuuggcuccucuccugcugccuuac

SEQ ID NO: 271141 - RNA, 32 nt, Human
uucucccuuuguccucauacagucgucucucu

SEQ ID NO: 271142 - RNA, 32 nt, Human
uucucccuuuuccuagacacaggacucugaca

SEQ ID NO: 271143 - RNA, 32 nt, Human
uucuccgaacccugaggcagugugugaagcug

SEQ ID NO: 271144 - RNA, 32 nt, Human
uucuccgaguuuugcuaccagccgaggcugug

SEQ ID NO: 271145 - RNA, 32 nt, Human
uucuccggaggcaccccuugcccagagugugc

SEQ ID NO: 271146 - RNA, 20 nt, Human
uucuccgggucaaggccagg

SEQ ID NO: 271147 - RNA, 32 nt, Human
uucuccggugagccacagccuggccaccuguc

SEQ ID NO: 271148 - RNA, 32 nt, Human
uucuccgugaccuuucucuagccagggagaag

SEQ ID NO: 271149 - RNA, 32 nt, Human
uucuccguggggacccgugucugugggagcgg

SEQ ID NO: 271150 - RNA, 32 nt, Human
uucuccguggugagcagggccaccccuggggc

SEQ ID NO: 271151 - RNA, 32 nt, Human
uucuccgugugggggcuacaugcgacccucuc

SEQ ID NO: 271152 - RNA, 32 nt, Human
uucuccguucuuuuuacaaucaucuuacacgc

SEQ ID NO: 271153 - RNA, 32 nt, Human
uucuccuaagggugucaggaaccucuaaaaag

SEQ ID NO: 271154 - RNA, 32 nt, Human
uucuccuagggaggaaacugaaaagcagaaag

SEQ ID NO: 271155 - RNA, 32 nt, Human
uucuccuaucuuucuuucucuucuuccuuucu

SEQ ID NO: 271156 - RNA, 32 nt, Human
uucuccucaccugggccuucucagccucugga

SEQ ID NO: 271157 - RNA, 32 nt, Human
uucuccucaguuuucuggagugcuuuggagga

SEQ ID NO: 271158 - RNA, 22 nt, Human
uucuccucaucuccccaucauu

SEQ ID NO: 271159 - RNA, 32 nt, Human
uucuccucaucugccucuuccugggcgccaac

SEQ ID NO: 271160 - RNA, 32 nt, Human
uucuccuccacccucuuaauggaugguauggc

SEQ ID NO: 271161 - RNA, 32 nt, Human
uucuccuccagaacaugcagagacccauggau

SEQ ID NO: 271162 - RNA, 32 nt, Human
uucuccuccagcccuucucuucaauggucccu

SEQ ID NO: 271163 - RNA, 25 nt, Human
uucuccuccauacauccccaucccu

SEQ ID NO: 271164 - RNA, 32 nt, Human
uucuccuccauucauguuuaauuugcaucaca

SEQ ID NO: 271165 - RNA, 32 nt, Human
uucuccucccacagggucccccuugccccagc

SEQ ID NO: 271166 - RNA, 32 nt, Human
uucuccucccaggaacugggccaacucaccug

SEQ ID NO: 271167 - RNA, 32 nt, Human
uucuccucccccaugcccaaccccuguggccg

SEQ ID NO: 271168 - RNA, 32 nt, Human
uucuccuccguuuucuucucuuccugcccuau

SEQ ID NO: 271169 - RNA, 31 nt, Human
uucuccuccuaaucugggccucuugucaugg

SEQ ID NO: 271170 - RNA, 32 nt, Human
uucuccuccuaaucugggccucuugucaugga

SEQ ID NO: 271171 - RNA, 32 nt, Human
uucuccuccuccagaccuaguauucuaaguua

SEQ ID NO: 271172 - RNA, 32 nt, Human
uucuccucgaccagccaucaugacauuuacca

SEQ ID NO: 271173 - RNA, 32 nt, Human
uucuccucguacugcugggugagguucucgau

SEQ ID NO: 271174 - RNA, 32 nt, Human
uucuccucuagggacucuucagucucauuuag

SEQ ID NO: 271175 - RNA, 32 nt, Human
uucuccucuaggguauugggaugcauguucug

SEQ ID NO: 271176 - RNA, 32 nt, Human
uucuccucuccccuccuucccccaccacaggu

SEQ ID NO: 271177 - RNA, 32 nt, Human
uucuccucuccccucuaaggccgaagaagggu

SEQ ID NO: 271178 - RNA, 32 nt, Human
uucuccucuccucaaaucucugaucaucuucu

SEQ ID NO: 271179 - RNA, 32 nt, Human
uucuccucuccucuccugguccuguugucccc

SEQ ID NO: 271180 - RNA, 32 nt, Human
uucuccucuccucugaccccucagcuccuugg

SEQ ID NO: 271181 - RNA, 32 nt, Human
uucuccucuucuuccuccuucguuucuuccuu

SEQ ID NO: 271182 - RNA, 32 nt, Human
uucuccugaaaccuucauccacacaaugccuc

SEQ ID NO: 271183 - RNA, 21 nt, Human
uucuccugaaggggcugcaag

SEQ ID NO: 271184 - RNA, 17 nt, Human
uucuccugaaugcagug

SEQ ID NO: 271185 - RNA, 32 nt, Human
uucuccugaccuccuuucaccugcugcuuuuu

SEQ ID NO: 271186 - RNA, 32 nt, Human
uucuccugauagucaccugcugguuguugcca

SEQ ID NO: 271187 - RNA, 32 nt, Human
uucuccugccaaaugacccuagacccucuguc

SEQ ID NO: 271188 - RNA, 32 nt, Human
uucuccugcccuccugugucucaggcccguuu

SEQ ID NO: 271189 - RNA, 32 nt, Human
uucuccugccuaagccucucgaguagcuggga

SEQ ID NO: 271190 - RNA, 20 nt, Human
uucuccugccucagccucgu

SEQ ID NO: 271191 - RNA, 32 nt, Human
uucuccugccucccugccucagccugggaccu

SEQ ID NO: 271192 - RNA, 32 nt, Human
uucuccugccucuccacacuccagguucccuc

SEQ ID NO: 271193 - RNA, 31 nt, Human
uucuccugccucuuggcccccagucacauuu

SEQ ID NO: 271194 - RNA, 32 nt, Human
uucuccugcuacagaacuggauccucccagcu

SEQ ID NO: 271195 - RNA, 32 nt, Human
uucuccugcuagccuagcuuuguauuuuauca

SEQ ID NO: 271196 - RNA, 32 nt, Human
uucuccugcuucuuccucuuccucucacucug

SEQ ID NO: 271197 - RNA, 32 nt, Human
uucuccugcuuuggccuccugaguagcuggga

SEQ ID NO: 271198 - RNA, 32 nt, Human
uucuccugcuuuggccuccugaguagcugggg

SEQ ID NO: 271199 - RNA, 32 nt, Human
uucuccuggaaccuguccacaguggggauugu

SEQ ID NO: 271200 - RNA, 32 nt, Human
uucuccuggagacagcucucaucaggcuuccc

SEQ ID NO: 271201 - RNA, 32 nt, Human
uucuccuggaucuugcugaauuaguggcuugg

SEQ ID NO: 271202 - RNA, 32 nt, Human
uucuccuggcaaguaaaccccaaggaggacug

SEQ ID NO: 271203 - RNA, 32 nt, Human
uucuccugggcccgcuuugccugcuugaagga

SEQ ID NO: 271204 - RNA, 32 nt, Human
uucuccugggcuccagccuccugcaaggacug

SEQ ID NO: 271205 - RNA, 32 nt, Human
uucuccuggggucacucccacauggcugccuc

SEQ ID NO: 271206 - RNA, 32 nt, Human
uucuccugggugaagauggaccagcccaccuu

SEQ ID NO: 271207 - RNA, 32 nt, Human
uucuccugguguuugcgcaagugccuucuccg

SEQ ID NO: 271208 - RNA, 32 nt, Human
uucuccuguaaucccagcuacucgggaggccg

SEQ ID NO: 271209 - RNA, 18 nt, Human
uucuccugucccagccuc

SEQ ID NO: 271210 - RNA, 32 nt, Human
uucuccugucuuagccuccugaguagcuguga

SEQ ID NO: 271211 - RNA, 32 nt, Human
uucuccugucuucauuuuccuccuuccaggcc

SEQ ID NO: 271212 - RNA, 32 nt, Human
uucuccugugucccaaaccccagggggcccca

SEQ ID NO: 271213 - RNA, 32 nt, Human
uucuccuguguucccuuugaguccaguguggg

SEQ ID NO: 271214 - RNA, 32 nt, Human
uucuccuguucugccaagacuuccuccucuuu

SEQ ID NO: 271215 - RNA, 32 nt, Human
uucuccuguuuagaauggcuguauuuacccaa

SEQ ID NO: 271216 - RNA, 32 nt, Human
uucuccuguuucacacagaggugggugguucu

SEQ ID NO: 271217 - RNA, 32 nt, Human
uucuccuguuucagccuccugaguagcuggga

SEQ ID NO: 271218 - RNA, 32 nt, Human
uucuccuuaagagcaacuuccuuuuuaaaaug

SEQ ID NO: 271219 - RNA, 32 nt, Human
uucuccuucaagguucuuucccccucaguuuu

SEQ ID NO: 271220 - RNA, 32 nt, Human
uucuccuucaguugugggguccugcuuugccc

SEQ ID NO: 271221 - RNA, 20 nt, Human
uucuccuucauccccaccac

SEQ ID NO: 271222 - RNA, 32 nt, Human
uucuccuuccucagcccugcccugcuuggaua

SEQ ID NO: 271223 - RNA, 32 nt, Human
uucuccuuccugaccuuccucagucugcagcu

SEQ ID NO: 271224 - RNA, 32 nt, Human
uucuccuuccuugucugccuuuacagauguuu

SEQ ID NO: 271225 - RNA, 32 nt, Human
uucuccuugaaaagugacauccugucacuucu

SEQ ID NO: 271226 - RNA, 32 nt, Human
uucuccuugacaauggaaaggcagcagucuuc

SEQ ID NO: 271227 - RNA, 32 nt, Human
uucuccuugagcucuuugacucccagaaggua

SEQ ID NO: 271228 - RNA, 21 nt, Human
uucuccuuggcaccugugcgc

SEQ ID NO: 271229 - RNA, 32 nt, Human
uucuccuuggguauuacaaguuuuugucugga

SEQ ID NO: 271230 - RNA, 21 nt, Human
uucuccuugguccuccuguca

SEQ ID NO: 271231 - RNA, 32 nt, Human
uucuccuuuacacauccuuuauuucauuaaau

SEQ ID NO: 271232 - RNA, 18 nt, Human
uucuccuuuauucuucua

SEQ ID NO: 271233 - RNA, 32 nt, Human
uucuccuuucacaaccuucuguggcucacaga

SEQ ID NO: 271234 - RNA, 18 nt, Human
uucuccuuucauuuucca

SEQ ID NO: 271235 - RNA, 32 nt, Human
uucuccuuucuacaugacauugcagugguggu

SEQ ID NO: 271236 - RNA, 32 nt, Human
uucuccuuucuuuccuccuugaagccuggcuc

SEQ ID NO: 271237 - RNA, 32 nt, Human
uucuccuuugaggcagagguuuaaguguaggc

SEQ ID NO: 271238 - RNA, 32 nt, Human
uucuccuuugauuauauaaaagcuauuucauu

SEQ ID NO: 271239 - RNA, 32 nt, Human
uucuccuuuggguuucuugcugcugcaauuuu

SEQ ID NO: 271240 - RNA, 32 nt, Human
uucucgaacuggaugcauuaggaagcugcugu

SEQ ID NO: 271241 - RNA, 22 nt, Human
uucucgaagaggccaguugggc

SEQ ID NO: 271242 - RNA, 32 nt, Human
uucucgacccuggacgucuaccuuccggaggc

SEQ ID NO: 271243 - RNA, 32 nt, Human
uucucgaguuuaaaguucagaggaucaugaag

SEQ ID NO: 271244 - RNA, 32 nt, Human
uucucgaucucauuuccacaaaggauaugaag

SEQ ID NO: 271245 - RNA, 32 nt, Human
uucucgauuuugcucuaaacugcugcaucugu

SEQ ID NO: 271246 - RNA, 32 nt, Human
uucucgcaacaguggccuacacugccuuucag

SEQ ID NO: 271247 - RNA, 32 nt, Human
uucucgcacaggcuuggagugcaguggugcga

SEQ ID NO: 271248 - RNA, 32 nt, Human
uucucgcaccugcucagcccugugucggcuuc

SEQ ID NO: 271249 - RNA, 32 nt, Human
uucucgcagucuuccuggaaaauauuuuccuu

SEQ ID NO: 271250 - RNA, 32 nt, Human
uucucgccaugucuucucacaagacuuucacc

SEQ ID NO: 271251 - RNA, 32 nt, Human
uucucgccgggcugggaacaauaaugcagcca

SEQ ID NO: 271252 - RNA, 32 nt, Human
uucucgccuaacgccgccaacaugguguucag

SEQ ID NO: 271253 - RNA, 32 nt, Human
uucucgccugucguuuagccugugccacacuu

SEQ ID NO: 271254 - RNA, 32 nt, Human
uucucgcucucuguccaccacacacacggccc

SEQ ID NO: 271255 - RNA, 32 nt, Human
uucucggccucucucucugugugaaggggccu

SEQ ID NO: 271256 - RNA, 32 nt, Human
uucucggcugaucucucuggguaggugcccuc

SEQ ID NO: 271257 - RNA, 32 nt, Human
uucucggcugcaguguacucaucuugauccua

SEQ ID NO: 271258 - RNA, 32 nt, Human
uucucgggaacgagggagagguugauccuaug

SEQ ID NO: 271259 - RNA, 32 nt, Human
uucucgggacaggcuaaccaggaggacaggag

SEQ ID NO: 271260 - RNA, 21 nt, Human
uucucgggcagccagcuaggu

SEQ ID NO: 271261 - RNA, 32 nt, Human
uucucgguuuuccuuugagucuucuggagcug

SEQ ID NO: 271262 - RNA, 32 nt, Human
uucucgucagcaagggcggacaaggacucuuc

SEQ ID NO: 271263 - RNA, 32 nt, Human
uucucguccccaugcucccccaccucagugcu

SEQ ID NO: 271264 - RNA, 32 nt, Human
uucucgucggauugcccaugcacuuguugcag

SEQ ID NO: 271265 - RNA, 32 nt, Human
uucucgucuguauaauggaagcaagacuucca

SEQ ID NO: 271266 - RNA, 32 nt, Human
uucucgugacagcaugagcagagaucauuaaa

SEQ ID NO: 271267 - RNA, 32 nt, Human
uucucguggccgcggcagcgcggucucugcgg

SEQ ID NO: 271268 - RNA, 29 nt, Human
uucucgugucuguguguuuggcuucuaaa

SEQ ID NO: 271269 - RNA, 32 nt, Human
uucucguguugcuucuccacuuugagagguug

SEQ ID NO: 271270 - RNA, 32 nt, Human
uucucguucucaucucugccggaauuccacau

SEQ ID NO: 271271 - RNA, 32 nt, Human
uucucguugcucgucaccuccaugccaggcac

SEQ ID NO: 271272 - RNA, 32 nt, Human
uucucguuucaggucaccaucagaaaagcuaa

SEQ ID NO: 271273 - RNA, 21 nt, Human
uucucuaaacccuuucuguca

SEQ ID NO: 271274 - RNA, 32 nt, Human
uucucuaagccuugguuuccugaaccuuaaaa

SEQ ID NO: 271275 - RNA, 32 nt, Human
uucucuaauaauacuuaaaacucuuuacuaaa

SEQ ID NO: 271276 - RNA, 32 nt, Human
uucucuaccaacaauaaaccaaacccagccac

SEQ ID NO: 271277 - RNA, 32 nt, Human
uucucuaccauccuuuuccuucccaugcagau

SEQ ID NO: 271278 - RNA, 32 nt, Human
uucucuacccacccucuucucucuucucuucu

SEQ ID NO: 271279 - RNA, 32 nt, Human
uucucuacuccauuauuucucuacuuuuccuu

SEQ ID NO: 271280 - RNA, 20 nt, Human
uucucuacucuuccccagca

SEQ ID NO: 271281 - RNA, 32 nt, Human
uucucuacugauuuuguggcugugguuaacuu

SEQ ID NO: 271282 - RNA, 32 nt, Human
uucucuagacaggcgcugggagaaagaaccgg

SEQ ID NO: 271283 - RNA, 32 nt, Human
uucucuagagagguacaguuguaagucagagu

SEQ ID NO: 271284 - RNA, 32 nt, Human
uucucuagcccacccucgcacacucauucacu

SEQ ID NO: 271285 - RNA, 32 nt, Human
uucucuaggcuguuauguuaauuccucugaua

SEQ ID NO: 271286 - RNA, 32 nt, Human
uucucuaguguuuuaagugauccuuugaagua

SEQ ID NO: 271287 - RNA, 32 nt, Human
uucucuaguucucauaagacuaucuccccgcc

SEQ ID NO: 271288 - RNA, 32 nt, Human
uucucuaugacacagcuuuaaccuucuucucu

SEQ ID NO: 271289 - RNA, 32 nt, Human
uucucuaugcacucuuauauucugccuuucug

SEQ ID NO: 271290 - RNA, 32 nt, Human
uucucuauggagugaagcgaaugaagugaaua

SEQ ID NO: 271291 - RNA, 32 nt, Human
uucucuauggggcucccagagugcaaaggaca

SEQ ID NO: 271292 - RNA, 32 nt, Human
uucucuauguagucuggcaguauaaauauaaa

SEQ ID NO: 271293 - RNA, 32 nt, Human
uucucuauuaugcuccuuucuucaaggccgcc

SEQ ID NO: 271294 - RNA, 32 nt, Human
uucucucaagcuagggcagaagagggguguca

SEQ ID NO: 271295 - RNA, 32 nt, Human
uucucucaagcuagggcagaagagggugucaa

SEQ ID NO: 271296 - RNA, 31 nt, Human
uucucucaagugucccaaaucaggguagcaa

SEQ ID NO: 271297 - RNA, 32 nt, Human
uucucucacauggagaaaaccaagacagaauu

SEQ ID NO: 271298 - RNA, 32 nt, Human
uucucucaccacaaaaagugguaugugaggua

SEQ ID NO: 271299 - RNA, 32 nt, Human
uucucucacccaggugcaaaugaccaguggug

SEQ ID NO: 271300 - RNA, 32 nt, Human
uucucucacuacuacauuucuguaaguggucc

SEQ ID NO: 271301 - RNA, 32 nt, Human
uucucucacucucgccacugggguuaagggca

SEQ ID NO: 271302 - RNA, 32 nt, Human
uucucucacuuaguacugaggaauuuucaugu

SEQ ID NO: 271303 - RNA, 31 nt, Human
uucucucagaaguucagcuguugaaacgaaa

SEQ ID NO: 271304 - RNA, 32 nt, Human
uucucucagcuauuuugagucuguggaagaaa

SEQ ID NO: 271305 - RNA, 20 nt, Human
uucucucagcuucucagggu

SEQ ID NO: 271306 - RNA, 32 nt, Human
uucucucagguuuguucuuccuaucauguuug

SEQ ID NO: 271307 - RNA, 32 nt, Human
uucucucauagaacauugaucuguuuuacagg

SEQ ID NO: 271308 - RNA, 32 nt, Human
uucucucauccagaagacauaggaacccuacc

SEQ ID NO: 271309 - RNA, 32 nt, Human
uucucucauguggauggauggacucugggguu

SEQ ID NO: 271310 - RNA, 32 nt, Human
uucucucauuccgaguucagggugacacauuu

SEQ ID NO: 271311 - RNA, 32 nt, Human
uucucuccaaccagggcagaaaggagggagga

SEQ ID NO: 271312 - RNA, 32 nt, Human
uucucuccaagcugggagcuccugggccccca

SEQ ID NO: 271313 - RNA, 21 nt, Human
uucucuccacaaaaaagagac

SEQ ID NO: 271314 - RNA, 32 nt, Human
uucucuccaccaccaaaagcaaaagaugauuu

SEQ ID NO: 271315 - RNA, 32 nt, Human
uucucuccacccuucuuagggcuggaggaugg

SEQ ID NO: 271316 - RNA, 32 nt, Human
uucucuccagaacagggaaaugugguguuuac

SEQ ID NO: 271317 - RNA, 32 nt, Human
uucucuccagccucugugccuuuguuccaggu

SEQ ID NO: 271318 - RNA, 32 nt, Human
uucucuccaucaggaugguacuuugggggaac

SEQ ID NO: 271319 - RNA, 32 nt, Human
uucucucccacacgccccucuccucuaccccu

SEQ ID NO: 271320 - RNA, 32 nt, Human
uucucucccacugcaacuccacuuucuuugca

SEQ ID NO: 271321 - RNA, 32 nt, Human
uucucuccccagccauucagagguuuccaaac

SEQ ID NO: 271322 - RNA, 32 nt, Human
uucucuccccuccucugcccugugccacucuc

SEQ ID NO: 271323 - RNA, 32 nt, Human
uucucuccccugccccaaaccucucuccucuc

SEQ ID NO: 271324 - RNA, 28 nt, Human
uucucucccgcagcugccucagucggcu

SEQ ID NO: 271325 - RNA, 32 nt, Human
uucucucccuaaggucugguggagucucccca

SEQ ID NO: 271326 - RNA, 32 nt, Human
uucucucccucuuucccuccauccucgagcgu

SEQ ID NO: 271327 - RNA, 32 nt, Human
uucucucccuuucucauucucauuccaccugu

SEQ ID NO: 271328 - RNA, 32 nt, Human
uucucucccuuucuccuucucguucucucccg

SEQ ID NO: 271329 - RNA, 32 nt, Human
uucucuccuccccuaccuugacucccccaacc

SEQ ID NO: 271330 - RNA, 32 nt, Human
uucucuccuccccuccccucccuucucauucc

SEQ ID NO: 271331 - RNA, 32 nt, Human
uucucuccuccccuucucucuuucugucuuuc

SEQ ID NO: 271332 - RNA, 32 nt, Human
uucucuccuccgcuuaaccaagcuguuguggu

SEQ ID NO: 271333 - RNA, 32 nt, Human
uucucuccuccuccucgcccuucuccucgccc

SEQ ID NO: 271334 - RNA, 32 nt, Human
uucucuccucucggaagcugcagccaugaugg

SEQ ID NO: 271335 - RNA, 32 nt, Human
uucucuccuggccacucuuccugcugccucug

SEQ ID NO: 271336 - RNA, 32 nt, Human
uucucuccuguucaaagaagcuuucaccaugg

SEQ ID NO: 271337 - RNA, 32 nt, Human
uucucuccuucucuccuccucucuccucuccu

SEQ ID NO: 271338 - RNA, 32 nt, Human
uucucuccuuucuccccauccuguguucuggg

SEQ ID NO: 271339 - RNA, 32 nt, Human
uucucuccuuucucccugcagccuuuucuggu

SEQ ID NO: 271340 - RNA, 32 nt, Human
uucucuccuuucucguccccaugcucccccac

SEQ ID NO: 271341 - RNA, 32 nt, Human
uucucucgacuucggccuuucggaaagaagcg

SEQ ID NO: 271342 - RNA, 32 nt, Human
uucucucgccacccucucguccccucgucucc

SEQ ID NO: 271343 - RNA, 21 nt, Human
uucucucgggcucuuugcuca

SEQ ID NO: 271344 - RNA, 32 nt, Human
uucucucucacugccacgccuuccuuucccuc

SEQ ID NO: 271345 - RNA, 32 nt, Human
uucucucucagccucauccuucugggccugga

SEQ ID NO: 271346 - RNA, 32 nt, Human
uucucucuccaauaaaccuuuugcuucagggu

SEQ ID NO: 271347 - RNA, 32 nt, Human
uucucucuccaccccuccuccauccacccuga

SEQ ID NO: 271348 - RNA, 32 nt, Human
uucucucuccaccuauccauuagccuuccuaa

SEQ ID NO: 271349 - RNA, 32 nt, Human
uucucucuccauguuuuacaucauucacaguu

SEQ ID NO: 271350 - RNA, 32 nt, Human
uucucucucccaguucuuccuuccgcuacccu

SEQ ID NO: 271351 - RNA, 32 nt, Human
uucucucucccccuuucucucuucucuuggcu

SEQ ID NO: 271352 - RNA, 32 nt, Human
uucucucuccuccuugcaauuuuccuuucugu

SEQ ID NO: 271353 - RNA, 32 nt, Human
uucucucucuuuuccucucucucccucuuucu

SEQ ID NO: 271354 - RNA, 32 nt, Human
uucucucugcaaucugcaaauaacuccuccau

SEQ ID NO: 271355 - RNA, 32 nt, Human
uucucucugccucgucccaccuugcugucugu

SEQ ID NO: 271356 - RNA, 32 nt, Human
uucucucugccugguugcccucugcguggggu

SEQ ID NO: 271357 - RNA, 32 nt, Human
uucucucuggccuggacauucucuggcagcac

SEQ ID NO: 271358 - RNA, 32 nt, Human
uucucucugggaacaucugguggguacuacag

SEQ ID NO: 271359 - RNA, 32 nt, Human
uucucucugucgcccaggcuggaguacagugg

SEQ ID NO: 271360 - RNA, 32 nt, Human
uucucucuguugcccaggcuggagugcaaugg

SEQ ID NO: 271361 - RNA, 32 nt, Human
uucucucuguugcccaggcuggagugcagugg

SEQ ID NO: 271362 - RNA, 32 nt, Human
uucucucuuaacguuccugggagacuccaaca

SEQ ID NO: 271363 - RNA, 32 nt, Human
uucucucuuauaccaacaauaucagaaauguu

SEQ ID NO: 271364 - RNA, 32 nt, Human
uucucucuuauuuucaguguauuugaaugaag

SEQ ID NO: 271365 - RNA, 32 nt, Human
uucucucuucauuccucuuaggagagugccaa

SEQ ID NO: 271366 - RNA, 32 nt, Human
uucucucuucucuucuucuugccugcaauuug

SEQ ID NO: 271367 - RNA, 32 nt, Human
uucucucuucuuuucuccuuuggggcuggggc

SEQ ID NO: 271368 - RNA, 32 nt, Human
uucucucuuggguggaggagacaaggggaggg

SEQ ID NO: 271369 - RNA, 32 nt, Human
uucucucuuucuuggugucuguccuuugcccc

SEQ ID NO: 271370 - RNA, 32 nt, Human
uucucucuuucuuucucuuccucucucucuuu

SEQ ID NO: 271371 - RNA, 32 nt, Human
uucucugaacuccaguaagagagaaugacacg

SEQ ID NO: 271372 - RNA, 32 nt, Human
uucucugaacucuuccccuuguuccaagggga

SEQ ID NO: 271373 - RNA, 32 nt, Human
uucucugaagagggguuggauaaggcaaaggu

SEQ ID NO: 271374 - RNA, 32 nt, Human
uucucugaagaguauuuucgaagaggagcaac

SEQ ID NO: 271375 - RNA, 32 nt, Human
uucucugaaggaugagaucacaacugacaacu

SEQ ID NO: 271376 - RNA, 32 nt, Human
uucucugacaucucaugacauugucuuuauca

SEQ ID NO: 271377 - RNA, 32 nt, Human
uucucugacccagcguugcuucugccucucau

SEQ ID NO: 271378 - RNA, 23 nt, Human
uucucugaccuguuccccacacu

SEQ ID NO: 271379 - RNA, 32 nt, Human
uucucugagaagaaaaguugaaaaaggguaaa

SEQ ID NO: 271380 - RNA, 32 nt, Human
uucucugagccugucuguacagugcuuugccc

SEQ ID NO: 271381 - RNA, 32 nt, Human
uucucugaguaugcagcagugcaguugaaggg

SEQ ID NO: 271382 - RNA, 32 nt, Human
uucucugaguucaggugggaaaaagagcugug

SEQ ID NO: 271383 - RNA, 32 nt, Human
uucucugauuuaauuccaaauggcaguuuuua

SEQ ID NO: 271384 - RNA, 32 nt, Human
uucucugauuucccaccucccaaccuuguucc

SEQ ID NO: 271385 - RNA, 32 nt, Human
uucucugcaagugucuguuauuagagaaacga

SEQ ID NO: 271386 - RNA, 32 nt, Human
uucucugcacuccuuccaauuuaauucugcuu

SEQ ID NO: 271387 - RNA, 31 nt, Human
uucucugcacuuugaggaugcagacagugaa

SEQ ID NO: 271388 - RNA, 32 nt, Human
uucucugcauggguuggucaggagaaugaaac

SEQ ID NO: 271389 - RNA, 32 nt, Human
uucucugccaauuaacuugucauuucaguaca

SEQ ID NO: 271390 - RNA, 32 nt, Human
uucucugccagccugugucacccacccaccuc

SEQ ID NO: 271391 - RNA, 32 nt, Human
uucucugccaucacccuuuccuugccggccgg

SEQ ID NO: 271392 - RNA, 32 nt, Human
uucucugccccagccaacguuggccuuacuuc

SEQ ID NO: 271393 - RNA, 32 nt, Human
uucucugccccaggcagccaugacauacacau

SEQ ID NO: 271394 - RNA, 32 nt, Human
uucucugccccagggaccuuccaucccugaau

SEQ ID NO: 271395 - RNA, 32 nt, Human
uucucugccccuuaaaucacacaugcuuuucu

SEQ ID NO: 271396 - RNA, 32 nt, Human
uucucugcccugccugauacuuguuuuaaaca

SEQ ID NO: 271397 - RNA, 32 nt, Human
uucucugccuccagucccccagccccuggccg

SEQ ID NO: 271398 - RNA, 32 nt, Human
uucucugccucuggcccuccuggcucuuccuc

SEQ ID NO: 271399 - RNA, 32 nt, Human
uucucugccugaugcucaaaaguguacuugug

SEQ ID NO: 271400 - RNA, 32 nt, Human
uucucugccugggagauggcuuccccgagccc

SEQ ID NO: 271401 - RNA, 32 nt, Human
uucucugccuguauuucuaucucauuugaucu

SEQ ID NO: 271402 - RNA, 32 nt, Human
uucucugcuaggagccagccuggguggcgcug

SEQ ID NO: 271403 - RNA, 32 nt, Human
uucucugcuccaccacauccuccguccagccg

SEQ ID NO: 271404 - RNA, 32 nt, Human
uucucugcucccagccugccucaccagggaag

SEQ ID NO: 271405 - RNA, 32 nt, Human
uucucugcugcagaaagcagacuugcauaucc

SEQ ID NO: 271406 - RNA, 32 nt, Human
uucucugcugugguugcugcagcuccaggaag

SEQ ID NO: 271407 - RNA, 32 nt, Human
uucucugcuuugucuguguuuugagucugcuu

SEQ ID NO: 271408 - RNA, 32 nt, Human
uucucuggaauggggcuucaguuuccacauuu

SEQ ID NO: 271409 - RNA, 32 nt, Human
uucucuggacaggagucuggggcacaacugga

SEQ ID NO: 271410 - RNA, 32 nt, Human
uucucuggagcuuaacaaacuuuuauuuccug

SEQ ID NO: 271411 - RNA, 32 nt, Human
uucucuggauucuagcaucuuuaaaaagagaa

SEQ ID NO: 271412 - RNA, 32 nt, Human
uucucuggcaugcucuuuuccucucucucauu

SEQ ID NO: 271413 - RNA, 30 nt, Human
uucucuggccucuccaguccugcuuacucc

SEQ ID NO: 271414 - RNA, 32 nt, Human
uucucuggccuugccaagagucucaucccuac

SEQ ID NO: 271415 - RNA, 32 nt, Human
uucucuggcgcuuuacuggccugggcacaccu

SEQ ID NO: 271416 - RNA, 32 nt, Human
uucucuggcugagcaggucugaccucagggga

SEQ ID NO: 271417 - RNA, 32 nt, Human
uucucuggcugcagagccgucuucucagguug

SEQ ID NO: 271418 - RNA, 32 nt, Human
uucucugggaggcaaaggcuggcacuggacug

SEQ ID NO: 271419 - RNA, 32 nt, Human
uucucugggauuauacuuaggcauuucuuaau

SEQ ID NO: 271420 - RNA, 32 nt, Human
uucucugggcagguggccauggggaggggcca

SEQ ID NO: 271421 - RNA, 32 nt, Human
uucucugggggccguggggugggagcuggggc

SEQ ID NO: 271422 - RNA, 32 nt, Human
uucucuggguacugcuggccagaggacuuuag

SEQ ID NO: 271423 - RNA, 32 nt, Human
uucucugguauuucaaggcaccgagaacaaga

SEQ ID NO: 271424 - RNA, 21 nt, Human
uucucugguccccugucccua

SEQ ID NO: 271425 - RNA, 32 nt, Human
uucucuggugcuguaauuuggcugcaggagcu

SEQ ID NO: 271426 - RNA, 32 nt, Human
uucucugguguuuguugacuucugccuguggg

SEQ ID NO: 271427 - RNA, 32 nt, Human
uucucugguucauguccaccacugacugggac

SEQ ID NO: 271428 - RNA, 32 nt, Human
uucucugguuuccccaccuuguggcuuagaga

SEQ ID NO: 271429 - RNA, 32 nt, Human
uucucuguaacaguguccuaacagugaaaauc

SEQ ID NO: 271430 - RNA, 32 nt, Human
uucucuguaaucucagcuucucaggaggcuga

SEQ ID NO: 271431 - RNA, 32 nt, Human
uucucuguagcuuggggaacuugcuguuucua

SEQ ID NO: 271432 - RNA, 16 nt, Human
uucucuguaugcagug

SEQ ID NO: 271433 - RNA, 32 nt, Human
uucucugucaacuucaguuucucucucaguuu

SEQ ID NO: 271434 - RNA, 32 nt, Human
uucucugucacccaggauggagugcaguguug

SEQ ID NO: 271435 - RNA, 32 nt, Human
uucucugucacccaggcuggaaugcaguggcg

SEQ ID NO: 271436 - RNA, 32 nt, Human
uucucugucacccaggcuggagugcaguggug

SEQ ID NO: 271437 - RNA, 32 nt, Human
uucucugucaucugacuuuccucacucuugcu

SEQ ID NO: 271438 - RNA, 32 nt, Human
uucucugucccuccucccaaccccuccuuucc

SEQ ID NO: 271439 - RNA, 32 nt, Human
uucucugucucaugugugcucuucuucuuucu

SEQ ID NO: 271440 - RNA, 32 nt, Human
uucucugucuccccauccuacuccaaggaugc

SEQ ID NO: 271441 - RNA, 32 nt, Human
uucucugugaaaagacagacugagggaaaauu

SEQ ID NO: 271442 - RNA, 32 nt, Human
uucucugugagcugaucuggcguccacacccc

SEQ ID NO: 271443 - RNA, 32 nt, Human
uucucugugcaucuguccauccucccuauggc

SEQ ID NO: 271444 - RNA, 32 nt, Human
uucucugugccucacaacagucuugcgcugua

SEQ ID NO: 271445 - RNA, 32 nt, Human
uucucuguggcuucugacagcagaaaucucug

SEQ ID NO: 271446 - RNA, 32 nt, Human
uucucugugugguucagcuacuuuccauuugg

SEQ ID NO: 271447 - RNA, 32 nt, Human
uucucuguguuccguccuggccaugggcuugu

SEQ ID NO: 271448 - RNA, 32 nt, Human
uucucuguguuguccuccuccuucccuuccca

SEQ ID NO: 271449 - RNA, 32 nt, Human
uucucuguucuccugagagcccuucagaugag

SEQ ID NO: 271450 - RNA, 32 nt, Human
uucucuguucuguucuccccauggcccagaca

SEQ ID NO: 271451 - RNA, 32 nt, Human
uucucuguugcccaggcuagagugcacuggug

SEQ ID NO: 271452 - RNA, 32 nt, Human
uucucuguuguuguuguuuuagaugggcucau

SEQ ID NO: 271453 - RNA, 32 nt, Human
uucucuguuugcccgugauuguuuucuuuauu

SEQ ID NO: 271454 - RNA, 32 nt, Human
uucucuuacuuuccucugccugccucaguuua

SEQ ID NO: 271455 - RNA, 21 nt, Human
uucucuuagauucuuaauuca

SEQ ID NO: 271456 - RNA, 32 nt, Human
uucucuuagggcucccggaaagaaggagggcu

SEQ ID NO: 271457 - RNA, 32 nt, Human
uucucuucaaugccuuugacaccaaccaugau

SEQ ID NO: 271458 - RNA, 32 nt, Human
uucucuucacagucacauuccaagccucaugu

SEQ ID NO: 271459 - RNA, 32 nt, Human
uucucuucagccccuucccuguguccaccuuu

SEQ ID NO: 271460 - RNA, 32 nt, Human
uucucuucagggucucuuuccacagcggauaa

SEQ ID NO: 271461 - RNA, 32 nt, Human
uucucuucaguuaguguaaacugcaaauacua

SEQ ID NO: 271462 - RNA, 32 nt, Human
uucucuucauacucucuaccuuccuuaccaug

SEQ ID NO: 271463 - RNA, 32 nt, Human
uucucuucauucuuuuaaggccuugcaagguc

SEQ ID NO: 271464 - RNA, 32 nt, Human
uucucuuccaggcagggcucucaucgguggug

SEQ ID NO: 271465 - RNA, 32 nt, Human
uucucuuccaguuugaaaaccaggcagguuua

SEQ ID NO: 271466 - RNA, 32 nt, Human
uucucuucccagcucugcccucgcuugcuggc

SEQ ID NO: 271467 - RNA, 32 nt, Human
uucucuuccccagaaaggacuggggucaaagg

SEQ ID NO: 271468 - RNA, 32 nt, Human
uucucuucccccaacacucccaaagauaccca

SEQ ID NO: 271469 - RNA, 32 nt, Human
uucucuucccuuuaaugcuugcagaagcuguu

SEQ ID NO: 271470 - RNA, 32 nt, Human
uucucuucccuuugaucucucuuccgcuugcu

SEQ ID NO: 271471 - RNA, 32 nt, Human
uucucuuccguuugcgguuuucugccuaauug

SEQ ID NO: 271472 - RNA, 32 nt, Human
uucucuuccucuucuuucucucucuucuccuc

SEQ ID NO: 271473 - RNA, 32 nt, Human
uucucuuccucuuuuaagcccucucuuccucg

SEQ ID NO: 271474 - RNA, 32 nt, Human
uucucuuccugccuuuccucuaucagagaagu

SEQ ID NO: 271475 - RNA, 32 nt, Human
uucucuuccugcucuccaucauggcgcaggau

SEQ ID NO: 271476 - RNA, 32 nt, Human
uucucuuccugguaauccucuggcccagccuu

SEQ ID NO: 271477 - RNA, 32 nt, Human
uucucuuccuucauugccaccuuuccucugug

SEQ ID NO: 271478 - RNA, 32 nt, Human
uucucuuccuugugccucuccucuuuaucacu

SEQ ID NO: 271479 - RNA, 32 nt, Human
uucucuuccuuuccuuuccuuuccucuccugc

SEQ ID NO: 271480 - RNA, 32 nt, Human
uucucuucuaucuccuuguugaucugaagcuu

SEQ ID NO: 271481 - RNA, 32 nt, Human
uucucuucucagacucuuccucugucacacgu

SEQ ID NO: 271482 - RNA, 32 nt, Human
uucucuucuccucgauccucaugguccuggga

SEQ ID NO: 271483 - RNA, 32 nt, Human
uucucuucuccucuuccuggcuguguuuucuc

SEQ ID NO: 271484 - RNA, 32 nt, Human
uucucuucucucucuuuuccuaggucugcagc

SEQ ID NO: 271485 - RNA, 32 nt, Human
uucucuucugacccagggcugagacagguuaa

SEQ ID NO: 271486 - RNA, 32 nt, Human
uucucuucugaccugcugaaccuuggugucca

SEQ ID NO: 271487 - RNA, 32 nt, Human
uucucuucugagugagucuagggcagauucuu

SEQ ID NO: 271488 - RNA, 32 nt, Human
uucucuucugauucuucucuucucccaagccc

SEQ ID NO: 271489 - RNA, 32 nt, Human
uucucuucuuccucagcuucuccauguuuagg

SEQ ID NO: 271490 - RNA, 32 nt, Human
uucucuucuucuaccucuacccucuccaacuu

SEQ ID NO: 271491 - RNA, 31 nt, Human
uucucuugacuacuggcuugccaaagcagag

SEQ ID NO: 271492 - RNA, 32 nt, Human
uucucuugacugccucucucuuaccuguucag

SEQ ID NO: 271493 - RNA, 32 nt, Human
uucucuugcccaggcuggagugcaguggcacg

SEQ ID NO: 271494 - RNA, 32 nt, Human
uucucuugcccugaccccuuguucccuggacc

SEQ ID NO: 271495 - RNA, 32 nt, Human
uucucuugcucugagccucccuuccccauucc

SEQ ID NO: 271496 - RNA, 32 nt, Human
uucucuuggaccuuaccuuaugugccuuucuu

SEQ ID NO: 271497 - RNA, 32 nt, Human
uucucuugggaaaugacuggggagacaccuga

SEQ ID NO: 271498 - RNA, 20 nt, Human
uucucuugggacggggaagc

SEQ ID NO: 271499 - RNA, 32 nt, Human
uucucuugucugucugucucugucuugaagcu

SEQ ID NO: 271500 - RNA, 32 nt, Human
uucucuugucuuuucuaaauguuaacaaaaua

SEQ ID NO: 271501 - RNA, 32 nt, Human
uucucuugugucuguugagacuuuaagggaga

SEQ ID NO: 271502 - RNA, 32 nt, Human
uucucuuguuucauuuuccugaagauuuaugu

SEQ ID NO: 271503 - RNA, 32 nt, Human
uucucuuuacaugcagccgcucucugcucccu

SEQ ID NO: 271504 - RNA, 32 nt, Human
uucucuuuacauguuaacaccuugcuacuacc

SEQ ID NO: 271505 - RNA, 32 nt, Human
uucucuuuaccagucccaccuaccucacuaug

SEQ ID NO: 271506 - RNA, 32 nt, Human
uucucuuuacuggaguuuccucuuguccauuu

SEQ ID NO: 271507 - RNA, 32 nt, Human
uucucuuuagggacugcuccauaccccaugau

SEQ ID NO: 271508 - RNA, 32 nt, Human
uucucuuucaauguguuuaauuuuggaguaac

SEQ ID NO: 271509 - RNA, 32 nt, Human
uucucuuuccauccuccuccucagaaauauag

SEQ ID NO: 271510 - RNA, 32 nt, Human
uucucuuuccuugagcugccuuuggcaaggga

SEQ ID NO: 271511 - RNA, 32 nt, Human
uucucuuuccuuucuuuccuuccacaaaucuu

SEQ ID NO: 271512 - RNA, 32 nt, Human
uucucuuucucagucccugccugucugccagc

SEQ ID NO: 271513 - RNA, 32 nt, Human
uucucuuucuucucuccacauuuccugucucc

SEQ ID NO: 271514 - RNA, 32 nt, Human
uucucuuugaccccaucucauuucgaagccac

SEQ ID NO: 271515 - RNA, 32 nt, Human
uucucuuugaggcuggaaugcaguagcgugau

SEQ ID NO: 271516 - RNA, 32 nt, Human
uucucuuuguuguuuuccuacuuucucaaggu

SEQ ID NO: 271517 - RNA, 32 nt, Human
uucucuuuuacacuuuuguacuccucagagca

SEQ ID NO: 271518 - RNA, 32 nt, Human
uucucuuuucccuagacugcagccagcggagc

SEQ ID NO: 271519 - RNA, 32 nt, Human
uucucuuuugagacagaguuucacucugucgc

SEQ ID NO: 271520 - RNA, 32 nt, Human
uucucuuuuguaacugcugucuuuacaauaaa

SEQ ID NO: 271521 - RNA, 32 nt, Human
uucucuuuuucuuccuccuuugggaucauugu

SEQ ID NO: 271522 - RNA, 32 nt, Human
uucugaaaaccacuucucuaccuucaccacca

SEQ ID NO: 271523 - RNA, 32 nt, Human
uucugaaaagguuggugaugaagaacuucagu

SEQ ID NO: 271524 - RNA, 32 nt, Human
uucugaaacacaaauuaaauucaaugccuuaa

SEQ ID NO: 271525 - RNA, 32 nt, Human
uucugaaacacacaccagcccugaguucuggg

SEQ ID NO: 271526 - RNA, 32 nt, Human
uucugaaacucacgcugcuccagccugaggcu

SEQ ID NO: 271527 - RNA, 32 nt, Human
uucugaaagaccacagcacucuaugucuacuu

SEQ ID NO: 271528 - RNA, 32 nt, Human
uucugaaagcccagagugcccuuggggacacu

SEQ ID NO: 271529 - RNA, 32 nt, Human
uucugaaaguggagguuucuuaagcagauaca

SEQ ID NO: 271530 - RNA, 32 nt, Human
uucugaaaucauugauuauucuacaaaaacau

SEQ ID NO: 271531 - RNA, 32 nt, Human
uucugaaauuuccauauugagagaagccaaac

SEQ ID NO: 271532 - RNA, 32 nt, Human
uucugaacacaaaucgagggagggagggagaa

SEQ ID NO: 271533 - RNA, 19 nt, Human
uucugaacagauguguucu

SEQ ID NO: 271534 - RNA, 32 nt, Human
uucugaaccaauuuugcacucagcauuaagag

SEQ ID NO: 271535 - RNA, 32 nt, Human
uucugaaccccuggccuguuccuuggaaugag

SEQ ID NO: 271536 - RNA, 32 nt, Human
uucugaacucgauaccuaccaaaaagaaaaag

SEQ ID NO: 271537 - RNA, 32 nt, Human
uucugaacugaugcuuucucacugucaucacu

SEQ ID NO: 271538 - RNA, 22 nt, Human
uucugaagcagaugguucauca

SEQ ID NO: 271539 - RNA, 32 nt, Human
uucugaagcagcauuugaagcugcaguccuga

SEQ ID NO: 271540 - RNA, 32 nt, Human
uucugaagccacuccucaggggcacagacccu

SEQ ID NO: 271541 - RNA, 30 nt, Human
uucugaagcuugcauugggaauggcugcuu

SEQ ID NO: 271542 - RNA, 32 nt, Human
uucugaagcuuggaaugcaaacacaggcuuca

SEQ ID NO: 271543 - RNA, 32 nt, Human
uucugaaggaaauguuaggucuucucaaggua

SEQ ID NO: 271544 - RNA, 29 nt, Human
uucugaaggaugcuaucauuugcccucug

SEQ ID NO: 271545 - RNA, 32 nt, Human
uucugaaggcagggcccggcagaggaaggauc

SEQ ID NO: 271546 - RNA, 32 nt, Human
uucugaaggccaugacaccugccuugccuccc

SEQ ID NO: 271547 - RNA, 32 nt, Human
uucugaagggcacgggccagauucaagaacgg

SEQ ID NO: 271548 - RNA, 32 nt, Human
uucugaaguuuccugacuuaacauaagcauuu

SEQ ID NO: 271549 - RNA, 32 nt, Human
uucugaaguuugucuggacuguuuacagacau

SEQ ID NO: 271550 - RNA, 32 nt, Human
uucugaauauagaauaucagcucucauuccag

SEQ ID NO: 271551 - RNA, 32 nt, Human
uucugaauauuuucccuucaucuaacauugau

SEQ ID NO: 271552 - RNA, 24 nt, Human
uucugaaucauguucuaguugcuu

SEQ ID NO: 271553 - RNA, 32 nt, Human
uucugaaucauuucuucuucucaggccaaagu

SEQ ID NO: 271554 - RNA, 32 nt, Human
uucugaaucuuccugccccuccucacugcuua

SEQ ID NO: 271555 - RNA, 32 nt, Human
uucugaaucuuuuccagggauaggcagguagc

SEQ ID NO: 271556 - RNA, 32 nt, Human
uucugaauguugguggaggguguaguggcuuu

SEQ ID NO: 271557 - RNA, 23 nt, Human
uucugaauuuuauguugcauuca

SEQ ID NO: 271558 - RNA, 32 nt, Human
uucugacaaggguggcuuuucucugccauucg

SEQ ID NO: 271559 - RNA, 32 nt, Human
uucugacaaguucccaggagcugcagcugcug

SEQ ID NO: 271560 - RNA, 32 nt, Human
uucugacaaucagugaauguacaacccagccg

SEQ ID NO: 271561 - RNA, 32 nt, Human
uucugacacagcccaggugggaacaaugcugc

SEQ ID NO: 271562 - RNA, 32 nt, Human
uucugacaccuucuuucucucccguuucacua

SEQ ID NO: 271563 - RNA, 32 nt, Human
uucugacagaagcagaggcaguucugaggcag

SEQ ID NO: 271564 - RNA, 20 nt, Human
uucugacagacagaagccaa

SEQ ID NO: 271565 - RNA, 32 nt, Human
uucugacagccaugugucacuaugcgcucguu

SEQ ID NO: 271566 - RNA, 32 nt, Human
uucugacagccaugugucacuaugcgcuuguu

SEQ ID NO: 271567 - RNA, 23 nt, Human
uucugacagcucccagcugggag

SEQ ID NO: 271568 - RNA, 32 nt, Human
uucugacagcucuaccucaagccccggagaac

SEQ ID NO: 271569 - RNA, 32 nt, Human
uucugacaggcgcaacuccuccauuuuccucc

SEQ ID NO: 271570 - RNA, 32 nt, Human
uucugacccacugaucucuacuaccacaagga

SEQ ID NO: 271571 - RNA, 20 nt, Human
uucugacccacugggauuug

SEQ ID NO: 271572 - RNA, 32 nt, Human
uucugacccaggagcgaaagucugucucuucc

SEQ ID NO: 271573 - RNA, 32 nt, Human
uucugacccauguucacguuguucacauccca

SEQ ID NO: 271574 - RNA, 32 nt, Human
uucugacccucacccacuguccaccaaaagcc

SEQ ID NO: 271575 - RNA, 32 nt, Human
uucugacccugaguccuugaaucacuagguuu

SEQ ID NO: 271576 - RNA, 32 nt, Human
uucugaccucaagugauccgcccgccucagcc

SEQ ID NO: 271577 - RNA, 24 nt, Human
uucugaccucaagugaucugccca

SEQ ID NO: 271578 - RNA, 32 nt, Human
uucugaccucaagugaucugcccaccuuggcc

SEQ ID NO: 271579 - RNA, 24 nt, Human
uucugaccucaagugaucugcccg

SEQ ID NO: 271580 - RNA, 21 nt, Human
uucugaccucaagugguccac

SEQ ID NO: 271581 - RNA, 19 nt, Human
uucugaccucagacggcuc

SEQ ID NO: 271582 - RNA, 24 nt, Human
uucugaccucagaugaucugcccg

SEQ ID NO: 271583 - RNA, 32 nt, Human
uucugaccucagccuuggaacuccucaagaac

SEQ ID NO: 271584 - RNA, 22 nt, Human
uucugaccucaggccuccauuu

SEQ ID NO: 271585 - RNA, 21 nt, Human
uucugaccucaggugauccac

SEQ ID NO: 271586 - RNA, 23 nt, Human
uucugaccucaggugauccacca

SEQ ID NO: 271587 - RNA, 24 nt, Human
uucugaccucaggugauccaccca

SEQ ID NO: 271588 - RNA, 24 nt, Human
uucugaccucaggugaucugccca

SEQ ID NO: 271589 - RNA, 32 nt, Human
uucugaccucagguuaggcaaagcuuucuuag

SEQ ID NO: 271590 - RNA, 32 nt, Human
uucugaccucccagggugucugaggccucuaa

SEQ ID NO: 271591 - RNA, 32 nt, Human
uucugaccuccuccucccaaaaggugcuaaac

SEQ ID NO: 271592 - RNA, 20 nt, Human
uucugaccuccuggcaagag

SEQ ID NO: 271593 - RNA, 22 nt, Human
uucugaccucgugaugcacuca

SEQ ID NO: 271594 - RNA, 32 nt, Human
uucugaccucuuagcuggggauuccauggcca

SEQ ID NO: 271595 - RNA, 32 nt, Human
uucugaccugagccccgggucucggcuguuuc

SEQ ID NO: 271596 - RNA, 32 nt, Human
uucugaccuggaggccagaggcuaggcugagg

SEQ ID NO: 271597 - RNA, 17 nt, Human
uucugaccuggcuccug

SEQ ID NO: 271598 - RNA, 20 nt, Human
uucugaccuucaguucacuu

SEQ ID NO: 271599 - RNA, 32 nt, Human
uucugaccuugaaauaaaucacuucugaccuu

SEQ ID NO: 271600 - RNA, 24 nt, Human
uucugaccuuggacaaagcacuca

SEQ ID NO: 271601 - RNA, 32 nt, Human
uucugaccuuguaccucucuuugaugguaacc

SEQ ID NO: 271602 - RNA, 32 nt, Human
uucugacgcgaugaggaagcaccugagcuggu

SEQ ID NO: 271603 - RNA, 32 nt, Human
uucugacggucugaggucuugcuugggccagu

SEQ ID NO: 271604 - RNA, 24 nt, Human
uucugacgucaagugauccacccg

SEQ ID NO: 271605 - RNA, 32 nt, Human
uucugacucaucuccuucucuccgucuugccu

SEQ ID NO: 271606 - RNA, 32 nt, Human
uucugacugacaugaucuuuugcaauaccuca

SEQ ID NO: 271607 - RNA, 32 nt, Human
uucugacugagucccuggaagaguaguaauuc

SEQ ID NO: 271608 - RNA, 32 nt, Human
uucugacuuguauccagcaugcuggagaccaa

SEQ ID NO: 271609 - RNA, 23 nt, Human
uucugacuuuagaaaguuucuca

SEQ ID NO: 271610 - RNA, 23 nt, Human
uucugacuuugaccagcuguaag

SEQ ID NO: 271611 - RNA, 22 nt, Human
uucugacuuuggaauggacuca

SEQ ID NO: 271612 - RNA, 25 nt, Human
uucugacuuuuuccaucucuugcuu

SEQ ID NO: 271613 - RNA, 32 nt, Human
uucugacuuuuuccaucucuugcuucaaagua

SEQ ID NO: 271614 - RNA, 32 nt, Human
uucugagaaaugcugcagucagaagggugugc

SEQ ID NO: 271615 - RNA, 32 nt, Human
uucugagaagggugucucucugucugugugga

SEQ ID NO: 271616 - RNA, 32 nt, Human
uucugagaaguacgucauaucuucccacagcu

SEQ ID NO: 271617 - RNA, 32 nt, Human
uucugagaaguuagaggguaaagagccccacc

SEQ ID NO: 271618 - RNA, 32 nt, Human
uucugagacagagagguacggacuaggcugca

SEQ ID NO: 271619 - RNA, 32 nt, Human
uucugagaccagccuggcuuacauggugaaac

SEQ ID NO: 271620 - RNA, 32 nt, Human
uucugagaccuuguuucaaucuuugcuguaua

SEQ ID NO: 271621 - RNA, 32 nt, Human
uucugagagcccaaaaaggccagaauagcugg

SEQ ID NO: 271622 - RNA, 32 nt, Human
uucugagaggaaaaggaaaagggaagggagag

SEQ ID NO: 271623 - RNA, 32 nt, Human
uucugagaucaugcaucucccacccaucugcc

SEQ ID NO: 271624 - RNA, 32 nt, Human
uucugagauccagcacaacucagucuguggga

SEQ ID NO: 271625 - RNA, 32 nt, Human
uucugagauggagucucacuccguugccaggc

SEQ ID NO: 271626 - RNA, 32 nt, Human
uucugagaugggagcagagcagcauuuagucu

SEQ ID NO: 271627 - RNA, 32 nt, Human
uucugagauguggugacucaugugaaguggug

SEQ ID NO: 271628 - RNA, 32 nt, Human
uucugagauuucacauccacacacaccacaga

SEQ ID NO: 271629 - RNA, 32 nt, Human
uucugagcaaacaugaucuagcucucaccaaa

SEQ ID NO: 271630 - RNA, 32 nt, Human
uucugagcaccagcugccccaggugaggugug

SEQ ID NO: 271631 - RNA, 31 nt, Human
uucugagcacuuuuauuuaauagcagaaugg

SEQ ID NO: 271632 - RNA, 32 nt, Human
uucugagcauuuuuaucaccuuuccucacaua

SEQ ID NO: 271633 - RNA, 32 nt, Human
uucugagccagccucugcgggucccccaauaa

SEQ ID NO: 271634 - RNA, 32 nt, Human
uucugagcccagggagguagaggcuucaguga

SEQ ID NO: 271635 - RNA, 32 nt, Human
uucugagcccaucuuccauuguccucaacgag

SEQ ID NO: 271636 - RNA, 32 nt, Human
uucugagccuuccucuggacccaggcaggaga

SEQ ID NO: 271637 - RNA, 32 nt, Human
uucugagcgauagggucucaccauguugccca

SEQ ID NO: 271638 - RNA, 32 nt, Human
uucugagcucuccccaaucaccagcugucugc

SEQ ID NO: 271639 - RNA, 32 nt, Human
uucugagcuggacaugguggcucagcuucuaa

SEQ ID NO: 271640 - RNA, 32 nt, Human
uucugagcuggcagaguuuagggacgacgccc

SEQ ID NO: 271641 - RNA, 32 nt, Human
uucugagcuuuaggcaagagaagagaagcauc

SEQ ID NO: 271642 - RNA, 32 nt, Human
uucugagcuuuccuggaguuaggcccuucuag

SEQ ID NO: 271643 - RNA, 32 nt, Human
uucugaggagugugugauguguuuccauauau

SEQ ID NO: 271644 - RNA, 32 nt, Human
uucugaggauucaggggcugggggugcuggau

SEQ ID NO: 271645 - RNA, 32 nt, Human
uucugaggcccagaggagcaggugggauggga

SEQ ID NO: 271646 - RNA, 32 nt, Human
uucugaggcccagggguggagguuaggggugg

SEQ ID NO: 271647 - RNA, 24 nt, Human
uucugaggccuccccagccaugug

SEQ ID NO: 271648 - RNA, 32 nt, Human
uucugaggccuccuccagccucagggaacugu

SEQ ID NO: 271649 - RNA, 32 nt, Human
uucugaggccugguuugcucuuaauuaauaua

SEQ ID NO: 271650 - RNA, 32 nt, Human
uucugaggcuggucccuccucaguuuccgcag

SEQ ID NO: 271651 - RNA, 32 nt, Human
uucugaggcuuuugucuucuagcuacuuacuu

SEQ ID NO: 271652 - RNA, 32 nt, Human
uucugagggagggagaccucggcacuagaaaa

SEQ ID NO: 271653 - RNA, 32 nt, Human
uucugagggccugcuuggccuccugggggcaa

SEQ ID NO: 271654 - RNA, 32 nt, Human
uucugaggggcaacguggaggaagggccaggg

SEQ ID NO: 271655 - RNA, 32 nt, Human
uucugagggugacugaggcuacagcugcuauc

SEQ ID NO: 271656 - RNA, 32 nt, Human
uucugagguacagaggaagugauguccuugac

SEQ ID NO: 271657 - RNA, 32 nt, Human
uucugagguacuuuagaugaacaguaaauauu

SEQ ID NO: 271658 - RNA, 32 nt, Human
uucugagguauugauagcuugcuuuauuucug

SEQ ID NO: 271659 - RNA, 32 nt, Human
uucugaggugggaggaucaugaggucaaggga

SEQ ID NO: 271660 - RNA, 32 nt, Human
uucugagguguuugagccucuuuugccuacac

SEQ ID NO: 271661 - RNA, 32 nt, Human
uucugaguacuggccucauuaaggauuauaaa

SEQ ID NO: 271662 - RNA, 32 nt, Human
uucugagugcauaagaccuccaccucuagacu

SEQ ID NO: 271663 - RNA, 32 nt, Human
uucugagugccuaucugugcucuuuccucccu

SEQ ID NO: 271664 - RNA, 32 nt, Human
uucugagugggauguuuggccacauuuauggu

SEQ ID NO: 271665 - RNA, 32 nt, Human
uucugaguuaggcagaacauagccauggcccu

SEQ ID NO: 271666 - RNA, 23 nt, Human
uucugaguuucauucuccugccu

SEQ ID NO: 271667 - RNA, 32 nt, Human
uucugauaagccguguguuccaaagaaugucu

SEQ ID NO: 271668 - RNA, 32 nt, Human
uucugauaccaaccucuuuccuuuggaaguag

SEQ ID NO: 271669 - RNA, 32 nt, Human
uucugauaccacugcacugucugagaauuucc

SEQ ID NO: 271670 - RNA, 32 nt, Human
uucugauagaaagugcuuaaaccaccacucuu

SEQ ID NO: 271671 - RNA, 32 nt, Human
uucugauagaagauaucauugauaacuggaag

SEQ ID NO: 271672 - RNA, 32 nt, Human
uucugauagccugccucacagaguuuagacau

SEQ ID NO: 271673 - RNA, 32 nt, Human
uucugaucaaggcaucagcuguccugagcaag

SEQ ID NO: 271674 - RNA, 32 nt, Human
uucugauccucucuucuuuucccauuuacaaa

SEQ ID NO: 271675 - RNA, 32 nt, Human
uucugauccugccuuuuucuuuuccccacaac

SEQ ID NO: 271676 - RNA, 22 nt, Human
uucugaucuaagaaucuaccca

SEQ ID NO: 271677 - RNA, 21 nt, Human
uucugaucucaagugauccau

SEQ ID NO: 271678 - RNA, 32 nt, Human
uucugaucucaagugauccaucugccuuggcc

SEQ ID NO: 271679 - RNA, 20 nt, Human
uucugaucucagauaacuca

SEQ ID NO: 271680 - RNA, 23 nt, Human
uucugaucucagcagucuucuca

SEQ ID NO: 271681 - RNA, 30 nt, Human
uucugaugcagcugagaaaaaugcagaccg

SEQ ID NO: 271682 - RNA, 32 nt, Human
uucugaugcagugguagcauugguucaaguuc

SEQ ID NO: 271683 - RNA, 32 nt, Human
uucugaugcccagguugcaccccaugccaaug

SEQ ID NO: 271684 - RNA, 32 nt, Human
uucugaugcccagguuggggugcaguggcaca

SEQ ID NO: 271685 - RNA, 31 nt, Human
uucugauggaaggugggagccaacacccuuc

SEQ ID NO: 271686 - RNA, 32 nt, Human
uucugauggacuucagcuguuggccuugcaug

SEQ ID NO: 271687 - RNA, 32 nt, Human
uucugauguccaguuuccugucuuccaugccu

SEQ ID NO: 271688 - RNA, 32 nt, Human
uucugauguggaauauuuucagcugcucauau

SEQ ID NO: 271689 - RNA, 32 nt, Human
uucugauguguucucugaucugcccccacugu

SEQ ID NO: 271690 - RNA, 32 nt, Human
uucugauuaaaggauuuggauuuguacaugua

SEQ ID NO: 271691 - RNA, 32 nt, Human
uucugauucaguagacuggaggugaagucagg

SEQ ID NO: 271692 - RNA, 32 nt, Human
uucugauuucgucugugaaugagggaaauggu

SEQ ID NO: 271693 - RNA, 32 nt, Human
uucugauuucucucaccaaagacuggaaaaau

SEQ ID NO: 271694 - RNA, 32 nt, Human
uucugauuucugucucccuuccaucuuuucuc

SEQ ID NO: 271695 - RNA, 32 nt, Human
uucugauuucuuuugcaacccucugcauucca

SEQ ID NO: 271696 - RNA, 32 nt, Human
uucugcaaaaauaaucauacucagccuggcaa

SEQ ID NO: 271697 - RNA, 32 nt, Human
uucugcaaaacuuggacaggggcaaaguugcu

SEQ ID NO: 271698 - RNA, 32 nt, Human
uucugcaaacucccccuccccuccucugugcc

SEQ ID NO: 271699 - RNA, 32 nt, Human
uucugcaaauauggcuuaaauauuucauggca

SEQ ID NO: 271700 - RNA, 32 nt, Human
uucugcaacagcuuuccagcuuugaaaaccug

SEQ ID NO: 271701 - RNA, 23 nt, Human
uucugcaaccucugccucccagg

SEQ ID NO: 271702 - RNA, 32 nt, Human
uucugcaacugugcacuccucccuugguggca

SEQ ID NO: 271703 - RNA, 32 nt, Human
uucugcaacuugcuacucucucccucuccauc

SEQ ID NO: 271704 - RNA, 22 nt, Human
uucugcaaguagcuggcuugua

SEQ ID NO: 271705 - RNA, 31 nt, Human
uucugcaaguguccugaaaaagacugaacga

SEQ ID NO: 271706 - RNA, 32 nt, Human
uucugcaaguugccuccacuuccaaguggcca

SEQ ID NO: 271707 - RNA, 32 nt, Human
uucugcaaugcagagugaaguggauacugggc

SEQ ID NO: 271708 - RNA, 32 nt, Human
uucugcaaugcagcccugccaacuggggaccu

SEQ ID NO: 271709 - RNA, 32 nt, Human
uucugcacagccgucuauccccaggaucuaac

SEQ ID NO: 271710 - RNA, 32 nt, Human
uucugcacagcucagggacuuagccagguccu

SEQ ID NO: 271711 - RNA, 32 nt, Human
uucugcaccaauagcugaggcguucaggguug

SEQ ID NO: 271712 - RNA, 19 nt, Human
uucugcacccauugcccag

SEQ ID NO: 271713 - RNA, 32 nt, Human
uucugcaccccucuccccaugggaccuuggag

SEQ ID NO: 271714 - RNA, 32 nt, Human
uucugcaccuggggacccagagcgagaugggu

SEQ ID NO: 271715 - RNA, 31 nt, Human
uucugcacugccccuuggccugugugugagu

SEQ ID NO: 271716 - RNA, 32 nt, Human
uucugcacuggugcuuuggauucccugauaug

SEQ ID NO: 271717 - RNA, 32 nt, Human
uucugcacuguugccaauaaaaagcucuuaaa

SEQ ID NO: 271718 - RNA, 32 nt, Human
uucugcacuucugcugcuuacccagcccccuc

SEQ ID NO: 271719 - RNA, 32 nt, Human
uucugcagacuggcagucgcacacacauuugg

SEQ ID NO: 271720 - RNA, 32 nt, Human
uucugcagaggacgggaggcuggaagcuggga

SEQ ID NO: 271721 - RNA, 32 nt, Human
uucugcagagugaacugggagcagagagccuc

SEQ ID NO: 271722 - RNA, 32 nt, Human
uucugcagaucuuggacccagggagagagcug

SEQ ID NO: 271723 - RNA, 27 nt, Human
uucugcagcaggcgcaaccucuccuag

SEQ ID NO: 271724 - RNA, 32 nt, Human
uucugcagcaguugccccaggcaccuguucga

SEQ ID NO: 271725 - RNA, 32 nt, Human
uucugcagccagaaugaaggugccaucagcag

SEQ ID NO: 271726 - RNA, 32 nt, Human
uucugcagccuacagaugcagaaccagaauga

SEQ ID NO: 271727 - RNA, 32 nt, Human
uucugcagcuggcuggcuaccaguggcagcgg

SEQ ID NO: 271728 - RNA, 32 nt, Human
uucugcagcugggaucagccucagcuuggcag

SEQ ID NO: 271729 - RNA, 32 nt, Human
uucugcagcuguccauccugugucugggucag

SEQ ID NO: 271730 - RNA, 32 nt, Human
uucugcaggacagggccagcugucucccagcc

SEQ ID NO: 271731 - RNA, 32 nt, Human
uucugcaggcagccaugagcuccagccacccc

SEQ ID NO: 271732 - RNA, 32 nt, Human
uucugcaggcaguugaauggcacuccagaugg

SEQ ID NO: 271733 - RNA, 32 nt, Human
uucugcaggggaagcgaccauggccauagauc

SEQ ID NO: 271734 - RNA, 32 nt, Human
uucugcaguccguuguucuacuucucuuuccu

SEQ ID NO: 271735 - RNA, 32 nt, Human
uucugcagugcgacauccagaaauggcugaug

SEQ ID NO: 271736 - RNA, 32 nt, Human
uucugcaguggaacuguccuugcuacccucag

SEQ ID NO: 271737 - RNA, 28 nt, Human
uucugcauagcugcugccuccuaaucuu

SEQ ID NO: 271738 - RNA, 32 nt, Human
uucugcauauccagcaaaaggaaucucauguu

SEQ ID NO: 271739 - RNA, 32 nt, Human
uucugcaucacacauccucugagaccuaccau

SEQ ID NO: 271740 - RNA, 32 nt, Human
uucugcauccaccucugcccucauucugucaa

SEQ ID NO: 271741 - RNA, 32 nt, Human
uucugcaucucuggagcucaucagucuugcuu

SEQ ID NO: 271742 - RNA, 18 nt, Human
uucugcaucuggcuccug

SEQ ID NO: 271743 - RNA, 32 nt, Human
uucugcaugauuucucugggcuugcugucuua

SEQ ID NO: 271744 - RNA, 32 nt, Human
uucugcauuaaugccacaguggggauggaggc

SEQ ID NO: 271745 - RNA, 32 nt, Human
uucugcauucacaauuagugacuuugaggccu

SEQ ID NO: 271746 - RNA, 32 nt, Human
uucugcauuuucaggauucaauagaacugcuc

SEQ ID NO: 271747 - RNA, 32 nt, Human
uucugcauuuuguuaagaagcaccucaugcaa

SEQ ID NO: 271748 - RNA, 32 nt, Human
uucugccaaaaauacaaaaauuagcugggcuu

SEQ ID NO: 271749 - RNA, 32 nt, Human
uucugccaacguagcucugccugccugucaac

SEQ ID NO: 271750 - RNA, 32 nt, Human
uucugccaauuaaagacuagaagggcacaacu

SEQ ID NO: 271751 - RNA, 32 nt, Human
uucugccacaucucgcccuucuggaccugcac

SEQ ID NO: 271752 - RNA, 32 nt, Human
uucugccacccacgcccccaccccuggcaugg

SEQ ID NO: 271753 - RNA, 32 nt, Human
uucugccacccaggcuggaguacaguggcaug

SEQ ID NO: 271754 - RNA, 32 nt, Human
uucugccacuggcggcuucccuucuuggcucu

SEQ ID NO: 271755 - RNA, 32 nt, Human
uucugccagcacuuggcauuccagcugaccuc

SEQ ID NO: 271756 - RNA, 32 nt, Human
uucugccagcaugcaccagugcagccuuacca

SEQ ID NO: 271757 - RNA, 32 nt, Human
uucugccagccugaacuauauuuaagaaacuu

SEQ ID NO: 271758 - RNA, 32 nt, Human
uucugccagcuggccuggggauucugaguggu

SEQ ID NO: 271759 - RNA, 32 nt, Human
uucugccaggaccacaccgagggugcccacug

SEQ ID NO: 271760 - RNA, 32 nt, Human
uucugccaggagagauguggcugugagcuggg

SEQ ID NO: 271761 - RNA, 32 nt, Human
uucugccaucaucucagagcaugaucacauug

SEQ ID NO: 271762 - RNA, 32 nt, Human
uucugccaugccacacagccucagcuugaauc

SEQ ID NO: 271763 - RNA, 28 nt, Human
uucugcccaagugguaauucaucuuggu

SEQ ID NO: 271764 - RNA, 21 nt, Human
uucugcccagcacaccuuucc

SEQ ID NO: 271765 - RNA, 32 nt, Human
uucugcccagcacucgugcuuguucacauaau

SEQ ID NO: 271766 - RNA, 32 nt, Human
uucugcccauggucaucugcagcugcacgagu

SEQ ID NO: 271767 - RNA, 32 nt, Human
uucugcccauuguuucuuacuaguuucuugaa

SEQ ID NO: 271768 - RNA, 25 nt, Human
uucugcccauuuggggacacuuccc

SEQ ID NO: 271769 - RNA, 23 nt, Human
uucugccccaccgacaacuuacc

SEQ ID NO: 271770 - RNA, 22 nt, Human
uucugcccccagugcccuuccc

SEQ ID NO: 271771 - RNA, 32 nt, Human
uucugccccgaguuuugccacacugagacuuu

SEQ ID NO: 271772 - RNA, 20 nt, Human
uucugccccgccgccuuccc

SEQ ID NO: 271773 - RNA, 32 nt, Human
uucugccccuccacccacauccacauucagca

SEQ ID NO: 271774 - RNA, 22 nt, Human
uucugccccucccaccuguccc

SEQ ID NO: 271775 - RNA, 32 nt, Human
uucugccccugcccuuccucacacugacacuu

SEQ ID NO: 271776 - RNA, 32 nt, Human
uucugccccugggcccagucucuccucggagg

SEQ ID NO: 271777 - RNA, 32 nt, Human
uucugcccgggcccuggccacaaugaccucuu

SEQ ID NO: 271778 - RNA, 32 nt, Human
uucugcccuaaccugacagaggugucauccac

SEQ ID NO: 271779 - RNA, 22 nt, Human
uucugcccuacccggacuuccu

SEQ ID NO: 271780 - RNA, 32 nt, Human
uucugcccuccagauccacggugcuaauuccc

SEQ ID NO: 271781 - RNA, 32 nt, Human
uucugcccucccccuucacucuccccacaagu

SEQ ID NO: 271782 - RNA, 32 nt, Human
uucugcccucccugagcccacagggucaguca

SEQ ID NO: 271783 - RNA, 32 nt, Human
uucugcccucuagcagggagguuuuccaacug

SEQ ID NO: 271784 - RNA, 19 nt, Human
uucugcccucugaccuggg

SEQ ID NO: 271785 - RNA, 17 nt, Human
uucugcccucugcccag

SEQ ID NO: 271786 - RNA, 23 nt, Human
uucugcccugcccuaaaucuccc

SEQ ID NO: 271787 - RNA, 24 nt, Human
uucugcccugccgaacacuuuccc

SEQ ID NO: 271788 - RNA, 21 nt, Human
uucugcccugggcacccuccu

SEQ ID NO: 271789 - RNA, 19 nt, Human
uucugcccuuccacuuucc

SEQ ID NO: 271790 - RNA, 32 nt, Human
uucugcccuugccuucgcccugggugggacag

SEQ ID NO: 271791 - RNA, 32 nt, Human
uucugcccuuugcccucuacuuuucucccuuu

SEQ ID NO: 271792 - RNA, 32 nt, Human
uucugccgagccucuugucccuucccugcucu

SEQ ID NO: 271793 - RNA, 32 nt, Human
uucugccgaguccacauggccaugaagcagag

SEQ ID NO: 271794 - RNA, 32 nt, Human
uucugccgcagcccugcagagggcacagaaaa

SEQ ID NO: 271795 - RNA, 32 nt, Human
uucugccgcuucuccccugauggccaccucuu

SEQ ID NO: 271796 - RNA, 32 nt, Human
uucugccggccccagccggaagcuuacuccgc

SEQ ID NO: 271797 - RNA, 32 nt, Human
uucugccgugagccacugcgcccggccuccuu

SEQ ID NO: 271798 - RNA, 32 nt, Human
uucugccguuuugucucccagcuggcauucuc

SEQ ID NO: 271799 - RNA, 32 nt, Human
uucugccuagucucugugcccugucuuugugu

SEQ ID NO: 271800 - RNA, 32 nt, Human
uucugccuaugauguugaggaaguuguaucag

SEQ ID NO: 271801 - RNA, 32 nt, Human
uucugccucacucaucccuccuguacccuggc

SEQ ID NO: 271802 - RNA, 32 nt, Human
uucugccucauuccucuccaugaugcccccug

SEQ ID NO: 271803 - RNA, 20 nt, Human
uucugccucccccucccccc

SEQ ID NO: 271804 - RNA, 21 nt, Human
uucugccuccccucuggucuc

SEQ ID NO: 271805 - RNA, 22 nt, Human
uucugccucccucuuucuuccu

SEQ ID NO: 271806 - RNA, 32 nt, Human
uucugccucccugcccuccagaccauggacgg

SEQ ID NO: 271807 - RNA, 20 nt, Human
uucugccuccuccccacucc

SEQ ID NO: 271808 - RNA, 32 nt, Human
uucugccucuacuagaacucagcuagagagga

SEQ ID NO: 271809 - RNA, 32 nt, Human
uucugccucuacuugucccuuuggccccuugc

SEQ ID NO: 271810 - RNA, 32 nt, Human
uucugccucucaaacuccugaccucaaguaau

SEQ ID NO: 271811 - RNA, 32 nt, Human
uucugccucugagggaaagcccagaaaaggac

SEQ ID NO: 271812 - RNA, 22 nt, Human
uucugccucuguccacauuucc

SEQ ID NO: 271813 - RNA, 32 nt, Human
uucugccucuuacuauacgacuguagugcaac

SEQ ID NO: 271814 - RNA, 32 nt, Human
uucugccugaaaucccaguacucuggaaggcc

SEQ ID NO: 271815 - RNA, 32 nt, Human
uucugccugccccucagaaccucucuguacuc

SEQ ID NO: 271816 - RNA, 32 nt, Human
uucugccugccggaccuccaccuggagcuguc

SEQ ID NO: 271817 - RNA, 32 nt, Human
uucugccugccuccgucucuuucucccucaga

SEQ ID NO: 271818 - RNA, 32 nt, Human
uucugccugccuguccucaugccucuccuccu

SEQ ID NO: 271819 - RNA, 32 nt, Human
uucugccugcugaccauaacagugccagcuuc

SEQ ID NO: 271820 - RNA, 32 nt, Human
uucugccugcugcccacuucccuagacuggag

SEQ ID NO: 271821 - RNA, 32 nt, Human
uucugccuggacaucauaaauggggacuugga

SEQ ID NO: 271822 - RNA, 32 nt, Human
uucugccugggcacacaccacaugcagauuuc

SEQ ID NO: 271823 - RNA, 32 nt, Human
uucugccugguggucuuucuucugccugcuau

SEQ ID NO: 271824 - RNA, 32 nt, Human
uucugccuguaaucccagaauuuugggaggcc

SEQ ID NO: 271825 - RNA, 32 nt, Human
uucugccuguacugcugcugcugcugcucagg

SEQ ID NO: 271826 - RNA, 32 nt, Human
uucugccugucaggcaggcggcaaagcucucc

SEQ ID NO: 271827 - RNA, 32 nt, Human
uucugccugucucagccucccaaaaagcuggg

SEQ ID NO: 271828 - RNA, 23 nt, Human
uucugccugugaucauuucuuua

SEQ ID NO: 271829 - RNA, 32 nt, Human
uucugccuuauacugggaaugccucaggcuug

SEQ ID NO: 271830 - RNA, 18 nt, Human
uucugccuucaaagguug

SEQ ID NO: 271831 - RNA, 32 nt, Human
uucugccuuccagaggugggaaugacuuggcu

SEQ ID NO: 271832 - RNA, 32 nt, Human
uucugccuuccaggagaggucuugcuuuugaa

SEQ ID NO: 271833 - RNA, 32 nt, Human
uucugccuucccuaguaguagggacugacaga

SEQ ID NO: 271834 - RNA, 32 nt, Human
uucugccuuuugucucuggguuuuguucucag

SEQ ID NO: 271835 - RNA, 32 nt, Human
uucugcgaggaauggcagcggcagcagcaucc

SEQ ID NO: 271836 - RNA, 32 nt, Human
uucugcgauauuuuuccacauuuucuugucgc

SEQ ID NO: 271837 - RNA, 32 nt, Human
uucugcgcucccggcccugcugcaggcugucu

SEQ ID NO: 271838 - RNA, 32 nt, Human
uucugcgcuuccuucucccucucuccagacgu

SEQ ID NO: 271839 - RNA, 32 nt, Human
uucugcggaggaggucaccugagcucacagga

SEQ ID NO: 271840 - RNA, 32 nt, Human
uucugcggagggugagacugagguggcugcag

SEQ ID NO: 271841 - RNA, 18 nt, Human
uucugcggcgcaaggcua

SEQ ID NO: 271842 - RNA, 32 nt, Human
uucugcggcuccaagccagcggguccugugaa

SEQ ID NO: 271843 - RNA, 32 nt, Human
uucugcguuggguuuucccuugccuuaugggc

SEQ ID NO: 271844 - RNA, 32 nt, Human
uucugcuaccccgugaccucccucucuccuuc

SEQ ID NO: 271845 - RNA, 32 nt, Human
uucugcuagagauucucagacugugggcauca

SEQ ID NO: 271846 - RNA, 32 nt, Human
uucugcuaguaaaggacuggcuucauucuaau

SEQ ID NO: 271847 - RNA, 32 nt, Human
uucugcucacaauaacaucugcccaaagaggg

SEQ ID NO: 271848 - RNA, 32 nt, Human
uucugcucacaucccauugcccggcuacaagg

SEQ ID NO: 271849 - RNA, 32 nt, Human
uucugcucagccacugggcucuuucacuuuuu

SEQ ID NO: 271850 - RNA, 32 nt, Human
uucugcucagccugugaccagcucuuucucuc

SEQ ID NO: 271851 - RNA, 32 nt, Human
uucugcucagcugguggguauggguccccuau

SEQ ID NO: 271852 - RNA, 32 nt, Human
uucugcucaguucaacaaugaaaugaagagga

SEQ ID NO: 271853 - RNA, 32 nt, Human
uucugcucaucucuccccauuucuuucuuccc

SEQ ID NO: 271854 - RNA, 32 nt, Human
uucugcuccauuuguagcaggugacagggguc

SEQ ID NO: 271855 - RNA, 32 nt, Human
uucugcuccccgccucaccccgccuccuccug

SEQ ID NO: 271856 - RNA, 32 nt, Human
uucugcucccgacuuucuggugucucuggcac

SEQ ID NO: 271857 - RNA, 32 nt, Human
uucugcucccucauucucuccccaccacucuc

SEQ ID NO: 271858 - RNA, 32 nt, Human
uucugcucccuuccaucucucucccauacuug

SEQ ID NO: 271859 - RNA, 32 nt, Human
uucugcuccgcuuccuccugcccagccaggca

SEQ ID NO: 271860 - RNA, 32 nt, Human
uucugcuccugcuuuucuguccugggcauggg

SEQ ID NO: 271861 - RNA, 32 nt, Human
uucugcucuaucucaaagacugaaugauacua

SEQ ID NO: 271862 - RNA, 32 nt, Human
uucugcucuccugcccacggugaucuggugcc

SEQ ID NO: 271863 - RNA, 32 nt, Human
uucugcucuguggaggggcgggcaccagcgcc

SEQ ID NO: 271864 - RNA, 32 nt, Human
uucugcucuguugcaugccugcucuaauuucu

SEQ ID NO: 271865 - RNA, 32 nt, Human
uucugcucuuagaccaggaagcugcauccaca

SEQ ID NO: 271866 - RNA, 32 nt, Human
uucugcugaaccugacagccagugggacucca

SEQ ID NO: 271867 - RNA, 32 nt, Human
uucugcugaccacagcacuccaaccaaaagcc

SEQ ID NO: 271868 - RNA, 32 nt, Human
uucugcugcacucugcuugggccuugaggucu

SEQ ID NO: 271869 - RNA, 32 nt, Human
uucugcugcccaagcuggaguggcaguggcau

SEQ ID NO: 271870 - RNA, 32 nt, Human
uucugcugcccagguuggagugcaguggcacg

SEQ ID NO: 271871 - RNA, 32 nt, Human
uucugcugccccuucaggguuuggaggagccg

SEQ ID NO: 271872 - RNA, 32 nt, Human
uucugcugcccucugcugucugcugagaugcc

SEQ ID NO: 271873 - RNA, 32 nt, Human
uucugcugccgcucugcagccuggaccugugg

SEQ ID NO: 271874 - RNA, 32 nt, Human
uucugcugcuaaaaauacaaaaguuuggaaac

SEQ ID NO: 271875 - RNA, 32 nt, Human
uucugcugcuacugcugcugcugcaagguugg

SEQ ID NO: 271876 - RNA, 32 nt, Human
uucugcugcuccacacacccagagaaggagug

SEQ ID NO: 271877 - RNA, 32 nt, Human
uucugcugcucccagcccccuccuccuggggc

SEQ ID NO: 271878 - RNA, 32 nt, Human
uucugcugcuggcuugcagaaaaagaaaaaug

SEQ ID NO: 271879 - RNA, 32 nt, Human
uucugcuggcggguguucugugccugggauua

SEQ ID NO: 271880 - RNA, 32 nt, Human
uucugcuguccccacugcccccggcuaggauc

SEQ ID NO: 271881 - RNA, 32 nt, Human
uucugcugugagaauguaagauggauccagaa

SEQ ID NO: 271882 - RNA, 32 nt, Human
uucugcuguggcuauauuggccuagaggggcu

SEQ ID NO: 271883 - RNA, 32 nt, Human
uucugcugugugacucugggcaagucacucuc

SEQ ID NO: 271884 - RNA, 32 nt, Human
uucugcugugugucuguguagacugggcacag

SEQ ID NO: 271885 - RNA, 32 nt, Human
uucugcuguuacggguacuuugcucauacgag

SEQ ID NO: 271886 - RNA, 32 nt, Human
uucugcuuacucacuccuucucccucuuucug

SEQ ID NO: 271887 - RNA, 32 nt, Human
uucugcuuagcugggccagcucccugcaacuc

SEQ ID NO: 271888 - RNA, 32 nt, Human
uucugcuucacacuaagugugucaucuuggcu

SEQ ID NO: 271889 - RNA, 32 nt, Human
uucugcuucacucuauuuaucucuugauguaa

SEQ ID NO: 271890 - RNA, 32 nt, Human
uucugcuuccacuguguuggggagagguguuc

SEQ ID NO: 271891 - RNA, 32 nt, Human
uucugcuuccccagcggauucccacucugucc

SEQ ID NO: 271892 - RNA, 32 nt, Human
uucugcuucccccauucccuuccacagcucau

SEQ ID NO: 271893 - RNA, 32 nt, Human
uucugcuuccccucacuuuuagaaguuaauug

SEQ ID NO: 271894 - RNA, 32 nt, Human
uucugcuucccuggaaaggaugaauuuacauc

SEQ ID NO: 271895 - RNA, 32 nt, Human
uucugcuucuucuguuuugccccauggucaag

SEQ ID NO: 271896 - RNA, 32 nt, Human
uucugcuugagguuuggggaggagggcaggcg

SEQ ID NO: 271897 - RNA, 32 nt, Human
uucugcuugcagccuucugucuuaaagguuuu

SEQ ID NO: 271898 - RNA, 32 nt, Human
uucugcuugcagcugcccaagucugccugggc

SEQ ID NO: 271899 - RNA, 32 nt, Human
uucugcuugcugcuaagaguuugcuaaagugu

SEQ ID NO: 271900 - RNA, 32 nt, Human
uucugcuuucaucuuggucacauacaauuauu

SEQ ID NO: 271901 - RNA, 32 nt, Human
uucugcuuucuugccacacagugggccggccc

SEQ ID NO: 271902 - RNA, 32 nt, Human
uucugcuuuguucgcucuuacuucugaggaag

SEQ ID NO: 271903 - RNA, 32 nt, Human
uucugcuuuuucuauucugaaaaaggacuuac

SEQ ID NO: 271904 - RNA, 32 nt, Human
uucuggaaaaggcaagaauagagaggcaguaa

SEQ ID NO: 271905 - RNA, 32 nt, Human
uucuggaaaauauccaugugguaaugguagac

SEQ ID NO: 271906 - RNA, 32 nt, Human
uucuggaaacccuuagcaaaccugccaugcuu

SEQ ID NO: 271907 - RNA, 32 nt, Human
uucuggaaacuaguuuuaauacauuuguuuuu

SEQ ID NO: 271908 - RNA, 32 nt, Human
uucuggaaagguuuuguuucugccucaaagca

SEQ ID NO: 271909 - RNA, 32 nt, Human
uucuggaaauggugcagccacuggggacaguu

SEQ ID NO: 271910 - RNA, 32 nt, Human
uucuggaacucuccaccuccgucucccuuggg

SEQ ID NO: 271911 - RNA, 32 nt, Human
uucuggaacuuaugauaggaagaaaagauguu

SEQ ID NO: 271912 - RNA, 32 nt, Human
uucuggaacuucugggcucaagcaauuuuccu

SEQ ID NO: 271913 - RNA, 32 nt, Human
uucuggaagagcucauauguguuuagcagguc

SEQ ID NO: 271914 - RNA, 32 nt, Human
uucuggaaggacaguaaccacugucaauugug

SEQ ID NO: 271915 - RNA, 32 nt, Human
uucuggaagugaugcuuccaggauuuguuuuc

SEQ ID NO: 271916 - RNA, 32 nt, Human
uucuggaaucaguguuuuccagucccauccca

SEQ ID NO: 271917 - RNA, 26 nt, Human
uucuggacaacuuuccccuucugcuu

SEQ ID NO: 271918 - RNA, 32 nt, Human
uucuggacacaaaaccaccccaaaaagugagu

SEQ ID NO: 271919 - RNA, 32 nt, Human
uucuggacaccaugcccugugccuugucacuc

SEQ ID NO: 271920 - RNA, 32 nt, Human
uucuggacagacacuuguacauggacagacau

SEQ ID NO: 271921 - RNA, 32 nt, Human
uucuggacauaaaacacagaugaggaaagggc

SEQ ID NO: 271922 - RNA, 32 nt, Human
uucuggacauaguaaaauuuuucuccauaaau

SEQ ID NO: 271923 - RNA, 32 nt, Human
uucuggaccagaacagcuccagcucccaggua

SEQ ID NO: 271924 - RNA, 32 nt, Human
uucuggaccagagacuuggugcgggguuaaca

SEQ ID NO: 271925 - RNA, 32 nt, Human
uucuggacucaaacgauccucucaccucggcc

SEQ ID NO: 271926 - RNA, 32 nt, Human
uucuggacucaagugauccucccgccucggcc

SEQ ID NO: 271927 - RNA, 32 nt, Human
uucuggacucaagugauccuccugccucagcu

SEQ ID NO: 271928 - RNA, 32 nt, Human
uucuggacucaagugauccucuggccucagcc

SEQ ID NO: 271929 - RNA, 21 nt, Human
uucuggacuccugaaggucgu

SEQ ID NO: 271930 - RNA, 32 nt, Human
uucuggacugcaaaggggacccccagguggga

SEQ ID NO: 271931 - RNA, 32 nt, Human
uucuggagaauaggaguggagcugcaggcccu

SEQ ID NO: 271932 - RNA, 32 nt, Human
uucuggagacugcgccguccucccgggagagc

SEQ ID NO: 271933 - RNA, 32 nt, Human
uucuggagagccucugcaggggguuugccauc

SEQ ID NO: 271934 - RNA, 32 nt, Human
uucuggagaggaacuuggaauuugagggagau

SEQ ID NO: 271935 - RNA, 32 nt, Human
uucuggagagggccucugagaaggcacugaau

SEQ ID NO: 271936 - RNA, 32 nt, Human
uucuggagcaccaguucacuccagguuuuuau

SEQ ID NO: 271937 - RNA, 32 nt, Human
uucuggagcagccuggugaacccugccacagg

SEQ ID NO: 271938 - RNA, 32 nt, Human
uucuggagccugacgaugaggggagugaugcu

SEQ ID NO: 271939 - RNA, 32 nt, Human
uucuggagcucuugugucauuguuagaaaucc

SEQ ID NO: 271940 - RNA, 32 nt, Human
uucuggagcugcuguuccaacagacagggccu

SEQ ID NO: 271941 - RNA, 32 nt, Human
uucuggaggaagagcaaucaaguuuguggcca

SEQ ID NO: 271942 - RNA, 32 nt, Human
uucuggaggaugucacagagaauuccauccug

SEQ ID NO: 271943 - RNA, 32 nt, Human
uucuggaggcuccagggcaggaaggggaggau

SEQ ID NO: 271944 - RNA, 24 nt, Human
uucuggaggcugcaaaguccaaua

SEQ ID NO: 271945 - RNA, 32 nt, Human
uucuggagguggguggcaacuccacgcgggag

SEQ ID NO: 271946 - RNA, 32 nt, Human
uucuggagguuggagguuccgcucagugacag

SEQ ID NO: 271947 - RNA, 32 nt, Human
uucuggaguccagagccacugccuuugcucca

SEQ ID NO: 271948 - RNA, 32 nt, Human
uucuggaguccuuuggaaacaugugucccaga

SEQ ID NO: 271949 - RNA, 32 nt, Human
uucuggagugccugaacggcccccugagcccu

SEQ ID NO: 271950 - RNA, 32 nt, Human
uucuggauagaggaagugauuggaaguauucc

SEQ ID NO: 271951 - RNA, 32 nt, Human
uucuggauaggggaugagguugcugugaaagc

SEQ ID NO: 271952 - RNA, 32 nt, Human
uucuggauauuuuugccacauuucuuugcaaa

SEQ ID NO: 271953 - RNA, 32 nt, Human
uucuggaucacgugggcccagugcaguucaaa

SEQ ID NO: 271954 - RNA, 32 nt, Human
uucuggauccuugagcaaaugauuauagucuc

SEQ ID NO: 271955 - RNA, 32 nt, Human
uucuggauccuuggagcuuagcucggagcuug

SEQ ID NO: 271956 - RNA, 32 nt, Human
uucuggaugaauauaaaaugugcugcccuuca

SEQ ID NO: 271957 - RNA, 32 nt, Human
uucuggaugcagagguggagguugaggccgug

SEQ ID NO: 271958 - RNA, 32 nt, Human
uucuggauggguuaguuguaggucccuagauu

SEQ ID NO: 271959 - RNA, 32 nt, Human
uucuggauucaagugauucuccugccucagcc

SEQ ID NO: 271960 - RNA, 32 nt, Human
uucuggauucaagugauucuugugccuuagcc

SEQ ID NO: 271961 - RNA, 32 nt, Human
uucuggauuuuguagugcacacaaagacaaga

SEQ ID NO: 271962 - RNA, 32 nt, Human
uucuggcaacuccuuguaauuccaauguauuu

SEQ ID NO: 271963 - RNA, 26 nt, Human
uucuggcaagguuuccaccucuuccu

SEQ ID NO: 271964 - RNA, 32 nt, Human
uucuggcacauacuugaguuugagaauaacug

SEQ ID NO: 271965 - RNA, 32 nt, Human
uucuggcacaucugaauaaacauguucuuauu

SEQ ID NO: 271966 - RNA, 32 nt, Human
uucuggcaccacuuccuucccuggccccuuaa

SEQ ID NO: 271967 - RNA, 23 nt, Human
uucuggcaccuaccuaccugcuu

SEQ ID NO: 271968 - RNA, 32 nt, Human
uucuggcagggaccuggcuggggaacguucug

SEQ ID NO: 271969 - RNA, 32 nt, Human
uucuggcauguagaucaguggucuccaagcuu

SEQ ID NO: 271970 - RNA, 32 nt, Human
uucuggcauucucugccucugccucauauucu

SEQ ID NO: 271971 - RNA, 32 nt, Human
uucuggccacaucagaaucgucugagggacuu

SEQ ID NO: 271972 - RNA, 32 nt, Human
uucuggccacugccacugaugcccagggauuc

SEQ ID NO: 271973 - RNA, 32 nt, Human
uucuggccaggaauaaauacuuccugaacauc

SEQ ID NO: 271974 - RNA, 32 nt, Human
uucuggccaggaggaagggcagaugcucccuc

SEQ ID NO: 271975 - RNA, 32 nt, Human
uucuggccagggaggcauugcugcaggugagc

SEQ ID NO: 271976 - RNA, 32 nt, Human
uucuggcccacaccuauggcucaggccgaggc

SEQ ID NO: 271977 - RNA, 32 nt, Human
uucuggcccagggacaggaggaagagaugcca

SEQ ID NO: 271978 - RNA, 32 nt, Human
uucuggcccucucgacccuccugggccuuguu

SEQ ID NO: 271979 - RNA, 21 nt, Human
uucuggccucaagugauccac

SEQ ID NO: 271980 - RNA, 32 nt, Human
uucuggccucaagugauccaccuaccuaguuu

SEQ ID NO: 271981 - RNA, 32 nt, Human
uucuggccucaagugauccuccugccucggcc

SEQ ID NO: 271982 - RNA, 20 nt, Human
uucuggccucagaccaacuc

SEQ ID NO: 271983 - RNA, 24 nt, Human
uucuggccucuuuccauccaauca

SEQ ID NO: 271984 - RNA, 32 nt, Human
uucuggccuucagggucacaggcaguaggggg

SEQ ID NO: 271985 - RNA, 21 nt, Human
uucuggccuuggugaucacuu

SEQ ID NO: 271986 - RNA, 32 nt, Human
uucuggcggaagagacaagcaagcaaugaaca

SEQ ID NO: 271987 - RNA, 32 nt, Human
uucuggcgucucucaccuccuucauccccuac

SEQ ID NO: 271988 - RNA, 32 nt, Human
uucuggcuaacacugaaaccccgucucuacua

SEQ ID NO: 271989 - RNA, 32 nt, Human
uucuggcucacugcagccucaaacuccugagu

SEQ ID NO: 271990 - RNA, 32 nt, Human
uucuggcuccagccagaccuucagugguccug

SEQ ID NO: 271991 - RNA, 18 nt, Human
uucuggcuccguccccag

SEQ ID NO: 271992 - RNA, 32 nt, Human
uucuggcuccuguggccucaccaggaagcguc

SEQ ID NO: 271993 - RNA, 32 nt, Human
uucuggcucugaagacacagacagagguuucc

SEQ ID NO: 271994 - RNA, 32 nt, Human
uucuggcucugaguguuccucucagcaccucu

SEQ ID NO: 271995 - RNA, 32 nt, Human
uucuggcucuggggcuccaaggacucacaaag

SEQ ID NO: 271996 - RNA, 32 nt, Human
uucuggcugcagaucuggagguggaggcagua

SEQ ID NO: 271997 - RNA, 23 nt, Human
uucuggcugccagccugggcagc

SEQ ID NO: 271998 - RNA, 32 nt, Human
uucuggcugccugguggccacugcuacagcug

SEQ ID NO: 271999 - RNA, 32 nt, Human
uucuggcugcucuucauugaccuguguguucc

SEQ ID NO: 272000 - RNA, 32 nt, Human
uucuggcugggaacguagacagugggguugug

SEQ ID NO: 272001 - RNA, 32 nt, Human
uucuggcugggcugccgugugcacagcaaguu

SEQ ID NO: 272002 - RNA, 32 nt, Human
uucuggcugguuuggaacaggcugccaugcuu

SEQ ID NO: 272003 - RNA, 32 nt, Human
uucuggcugugggagcaccaccugguggcuga

SEQ ID NO: 272004 - RNA, 21 nt, Human
uucuggcuucagcccccacca

SEQ ID NO: 272005 - RNA, 32 nt, Human
uucuggcuucaggcugggaggcacaguucagg

SEQ ID NO: 272006 - RNA, 32 nt, Human
uucuggcuucugcuucauccugcuccaucggg

SEQ ID NO: 272007 - RNA, 20 nt, Human
uucuggcuucuguuccacuu

SEQ ID NO: 272008 - RNA, 32 nt, Human
uucuggcuuggcuaauggaaaucgacacuagc

SEQ ID NO: 272009 - RNA, 32 nt, Human
uucuggcuuuggucuguucuccuuccuuacag

SEQ ID NO: 272010 - RNA, 32 nt, Human
uucuggcuuuucaaccaaacauuguugcuaau

SEQ ID NO: 272011 - RNA, 32 nt, Human
uucugggaaagcaguuuugcuaaaagcuguac

SEQ ID NO: 272012 - RNA, 32 nt, Human
uucugggaacugcuuugcauuucuccuauaga

SEQ ID NO: 272013 - RNA, 32 nt, Human
uucugggaagcccguggcagggcacaggguug

SEQ ID NO: 272014 - RNA, 32 nt, Human
uucugggaaggccugggugugugcacaaggag

SEQ ID NO: 272015 - RNA, 32 nt, Human
uucugggaagggcagaggauaaauguggcccu

SEQ ID NO: 272016 - RNA, 32 nt, Human
uucugggaauacagacuugaaccagacaugcu

SEQ ID NO: 272017 - RNA, 32 nt, Human
uucugggaaugcuaauaugcaagugaaccagu

SEQ ID NO: 272018 - RNA, 32 nt, Human
uucugggacccaggcuucagugucacacgguc

SEQ ID NO: 272019 - RNA, 18 nt, Human
uucugggaccugccagca

SEQ ID NO: 272020 - RNA, 32 nt, Human
uucugggacugcugugaggcagaggaaugaug

SEQ ID NO: 272021 - RNA, 32 nt, Human
uucugggagcagaguugagggagccgagcuga

SEQ ID NO: 272022 - RNA, 19 nt, Human
uucugggagccacugggca

SEQ ID NO: 272023 - RNA, 24 nt, Human
uucugggagccauucuucuugccu

SEQ ID NO: 272024 - RNA, 32 nt, Human
uucugggagccuuuugacagcuggucccugcc

SEQ ID NO: 272025 - RNA, 32 nt, Human
uucugggagcugugaccucccuuccuccucca

SEQ ID NO: 272026 - RNA, 32 nt, Human
uucugggaggccgaggcgggcagaucacuuga

SEQ ID NO: 272027 - RNA, 32 nt, Human
uucugggaggucacuggaggccagcucagccc

SEQ ID NO: 272028 - RNA, 26 nt, Human
uucugggagguucccgcuugcugccu

SEQ ID NO: 272029 - RNA, 32 nt, Human
uucugggaguugcauaccggccagucuuauuc

SEQ ID NO: 272030 - RNA, 32 nt, Human
uucugggaguuuagacaauguugcccuuggau

SEQ ID NO: 272031 - RNA, 32 nt, Human
uucugggauacauaugcaaaacaugcauguuu

SEQ ID NO: 272032 - RNA, 32 nt, Human
uucugggauaguagucuucauccacuaaacug

SEQ ID NO: 272033 - RNA, 32 nt, Human
uucugggauuacaggcaugagccaccaugccc

SEQ ID NO: 272034 - RNA, 32 nt, Human
uucugggauuacaggcaugagccaccgugccc

SEQ ID NO: 272035 - RNA, 32 nt, Human
uucugggauuacaggcaugagccacugugccc

SEQ ID NO: 272036 - RNA, 32 nt, Human
uucugggauuacaggguguugagccacucuga

SEQ ID NO: 272037 - RNA, 32 nt, Human
uucugggauucaggcuggccggugcugugucc

SEQ ID NO: 272038 - RNA, 32 nt, Human
uucugggauuucucccucucaguggagccuua

SEQ ID NO: 272039 - RNA, 32 nt, Human
uucugggcaccacugcauucccugauacccac

SEQ ID NO: 272040 - RNA, 21 nt, Human
uucugggcaccgccuucugcu

SEQ ID NO: 272041 - RNA, 31 nt, Human
uucugggcacuuuuuaacauugcugauguag

SEQ ID NO: 272042 - RNA, 32 nt, Human
uucugggcaggcaggccauggggcauggagga

SEQ ID NO: 272043 - RNA, 32 nt, Human
uucugggcaguuucaccuuugugccuuaaaug

SEQ ID NO: 272044 - RNA, 32 nt, Human
uucugggcauucuauggagaccccaggagagc

SEQ ID NO: 272045 - RNA, 31 nt, Human
uucugggccaagagacacucacuggacaaua

SEQ ID NO: 272046 - RNA, 32 nt, Human
uucugggccaucccccuccacccccacccuga

SEQ ID NO: 272047 - RNA, 24 nt, Human
uucugggccauucuuuuccugucu

SEQ ID NO: 272048 - RNA, 32 nt, Human
uucugggccuguaaucccaguuuggauggcac

SEQ ID NO: 272049 - RNA, 32 nt, Human
uucugggcgccacugcauucccugauacacac

SEQ ID NO: 272050 - RNA, 32 nt, Human
uucugggcucaagcaaucuucccaccucagcc

SEQ ID NO: 272051 - RNA, 32 nt, Human
uucugggcucaagcaauucaucugccucaacc

SEQ ID NO: 272052 - RNA, 32 nt, Human
uucugggcucaagcaauugucccuccucagcc

SEQ ID NO: 272053 - RNA, 32 nt, Human
uucugggcucaagcaauuuuccugccuugggc

SEQ ID NO: 272054 - RNA, 32 nt, Human
uucugggcucaagugauccucccuccuuggcc

SEQ ID NO: 272055 - RNA, 32 nt, Human
uucugggcucaagugauccucucaccucagcu

SEQ ID NO: 272056 - RNA, 32 nt, Human
uucugggcucaagugcuucucccaccucagcc

SEQ ID NO: 272057 - RNA, 32 nt, Human
uucugggcucaggugauccucccgccuuggcc

SEQ ID NO: 272058 - RNA, 32 nt, Human
uucugggcucaggugauccuuccgccucaccc

SEQ ID NO: 272059 - RNA, 32 nt, Human
uucugggcucuugccugugaaaucuuucuuug

SEQ ID NO: 272060 - RNA, 32 nt, Human
uucugggcuggccaaggccagagcaggcuccc

SEQ ID NO: 272061 - RNA, 32 nt, Human
uucugggcugggauccuggcuccagggccaug

SEQ ID NO: 272062 - RNA, 32 nt, Human
uucuggggaaagcauccaucacagaaccuccc

SEQ ID NO: 272063 - RNA, 32 nt, Human
uucuggggaagagaccuagaaacaagcuuuca

SEQ ID NO: 272064 - RNA, 32 nt, Human
uucuggggaccaugcauuugccuggauuuucc

SEQ ID NO: 272065 - RNA, 32 nt, Human
uucuggggagcaccgcaggcuccucaccccca

SEQ ID NO: 272066 - RNA, 32 nt, Human
uucuggggaggcagagaggcagggacuuuggg

SEQ ID NO: 272067 - RNA, 32 nt, Human
uucuggggagguaggaaggaccaggggcauuc

SEQ ID NO: 272068 - RNA, 32 nt, Human
uucuggggaugguuugggggcgggccgggucc

SEQ ID NO: 272069 - RNA, 32 nt, Human
uucuggggcaggcaccgagguccgaguggcaa

SEQ ID NO: 272070 - RNA, 21 nt, Human
uucuggggcaggucuccgccu

SEQ ID NO: 272071 - RNA, 22 nt, Human
uucuggggccacccuccagccu

SEQ ID NO: 272072 - RNA, 32 nt, Human
uucuggggcccagguugaagccgaccaacccu

SEQ ID NO: 272073 - RNA, 32 nt, Human
uucuggggccccugcccucaggaggcugucag

SEQ ID NO: 272074 - RNA, 23 nt, Human
uucuggggcuaacuucucugccu

SEQ ID NO: 272075 - RNA, 22 nt, Human
uucuggggcuaagccuccuucu

SEQ ID NO: 272076 - RNA, 32 nt, Human
uucugggggaggguuucacuguuacaucacca

SEQ ID NO: 272077 - RNA, 32 nt, Human
uucugggggaggucacugcagaaggauggaac

SEQ ID NO: 272078 - RNA, 32 nt, Human
uucugggggcuggagggagccggggcagccac

SEQ ID NO: 272079 - RNA, 32 nt, Human
uucugggggugagguugacggcuggucgugau

SEQ ID NO: 272080 - RNA, 26 nt, Human
uucugggguaaguuccaccucuucuu

SEQ ID NO: 272081 - RNA, 32 nt, Human
uucuggggucaagugauccucucaccucagcc

SEQ ID NO: 272082 - RNA, 32 nt, Human
uucugggguggaggguggggguggagguccug

SEQ ID NO: 272083 - RNA, 24 nt, Human
uucugggguuucuugaaucuuguc

SEQ ID NO: 272084 - RNA, 24 nt, Human
uucugggguuuugauuuuccuucu

SEQ ID NO: 272085 - RNA, 32 nt, Human
uucuggguagaguuuguccucucacuucugga

SEQ ID NO: 272086 - RNA, 24 nt, Human
uucugggucagaaugaucuacuca

SEQ ID NO: 272087 - RNA, 32 nt, Human
uucugggucccugguugaagcagcagcuuacc

SEQ ID NO: 272088 - RNA, 32 nt, Human
uucuggguccucuucagguuugagugcuugaa

SEQ ID NO: 272089 - RNA, 23 nt, Human
uucugggucgguuccagcggcuu

SEQ ID NO: 272090 - RNA, 32 nt, Human
uucugggugagguuauuugcagguggagacgg

SEQ ID NO: 272091 - RNA, 32 nt, Human
uucugggugaugaaaauguucuauuucuugau

SEQ ID NO: 272092 - RNA, 32 nt, Human
uucugggugcagacugcaccuccggaugcagu

SEQ ID NO: 272093 - RNA, 32 nt, Human
uucugggugggaccuaagauggcuugggaguu

SEQ ID NO: 272094 - RNA, 32 nt, Human
uucugggugggaguggggagggcgaggggccu

SEQ ID NO: 272095 - RNA, 32 nt, Human
uucugggugggcugguucuggguggggagcug

SEQ ID NO: 272096 - RNA, 32 nt, Human
uucugggugugacugauucccagccuguggca

SEQ ID NO: 272097 - RNA, 32 nt, Human
uucuggguuagaagcuauucgaaaaguccagu

SEQ ID NO: 272098 - RNA, 32 nt, Human
uucuggguuaucuucugaucauggccuuucaa

SEQ ID NO: 272099 - RNA, 32 nt, Human
uucuggguucaagugauucuccugccucagcc

SEQ ID NO: 272100 - RNA, 32 nt, Human
uucuggguucaagugauucuucugccucagcc

SEQ ID NO: 272101 - RNA, 32 nt, Human
uucuggguucacgugauucucuugccuuagcc

SEQ ID NO: 272102 - RNA, 32 nt, Human
uucuggguuuucucaugccuggucuuacugcu

SEQ ID NO: 272103 - RNA, 32 nt, Human
uucugguaauuuccucuucuugaucugggugu

SEQ ID NO: 272104 - RNA, 32 nt, Human
uucugguaccaccuccaugggccccagauugg

SEQ ID NO: 272105 - RNA, 32 nt, Human
uucugguagugacagaucugcaggacagauuu

SEQ ID NO: 272106 - RNA, 32 nt, Human
uucugguaucuuugaaaaauguaaauaguuua

SEQ ID NO: 272107 - RNA, 32 nt, Human
uucuggucaccaggcuguucaguggacucagu

SEQ ID NO: 272108 - RNA, 32 nt, Human
uucuggucauuucauauaaauggaauucuaca

SEQ ID NO: 272109 - RNA, 24 nt, Human
uucuggucccacccaccucugccu

SEQ ID NO: 272110 - RNA, 32 nt, Human
uucuggucguccucacugcucacuauaugcua

SEQ ID NO: 272111 - RNA, 32 nt, Human
uucuggucugcuguugagauguuugguaaaug

SEQ ID NO: 272112 - RNA, 32 nt, Human
uucuggucuguggagaaacugugaauuggaga

SEQ ID NO: 272113 - RNA, 23 nt, Human
uucuggucuuuccucuucuguuu

SEQ ID NO: 272114 - RNA, 32 nt, Human
uucuggugaccuuccaagagccugagagugag

SEQ ID NO: 272115 - RNA, 32 nt, Human
uucuggugagauugcaccuggauaccaggcuu

SEQ ID NO: 272116 - RNA, 32 nt, Human
uucuggugagccagcgggacccaccagcucua

SEQ ID NO: 272117 - RNA, 32 nt, Human
uucuggugaggaaugaaagggccaaguguucc

SEQ ID NO: 272118 - RNA, 32 nt, Human
uucuggugccagccccaugcagggggacucuc

SEQ ID NO: 272119 - RNA, 32 nt, Human
uucugguggccccuucuaugcccagcugugcu

SEQ ID NO: 272120 - RNA, 32 nt, Human
uucugguggggguagugauggacgcugaccca

SEQ ID NO: 272121 - RNA, 32 nt, Human
uucugguguccaggcugaaguccucgugugac

SEQ ID NO: 272122 - RNA, 32 nt, Human
uucuggugugugcucccgccuccuggguauac

SEQ ID NO: 272123 - RNA, 22 nt, Human
uucugguuccugcacaaccuca

SEQ ID NO: 272124 - RNA, 19 nt, Human
uucugguuccuggcugccu

SEQ ID NO: 272125 - RNA, 32 nt, Human
uucugguugcccuggaaagccugcugcucagc

SEQ ID NO: 272126 - RNA, 32 nt, Human
uucugguuucaagcaacucuucugccucagca

SEQ ID NO: 272127 - RNA, 32 nt, Human
uucugguuucugacuuuuccuucuugaugacc

SEQ ID NO: 272128 - RNA, 32 nt, Human
uucugguuugguguugagucucucuccugcug

SEQ ID NO: 272129 - RNA, 32 nt, Human
uucugguuuuuaaccauugucuuguucuguga

SEQ ID NO: 272130 - RNA, 32 nt, Human
uucuguaaagcagagugauggcugagaagucc

SEQ ID NO: 272131 - RNA, 32 nt, Human
uucuguaaauaacaucuaguaucuucacuaaa

SEQ ID NO: 272132 - RNA, 32 nt, Human
uucuguaaccaggaaaaguuacaagaagaggg

SEQ ID NO: 272133 - RNA, 32 nt, Human
uucuguaacccaggcuggagugcaguggccug

SEQ ID NO: 272134 - RNA, 32 nt, Human
uucuguaacccuugguugccagagauaaagug

SEQ ID NO: 272135 - RNA, 32 nt, Human
uucuguaacugcauuuuucaccuuaaaaguua

SEQ ID NO: 272136 - RNA, 32 nt, Human
uucuguaauuauacacauuuccaguuccaugc

SEQ ID NO: 272137 - RNA, 32 nt, Human
uucuguacacccuuucuaucgugucaaauguu

SEQ ID NO: 272138 - RNA, 32 nt, Human
uucuguacauuucucagggaaaggggacuuug

SEQ ID NO: 272139 - RNA, 32 nt, Human
uucuguaccagcccccucagauacucaugccc

SEQ ID NO: 272140 - RNA, 32 nt, Human
uucuguaccccuuccccagccugggccuugac

SEQ ID NO: 272141 - RNA, 32 nt, Human
uucuguaccuucaaccugguguuaggugugca

SEQ ID NO: 272142 - RNA, 32 nt, Human
uucuguaccuuggaacagucuucccugacaag

SEQ ID NO: 272143 - RNA, 32 nt, Human
uucuguacucaccuacucccaccccaagggaa

SEQ ID NO: 272144 - RNA, 32 nt, Human
uucuguacucucacaaacuuuguuacucaaaa

SEQ ID NO: 272145 - RNA, 32 nt, Human
uucuguacugcacuguggcuugcccuggcggg

SEQ ID NO: 272146 - RNA, 32 nt, Human
uucuguagaccagcuccaacaggauuccaugg

SEQ ID NO: 272147 - RNA, 32 nt, Human
uucuguagauccugagucgguguuacaauagu

SEQ ID NO: 272148 - RNA, 32 nt, Human
uucuguagaugaugcaguguucuaucauaagu

SEQ ID NO: 272149 - RNA, 32 nt, Human
uucuguagauggggucucacuauguugcccag

SEQ ID NO: 272150 - RNA, 32 nt, Human
uucuguagcuaagagggaauccuggcccccuc

SEQ ID NO: 272151 - RNA, 32 nt, Human
uucuguagcuuuuugaccuaagaucucagcaa

SEQ ID NO: 272152 - RNA, 32 nt, Human
uucuguagggcagagggcacuauuccagaguc

SEQ ID NO: 272153 - RNA, 32 nt, Human
uucuguagggcuggggcuggaaaugggucgug

SEQ ID NO: 272154 - RNA, 32 nt, Human
uucuguaggucggaggaauggaggcuuacuaa

SEQ ID NO: 272155 - RNA, 32 nt, Human
uucuguaguaacuguuuaaccuuucuaaaucu

SEQ ID NO: 272156 - RNA, 32 nt, Human
uucuguaguacugacugguucaucacaaggca

SEQ ID NO: 272157 - RNA, 32 nt, Human
uucuguaguauucacuacuccagaccuuuuuc

SEQ ID NO: 272158 - RNA, 32 nt, Human
uucuguagucccugagcuuggaaauuacugug

SEQ ID NO: 272159 - RNA, 32 nt, Human
uucuguaguguagcugcacguccugguacugu

SEQ ID NO: 272160 - RNA, 31 nt, Human
uucuguaguuacuucuuuuauucuuucaggu

SEQ ID NO: 272161 - RNA, 32 nt, Human
uucuguauaaaguuaccugacacacauauaaa

SEQ ID NO: 272162 - RNA, 32 nt, Human
uucuguaucaauucaauaaauggaauugacug

SEQ ID NO: 272163 - RNA, 32 nt, Human
uucuguaucuuuuccuguuaaacacacagacc

SEQ ID NO: 272164 - RNA, 19 nt, Human
uucuguauucucauuucca

SEQ ID NO: 272165 - RNA, 32 nt, Human
uucuguauugcaacuuuucucagagauugcaa

SEQ ID NO: 272166 - RNA, 32 nt, Human
uucugucaaagacaauauuuuguguuuuucag

SEQ ID NO: 272167 - RNA, 32 nt, Human
uucugucaacuagucguggagggaaggagacu

SEQ ID NO: 272168 - RNA, 32 nt, Human
uucugucaauauguccuugcccacugccucuc

SEQ ID NO: 272169 - RNA, 32 nt, Human
uucugucacacagucuggagugcuguggugca

SEQ ID NO: 272170 - RNA, 32 nt, Human
uucugucacccagacuggagugcagugccaca

SEQ ID NO: 272171 - RNA, 32 nt, Human
uucugucacccaggccggagugcaguggugua

SEQ ID NO: 272172 - RNA, 32 nt, Human
uucugucacccaggcuagagcgcaguggcaag

SEQ ID NO: 272173 - RNA, 32 nt, Human
uucugucacccaggcuagaguacagugggaac

SEQ ID NO: 272174 - RNA, 32 nt, Human
uucugucacccaggcuggaguccaauggggcg

SEQ ID NO: 272175 - RNA, 32 nt, Human
uucugucacccaggcuggagugcaaaggugca

SEQ ID NO: 272176 - RNA, 32 nt, Human
uucugucacccaggcuggagugcagugacuca

SEQ ID NO: 272177 - RNA, 32 nt, Human
uucugucacccaggcuggagugcaguggcacc

SEQ ID NO: 272178 - RNA, 32 nt, Human
uucugucacccaggcuggagugcaguggcgca

SEQ ID NO: 272179 - RNA, 32 nt, Human
uucugucacccaggcuggagugcaguggcgug

SEQ ID NO: 272180 - RNA, 32 nt, Human
uucugucacccaggcuggagugcaguggugca

SEQ ID NO: 272181 - RNA, 32 nt, Human
uucugucacccaggcuggagugcaguggugug

SEQ ID NO: 272182 - RNA, 32 nt, Human
uucugucacccaggcuggcgugcaauaguuca

SEQ ID NO: 272183 - RNA, 32 nt, Human
uucugucacccaggcuggggugcaguggcgug

SEQ ID NO: 272184 - RNA, 32 nt, Human
uucugucacccagguuagaguagauuucagug

SEQ ID NO: 272185 - RNA, 32 nt, Human
uucugucacccgggcuggagugcaguggcgug

SEQ ID NO: 272186 - RNA, 32 nt, Human
uucugucaccuaggcuggaaugcaguggugca

SEQ ID NO: 272187 - RNA, 32 nt, Human
uucugucaccuaggcuggaguguagugacaug

SEQ ID NO: 272188 - RNA, 32 nt, Human
uucugucaccuaggguggagugcaguggcaca

SEQ ID NO: 272189 - RNA, 32 nt, Human
uucugucacucaagcuguagugcaguggugcc

SEQ ID NO: 272190 - RNA, 32 nt, Human
uucugucacucaggcuagagugcaguggcaug

SEQ ID NO: 272191 - RNA, 32 nt, Human
uucugucacucaggcuggaguacaguggugcc

SEQ ID NO: 272192 - RNA, 32 nt, Human
uucugucacucaggcuggagugcaguggcgug

SEQ ID NO: 272193 - RNA, 32 nt, Human
uucugucaggaaaauuuaguuuacagaauacu

SEQ ID NO: 272194 - RNA, 32 nt, Human
uucugucauuccuaaaacacccuucagcaaug

SEQ ID NO: 272195 - RNA, 32 nt, Human
uucugucauuuuccuuucacuuccugaaagcc

SEQ ID NO: 272196 - RNA, 32 nt, Human
uucuguccagccagcaggaugcagccuuugcc

SEQ ID NO: 272197 - RNA, 32 nt, Human
uucuguccccgaggccggagugcaauggcgug

SEQ ID NO: 272198 - RNA, 32 nt, Human
uucuguccccuccccaagaccccaccucauau

SEQ ID NO: 272199 - RNA, 32 nt, Human
uucuguccccuucacuucacuccuggaaaaga

SEQ ID NO: 272200 - RNA, 32 nt, Human
uucugucccuuucuucuaccacucuuccuuuc

SEQ ID NO: 272201 - RNA, 28 nt, Human
uucuguccuaaagucgccucaucuucac

SEQ ID NO: 272202 - RNA, 32 nt, Human
uucuguccuagaguucuuuccugaccucuagc

SEQ ID NO: 272203 - RNA, 32 nt, Human
uucuguccucacccuacccugcucuccacccc

SEQ ID NO: 272204 - RNA, 32 nt, Human
uucuguccuccaggcuggagugcaaugacaug

SEQ ID NO: 272205 - RNA, 32 nt, Human
uucuguccucugaggucuuccuugucccuuua

SEQ ID NO: 272206 - RNA, 32 nt, Human
uucuguccugggaacagccugacccaccuccc

SEQ ID NO: 272207 - RNA, 32 nt, Human
uucuguccuuagauccucacauguuaucccug

SEQ ID NO: 272208 - RNA, 32 nt, Human
uucuguccuuccaucccucuuuugggcucuuc

SEQ ID NO: 272209 - RNA, 32 nt, Human
uucuguccuuguccuggaccucagguucccag

SEQ ID NO: 272210 - RNA, 32 nt, Human
uucugucgaggagcuucggggcucagagaggu

SEQ ID NO: 272211 - RNA, 32 nt, Human
uucugucgcccaggcuggagugcaggggcauu

SEQ ID NO: 272212 - RNA, 32 nt, Human
uucugucgcccaggcuggagugcaguggcgcg

SEQ ID NO: 272213 - RNA, 32 nt, Human
uucugucgcccaggcuggaguguagugacgcg

SEQ ID NO: 272214 - RNA, 32 nt, Human
uucugucgcccaggcuggcgugcaguggcgcg

SEQ ID NO: 272215 - RNA, 32 nt, Human
uucugucgcccuggcuggagugcaauggugug

SEQ ID NO: 272216 - RNA, 32 nt, Human
uucugucgcccuggcuggaguggaaugccgug

SEQ ID NO: 272217 - RNA, 32 nt, Human
uucugucggccucgcuuuuccugggccagugu

SEQ ID NO: 272218 - RNA, 32 nt, Human
uucugucguccaggcuggagugcaguagcgca

SEQ ID NO: 272219 - RNA, 32 nt, Human
uucugucguccaggcuggagugcaguggugug

SEQ ID NO: 272220 - RNA, 32 nt, Human
uucugucguccaggcuggagugcgguggcgug

SEQ ID NO: 272221 - RNA, 32 nt, Human
uucugucgucugcaguucagucagggacaaau

SEQ ID NO: 272222 - RNA, 32 nt, Human
uucugucuacagcuagaagcugugccccaguu

SEQ ID NO: 272223 - RNA, 32 nt, Human
uucugucuaguuacaguuauggaaguaugaga

SEQ ID NO: 272224 - RNA, 32 nt, Human
uucugucucccaggcugaagugcagugaguca

SEQ ID NO: 272225 - RNA, 32 nt, Human
uucugucuccuccccucccuccuucuuuaguu

SEQ ID NO: 272226 - RNA, 32 nt, Human
uucugucuccuccucccgcugaacacguccuc

SEQ ID NO: 272227 - RNA, 32 nt, Human
uucugucucgcaggccagagugcaguggugug

SEQ ID NO: 272228 - RNA, 32 nt, Human
uucugucucucaggugaugucaccagcaauaa

SEQ ID NO: 272229 - RNA, 32 nt, Human
uucugucucugccucccucacccugagccccu

SEQ ID NO: 272230 - RNA, 32 nt, Human
uucugucucugucuuuggcuucuguccaggca

SEQ ID NO: 272231 - RNA, 32 nt, Human
uucugucucuucuguuccaaagccaggagagc

SEQ ID NO: 272232 - RNA, 32 nt, Human
uucugucucuugaguugaaaucagaggcugcu

SEQ ID NO: 272233 - RNA, 32 nt, Human
uucugucugaucaaggcaccacacaacccaga

SEQ ID NO: 272234 - RNA, 32 nt, Human
uucugucugccucgccuguucucuccagguag

SEQ ID NO: 272235 - RNA, 32 nt, Human
uucugucugggcagagacuguggacccuggua

SEQ ID NO: 272236 - RNA, 32 nt, Human
uucugucuggggacgaaggguuggacgggaug

SEQ ID NO: 272237 - RNA, 32 nt, Human
uucugucugucaccaaguaucuugaagugaua

SEQ ID NO: 272238 - RNA, 32 nt, Human
uucugucuguucucuuuucucucccucccuca

SEQ ID NO: 272239 - RNA, 32 nt, Human
uucugucuucuccagaaggcaauaccaaccug

SEQ ID NO: 272240 - RNA, 32 nt, Human
uucugucuucucuugaacugcauaacugagaa

SEQ ID NO: 272241 - RNA, 32 nt, Human
uucugucuugcucuccccuccccuggcuuucc

SEQ ID NO: 272242 - RNA, 32 nt, Human
uucugugaagaauguuguugguaguuugauag

SEQ ID NO: 272243 - RNA, 32 nt, Human
uucugugaagacagaagaguaucaagauuaau

SEQ ID NO: 272244 - RNA, 32 nt, Human
uucugugacuccugucuccucuacaauguaca

SEQ ID NO: 272245 - RNA, 20 nt, Human
uucugugagacuggggccag

SEQ ID NO: 272246 - RNA, 31 nt, Human
uucugugagguggaaacagugguccugaauc

SEQ ID NO: 272247 - RNA, 32 nt, Human
uucugugagugggagagcaggaccgcggugcu

SEQ ID NO: 272248 - RNA, 32 nt, Human
uucugugauaaaauguaauuucaacuauuuug

SEQ ID NO: 272249 - RNA, 32 nt, Human
uucugugauccuggacaaguaacugaaucucu

SEQ ID NO: 272250 - RNA, 32 nt, Human
uucugugaucuaaaacaacucuuauugaauug

SEQ ID NO: 272251 - RNA, 32 nt, Human
uucugugauuggguaugucaaugauucucuuc

SEQ ID NO: 272252 - RNA, 32 nt, Human
uucugugcaacaguuuuucacugagcauguca

SEQ ID NO: 272253 - RNA, 32 nt, Human
uucugugcacacagccuucuccucgacucucu

SEQ ID NO: 272254 - RNA, 32 nt, Human
uucugugcacccaccaguacccugccauggga

SEQ ID NO: 272255 - RNA, 32 nt, Human
uucugugcacccuggucgcugggaaacguauu

SEQ ID NO: 272256 - RNA, 32 nt, Human
uucugugcauugcuguauacacacagacacac

SEQ ID NO: 272257 - RNA, 32 nt, Human
uucugugccaaugaacaagaacaaaagucauu

SEQ ID NO: 272258 - RNA, 32 nt, Human
uucugugccagccuggcucugccccuccccca

SEQ ID NO: 272259 - RNA, 32 nt, Human
uucugugcccugcugacgugacugacccgaga

SEQ ID NO: 272260 - RNA, 32 nt, Human
uucugugccugggguacucucgcucuguagac

SEQ ID NO: 272261 - RNA, 32 nt, Human
uucugugccuuuccagcuucuagaggcugccu

SEQ ID NO: 272262 - RNA, 32 nt, Human
uucugugcuggcugugccucuagucgcagcuc

SEQ ID NO: 272263 - RNA, 18 nt, Human
uucugugcugggcuccug

SEQ ID NO: 272264 - RNA, 32 nt, Human
uucugugcuuaaacuuucagaaacccaagggu

SEQ ID NO: 272265 - RNA, 32 nt, Human
uucugugcuuccugguuuugcaauuggauuga

SEQ ID NO: 272266 - RNA, 32 nt, Human
uucugugcuugcuguccuaccucucuccacag

SEQ ID NO: 272267 - RNA, 32 nt, Human
uucuguggaacaagccuaucagcuucagaaug

SEQ ID NO: 272268 - RNA, 32 nt, Human
uucuguggaagagagaaaaugagugaauauuc

SEQ ID NO: 272269 - RNA, 32 nt, Human
uucuguggaagaggcgcccacucccacuuuaa

SEQ ID NO: 272270 - RNA, 31 nt, Human
uucuguggacaaugccugcaucauuuuucag

SEQ ID NO: 272271 - RNA, 31 nt, Human
uucuguggagccuguuccucacuggaaauug

SEQ ID NO: 272272 - RNA, 32 nt, Human
uucuguggccacuguuaggucugccauuuuac

SEQ ID NO: 272273 - RNA, 32 nt, Human
uucuguggcccaggcuggagugcaguggcugu

SEQ ID NO: 272274 - RNA, 32 nt, Human
uucuguggccccggaggaaggagagacugagg

SEQ ID NO: 272275 - RNA, 32 nt, Human
uucuguggcccuggcuggaguucaguggugug

SEQ ID NO: 272276 - RNA, 32 nt, Human
uucuguggccugagaaggaagggaccuccacg

SEQ ID NO: 272277 - RNA, 32 nt, Human
uucuguggccuggacacaaccagcacagagcu

SEQ ID NO: 272278 - RNA, 32 nt, Human
uucuguggcggcuggaaguggacggagaucac

SEQ ID NO: 272279 - RNA, 32 nt, Human
uucuguggcugggaacaccuuccaccaugacc

SEQ ID NO: 272280 - RNA, 32 nt, Human
uucuguggcuucguggucacugcuccagccuc

SEQ ID NO: 272281 - RNA, 32 nt, Human
uucugugggaaucacaagaguuuauccacuaa

SEQ ID NO: 272282 - RNA, 32 nt, Human
uucugugggaggggcagagagguagguggcac

SEQ ID NO: 272283 - RNA, 32 nt, Human
uucugugggccuggcugggggcaguuaaaaag

SEQ ID NO: 272284 - RNA, 32 nt, Human
uucugugggcucuggaaggccaccaggguagg

SEQ ID NO: 272285 - RNA, 32 nt, Human
uucuguggggagagaaguugaaggaucccgaa

SEQ ID NO: 272286 - RNA, 32 nt, Human
uucuguggggucuuacuauauugcccaagccg

SEQ ID NO: 272287 - RNA, 32 nt, Human
uucugugggucgcucccagagccauggcccau

SEQ ID NO: 272288 - RNA, 32 nt, Human
uucugugggucugugguaucugacacugugga

SEQ ID NO: 272289 - RNA, 32 nt, Human
uucugugguccaggcuagagggcaguggcaug

SEQ ID NO: 272290 - RNA, 32 nt, Human
uucuguggucccagaccagcccucuucucccu

SEQ ID NO: 272291 - RNA, 32 nt, Human
uucugugguguuucauacucuacucagaguuc

SEQ ID NO: 272292 - RNA, 32 nt, Human
uucuguguccaguuuuggaggcugaguucugg

SEQ ID NO: 272293 - RNA, 32 nt, Human
uucugugucuacaccuagagagagggccagua

SEQ ID NO: 272294 - RNA, 32 nt, Human
uucugugucucccagcccauuuccacuccuag

SEQ ID NO: 272295 - RNA, 32 nt, Human
uucugugucuugguuucugccugcugcccacu

SEQ ID NO: 272296 - RNA, 32 nt, Human
uucuguguggauuugucugauugcuucagaca

SEQ ID NO: 272297 - RNA, 32 nt, Human
uucuguguguccgcccucccagcuccagcccu

SEQ ID NO: 272298 - RNA, 32 nt, Human
uucuguguucacagagcgugcugcagaucauc

SEQ ID NO: 272299 - RNA, 32 nt, Human
uucuguguucacugagaacagaaaggaagggg

SEQ ID NO: 272300 - RNA, 32 nt, Human
uucuguguucucuccauuugaguauuuuguaa

SEQ ID NO: 272301 - RNA, 32 nt, Human
uucuguguuuauaaaugcauuaucucugagaa

SEQ ID NO: 272302 - RNA, 32 nt, Human
uucuguuaaggccuagcccaggaaaagauguc

SEQ ID NO: 272303 - RNA, 31 nt, Human
uucuguuacacuacagauaccaaaacacuga

SEQ ID NO: 272304 - RNA, 32 nt, Human
uucuguuaucgggggcagaaagacugaagcac

SEQ ID NO: 272305 - RNA, 32 nt, Human
uucuguucaaugcaaauaaacauucacuuuuu

SEQ ID NO: 272306 - RNA, 32 nt, Human
uucuguucaguugcuaaugaggcuccuccgcu

SEQ ID NO: 272307 - RNA, 32 nt, Human
uucuguucauucuuuaaguaucuauauuucau

SEQ ID NO: 272308 - RNA, 32 nt, Human
uucuguuccaaagcagucuuauccugacagga

SEQ ID NO: 272309 - RNA, 32 nt, Human
uucuguuccucuuuugaacuuuuccuuuuguc

SEQ ID NO: 272310 - RNA, 32 nt, Human
uucuguuccuguguuaguuugcugagaaugau

SEQ ID NO: 272311 - RNA, 32 nt, Human
uucuguucucucuugcccaaauaauauuaaag

SEQ ID NO: 272312 - RNA, 32 nt, Human
uucuguucucuuccuccuccaucuuuauucau

SEQ ID NO: 272313 - RNA, 32 nt, Human
uucuguucucuuccugcccauuuccuugaacc

SEQ ID NO: 272314 - RNA, 32 nt, Human
uucuguucugcccaggccuucccaccaggaau

SEQ ID NO: 272315 - RNA, 32 nt, Human
uucuguucugggucugaauucccuuuugugcc

SEQ ID NO: 272316 - RNA, 32 nt, Human
uucuguucuguucauguagcacagauaagcau

SEQ ID NO: 272317 - RNA, 32 nt, Human
uucuguucuucccucacuccauccccgcuacc

SEQ ID NO: 272318 - RNA, 32 nt, Human
uucuguucuugcacguucuucucccaucuugg

SEQ ID NO: 272319 - RNA, 32 nt, Human
uucuguugaaggagagggugaggaagaaagag

SEQ ID NO: 272320 - RNA, 32 nt, Human
uucuguugaagggcuuaaccuggguccccuaa

SEQ ID NO: 272321 - RNA, 32 nt, Human
uucuguugacccuucaucugaaagauucucuu

SEQ ID NO: 272322 - RNA, 32 nt, Human
uucuguugauacacauucaggacucugguuuc

SEQ ID NO: 272323 - RNA, 32 nt, Human
uucuguugccacugcaaccuauuacuugguag

SEQ ID NO: 272324 - RNA, 32 nt, Human
uucuguugcccaaguuggagugcaguggcaug

SEQ ID NO: 272325 - RNA, 32 nt, Human
uucuguugcccagacuagaguacaauauugca

SEQ ID NO: 272326 - RNA, 32 nt, Human
uucuguugcccaggagggagugcaguggugca

SEQ ID NO: 272327 - RNA, 32 nt, Human
uucuguugcccaggcaagagugcagugguaug

SEQ ID NO: 272328 - RNA, 32 nt, Human
uucuguugcccaggcuggagugcaauggcaug

SEQ ID NO: 272329 - RNA, 32 nt, Human
uucuguugcccaggcuggagugcaguggcgug

SEQ ID NO: 272330 - RNA, 32 nt, Human
uucuguugcccaggcuggagugcaguggugcg

SEQ ID NO: 272331 - RNA, 32 nt, Human
uucuguugcccaggcuggccugaucuuggcuc

SEQ ID NO: 272332 - RNA, 32 nt, Human
uucuguugcccaugcuggagugcaguggcgug

SEQ ID NO: 272333 - RNA, 32 nt, Human
uucuguugccuaggccagagugcaguggcaug

SEQ ID NO: 272334 - RNA, 32 nt, Human
uucuguugccuaggcuggagugcaguggcgca

SEQ ID NO: 272335 - RNA, 32 nt, Human
uucuguugccugggcuggagugcaguggcaug

SEQ ID NO: 272336 - RNA, 32 nt, Human
uucuguugccugggcuggagugcaguggcgug

SEQ ID NO: 272337 - RNA, 32 nt, Human
uucuguugcuagaccgagccugugggauauac

SEQ ID NO: 272338 - RNA, 24 nt, Human
uucuguugcuccgcauaacugugg

SEQ ID NO: 272339 - RNA, 32 nt, Human
uucuguugcuccugccuuauuucucuuucaac

SEQ ID NO: 272340 - RNA, 24 nt, Human
uucuguuggcuccaccuccagccu

SEQ ID NO: 272341 - RNA, 32 nt, Human
uucuguugggguucagaacacaauaccccaaa

SEQ ID NO: 272342 - RNA, 32 nt, Human
uucuguuguccaggauggagugcagugguuga

SEQ ID NO: 272343 - RNA, 32 nt, Human
uucuguuguuucugcugacuguguggguggaa

SEQ ID NO: 272344 - RNA, 32 nt, Human
uucuguuguuuuuauagcaggguugggguggu

SEQ ID NO: 272345 - RNA, 32 nt, Human
uucuguuuagagauucuagcccauggguuauc

SEQ ID NO: 272346 - RNA, 32 nt, Human
uucuguuuauucacacuaaugagccagagcug

SEQ ID NO: 272347 - RNA, 32 nt, Human
uucuguuuauugaaccucuuuauuaaaccucu

SEQ ID NO: 272348 - RNA, 32 nt, Human
uucuguuuauuuucucuuuuccucccccaucc

SEQ ID NO: 272349 - RNA, 32 nt, Human
uucuguuuccaaagggagaucucuguggcccu

SEQ ID NO: 272350 - RNA, 32 nt, Human
uucuguuucccaaagcgcuggugugacugugg

SEQ ID NO: 272351 - RNA, 32 nt, Human
uucuguuucccaggcuggagugcagugguggg

SEQ ID NO: 272352 - RNA, 32 nt, Human
uucuguuucccauuacuuuaauacucaccccc

SEQ ID NO: 272353 - RNA, 32 nt, Human
uucuguuuccuuccuuucuauuaauuuggaaa

SEQ ID NO: 272354 - RNA, 32 nt, Human
uucuguuucuaaauaaaagcugugccuucuga

SEQ ID NO: 272355 - RNA, 32 nt, Human
uucuguuucuaaucccagccugggcaggaaug

SEQ ID NO: 272356 - RNA, 32 nt, Human
uucuguuucuccccuuggcugccuguaagccc

SEQ ID NO: 272357 - RNA, 32 nt, Human
uucuguuucuccccuuggcugccuguacgccc

SEQ ID NO: 272358 - RNA, 32 nt, Human
uucuguuucugagugagaagauaaaaacugcc

SEQ ID NO: 272359 - RNA, 22 nt, Human
uucuguuugcuccagacugggg

SEQ ID NO: 272360 - RNA, 20 nt, Human
uucuguuugcugccugaaag

SEQ ID NO: 272361 - RNA, 32 nt, Human
uucuguuuuaaaggagguauuuuggaaauuga

SEQ ID NO: 272362 - RNA, 32 nt, Human
uucuguuuuagaguguuucugggccaggaucc

SEQ ID NO: 272363 - RNA, 32 nt, Human
uucuguuuuaugggagaggucuguuggcaaag

SEQ ID NO: 272364 - RNA, 32 nt, Human
uucuguuuucuaaaggacaaaauacagagugu

SEQ ID NO: 272365 - RNA, 32 nt, Human
uucuguuuucuaccucuccaggccugcccacu

SEQ ID NO: 272366 - RNA, 32 nt, Human
uucuguuuucuggaaguugcuggagaagggcu

SEQ ID NO: 272367 - RNA, 32 nt, Human
uucuguuuugagauggagucucucucugucac

SEQ ID NO: 272368 - RNA, 32 nt, Human
uucuguuuugcaccugcagaucaccgaguugg

SEQ ID NO: 272369 - RNA, 32 nt, Human
uucuguuuuguugacucuugaaugcuccccca

SEQ ID NO: 272370 - RNA, 32 nt, Human
uucuguuuuuccuaccucuuaggcugguccuu

SEQ ID NO: 272371 - RNA, 32 nt, Human
uucuguuuuugagacacuuuucugccuucuau

SEQ ID NO: 272372 - RNA, 32 nt, Human
uucuuaaaaaggacaaugcugauggaagacca

SEQ ID NO: 272373 - RNA, 32 nt, Human
uucuuaaaaauguauuuuauuuuagccagugg

SEQ ID NO: 272374 - RNA, 32 nt, Human
uucuuaaaaauuguacuuacugccuuuccaug

SEQ ID NO: 272375 - RNA, 32 nt, Human
uucuuaaaacaacagcaacgugaucuuggcug

SEQ ID NO: 272376 - RNA, 32 nt, Human
uucuuaaaacauuuuaacauuagaauggauug

SEQ ID NO: 272377 - RNA, 32 nt, Human
uucuuaaaccacaaaacaucaaguauuccaag

SEQ ID NO: 272378 - RNA, 23 nt, Human
uucuuaaaccaggcuguggcagg

SEQ ID NO: 272379 - RNA, 32 nt, Human
uucuuaaacugauuaacuagcuguaauauagu

SEQ ID NO: 272380 - RNA, 27 nt, Human
uucuuaaacuuuuuagaggguggcagg

SEQ ID NO: 272381 - RNA, 32 nt, Human
uucuuaaagauaauuaaaaaugaaacaaagug

SEQ ID NO: 272382 - RNA, 32 nt, Human
uucuuaaauguggcuaauucuguaacauaguc

SEQ ID NO: 272383 - RNA, 32 nt, Human
uucuuaacaagugucuaaagacaguaggcugu

SEQ ID NO: 272384 - RNA, 22 nt, Human
uucuuaacaauuugacccucca

SEQ ID NO: 272385 - RNA, 32 nt, Human
uucuuaacauugcagcuuucucuccaucugca

SEQ ID NO: 272386 - RNA, 28 nt, Human
uucuuaaccaaggcugccucuuccaaca

SEQ ID NO: 272387 - RNA, 32 nt, Human
uucuuaaccaucagccaugugcugcuauuucu

SEQ ID NO: 272388 - RNA, 32 nt, Human
uucuuaaccugcuuuuucagcaacuaaaacca

SEQ ID NO: 272389 - RNA, 32 nt, Human
uucuuaacuccucuguccucuauauucagcau

SEQ ID NO: 272390 - RNA, 32 nt, Human
uucuuaacuggguggagaaagaauggaaaacc

SEQ ID NO: 272391 - RNA, 32 nt, Human
uucuuaagaaaugcgccaguguuuaugagguu

SEQ ID NO: 272392 - RNA, 32 nt, Human
uucuuaagaauguacacuuggccaggugcagu

SEQ ID NO: 272393 - RNA, 24 nt, Human
uucuuaagcagaggaguggcaagg

SEQ ID NO: 272394 - RNA, 21 nt, Human
uucuuaagcucacagagucag

SEQ ID NO: 272395 - RNA, 32 nt, Human
uucuuaaggacuuugugugaaguaauucuuua

SEQ ID NO: 272396 - RNA, 32 nt, Human
uucuuaaguguggaaucaaaugagcacauaag

SEQ ID NO: 272397 - RNA, 32 nt, Human
uucuuaauacgugcaacaucuuaauuuuuguu

SEQ ID NO: 272398 - RNA, 32 nt, Human
uucuuaauaguuacaguugggcaugauuugua

SEQ ID NO: 272399 - RNA, 32 nt, Human
uucuuaaucuuuauccaauaaaaugaaacaaa

SEQ ID NO: 272400 - RNA, 32 nt, Human
uucuuaaugcuguauuuguucaucucaaaccu

SEQ ID NO: 272401 - RNA, 32 nt, Human
uucuuaauguuuguggcuuucucuccagccuc

SEQ ID NO: 272402 - RNA, 22 nt, Human
uucuuaauucauuucaccuucc

SEQ ID NO: 272403 - RNA, 32 nt, Human
uucuuaauugaaagacuucccccaaaaggaag

SEQ ID NO: 272404 - RNA, 23 nt, Human
uucuuacacacgcugaguacaga

SEQ ID NO: 272405 - RNA, 32 nt, Human
uucuuacacagaaacauacacauaccgagaaa

SEQ ID NO: 272406 - RNA, 32 nt, Human
uucuuacacagaaacaugcacauacccagaaa

SEQ ID NO: 272407 - RNA, 32 nt, Human
uucuuacacagcagccuuacuucaucggccca

SEQ ID NO: 272408 - RNA, 32 nt, Human
uucuuacacaggcuucaucaagguucagcuga

SEQ ID NO: 272409 - RNA, 32 nt, Human
uucuuacaccgucuccacuuguggagagccac

SEQ ID NO: 272410 - RNA, 32 nt, Human
uucuuacagaggagauggagugcuaugagcau

SEQ ID NO: 272411 - RNA, 32 nt, Human
uucuuacagcuauucugggccuggauggucua

SEQ ID NO: 272412 - RNA, 32 nt, Human
uucuuacaggaaccaccuacucuuucaguuuu

SEQ ID NO: 272413 - RNA, 32 nt, Human
uucuuacagucccugucauauuaccaacagag

SEQ ID NO: 272414 - RNA, 31 nt, Human
uucuuacauacuucuguguuuaaauuuucau

SEQ ID NO: 272415 - RNA, 32 nt, Human
uucuuacauggcagcaagagaaaaugaggaag

SEQ ID NO: 272416 - RNA, 32 nt, Human
uucuuaccaaagaaaaugaaaagaucuuaucc

SEQ ID NO: 272417 - RNA, 32 nt, Human
uucuuaccaugcuaauauguaaaguucaugcc

SEQ ID NO: 272418 - RNA, 32 nt, Human
uucuuacccagcccuggucaagaaucugugag

SEQ ID NO: 272419 - RNA, 32 nt, Human
uucuuaccucaaggcucugucuagccauguua

SEQ ID NO: 272420 - RNA, 32 nt, Human
uucuuaccuccccuaacuugcuuucccuguuu

SEQ ID NO: 272421 - RNA, 32 nt, Human
uucuuaccugggaaccuaauuccccagaagcu

SEQ ID NO: 272422 - RNA, 32 nt, Human
uucuuacgaucaaauuugucucuugcaaugau

SEQ ID NO: 272423 - RNA, 32 nt, Human
uucuuacgcagcuggggccaggagggucagag

SEQ ID NO: 272424 - RNA, 32 nt, Human
uucuuacgugaacuguauacauucauauagaa

SEQ ID NO: 272425 - RNA, 32 nt, Human
uucuuacuaagcuaaguuguauacaaccccac

SEQ ID NO: 272426 - RNA, 32 nt, Human
uucuuacuccagcucaacccauuggguguugg

SEQ ID NO: 272427 - RNA, 32 nt, Human
uucuuacugagcaccugcugggcaugcugugu

SEQ ID NO: 272428 - RNA, 32 nt, Human
uucuuacugcaaccuucgccucccgaguucaa

SEQ ID NO: 272429 - RNA, 32 nt, Human
uucuuacuuaaacuuggucuucuuucaaguug

SEQ ID NO: 272430 - RNA, 32 nt, Human
uucuuacuucugucacucuuccuucuccagcc

SEQ ID NO: 272431 - RNA, 32 nt, Human
uucuuacuucuuuucucucuuauuuauuaacc

SEQ ID NO: 272432 - RNA, 32 nt, Human
uucuuagaaaugcagaccugugggcucuacca

SEQ ID NO: 272433 - RNA, 32 nt, Human
uucuuagaauacagugcucacugcauuuaaua

SEQ ID NO: 272434 - RNA, 32 nt, Human
uucuuagacauuuugucauaccauucuagaag

SEQ ID NO: 272435 - RNA, 32 nt, Human
uucuuagagaucuggccacuggucaaacagua

SEQ ID NO: 272436 - RNA, 32 nt, Human
uucuuagagcuuucuaaagaacaggaaguagg

SEQ ID NO: 272437 - RNA, 32 nt, Human
uucuuagaggguucagucuaggacccggcucu

SEQ ID NO: 272438 - RNA, 32 nt, Human
uucuuagauaucuuauucuuaguaauacuacu

SEQ ID NO: 272439 - RNA, 32 nt, Human
uucuuagauuuggcaucugaggguauaaaggc

SEQ ID NO: 272440 - RNA, 32 nt, Human
uucuuagcaacagaaaaaucaaacuucuguua

SEQ ID NO: 272441 - RNA, 32 nt, Human
uucuuagcacucuucccuccccuaaaccaucc

SEQ ID NO: 272442 - RNA, 32 nt, Human
uucuuagcagccgccgcagcagccgcggcgac

SEQ ID NO: 272443 - RNA, 32 nt, Human
uucuuagcagugaguuucuguucuguuggaug

SEQ ID NO: 272444 - RNA, 32 nt, Human
uucuuagcaguuuuauaacccuuuuuccucaa

SEQ ID NO: 272445 - RNA, 32 nt, Human
uucuuagcaugagcuaccucaucucuagaagc

SEQ ID NO: 272446 - RNA, 32 nt, Human
uucuuagccuuacuugaaucuugccuauaaua

SEQ ID NO: 272447 - RNA, 32 nt, Human
uucuuagcuaucauugcuuccuccuccccaac

SEQ ID NO: 272448 - RNA, 32 nt, Human
uucuuaggcuuccucagcuauguggaggugua

SEQ ID NO: 272449 - RNA, 32 nt, Human
uucuuaggucccuguccucugucuuugaggcu

SEQ ID NO: 272450 - RNA, 32 nt, Human
uugagccugggaggucaaggcugcagugagcc

SEQ ID NO: 272451 - RNA, 32 nt, Human
uugagccugggaggucaaggcugcagugagcu

SEQ ID NO: 272452 - RNA, 32 nt, Human
uugagccugggaggucgaggcugcagugagcu

SEQ ID NO: 272453 - RNA, 32 nt, Human
uugagccugggaggucgaggcuguagugagcc

SEQ ID NO: 272454 - RNA, 32 nt, Human
uugagccugggaggucgaggcuguagugagcu

SEQ ID NO: 272455 - RNA, 32 nt, Human
uugagccugggagguggagguugcagugagcu

SEQ ID NO: 272456 - RNA, 32 nt, Human
uugagccugggagguggagguugcagugagug

SEQ ID NO: 272457 - RNA, 32 nt, Human
uugagccugggagguugaggcugcagugagcc

SEQ ID NO: 272458 - RNA, 32 nt, Human
uugagccugggagguugugguugcagugagcu

SEQ ID NO: 272459 - RNA, 32 nt, Human
uugagccugggaguucaagaccagccugggca

SEQ ID NO: 272460 - RNA, 32 nt, Human
uugagccugggaguuggagaccagccugggca

SEQ ID NO: 272461 - RNA, 32 nt, Human
uugagccugggaguuugagaccagccugggca

SEQ ID NO: 272462 - RNA, 32 nt, Human
uugagccugggaguuugaggcugcagugagcu

SEQ ID NO: 272463 - RNA, 32 nt, Human
uugagccugggaugucaaggcugcagugagcu

SEQ ID NO: 272464 - RNA, 24 nt, Human
uugagccugggcaacagagugaga

SEQ ID NO: 272465 - RNA, 32 nt, Human
uugagccugggcaggcucuguggagcucacca

SEQ ID NO: 272466 - RNA, 24 nt, Human
uugagccugggcgacagagcgaga

SEQ ID NO: 272467 - RNA, 32 nt, Human
uugagccugggcgacagagcgagacuccaucu

SEQ ID NO: 272468 - RNA, 24 nt, Human
uugagccugggcgacagagugaga

SEQ ID NO: 272469 - RNA, 32 nt, Human
uugagccugggggacugaggcugcagugagcc

SEQ ID NO: 272470 - RNA, 32 nt, Human
uugagccugugaggucgaggcuacagugagca

SEQ ID NO: 272471 - RNA, 32 nt, Human
uugagccugugaggucgaggcugcagugagcc

SEQ ID NO: 272472 - RNA, 32 nt, Human
uugagccuuuagggagcuucucuguuuuggga

SEQ ID NO: 272473 - RNA, 32 nt, Human
uugagcgaauguauggaagaaaauauuauucu

SEQ ID NO: 272474 - RNA, 32 nt, Human
uugagcgagagggaggaagggcgcgcgggccg

SEQ ID NO: 272475 - RNA, 32 nt, Human
uugagcgagggaaguugaggcugcagugaacu

SEQ ID NO: 272476 - RNA, 32 nt, Human
uugagcggcugaggcaggagaauugcuugaac

SEQ ID NO: 272477 - RNA, 32 nt, Human
uugagcgggaggaggaggaggagcggcggcgc

SEQ ID NO: 272478 - RNA, 32 nt, Human
uugagcgguugaauugggagaaugaagauaag

SEQ ID NO: 272479 - RNA, 32 nt, Human
uugagcuacuaaaaagcagaauuccggagcuu

SEQ ID NO: 272480 - RNA, 32 nt, Human
uugagcuagggagguggugcagucagccucgc

SEQ ID NO: 272481 - RNA, 32 nt, Human
uugagcuaucuacaaccucccacggcagcccg

SEQ ID NO: 272482 - RNA, 32 nt, Human
uugagcuaucuguggccagggugcuggcaugg

SEQ ID NO: 272483 - RNA, 32 nt, Human
uugagcucaaagcuuagcagcuucaauguugu

SEQ ID NO: 272484 - RNA, 32 nt, Human
uugagcucaacaguuccagaccagccugggca

SEQ ID NO: 272485 - RNA, 32 nt, Human
uugagcucaagaguucaagaccagccugggaa

SEQ ID NO: 272486 - RNA, 32 nt, Human
uugagcucaagcaauccaccugccucaaccuc

SEQ ID NO: 272487 - RNA, 32 nt, Human
uugagcucagccuguucucagcaguagagaaa

SEQ ID NO: 272488 - RNA, 32 nt, Human
uugagcucaggagcuugagaccagccugggca

SEQ ID NO: 272489 - RNA, 32 nt, Human
uugagcucaggagguugaggcugcagagagug

SEQ ID NO: 272490 - RNA, 32 nt, Human
uugagcucaggaguccuaaaccagccugggca

SEQ ID NO: 272491 - RNA, 32 nt, Human
uugagcucaggaguuagagaccagccugggca

SEQ ID NO: 272492 - RNA, 32 nt, Human
uugagcucaggaguucaagaccagccuaggca

SEQ ID NO: 272493 - RNA, 32 nt, Human
uugagcucaggaguucaagaccagccuaggcc

SEQ ID NO: 272494 - RNA, 32 nt, Human
uugagcucaggaguucaagaccagccuggaca

SEQ ID NO: 272495 - RNA, 32 nt, Human
uugagcucaggaguucaagaccagccugggca

SEQ ID NO: 272496 - RNA, 32 nt, Human
uugagcucaggaguucaagaccagcuugggaa

SEQ ID NO: 272497 - RNA, 32 nt, Human
uugagcucaggaguucaaggcugcagagagcu

SEQ ID NO: 272498 - RNA, 32 nt, Human
uugagcucaggaguuccagaccagcccgggcc

SEQ ID NO: 272499 - RNA, 32 nt, Human
uugagcucaggaguuccagaccagccugggca

SEQ ID NO: 272500 - RNA, 32 nt, Human
uugagcucaggaguuccauaccagccugggca

SEQ ID NO: 272501 - RNA, 32 nt, Human
uugagcucaggaguucgagaccaccuugggcc

SEQ ID NO: 272502 - RNA, 32 nt, Human
uugagcucaggaguucgagaccagccugggca

SEQ ID NO: 272503 - RNA, 32 nt, Human
uugagcucaggaguucgugaccagccugggca

SEQ ID NO: 272504 - RNA, 32 nt, Human
uugagcucaggaguuucagaccagccugggca

SEQ ID NO: 272505 - RNA, 32 nt, Human
uugagcucaggaguuugagaccagccugagca

SEQ ID NO: 272506 - RNA, 32 nt, Human
uugagcucaggaguuugagaccagccugggca

SEQ ID NO: 272507 - RNA, 32 nt, Human
uugagcucaggaguuugagaccagcugggcaa

SEQ ID NO: 272508 - RNA, 32 nt, Human
uugagcucaggaguuugagaccagcuugggua

SEQ ID NO: 272509 - RNA, 32 nt, Human
uugagcucaggaguuugaggccaggcugggca

SEQ ID NO: 272510 - RNA, 32 nt, Human
uugagcucaggcguucgggaccagccuggcca

SEQ ID NO: 272511 - RNA, 32 nt, Human
uugagcucagggggccaaggcugcagugaguc

SEQ ID NO: 272512 - RNA, 32 nt, Human
uugagcucaguaguucaagaccagccuaggca

SEQ ID NO: 272513 - RNA, 32 nt, Human
uugagcucaugaguucaagaccagucugggca

SEQ ID NO: 272514 - RNA, 32 nt, Human
uugagcucauucucacaccucauuagacauaa

SEQ ID NO: 272515 - RNA, 32 nt, Human
uugagcuccaagcacagcaaagccugacagaa

SEQ ID NO: 272516 - RNA, 32 nt, Human
uugagcuccggagcuugagaccagccugagca

SEQ ID NO: 272517 - RNA, 32 nt, Human
uugagcuccuguagccucugcagcugcccauu

SEQ ID NO: 272518 - RNA, 32 nt, Human
uugagcucggaagauggaggcugcagugagcc

SEQ ID NO: 272519 - RNA, 32 nt, Human
uugagcucgggaguuugagaccagccucauca

SEQ ID NO: 272520 - RNA, 32 nt, Human
uugagcucugaaugucaagaccaguccuggac

SEQ ID NO: 272521 - RNA, 32 nt, Human
uugagcucuggaguuugagaccagccugggca

SEQ ID NO: 272522 - RNA, 32 nt, Human
uugagcucugguuugaaaguagccaaggggac

SEQ ID NO: 272523 - RNA, 32 nt, Human
uugagcugaaacauugcuuccacccaccauca

SEQ ID NO: 272524 - RNA, 32 nt, Human
uugagcugacuuuagagaucacugugggguca

SEQ ID NO: 272525 - RNA, 32 nt, Human
uugagcugaggaguucaagaccagccugggca

SEQ ID NO: 272526 - RNA, 32 nt, Human
uugagcugaggaguuugagaccagccugggca

SEQ ID NO: 272527 - RNA, 32 nt, Human
uugagcugaugguucccagccugcugugaaga

SEQ ID NO: 272528 - RNA, 32 nt, Human
uugagcugcacuggccccggugcuggcaucug

SEQ ID NO: 272529 - RNA, 32 nt, Human
uugagcugccagguugucuucaucucagaacu

SEQ ID NO: 272530 - RNA, 22 nt, Human
uugagcuggaagcguagggcug

SEQ ID NO: 272531 - RNA, 32 nt, Human
uugagcugggaguucaagaccagucugagcaa

SEQ ID NO: 272532 - RNA, 32 nt, Human
uugagcuggggagauggaggcugcagugagcu

SEQ ID NO: 272533 - RNA, 32 nt, Human
uugagcugucucagugggauaaguuugaaauu

SEQ ID NO: 272534 - RNA, 32 nt, Human
uugagcugugugaccuuggguaaguaacuuaa

SEQ ID NO: 272535 - RNA, 32 nt, Human
uugagcuguguggggucagcugugcugccagg

SEQ ID NO: 272536 - RNA, 32 nt, Human
uugagcuuaaguguuccuccuaccucggccuc

SEQ ID NO: 272537 - RNA, 32 nt, Human
uugagcuuaggagguugaggcugcagugagcu

SEQ ID NO: 272538 - RNA, 32 nt, Human
uugagcuuaggaguuugagaccagccugggca

SEQ ID NO: 272539 - RNA, 23 nt, Human
uugagcuucacagugucaggcug

SEQ ID NO: 272540 - RNA, 32 nt, Human
uugagcuucugguuuggaaacagcaagaccca

SEQ ID NO: 272541 - RNA, 32 nt, Human
uugagcuucuguuuccugauuuggaguauaca

SEQ ID NO: 272542 - RNA, 32 nt, Human
uugagcuugagagguugaagcugcagugagcu

SEQ ID NO: 272543 - RNA, 32 nt, Human
uugagcuuggccgcccuccacgccccaugcug

SEQ ID NO: 272544 - RNA, 32 nt, Human
uugagcuugggaagucgaggcugcagucagcc

SEQ ID NO: 272545 - RNA, 32 nt, Human
uugagcuugggagaucgaggcuacagugagcu

SEQ ID NO: 272546 - RNA, 32 nt, Human
uugagcuugggaguucaagaccagccugagag

SEQ ID NO: 272547 - RNA, 24 nt, Human
uugagcuugggugacagaguaaga

SEQ ID NO: 272548 - RNA, 32 nt, Human
uugagcuuugggccucaguugcccuggcagaa

SEQ ID NO: 272549 - RNA, 32 nt, Human
uugaggaagaagcacuaugucuggggccaagu

SEQ ID NO: 272550 - RNA, 32 nt, Human
uugaggaagagucuugguuucucucuacagug

SEQ ID NO: 272551 - RNA, 32 nt, Human
uugaggaauuccaccagcuugaagauggcuga

SEQ ID NO: 272552 - RNA, 32 nt, Human
uugaggaauuucuguucuggggcuuguccuuc

SEQ ID NO: 272553 - RNA, 32 nt, Human
uugaggacagcccaucucccuucaagaacccu

SEQ ID NO: 272554 - RNA, 32 nt, Human
uugaggacccccacccuccugcauccucucuc

SEQ ID NO: 272555 - RNA, 32 nt, Human
uugaggacgcccagaggugauacugacgaugc

SEQ ID NO: 272556 - RNA, 32 nt, Human
uugaggacucagaggaacuggcagcucagcug

SEQ ID NO: 272557 - RNA, 32 nt, Human
uugaggacugaagcuggggcuuggggauugcc

SEQ ID NO: 272558 - RNA, 22 nt, Human
uugaggacuguuucaaaaccac

SEQ ID NO: 272559 - RNA, 31 nt, Human
uugaggagaaagggccuacucauuugcaaug

SEQ ID NO: 272560 - RNA, 31 nt, Human
uugaggagaagugaaguuucacugugguaug

SEQ ID NO: 272561 - RNA, 32 nt, Human
uugaggagccgcugcccccgcucccugaagau

SEQ ID NO: 272562 - RNA, 32 nt, Human
uugaggagccuccuggggaauuggaggauuaa

SEQ ID NO: 272563 - RNA, 32 nt, Human
uugaggaggaaaucaguaacaaaaagacaauu

SEQ ID NO: 272564 - RNA, 32 nt, Human
uugaggaggagaagggaggaggugggggagga

SEQ ID NO: 272565 - RNA, 32 nt, Human
uugaggaggccgccacggcagcgcgggagcgg

SEQ ID NO: 272566 - RNA, 32 nt, Human
uugaggagggcagcucaagccacagaguccag

SEQ ID NO: 272567 - RNA, 32 nt, Human
uugaggaggucugauuuucaggcuuuggauuu

SEQ ID NO: 272568 - RNA, 32 nt, Human
uugaggagugaggaaggcaggaagagagcaug

SEQ ID NO: 272569 - RNA, 32 nt, Human
uugaggagugauuuucuuuccuuucccuugaa

SEQ ID NO: 272570 - RNA, 32 nt, Human
uugaggaguuucauucuacaguuuacaaggug

SEQ ID NO: 272571 - RNA, 32 nt, Human
uugaggauaauaaaggugugugaucugguuug

SEQ ID NO: 272572 - RNA, 32 nt, Human
uugaggauggggccguguuagcagguuacucu

SEQ ID NO: 272573 - RNA, 22 nt, Human
uugaggauguccagagcagaau

SEQ ID NO: 272574 - RNA, 17 nt, Human
uugaggauguccaguca

SEQ ID NO: 272575 - RNA, 32 nt, Human
uugaggauguuaccuacuaaacugaaaacauu

SEQ ID NO: 272576 - RNA, 32 nt, Human
uugaggauugcaaccgcugccuccagggucca

SEQ ID NO: 272577 - RNA, 32 nt, Human
uugaggcaaagcauucauccuacaucauaaaa

SEQ ID NO: 272578 - RNA, 32 nt, Human
uugaggcaaauuaaguguauguguguagguua

SEQ ID NO: 272579 - RNA, 32 nt, Human
uugaggcacaccucagacugaaugagucagaa

SEQ ID NO: 272580 - RNA, 32 nt, Human
uugaggcaccuugagugcaucucaguucagcu

SEQ ID NO: 272581 - RNA, 32 nt, Human
uugaggcagaacuaaguuuacagggaaaggua

SEQ ID NO: 272582 - RNA, 32 nt, Human
uugaggcagaguuuugcucuuguugcccaggc

SEQ ID NO: 272583 - RNA, 31 nt, Human
uugaggcagauccuggcacuaccucacagcu

SEQ ID NO: 272584 - RNA, 21 nt, Human
uugaggcagggucucacucug

SEQ ID NO: 272585 - RNA, 32 nt, Human
uugaggcauaccacccucaaaaaccuauuugu

SEQ ID NO: 272586 - RNA, 32 nt, Human
uugaggcaugcugggccuggugcagugauggc

SEQ ID NO: 272587 - RNA, 32 nt, Human
uugaggccaagagaucaagaccagucugggca

SEQ ID NO: 272588 - RNA, 32 nt, Human
uugaggccaagaguuaaagaccagccugguca

SEQ ID NO: 272589 - RNA, 32 nt, Human
uugaggccaagaguucaagaccagccugggca

SEQ ID NO: 272590 - RNA, 32 nt, Human
uugaggccaagaguuucagaccagccugggca

SEQ ID NO: 272591 - RNA, 32 nt, Human
uugaggccacagaacucccuggggcuggggcc

SEQ ID NO: 272592 - RNA, 32 nt, Human
uugaggccacuugcacugaguccucuacaggg

SEQ ID NO: 272593 - RNA, 32 nt, Human
uugaggccagaagugcaagaccagccugcgca

SEQ ID NO: 272594 - RNA, 32 nt, Human
uugaggccagaaguucaagaccauccucagca

SEQ ID NO: 272595 - RNA, 23 nt, Human
uugaggccagacugggcaauaua

SEQ ID NO: 272596 - RNA, 32 nt, Human
uugaggccagagguucaagaccagccugggca

SEQ ID NO: 272597 - RNA, 32 nt, Human
uugaggccagcaguucaagaccaaccuaggca

SEQ ID NO: 272598 - RNA, 32 nt, Human
uugaggccagcaguuugagaccagccuggcca

SEQ ID NO: 272599 - RNA, 32 nt, Human
uugaggccagcccuagccaacaugguguaaac

SEQ ID NO: 272600 - RNA, 32 nt, Human
uugaggccagccuggccaacauggcaaaaccc

SEQ ID NO: 272601 - RNA, 32 nt, Human
uugaggccagccuggccaacauggcgaaaccc

SEQ ID NO: 272602 - RNA, 32 nt, Human
uugaggccagccugggaaauauagugagaccc

SEQ ID NO: 272603 - RNA, 23 nt, Human
uugaggccagccugggcaacaua

SEQ ID NO: 272604 - RNA, 32 nt, Human
uugaggccagccugggcaacauagugagaccc

SEQ ID NO: 272605 - RNA, 32 nt, Human
uugaggccaggaauucaagaccagccuggcca

SEQ ID NO: 272606 - RNA, 32 nt, Human
uugaggccaggaauucgagaccagccuggcaa

SEQ ID NO: 272607 - RNA, 32 nt, Human
uugaggccaggaauucgagaccagccuggcca

SEQ ID NO: 272608 - RNA, 32 nt, Human
uugaggccaggaauucgagaccagccugggca

SEQ ID NO: 272609 - RNA, 32 nt, Human
uugaggccaggaggucaauaccagccugggca

SEQ ID NO: 272610 - RNA, 32 nt, Human
uugaggccaggagguugaggcugcagugagcu

SEQ ID NO: 272611 - RNA, 32 nt, Human
uugaggccaggaguuagagaccagccuggcca

SEQ ID NO: 272612 - RNA, 32 nt, Human
uugaggccaggaguuagagacugcagugagcu

SEQ ID NO: 272613 - RNA, 32 nt, Human
uugaggccaggaguucaagaccagccagggca

SEQ ID NO: 272614 - RNA, 32 nt, Human
uugaggccaggaguucaagaccagcccaggca

SEQ ID NO: 272615 - RNA, 32 nt, Human
uugaggccaggaguucaagaccagccuggcca

SEQ ID NO: 272616 - RNA, 32 nt, Human
uugaggccaggaguucaagaccagccugggca

SEQ ID NO: 272617 - RNA, 32 nt, Human
uugaggccaggaguucaagaccagcuuggcca

SEQ ID NO: 272618 - RNA, 32 nt, Human
uugaggccaggaguucaagaccagucuggcca

SEQ ID NO: 272619 - RNA, 32 nt, Human
uugaggccaggaguucaagaccagucugggca

SEQ ID NO: 272620 - RNA, 32 nt, Human
uugaggccaggaguucaagaccggccuggcca

SEQ ID NO: 272621 - RNA, 32 nt, Human
uugaggccaggaguucaaggcuauagugugcu

SEQ ID NO: 272622 - RNA, 32 nt, Human
uugaggccaggaguucaggaccagccugggca

SEQ ID NO: 272623 - RNA, 32 nt, Human
uugaggccaggaguuccagaccagccuggcca

SEQ ID NO: 272624 - RNA, 32 nt, Human
uugaggccaggaguuccagaccagccugggca

SEQ ID NO: 272625 - RNA, 32 nt, Human
uugaggccaggaguuccagaccagccugggua

SEQ ID NO: 272626 - RNA, 32 nt, Human
uugaggccaggaguucgagaccagccuaguuc

SEQ ID NO: 272627 - RNA, 32 nt, Human
uugaggccaggaguucgagaccagccucagca

SEQ ID NO: 272628 - RNA, 32 nt, Human
uugaggccaggaguucgagaccagccugaaca

SEQ ID NO: 272629 - RNA, 32 nt, Human
uugaggccaggaguucgagaccagccugagca

SEQ ID NO: 272630 - RNA, 32 nt, Human
uugaggccaggaguucgagaccagccuggaca

SEQ ID NO: 272631 - RNA, 32 nt, Human
uugaggccaggaguucgagaccagccuggcca

SEQ ID NO: 272632 - RNA, 32 nt, Human
uugaggccaggaguucgagaccagccugggca

SEQ ID NO: 272633 - RNA, 32 nt, Human
uugaggccaggaguucgagaccagccugguca

SEQ ID NO: 272634 - RNA, 32 nt, Human
uugaggccaggaguucgagaccagccuggucc

SEQ ID NO: 272635 - RNA, 32 nt, Human
uugaggccaggaguucgagaccagccuguuca

SEQ ID NO: 272636 - RNA, 32 nt, Human
uugaggccaggaguucgauaccagccuggcca

SEQ ID NO: 272637 - RNA, 32 nt, Human
uugaggccaggaguucuagaccagccuggcca

SEQ ID NO: 272638 - RNA, 32 nt, Human
uugaggccaggaguugcagaccagccugggua

SEQ ID NO: 272639 - RNA, 32 nt, Human
uugaggccaggaguuggagaccagccuggcca

SEQ ID NO: 272640 - RNA, 32 nt, Human
uugaggccaggaguuggagaccagccugggca

SEQ ID NO: 272641 - RNA, 32 nt, Human
uugaggccaggaguuuaagaccagccugggca

SEQ ID NO: 272642 - RNA, 32 nt, Human
uugaggccaggaguuugaaaccagccuggcca

SEQ ID NO: 272643 - RNA, 32 nt, Human
uugaggccaggaguuugagaccagccugagug

SEQ ID NO: 272644 - RNA, 32 nt, Human
uugaggccaggaguuugagaccagccuggcaa

SEQ ID NO: 272645 - RNA, 32 nt, Human
uugaggccaggaguuugagaccagccuggcca

SEQ ID NO: 272646 - RNA, 32 nt, Human
uugaggccaggaguuugagaccagccugggca

SEQ ID NO: 272647 - RNA, 32 nt, Human
uugaggccaggaguuugagaccagcuugggca

SEQ ID NO: 272648 - RNA, 32 nt, Human
uugaggccaggaguuugaggccagcuagagug

SEQ ID NO: 272649 - RNA, 32 nt, Human
uugaggccaggaguuugaggcugcagugagcu

SEQ ID NO: 272650 - RNA, 32 nt, Human
uugaggccaggaguuugaggcugcagugaguu

SEQ ID NO: 272651 - RNA, 32 nt, Human
uugaggccaggaguuuguuaccagccugggca

SEQ ID NO: 272652 - RNA, 32 nt, Human
uugaggccagggguuugagaccagccuggcca

SEQ ID NO: 272653 - RNA, 32 nt, Human
uugaggccaggguucgagaccaaccuugggca

SEQ ID NO: 272654 - RNA, 32 nt, Human
uugaggccaguaguuggagaccagccuggcca

SEQ ID NO: 272655 - RNA, 32 nt, Human
uugaggccagucuggccaaugugaugaaaccc

SEQ ID NO: 272656 - RNA, 32 nt, Human
uugaggccagugagcugugaucacuccagugc

SEQ ID NO: 272657 - RNA, 32 nt, Human
uugaggccaugccaccucccuuccaguccaca

SEQ ID NO: 272658 - RNA, 32 nt, Human
uugaggcccaacaacaguguauuuguuuuucc

SEQ ID NO: 272659 - RNA, 32 nt, Human
uugaggcccagagucugaggcugcgguaagcu

SEQ ID NO: 272660 - RNA, 32 nt, Human
uugaggcccaggaagagccaguguugcaguuc

SEQ ID NO: 272661 - RNA, 32 nt, Human
uugaggcccgggcacuucccgucuccucccuu

SEQ ID NO: 272662 - RNA, 32 nt, Human
uugaggcccggggagagccggggagccgggcc

SEQ ID NO: 272663 - RNA, 32 nt, Human
uugaggccgggaguucgggaccagccuagccu

SEQ ID NO: 272664 - RNA, 32 nt, Human
uugaggccgggaguuggagaccagccugagca

SEQ ID NO: 272665 - RNA, 32 nt, Human
uugaggccgggaguuugagaccagccugggca

SEQ ID NO: 272666 - RNA, 32 nt, Human
uugaggccuagccuuggaggcugcagugcacu

SEQ ID NO: 272667 - RNA, 32 nt, Human
uugaggccuccccucuccugccucccuccacc

SEQ ID NO: 272668 - RNA, 32 nt, Human
uugaggccuggaguucaagaccagccugugca

SEQ ID NO: 272669 - RNA, 32 nt, Human
uugaggcgaggaguucaagaccagccuaggca

SEQ ID NO: 272670 - RNA, 32 nt, Human
uugaggcgcccaggccccagaagucaccugcc

SEQ ID NO: 272671 - RNA, 32 nt, Human
uugaggcgcgucucacccuguugcccaggcug

SEQ ID NO: 272672 - RNA, 32 nt, Human
uugaggcgggcagauuaccugaggucaggagu

SEQ ID NO: 272673 - RNA, 32 nt, Human
uugaggcguggguagagcaggaauugguuuuc

SEQ ID NO: 272674 - RNA, 32 nt, Human
uugaggcuagauggccuaggagauuuuauugu

SEQ ID NO: 272675 - RNA, 32 nt, Human
uugaggcuaggaguucaagaccagccuggcca

SEQ ID NO: 272676 - RNA, 32 nt, Human
uugaggcuaggaguuccagaccagccugggca

SEQ ID NO: 272677 - RNA, 32 nt, Human
uugaggcuaggauuuugagaccagccugggga

SEQ ID NO: 272678 - RNA, 32 nt, Human
uugaggcuaggcauucaagaccagccuaggca

SEQ ID NO: 272679 - RNA, 22 nt, Human
uugaggcuagucuggaaccuuu

SEQ ID NO: 272680 - RNA, 32 nt, Human
uugaggcuagugagcugugacucccacugcac

SEQ ID NO: 272681 - RNA, 32 nt, Human
uugaggcuagugagcugugauuguaccacugc

SEQ ID NO: 272682 - RNA, 32 nt, Human
uugaggcucagccauaagagcuucacuuugac

SEQ ID NO: 272683 - RNA, 24 nt, Human
uugaggcucagcugccccaccccc

SEQ ID NO: 272684 - RNA, 32 nt, Human
uugaggcugaggccauggcaggacagcugcug

SEQ ID NO: 272685 - RNA, 21 nt, Human
uugaggcugcaaucacacuga

SEQ ID NO: 272686 - RNA, 32 nt, Human
uugaggcugcugaccuuuggaugggguuuuug

SEQ ID NO: 272687 - RNA, 32 nt, Human
uugaggcuggcggggucugcuccugggaaugg

SEQ ID NO: 272688 - RNA, 32 nt, Human
uugaggcugggaguucaaaaccagccugggca

SEQ ID NO: 272689 - RNA, 32 nt, Human
uugaggcuugaaguucgagaccagccuggcca

SEQ ID NO: 272690 - RNA, 32 nt, Human
uugaggcuuguccuaaaguggagaguuucagu

SEQ ID NO: 272691 - RNA, 32 nt, Human
uugaggcuuucauaguucaguguuauaauauu

SEQ ID NO: 272692 - RNA, 32 nt, Human
uugagggagcugauaaagacuuuagcugacuc

SEQ ID NO: 272693 - RNA, 32 nt, Human
uugagggaggacaccuuccuaggccuggagag

SEQ ID NO: 272694 - RNA, 32 nt, Human
uugagggaggcagaagucugcaguugaagaaa

SEQ ID NO: 272695 - RNA, 32 nt, Human
uugagggagggaggggcaagcccaguguuagu

SEQ ID NO: 272696 - RNA, 32 nt, Human
uugagggaggguaggguggugggagcccaguu

SEQ ID NO: 272697 - RNA, 32 nt, Human
uugagggauccucucuccuuguucaucucugc

SEQ ID NO: 272698 - RNA, 32 nt, Human
uugagggcaagcacugugucuccuuucaacca

SEQ ID NO: 272699 - RNA, 32 nt, Human
uugagggcagaauuuccaucucugauucccaa

SEQ ID NO: 272700 - RNA, 32 nt, Human
uugagggcagccugggaaacauggcuaaaucc

SEQ ID NO: 272701 - RNA, 32 nt, Human
uugagggcaggaguucgugaccagccugguca

SEQ ID NO: 272702 - RNA, 32 nt, Human
uugagggcaggcagagguagcugaggguagca

SEQ ID NO: 272703 - RNA, 32 nt, Human
uugagggcaggcaggagguggaguugcagcug

SEQ ID NO: 272704 - RNA, 32 nt, Human
uugagggcagguggcacguggggaagagggcg

SEQ ID NO: 272705 - RNA, 32 nt, Human
uugagggcaugaguucgagaccagccuggcca

SEQ ID NO: 272706 - RNA, 32 nt, Human
uugagggccagaguccccagccccagaucaca

SEQ ID NO: 272707 - RNA, 32 nt, Human
uugagggcccagaggacagagagauggacaug

SEQ ID NO: 272708 - RNA, 32 nt, Human
uugagggcccuggagaaacuucagcagaacag

SEQ ID NO: 272709 - RNA, 32 nt, Human
uugagggcccugggacaugugcuaucugauaa

SEQ ID NO: 272710 - RNA, 32 nt, Human
uugagggccuucucaggaacacuggcauugcc

SEQ ID NO: 272711 - RNA, 32 nt, Human
uugagggcgccugagggccaggagcagcaggc

SEQ ID NO: 272712 - RNA, 32 nt, Human
uugagggcucaaaggcucuucccacugcuugu

SEQ ID NO: 272713 - RNA, 32 nt, Human
uugagggcugaguccuugcugugggaugugcc

SEQ ID NO: 272714 - RNA, 32 nt, Human
uugagggcuggaaaugcaaagacacauuuuuc

SEQ ID NO: 272715 - RNA, 22 nt, Human
uugagggcuuuugguuggccag

SEQ ID NO: 272716 - RNA, 32 nt, Human
uugaggggaaauggugugagacgaaugggcuc

SEQ ID NO: 272717 - RNA, 32 nt, Human
uugaggggagugagaaaaggagaaguagagau

SEQ ID NO: 272718 - RNA, 32 nt, Human
uugaggggcaccacuacuccagcccagaagga

SEQ ID NO: 272719 - RNA, 32 nt, Human
uugaggggcagccugcagcuacuuggcacagg

SEQ ID NO: 272720 - RNA, 32 nt, Human
uugaggggcugaagcuggccaggaguugcugc

SEQ ID NO: 272721 - RNA, 32 nt, Human
uugaggggcugcaggugaugcauugcacggga

SEQ ID NO: 272722 - RNA, 32 nt, Human
uugagggggaaugaccucuaacaucuguaaaa

SEQ ID NO: 272723 - RNA, 32 nt, Human
uugaggggugggagcagguguguacugacaau

SEQ ID NO: 272724 - RNA, 32 nt, Human
uugagggucuccacugcugccuugggggccug

SEQ ID NO: 272725 - RNA, 32 nt, Human
uugagggucucugguggggaaggacagggacc

SEQ ID NO: 272726 - RNA, 21 nt, Human
uugagggucuuaagaaccaca

SEQ ID NO: 272727 - RNA, 32 nt, Human
uugagggugcuguccccaccucugguggaaag

SEQ ID NO: 272728 - RNA, 32 nt, Human
uugagggugggagagaagaaaagggaaagaag

SEQ ID NO: 272729 - RNA, 32 nt, Human
uugagggugggucugccucucccagcccacug

SEQ ID NO: 272730 - RNA, 32 nt, Human
uugagggugggugggaagagugagaagauaua

SEQ ID NO: 272731 - RNA, 32 nt, Human
uugaggguuaagaagaaagaggaaugaggaaa

SEQ ID NO: 272732 - RNA, 32 nt, Human
uugaggguugugaauaguggagauguguaggg

SEQ ID NO: 272733 - RNA, 32 nt, Human
uugaggguuuucuaaauaaucugcuguugauu

SEQ ID NO: 272734 - RNA, 32 nt, Human
uugagguaccagccagaugucuucccacaaag

SEQ ID NO: 272735 - RNA, 32 nt, Human
uugagguagagaguuugagaccagccuggcca

SEQ ID NO: 272736 - RNA, 32 nt, Human
uugaggucaagaguucgagaccagccugacca

SEQ ID NO: 272737 - RNA, 32 nt, Human
uugaggucaagaguuugagaccagccugacca

SEQ ID NO: 272738 - RNA, 32 nt, Human
uugaggucaagaguuugagaccagccuggcca

SEQ ID NO: 272739 - RNA, 32 nt, Human
uugaggucaagcaacccucccaccucggccug

SEQ ID NO: 272740 - RNA, 32 nt, Human
uugaggucaaggggcagcaggagaagaugcaa

SEQ ID NO: 272741 - RNA, 32 nt, Human
uugaggucagaaguucaagaccagccugacca

SEQ ID NO: 272742 - RNA, 32 nt, Human
uugaggucagaaguucgagaccagccugccca

SEQ ID NO: 272743 - RNA, 32 nt, Human
uugaggucagaaguucgagaccagccuggcca

SEQ ID NO: 272744 - RNA, 32 nt, Human
uugaggucagcaguuugagaccagccuggcca

SEQ ID NO: 272745 - RNA, 32 nt, Human
uugaggucaggaauuagagaccagccugggaa

SEQ ID NO: 272746 - RNA, 32 nt, Human
uugaggucaggaauucaaaaccagccuggcca

SEQ ID NO: 272747 - RNA, 32 nt, Human
uugaggucaggaauucaagaccagccuggcca

SEQ ID NO: 272748 - RNA, 32 nt, Human
uugaggucaggaauucgagaccagcuugggca

SEQ ID NO: 272749 - RNA, 32 nt, Human
uugaggucaggacuagguggucucagccaaug

SEQ ID NO: 272750 - RNA, 32 nt, Human
uugaggucaggacuuugagaccagccuggcca

SEQ ID NO: 272751 - RNA, 32 nt, Human
uugaggucaggagauugagaccagccuggcca

SEQ ID NO: 272752 - RNA, 32 nt, Human
uugaggucaggagcucaagaccagccugacca

SEQ ID NO: 272753 - RNA, 32 nt, Human
uugaggucaggagcucaagaccagccugggua

SEQ ID NO: 272754 - RNA, 32 nt, Human
uugaggucaggagcucaagaccagccugguca

SEQ ID NO: 272755 - RNA, 32 nt, Human
uugaggucaggagcucgagaccagccuggcca

SEQ ID NO: 272756 - RNA, 32 nt, Human
uugaggucaggagcucgagaccagcuuggcca

SEQ ID NO: 272757 - RNA, 32 nt, Human
uugaggucaggagcuugaaaccagccuggcca

SEQ ID NO: 272758 - RNA, 32 nt, Human
uugaggucaggagcuugagaccagccuggcca

SEQ ID NO: 272759 - RNA, 32 nt, Human
uugaggucaggaguccaagaccagccuggcca

SEQ ID NO: 272760 - RNA, 32 nt, Human
uugaggucaggaguuagaaaccagccuggcca

SEQ ID NO: 272761 - RNA, 32 nt, Human
uugaggucaggaguucaaaaccagccuggcca

SEQ ID NO: 272762 - RNA, 32 nt, Human
uugaggucaggaguucaacaccagccuggcca

SEQ ID NO: 272763 - RNA, 32 nt, Human
uugaggucaggaguucaagaccacccugacca

SEQ ID NO: 272764 - RNA, 32 nt, Human
uugaggucaggaguucaagaccagccugacca

SEQ ID NO: 272765 - RNA, 32 nt, Human
uugaggucaggaguucaagaccagccuggcca

SEQ ID NO: 272766 - RNA, 32 nt, Human
uugaggucaggaguucaagaccagccuggccg

SEQ ID NO: 272767 - RNA, 32 nt, Human
uugaggucaggaguucaagaccagccuggcua

SEQ ID NO: 272768 - RNA, 32 nt, Human
uugaggucaggaguucaagaccagccuggcug

SEQ ID NO: 272769 - RNA, 32 nt, Human
uugaggucaggaguucaagaccagccugggca

SEQ ID NO: 272770 - RNA, 32 nt, Human
uugaggucaggaguucaagaccagccuuggca

SEQ ID NO: 272771 - RNA, 32 nt, Human
uugaggucaggaguucaagaccagcuuggcca

SEQ ID NO: 272772 - RNA, 32 nt, Human
uugaggucaggaguucaagaccaggcuggcca

SEQ ID NO: 272773 - RNA, 32 nt, Human
uugaggucaggaguucaagaccagucuggcca

SEQ ID NO: 272774 - RNA, 32 nt, Human
uugaggucaggaguucaagaccugccuggcca

SEQ ID NO: 272775 - RNA, 32 nt, Human
uugaggucaggaguucacgaccagccuggcca

SEQ ID NO: 272776 - RNA, 32 nt, Human
uugaggucaggaguucagcuuggaauuaccag

SEQ ID NO: 272777 - RNA, 32 nt, Human
uugaggucaggaguucaggaccagccuggcca

SEQ ID NO: 272778 - RNA, 32 nt, Human
uugaggucaggaguuccagaccagccuggcca

SEQ ID NO: 272779 - RNA, 32 nt, Human
uugaggucaggaguuccuaaccagccugguca

SEQ ID NO: 272780 - RNA, 32 nt, Human
uugaggucaggaguucgaaaccagccuggcca

SEQ ID NO: 272781 - RNA, 32 nt, Human
uugaggucaggaguucgagaccagcccagcca

SEQ ID NO: 272782 - RNA, 32 nt, Human
uugaggucaggaguucgagaccagccuagcua

SEQ ID NO: 272783 - RNA, 32 nt, Human
uugaggucaggaguucgagaccagccugacca

SEQ ID NO: 272784 - RNA, 32 nt, Human
uugaggucaggaguucgagaccagccuggcaa

SEQ ID NO: 272785 - RNA, 32 nt, Human
uugaggucaggaguucgagaccagccuggcca

SEQ ID NO: 272786 - RNA, 32 nt, Human
uugaggucaggaguucgagaccagcuugugca

SEQ ID NO: 272787 - RNA, 32 nt, Human
uugaggucaggaguucgaguccagccuggcca

SEQ ID NO: 272788 - RNA, 32 nt, Human
uugaggucaggaguucgauaccagccugacca

SEQ ID NO: 272789 - RNA, 32 nt, Human
uugaggucaggaguucgcgaccagccuaccca

SEQ ID NO: 272790 - RNA, 32 nt, Human
uugaggucaggaguucuagaccagccuggcca

SEQ ID NO: 272791 - RNA, 32 nt, Human
uugaggucaggaguucuagaccagccugguca

SEQ ID NO: 272792 - RNA, 32 nt, Human
uugaggucaggaguuggagaccagccuggcca

SEQ ID NO: 272793 - RNA, 32 nt, Human
uugaggucaggaguuggagaccagucuggcca

SEQ ID NO: 272794 - RNA, 32 nt, Human
uugaggucaggaguuucggaccagccuggcca

SEQ ID NO: 272795 - RNA, 32 nt, Human
uugaggucaggaguuugaaaccagccugagca

SEQ ID NO: 272796 - RNA, 32 nt, Human
uugaggucaggaguuugaaaccagccuggcca

SEQ ID NO: 272797 - RNA, 32 nt, Human
uugaggucaggaguuugagaccagcccggcca

SEQ ID NO: 272798 - RNA, 32 nt, Human
uugaggucaggaguuugagaccagccuagcca

SEQ ID NO: 272799 - RNA, 32 nt, Human
uugaggucaggaguuugagaccagccucgcca

SEQ ID NO: 272800 - RNA, 32 nt, Human
uugaggucaggaguuugagaccagccucggca

SEQ ID NO: 272801 - RNA, 32 nt, Human
uugaggucaggaguuugagaccagccugacca

SEQ ID NO: 272802 - RNA, 32 nt, Human
uugaggucaggaguuugagaccagccugauca

SEQ ID NO: 272803 - RNA, 32 nt, Human
uugaggucaggaguuugagaccagccuggaca

SEQ ID NO: 272804 - RNA, 32 nt, Human
uugaggucaggaguuugagaccagccuggcca

SEQ ID NO: 272805 - RNA, 32 nt, Human
uugaggucaggaguuugagaccagccuggccg

SEQ ID NO: 272806 - RNA, 32 nt, Human
uugaggucaggaguuugagaccagccugggua

SEQ ID NO: 272807 - RNA, 32 nt, Human
uugaggucaggaguuugagaccagccugguca

SEQ ID NO: 272808 - RNA, 32 nt, Human
uugaggucaggaguuugagaccagugugcaaa

SEQ ID NO: 272809 - RNA, 32 nt, Human
uugaggucaggaguuugaggccagccuggcca

SEQ ID NO: 272810 - RNA, 32 nt, Human
uugaggucaggaguuuuagaccagccuggaca

SEQ ID NO: 272811 - RNA, 32 nt, Human
uugaggucagggguuugagaccagccugacca

SEQ ID NO: 272812 - RNA, 32 nt, Human
uugaggucagggguuugagaccagccuggcuu

SEQ ID NO: 272813 - RNA, 32 nt, Human
uugaggucaugaccacagcacaaccuagccua

SEQ ID NO: 272814 - RNA, 32 nt, Human
uugaggucaugaguucaagaccagccugacca

SEQ ID NO: 272815 - RNA, 32 nt, Human
uugagguccccaaagguguauuuuugggcaaa

SEQ ID NO: 272816 - RNA, 32 nt, Human
uugaggucgggaguucaagaccagccuggcca

SEQ ID NO: 272817 - RNA, 32 nt, Human
uugaggucgggaguucgagaccagccugacca

SEQ ID NO: 272818 - RNA, 32 nt, Human
uugaggucgggaguucgagaccagccugagca

SEQ ID NO: 272819 - RNA, 32 nt, Human
uugaggucgggaguucgagaccagccuggcca

SEQ ID NO: 272820 - RNA, 32 nt, Human
uugaggucgggaguuggaggccagccuggcca

SEQ ID NO: 272821 - RNA, 32 nt, Human
uugaggucggggguuugcgaccagccugguca

SEQ ID NO: 272822 - RNA, 32 nt, Human
uugaggucuagggauugagaccagccuggcca

SEQ ID NO: 272823 - RNA, 32 nt, Human
uugaggucuggggaaaagggaggacuuugcau

SEQ ID NO: 272824 - RNA, 32 nt, Human
uugaggugaggaauucgagaccagccuggcca

SEQ ID NO: 272825 - RNA, 32 nt, Human
uugaggugaggaguucaagaccagccuggcca

SEQ ID NO: 272826 - RNA, 32 nt, Human
uugagguggaguuucacucuuguugcccaagc

SEQ ID NO: 272827 - RNA, 32 nt, Human
uugagguggaguuucgcucuuguugcccgggc

SEQ ID NO: 272828 - RNA, 32 nt, Human
uugagguggccugucugugccucuccuuuguu

SEQ ID NO: 272829 - RNA, 32 nt, Human
uugaggugggagagagaagcagagcgagagag

SEQ ID NO: 272830 - RNA, 32 nt, Human
uugaggugggcaauggcuugagcccaggaguu

SEQ ID NO: 272831 - RNA, 32 nt, Human
uugaggugggcagaucgccugaggucgggagu

SEQ ID NO: 272832 - RNA, 32 nt, Human
uugaggugggcggaucaccugaggucaggagu

SEQ ID NO: 272833 - RNA, 32 nt, Human
uugaggugguguagauggugaccuggguaucc

SEQ ID NO: 272834 - RNA, 32 nt, Human
uugagguuaauggcacuucgguguuuaggcuc

SEQ ID NO: 272835 - RNA, 32 nt, Human
uugagguuaggaguucaagaccagcccagcca

SEQ ID NO: 272836 - RNA, 32 nt, Human
uugagguuaggaguucaagaccagccuggcca

SEQ ID NO: 272837 - RNA, 32 nt, Human
uugagguuaggaguucgauaccagccuggcca

SEQ ID NO: 272838 - RNA, 32 nt, Human
uugagguuaggaguuugagaccagccuggcca

SEQ ID NO: 272839 - RNA, 32 nt, Human
uugagguugcuggugggccugcucuggugguc

SEQ ID NO: 272840 - RNA, 31 nt, Human
uugagguuguuauuuaaaguuggagaugagu

SEQ ID NO: 272841 - RNA, 32 nt, Human
uugagguuuauauuacacauucuaaguguaug

SEQ ID NO: 272842 - RNA, 32 nt, Human
uugaguaaugaccauaugccaggugcuuucac

SEQ ID NO: 272843 - RNA, 32 nt, Human
uugaguacugaugacccaguacucagucuagg

SEQ ID NO: 272844 - RNA, 32 nt, Human
uugaguacuguacugacuuuuugcuaguuucu

SEQ ID NO: 272845 - RNA, 32 nt, Human
uugaguagccaaggaaggucagugugaaaagc

SEQ ID NO: 272846 - RNA, 32 nt, Human
uugaguagcucagacuugguuuugccaaaacu

SEQ ID NO: 272847 - RNA, 21 nt, Human
uugaguagcugggacuacagg

SEQ ID NO: 272848 - RNA, 21 nt, Human
uugaguagcugggacuucagg

SEQ ID NO: 272849 - RNA, 21 nt, Human
uugaguagcugggauuacagg

SEQ ID NO: 272850 - RNA, 32 nt, Human
uugaguagcugugugcuuuguuuaugauaaca

SEQ ID NO: 272851 - RNA, 30 nt, Human
uugaguagcuucuccaugcuauguauuuuu

SEQ ID NO: 272852 - RNA, 32 nt, Human
uugaguagugaaaggaaggaggaggaaaggaa

SEQ ID NO: 272853 - RNA, 32 nt, Human
uugaguauguucucccuuuuccauuuuggauu

SEQ ID NO: 272854 - RNA, 32 nt, Human
uugaguauuucugucuuuucacagaaaaacau

SEQ ID NO: 272855 - RNA, 32 nt, Human
uugagucacuauauguggaugugcuagucuua

SEQ ID NO: 272856 - RNA, 32 nt, Human
uugagucagcaacuaagucuuccuucaaaguu

SEQ ID NO: 272857 - RNA, 32 nt, Human
uugagucagcagacaauggauauuuuuauauc

SEQ ID NO: 272858 - RNA, 32 nt, Human
uugagucagcugacucaauuacccagggguau

SEQ ID NO: 272859 - RNA, 32 nt, Human
uugagucaggcagcuggaggguuguggcccga

SEQ ID NO: 272860 - RNA, 32 nt, Human
uugagucaguuauggacugcugccuuuaaacc

SEQ ID NO: 272861 - RNA, 32 nt, Human
uugaguccaagaguuugagaccagccugagca

SEQ ID NO: 272862 - RNA, 32 nt, Human
uugaguccaaguguuugagaccagccugagca

SEQ ID NO: 272863 - RNA, 32 nt, Human
uugaguccacgaguuuaagaccagccugggca

SEQ ID NO: 272864 - RNA, 23 nt, Human
uugaguccagccugggcaguaua

SEQ ID NO: 272865 - RNA, 32 nt, Human
uugaguccagccugggcaguauagcaagaccc

SEQ ID NO: 272866 - RNA, 32 nt, Human
uugaguccaggaauuugagaccagccuggaca

SEQ ID NO: 272867 - RNA, 32 nt, Human
uugaguccaggaauuugagaccagccuggcca

SEQ ID NO: 272868 - RNA, 32 nt, Human
uugaguccaggaggcggaggcugcagugagcu

SEQ ID NO: 272869 - RNA, 32 nt, Human
uugaguccaggagguugaggcugcagucagcu

SEQ ID NO: 272870 - RNA, 32 nt, Human
uugaguccaggagguugaggcugcagugagcu

SEQ ID NO: 272871 - RNA, 32 nt, Human
uugaguccaggaguccgagaccagccugggca

SEQ ID NO: 272872 - RNA, 32 nt, Human
uugaguccaggaguucaaggcugcagugaguu

SEQ ID NO: 272873 - RNA, 32 nt, Human
uugaguccaggaguuggaggcuacagugagcc

SEQ ID NO: 272874 - RNA, 32 nt, Human
uugaguccaggaguuuaagaccagccuggaca

SEQ ID NO: 272875 - RNA, 32 nt, Human
uugaguccaggaguuugagaccagccuggaca

SEQ ID NO: 272876 - RNA, 32 nt, Human
uugaguccaggaguuugagaccagccugggca

SEQ ID NO: 272877 - RNA, 32 nt, Human
uugaguccaggaguuugagguuacagugaucc

SEQ ID NO: 272878 - RNA, 32 nt, Human
uugagucccacagcaagggagagcaagaacgc

SEQ ID NO: 272879 - RNA, 32 nt, Human
uugaguccgggaguucagaaccagccuggaca

SEQ ID NO: 272880 - RNA, 32 nt, Human
uugaguccucauccauggagugcuguguuugg

SEQ ID NO: 272881 - RNA, 32 nt, Human
uugagucggugggcugggagaggcagacccac

SEQ ID NO: 272882 - RNA, 32 nt, Human
uugagucuaggaguucaagaccagccuggcca

SEQ ID NO: 272883 - RNA, 32 nt, Human
uugagucuaugaguucaagaccagccugggca

SEQ ID NO: 272884 - RNA, 32 nt, Human
uugagucucaaccugcuguucuuuggacuaga

SEQ ID NO: 272885 - RNA, 32 nt, Human
uugagucuccccuagugucagagaucaggaga

SEQ ID NO: 272886 - RNA, 32 nt, Human
uugagucucuuucuuguccucccagcugagcu

SEQ ID NO: 272887 - RNA, 22 nt, Human
uugagucugacccaggaccucu

SEQ ID NO: 272888 - RNA, 32 nt, Human
uugagucugcaagacugggaggaacuggggug

SEQ ID NO: 272889 - RNA, 32 nt, Human
uugagucuggacaccaguagguggucaugguc

SEQ ID NO: 272890 - RNA, 32 nt, Human
uugagucugggagguggaggcugcagugagcc

SEQ ID NO: 272891 - RNA, 32 nt, Human
uugagucugggcuuguuuguguuacugcauac

SEQ ID NO: 272892 - RNA, 32 nt, Human
uugagucuguuuucccaaccuccugugggccu

SEQ ID NO: 272893 - RNA, 32 nt, Human
uugagucuuacucugugccugaccuugugcuu

SEQ ID NO: 272894 - RNA, 32 nt, Human
uugagugaaaugccucucagucuuaggggaca

SEQ ID NO: 272895 - RNA, 32 nt, Human
uugagugaacauuuuuagaggaaagguuaugc

SEQ ID NO: 272896 - RNA, 32 nt, Human
uugagugacaguucuauuugauugccuccggu

SEQ ID NO: 272897 - RNA, 31 nt, Human
uugagugagagaauagaaaaagcgcuuuagu

SEQ ID NO: 272898 - RNA, 32 nt, Human
uugagugagcucugcugccucuucugcugccc

SEQ ID NO: 272899 - RNA, 32 nt, Human
uugagugaugaccacaccaaucacuguauuuu

SEQ ID NO: 272900 - RNA, 32 nt, Human
uugagugaugcaugagguagguguuuggagua

SEQ ID NO: 272901 - RNA, 32 nt, Human
uugagugcaagaagaaagaggcgcugcucacu

SEQ ID NO: 272902 - RNA, 32 nt, Human
uugagugcaaugaccuguucucagcuuacuca

SEQ ID NO: 272903 - RNA, 32 nt, Human
uugagugcagaacuagcuaguagaagccagau

SEQ ID NO: 272904 - RNA, 32 nt, Human
uugagugcaggaguuugagaccagccugggca

SEQ ID NO: 272905 - RNA, 32 nt, Human
uugagugcaguggcgcaaucguggcucacugc

SEQ ID NO: 272906 - RNA, 32 nt, Human
uugagugcaguggcgugaucuggacucacugu

SEQ ID NO: 272907 - RNA, 32 nt, Human
uugagugcaguggugugaucuuggcucacugc

SEQ ID NO: 272908 - RNA, 32 nt, Human
uugagugcuaucagcccucuagacccagaccc

SEQ ID NO: 272909 - RNA, 32 nt, Human
uugagugcuccaguuaagacaguaauuuauuu

SEQ ID NO: 272910 - RNA, 32 nt, Human
uugagugcuccuguggggagcggggaugagcu

SEQ ID NO: 272911 - RNA, 32 nt, Human
uugaguggcgauuaccuccagcacagagacgu

SEQ ID NO: 272912 - RNA, 32 nt, Human
uugaguggggcagagggacagggcagccagac

SEQ ID NO: 272913 - RNA, 32 nt, Human
uugagugggggaggcagggacgagggaaggaa

SEQ ID NO: 272914 - RNA, 32 nt, Human
uugaguggucucaagcccuuaaccucuguaag

SEQ ID NO: 272915 - RNA, 32 nt, Human
uugagugguggagguggaacucagcaggauag

SEQ ID NO: 272916 - RNA, 31 nt, Human
uugaguguacuuuucuauggacaacagguca

SEQ ID NO: 272917 - RNA, 32 nt, Human
uugagugucugugucuuagaccugcaaacagc

SEQ ID NO: 272918 - RNA, 32 nt, Human
uugagugugggaugugcuuccagcagugccuu

SEQ ID NO: 272919 - RNA, 32 nt, Human
uugaguguuaucucucaguggcuagaggugcu

SEQ ID NO: 272920 - RNA, 32 nt, Human
uugaguuaaaccuaccuaaguagauuuuaggu

SEQ ID NO: 272921 - RNA, 32 nt, Human
uugaguuaagauugcuuggaaaaagaacuguu

SEQ ID NO: 272922 - RNA, 32 nt, Human
uugaguuacuccuguaucauugcucauaauau

SEQ ID NO: 272923 - RNA, 32 nt, Human
uugaguuaucuaggugcagcuguguucugcag

SEQ ID NO: 272924 - RNA, 32 nt, Human
uugaguucaagaccagccuggccaacauggug

SEQ ID NO: 272925 - RNA, 32 nt, Human
uugaguucaauaccagccugagcaaccuaaug

SEQ ID NO: 272926 - RNA, 32 nt, Human
uugaguucaggaguucaaaaccagccuggaca

SEQ ID NO: 272927 - RNA, 32 nt, Human
uugaguucaggaguucaagaccggccugggca

SEQ ID NO: 272928 - RNA, 32 nt, Human
uugaguucaggaguuuaagaccagccuggaca

SEQ ID NO: 272929 - RNA, 32 nt, Human
uugaguucagguagcugccccuggcucugacc

SEQ ID NO: 272930 - RNA, 32 nt, Human
uugaguucauacccuguuaccauuuuggggua

SEQ ID NO: 272931 - RNA, 32 nt, Human
uugaguuccuucucucccaucuggaucuccca

SEQ ID NO: 272932 - RNA, 32 nt, Human
uugaguucgagaccagccuggccacaugguga

SEQ ID NO: 272933 - RNA, 32 nt, Human
uugaguucucaguuucucugcagcuacuauag

SEQ ID NO: 272934 - RNA, 32 nt, Human
uugaguucugcuggacaggagcacuuuaucug

SEQ ID NO: 272935 - RNA, 32 nt, Human
uugaguucuucaccaucuuuugcaacugaaau

SEQ ID NO: 272936 - RNA, 32 nt, Human
uugaguugagcuuuagcaaaaguuuccccuca

SEQ ID NO: 272937 - RNA, 32 nt, Human
uugaguugcugcugaaacucauugcaaaccuc

SEQ ID NO: 272938 - RNA, 32 nt, Human
uugaguugugcugaaugccccaccccagcucu

SEQ ID NO: 272939 - RNA, 32 nt, Human
uugaguugugugcggguggcugugcauugggg

SEQ ID NO: 272940 - RNA, 32 nt, Human
uugaguuguguguuacuggggguggggugggg

SEQ ID NO: 272941 - RNA, 32 nt, Human
uugaguuguucgcaccacugcaccacaacuca

SEQ ID NO: 272942 - RNA, 32 nt, Human
uugaguuucauucacacaaaacauggacauca

SEQ ID NO: 272943 - RNA, 32 nt, Human
uugaguuuggaauccagaacagauuccaggcu

SEQ ID NO: 272944 - RNA, 32 nt, Human
uugaguuuguguccuggaagucccagacucgg

SEQ ID NO: 272945 - RNA, 32 nt, Human
uugauaaagauuaaggacauguucuuugguca

SEQ ID NO: 272946 - RNA, 32 nt, Human
uugauaaauuaguggagaaauggcauuuuaag

SEQ ID NO: 272947 - RNA, 32 nt, Human
uugauaacaaucuaaauaagcugcaguugaag

SEQ ID NO: 272948 - RNA, 32 nt, Human
uugauaacaucuuaucaggagacgguuuugag

SEQ ID NO: 272949 - RNA, 32 nt, Human
uugauaaccauguaauuucuuagaaccauggc

SEQ ID NO: 272950 - RNA, 32 nt, Human
uugauaaguuuacauaaacagaaauaaaagau

SEQ ID NO: 272951 - RNA, 32 nt, Human
uugauaaucuugacccguacacugccuuuggu

SEQ ID NO: 272952 - RNA, 32 nt, Human
uugauaauugaauauuucaaagagaucagcau

SEQ ID NO: 272953 - RNA, 32 nt, Human
uugauaauuuguuguugagagcuguucauucu

SEQ ID NO: 272954 - RNA, 32 nt, Human
uugauacaaaugucaacuccagccccugucau

SEQ ID NO: 272955 - RNA, 32 nt, Human
uugauacacagcaaagcauuccuaugguaaaa

SEQ ID NO: 272956 - RNA, 32 nt, Human
uugauacauacagguuagcuguuacaaaagau

SEQ ID NO: 272957 - RNA, 32 nt, Human
uugauacauagagagccacacugaggagaagc

SEQ ID NO: 272958 - RNA, 32 nt, Human
uugauacauguugccaaccacccuccagaaag

SEQ ID NO: 272959 - RNA, 32 nt, Human
uugauaccagccugaccaacauggagaaaccc

SEQ ID NO: 272960 - RNA, 32 nt, Human
uugauaccagccuggccaacauggugaaaccc

SEQ ID NO: 272961 - RNA, 32 nt, Human
uugauaccuugcaaaaguauugcuucugaaag

SEQ ID NO: 272962 - RNA, 32 nt, Human
uugauaccuugcaauaguauugcuucugaaag

SEQ ID NO: 272963 - RNA, 32 nt, Human
uugauacuuggaccccaggucuggagauuggg

SEQ ID NO: 272964 - RNA, 32 nt, Human
uugauacuuuucucaaauuaaguuuaaauaua

SEQ ID NO: 272965 - RNA, 31 nt, Human
uugauagaacaauacuuucaguuauguugca

SEQ ID NO: 272966 - RNA, 32 nt, Human
uugauagaauauucauuuuauggcaaggaaau

SEQ ID NO: 272967 - RNA, 32 nt, Human
uugauagagaagggacagggaacagaaccuuc

SEQ ID NO: 272968 - RNA, 32 nt, Human
uugauagcaaacacugggggcaccuuaagauu

SEQ ID NO: 272969 - RNA, 32 nt, Human
uugauagcacgcuauucuuuccuucauggcac

SEQ ID NO: 272970 - RNA, 32 nt, Human
uugauagcugggacugaauagaagaaaacggg

SEQ ID NO: 272971 - RNA, 32 nt, Human
uugauaggagcugguugaccuuguacagaacc

SEQ ID NO: 272972 - RNA, 32 nt, Human
uugauaggccaugccuugccacuuuacaaguu

SEQ ID NO: 272973 - RNA, 32 nt, Human
uugauaggcugaggcagguggauugcuugagc

SEQ ID NO: 272974 - RNA, 32 nt, Human
uugauaggcuguguguuucuaagaauuugucc

SEQ ID NO: 272975 - RNA, 32 nt, Human
uugauagguuuugcaaagacuugguccugcca

SEQ ID NO: 272976 - RNA, 32 nt, Human
uugauaguaaaaaggcaggugauggaaaucag

SEQ ID NO: 272977 - RNA, 32 nt, Human
uugauagucugaggcugggccucugccuuugu

SEQ ID NO: 272978 - RNA, 32 nt, Human
uugauauaaucagcucaugaaugcacagcuau

SEQ ID NO: 272979 - RNA, 32 nt, Human
uugauauauagcauuguacauaugacaagucu

SEQ ID NO: 272980 - RNA, 32 nt, Human
uugauaucauuuccuagacucuacuccaugau

SEQ ID NO: 272981 - RNA, 32 nt, Human
uugauauccagaaauuagaaagaacguccaau

SEQ ID NO: 272982 - RNA, 32 nt, Human
uugauauccugcaaaugaaggaggaggauguc

SEQ ID NO: 272983 - RNA, 32 nt, Human
uugauaucucccagagguacagaaacaggauu

SEQ ID NO: 272984 - RNA, 32 nt, Human
uugauauggaaagcugaugagagagcaucucu

SEQ ID NO: 272985 - RNA, 32 nt, Human
uugauauggaguuuugcucuuguugcccaggc

SEQ ID NO: 272986 - RNA, 32 nt, Human
uugauaugggaacugaaggccagccaggggag

SEQ ID NO: 272987 - RNA, 32 nt, Human
uugauaugucugcaugcagcacagaacuuuga

SEQ ID NO: 272988 - RNA, 32 nt, Human
uugauauuagauacauuaaagcacugaauuuu

SEQ ID NO: 272989 - RNA, 32 nt, Human
uugauauucauuccccaauucacugcaaggag

SEQ ID NO: 272990 - RNA, 32 nt, Human
uugauauucucccauuuucacugcccaacuaa

SEQ ID NO: 272991 - RNA, 32 nt, Human
uugauauucuguucagaacuuucuuuagacua

SEQ ID NO: 272992 - RNA, 32 nt, Human
uugauauucuuuaaguuaguugcucacacacu

SEQ ID NO: 272993 - RNA, 32 nt, Human
uugauauuugaaauguuauguacuggaaaggc

SEQ ID NO: 272994 - RNA, 22 nt, Human
uugauauuuuuagcaguuccaa

SEQ ID NO: 272995 - RNA, 21 nt, Human
uugaucaacaucucccugaca

SEQ ID NO: 272996 - RNA, 32 nt, Human
uugaucaaggagaaggagagaaaacaccugaa

SEQ ID NO: 272997 - RNA, 32 nt, Human
uugaucacaccacugcacuccagccugggcaa

SEQ ID NO: 272998 - RNA, 32 nt, Human
uugaucacccuggcugacauguuucuggaagu

SEQ ID NO: 272999 - RNA, 32 nt, Human
uugaucacgccacugcacuccagccuggguga

SEQ ID NO: 273000 - RNA, 32 nt, Human
uugaucacugcucuccaucccauguaccacaa

SEQ ID NO: 273001 - RNA, 32 nt, Human
uugaucacuugcaggcccggguucugugugcc

SEQ ID NO: 273002 - RNA, 32 nt, Human
uugaucagacagcuugaaucagcaucucuucu

SEQ ID NO: 273003 - RNA, 32 nt, Human
uugaucagacccuucucuuaacagagagauac

SEQ ID NO: 273004 - RNA, 32 nt, Human
uugaucagacccuucucuuaauagagagauac

SEQ ID NO: 273005 - RNA, 25 nt, Human
uugaucagcccuuuuucccauccug

SEQ ID NO: 273006 - RNA, 32 nt, Human
uugaucagggccugagaugcugaccugccagu

SEQ ID NO: 273007 - RNA, 32 nt, Human
uugaucauauucaacagaaauccaccauauaa

SEQ ID NO: 273008 - RNA, 32 nt, Human
uugaucaucacuucuucagccaucucacugaa

SEQ ID NO: 273009 - RNA, 32 nt, Human
uugaucauuuugaggcugggugcaguggcuca

SEQ ID NO: 273010 - RNA, 32 nt, Human
uugauccacuggcauuugcugcccucuugucc

SEQ ID NO: 273011 - RNA, 32 nt, Human
uugauccagaagccagaggauggacuaagugg

SEQ ID NO: 273012 - RNA, 32 nt, Human
uugauccagcaauaccccacuucaccuacaau

SEQ ID NO: 273013 - RNA, 32 nt, Human
uugauccaggaauauuucaaccagagacacaa

SEQ ID NO: 273014 - RNA, 32 nt, Human
uugauccaggaggucccacuguggcguuucau

SEQ ID NO: 273015 - RNA, 32 nt, Human
uugauccaugaguuguuucuccaacucuucga

SEQ ID NO: 273016 - RNA, 32 nt, Human
uugaucccaggaggcggagguugcagugaguu

SEQ ID NO: 273017 - RNA, 32 nt, Human
uugaucccaggaggucgagaccagccugggga

SEQ ID NO: 273018 - RNA, 32 nt, Human
uugaucccaggaguuugagaccagccugggca

SEQ ID NO: 273019 - RNA, 32 nt, Human
uugaucccucuacaagagggucuggggccagc

SEQ ID NO: 273020 - RNA, 32 nt, Human
uugaucccugugccaucuccagacccucaaac

SEQ ID NO: 273021 - RNA, 32 nt, Human
uugauccggggagguggaaguugcagugggcc

SEQ ID NO: 273022 - RNA, 32 nt, Human
uugauccuacagccaagcuccaagucaguaua

SEQ ID NO: 273023 - RNA, 32 nt, Human
uugauccucaaaggacuguggccaaggccucu

SEQ ID NO: 273024 - RNA, 32 nt, Human
uugauccuccaaauaacucucuucuaauuccu

SEQ ID NO: 273025 - RNA, 32 nt, Human
uugauccuccaaugucuaauuuucuuuccgac

SEQ ID NO: 273026 - RNA, 32 nt, Human
uugauccucugccuccccuuccucuucuuguu

SEQ ID NO: 273027 - RNA, 32 nt, Human
uugauccucuucuuccucugcugggccucgca

SEQ ID NO: 273028 - RNA, 32 nt, Human
uugauccugggaguucgagaccagccugggca

SEQ ID NO: 273029 - RNA, 32 nt, Human
uugauccugucaccaaccauaugaaguaggca

SEQ ID NO: 273030 - RNA, 32 nt, Human
uugauccuugauaaugccuccgacaaauauuu

SEQ ID NO: 273031 - RNA, 32 nt, Human
uugauccuugcuaccccucuaccugcugcugu

SEQ ID NO: 273032 - RNA, 32 nt, Human
uugaucgccacagccccagacagggagugagu

SEQ ID NO: 273033 - RNA, 16 nt, Human
uugaucgcuggcccug

SEQ ID NO: 273034 - RNA, 32 nt, Human
uugaucgguaaaauccaagcucucucagcuga

SEQ ID NO: 273035 - RNA, 32 nt, Human
uugaucgugcagcugcugggcacgcccaguga

SEQ ID NO: 273036 - RNA, 32 nt, Human
uugaucgugccacugcacuccagccuggggga

SEQ ID NO: 273037 - RNA, 32 nt, Human
uugaucuagaacgcucuugauuuuggaauuau

SEQ ID NO: 273038 - RNA, 32 nt, Human
uugaucuagaagcagaggaaucccagcgccuu

SEQ ID NO: 273039 - RNA, 32 nt, Human
uugaucucaaaacagcuugacagagcaacugu

SEQ ID NO: 273040 - RNA, 32 nt, Human
uugaucucaagcgauccucccugccucggccu

SEQ ID NO: 273041 - RNA, 32 nt, Human
uugaucucaagggcaucuuggaaguauuugac

SEQ ID NO: 273042 - RNA, 32 nt, Human
uugaucucaggagguugaggcugcagugaauu

SEQ ID NO: 273043 - RNA, 32 nt, Human
uugaucucauuugccagcaaaauaauauuaua

SEQ ID NO: 273044 - RNA, 32 nt, Human
uugaucuccacauuuucucaggaguaguucgg

SEQ ID NO: 273045 - RNA, 32 nt, Human
uugaucucccagaagugcuggcccucccccag

SEQ ID NO: 273046 - RNA, 32 nt, Human
uugaucucccuucaguuaauuaggcaaggcua

SEQ ID NO: 273047 - RNA, 32 nt, Human
uugaucuccucuccuuccucuggccaguccug

SEQ ID NO: 273048 - RNA, 32 nt, Human
uugaucucucuacaacauuuauccuggucguu

SEQ ID NO: 273049 - RNA, 32 nt, Human
uugaucucucuggccucccaccaggaaugccg

SEQ ID NO: 273050 - RNA, 32 nt, Human
uugaucucugccucccugucacaacgcugccc

SEQ ID NO: 273051 - RNA, 32 nt, Human
uugaucugaauuaagcugucugccauuuggag

SEQ ID NO: 273052 - RNA, 32 nt, Human
uugaucugcaugucuguuuacacuucucugua

SEQ ID NO: 273053 - RNA, 32 nt, Human
uugaucugcccaggaaagggaugcauugacac

SEQ ID NO: 273054 - RNA, 32 nt, Human
uugaucugggagaugagacgggauccuucaug

SEQ ID NO: 273055 - RNA, 32 nt, Human
uugaucuggugggucuuugggguggggcccaa

SEQ ID NO: 273056 - RNA, 32 nt, Human
uugaucuuauuugccucaucuuccucaugguu

SEQ ID NO: 273057 - RNA, 32 nt, Human
uugaucuucucagccaggagaagaggguggug

SEQ ID NO: 273058 - RNA, 32 nt, Human
uugaucuucucuuccaccucucuggcucucau

SEQ ID NO: 273059 - RNA, 32 nt, Human
uugaucuuguauugaucagugccaauguacug

SEQ ID NO: 273060 - RNA, 32 nt, Human
uugaucuugucucucaggcuggguugcaaugg

SEQ ID NO: 273061 - RNA, 32 nt, Human
uugaucuuugccuguuacugcugucuagacgc

SEQ ID NO: 273062 - RNA, 32 nt, Human
uugaugaaaauguugcacauucuauaguugca

SEQ ID NO: 273063 - RNA, 32 nt, Human
uugaugaaagcacuagguaggggccagcaaau

SEQ ID NO: 273064 - RNA, 31 nt, Human
uugaugaacaauaaauauuuguugaacaaau

SEQ ID NO: 273065 - RNA, 32 nt, Human
uugaugaacagccucauuuccccagcuucccu

SEQ ID NO: 273066 - RNA, 32 nt, Human
uugaugaaccaauucacaagaggcuaggcccu

SEQ ID NO: 273067 - RNA, 32 nt, Human
uugaugaaccaauuuucugcagccucuuuuug

SEQ ID NO: 273068 - RNA, 32 nt, Human
uugaugaagagaaugaauggaagguauuggaa

SEQ ID NO: 273069 - RNA, 32 nt, Human
uugaugaaguagauugguuggaguagaaaaau

SEQ ID NO: 273070 - RNA, 32 nt, Human
uugaugacaagaaagauccccuccucuaccag

SEQ ID NO: 273071 - RNA, 32 nt, Human
uugaugacagaagugugagaccagcccagcca

SEQ ID NO: 273072 - RNA, 32 nt, Human
uugaugacaugggauugaguugguuaccuauu

SEQ ID NO: 273073 - RNA, 32 nt, Human
uugaugaccuaaaaagggauuauuucugagga

SEQ ID NO: 273074 - RNA, 32 nt, Human
uugaugacuuccucaaggccaaggccacauuc

SEQ ID NO: 273075 - RNA, 32 nt, Human
uugaugacuuccucaaggcuaaggccacauuc

SEQ ID NO: 273076 - RNA, 32 nt, Human
uugaugacuuccucaaugccaaggccacguuc

SEQ ID NO: 273077 - RNA, 32 nt, Human
uugaugacuucuagcaagccucgcuaaccucg

SEQ ID NO: 273078 - RNA, 32 nt, Human
uugaugagcaagacauacugaaugcauauuuc

SEQ ID NO: 273079 - RNA, 32 nt, Human
uugaugagcggcagcagcaggagccuggagcg

SEQ ID NO: 273080 - RNA, 32 nt, Human
uugaugaggaggugguggccugugauggcaag

SEQ ID NO: 273081 - RNA, 32 nt, Human
uugaugaggcuggagugcaguggcgcgaucuu

SEQ ID NO: 273082 - RNA, 32 nt, Human
uugaugaggggguaggaggggaagaagacagc

SEQ ID NO: 273083 - RNA, 32 nt, Human
uugaugauggcgguggagguggugguuguagu

SEQ ID NO: 273084 - RNA, 32 nt, Human
uugaugauguccuuauucauugccagguuaua

SEQ ID NO: 273085 - RNA, 32 nt, Human
uugaugcacaguuugaaaaugaugaaugaauu

SEQ ID NO: 273086 - RNA, 32 nt, Human
uugaugcacaucuggagccacuggagcuccuu

SEQ ID NO: 273087 - RNA, 32 nt, Human
uugaugcaccauugccacuguaauauugcugu

SEQ ID NO: 273088 - RNA, 32 nt, Human
uugaugcagagcuuuuuagccaugaagaaucu

SEQ ID NO: 273089 - RNA, 32 nt, Human
uugaugcagaugcuaugcuuucacuucucaug

SEQ ID NO: 273090 - RNA, 32 nt, Human
uugaugcagcuuuaagaugguggggaggaugg

SEQ ID NO: 273091 - RNA, 32 nt, Human
uugaugcaguuuguuggaaugacauugggcug

SEQ ID NO: 273092 - RNA, 32 nt, Human
uugaugcauaugcaccacauuauuauauuucc

SEQ ID NO: 273093 - RNA, 32 nt, Human
uugaugccagacaucaccagguuguagaaguu

SEQ ID NO: 273094 - RNA, 32 nt, Human
uugaugccaggaguucaagaccagccugggca

SEQ ID NO: 273095 - RNA, 32 nt, Human
uugaugccaggaguucgagaccagccuggcca

SEQ ID NO: 273096 - RNA, 32 nt, Human
uugaugccauuuuaccaguagaaggaugaaaa

SEQ ID NO: 273097 - RNA, 32 nt, Human
uugaugcccuugaauagccugaagaugaaggg

SEQ ID NO: 273098 - RNA, 32 nt, Human
uugaugccguucccugaacauaggaaaauaga

SEQ ID NO: 273099 - RNA, 32 nt, Human
uugaugcugcuugggccuggcccaguggcggg

SEQ ID NO: 273100 - RNA, 32 nt, Human
uugaugcuguggcucaguuugccuuccugaau

SEQ ID NO: 273101 - RNA, 21 nt, Human
uugaugcuuauguagugccuu

SEQ ID NO: 273102 - RNA, 32 nt, Human
uugaugcuucaguuuugaaguggauucugcac

SEQ ID NO: 273103 - RNA, 32 nt, Human
uugauggacccugagagagguggucccuccag

SEQ ID NO: 273104 - RNA, 32 nt, Human
uugauggagacuccauggaggcucccuccaca

SEQ ID NO: 273105 - RNA, 32 nt, Human
uugauggagauacaacaggaacuccaguggac

SEQ ID NO: 273106 - RNA, 32 nt, Human
uugauggaggcuggagcuuguguuuuaggauc

SEQ ID NO: 273107 - RNA, 32 nt, Human
uugauggaguuucgcuguuguugcccaggcug

SEQ ID NO: 273108 - RNA, 32 nt, Human
uugauggaugagggagaaagacacagucaguu

SEQ ID NO: 273109 - RNA, 28 nt, Human
uugauggcacauacuuuuagaggaugcu

SEQ ID NO: 273110 - RNA, 32 nt, Human
uugauggcaucugcagacucuguuuccaaaua

SEQ ID NO: 273111 - RNA, 32 nt, Human
uugauggcuggggccagucucuugucacuuug

SEQ ID NO: 273112 - RNA, 32 nt, Human
uugauggcuguucauuucacccaguauaagca

SEQ ID NO: 273113 - RNA, 32 nt, Human
uugaugggagcagaacuuuucuaagauacugu

SEQ ID NO: 273114 - RNA, 21 nt, Human
uugaugggauuguuuggaugu

SEQ ID NO: 273115 - RNA, 32 nt, Human
uugaugggcauuucuuuuaagacagagcagaa

SEQ ID NO: 273116 - RNA, 32 nt, Human
uugaugggccaucuugauuuucuucuggaugu

SEQ ID NO: 273117 - RNA, 32 nt, Human
uugaugggccuccccaaaucuaauuuaaagca

SEQ ID NO: 273118 - RNA, 28 nt, Human
uugaugggggaagagggugguucagccu

SEQ ID NO: 273119 - RNA, 32 nt, Human
uugaugggggcugugaguggggcagugugaua

SEQ ID NO: 273120 - RNA, 32 nt, Human
uugauggggguuuaaugauuugcucaaaguca

SEQ ID NO: 273121 - RNA, 32 nt, Human
uugauggugcuagaagaauuugagaagaaaua

SEQ ID NO: 273122 - RNA, 24 nt, Human
uugauggugcuccccuuccugcca

SEQ ID NO: 273123 - RNA, 32 nt, Human
uugauggugcuccccuuccugccagcgucaga

SEQ ID NO: 273124 - RNA, 32 nt, Human
uugaugguuuuguguuagucuuccugcagcug

SEQ ID NO: 273125 - RNA, 22 nt, Human
uugauguaaaaggaacagaaag

SEQ ID NO: 273126 - RNA, 32 nt, Human
uugauguacagaacacaaaugucuaguuucua

SEQ ID NO: 273127 - RNA, 32 nt, Human
uugauguacauacucauguuuuacaucuuuuc

SEQ ID NO: 273128 - RNA, 32 nt, Human
uugauguagaugaaccuguucacuggaaaauu

SEQ ID NO: 273129 - RNA, 32 nt, Human
uugauguaguuuugcuucuugcuuuauccauu

SEQ ID NO: 273130 - RNA, 32 nt, Human
uugauguauguuaauaaaagcauuucaggcug

SEQ ID NO: 273131 - RNA, 32 nt, Human
uugaugucauagggagcggggagcugcauucc

SEQ ID NO: 273132 - RNA, 32 nt, Human
uugauguccaguucuugucagaggaggcuugu

SEQ ID NO: 273133 - RNA, 32 nt, Human
uugauguccugcaaaugaaggaggaggauguc

SEQ ID NO: 273134 - RNA, 32 nt, Human
uugaugucuccccuggaaaccccaggaccaca

SEQ ID NO: 273135 - RNA, 32 nt, Human
uugaugucugagcuuuccagugcaaugugaau

SEQ ID NO: 273136 - RNA, 32 nt, Human
uugaugucuuguuuccugagccugugucaaau

SEQ ID NO: 273137 - RNA, 32 nt, Human
uugaugugaacccagugaucaguggaauuguc

SEQ ID NO: 273138 - RNA, 32 nt, Human
uugaugugcuuguuugacauuugucucauuaa

SEQ ID NO: 273139 - RNA, 32 nt, Human
uugauguggaaagaaguugacagaggguugca

SEQ ID NO: 273140 - RNA, 32 nt, Human
uugauguggccaagccuuucccucccuaccug

SEQ ID NO: 273141 - RNA, 32 nt, Human
uugaugugggagaaaaagcgacuggggcuugc

SEQ ID NO: 273142 - RNA, 32 nt, Human
uugauguggucuggccccuugucuaugaucuu

SEQ ID NO: 273143 - RNA, 32 nt, Human
uugauguguugagcuggaggugaguggaccgg

SEQ ID NO: 273144 - RNA, 32 nt, Human
uugauguuaucagacagagcacugacuaugua

SEQ ID NO: 273145 - RNA, 32 nt, Human
uugauguuccagcucaccagaagauucuuaca

SEQ ID NO: 273146 - RNA, 32 nt, Human
uugauguucuuccuuuucacauuucagaaucg

SEQ ID NO: 273147 - RNA, 32 nt, Human
uugauuaacauggaaggggaaauaugauagau

SEQ ID NO: 273148 - RNA, 24 nt, Human
uugauuaagugggaaguguuuuga

SEQ ID NO: 273149 - RNA, 32 nt, Human
uugauuacaccccugcacuccagccugggcgg

SEQ ID NO: 273150 - RNA, 32 nt, Human
uugauuacaggcaaugagagcugugagugggg

SEQ ID NO: 273151 - RNA, 32 nt, Human
uugauuacccaagaguucaaggcugcagugaa

SEQ ID NO: 273152 - RNA, 32 nt, Human
uugauuagcuguucuucuacaucacauuguua

SEQ ID NO: 273153 - RNA, 32 nt, Human
uugauuauaccacugcacuccagccuggguga

SEQ ID NO: 273154 - RNA, 32 nt, Human
uugauuaugaauagaagguagugaagaaaagc

SEQ ID NO: 273155 - RNA, 32 nt, Human
uugauuauuccauuuaugcuggagauuacaaa

SEQ ID NO: 273156 - RNA, 32 nt, Human
uugauuauuuccaguguuauguuuucauguaa

SEQ ID NO: 273157 - RNA, 32 nt, Human
uugauuauuugaaucuuacagcaacaaauagg

SEQ ID NO: 273158 - RNA, 32 nt, Human
uugauucaacaaugcuauaaucuguuacucuc

SEQ ID NO: 273159 - RNA, 32 nt, Human
uugauucagccuggagaugguggaagagauaa

SEQ ID NO: 273160 - RNA, 32 nt, Human
uugauucagcuggucugaaucucugaauuuau

SEQ ID NO: 273161 - RNA, 32 nt, Human
uugauucauugcaggucucaggcacagguuga

SEQ ID NO: 273162 - RNA, 31 nt, Human
uugauuccacuuuucugcauagccgguagaa

SEQ ID NO: 273163 - RNA, 32 nt, Human
uugauuccagugagggagaaagugaucugcag

SEQ ID NO: 273164 - RNA, 32 nt, Human
uugauuccaucucaagacaauuugucaaauac

SEQ ID NO: 273165 - RNA, 32 nt, Human
uugauuccaugucuuugcuauugugaauagug

SEQ ID NO: 273166 - RNA, 32 nt, Human
uugauuccaugucuuugcuauugugaauauug

SEQ ID NO: 273167 - RNA, 32 nt, Human
uugauuccauguuuuugcuauuguaaauagug

SEQ ID NO: 273168 - RNA, 32 nt, Human
uugauuccauguuuuugcuauugugaauagug

SEQ ID NO: 273169 - RNA, 32 nt, Human
uugauucccagaggaguuggugcuucacauca

SEQ ID NO: 273170 - RNA, 32 nt, Human
uugauuccugcccaacagucccugccagauac

SEQ ID NO: 273171 - RNA, 32 nt, Human
uugauuccugugaguagggcucagggauuuau

SEQ ID NO: 273172 - RNA, 32 nt, Human
uugauuccuuaucuuugcuauugugaacagug

SEQ ID NO: 273173 - RNA, 32 nt, Human
uugauucucagcacuuacuaauuguguggaca

SEQ ID NO: 273174 - RNA, 32 nt, Human
uugauucucagccugguagaugcugguguaua

SEQ ID NO: 273175 - RNA, 32 nt, Human
uugauucucagccugguagauguugguguaua

SEQ ID NO: 273176 - RNA, 32 nt, Human
uugauucucauuuuaccauagcuuauauucuc

SEQ ID NO: 273177 - RNA, 32 nt, Human
uugauucuccagccugggcaacggagugagac

SEQ ID NO: 273178 - RNA, 31 nt, Human
uugauucugcccacagggccugugccaaggc

SEQ ID NO: 273179 - RNA, 32 nt, Human
uugauucugccuuaaucaaccccagcccaugu

SEQ ID NO: 273180 - RNA, 32 nt, Human
uugauucuguaucuacagaagucauguaacug

SEQ ID NO: 273181 - RNA, 32 nt, Human
uugauucugugucuuugcuauuguaaauagug

SEQ ID NO: 273182 - RNA, 24 nt, Human
uugauucuguucgcaaagcacaga

SEQ ID NO: 273183 - RNA, 32 nt, Human
uugauugaaagaguuaugaucuaaagaccugg

SEQ ID NO: 273184 - RNA, 32 nt, Human
uugauugaauccuaauuuagacaagccauaac

SEQ ID NO: 273185 - RNA, 32 nt, Human
uugauugacagagagguugaccuuaugaugag

SEQ ID NO: 273186 - RNA, 32 nt, Human
uugauugacuaaaucaggauggaaaugauggc

SEQ ID NO: 273187 - RNA, 32 nt, Human
uugauugagcaucuacaaugugccaguuguag

SEQ ID NO: 273188 - RNA, 32 nt, Human
uugauugagccuccaccucugggauuuuucuu

SEQ ID NO: 273189 - RNA, 32 nt, Human
uugauugaucucucaugucucccuaaaaugua

SEQ ID NO: 273190 - RNA, 32 nt, Human
uugauugcaccacugcacucuagccugcguga

SEQ ID NO: 273191 - RNA, 32 nt, Human
uugauugcaccacugcacucuagccuggggaa

SEQ ID NO: 273192 - RNA, 32 nt, Human
uugauugcauagcuccucauguuucuacacuc

SEQ ID NO: 273193 - RNA, 32 nt, Human
uugauugccgcuccggucccaggagggaugga

SEQ ID NO: 273194 - RNA, 32 nt, Human
uugauugcuaugcagguuugggagaggaggcc

SEQ ID NO: 273195 - RNA, 32 nt, Human
uugauugcugaagaaguauguuuaagagggag

SEQ ID NO: 273196 - RNA, 32 nt, Human
uugauugcugcagaaauguccuaugcacucuu

SEQ ID NO: 273197 - RNA, 32 nt, Human
uugauugcugugccucauuacaaaugcauaug

SEQ ID NO: 273198 - RNA, 32 nt, Human
uugauugcuuuuguauuuaauucugcaggugu

SEQ ID NO: 273199 - RNA, 32 nt, Human
uugauuggaagaaaggaagucgcagccccugc

SEQ ID NO: 273200 - RNA, 32 nt, Human
uugauugggaaugggguagggggaggaguugu

SEQ ID NO: 273201 - RNA, 32 nt, Human
uugauuggguagaucuggguuaggagcuggga

SEQ ID NO: 273202 - RNA, 32 nt, Human
uugauugguucagaaucuggggcaggauggaa

SEQ ID NO: 273203 - RNA, 32 nt, Human
uugauugguuuuccuguaggcuggaaguaaaa

SEQ ID NO: 273204 - RNA, 25 nt, Human
uugauuguauggauguaaguguucu

SEQ ID NO: 273205 - RNA, 32 nt, Human
uugauugucccuggauggagugcagucaccuu

SEQ ID NO: 273206 - RNA, 32 nt, Human
uugauugugucaccccaucacagcucaguguu

SEQ ID NO: 273207 - RNA, 32 nt, Human
uugauugugucacugcacuccagccugggcaa

SEQ ID NO: 273208 - RNA, 32 nt, Human
uugauugugucacugcacuccagcuuggguga

SEQ ID NO: 273209 - RNA, 32 nt, Human
uugauugugugguucauuuuuguauuuauuuc

SEQ ID NO: 273210 - RNA, 32 nt, Human
uugauuguugaaugauagaugaaguauugcug

SEQ ID NO: 273211 - RNA, 32 nt, Human
uugauuguuugaagucuauggaagaaauaguu

SEQ ID NO: 273212 - RNA, 32 nt, Human
uugauuuaaucagcaacauagaccuugcagcg

SEQ ID NO: 273213 - RNA, 32 nt, Human
uugauuuacaauuguccccacccuuuuauaua

SEQ ID NO: 273214 - RNA, 32 nt, Human
uugauuuaccugccaagaccugaguucaggcc

SEQ ID NO: 273215 - RNA, 32 nt, Human
uugauuuacuauaagagcugggauuugauuca

SEQ ID NO: 273216 - RNA, 20 nt, Human
uugauuuaguaaguguucug

SEQ ID NO: 273217 - RNA, 32 nt, Human
uugauuuauaaauacaaaaauacauucuccaa

SEQ ID NO: 273218 - RNA, 32 nt, Human
uugauuucaacauuuucucccacccucucggc

SEQ ID NO: 273219 - RNA, 32 nt, Human
uugauuucacuuaucauagaacaaauauguau

SEQ ID NO: 273220 - RNA, 32 nt, Human
uugauuucagccacaccccugcagcccugcau

SEQ ID NO: 273221 - RNA, 32 nt, Human
uugauuucagugccuguuggggacuugauuuc

SEQ ID NO: 273222 - RNA, 32 nt, Human
uugauuuccaagaaucggcauguauacuuaau

SEQ ID NO: 273223 - RNA, 32 nt, Human
uugauuucccacuccuagaugcuaaagagacu

SEQ ID NO: 273224 - RNA, 32 nt, Human
uugauuuccuaccucaguguacacucaacuau

SEQ ID NO: 273225 - RNA, 32 nt, Human
uugauuuccucuucucucccuucaagccccac

SEQ ID NO: 273226 - RNA, 32 nt, Human
uugauuucggcaagcuggaauggcccaccagc

SEQ ID NO: 273227 - RNA, 32 nt, Human
uugauuucuaacuccuugucugaauccugcuu

SEQ ID NO: 273228 - RNA, 32 nt, Human
uugauuucucauugaccaggguuuguucuugg

SEQ ID NO: 273229 - RNA, 20 nt, Human
uugauuucugaggaucucag

SEQ ID NO: 273230 - RNA, 32 nt, Human
uugauuucugcccagggauuugcucaccccaa

SEQ ID NO: 273231 - RNA, 32 nt, Human
uugauuucuggaccacugaugcuguugcugag

SEQ ID NO: 273232 - RNA, 32 nt, Human
uugauuugaaagacacuggcucugccacuuaa

SEQ ID NO: 273233 - RNA, 32 nt, Human
uugauuugaacaaauuuucuggugcuaagucu

SEQ ID NO: 273234 - RNA, 32 nt, Human
uugauuugaagaaaaagauauuuuggugcuca

SEQ ID NO: 273235 - RNA, 32 nt, Human
uugauuugcauauccuggguguacugagccac

SEQ ID NO: 273236 - RNA, 32 nt, Human
uugauuugcaucuugggaguugcuuggaauuu

SEQ ID NO: 273237 - RNA, 32 nt, Human
uugauuuggagaaauauaaauuucugccagaa

SEQ ID NO: 273238 - RNA, 32 nt, Human
uugauuuuaaagccucuucauccaggucaguu

SEQ ID NO: 273239 - RNA, 32 nt, Human
uugauuuuaacucauugucacucugauguuca

SEQ ID NO: 273240 - RNA, 32 nt, Human
uugauuuuagccuggugagaccccgagcauau

SEQ ID NO: 273241 - RNA, 32 nt, Human
uugauuuucacugcaacucugccuuugugugu

SEQ ID NO: 273242 - RNA, 32 nt, Human
uugauuuuccaagugguucagaauguaaauau

SEQ ID NO: 273243 - RNA, 32 nt, Human
uugauuuuccacaguucugcaggcuggaaauc

SEQ ID NO: 273244 - RNA, 32 nt, Human
uugauuuuccccucuucuccccaccuccacuc

SEQ ID NO: 273245 - RNA, 32 nt, Human
uugauuuugcauuuugcacuuccucccaggau

SEQ ID NO: 273246 - RNA, 32 nt, Human
uugauuuugccucccaacaccauuucuuuuua

SEQ ID NO: 273247 - RNA, 32 nt, Human
uugauuuuggcccucugauguauugcuagagc

SEQ ID NO: 273248 - RNA, 32 nt, Human
uugauuuuguauccugagacucugcugaaguu

SEQ ID NO: 273249 - RNA, 32 nt, Human
uugauuuuguauccugagacuuugcugaaguu

SEQ ID NO: 273250 - RNA, 32 nt, Human
uugauuuuguuuguuuucucgugagcuuaggc

SEQ ID NO: 273251 - RNA, 32 nt, Human
uugauuuuucuuguuaaucagaauuccuauuc

SEQ ID NO: 273252 - RNA, 32 nt, Human
uugcaaaaagggcacggggcagagggacuaug

SEQ ID NO: 273253 - RNA, 32 nt, Human
uugcaaaacagcuuuaauccuugaguauauuu

SEQ ID NO: 273254 - RNA, 32 nt, Human
uugcaaaacccgccuccagccuccagcagcaa

SEQ ID NO: 273255 - RNA, 23 nt, Human
uugcaaaagaaaguaacaugauc

SEQ ID NO: 273256 - RNA, 32 nt, Human
uugcaaaauagaagaagaggaaguuagagaua

SEQ ID NO: 273257 - RNA, 32 nt, Human
uugcaaaauguucuuucaguuuuuagaaccuc

SEQ ID NO: 273258 - RNA, 32 nt, Human
uugcaaacagcaauggauuaggauauggaaau

SEQ ID NO: 273259 - RNA, 32 nt, Human
uugcaaaccgaguacugcuguaaauacuaugu

SEQ ID NO: 273260 - RNA, 32 nt, Human
uugcaaacuacaccuccacccacugggcugaa

SEQ ID NO: 273261 - RNA, 32 nt, Human
uugcaaacuccuuguuuuauuugcaagugcuu

SEQ ID NO: 273262 - RNA, 32 nt, Human
uugcaaacugaugcuuucuuuaauuguccugg

SEQ ID NO: 273263 - RNA, 32 nt, Human
uugcaaacuggcauuucaucaguggcuaaauu

SEQ ID NO: 273264 - RNA, 32 nt, Human
uugcaaagacacaggcguauacccacaaaaac

SEQ ID NO: 273265 - RNA, 32 nt, Human
uugcaaagaccucaaucaugucagcuuaucuu

SEQ ID NO: 273266 - RNA, 32 nt, Human
uugcaaagacgagguuucaccauguugaccag

SEQ ID NO: 273267 - RNA, 32 nt, Human
uugcaaagagguuucuagacagcagaagaaaa

SEQ ID NO: 273268 - RNA, 32 nt, Human
uugcaaagcagauuuaaugucauguucagcca

SEQ ID NO: 273269 - RNA, 32 nt, Human
uugcaaagccgaggaaucaagccagaugcgag

SEQ ID NO: 273270 - RNA, 32 nt, Human
uugcaaaggaagagcuaagauuaacauaauuu

SEQ ID NO: 273271 - RNA, 32 nt, Human
uugcaaaggaggaggaaaagggaggacuuggu

SEQ ID NO: 273272 - RNA, 32 nt, Human
uugcaaagggccuggggcagagccuggcacau

SEQ ID NO: 273273 - RNA, 32 nt, Human
uugcaaagggcugaggcccagcucugucuggu

SEQ ID NO: 273274 - RNA, 32 nt, Human
uugcaaagucuacauuuuaugcugaaucugca

SEQ ID NO: 273275 - RNA, 32 nt, Human
uugcaaaguucacugucucagcaaaguugaac

SEQ ID NO: 273276 - RNA, 32 nt, Human
uugcaaauacaaaauaaaaauuaguuguuacc

SEQ ID NO: 273277 - RNA, 32 nt, Human
uugcaaauuccaccccuccuucccugguccag

SEQ ID NO: 273278 - RNA, 32 nt, Human
uugcaacaaaaacaaaaauugacaggugggau

SEQ ID NO: 273279 - RNA, 32 nt, Human
uugcaacaaucaauggaaucuucauguauucu

SEQ ID NO: 273280 - RNA, 32 nt, Human
uugcaacacugcaguccagucuggaccacaga

SEQ ID NO: 273281 - RNA, 32 nt, Human
uugcaacacugccacuccagccugggugacag

SEQ ID NO: 273282 - RNA, 32 nt, Human
uugcaacacuggcuggccaucuggccugccug

SEQ ID NO: 273283 - RNA, 32 nt, Human
uugcaacacuguacuccagccugggcaacaga

SEQ ID NO: 273284 - RNA, 32 nt, Human
uugcaaccaccaggcuggugcccugcagcugu

SEQ ID NO: 273285 - RNA, 32 nt, Human
uugcaaccuauccugggagacccuaaaacaua

SEQ ID NO: 273286 - RNA, 32 nt, Human
uugcaaccuccgcuuccuggguucaaacaauu

SEQ ID NO: 273287 - RNA, 31 nt, Human
uugcaaccucugucucccagguucaagcgau

SEQ ID NO: 273288 - RNA, 32 nt, Human
uugcaacggccucagaaguuuggccggagagg

SEQ ID NO: 273289 - RNA, 32 nt, Human
uugcaacucugccucuguucucuugcauucug

SEQ ID NO: 273290 - RNA, 32 nt, Human
uugcaacugcacuccagccugggcuacagagc

SEQ ID NO: 273291 - RNA, 23 nt, Human
uugcaacuggccugagcaacaca

SEQ ID NO: 273292 - RNA, 32 nt, Human
uugcaacugugcccuccacacuauccuuacuu

SEQ ID NO: 273293 - RNA, 32 nt, Human
uugcaacugugccucccucugucuguuuucac

SEQ ID NO: 273294 - RNA, 32 nt, Human
uugcaacuuggacuuguccucagcagcuggua

SEQ ID NO: 273295 - RNA, 32 nt, Human
uugcaacuuuccagaaucuggcccagaaauua

SEQ ID NO: 273296 - RNA, 32 nt, Human
uugcaagaaagaauuugggcgaauccauagag

SEQ ID NO: 273297 - RNA, 32 nt, Human
uugcaagaaagaggcugccaggccuacaucag

SEQ ID NO: 273298 - RNA, 32 nt, Human
uugcaagaaccuggcucugccugcaugucagc

SEQ ID NO: 273299 - RNA, 32 nt, Human
uugcaagaaguuaggguuaaggagaggugaug

SEQ ID NO: 273300 - RNA, 32 nt, Human
uugcaagaccaccagcuccuggaagcugaguu

SEQ ID NO: 273301 - RNA, 32 nt, Human
uugcaagauggauacuaauuccagcauucucu

SEQ ID NO: 273302 - RNA, 32 nt, Human
uugcaagcagacccaaaagcauuaaggagaaa

SEQ ID NO: 273303 - RNA, 32 nt, Human
uugcaagcucaagugauccuccugacucagcc

SEQ ID NO: 273304 - RNA, 32 nt, Human
uugcaagcucaggccuuuaaggacugcugaug

SEQ ID NO: 273305 - RNA, 32 nt, Human
uugcaagcuccgccucccagguucaagugauu

SEQ ID NO: 273306 - RNA, 32 nt, Human
uugcaaggacaguguauguuguccuuuuggaa

SEQ ID NO: 273307 - RNA, 32 nt, Human
uugcaaggaugggagacugggauagcuuccca

SEQ ID NO: 273308 - RNA, 32 nt, Human
uugcaaguaccacuccauccagccuugggcaa

SEQ ID NO: 273309 - RNA, 32 nt, Human
uugcaagucucccagcccaucucuccgagcag

SEQ ID NO: 273310 - RNA, 32 nt, Human
uugcaaguuauccuguggccagguguggucuc

SEQ ID NO: 273311 - RNA, 22 nt, Human
uugcaaguugcccucccuggca

SEQ ID NO: 273312 - RNA, 32 nt, Human
uugcaauaaaguacauuuugacuuuguuggca

SEQ ID NO: 273313 - RNA, 32 nt, Human
uugcaauaacaucccucuguaccuuuucuggc

SEQ ID NO: 273314 - RNA, 32 nt, Human
uugcaauacauuaacagacccuuuaucaacau

SEQ ID NO: 273315 - RNA, 32 nt, Human
uugcaauauuucagaagcuuuaacugaagugu

SEQ ID NO: 273316 - RNA, 32 nt, Human
uugcaaucaaggccauggcaaaauacuggcuc

SEQ ID NO: 273317 - RNA, 32 nt, Human
uugcaaucccuuaaugucagacucuuaggaaa

SEQ ID NO: 273318 - RNA, 32 nt, Human
uugcaaugaacuauuuucucucaguccggggu

SEQ ID NO: 273319 - RNA, 32 nt, Human
uugcaaugaagcggagguugcagugagccgag

SEQ ID NO: 273320 - RNA, 21 nt, Human
uugcaaugagcuaugauuuca

SEQ ID NO: 273321 - RNA, 30 nt, Human
uugcaauggaaaggacacuugagagaagac

SEQ ID NO: 273322 - RNA, 32 nt, Human
uugcaauggaaauggauuauugaagacacaaa

SEQ ID NO: 273323 - RNA, 31 nt, Human
uugcaauggaucauguccaugccagguguua

SEQ ID NO: 273324 - RNA, 32 nt, Human
uugcaaugggcugccaagaaaacggcugugcu

SEQ ID NO: 273325 - RNA, 32 nt, Human
uugcaauggucugaauguauucucccaaaauu

SEQ ID NO: 273326 - RNA, 32 nt, Human
uugcaauguauuucgcucaucuggacccugca

SEQ ID NO: 273327 - RNA, 32 nt, Human
uugcaauguuaauuauuuagauauuuaauuuc

SEQ ID NO: 273328 - RNA, 32 nt, Human
uugcaauuccagaaugcugggaguuuuacagu

SEQ ID NO: 273329 - RNA, 32 nt, Human
uugcaauuccugcaggccaggggagagaccag

SEQ ID NO: 273330 - RNA, 32 nt, Human
uugcaauucuguaggcuggaagucugacuaug

SEQ ID NO: 273331 - RNA, 32 nt, Human
uugcaauugcagucuucauucauuaucaucaa

SEQ ID NO: 273332 - RNA, 32 nt, Human
uugcacaaagccugguccugaguaggugcccu

SEQ ID NO: 273333 - RNA, 32 nt, Human
uugcacaacaacaacaacaacaaauucacgga

SEQ ID NO: 273334 - RNA, 32 nt, Human
uugcacaacuucaagaaaagcagcucagcuca

SEQ ID NO: 273335 - RNA, 32 nt, Human
uugcacaaguacuggcuggauaccucugaggc

SEQ ID NO: 273336 - RNA, 32 nt, Human
uugcacaauugcacuccagccuggcgacagag

SEQ ID NO: 273337 - RNA, 32 nt, Human
uugcacaauugcuuuaggguaagugaauuaua

SEQ ID NO: 273338 - RNA, 32 nt, Human
uugcacacccaccucucccugcaccugguucu

SEQ ID NO: 273339 - RNA, 32 nt, Human
uugcacaccccagcucugagguggcuucagcg

SEQ ID NO: 273340 - RNA, 32 nt, Human
uugcacaccccagcugugagguggcuucagcg

SEQ ID NO: 273341 - RNA, 32 nt, Human
uugcacaccccucccuguaaccaaggaacacu

SEQ ID NO: 273342 - RNA, 32 nt, Human
uugcacacgccuguaaucccagcugcuuggga

SEQ ID NO: 273343 - RNA, 32 nt, Human
uugcacacucacaauauucucucucagaaauc

SEQ ID NO: 273344 - RNA, 32 nt, Human
uugcacacucacuggcaucuuugcuaugggga

SEQ ID NO: 273345 - RNA, 32 nt, Human
uugcacacucaggcuaucugagauacugguaa

SEQ ID NO: 273346 - RNA, 32 nt, Human
uugcacacugcacuccagccugggugacuagc

SEQ ID NO: 273347 - RNA, 32 nt, Human
uugcacacugccuguucacaugucgcccaggc

SEQ ID NO: 273348 - RNA, 32 nt, Human
uugcacagaacaguuacuuacuguagcaggga

SEQ ID NO: 273349 - RNA, 18 nt, Human
uugcacagaaguaauuca

SEQ ID NO: 273350 - RNA, 32 nt, Human
uugcacagacacacacauauaucaauucucau

SEQ ID NO: 273351 - RNA, 32 nt, Human
uugcacagagcuggagggaggggugagauagg

SEQ ID NO: 273352 - RNA, 32 nt, Human
uugcacagauccccaccugccauccuauagug

SEQ ID NO: 273353 - RNA, 32 nt, Human
uugcacagcaaaaacugcgaggccagaacuag

SEQ ID NO: 273354 - RNA, 19 nt, Human
uugcacagcgguauucuca

SEQ ID NO: 273355 - RNA, 32 nt, Human
uugcacagcucauguacuggcucucacggcca

SEQ ID NO: 273356 - RNA, 32 nt, Human
uugcacagcugauguagacagucaggcaaaac

SEQ ID NO: 273357 - RNA, 32 nt, Human
uugcacagcugcacuccagccugugcugagac

SEQ ID NO: 273358 - RNA, 32 nt, Human
uugcacagcugcugcugacaggucuaccugaa

SEQ ID NO: 273359 - RNA, 32 nt, Human
uugcacaggaaagccuuuauacuugaugagaa

SEQ ID NO: 273360 - RNA, 20 nt, Human
uugcacaggaguucauuuca

SEQ ID NO: 273361 - RNA, 32 nt, Human
uugcacaggcuggucuugaacucuugagcuca

SEQ ID NO: 273362 - RNA, 32 nt, Human
uugcacagggaaaugcagggggcaggacuugg

SEQ ID NO: 273363 - RNA, 18 nt, Human
uugcacaguaugcuuuca

SEQ ID NO: 273364 - RNA, 32 nt, Human
uugcacagucggcugggcggugcaauggcgga

SEQ ID NO: 273365 - RNA, 32 nt, Human
uugcacagugccucaagccccagaguggcuca

SEQ ID NO: 273366 - RNA, 32 nt, Human
uugcacagugccuggcagacauuugacauuca

SEQ ID NO: 273367 - RNA, 18 nt, Human
uugcacaguuaauuuuca

SEQ ID NO: 273368 - RNA, 32 nt, Human
uugcacauacauacaaacacaugcaaacauac

SEQ ID NO: 273369 - RNA, 31 nt, Human
uugcacauagaauauagacucacuuguacau

SEQ ID NO: 273370 - RNA, 20 nt, Human
uugcacaucagaaaguucau

SEQ ID NO: 273371 - RNA, 32 nt, Human
uugcacauccuucaaggggaucuuuaaccucu

SEQ ID NO: 273372 - RNA, 32 nt, Human
uugcacaucuagcauccagaacagugagaaug

SEQ ID NO: 273373 - RNA, 32 nt, Human
uugcacauguuggcaacacacgcauccgcauc

SEQ ID NO: 273374 - RNA, 32 nt, Human
uugcacauucuaggcagccauuuggaagauuc

SEQ ID NO: 273375 - RNA, 32 nt, Human
uugcaccaaauccugucuucagucuuuuguuu

SEQ ID NO: 273376 - RNA, 32 nt, Human
uugcaccaacccugcguggcucuugucugugu

SEQ ID NO: 273377 - RNA, 32 nt, Human
uugcaccaacuuugaagucugauuuuccugga

SEQ ID NO: 273378 - RNA, 32 nt, Human
uugcaccaaggaagcuuuuggggaggaaggaa

SEQ ID NO: 273379 - RNA, 32 nt, Human
uugcaccacagcacucaagccugggugacaga

SEQ ID NO: 273380 - RNA, 32 nt, Human
uugcaccacagcacuccaaccugggugacaga

SEQ ID NO: 273381 - RNA, 32 nt, Human
uugcaccacagcacugcagccuagacaacaga

SEQ ID NO: 273382 - RNA, 32 nt, Human
uugcaccaccacacuccagccugcgcgacaga

SEQ ID NO: 273383 - RNA, 32 nt, Human
uugcaccaccacacuccagccugggugacaag

SEQ ID NO: 273384 - RNA, 32 nt, Human
uugcaccaccacacuccagccugggugacaga

SEQ ID NO: 273385 - RNA, 32 nt, Human
uugcaccaccgcacuccagccugggugacaga

SEQ ID NO: 273386 - RNA, 32 nt, Human
uugcaccacggcacgcuagccugggugacaca

SEQ ID NO: 273387 - RNA, 32 nt, Human
uugcaccacggcacuccagccugggugacaga

SEQ ID NO: 273388 - RNA, 32 nt, Human
uugcaccacuacacuccagccuggaugacaga

SEQ ID NO: 273389 - RNA, 32 nt, Human
uugcaccacuacacuccagccugggcaacaga

SEQ ID NO: 273390 - RNA, 32 nt, Human
uugcaccacuacacuccagccugggugacaaa

SEQ ID NO: 273391 - RNA, 32 nt, Human
uugcaccacuacacuguagccugggugacaaa

SEQ ID NO: 273392 - RNA, 32 nt, Human
uugcaccacugaacuccagccugggccacaua

SEQ ID NO: 273393 - RNA, 32 nt, Human
uugcaccacugcacgccagccugggugaaaga

SEQ ID NO: 273394 - RNA, 32 nt, Human
uugcaccacugcacuacagcuugggugacagc

SEQ ID NO: 273395 - RNA, 32 nt, Human
uugcaccacugcacucaagccugggcaacaga

SEQ ID NO: 273396 - RNA, 32 nt, Human
uugcaccacugcacuccaaccugggcaacaga

SEQ ID NO: 273397 - RNA, 32 nt, Human
uugcaccacugcacuccaaccugggugacaag

SEQ ID NO: 273398 - RNA, 32 nt, Human
uugcaccacugcacuccaaccugggugacaga

SEQ ID NO: 273399 - RNA, 32 nt, Human
uugcaccacugcacuccacagagugagacucc

SEQ ID NO: 273400 - RNA, 32 nt, Human
uugcaccacugcacuccagcccaggcaacaga

SEQ ID NO: 273401 - RNA, 32 nt, Human
uugcaccacugcacuccagccggggugacaga

SEQ ID NO: 273402 - RNA, 32 nt, Human
uugcaccacugcacuccagccuaggcgacaga

SEQ ID NO: 273403 - RNA, 32 nt, Human
uugcaccacugcacuccagccugagugacaga

SEQ ID NO: 273404 - RNA, 32 nt, Human
uugcaccacugcacuccagccugagugaggaa

SEQ ID NO: 273405 - RNA, 32 nt, Human
uugcaccacugcacuccagccuggaaaacgga

SEQ ID NO: 273406 - RNA, 32 nt, Human
uugcaccacugcacuccagccuggcgacaaag

SEQ ID NO: 273407 - RNA, 32 nt, Human
uugcaccacugcacuccagccugggaaacaga

SEQ ID NO: 273408 - RNA, 32 nt, Human
uugcaccacugcacuccagccugggagacaga

SEQ ID NO: 273409 - RNA, 32 nt, Human
uugcaccacugcacuccagccugggcaacaaa

SEQ ID NO: 273410 - RNA, 32 nt, Human
uugcaccacugcacuccagccugggcaacaga

SEQ ID NO: 273411 - RNA, 32 nt, Human
uugcaccacugcacuccagccugggcaauaga

SEQ ID NO: 273412 - RNA, 32 nt, Human
uugcaccacugcacuccagccugggcgacaga

SEQ ID NO: 273413 - RNA, 32 nt, Human
uugcaccacugcacuccagccugggcgacugu

SEQ ID NO: 273414 - RNA, 32 nt, Human
uugcaccacugcacuccagccugggcggcaga

SEQ ID NO: 273415 - RNA, 32 nt, Human
uugcaccacugcacuccagccugggcuacaga

SEQ ID NO: 273416 - RNA, 32 nt, Human
uugcaccacugcacuccagccuggggacagag

SEQ ID NO: 273417 - RNA, 32 nt, Human
uugcaccacugcacuccagccuggguaacaag

SEQ ID NO: 273418 - RNA, 32 nt, Human
uugcaccacugcacuccagccugggugacaga

SEQ ID NO: 273419 - RNA, 32 nt, Human
uugcaccacugcacuccagccugggugauaga

SEQ ID NO: 273420 - RNA, 32 nt, Human
uugcaccacugcacuccagccuggguggcaga

SEQ ID NO: 273421 - RNA, 32 nt, Human
uugcaccacugcacuccagccugggugucaga

SEQ ID NO: 273422 - RNA, 32 nt, Human
uugcaccacugcacuccagccuggugacagag

SEQ ID NO: 273423 - RNA, 32 nt, Human
uugcaccacugcacuccagccuggugacaggg

SEQ ID NO: 273424 - RNA, 32 nt, Human
uugcaccacugcacuccagcgagacucugucu

SEQ ID NO: 273425 - RNA, 32 nt, Human
uugcaccacugcacuccaggcuggguaacaga

SEQ ID NO: 273426 - RNA, 32 nt, Human
uugcaccacugcacuccagucugggcaacaga

SEQ ID NO: 273427 - RNA, 32 nt, Human
uugcaccacugcacuccagucugggugagagu

SEQ ID NO: 273428 - RNA, 32 nt, Human
uugcaccacugcacuccagucugguugagaga

SEQ ID NO: 273429 - RNA, 32 nt, Human
uugcaccacugcacuccauccugggcaacaga

SEQ ID NO: 273430 - RNA, 32 nt, Human
uugcaccacugcacucccuuccaggugaaaga

SEQ ID NO: 273431 - RNA, 32 nt, Human
uugcaccacugcacucuaacuugggcaacaaa

SEQ ID NO: 273432 - RNA, 32 nt, Human
uugcaccacugcacucuacucugggugacaga

SEQ ID NO: 273433 - RNA, 32 nt, Human
uugcaccacugcacucuagccugcgugacaca

SEQ ID NO: 273434 - RNA, 32 nt, Human
uugcaccacugcacucuagccuggggaacaga

SEQ ID NO: 273435 - RNA, 32 nt, Human
uugcaccacugcacucuagccuggguaacaag

SEQ ID NO: 273436 - RNA, 32 nt, Human
uugcaccacugcacugcagccugggaaacaga

SEQ ID NO: 273437 - RNA, 32 nt, Human
uugcaccacugcacuucagccuggugacagag

SEQ ID NO: 273438 - RNA, 32 nt, Human
uugcaccacugcacuucagcuugggcaacaga

SEQ ID NO: 273439 - RNA, 32 nt, Human
uugcaccacugcacuuuagucugggugacaga

SEQ ID NO: 273440 - RNA, 32 nt, Human
uugcaccacugcaguucagccuggaugaugag

SEQ ID NO: 273441 - RNA, 32 nt, Human
uugcaccacugcauuccaaccugggcggcaga

SEQ ID NO: 273442 - RNA, 32 nt, Human
uugcaccacugcauuccagcauggccacaaag

SEQ ID NO: 273443 - RNA, 32 nt, Human
uugcaccacugcauuccagccuggaugacaga

SEQ ID NO: 273444 - RNA, 32 nt, Human
uugcaccacugcauuccagccuggcgacagag

SEQ ID NO: 273445 - RNA, 32 nt, Human
uugcaccacugcucuccagccuggggaacaga

SEQ ID NO: 273446 - RNA, 32 nt, Human
uugcaccacuggacgccagccuaggcaacacu

SEQ ID NO: 273447 - RNA, 32 nt, Human
uugcaccacuguacuccaaccugggcgacaga

SEQ ID NO: 273448 - RNA, 32 nt, Human
uugcaccacuguacuccagacuggauaacagc

SEQ ID NO: 273449 - RNA, 32 nt, Human
uugcaccacuguacuccagcacucuagccugg

SEQ ID NO: 273450 - RNA, 32 nt, Human
uugcaccacuguacuccagccugggcaacaga

SEQ ID NO: 273451 - RNA, 32 nt, Human
uugcaccacuguacuccagccugggcgauaca

SEQ ID NO: 273452 - RNA, 32 nt, Human
uugcaccacuguacuccagccugggugacaaa

SEQ ID NO: 273453 - RNA, 32 nt, Human
uugcaccacuguacuccagccugggugacagg

SEQ ID NO: 273454 - RNA, 32 nt, Human
uugcaccacuuacuccagccugggcaacagag

SEQ ID NO: 273455 - RNA, 32 nt, Human
uugcaccacuucacuccagccugggugacgga

SEQ ID NO: 273456 - RNA, 32 nt, Human
uugcaccacuucaucccagccugggagacaga

SEQ ID NO: 273457 - RNA, 32 nt, Human
uugcaccacuuguaacuccagccugggcaaca

SEQ ID NO: 273458 - RNA, 32 nt, Human
uugcaccacuuuacuuagccugggugacagag

SEQ ID NO: 273459 - RNA, 32 nt, Human
uugcaccagccguaacuacagcuuugauugga

SEQ ID NO: 273460 - RNA, 29 nt, Human
uugcaccaggagacagaggcagcugggau

SEQ ID NO: 273461 - RNA, 32 nt, Human
uugcaccaggaucagauucaucaaaugguaca

SEQ ID NO: 273462 - RNA, 32 nt, Human
uugcaccagugacuugaaaaugauucugcucc

SEQ ID NO: 273463 - RNA, 32 nt, Human
uugcaccagugcacuccagcugggcgacagag

SEQ ID NO: 273464 - RNA, 25 nt, Human
uugcaccaguucccaauuuuuccca

SEQ ID NO: 273465 - RNA, 32 nt, Human
uugcaccaucuucugcaggacuguauuuugag

SEQ ID NO: 273466 - RNA, 32 nt, Human
uugcaccauguuggccaggcuggucuugaauu

SEQ ID NO: 273467 - RNA, 32 nt, Human
uugcaccauugaacuccagccugggcaacaag

SEQ ID NO: 273468 - RNA, 32 nt, Human
uugcaccauugcaccuccagccugggcaacag

SEQ ID NO: 273469 - RNA, 32 nt, Human
uugcaccauugcacuccacccugggcgacaga

SEQ ID NO: 273470 - RNA, 32 nt, Human
uugcaccauugcacuccagccugcgcaacaag

SEQ ID NO: 273471 - RNA, 32 nt, Human
uugcaccauugcacuccagccuggcgacagag

SEQ ID NO: 273472 - RNA, 32 nt, Human
uugcaccauugcacuccagccugggcaacaag

SEQ ID NO: 273473 - RNA, 32 nt, Human
uugcaccauugcacuccagccugggcaacaga

SEQ ID NO: 273474 - RNA, 32 nt, Human
uugcaccauugcacuccagccugggcaauaag

SEQ ID NO: 273475 - RNA, 32 nt, Human
uugcaccauugcacuccagccugggcgacaag

SEQ ID NO: 273476 - RNA, 32 nt, Human
uugcaccauugcacuccagccugggcgacaga

SEQ ID NO: 273477 - RNA, 32 nt, Human
uugcaccauugcacuccagccugggugacaga

SEQ ID NO: 273478 - RNA, 32 nt, Human
uugcaccauugcacuccagccugugcaacaag

SEQ ID NO: 273479 - RNA, 32 nt, Human
uugcaccauugcacuccagcuugggugacaga

SEQ ID NO: 273480 - RNA, 32 nt, Human
uugcaccauugcacuccugccugggcaacaag

SEQ ID NO: 273481 - RNA, 32 nt, Human
uugcaccauugcauuccagccugggcaacaag

SEQ ID NO: 273482 - RNA, 32 nt, Human
uugcaccauugcauuccagccugggugacaga

SEQ ID NO: 273483 - RNA, 32 nt, Human
uugcaccauugcccuccagccugagcaacaga

SEQ ID NO: 273484 - RNA, 32 nt, Human
uugcaccauugcgcucuagccugggcaacaac

SEQ ID NO: 273485 - RNA, 32 nt, Human
uugcaccauuguacuccagccugggcaacaag

SEQ ID NO: 273486 - RNA, 32 nt, Human
uugcaccauuguacuccagccugggcaauaag

SEQ ID NO: 273487 - RNA, 32 nt, Human
uugcaccauuucauuccagccugggcaacaug

SEQ ID NO: 273488 - RNA, 32 nt, Human
uugcacccacugcauuugcagccuugagguca

SEQ ID NO: 273489 - RNA, 32 nt, Human
uugcacccaggagguggagguugcagugagcc

SEQ ID NO: 273490 - RNA, 32 nt, Human
uugcacccagggagcuggaguugagcuguucc

SEQ ID NO: 273491 - RNA, 32 nt, Human
uugcaccccagccugagcaacaagagcgaaac

SEQ ID NO: 273492 - RNA, 32 nt, Human
uugcacccccagccuccaccccggcuccccug

SEQ ID NO: 273493 - RNA, 32 nt, Human
uugcacccccaggccuuggggcucagaccagu

SEQ ID NO: 273494 - RNA, 32 nt, Human
uugcaccccugcacuccagccugggugacaga

SEQ ID NO: 273495 - RNA, 32 nt, Human
uugcaccccugcacuccaggcugggcaacagu

SEQ ID NO: 273496 - RNA, 32 nt, Human
uugcacccgugggagucgggacauauaaugga

SEQ ID NO: 273497 - RNA, 32 nt, Human
uugcacccucauucccucgggacccucccagu

SEQ ID NO: 273498 - RNA, 32 nt, Human
uugcacccuccagacacucagguugaaaauag

SEQ ID NO: 273499 - RNA, 32 nt, Human
uugcacccugcacucuagccugggcaacaaga

SEQ ID NO: 273500 - RNA, 32 nt, Human
uugcacccuguauuucuuuuugcagccagcac

SEQ ID NO: 273501 - RNA, 32 nt, Human
uugcaccgcugcacuccagccuggcgacagag

SEQ ID NO: 273502 - RNA, 32 nt, Human
uugcaccgcuguacuccagccugggcaacaga

SEQ ID NO: 273503 - RNA, 32 nt, Human
uugcaccgugacacuccagccugggcaacaga

SEQ ID NO: 273504 - RNA, 32 nt, Human
uugcaccuacauagugugucuccucauuggag

SEQ ID NO: 273505 - RNA, 32 nt, Human
uugcaccuauaaucccagcacuuugggaggca

SEQ ID NO: 273506 - RNA, 20 nt, Human
uugcaccucaacaaaaggcu

SEQ ID NO: 273507 - RNA, 32 nt, Human
uugcaccucauaggugaugaucaugaggggga

SEQ ID NO: 273508 - RNA, 32 nt, Human
uugcaccuccagccugggcaacagagugagac

SEQ ID NO: 273509 - RNA, 32 nt, Human
uugcaccucgcugcuccagccucuggggcgca

SEQ ID NO: 273510 - RNA, 32 nt, Human
uugcaccucucagagaagauaacugccucuug

SEQ ID NO: 273511 - RNA, 32 nt, Human
uugcaccugcagccaagcaaaugccugccaaa

SEQ ID NO: 273512 - RNA, 32 nt, Human
uugcaccugcagccccgcgcucuacccgguuc

SEQ ID NO: 273513 - RNA, 32 nt, Human
uugcaccuguaaucccagcacuuugggaggcc

SEQ ID NO: 273514 - RNA, 32 nt, Human
uugcaccuucuggaacuaugggcuugagaaaa

SEQ ID NO: 273515 - RNA, 32 nt, Human
uugcaccuugucuaaggacccuaaaugaacga

SEQ ID NO: 273516 - RNA, 32 nt, Human
uugcaccuuuggucccaugggugggggacagg

SEQ ID NO: 273517 - RNA, 32 nt, Human
uugcaccuuuguacuccagccugggcaacgag

SEQ ID NO: 273518 - RNA, 32 nt, Human
uugcacgacauuacucgcaggugguggggagc

SEQ ID NO: 273519 - RNA, 32 nt, Human
uugcacgacugcacuccagccugggcaaugga

SEQ ID NO: 273520 - RNA, 32 nt, Human
uugcacgauuccugccucgacguuacaccagg

SEQ ID NO: 273521 - RNA, 32 nt, Human
uugcacgccccuaggcccucugugcuggggca

SEQ ID NO: 273522 - RNA, 32 nt, Human
uugcacggaacagauucagaugagcauuuucc

SEQ ID NO: 273523 - RNA, 32 nt, Human
uugcacggcggagggggugaggugggaggcgu

SEQ ID NO: 273524 - RNA, 32 nt, Human
uugcacgggacacguuacccagcucgggugag

SEQ ID NO: 273525 - RNA, 19 nt, Human
uugcacgguaugagcuuca

SEQ ID NO: 273526 - RNA, 32 nt, Human
uugcacggucucccccuccccaucugaugugu

SEQ ID NO: 273527 - RNA, 32 nt, Human
uugcacgugaguaugauccaggauuggccugu

SEQ ID NO: 273528 - RNA, 32 nt, Human
uugcacguucuucucccaucuuggaauaucca

SEQ ID NO: 273529 - RNA, 32 nt, Human
uugcacuaaaauuauaucaaggucucagauga

SEQ ID NO: 273530 - RNA, 32 nt, Human
uugcacuaaccacauuugucaucucuagggca

SEQ ID NO: 273531 - RNA, 32 nt, Human
uugcacuacagccugggcaacaagagcgaaac

SEQ ID NO: 273532 - RNA, 32 nt, Human
uugcacuacuacacuccagccuggugacagag

SEQ ID NO: 273533 - RNA, 32 nt, Human
uugcacuacugcacuccagacuggugacggag

SEQ ID NO: 273534 - RNA, 32 nt, Human
uugcacuacugcacuccagccugggugacaga

SEQ ID NO: 273535 - RNA, 32 nt, Human
uugcacuacugcauuccagccugggugacaua

SEQ ID NO: 273536 - RNA, 32 nt, Human
uugcacuacugcgcuucacccugggcaacaga

SEQ ID NO: 273537 - RNA, 32 nt, Human
uugcacuagagcuguuuguggacuuggcuuca

SEQ ID NO: 273538 - RNA, 32 nt, Human
uugcacuagaggcuucugacuccugggacuuu

SEQ ID NO: 273539 - RNA, 32 nt, Human
uugcacuagcuguuuccucugccuaaacaucc

SEQ ID NO: 273540 - RNA, 32 nt, Human
uugcacuagugucucugcagguugcugguugu

SEQ ID NO: 273541 - RNA, 32 nt, Human
uugcacuaucuggagcuaacaccugugaccca

SEQ ID NO: 273542 - RNA, 32 nt, Human
uugcacuauugcacuccagccugggcaacagg

SEQ ID NO: 273543 - RNA, 32 nt, Human
uugcacucaaguuguuuaacugugcaugugcg

SEQ ID NO: 273544 - RNA, 32 nt, Human
uugcacucagcccuguacucacuucuucacuc

SEQ ID NO: 273545 - RNA, 32 nt, Human
uugcacuccaaccugggugacaagagcaaaac

SEQ ID NO: 273546 - RNA, 32 nt, Human
uugcacuccacacuccagccugagcaacaaga

SEQ ID NO: 273547 - RNA, 32 nt, Human
uugcacuccagaaaacaacauacauguuuaaa

SEQ ID NO: 273548 - RNA, 32 nt, Human
uugcacuccagcccaggcgacagaacaaaacu

SEQ ID NO: 273549 - RNA, 32 nt, Human
uugcacuccagcccgggcaacaacagcgaaac

SEQ ID NO: 273550 - RNA, 32 nt, Human
uugcacuccagccugagcaacagagugagugu

SEQ ID NO: 273551 - RNA, 32 nt, Human
uugcacuccagccugagcaacaggagcgaaac

SEQ ID NO: 273552 - RNA, 32 nt, Human
uugcacuccagccugagcgacagagcgagacu

SEQ ID NO: 273553 - RNA, 32 nt, Human
uugcacuccagccugagugacaagagacucug

SEQ ID NO: 273554 - RNA, 32 nt, Human
uugcacuccagccugcgcaacaagagcgaaac

SEQ ID NO: 273555 - RNA, 32 nt, Human
uugcacuccagccuggacaacaagagcgaaac

SEQ ID NO: 273556 - RNA, 32 nt, Human
uugcacuccagccuggacaacaagagugaaac

SEQ ID NO: 273557 - RNA, 32 nt, Human
uugcacuccagccuggacagcaggagcgaaac

SEQ ID NO: 273558 - RNA, 32 nt, Human
uugcacuccagccuggaugacagagugagacu

SEQ ID NO: 273559 - RNA, 32 nt, Human
uugcacuccagccuggccacagagcgagacuc

SEQ ID NO: 273560 - RNA, 32 nt, Human
uugcacuccagccuggcgacaagagcgagacu

SEQ ID NO: 273561 - RNA, 32 nt, Human
uugcacuccagccuggcgacagagcgagacuc

SEQ ID NO: 273562 - RNA, 32 nt, Human
uugcacuccagccuggcgacagagugagacuc

SEQ ID NO: 273563 - RNA, 32 nt, Human
uugcacuccagccuggcgaccgagcgggacuc

SEQ ID NO: 273564 - RNA, 32 nt, Human
uugcacuccagccuggcugacagagcgagacu

SEQ ID NO: 273565 - RNA, 32 nt, Human
uugcacuccagccugggcaacaacagugaaac

SEQ ID NO: 273566 - RNA, 32 nt, Human
uugcacuccagccugggcaacaagagcgaaac

SEQ ID NO: 273567 - RNA, 32 nt, Human
uugcacuccagccugggcaacaagagcgaggc

SEQ ID NO: 273568 - RNA, 32 nt, Human
uugcacuccagccugggcaacaagaggaaaac

SEQ ID NO: 273569 - RNA, 32 nt, Human
uugcacuccagccugggcaacaagagggaaac

SEQ ID NO: 273570 - RNA, 32 nt, Human
uugcacuccagccugggcaacaagagugaaac

SEQ ID NO: 273571 - RNA, 32 nt, Human
uugcacuccagccugggcaacaagagugaacc

SEQ ID NO: 273572 - RNA, 32 nt, Human
uugcacuccagccugggcaacaagagugagac

SEQ ID NO: 273573 - RNA, 32 nt, Human
uugcacuccagccugggcaacaagaguggcac

SEQ ID NO: 273574 - RNA, 32 nt, Human
uugcacuccagccugggcaacaagcgaaacuc

SEQ ID NO: 273575 - RNA, 32 nt, Human
uugcacuccagccugggcaacaagugcaaaac

SEQ ID NO: 273576 - RNA, 32 nt, Human
uugcacuccagccugggcaacacagcgagacu

SEQ ID NO: 273577 - RNA, 32 nt, Human
uugcacuccagccugggcaacagagcgagacu

SEQ ID NO: 273578 - RNA, 32 nt, Human
uugcacuccagccugggcaacagagcgagagu

SEQ ID NO: 273579 - RNA, 32 nt, Human
uugcacuccagccugggcaacagagcgcgacu

SEQ ID NO: 273580 - RNA, 32 nt, Human
uugcacuccagccugggcaacagagugaaaaa

SEQ ID NO: 273581 - RNA, 32 nt, Human
uugcacuccagccugggcaacagagugagacc

SEQ ID NO: 273582 - RNA, 32 nt, Human
uugcacuccagccugggcaacagagugagacu

SEQ ID NO: 273583 - RNA, 32 nt, Human
uugcacuccagccugggcaacagcagcgaaac

SEQ ID NO: 273584 - RNA, 32 nt, Human
uugcacuccagccugggcaacagggcaagauu

SEQ ID NO: 273585 - RNA, 32 nt, Human
uugcacuccagccugggcaacaguguuaagac

SEQ ID NO: 273586 - RNA, 32 nt, Human
uugcacuccagccugggcaacgaaaagugaaa

SEQ ID NO: 273587 - RNA, 32 nt, Human
uugcacuccagccugggcaacgagagugaaac

SEQ ID NO: 273588 - RNA, 32 nt, Human
uugcacuccagccugggcaacgagcgaaacua

SEQ ID NO: 273589 - RNA, 32 nt, Human
uugcacuccagccugggcaacgagcgaaacuc

SEQ ID NO: 273590 - RNA, 32 nt, Human
uugcacuccagccugggcaacgagugaaacuc

SEQ ID NO: 273591 - RNA, 32 nt, Human
uugcacuccagccugggcaacgagugcaaaac

SEQ ID NO: 273592 - RNA, 32 nt, Human
uugcacuccagccugggcaauaagagcgaaac

SEQ ID NO: 273593 - RNA, 32 nt, Human
uugcacuccagccugggcaauaagagugaaac

SEQ ID NO: 273594 - RNA, 32 nt, Human
uugcacuccagccugggcaauagagugagacu

SEQ ID NO: 273595 - RNA, 32 nt, Human
uugcacuccagccugggcaauagggcaagagu

SEQ ID NO: 273596 - RNA, 32 nt, Human
uugcacuccagccugggcgacaagagcgaaac

SEQ ID NO: 273597 - RNA, 32 nt, Human
uugcacuccagccugggcgacaagagugaaac

SEQ ID NO: 273598 - RNA, 32 nt, Human
uugcacuccagccugggcgacaagagugaaau

SEQ ID NO: 273599 - RNA, 32 nt, Human
uugcacuccagccugggcgacaagcgaaacuu

SEQ ID NO: 273600 - RNA, 32 nt, Human
uugcacuccagccugggcgacagagcgagacu

SEQ ID NO: 273601 - RNA, 32 nt, Human
uugcacuccagccugggcgacagagugacacu

SEQ ID NO: 273602 - RNA, 32 nt, Human
uugcacuccagccugggcgacagagugagacu

SEQ ID NO: 273603 - RNA, 32 nt, Human
uugcacuccagccugggcgacagggcaagacu

SEQ ID NO: 273604 - RNA, 32 nt, Human
uugcacuccagccugggcgacagggugagacu

SEQ ID NO: 273605 - RNA, 32 nt, Human
uugcacuccagccugggcgacagugcaagacu

SEQ ID NO: 273606 - RNA, 32 nt, Human
uugcacuccagccugggcgacugagcgagacu

SEQ ID NO: 273607 - RNA, 32 nt, Human
uugcacuccagccugggcgauagagugagacu

SEQ ID NO: 273608 - RNA, 32 nt, Human
uugcacuccagccuggggaacagagcgagacu

SEQ ID NO: 273609 - RNA, 32 nt, Human
uugcacuccagccugggugacaagagcgaaac

SEQ ID NO: 273610 - RNA, 32 nt, Human
uugcacuccagccugggugacaagagugaaac

SEQ ID NO: 273611 - RNA, 32 nt, Human
uugcacuccagccugggugacaagagugagac

SEQ ID NO: 273612 - RNA, 32 nt, Human
uugcacuccagccugggugacacagugagacu

SEQ ID NO: 273613 - RNA, 32 nt, Human
uugcacuccagccugggugacagagcgagacc

SEQ ID NO: 273614 - RNA, 32 nt, Human
uugcacuccagccugggugacagagcgagacu

SEQ ID NO: 273615 - RNA, 32 nt, Human
uugcacuccagccugggugacagagugaaacc

SEQ ID NO: 273616 - RNA, 32 nt, Human
uugcacuccagccugggugacagagugagacc

SEQ ID NO: 273617 - RNA, 32 nt, Human
uugcacuccagccugggugacagagugagacu

SEQ ID NO: 273618 - RNA, 32 nt, Human
uugcacuccagccugggugacagugaaacucc

SEQ ID NO: 273619 - RNA, 32 nt, Human
uugcacuccagccugggugacagugagacuuu

SEQ ID NO: 273620 - RNA, 32 nt, Human
uugcacuccagccugggugacgagugaaacuc

SEQ ID NO: 273621 - RNA, 32 nt, Human
uugcacuccagccugggugauaagagcgaaau

SEQ ID NO: 273622 - RNA, 32 nt, Human
uugcacuccagccugugcaacaagcgaaacuc

SEQ ID NO: 273623 - RNA, 32 nt, Human
uugcacuccaggcaccuggccaagagaauaca

SEQ ID NO: 273624 - RNA, 32 nt, Human
uugcacuccaggcugggcagcaagagcaagac

SEQ ID NO: 273625 - RNA, 32 nt, Human
uugcacuccauccuggacaacagagugagacu

SEQ ID NO: 273626 - RNA, 32 nt, Human
uugcacuccauccuggacaacaggagugaaac

SEQ ID NO: 273627 - RNA, 32 nt, Human
uugcacuccucugcuuucucccugccuugauu

SEQ ID NO: 273628 - RNA, 32 nt, Human
uugcacucuagccuggcaacagagcgagauuc

SEQ ID NO: 273629 - RNA, 32 nt, Human
uugcacucuugcucucccccucccucccuuac

SEQ ID NO: 273630 - RNA, 32 nt, Human
uugcacugaggcacccgccgggcagggacccg

SEQ ID NO: 273631 - RNA, 32 nt, Human
uugcacugagguccuggaggccuugugaggcc

SEQ ID NO: 273632 - RNA, 32 nt, Human
uugcacugagugaccugcuuccugauugcgca

SEQ ID NO: 273633 - RNA, 32 nt, Human
uugcacugcccuggcacaugggcacaacgucu

SEQ ID NO: 273634 - RNA, 32 nt, Human
uugcacugccuuuggggcuggagggagacgug

SEQ ID NO: 273635 - RNA, 32 nt, Human
uugcacugcugagagcaagaugggucaccagc

SEQ ID NO: 273636 - RNA, 32 nt, Human
uugcacugcuguuccugcuccaugacuggcug

SEQ ID NO: 273637 - RNA, 32 nt, Human
uugcacuggaaccauugcuuuacucugguugg

SEQ ID NO: 273638 - RNA, 32 nt, Human
uugcacuguaggacagcggcccgaaguggaag

SEQ ID NO: 273639 - RNA, 32 nt, Human
uugcacugucgcacuccagccuggaugauaga

SEQ ID NO: 273640 - RNA, 32 nt, Human
uugcacugugccuuucaacuccagaaacauuc

SEQ ID NO: 273641 - RNA, 32 nt, Human
uugcacuguggaaauugguaaaugcuucaaau

SEQ ID NO: 273642 - RNA, 32 nt, Human
uugcacuuaauaccugcaauguuugcuacugu

SEQ ID NO: 273643 - RNA, 32 nt, Human
uugcacuuacguccucccugggacuuauauca

SEQ ID NO: 273644 - RNA, 32 nt, Human
uugcacuuagcucucccuggggacuuaaauuu

SEQ ID NO: 273645 - RNA, 32 nt, Human
uugcacuucacuuaauguguguccucaucuuu

SEQ ID NO: 273646 - RNA, 32 nt, Human
uugcacuucagccugggcgacacagcgagacc

SEQ ID NO: 273647 - RNA, 25 nt, Human
uugcacuuccagcuuuauuauucaa

SEQ ID NO: 273648 - RNA, 32 nt, Human
uugcacuucuugcauaauauaaaacuuauugc

SEQ ID NO: 273649 - RNA, 32 nt, Human
uugcacuuuaccuguucuuuuccagagcugac

SEQ ID NO: 273650 - RNA, 24 nt, Human
uugcacuuuccccacaucagccaa

SEQ ID NO: 273651 - RNA, 32 nt, Human
uugcacuuuugagacugguagcuaaccaucuu

SEQ ID NO: 273652 - RNA, 32 nt, Human
uugcagaaaacugccuuccuuucuucuuaaug

SEQ ID NO: 273653 - RNA, 24 nt, Human
uugcagaaaagagagccuucaaaa

SEQ ID NO: 273654 - RNA, 26 nt, Human
uugcagaaacagcgagaacuucaaaa

SEQ ID NO: 273655 - RNA, 32 nt, Human
uugcagaaacccagcccugccccugccuccug

SEQ ID NO: 273656 - RNA, 32 nt, Human
uugcagaaaggagcuacccacuucagaucucc

SEQ ID NO: 273657 - RNA, 21 nt, Human
uugcagaacgucaacacgccc

SEQ ID NO: 273658 - RNA, 32 nt, Human
uugcagaacugucagccuguggaguuguuucc

SEQ ID NO: 273659 - RNA, 32 nt, Human
uugcagaagaaguaagugaggaagaaaugagu

SEQ ID NO: 273660 - RNA, 32 nt, Human
uugcagaagaaugccuuucccucauuuuauaa

SEQ ID NO: 273661 - RNA, 32 nt, Human
uugcagaagagguaagggagugaggcacuccu

SEQ ID NO: 273662 - RNA, 21 nt, Human
uugcagaagugcagcucgccc

SEQ ID NO: 273663 - RNA, 24 nt, Human
uugcagaaugaagucaccucgccc

SEQ ID NO: 273664 - RNA, 32 nt, Human
uugcagacaaaugauggaaaugggaaaagacu

SEQ ID NO: 273665 - RNA, 32 nt, Human
uugcagacaaauugaagaacuggugggauuuu

SEQ ID NO: 273666 - RNA, 32 nt, Human
uugcagacacagggucucaccauguugcccag

SEQ ID NO: 273667 - RNA, 18 nt, Human
uugcagacaccaccauau

SEQ ID NO: 273668 - RNA, 32 nt, Human
uugcagacacccaaguuuugugccucaccagg

SEQ ID NO: 273669 - RNA, 32 nt, Human
uugcagacauguucauuccaagcacaauauuc

SEQ ID NO: 273670 - RNA, 32 nt, Human
uugcagaccagccuggccaacauggcaaaacc

SEQ ID NO: 273671 - RNA, 32 nt, Human
uugcagaccagccuggguaacauagugagacc

SEQ ID NO: 273672 - RNA, 32 nt, Human
uugcagaccuuuccuguucccacucuuguugg

SEQ ID NO: 273673 - RNA, 32 nt, Human
uugcagacuacaggcagagaacuccaucuuag

SEQ ID NO: 273674 - RNA, 22 nt, Human
uugcagacuacgucuccugcca

SEQ ID NO: 273675 - RNA, 32 nt, Human
uugcagacucacucggccucacuucauccuug

SEQ ID NO: 273676 - RNA, 32 nt, Human
uugcagagaccacugcacuccagccugggcaa

SEQ ID NO: 273677 - RNA, 32 nt, Human
uugcagagagaaggagcaaaccuuuucauugg

SEQ ID NO: 273678 - RNA, 32 nt, Human
uugcagagaggaggacguguacuccaggcgag

SEQ ID NO: 273679 - RNA, 32 nt, Human
uugcagagagucagggaggcggaaaagacacg

SEQ ID NO: 273680 - RNA, 32 nt, Human
uugcagagaugcuggggucgagaccccaggga

SEQ ID NO: 273681 - RNA, 32 nt, Human
uugcagagauggaguuucaccauauugcccag

SEQ ID NO: 273682 - RNA, 32 nt, Human
uugcagagaugggguucccacuauguugauca

SEQ ID NO: 273683 - RNA, 32 nt, Human
uugcagagcaaagaagaugggggagaacuaau

SEQ ID NO: 273684 - RNA, 26 nt, Human
uugcagagcacuucccaccucucuga

SEQ ID NO: 273685 - RNA, 32 nt, Human
uugcagagcagcaagaggcucucuccagaaaa

SEQ ID NO: 273686 - RNA, 32 nt, Human
uugcagagcagccugggcaacauggugaaacc

SEQ ID NO: 273687 - RNA, 32 nt, Human
uugcagagccugggacaaccuccuuauugaag

SEQ ID NO: 273688 - RNA, 32 nt, Human
uugcagagcgggaggccaggaggacucgucgu

SEQ ID NO: 273689 - RNA, 32 nt, Human
uugcagagcuagggugugugacugccucccuu

SEQ ID NO: 273690 - RNA, 32 nt, Human
uugcagagcugggcacaugugcccagggggca

SEQ ID NO: 273691 - RNA, 32 nt, Human
uugcagaggaagaugagcuggcacucugcaaa

SEQ ID NO: 273692 - RNA, 32 nt, Human
uugcagaggcgguggagggaaggagacaggau

SEQ ID NO: 273693 - RNA, 32 nt, Human
uugcagagucaacagcccaucagcccauguuu

SEQ ID NO: 273694 - RNA, 32 nt, Human
uugcagaguguugggacugucauuugugauuu

SEQ ID NO: 273695 - RNA, 32 nt, Human
uugcagauaagaggaagugggaagagaggugg

SEQ ID NO: 273696 - RNA, 32 nt, Human
uugcagauaccacauucauuaugcugcaguac

SEQ ID NO: 273697 - RNA, 32 nt, Human
uugcagaugcaagcuccucuccuaggucuucu

SEQ ID NO: 273698 - RNA, 32 nt, Human
uugcagauguccugggugcagggccuucccgg

SEQ ID NO: 273699 - RNA, 32 nt, Human
uugcagauguuuaagaaaauaauagccagauu

SEQ ID NO: 273700 - RNA, 32 nt, Human
uugcagauguuuaagaaaauaauggccagauu

SEQ ID NO: 273701 - RNA, 32 nt, Human
uugcagauguuuucagaaaaucaagucacagu

SEQ ID NO: 273702 - RNA, 32 nt, Human
uugcagauugcuuuacuugcucugcuucccag

SEQ ID NO: 273703 - RNA, 32 nt, Human
uugcagcaacagcagcaggauccccagggcag

SEQ ID NO: 273704 - RNA, 32 nt, Human
uugcagcaacagcuccaagaagugcucggcag

SEQ ID NO: 273705 - RNA, 32 nt, Human
uugcagcaagcauuucuccaguuacaggcaaa

SEQ ID NO: 273706 - RNA, 32 nt, Human
uugcagcacaauauaacuuuacauucuuugcc

SEQ ID NO: 273707 - RNA, 32 nt, Human
uugcagcacaaugccuucuccaccugcccucc

SEQ ID NO: 273708 - RNA, 32 nt, Human
uugcagcacagccaggacuccagccugaacca

SEQ ID NO: 273709 - RNA, 32 nt, Human
uugcagcacagccugguuacagagugagauuc

SEQ ID NO: 273710 - RNA, 32 nt, Human
uugcagcacucacgaaauaugcucucuccuuu

SEQ ID NO: 273711 - RNA, 32 nt, Human
uugcagcacugacagaguguuuugaaauuuua

SEQ ID NO: 273712 - RNA, 32 nt, Human
uugcagcacugaguggucaaaauacauuucug

SEQ ID NO: 273713 - RNA, 32 nt, Human
uugcagcagagccacguaguuuggcauuuuga

SEQ ID NO: 273714 - RNA, 32 nt, Human
uugcagcaggguggcagggucaggagagucug

SEQ ID NO: 273715 - RNA, 32 nt, Human
uugcagcaucaugaugggccucuccuuggccu

SEQ ID NO: 273716 - RNA, 32 nt, Human
uugcagcauugcacuccagccugggugacaga

SEQ ID NO: 273717 - RNA, 32 nt, Human
uugcagccaaaccagcugaugaagaacugcug

SEQ ID NO: 273718 - RNA, 32 nt, Human
uugcagccagaggcugcaggaaaaaggcuucc

SEQ ID NO: 273719 - RNA, 32 nt, Human
uugcagccagccggcgguccagccuggugccu

SEQ ID NO: 273720 - RNA, 19 nt, Human
uugcagccaggugcagugg

SEQ ID NO: 273721 - RNA, 32 nt, Human
uugcagccauauccacuuauccaucuuaagau

SEQ ID NO: 273722 - RNA, 32 nt, Human
uugcagcccaggcuggagugcaguggcaccau

SEQ ID NO: 273723 - RNA, 32 nt, Human
uugcagcccgggcaccuucccacuuucuagcu

SEQ ID NO: 273724 - RNA, 32 nt, Human
uugcagcccuccuuuaacccaaaggaggaaag

SEQ ID NO: 273725 - RNA, 32 nt, Human
uugcagccucaaacaccugugcucaagcaauu

SEQ ID NO: 273726 - RNA, 32 nt, Human
uugcagccucaaacuccugggcucaagcaauc

SEQ ID NO: 273727 - RNA, 32 nt, Human
uugcagccucagacuccuggguucaagcaauc

SEQ ID NO: 273728 - RNA, 32 nt, Human
uugcagccucgaacuccugggcucauauuuuc

SEQ ID NO: 273729 - RNA, 32 nt, Human
uugcagccucgaacuccugggcuuaagggauc

SEQ ID NO: 273730 - RNA, 32 nt, Human
uugcagccucgaccugcugggcucgggcuauc

SEQ ID NO: 273731 - RNA, 32 nt, Human
uugcagccucgacuucucggggccaagcgauc

SEQ ID NO: 273732 - RNA, 32 nt, Human
uugcagccucuccaggcccagcuccugcaucu

SEQ ID NO: 273733 - RNA, 32 nt, Human
uugcagccuggugacagagugagacuccaucu

SEQ ID NO: 273734 - RNA, 32 nt, Human
uugcagccuucaauuccugggcucaggcaauc

SEQ ID NO: 273735 - RNA, 32 nt, Human
uugcagccuugacuucucaacgccaagucauc

SEQ ID NO: 273736 - RNA, 32 nt, Human
uugcagcgcugccuuucgaucucuccacaucu

SEQ ID NO: 273737 - RNA, 32 nt, Human
uugcagcgucuccggaaguggaggcgggagcg

SEQ ID NO: 273738 - RNA, 32 nt, Human
uugcagcgucuucuauuuuccaggucaaguac

SEQ ID NO: 273739 - RNA, 32 nt, Human
uugcagcuagagauguaugcagacaguaauaa

SEQ ID NO: 273740 - RNA, 30 nt, Human
uugcagcucaauaaauuuugaaugaacucc

SEQ ID NO: 273741 - RNA, 18 nt, Human
uugcagcuccugagccuu

SEQ ID NO: 273742 - RNA, 32 nt, Human
uugcagcuccuugccagagcccagauucccga

SEQ ID NO: 273743 - RNA, 28 nt, Human
uugcagcucggcugugccucaucuuccc

SEQ ID NO: 273744 - RNA, 32 nt, Human
uugcagcucugacuucugcucccaguaaccca

SEQ ID NO: 273745 - RNA, 32 nt, Human
uugcagcugcccaccucacccucagcucuggc

SEQ ID NO: 273746 - RNA, 32 nt, Human
uugcagcuggaagcauuuguuuuugaaguugu

SEQ ID NO: 273747 - RNA, 32 nt, Human
uugcagcuggcugcagccuccaccucccuggc

SEQ ID NO: 273748 - RNA, 32 nt, Human
uugcagcuucaacuuuucucuuuaguguucug

SEQ ID NO: 273749 - RNA, 20 nt, Human
uugcagcuugcccagagcca

SEQ ID NO: 273750 - RNA, 32 nt, Human
uugcagcuuugaccuccugggcuuaggugauc

SEQ ID NO: 273751 - RNA, 32 nt, Human
uugcagcuuugucuccucagcacucugcuguc

SEQ ID NO: 273752 - RNA, 32 nt, Human
uugcaggaacuuugagaaaggcaggagaagca

SEQ ID NO: 273753 - RNA, 32 nt, Human
uugcaggaagccagaggaggcaauacaguggg

SEQ ID NO: 273754 - RNA, 32 nt, Human
uugcaggaaggugagggugagcagagaugugu

SEQ ID NO: 273755 - RNA, 32 nt, Human
uugcaggacgcugugguguggaggcagcagcc

SEQ ID NO: 273756 - RNA, 32 nt, Human
uugcaggacugccuugguggcuuuguuugcug

SEQ ID NO: 273757 - RNA, 32 nt, Human
uugcaggaggacgguaaacagcaaaggcuuua

SEQ ID NO: 273758 - RNA, 32 nt, Human
uugcaggagguggagguuguugguggaggagg

SEQ ID NO: 273759 - RNA, 32 nt, Human
uugcaggaguugccgauggaggccugcaguac

SEQ ID NO: 273760 - RNA, 32 nt, Human
uugcaggaguugcugcuggaccacaugacacc

SEQ ID NO: 273761 - RNA, 32 nt, Human
uugcaggaugaaucacuugucacuuuucuucu

SEQ ID NO: 273762 - RNA, 32 nt, Human
uugcaggauggacaggaugacagacagggacg

SEQ ID NO: 273763 - RNA, 32 nt, Human
uugcaggaugucgaugacagacuugcugaacg

SEQ ID NO: 273764 - RNA, 32 nt, Human
uugcaggaugugccauaucauugaacggaacu

SEQ ID NO: 273765 - RNA, 21 nt, Human
uugcaggcagacuucccacca

SEQ ID NO: 273766 - RNA, 32 nt, Human
uugcaggcagaggagauugggucuugacuggu

SEQ ID NO: 273767 - RNA, 32 nt, Human
uugcaggcauugugggaaggugaagaguuucc

SEQ ID NO: 273768 - RNA, 32 nt, Human
uugcaggccauggaggagggaccuccacucca

SEQ ID NO: 273769 - RNA, 23 nt, Human
uugcaggcccccaucuucugacu

SEQ ID NO: 273770 - RNA, 21 nt, Human
uugcaggcccggccuccugcc

SEQ ID NO: 273771 - RNA, 32 nt, Human
uugcaggccucugcucugccuccugaggcagg

SEQ ID NO: 273772 - RNA, 32 nt, Human
uugcaggcgggaaccaugucucaggcugcaaa

SEQ ID NO: 273773 - RNA, 30 nt, Human
uugcaggcguggcgcagggcacggugguca

SEQ ID NO: 273774 - RNA, 32 nt, Human
uugcaggcucucuguccagggcugcuuccugu

SEQ ID NO: 273775 - RNA, 24 nt, Human
uugcaggcugcccccuuccugcca

SEQ ID NO: 273776 - RNA, 32 nt, Human
uugcagggaaauacagcuacagaggaaggaga

SEQ ID NO: 273777 - RNA, 32 nt, Human
uugcagggaacuaggaacauggaggggaacca

SEQ ID NO: 273778 - RNA, 32 nt, Human
uugcagggagagugaugcuccaggcaacacgg

SEQ ID NO: 273779 - RNA, 32 nt, Human
uugcagggagcuaagaucgcgccauugcacuc

SEQ ID NO: 273780 - RNA, 32 nt, Human
uugcagggaggcggagguugcagugagccgag

SEQ ID NO: 273781 - RNA, 24 nt, Human
uugcagggauaagcccaggaccgg

SEQ ID NO: 273782 - RNA, 32 nt, Human
uugcagggaugcuuaaggaaggccccgcccag

SEQ ID NO: 273783 - RNA, 32 nt, Human
uugcagggcagccugguuacagagugagacuc

SEQ ID NO: 273784 - RNA, 19 nt, Human
uugcaggggcaucacguua

SEQ ID NO: 273785 - RNA, 32 nt, Human
uugcaggggucaguguagcuucugagcuaccu

SEQ ID NO: 273786 - RNA, 32 nt, Human
uugcaggggucuucaggcuuuuccacuggcuc

SEQ ID NO: 273787 - RNA, 32 nt, Human
uugcaggucgugagauagagccugagaugggg

SEQ ID NO: 273788 - RNA, 32 nt, Human
uugcaggugccuggcuugcuguggcuauggga

SEQ ID NO: 273789 - RNA, 32 nt, Human
uugcagguggagagcauaguugccaaaaucaa

SEQ ID NO: 273790 - RNA, 32 nt, Human
uugcaggugggagauuuggauuugaaugugga

SEQ ID NO: 273791 - RNA, 32 nt, Human
uugcagguucugagagaggcaagcagguaguc

SEQ ID NO: 273792 - RNA, 32 nt, Human
uugcagguugacacucucaccugacagaugau

SEQ ID NO: 273793 - RNA, 32 nt, Human
uugcagguuggaaguuacucugggugagucag

SEQ ID NO: 273794 - RNA, 21 nt, Human
uugcagguuggacucuucaca

SEQ ID NO: 273795 - RNA, 22 nt, Human
uugcagguuuagcuuuuuccca

SEQ ID NO: 273796 - RNA, 32 nt, Human
uugcagguuucuguagccggaagaucuccguu

SEQ ID NO: 273797 - RNA, 32 nt, Human
uugcaguaaaacacaggggcaaaggaagacag

SEQ ID NO: 273798 - RNA, 32 nt, Human
uugcaguaacaccugcucuuucugaagagcua

SEQ ID NO: 273799 - RNA, 32 nt, Human
uugcaguaaccagcagcauucucagcuggaug

SEQ ID NO: 273800 - RNA, 32 nt, Human
uugcaguaccaugcaggacuagcaucuggccu

SEQ ID NO: 273801 - RNA, 32 nt, Human
uugcaguagcuguaggaaggggaggccauuuu

SEQ ID NO: 273802 - RNA, 32 nt, Human
uugcaguagggagguaucaaggagcauaauua

SEQ ID NO: 273803 - RNA, 32 nt, Human
uugcagucagugagcugcugccaaaacggcgu

SEQ ID NO: 273804 - RNA, 32 nt, Human
uugcaguccagccugggcagcaagagugaaac

SEQ ID NO: 273805 - RNA, 32 nt, Human
uugcagucuucaauuugagaaaggugagaaau

SEQ ID NO: 273806 - RNA, 32 nt, Human
uugcagugaccaccccugcaggcauccaaagg

SEQ ID NO: 273807 - RNA, 32 nt, Human
uugcagugagccaaaauuacgccacugcacuc

SEQ ID NO: 273808 - RNA, 32 nt, Human
uugcagugagccaaagguacaccacuacacuc

SEQ ID NO: 273809 - RNA, 32 nt, Human
uugcagugagccaagacuacgccacugcacuc

SEQ ID NO: 273810 - RNA, 32 nt, Human
uugcagugagccaagacugcgccacugcacuc

SEQ ID NO: 273811 - RNA, 32 nt, Human
uugcagugagccaagaucaagccauugcacuc

SEQ ID NO: 273812 - RNA, 32 nt, Human
uugcagugagccaagaucaagccauuguacuc

SEQ ID NO: 273813 - RNA, 32 nt, Human
uugcagugagccaagauccugccacugcacuc

SEQ ID NO: 273814 - RNA, 32 nt, Human
uugcagugagccaagaucgagccauugcacuc

SEQ ID NO: 273815 - RNA, 32 nt, Human
uugcagugagccaagaucucgccacugcacuc

SEQ ID NO: 273816 - RNA, 32 nt, Human
uugcagugagccaagauuacgccacugcacua

SEQ ID NO: 273817 - RNA, 32 nt, Human
uugcagugagccaagauuacgccacugcacuc

SEQ ID NO: 273818 - RNA, 32 nt, Human
uugcagugagccaagauugagccauugcucuc

SEQ ID NO: 273819 - RNA, 32 nt, Human
uugcagugagccaagauugcagugagccaaga

SEQ ID NO: 273820 - RNA, 32 nt, Human
uugcagugagccacugcacuccagccugauga

SEQ ID NO: 273821 - RNA, 32 nt, Human
uugcagugagccaggaucgcgccauugcacuc

SEQ ID NO: 273822 - RNA, 32 nt, Human
uugcagugagccaugaucgagccacugcacuc

SEQ ID NO: 273823 - RNA, 32 nt, Human
uugcagugagcugagguugcggugagcugaga

SEQ ID NO: 273824 - RNA, 32 nt, Human
uugcagugggaggcgacgguggaggagggugg

SEQ ID NO: 273825 - RNA, 31 nt, Human
uugcaguggguggaguuguggauagggguga

SEQ ID NO: 273826 - RNA, 16 nt, Human
uugcaguguccacuca

SEQ ID NO: 273827 - RNA, 32 nt, Human
uugcagugugccaggcacugugccaaguauuu

SEQ ID NO: 273828 - RNA, 32 nt, Human
uugcaguguggacacguguuugaagcaguuac

SEQ ID NO: 273829 - RNA, 32 nt, Human
uugcaguguggggcugccagcauuucauggcc

SEQ ID NO: 273830 - RNA, 32 nt, Human
uugcaguuaagccuguugucuguuguagucug

SEQ ID NO: 273831 - RNA, 32 nt, Human
uugcaguuacugauacaaaugguguuaacugg

SEQ ID NO: 273832 - RNA, 32 nt, Human
uugcaguuacuuuugcaccaaccuaauaacaa

SEQ ID NO: 273833 - RNA, 32 nt, Human
uugcaguuucacaaucaguucuucauuucaug

SEQ ID NO: 273834 - RNA, 32 nt, Human
uugcaguuuuggucuugaauucugugccaucu

SEQ ID NO: 273835 - RNA, 32 nt, Human
uugcaguuuuucucccccgccccaaagauacg

SEQ ID NO: 273836 - RNA, 32 nt, Human
uugcauaaaaggcuucaucuuauaaagugaaa

SEQ ID NO: 273837 - RNA, 22 nt, Human
uugcauaaagugcccucacacu

SEQ ID NO: 273838 - RNA, 32 nt, Human
uugcauaaauguagaagggaacucagcaaugc

SEQ ID NO: 273839 - RNA, 23 nt, Human
uugcauaauuaaacucuucagcu

SEQ ID NO: 273840 - RNA, 32 nt, Human
uugcauacagaaggugcugacugaccccugcc

SEQ ID NO: 273841 - RNA, 32 nt, Human
uugcauacauucuucaagaucccauuugaauu

SEQ ID NO: 273842 - RNA, 32 nt, Human
uugcauacugccucagagccauguguccaguu

SEQ ID NO: 273843 - RNA, 32 nt, Human
uugcauacuuagaaccuugucucacuuugagg

SEQ ID NO: 273844 - RNA, 32 nt, Human
uugcauaggcucuugcuuaucuuuguuuugca

SEQ ID NO: 273845 - RNA, 32 nt, Human
uugcauaguuaauuugggauggggaagcaaau

SEQ ID NO: 273846 - RNA, 32 nt, Human
uugcauauaaccuaugcacauucucccauaua

SEQ ID NO: 273847 - RNA, 32 nt, Human
uugcauaucagauacuucaaaauaugaaaagg

SEQ ID NO: 273848 - RNA, 32 nt, Human
uugcauaucuagagacagagacugagucacug

SEQ ID NO: 273849 - RNA, 32 nt, Human
uugcauaugcaagcccuggccacagcugcacu

SEQ ID NO: 273850 - RNA, 32 nt, Human
uugcauaugguaauuauaauuuccagauaaaa

SEQ ID NO: 273851 - RNA, 32 nt, Human
uugcaucaaccucuugggccucagccaagaug

SEQ ID NO: 273852 - RNA, 32 nt, Human
uugcaucaaucuuaaugucucuucauaauacu

SEQ ID NO: 273853 - RNA, 32 nt, Human
uugcaucaauugagacugucauuuuuccguca

SEQ ID NO: 273854 - RNA, 32 nt, Human
uugcaucacuccacugcacaguguuaguggga

SEQ ID NO: 273855 - RNA, 32 nt, Human
uugcaucacugcacuccaaccugggcaacaga

SEQ ID NO: 273856 - RNA, 32 nt, Human
uugcaucacugcacuccagccugggcaacaga

SEQ ID NO: 273857 - RNA, 32 nt, Human
uugcaucacugcacuccagccugggcagcaga

SEQ ID NO: 273858 - RNA, 32 nt, Human
uugcaucacugcacuccagccugggcgaugga

SEQ ID NO: 273859 - RNA, 32 nt, Human
uugcaucacugcacuccagccugggugacaga

SEQ ID NO: 273860 - RNA, 32 nt, Human
uugcaucacugcacuccagcuugggugacaga

SEQ ID NO: 273861 - RNA, 32 nt, Human
uugcaucacugcacugcagccugggcaacaua

SEQ ID NO: 273862 - RNA, 32 nt, Human
uugcaucagccuguggauguaugccuaccacc

SEQ ID NO: 273863 - RNA, 32 nt, Human
uugcaucagcgugacccagauaugagacaugg

SEQ ID NO: 273864 - RNA, 32 nt, Human
uugcaucauugcacuccagccugggcaacaag

SEQ ID NO: 273865 - RNA, 32 nt, Human
uugcaucauugcacuccagccugggcaacaga

SEQ ID NO: 273866 - RNA, 32 nt, Human
uugcaucauuuccccucucuggcuccaauuug

SEQ ID NO: 273867 - RNA, 32 nt, Human
uugcaucccaaaccacgccucuugaccaggcu

SEQ ID NO: 273868 - RNA, 32 nt, Human
uugcaucccaguugguacagaccuucauccac

SEQ ID NO: 273869 - RNA, 32 nt, Human
uugcaucccuccagccaaggauuugaacccag

SEQ ID NO: 273870 - RNA, 32 nt, Human
uugcaucccugacccagcaucagaaaacacau

SEQ ID NO: 273871 - RNA, 32 nt, Human
uugcauccuugaaauccugggcucaggugauc

SEQ ID NO: 273872 - RNA, 28 nt, Human
uugcaucucagugcugcuuuggggucuc

SEQ ID NO: 273873 - RNA, 32 nt, Human
uugcaucugcccauacaucuucugagagaacc

SEQ ID NO: 273874 - RNA, 32 nt, Human
uugcaucugucugaccucaaagcccugcuucu

SEQ ID NO: 273875 - RNA, 32 nt, Human
uugcaugaaaaagauggagaaacaugccauuu

SEQ ID NO: 273876 - RNA, 32 nt, Human
uugcaugaagagaagcaauuuuggggaagggu

SEQ ID NO: 273877 - RNA, 32 nt, Human
uugcaugaauccauggcaaaguuauguugguu

SEQ ID NO: 273878 - RNA, 22 nt, Human
uugcaugaauugcuuuuacaag

SEQ ID NO: 273879 - RNA, 32 nt, Human
uugcaugacuauucagaaacaauaauccaaac

SEQ ID NO: 273880 - RNA, 32 nt, Human
uugcaugacuguggccuguugcucaugacuuu

SEQ ID NO: 273881 - RNA, 32 nt, Human
uugcaugagaugaaagaugacauuuuaauucu

SEQ ID NO: 273882 - RNA, 32 nt, Human
uugcaugaggccugcagguggccuauuuugac

SEQ ID NO: 273883 - RNA, 32 nt, Human
uugcaugaugcugaagccagaagccuucaagg

SEQ ID NO: 273884 - RNA, 32 nt, Human
uugcaugcacaccuuccuccacccuccacccu

SEQ ID NO: 273885 - RNA, 32 nt, Human
uugcaugcacuuuucaaaaugauugacuuaag

SEQ ID NO: 273886 - RNA, 32 nt, Human
uugcaugcaggauaguugcaucaugucaguug

SEQ ID NO: 273887 - RNA, 32 nt, Human
uugcaugccaugguuuauaaucuaagauaggc

SEQ ID NO: 273888 - RNA, 28 nt, Human
uugcaugcccucaucccacccauucuca

SEQ ID NO: 273889 - RNA, 32 nt, Human
uugcaugcccuccuaugagaaucuaaugccgc

SEQ ID NO: 273890 - RNA, 32 nt, Human
uugcaugccucuuccuccuucccgucuuccug

SEQ ID NO: 273891 - RNA, 32 nt, Human
uugcaugccuguaaucccagcauuuugggagg

SEQ ID NO: 273892 - RNA, 31 nt, Human
uugcauggaagggggagaugggugggaggag

SEQ ID NO: 273893 - RNA, 32 nt, Human
uugcauggcugcacucuagccugggugacagu

SEQ ID NO: 273894 - RNA, 32 nt, Human
uugcaugggagacagaucaaccgcacaagagu

SEQ ID NO: 273895 - RNA, 32 nt, Human
uugcaugggagccacagaggagcgucccuggg

SEQ ID NO: 273896 - RNA, 32 nt, Human
uugcaugggaggcagguggggcuuggaucagu

SEQ ID NO: 273897 - RNA, 20 nt, Human
uugcaugggagggaccccuu

SEQ ID NO: 273898 - RNA, 29 nt, Human
uugcaugggcuacgccaggaaaguaggcu

SEQ ID NO: 273899 - RNA, 32 nt, Human
uugcaugggcugcauuaucuacagcauuguac

SEQ ID NO: 273900 - RNA, 32 nt, Human
uugcauggggauaagagaggcaagcggccagu

SEQ ID NO: 273901 - RNA, 32 nt, Human
uugcauggguuucucacaagcguccuuccuca

SEQ ID NO: 273902 - RNA, 32 nt, Human
uugcauguaaaucacaaaaacugugugacuua

SEQ ID NO: 273903 - RNA, 32 nt, Human
uugcauguauauguguuauggguuaguuuuca

SEQ ID NO: 273904 - RNA, 32 nt, Human
uugcaugucuaaccccuucacugauucccaac

SEQ ID NO: 273905 - RNA, 32 nt, Human
uugcaugugccuggcaggaggcccuccugcuu

SEQ ID NO: 273906 - RNA, 23 nt, Human
uugcaugugugugguggccccag

SEQ ID NO: 273907 - RNA, 19 nt, Human
uugcauguuaagacuaugu

SEQ ID NO: 273908 - RNA, 32 nt, Human
uugcauuauggggcagaagugggagcuucucc

SEQ ID NO: 273909 - RNA, 32 nt, Human
uugcauuauguguuaauuuucuugcaucuaaa

SEQ ID NO: 273910 - RNA, 32 nt, Human
uugcauucaaucccacugcuuugcucggcaau

SEQ ID NO: 273911 - RNA, 32 nt, Human
uugcauucaccuaggccaagaaacaguguugu

SEQ ID NO: 273912 - RNA, 32 nt, Human
uugcauucagggauugcaaggaccauauagac

SEQ ID NO: 273913 - RNA, 32 nt, Human
uugcauucaucuucccagcaucuugcaguuuc

SEQ ID NO: 273914 - RNA, 32 nt, Human
uugcauuccagccugggcaacaagagcgaaac

SEQ ID NO: 273915 - RNA, 32 nt, Human
uugcauuccagccugggcaacaagagggaaac

SEQ ID NO: 273916 - RNA, 32 nt, Human
uugcauuccagccugggcaacaagagugaaac

SEQ ID NO: 273917 - RNA, 32 nt, Human
uugcauuccagccugggugacagagcgagacu

SEQ ID NO: 273918 - RNA, 32 nt, Human
uugcauuccagcugucacucugugccuuucua

SEQ ID NO: 273919 - RNA, 32 nt, Human
uugcauucuagacugcauuuuacagugccucu

SEQ ID NO: 273920 - RNA, 32 nt, Human
uugcauucuuuuccuuuuucuuccuguucauu

SEQ ID NO: 273921 - RNA, 32 nt, Human
uugcauugaagccccacaaagccagauugcag

SEQ ID NO: 273922 - RNA, 32 nt, Human
uugcauugcauucagaguaaccugugugcaua

SEQ ID NO: 273923 - RNA, 32 nt, Human
uugcauuucaccccugcaucccagucgcccug

SEQ ID NO: 273924 - RNA, 32 nt, Human
uugcauuucugacuuuauccuguuguuaggaa

SEQ ID NO: 273925 - RNA, 32 nt, Human
uugcauuucuggacccuccacuucaaucugag

SEQ ID NO: 273926 - RNA, 32 nt, Human
uugcauuugcugucuccucugcucaccaggau

SEQ ID NO: 273927 - RNA, 32 nt, Human
uugcauuuggagccaugacagcugauagcucc

SEQ ID NO: 273928 - RNA, 32 nt, Human
uugcauuugggcagcuucugugguguaaauuc

SEQ ID NO: 273929 - RNA, 21 nt, Human
uugcauuuggggagggacuga

SEQ ID NO: 273930 - RNA, 32 nt, Human
uugcauuugucagccugaguuuccuugucucu

SEQ ID NO: 273931 - RNA, 32 nt, Human
uugcauuuuuccuguuuuaacaacggcugugc

SEQ ID NO: 273932 - RNA, 32 nt, Human
uugccaaaaacaacaaauagccacagaacgua

SEQ ID NO: 273933 - RNA, 32 nt, Human
uugccaaaaaggaacuuuucaugucaugcagu

SEQ ID NO: 273934 - RNA, 32 nt, Human
uugccaaaaugaagaggaaggaaggcgacucc

SEQ ID NO: 273935 - RNA, 32 nt, Human
uugccaaacuuugccauugugcuccugcauuu

SEQ ID NO: 273936 - RNA, 32 nt, Human
uugccaaagcaagggacuccagccucuuagga

SEQ ID NO: 273937 - RNA, 32 nt, Human
uugccaaagccagcaacaagagacuccaacaa

SEQ ID NO: 273938 - RNA, 22 nt, Human
uugccaaagcuuuuugccuugc

SEQ ID NO: 273939 - RNA, 32 nt, Human
uugccaaaguagaagaaauaguaguaccauau

SEQ ID NO: 273940 - RNA, 32 nt, Human
uugccaaaguaggaagaaaaagaacagcaaga

SEQ ID NO: 273941 - RNA, 25 nt, Human
uugccaaaugaugugauacuuucca

SEQ ID NO: 273942 - RNA, 32 nt, Human
uugccaacaauuuuaccagcaguuauaccuaa

SEQ ID NO: 273943 - RNA, 32 nt, Human
uugccaacagaaacauggcagauagguaucaa

SEQ ID NO: 273944 - RNA, 32 nt, Human
uugccaacauggugaaaccccaucucuacuaa

SEQ ID NO: 273945 - RNA, 32 nt, Human
uugccaacauggugaaacuccaucucuacuga

SEQ ID NO: 273946 - RNA, 32 nt, Human
uugccaaccuguccuccacugcagccucaccc

SEQ ID NO: 273947 - RNA, 32 nt, Human
uugccaacuauacgaauggcuucgaggagaua

SEQ ID NO: 273948 - RNA, 32 nt, Human
uugccaacugugugugcagguacuguguguac

SEQ ID NO: 273949 - RNA, 24 nt, Human
uugccaacuucaaugguccuaguc

SEQ ID NO: 273950 - RNA, 32 nt, Human
uugccaagaaggcaggggaagccccagugguc

SEQ ID NO: 273951 - RNA, 32 nt, Human
uugccaagaugggauggggaggggguaugaga

SEQ ID NO: 273952 - RNA, 32 nt, Human
uugccaagcagcugggacuacaggugcgcacc

SEQ ID NO: 273953 - RNA, 32 nt, Human
uugccaaggagggcuucaagaagauuagcaaa

SEQ ID NO: 273954 - RNA, 32 nt, Human
uugccaaggcuggagugcaggccgcgaucucg

SEQ ID NO: 273955 - RNA, 21 nt, Human
uugccaaggcuggagugcagu

SEQ ID NO: 273956 - RNA, 22 nt, Human
uugccaaggcuggagugcagug

SEQ ID NO: 273957 - RNA, 32 nt, Human
uugccaaguaaagucagcaaacaacaaacaaa

SEQ ID NO: 273958 - RNA, 32 nt, Human
uugccaaguccuucccuuugguuuuaguuuau

SEQ ID NO: 273959 - RNA, 32 nt, Human
uugccaaguguuuuuacaucaucucauuugau

SEQ ID NO: 273960 - RNA, 32 nt, Human
uugccaauaaaugaucucucauuuuuccaccu

SEQ ID NO: 273961 - RNA, 32 nt, Human
uugccaauccaguggacaagacaggagacugg

SEQ ID NO: 273962 - RNA, 32 nt, Human
uugccaauugucccccagaggggcucuccacc

SEQ ID NO: 273963 - RNA, 32 nt, Human
uugccacaacccagugaguuuccccagaucuc

SEQ ID NO: 273964 - RNA, 32 nt, Human
uugccacagcagcggauagagcaggagagcac

SEQ ID NO: 273965 - RNA, 32 nt, Human
uugccacaggcaggugagaaaggcagggccac

SEQ ID NO: 273966 - RNA, 32 nt, Human
uugccacaguccagagaaggccaccucuaaug

SEQ ID NO: 273967 - RNA, 32 nt, Human
uugccacauccacagcccaugccaaccccucc

SEQ ID NO: 273968 - RNA, 32 nt, Human
uugccacauuuuccucagguuacucaggaaaa

SEQ ID NO: 273969 - RNA, 32 nt, Human
uugccaccaaauaccacacacacuucaguuac

SEQ ID NO: 273970 - RNA, 32 nt, Human
uugccaccaaauauaaugcagacaaauuaugc

SEQ ID NO: 273971 - RNA, 19 nt, Human
uugccaccaccacuaguuc

SEQ ID NO: 273972 - RNA, 32 nt, Human
uugccaccacugcaagcaaaagucuggagaag

SEQ ID NO: 273973 - RNA, 32 nt, Human
uugccaccagugcugugucuuaagagcugcca

SEQ ID NO: 273974 - RNA, 32 nt, Human
uugccaccccuucacgugcacccucaauuucc

SEQ ID NO: 273975 - RNA, 24 nt, Human
uugccacccugugcugaggccuga

SEQ ID NO: 273976 - RNA, 32 nt, Human
uugccaccucgagggucgucucugcugggcgc

SEQ ID NO: 273977 - RNA, 32 nt, Human
uugccaccucuaacagcaccaaaucaaaaucu

SEQ ID NO: 273978 - RNA, 32 nt, Human
uugccacgaucucacuaaaggauuucuauuug

SEQ ID NO: 273979 - RNA, 32 nt, Human
uugccacuaacugaauucuucaaauacucaca

SEQ ID NO: 273980 - RNA, 32 nt, Human
uugccacuccccuaaacuccaggauuuauaaa

SEQ ID NO: 273981 - RNA, 32 nt, Human
uugccacugaggcuucacuggugagauccguu

SEQ ID NO: 273982 - RNA, 32 nt, Human
uugccacugcaaacaauaaacauccuuguaca

SEQ ID NO: 273983 - RNA, 32 nt, Human
uugccacugcacuccagccuaagcaaauagca

SEQ ID NO: 273984 - RNA, 32 nt, Human
uugccacugcacuccagccugggcaacaagag

SEQ ID NO: 273985 - RNA, 32 nt, Human
uugccacugcacuccagccugggcaacagagu

SEQ ID NO: 273986 - RNA, 32 nt, Human
uugccacugcacuccugccugggugacagaag

SEQ ID NO: 273987 - RNA, 32 nt, Human
uugccacugcacucuggccugggcaacagagc

SEQ ID NO: 273988 - RNA, 32 nt, Human
uugccacugcagaaugaagccagugcacaugg

SEQ ID NO: 273989 - RNA, 32 nt, Human
uugccacugcucuccagccugagcgacagagc

SEQ ID NO: 273990 - RNA, 32 nt, Human
uugccacuggggcagugagccuuugguccauu

SEQ ID NO: 273991 - RNA, 32 nt, Human
uugccacugguauuccuuccucuuuugacuuu

SEQ ID NO: 273992 - RNA, 32 nt, Human
uugccacuguacuccagccugaagagcgagac

SEQ ID NO: 273993 - RNA, 32 nt, Human
uugccacugugcuugagugccuggugaagaau

SEQ ID NO: 273994 - RNA, 32 nt, Human
uugccacuuagauuuucuagcagcaaaguccg

SEQ ID NO: 273995 - RNA, 32 nt, Human
uugccacuucucuccucuuccuccugccccug

SEQ ID NO: 273996 - RNA, 32 nt, Human
uugccacuuuagcugcugccucccucugauuc

SEQ ID NO: 273997 - RNA, 32 nt, Human
uugccagaaaggauucuaauaacucgguguca

SEQ ID NO: 273998 - RNA, 32 nt, Human
uugccagaaaugcuguucucaccagaaugccc

SEQ ID NO: 273999 - RNA, 32 nt, Human
uugccagaagcacauaauaaugacuuuguaag

SEQ ID NO: 274000 - RNA, 32 nt, Human
uugccagacagagaucagaauugaaccgucaa

SEQ ID NO: 274001 - RNA, 32 nt, Human
uugccagacugaagcaggaggauugcuugggc

SEQ ID NO: 274002 - RNA, 20 nt, Human
uugccagacuggagugcagu

SEQ ID NO: 274003 - RNA, 32 nt, Human
uugccagagacaccuugguagugcccaucggc

SEQ ID NO: 274004 - RNA, 32 nt, Human
uugccagagagggagaagagaguauguauaag

SEQ ID NO: 274005 - RNA, 32 nt, Human
uugccagagcccagauucccgagagcacucag

SEQ ID NO: 274006 - RNA, 32 nt, Human
uugccagcaaaccaccagaagcuaggagagaa

SEQ ID NO: 274007 - RNA, 32 nt, Human
uugccagcaaagugacucgcaccgugaaguuc

SEQ ID NO: 274008 - RNA, 32 nt, Human
uugccagcagaggcuguuccuuccugcuguuu

SEQ ID NO: 274009 - RNA, 32 nt, Human
uugccagcaggcucugugcuccuugaagcaag

SEQ ID NO: 274010 - RNA, 32 nt, Human
uugccagcagggugcugccaauaaaagguagu

SEQ ID NO: 274011 - RNA, 32 nt, Human
uugccagcauagugcuccuggaccagcgauau

SEQ ID NO: 274012 - RNA, 32 nt, Human
uugccagcauuuuaaugaaaaucuaaugaugu

SEQ ID NO: 274013 - RNA, 32 nt, Human
uugccagcauuuucacauuuugccuuucucgu

SEQ ID NO: 274014 - RNA, 32 nt, Human
uugccagccauguugcccaggcuggucgugaa

SEQ ID NO: 274015 - RNA, 32 nt, Human
uugccagcccagccccuccaugcacauuugga

SEQ ID NO: 274016 - RNA, 17 nt, Human
uugccagcugcugagcc

SEQ ID NO: 274017 - RNA, 21 nt, Human
uugccagcugcugcugaguca

SEQ ID NO: 274018 - RNA, 32 nt, Human
uugccagcugggugcugagcauugagucacug

SEQ ID NO: 274019 - RNA, 32 nt, Human
uugccagcuguuacagauggaggugaugcacc

SEQ ID NO: 274020 - RNA, 32 nt, Human
uugccagcuuuuccucccuuggguucugauau

SEQ ID NO: 274021 - RNA, 32 nt, Human
uugccaggaaaccagauguggcccagaugucc

SEQ ID NO: 274022 - RNA, 32 nt, Human
uugccaggaagguggcuucagcaccuccaggu

SEQ ID NO: 274023 - RNA, 32 nt, Human
uugccaggaggggucgaagggaaaguacaagg

SEQ ID NO: 274024 - RNA, 32 nt, Human
uugccaggcagcugcaggagagugcugccaag

SEQ ID NO: 274025 - RNA, 32 nt, Human
uugccaggcccaggcugggugcccuguggccu

SEQ ID NO: 274026 - RNA, 32 nt, Human
uugccaggcuagagacagggagagcagaguaa

SEQ ID NO: 274027 - RNA, 20 nt, Human
uugccaggcuagagugcagu

SEQ ID NO: 274028 - RNA, 23 nt, Human
uugccaggcuagagugcaguggc

SEQ ID NO: 274029 - RNA, 32 nt, Human
uugccaggcuagagugguguugcagugucagc

SEQ ID NO: 274030 - RNA, 20 nt, Human
uugccaggcuggaaugcagu

SEQ ID NO: 274031 - RNA, 20 nt, Human
uugccaggcuggagugcagu

SEQ ID NO: 274032 - RNA, 32 nt, Human
uugccaggcuuacagaacacccacugccuaga

SEQ ID NO: 274033 - RNA, 32 nt, Human
uugccagggaccaggagcucucacuuugccua

SEQ ID NO: 274034 - RNA, 32 nt, Human
uugccaggggagagacagccacgguccucuuu

SEQ ID NO: 274035 - RNA, 28 nt, Human
uugccaggugaugcugccucucugugga

SEQ ID NO: 274036 - RNA, 32 nt, Human
uugccaggugaugcugccucucuguggauccc

SEQ ID NO: 274037 - RNA, 32 nt, Human
uugccaggugggcccaaauggaaauguauuca

SEQ ID NO: 274038 - RNA, 32 nt, Human
uugccagguuuccugacuccacauguuaugcu

SEQ ID NO: 274039 - RNA, 32 nt, Human
uugccagucgcuaggucagcccauggggccac

SEQ ID NO: 274040 - RNA, 32 nt, Human
uugccagucuugccagggcaaaaaggcaagcg

SEQ ID NO: 274041 - RNA, 32 nt, Human
uugccagugaagccuccaacccuaagccacug

SEQ ID NO: 274042 - RNA, 32 nt, Human
uugccaguggggugggcagugcaguggggugg

SEQ ID NO: 274043 - RNA, 32 nt, Human
uugccagugggguggucacauauaguguucuc

SEQ ID NO: 274044 - RNA, 32 nt, Human
uugccaguuauguucaggaaacccaauaaccu

SEQ ID NO: 274045 - RNA, 32 nt, Human
uugccaguucccaaaucuuuaucuaucucaga

SEQ ID NO: 274046 - RNA, 32 nt, Human
uugccaguuggcuuuucuuaaaugaaaacacu

SEQ ID NO: 274047 - RNA, 31 nt, Human
uugccaguuuauucuggcccugugucuacug

SEQ ID NO: 274048 - RNA, 32 nt, Human
uugccaguuugaagacuguucuccuaaagugu

SEQ ID NO: 274049 - RNA, 32 nt, Human
uugccauaaaacugccaucacacagaagagag

SEQ ID NO: 274050 - RNA, 32 nt, Human
uugccauaacauccugcuccauucccucuaag

SEQ ID NO: 274051 - RNA, 32 nt, Human
uugccauauggguagagguuacagagggaggu

SEQ ID NO: 274052 - RNA, 32 nt, Human
uugccaucaagcaacccucauucucaugccug

SEQ ID NO: 274053 - RNA, 32 nt, Human
uugccaucacagaggccacacugagcgcuugg

SEQ ID NO: 274054 - RNA, 32 nt, Human
uugccaucagccauggcucccaaaaagagugu

SEQ ID NO: 274055 - RNA, 32 nt, Human
uugccaucccugucuccuccauccuggcugug

SEQ ID NO: 274056 - RNA, 32 nt, Human
uugccaucucaguugcugcagugcagugaauu

SEQ ID NO: 274057 - RNA, 32 nt, Human
uugccaucuccaggaagacuugacggcuuugg

SEQ ID NO: 274058 - RNA, 32 nt, Human
uugccaucuccucaucccugagccaucucccu

SEQ ID NO: 274059 - RNA, 32 nt, Human
uugccaucuccugcacagccugggggagcuaa

SEQ ID NO: 274060 - RNA, 32 nt, Human
uugccaugaaggaacuugggauuuucaaugga

SEQ ID NO: 274061 - RNA, 32 nt, Human
uugccaugcguccuggucaagcuccccucacu

SEQ ID NO: 274062 - RNA, 22 nt, Human
uugccaugcuuaggugacagaa

SEQ ID NO: 274063 - RNA, 32 nt, Human
uugccauggccauagggccacagugccguauc

SEQ ID NO: 274064 - RNA, 19 nt, Human
uugccauggcccugagcca

SEQ ID NO: 274065 - RNA, 32 nt, Human
uugccauggccgcuguaacacuacauguugcu

SEQ ID NO: 274066 - RNA, 32 nt, Human
uugccauggccuggccaucuuguugcugcuug

SEQ ID NO: 274067 - RNA, 32 nt, Human
uugccauggucaccaaacaggaaguggacauu

SEQ ID NO: 274068 - RNA, 32 nt, Human
uugccauggugaugguguagcccucccacuuu

SEQ ID NO: 274069 - RNA, 32 nt, Human
uugccaugugccaggcacugugcugagugcca

SEQ ID NO: 274070 - RNA, 32 nt, Human
uugccauguugcccaagcaggucuccaacucc

SEQ ID NO: 274071 - RNA, 32 nt, Human
uugccauguuuuugccaaaaccaagauuuuga

SEQ ID NO: 274072 - RNA, 23 nt, Human
uugccauuaaacuuaccugggca

SEQ ID NO: 274073 - RNA, 24 nt, Human
uugccauuaacuuucuucugggca

SEQ ID NO: 274074 - RNA, 32 nt, Human
uugccauuacuuuuccuucccacucucuccaa

SEQ ID NO: 274075 - RNA, 32 nt, Human
uugccauucaggaacguggcaaggagcaugca

SEQ ID NO: 274076 - RNA, 22 nt, Human
uugccauucuucauuccuacaa

SEQ ID NO: 274077 - RNA, 32 nt, Human
uugccauugcacuccagcugagagugugaccc

SEQ ID NO: 274078 - RNA, 32 nt, Human
uugccauugcccaggaggggcccagucaccau

SEQ ID NO: 274079 - RNA, 32 nt, Human
uugccauugggcagaggaguauaggacugggg

SEQ ID NO: 274080 - RNA, 32 nt, Human
uugccauugguuucugaaaaguauucacauca

SEQ ID NO: 274081 - RNA, 23 nt, Human
uugccauuuuaaauauguucuga

SEQ ID NO: 274082 - RNA, 32 nt, Human
uugccauuuuucaaagauuaaguaggaggaga

SEQ ID NO: 274083 - RNA, 32 nt, Human
uugccauuuuuggaggcauggaagagagacac

SEQ ID NO: 274084 - RNA, 21 nt, Human
uugcccaaccuggagugcaau

SEQ ID NO: 274085 - RNA, 24 nt, Human
uugcccaaccuggagugcaauggc

SEQ ID NO: 274086 - RNA, 21 nt, Human
uugcccaaccuggagugcagu

SEQ ID NO: 274087 - RNA, 32 nt, Human
uugcccaaccuggagugcaguggugcggucuc

SEQ ID NO: 274088 - RNA, 32 nt, Human
uugcccaagacagaucucaccccacaucuuca

SEQ ID NO: 274089 - RNA, 32 nt, Human
uugcccaagaguuugagaccagccuggacaac

SEQ ID NO: 274090 - RNA, 24 nt, Human
uugcccaagcugaucuugaacucc

SEQ ID NO: 274091 - RNA, 23 nt, Human
uugcccaagcuggaaugcagugg

SEQ ID NO: 274092 - RNA, 24 nt, Human
uugcccaagcuggaaugcaguggc

SEQ ID NO: 274093 - RNA, 32 nt, Human
uugcccaagcuggaaugcaguggcacagucac

SEQ ID NO: 274094 - RNA, 21 nt, Human
uugcccaagcuggaguacagu

SEQ ID NO: 274095 - RNA, 24 nt, Human
uugcccaagcuggaguacaguagu

SEQ ID NO: 274096 - RNA, 32 nt, Human
uugcccaagcuggaguacaguagugcaaucuc

SEQ ID NO: 274097 - RNA, 23 nt, Human
uugcccaagcuggagugaagugg

SEQ ID NO: 274098 - RNA, 32 nt, Human
uugcccaagcuggagugaagugguacaaucug

SEQ ID NO: 274099 - RNA, 19 nt, Human
uugcccaagcuggagugca

SEQ ID NO: 274100 - RNA, 23 nt, Human
uugcccaagcuggagugcaaugg

SEQ ID NO: 274101 - RNA, 24 nt, Human
uugcccaagcuggagugcaauggc

SEQ ID NO: 274102 - RNA, 32 nt, Human
uugcccaagcuggagugcaauggcgcgaucuc

SEQ ID NO: 274103 - RNA, 23 nt, Human
uugcccaagcuggagugcagugg

SEQ ID NO: 274104 - RNA, 24 nt, Human
uugcccaagcuggagugcaguggc

SEQ ID NO: 274105 - RNA, 32 nt, Human
uugcccaagcuggagugcaguggcgcgaucuc

SEQ ID NO: 274106 - RNA, 32 nt, Human
uugcccaagcuggagugcaguggugcaaugug

SEQ ID NO: 274107 - RNA, 32 nt, Human
uugcccaagcuggucuggaacuccugggcuca

SEQ ID NO: 274108 - RNA, 32 nt, Human
uugcccaagcuggucuugaacuacugagcuca

SEQ ID NO: 274109 - RNA, 24 nt, Human
uugcccaagcuggugucaaacucc

SEQ ID NO: 274110 - RNA, 32 nt, Human
uugcccaagcuugagggcaguggugcaaucau

SEQ ID NO: 274111 - RNA, 24 nt, Human
uugcccaagcuugucuugaacucc

SEQ ID NO: 274112 - RNA, 32 nt, Human
uugcccaaggggacacagcagugacggcucug

SEQ ID NO: 274113 - RNA, 23 nt, Human
uugcccaagguagagugcagugg

SEQ ID NO: 274114 - RNA, 24 nt, Human
uugcccaagguagagugcaguggc

SEQ ID NO: 274115 - RNA, 19 nt, Human
uugcccaaggugugcaggg

SEQ ID NO: 274116 - RNA, 32 nt, Human
uugcccaagguugcacagcaagaaaagggaga

SEQ ID NO: 274117 - RNA, 23 nt, Human
uugcccaaguuggagugcagugg

SEQ ID NO: 274118 - RNA, 24 nt, Human
uugcccaaguuggagugcaguggc

SEQ ID NO: 274119 - RNA, 32 nt, Human
uugcccaaugcuucacaggccaugcuggggcc

SEQ ID NO: 274120 - RNA, 32 nt, Human
uugcccaauuaauacuagggugcaguguaucc

SEQ ID NO: 274121 - RNA, 24 nt, Human
uugcccacacuagagugcaauggc

SEQ ID NO: 274122 - RNA, 32 nt, Human
uugcccacagucauggucucuguagaaucuga

SEQ ID NO: 274123 - RNA, 24 nt, Human
uugcccacauuggagugcaguggc

SEQ ID NO: 274124 - RNA, 32 nt, Human
uugcccacccacccaucucacuaugcaauucg

SEQ ID NO: 274125 - RNA, 32 nt, Human
uugcccaccuccacucuaauucccauccauua

SEQ ID NO: 274126 - RNA, 32 nt, Human
uugcccacgaucccagacacugaagaugaaau

SEQ ID NO: 274127 - RNA, 24 nt, Human
uugcccacgcaggagugcaguggc

SEQ ID NO: 274128 - RNA, 32 nt, Human
uugcccacgcaggagugcaguggcaugcucuc

SEQ ID NO: 274129 - RNA, 21 nt, Human
uugcccacgcuggagugcaau

SEQ ID NO: 274130 - RNA, 32 nt, Human
uugcccacgcuggagugcaauggugcaaucuc

SEQ ID NO: 274131 - RNA, 32 nt, Human
uugcccacgcuggucucgaauuccuggccuca

SEQ ID NO: 274132 - RNA, 32 nt, Human
uugcccacggcaacugccuuccugccucuccc

SEQ ID NO: 274133 - RNA, 32 nt, Human
uugcccacggguuuguuuccaaguccucuucu

SEQ ID NO: 274134 - RNA, 24 nt, Human
uugcccacggugaucucgaacucc

SEQ ID NO: 274135 - RNA, 32 nt, Human
uugcccacugcaaguucucuccaggugcaauu

SEQ ID NO: 274136 - RNA, 32 nt, Human
uugcccacugcacacuugcuguguacaaugac

SEQ ID NO: 274137 - RNA, 32 nt, Human
uugcccacugcacuccagccugggcaacagag

SEQ ID NO: 274138 - RNA, 32 nt, Human
uugcccacuuuccucuuuuugggguuggugag

SEQ ID NO: 274139 - RNA, 32 nt, Human
uugcccacuuucugcuggucuccgagagacug

SEQ ID NO: 274140 - RNA, 32 nt, Human
uugcccagaacccacgccucaggaugaucgug

SEQ ID NO: 274141 - RNA, 19 nt, Human
uugcccagacuagaguaca

SEQ ID NO: 274142 - RNA, 23 nt, Human
uugcccagacuagagugcagugg

SEQ ID NO: 274143 - RNA, 24 nt, Human
uugcccagacuagagugcaguggu

SEQ ID NO: 274144 - RNA, 22 nt, Human
uugcccagacuggaauacagug

SEQ ID NO: 274145 - RNA, 23 nt, Human
uugcccagacuggaauacagugg

SEQ ID NO: 274146 - RNA, 24 nt, Human
uugcccagacuggaauacaguggu

SEQ ID NO: 274147 - RNA, 22 nt, Human
uugcccagacuggagagcagug

SEQ ID NO: 274148 - RNA, 23 nt, Human
uugcccagacuggagagcagugg

SEQ ID NO: 274149 - RNA, 24 nt, Human
uugcccagacuggagagcaguggc

SEQ ID NO: 274150 - RNA, 23 nt, Human
uugcccagacuggagggcagugg

SEQ ID NO: 274151 - RNA, 32 nt, Human
uugcccagacuggagugaaguagcaugaucuu

SEQ ID NO: 274152 - RNA, 19 nt, Human
uugcccagacuggagugca

SEQ ID NO: 274153 - RNA, 23 nt, Human
uugcccagacuggagugcaaugg

SEQ ID NO: 274154 - RNA, 24 nt, Human
uugcccagacuggagugcaauggc

SEQ ID NO: 274155 - RNA, 32 nt, Human
uugcccagacuggagugcaauggcacacgauc

SEQ ID NO: 274156 - RNA, 23 nt, Human
uugcccagacuggagugcagugg

SEQ ID NO: 274157 - RNA, 24 nt, Human
uugcccagacuggagugcaguggc

SEQ ID NO: 274158 - RNA, 32 nt, Human
uugcccagacuggagugcaguggcgugaucuc

SEQ ID NO: 274159 - RNA, 32 nt, Human
uugcccagacuggagugcagugguguaaucuu

SEQ ID NO: 274160 - RNA, 32 nt, Human
uugcccagacuggagugcaguggugugaucau

SEQ ID NO: 274161 - RNA, 24 nt, Human
uugcccagacuggucucaaacucc

SEQ ID NO: 274162 - RNA, 24 nt, Human
uugcccagacuggucucgaacucc

SEQ ID NO: 274163 - RNA, 24 nt, Human
uugcccagacuggucucgaacucu

SEQ ID NO: 274164 - RNA, 24 nt, Human
uugcccagacuggucuugaacucc

SEQ ID NO: 274165 - RNA, 24 nt, Human
uugcccagacugguuuugaacucc

SEQ ID NO: 274166 - RNA, 32 nt, Human
uugcccagagaggccucacacaggccucagaa

SEQ ID NO: 274167 - RNA, 32 nt, Human
uugcccagagcacgaggagcugcuggcggggg

SEQ ID NO: 274168 - RNA, 19 nt, Human
uugcccagauuggagucag

SEQ ID NO: 274169 - RNA, 24 nt, Human
uugcccagauuggucucaaacucc

SEQ ID NO: 274170 - RNA, 28 nt, Human
uugcccagcagugcugccuucagcggcc

SEQ ID NO: 274171 - RNA, 17 nt, Human
uugcccagccggcugca

SEQ ID NO: 274172 - RNA, 20 nt, Human
uugcccagccgugguggccc

SEQ ID NO: 274173 - RNA, 21 nt, Human
uugcccagccuggagugcaau

SEQ ID NO: 274174 - RNA, 24 nt, Human
uugcccagccuggagugcaauagc

SEQ ID NO: 274175 - RNA, 32 nt, Human
uugcccagccuggagugcaauagcgugaucuc

SEQ ID NO: 274176 - RNA, 32 nt, Human
uugcccagccuggagugcaauggcacaaucuc

SEQ ID NO: 274177 - RNA, 32 nt, Human
uugcccagccuggagugcagugugucaucuug

SEQ ID NO: 274178 - RNA, 32 nt, Human
uugcccagccugggggaguggggaaggcuugg

SEQ ID NO: 274179 - RNA, 32 nt, Human
uugcccagcugagugcuggcucugaggaagcc

SEQ ID NO: 274180 - RNA, 20 nt, Human
uugcccagcuggagugcagu

SEQ ID NO: 274181 - RNA, 23 nt, Human
uugcccagcuggagugcaguggc

SEQ ID NO: 274182 - RNA, 32 nt, Human
uugcccagcuuggaguugucugucacgcacau

SEQ ID NO: 274183 - RNA, 32 nt, Human
uugcccaggagaaugaggagccucccugcagu

SEQ ID NO: 274184 - RNA, 32 nt, Human
uugcccaggagggagugcaguggugcaaccuc

SEQ ID NO: 274185 - RNA, 24 nt, Human
uugcccaggagggucucgaacucc

SEQ ID NO: 274186 - RNA, 32 nt, Human
uugcccaggauccauugcugcagcuuccugaa

SEQ ID NO: 274187 - RNA, 32 nt, Human
uugcccaggauggaaugcaguggcacaaucuu

SEQ ID NO: 274188 - RNA, 23 nt, Human
uugcccaggauggagugcagugg

SEQ ID NO: 274189 - RNA, 32 nt, Human
uugcccaggauggagugcaguggugagaucac

SEQ ID NO: 274190 - RNA, 24 nt, Human
uugcccaggcagaucucagacucc

SEQ ID NO: 274191 - RNA, 21 nt, Human
uugcccaggcaggaguacagu

SEQ ID NO: 274192 - RNA, 24 nt, Human
uugcccaggcaggaguacaguagu

SEQ ID NO: 274193 - RNA, 24 nt, Human
uugcccaggcaggaguacaguggc

SEQ ID NO: 274194 - RNA, 24 nt, Human
uugcccaggcaggucuugaacucc

SEQ ID NO: 274195 - RNA, 24 nt, Human
uugcccaggcaguagugcaguggc

SEQ ID NO: 274196 - RNA, 32 nt, Human
uugcccaggcaguagugcaguggcgcgauaua

SEQ ID NO: 274197 - RNA, 24 nt, Human
uugcccaggccagucucaaacucc

SEQ ID NO: 274198 - RNA, 24 nt, Human
uugcccaggccagucuugaacucc

SEQ ID NO: 274199 - RNA, 24 nt, Human
uugcccaggccaguuagaaaaucc

SEQ ID NO: 274200 - RNA, 32 nt, Human
uugcccaggcccgagugcaguggugcgaucuu

SEQ ID NO: 274201 - RNA, 19 nt, Human
uugcccaggccggagugca

SEQ ID NO: 274202 - RNA, 21 nt, Human
uugcccaggccggagugcaau

SEQ ID NO: 274203 - RNA, 22 nt, Human
uugcccaggccggagugcaaug

SEQ ID NO: 274204 - RNA, 23 nt, Human
uugcccaggccggagugcaaugg

SEQ ID NO: 274205 - RNA, 24 nt, Human
uugcccaggccggagugcaauggc

SEQ ID NO: 274206 - RNA, 24 nt, Human
uugcccaggccggucuugaacucc

SEQ ID NO: 274207 - RNA, 24 nt, Human
uugcccaggccuaguuucaguggc

SEQ ID NO: 274208 - RNA, 20 nt, Human
uugcccaggcggaguacaau

SEQ ID NO: 274209 - RNA, 23 nt, Human
uugcccaggcggaguacaauggu

SEQ ID NO: 274210 - RNA, 24 nt, Human
uugcccaggcuaauaucgaaugcu

SEQ ID NO: 274211 - RNA, 24 nt, Human
uugcccaggcuaaucucaaauucc

SEQ ID NO: 274212 - RNA, 24 nt, Human
uugcccaggcuagagcgcaggggc

SEQ ID NO: 274213 - RNA, 32 nt, Human
uugcccaggcuagagggcaauggugcaaucuc

SEQ ID NO: 274214 - RNA, 19 nt, Human
uugcccaggcuagagugca

SEQ ID NO: 274215 - RNA, 23 nt, Human
uugcccaggcuagagugcaaugg

SEQ ID NO: 274216 - RNA, 24 nt, Human
uugcccaggcuagagugcaauggc

SEQ ID NO: 274217 - RNA, 32 nt, Human
uugcccaggcuagagugcaauggcacaaucuc

SEQ ID NO: 274218 - RNA, 32 nt, Human
uugcccaggcuagagugcaauggcacaaucug

SEQ ID NO: 274219 - RNA, 32 nt, Human
uugcccaggcuagagugcaauggcgccaucuc

SEQ ID NO: 274220 - RNA, 32 nt, Human
uugcccaggcuagagugcaauggugcgaucua

SEQ ID NO: 274221 - RNA, 23 nt, Human
uugcccaggcuagagugcacugg

SEQ ID NO: 274222 - RNA, 24 nt, Human
uugcccaggcuagagugcacuggu

SEQ ID NO: 274223 - RNA, 20 nt, Human
uugcccaggcuagagugcag

SEQ ID NO: 274224 - RNA, 24 nt, Human
uugcccaggcuagagugcagcagu

SEQ ID NO: 274225 - RNA, 32 nt, Human
uugcccaggcuagagugcagcagugacaugau

SEQ ID NO: 274226 - RNA, 21 nt, Human
uugcccaggcuagagugcagu

SEQ ID NO: 274227 - RNA, 23 nt, Human
uugcccaggcuagagugcagugg

SEQ ID NO: 274228 - RNA, 24 nt, Human
uugcccaggcuagagugcaguggc

SEQ ID NO: 274229 - RNA, 32 nt, Human
uugcccaggcuagagugcaguggcacaaucau

SEQ ID NO: 274230 - RNA, 24 nt, Human
uugcccaggcuagagugcaguggu

SEQ ID NO: 274231 - RNA, 32 nt, Human
uugcccaggcuagagugcaguggugcaaucuc

SEQ ID NO: 274232 - RNA, 32 nt, Human
uugcccaggcuagagugcaguggugccacagc

SEQ ID NO: 274233 - RNA, 23 nt, Human
uugcccaggcuagcaugcaaugg

SEQ ID NO: 274234 - RNA, 24 nt, Human
uugcccaggcuagcaugcaauggu

SEQ ID NO: 274235 - RNA, 24 nt, Human
uugcccaggcuagccucaaacucc

SEQ ID NO: 274236 - RNA, 18 nt, Human
uugcccaggcuagucugg

SEQ ID NO: 274237 - RNA, 24 nt, Human
uugcccaggcuagucuggaacucc

SEQ ID NO: 274238 - RNA, 24 nt, Human
uugcccaggcuagucuugaacucc

SEQ ID NO: 274239 - RNA, 23 nt, Human
uugcccaggcucaucucgaacuc

SEQ ID NO: 274240 - RNA, 32 nt, Human
uugcccaggcuccagugcaguggugugaucau

SEQ ID NO: 274241 - RNA, 32 nt, Human
uugcccaggcucuagugcaauggcacgaucuc

SEQ ID NO: 274242 - RNA, 19 nt, Human
uugcccaggcugaagugca

SEQ ID NO: 274243 - RNA, 32 nt, Human
uugcccaggcugaagugcaauguugugaucuc

SEQ ID NO: 274244 - RNA, 21 nt, Human
uugcccaggcugaagugcagu

SEQ ID NO: 274245 - RNA, 23 nt, Human
uugcccaggcugaagugcagugg

SEQ ID NO: 274246 - RNA, 32 nt, Human
uugcccaggcugaagugcaguggggcgcucuc

SEQ ID NO: 274247 - RNA, 32 nt, Human
uugcccaggcugaagugcaguggugcgaucuc

SEQ ID NO: 274248 - RNA, 32 nt, Human
uugcccaggcugaagugcaguggugugaucuu

SEQ ID NO: 274249 - RNA, 32 nt, Human
uugcccaggcugaagugcaguguugugaucuc

SEQ ID NO: 274250 - RNA, 23 nt, Human
uugcccaggcugaaguguagugg

SEQ ID NO: 274251 - RNA, 24 nt, Human
uugcccaggcugaauucagacucc

SEQ ID NO: 274252 - RNA, 24 nt, Human
uugcccaggcugaccuccaacucc

SEQ ID NO: 274253 - RNA, 24 nt, Human
uugcccaggcugaucucaaauucc

SEQ ID NO: 274254 - RNA, 24 nt, Human
uugcccaggcugaucucgaaccuc

SEQ ID NO: 274255 - RNA, 24 nt, Human
uugcccaggcugaucuugaacucc

SEQ ID NO: 274256 - RNA, 32 nt, Human
uugcccaggcugcagugcaauggcacaaucuu

SEQ ID NO: 274257 - RNA, 24 nt, Human
uugcccaggcugcagugcaguggc

SEQ ID NO: 274258 - RNA, 32 nt, Human
uugcccaggcugcagugcaguggugccaucuc

SEQ ID NO: 274259 - RNA, 32 nt, Human
uugcccaggcugcagugcaguggugugaucuu

SEQ ID NO: 274260 - RNA, 24 nt, Human
uugcccaggcugcucucaaacucc

SEQ ID NO: 274261 - RNA, 32 nt, Human
uugcccaggcuggaaauggcgcgaucucggcu

SEQ ID NO: 274262 - RNA, 23 nt, Human
uugcccaggcuggaauacagugg

SEQ ID NO: 274263 - RNA, 24 nt, Human
uugcccaggcuggaauacaguggc

SEQ ID NO: 274264 - RNA, 23 nt, Human
uugcccaggcuggaaugcaaugg

SEQ ID NO: 274265 - RNA, 24 nt, Human
uugcccaggcuggaaugcaauggc

SEQ ID NO: 274266 - RNA, 32 nt, Human
uugcccaggcuggaaugcaauggcgcgaucuc

SEQ ID NO: 274267 - RNA, 32 nt, Human
uugcccaggcuggaaugcaauggcgugaucuu

SEQ ID NO: 274268 - RNA, 21 nt, Human
uugcccaggcuggaaugcagu

SEQ ID NO: 274269 - RNA, 23 nt, Human
uugcccaggcuggaaugcagugg

SEQ ID NO: 274270 - RNA, 24 nt, Human
uugcccaggcuggaaugcaguggc

SEQ ID NO: 274271 - RNA, 32 nt, Human
uugcccaggcuggaaugcaguggcacaaucuu

SEQ ID NO: 274272 - RNA, 32 nt, Human
uugcccaggcuggaaugcaguggcgugaucuc

SEQ ID NO: 274273 - RNA, 32 nt, Human
uugcccaggcuggaaugcaguggcgugaucuu

SEQ ID NO: 274274 - RNA, 32 nt, Human
uugcccaggcuggaaugcagugguacgcucuc

SEQ ID NO: 274275 - RNA, 32 nt, Human
uugcccaggcuggaaugcaguggugugcucug

SEQ ID NO: 274276 - RNA, 24 nt, Human
uugcccaggcuggaccugaacucc

SEQ ID NO: 274277 - RNA, 32 nt, Human
uugcccaggcuggacuacaguggcacaaucuc

SEQ ID NO: 274278 - RNA, 20 nt, Human
uugcccaggcuggacugcag

SEQ ID NO: 274279 - RNA, 23 nt, Human
uugcccaggcuggacugcagcag

SEQ ID NO: 274280 - RNA, 24 nt, Human
uugcccaggcuggacugcagcagc

SEQ ID NO: 274281 - RNA, 24 nt, Human
uugcccaggcuggacugcaguggc

SEQ ID NO: 274282 - RNA, 32 nt, Human
uugcccaggcuggacugcaguggcgugaucuc

SEQ ID NO: 274283 - RNA, 23 nt, Human
uugcccaggcuggagagcagugg

SEQ ID NO: 274284 - RNA, 24 nt, Human
uugcccaggcuggagagcaguggc

SEQ ID NO: 274285 - RNA, 32 nt, Human
uugcccaggcuggagagcaguggcgcgaucuu

SEQ ID NO: 274286 - RNA, 32 nt, Human
uugcccaggcuggagagcaguggugcaaucuu

SEQ ID NO: 274287 - RNA, 22 nt, Human
uugcccaggcuggagcgaagug

SEQ ID NO: 274288 - RNA, 32 nt, Human
uugcccaggcuggagcgcaaguggcgcgaucu

SEQ ID NO: 274289 - RNA, 23 nt, Human
uugcccaggcuggagcgcagugg

SEQ ID NO: 274290 - RNA, 32 nt, Human
uugcccaggcuggagcgcaguggggugaucuc

SEQ ID NO: 274291 - RNA, 23 nt, Human
uugcccaggcuggagggcaaugg

SEQ ID NO: 274292 - RNA, 32 nt, Human
uugcccaggcuggagggcaauggugcaaucuc

SEQ ID NO: 274293 - RNA, 22 nt, Human
uugcccaggcuggagggcagug

SEQ ID NO: 274294 - RNA, 32 nt, Human
uugcccaggcuggagggcagugacgugaucag

SEQ ID NO: 274295 - RNA, 23 nt, Human
uugcccaggcuggagggcagugg

SEQ ID NO: 274296 - RNA, 21 nt, Human
uugcccaggcuggaguacaau

SEQ ID NO: 274297 - RNA, 22 nt, Human
uugcccaggcuggaguacaaug

SEQ ID NO: 274298 - RNA, 23 nt, Human
uugcccaggcuggaguacaaugg

SEQ ID NO: 274299 - RNA, 24 nt, Human
uugcccaggcuggaguacaauggc

SEQ ID NO: 274300 - RNA, 32 nt, Human
uugcccaggcuggaguacaauggcgcgaucuc

SEQ ID NO: 274301 - RNA, 32 nt, Human
uugcccaggcuggaguacaauggcgugaucuc

SEQ ID NO: 274302 - RNA, 24 nt, Human
uugcccaggcuggaguacaauggu

SEQ ID NO: 274303 - RNA, 32 nt, Human
uugcccaggcuggaguacaauggugcgaucuc

SEQ ID NO: 274304 - RNA, 32 nt, Human
uugcccaggcuggaguacaauggugcgaucuu

SEQ ID NO: 274305 - RNA, 21 nt, Human
uugcccaggcuggaguacagu

SEQ ID NO: 274306 - RNA, 23 nt, Human
uugcccaggcuggaguacagugg

SEQ ID NO: 274307 - RNA, 24 nt, Human
uugcccaggcuggaguacaguggc

SEQ ID NO: 274308 - RNA, 32 nt, Human
uugcccaggcuggaguacaguggcacaaucuc

SEQ ID NO: 274309 - RNA, 32 nt, Human
uugcccaggcuggaguacaguggcacaaucuu

SEQ ID NO: 274310 - RNA, 32 nt, Human
uugcccaggcuggaguacaguggcgugaucuc

SEQ ID NO: 274311 - RNA, 24 nt, Human
uugcccaggcuggaguacaguggu

SEQ ID NO: 274312 - RNA, 32 nt, Human
uugcccaggcuggaguacagugguaugaucuu

SEQ ID NO: 274313 - RNA, 32 nt, Human
uugcccaggcuggaguacaguggucacugcaa

SEQ ID NO: 274314 - RNA, 23 nt, Human
uugcccaggcuggaguacauugg

SEQ ID NO: 274315 - RNA, 32 nt, Human
uugcccaggcuggaguacauuggugugaugau

SEQ ID NO: 274316 - RNA, 21 nt, Human
uugcccaggcuggaguauagu

SEQ ID NO: 274317 - RNA, 32 nt, Human
uugcccaggcuggaguauaguagugcaguggu

SEQ ID NO: 274318 - RNA, 32 nt, Human
uugcccaggcuggagugaaauggugcgaucuc

SEQ ID NO: 274319 - RNA, 21 nt, Human
uugcccaggcuggagugaagu

SEQ ID NO: 274320 - RNA, 23 nt, Human
uugcccaggcuggagugaagugg

SEQ ID NO: 274321 - RNA, 32 nt, Human
uugcccaggcuggagugaaguggcgugaccuu

SEQ ID NO: 274322 - RNA, 32 nt, Human
uugcccaggcuggagugaguggcacagucucg

SEQ ID NO: 274323 - RNA, 19 nt, Human
uugcccaggcuggagugca

SEQ ID NO: 274324 - RNA, 23 nt, Human
uugcccaggcuggagugcaacgg

SEQ ID NO: 274325 - RNA, 24 nt, Human
uugcccaggcuggagugcaacggc

SEQ ID NO: 274326 - RNA, 32 nt, Human
uugcccaggcuggagugcaacggcacgaucuc

SEQ ID NO: 274327 - RNA, 32 nt, Human
uugcccaggcuggagugcaacggcaugauuuu

SEQ ID NO: 274328 - RNA, 32 nt, Human
uugcccaggcuggagugcaacggcgcgcucuu

SEQ ID NO: 274329 - RNA, 32 nt, Human
uugcccaggcuggagugcaacggugcagucuc

SEQ ID NO: 274330 - RNA, 32 nt, Human
uugcccaggcuggagugcaagggcgcaaucuc

SEQ ID NO: 274331 - RNA, 21 nt, Human
uugcccaggcuggagugcaau

SEQ ID NO: 274332 - RNA, 24 nt, Human
uugcccaggcuggagugcaauagc

SEQ ID NO: 274333 - RNA, 32 nt, Human
uugcccaggcuggagugcaauagcacgaucuu

SEQ ID NO: 274334 - RNA, 32 nt, Human
uugcccaggcuggagugcaauagcaugaucuc

SEQ ID NO: 274335 - RNA, 32 nt, Human
uugcccaggcuggagugcaauagcgcaaucuc

SEQ ID NO: 274336 - RNA, 32 nt, Human
uugcccaggcuggagugcaauagcgcgaucuu

SEQ ID NO: 274337 - RNA, 22 nt, Human
uugcccaggcuggagugcaaug

SEQ ID NO: 274338 - RNA, 32 nt, Human
uugcccaggcuggagugcaaugaugcaaucuc

SEQ ID NO: 274339 - RNA, 32 nt, Human
uugcccaggcuggagugcaaugcgcgaucuca

SEQ ID NO: 274340 - RNA, 23 nt, Human
uugcccaggcuggagugcaaugg

SEQ ID NO: 274341 - RNA, 32 nt, Human
uugcccaggcuggagugcaauggagcgaucuu

SEQ ID NO: 274342 - RNA, 24 nt, Human
uugcccaggcuggagugcaauggc

SEQ ID NO: 274343 - RNA, 32 nt, Human
uugcccaggcuggagugcaauggcacaaccuc

SEQ ID NO: 274344 - RNA, 32 nt, Human
uugcccaggcuggagugcaauggcacaaucuc

SEQ ID NO: 274345 - RNA, 32 nt, Human
uugcccaggcuggagugcaauggcacaauuuc

SEQ ID NO: 274346 - RNA, 32 nt, Human
uugcccaggcuggagugcaauggcacaucuug

SEQ ID NO: 274347 - RNA, 32 nt, Human
uugcccaggcuggagugcaauggcacgacguc

SEQ ID NO: 274348 - RNA, 32 nt, Human
uugcccaggcuggagugcaauggcacgaucuc

SEQ ID NO: 274349 - RNA, 32 nt, Human
uugcccaggcuggagugcaauggcacgaucuu

SEQ ID NO: 274350 - RNA, 32 nt, Human
uugcccaggcuggagugcaauggcacguucuc

SEQ ID NO: 274351 - RNA, 32 nt, Human
uugcccaggcuggagugcaauggcgcaaucuc

SEQ ID NO: 274352 - RNA, 32 nt, Human
uugcccaggcuggagugcaauggcgcaaucuu

SEQ ID NO: 274353 - RNA, 32 nt, Human
uugcccaggcuggagugcaauggcgcgaaccu

SEQ ID NO: 274354 - RNA, 32 nt, Human
uugcccaggcuggagugcaauggcgcgauccu

SEQ ID NO: 274355 - RNA, 32 nt, Human
uugcccaggcuggagugcaauggcgcgaucuc

SEQ ID NO: 274356 - RNA, 32 nt, Human
uugcccaggcuggagugcaauggcgcgaucuu

SEQ ID NO: 274357 - RNA, 32 nt, Human
uugcccaggcuggagugcaauggcgcguucuc

SEQ ID NO: 274358 - RNA, 32 nt, Human
uugcccaggcuggagugcaauggcguaaucuc

SEQ ID NO: 274359 - RNA, 32 nt, Human
uugcccaggcuggagugcaauggcguaucucc

SEQ ID NO: 274360 - RNA, 32 nt, Human
uugcccaggcuggagugcaauggcgugaucgc

SEQ ID NO: 274361 - RNA, 32 nt, Human
uugcccaggcuggagugcaauggcgugaucuc

SEQ ID NO: 274362 - RNA, 32 nt, Human
uugcccaggcuggagugcaauggcgugaucuu

SEQ ID NO: 274363 - RNA, 32 nt, Human
uugcccaggcuggagugcaaugguacaaucuc

SEQ ID NO: 274364 - RNA, 32 nt, Human
uugcccaggcuggagugcaaugguaugaucuu

SEQ ID NO: 274365 - RNA, 32 nt, Human
uugcccaggcuggagugcaauggugcaaucuc

SEQ ID NO: 274366 - RNA, 32 nt, Human
uugcccaggcuggagugcaauggugcaaucuu

SEQ ID NO: 274367 - RNA, 32 nt, Human
uugcccaggcuggagugcaauggugcaauuuc

SEQ ID NO: 274368 - RNA, 32 nt, Human
uugcccaggcuggagugcaauggugcaguuuu

SEQ ID NO: 274369 - RNA, 32 nt, Human
uugcccaggcuggagugcaauggugcgaucuc

SEQ ID NO: 274370 - RNA, 32 nt, Human
uugcccaggcuggagugcaauggugcgaucuu

SEQ ID NO: 274371 - RNA, 22 nt, Human
uugcccaggcuggagugcacug

SEQ ID NO: 274372 - RNA, 23 nt, Human
uugcccaggcuggagugcacugg

SEQ ID NO: 274373 - RNA, 32 nt, Human
uugcccaggcuggagugcacuggcgugaucuc

SEQ ID NO: 274374 - RNA, 20 nt, Human
uugcccaggcuggagugcag

SEQ ID NO: 274375 - RNA, 32 nt, Human
uugcccaggcuggagugcagaggugcgaucuc

SEQ ID NO: 274376 - RNA, 24 nt, Human
uugcccaggcuggagugcagcagc

SEQ ID NO: 274377 - RNA, 32 nt, Human
uugcccaggcuggagugcagcgcauggucuca

SEQ ID NO: 274378 - RNA, 32 nt, Human
uugcccaggcuggagugcaggggcacgaucuc

SEQ ID NO: 274379 - RNA, 32 nt, Human
uugcccaggcuggagugcaggggcguaaucuc

SEQ ID NO: 274380 - RNA, 21 nt, Human
uugcccaggcuggagugcagu

SEQ ID NO: 274381 - RNA, 24 nt, Human
uugcccaggcuggagugcaguagc

SEQ ID NO: 274382 - RNA, 32 nt, Human
uugcccaggcuggagugcaguagcacgaucuc

SEQ ID NO: 274383 - RNA, 32 nt, Human
uugcccaggcuggagugcaguagcacuaucac

SEQ ID NO: 274384 - RNA, 32 nt, Human
uugcccaggcuggagugcaguagcuauucaca

SEQ ID NO: 274385 - RNA, 32 nt, Human
uugcccaggcuggagugcaguagugcagucgu

SEQ ID NO: 274386 - RNA, 32 nt, Human
uugcccaggcuggagugcagucgcacaaucuc

SEQ ID NO: 274387 - RNA, 22 nt, Human
uugcccaggcuggagugcagug

SEQ ID NO: 274388 - RNA, 32 nt, Human
uugcccaggcuggagugcagugacgcgauccu

SEQ ID NO: 274389 - RNA, 32 nt, Human
uugcccaggcuggagugcagugacgugaucuc

SEQ ID NO: 274390 - RNA, 32 nt, Human
uugcccaggcuggagugcagugagcuauuaca

SEQ ID NO: 274391 - RNA, 32 nt, Human
uugcccaggcuggagugcagugaugugaucuc

SEQ ID NO: 274392 - RNA, 23 nt, Human
uugcccaggcuggagugcagugg

SEQ ID NO: 274393 - RNA, 32 nt, Human
uugcccaggcuggagugcaguggagcaaucuu

SEQ ID NO: 274394 - RNA, 24 nt, Human
uugcccaggcuggagugcaguggc

SEQ ID NO: 274395 - RNA, 32 nt, Human
uugcccaggcuggagugcaguggcacaaucuc

SEQ ID NO: 274396 - RNA, 32 nt, Human
uugcccaggcuggagugcaguggcgcaauccc

SEQ ID NO: 274397 - RNA, 32 nt, Human
uugcccaggcuggagugcaguggcgcaaucuc

SEQ ID NO: 274398 - RNA, 32 nt, Human
uugcccaggcuggagugcaguggcgcaauuuc

SEQ ID NO: 274399 - RNA, 32 nt, Human
uugcccaggcuggagugcaguggcgccaucuu

SEQ ID NO: 274400 - RNA, 32 nt, Human
uugcccaggcuggagugcaguggcgcgaucuc

SEQ ID NO: 274401 - RNA, 32 nt, Human
uugcccaggcuggagugcaguggcgcgaucuu

SEQ ID NO: 274402 - RNA, 32 nt, Human
uugcccaggcuggagugcaguggcgcggucuc

SEQ ID NO: 274403 - RNA, 32 nt, Human
uugcccaggcuggagugcaguggcgcuaucuc

SEQ ID NO: 274404 - RNA, 32 nt, Human
uugcccaggcuggagugcaguggcgugaucuc

SEQ ID NO: 274405 - RNA, 32 nt, Human
uugcccaggcuggagugcaguggcgugaucuu

SEQ ID NO: 274406 - RNA, 32 nt, Human
uugcccaggcuggagugcaguggcgugauuuc

SEQ ID NO: 274407 - RNA, 32 nt, Human
uugcccaggcuggagugcaguggcucagucuc

SEQ ID NO: 274408 - RNA, 32 nt, Human
uugcccaggcuggagugcagugguacagucuu

SEQ ID NO: 274409 - RNA, 32 nt, Human
uugcccaggcuggagugcagugguaugaucau

SEQ ID NO: 274410 - RNA, 32 nt, Human
uugcccaggcuggagugcagugguaugaucuc

SEQ ID NO: 274411 - RNA, 32 nt, Human
uugcccaggcuggagugcaguggucugaucuc

SEQ ID NO: 274412 - RNA, 32 nt, Human
uugcccaggcuggagugcaguggugagaucug

SEQ ID NO: 274413 - RNA, 32 nt, Human
uugcccaggcuggagugcaguggugcaaucau

SEQ ID NO: 274414 - RNA, 32 nt, Human
uugcccaggcuggagugcaguggugcaaucuc

SEQ ID NO: 274415 - RNA, 32 nt, Human
uugcccaggcuggagugcaguggugcaaucuu

SEQ ID NO: 274416 - RNA, 32 nt, Human
uugcccaggcuggagugcaguggugccaucau

SEQ ID NO: 274417 - RNA, 32 nt, Human
uugcccaggcuggagugcaguggugccaucuu

SEQ ID NO: 274418 - RNA, 32 nt, Human
uugcccaggcuggagugcaguggugcgaccuu

SEQ ID NO: 274419 - RNA, 32 nt, Human
uugcccaggcuggagugcaguggugcgaucau

SEQ ID NO: 274420 - RNA, 32 nt, Human
uugcccaggcuggagugcaguggugcgaucgc

SEQ ID NO: 274421 - RNA, 32 nt, Human
uugcccaggcuggagugcaguggugcgaucuc

SEQ ID NO: 274422 - RNA, 32 nt, Human
uugcccaggcuggagugcaguggugcgaucuu

SEQ ID NO: 274423 - RNA, 32 nt, Human
uugcccaggcuggagugcaguggugggaacuc

SEQ ID NO: 274424 - RNA, 32 nt, Human
uugcccaggcuggagugcagugguguaaacau

SEQ ID NO: 274425 - RNA, 32 nt, Human
uugcccaggcuggagugcagugguguaaucuu

SEQ ID NO: 274426 - RNA, 32 nt, Human
uugcccaggcuggagugcaguggugugaucuc

SEQ ID NO: 274427 - RNA, 32 nt, Human
uugcccaggcuggagugcaguggugugaucuu

SEQ ID NO: 274428 - RNA, 22 nt, Human
uugcccaggcuggagugcauug

SEQ ID NO: 274429 - RNA, 32 nt, Human
uugcccaggcuggagugcauugaugugaucuu

SEQ ID NO: 274430 - RNA, 23 nt, Human
uugcccaggcuggagugcauugg

SEQ ID NO: 274431 - RNA, 32 nt, Human
uugcccaggcuggagugcauuggcgcgaucuc

SEQ ID NO: 274432 - RNA, 32 nt, Human
uugcccaggcuggagugccuuggcgcgaucuc

SEQ ID NO: 274433 - RNA, 21 nt, Human
uugcccaggcuggagugcgau

SEQ ID NO: 274434 - RNA, 32 nt, Human
uugcccaggcuggagugcgauggugcgaucuu

SEQ ID NO: 274435 - RNA, 21 nt, Human
uugcccaggcuggagugcggu

SEQ ID NO: 274436 - RNA, 32 nt, Human
uugcccaggcuggagugcgguggcgugaucau

SEQ ID NO: 274437 - RNA, 32 nt, Human
uugcccaggcuggagugcggugguacaaucuc

SEQ ID NO: 274438 - RNA, 32 nt, Human
uugcccaggcuggagugcgguggugcaaucuc

SEQ ID NO: 274439 - RNA, 32 nt, Human
uugcccaggcuggagugcgguggugcgaucac

SEQ ID NO: 274440 - RNA, 32 nt, Human
uugcccaggcuggagugcguuggcguggucuu

SEQ ID NO: 274441 - RNA, 23 nt, Human
uugcccaggcuggaguggagugg

SEQ ID NO: 274442 - RNA, 32 nt, Human
uugcccaggcuggaguggaguggcgugaucuu

SEQ ID NO: 274443 - RNA, 32 nt, Human
uugcccaggcuggaguguaauggcgccaucuc

SEQ ID NO: 274444 - RNA, 32 nt, Human
uugcccaggcuggaguguaauggugcaaucuc

SEQ ID NO: 274445 - RNA, 23 nt, Human
uugcccaggcuggaguguagugg

SEQ ID NO: 274446 - RNA, 32 nt, Human
uugcccaggcuggaguguaguggcgcaaucuu

SEQ ID NO: 274447 - RNA, 32 nt, Human
uugcccaggcuggaguguaguggcgcgaucuc

SEQ ID NO: 274448 - RNA, 32 nt, Human
uugcccaggcuggaguguagugguaugaucau

SEQ ID NO: 274449 - RNA, 32 nt, Human
uugcccaggcuggaguguaguggugcgaucuc

SEQ ID NO: 274450 - RNA, 32 nt, Human
uugcccaggcuggaguguaguggugugaucac

SEQ ID NO: 274451 - RNA, 32 nt, Human
uugcccaggcuggaguguaguggugugaucuc

SEQ ID NO: 274452 - RNA, 32 nt, Human
uugcccaggcuggaguguagugguguguucuu

SEQ ID NO: 274453 - RNA, 32 nt, Human
uugcccaggcuggagugugaugggcucgaucu

SEQ ID NO: 274454 - RNA, 22 nt, Human
uugcccaggcuggaguguggug

SEQ ID NO: 274455 - RNA, 23 nt, Human
uugcccaggcuggaguguggugg

SEQ ID NO: 274456 - RNA, 32 nt, Human
uugcccaggcuggagugugguggcacaaucac

SEQ ID NO: 274457 - RNA, 32 nt, Human
uugcccaggcuggagugugguggggcaaucuc

SEQ ID NO: 274458 - RNA, 32 nt, Human
uugcccaggcuggaguucagcggugcaauccc

SEQ ID NO: 274459 - RNA, 32 nt, Human
uugcccaggcuggaguucaggggcuauuccca

SEQ ID NO: 274460 - RNA, 32 nt, Human
uugcccaggcuggaguucaguggcgugaucuu

SEQ ID NO: 274461 - RNA, 32 nt, Human
uugcccaggcuggauggagugcaguggcguga

SEQ ID NO: 274462 - RNA, 21 nt, Human
uugcccaggcuggauuacagu

SEQ ID NO: 274463 - RNA, 22 nt, Human
uugcccaggcuggauuacagug

SEQ ID NO: 274464 - RNA, 23 nt, Human
uugcccaggcuggauuacagugg

SEQ ID NO: 274465 - RNA, 24 nt, Human
uugcccaggcuggauuacaguggc

SEQ ID NO: 274466 - RNA, 32 nt, Human
uugcccaggcuggauuacaguggcgcaaucuc

SEQ ID NO: 274467 - RNA, 32 nt, Human
uugcccaggcuggauugcgguggcgcugucuc

SEQ ID NO: 274468 - RNA, 24 nt, Human
uugcccaggcuggcccugaacucc

SEQ ID NO: 274469 - RNA, 24 nt, Human
uugcccaggcuggccucaaacucc

SEQ ID NO: 274470 - RNA, 24 nt, Human
uugcccaggcuggccucaaauucc

SEQ ID NO: 274471 - RNA, 24 nt, Human
uugcccaggcuggccucgaacucu

SEQ ID NO: 274472 - RNA, 23 nt, Human
uugcccaggcuggcgugcagugg

SEQ ID NO: 274473 - RNA, 32 nt, Human
uugcccaggcuggcgugcaguggugcgaucug

SEQ ID NO: 274474 - RNA, 32 nt, Human
uugcccaggcugggguacagugguggaaucuc

SEQ ID NO: 274475 - RNA, 23 nt, Human
uugcccaggcuggggugcagugg

SEQ ID NO: 274476 - RNA, 24 nt, Human
uugcccaggcuggggugcaguggc

SEQ ID NO: 274477 - RNA, 32 nt, Human
uugcccaggcugggugcagcggugcgaucuug

SEQ ID NO: 274478 - RNA, 23 nt, Human
uugcccaggcuggucccgaacuc

SEQ ID NO: 274479 - RNA, 24 nt, Human
uugcccaggcuggucgcgaacucc

SEQ ID NO: 274480 - RNA, 24 nt, Human
uugcccaggcuggucgugaacucc

SEQ ID NO: 274481 - RNA, 32 nt, Human
uugcccaggcuggucuagaacuucuggucuca

SEQ ID NO: 274482 - RNA, 18 nt, Human
uugcccaggcuggucuca

SEQ ID NO: 274483 - RNA, 23 nt, Human
uugcccaggcuggucucaaaccc

SEQ ID NO: 274484 - RNA, 23 nt, Human
uugcccaggcuggucucaaacuc

SEQ ID NO: 274485 - RNA, 24 nt, Human
uugcccaggcuggucucaaacucc

SEQ ID NO: 274486 - RNA, 32 nt, Human
uugcccaggcuggucucaaacuccugagcaca

SEQ ID NO: 274487 - RNA, 32 nt, Human
uugcccaggcuggucucaaacuccugagcuca

SEQ ID NO: 274488 - RNA, 24 nt, Human
uugcccaggcuggucucaaacucu

SEQ ID NO: 274489 - RNA, 24 nt, Human
uugcccaggcuggucucaaacuuc

SEQ ID NO: 274490 - RNA, 32 nt, Human
uugcccaggcuggucucaaacuucuggcuuca

SEQ ID NO: 274491 - RNA, 32 nt, Human
uugcccaggcuggucucaaacuugugagcuca

SEQ ID NO: 274492 - RNA, 32 nt, Human
uugcccaggcuggucucaaauuucugggcuca

SEQ ID NO: 274493 - RNA, 24 nt, Human
uugcccaggcuggucucaaccucc

SEQ ID NO: 274494 - RNA, 32 nt, Human
uugcccaggcuggucucaacuccugagcucag

SEQ ID NO: 274495 - RNA, 24 nt, Human
uugcccaggcuggucucaaucucc

SEQ ID NO: 274496 - RNA, 24 nt, Human
uugcccaggcuggucuccaacucc

SEQ ID NO: 274497 - RNA, 24 nt, Human
uugcccaggcuggucucgaacucc

SEQ ID NO: 274498 - RNA, 32 nt, Human
uugcccaggcuggucucgaacuccugagcuca

SEQ ID NO: 274499 - RNA, 24 nt, Human
uugcccaggcuggucucgaacucu

SEQ ID NO: 274500 - RNA, 32 nt, Human
uugcccaggcuggucucgaacucuggccucaa

SEQ ID NO: 274501 - RNA, 24 nt, Human
uugcccaggcuggucucgaacuuc

SEQ ID NO: 274502 - RNA, 32 nt, Human
uugcccaggcuggucucgaacuucgggcccca

SEQ ID NO: 274503 - RNA, 32 nt, Human
uugcccaggcuggucucgaacuucugagcuca

SEQ ID NO: 274504 - RNA, 32 nt, Human
uugcccaggcuggucucgaacuucugagcucg

SEQ ID NO: 274505 - RNA, 32 nt, Human
uugcccaggcuggucucgaacuucugggcuca

SEQ ID NO: 274506 - RNA, 24 nt, Human
uugcccaggcuggucucgaauucc

SEQ ID NO: 274507 - RNA, 32 nt, Human
uugcccaggcuggucucgaauuccuggauuca

SEQ ID NO: 274508 - RNA, 24 nt, Human
uugcccaggcuggucucggacucc

SEQ ID NO: 274509 - RNA, 32 nt, Human
uugcccaggcuggucugaaacuuuugggcuca

SEQ ID NO: 274510 - RNA, 32 nt, Human
uugcccaggcuggucugaagcugcugggcuca

SEQ ID NO: 274511 - RNA, 24 nt, Human
uugcccaggcuggucuuaaacucc

SEQ ID NO: 274512 - RNA, 32 nt, Human
uugcccaggcuggucuuaagcuucugagcuca

SEQ ID NO: 274513 - RNA, 23 nt, Human
uugcccaggcuggucuugaaccc

SEQ ID NO: 274514 - RNA, 24 nt, Human
uugcccaggcuggucuugaacucc

SEQ ID NO: 274515 - RNA, 32 nt, Human
uugcccaggcuggucuugaacuccggggcuca

SEQ ID NO: 274516 - RNA, 32 nt, Human
uugcccaggcuggucuugaacuccugagcuca

SEQ ID NO: 274517 - RNA, 32 nt, Human
uugcccaggcuggucuugaacucuuggcacuc

SEQ ID NO: 274518 - RNA, 32 nt, Human
uugcccaggcuggucuugaacucuuggccuca

SEQ ID NO: 274519 - RNA, 32 nt, Human
uugcccaggcuggucuugaacucuuggcucca

SEQ ID NO: 274520 - RNA, 32 nt, Human
uugcccaggcuggucuugaacucuugggcuca

SEQ ID NO: 274521 - RNA, 32 nt, Human
uugcccaggcuggucuugaacugggcuuaggc

SEQ ID NO: 274522 - RNA, 32 nt, Human
uugcccaggcuggucuugaacuucugaccuca

SEQ ID NO: 274523 - RNA, 32 nt, Human
uugcccaggcuggucuugaacuucugagcuca

SEQ ID NO: 274524 - RNA, 32 nt, Human
uugcccaggcuggucuugaacuucugggcuca

SEQ ID NO: 274525 - RNA, 32 nt, Human
uugcccaggcuggucuugaauuccugggcuca

SEQ ID NO: 274526 - RNA, 32 nt, Human
uugcccaggcuggucuugacuccugggcucaa

SEQ ID NO: 274527 - RNA, 32 nt, Human
uugcccaggcuggucuugauuccuggacucaa

SEQ ID NO: 274528 - RNA, 24 nt, Human
uugcccaggcuggugucaaacucc

SEQ ID NO: 274529 - RNA, 24 nt, Human
uugcccaggcuggugucgaacucc

SEQ ID NO: 274530 - RNA, 24 nt, Human
uugcccaggcuggugucgaauucc

SEQ ID NO: 274531 - RNA, 23 nt, Human
uugcccaggcuggugugcaaugg

SEQ ID NO: 274532 - RNA, 32 nt, Human
uugcccaggcuggugugcaauggcgugaucuc

SEQ ID NO: 274533 - RNA, 22 nt, Human
uugcccaggcugguugaacucc

SEQ ID NO: 274534 - RNA, 24 nt, Human
uugcccaggcugguuuaaaacucc

SEQ ID NO: 274535 - RNA, 24 nt, Human
uugcccaggcugguuucaaacucc

SEQ ID NO: 274536 - RNA, 24 nt, Human
uugcccaggcugguuucaaccucc

SEQ ID NO: 274537 - RNA, 21 nt, Human
uugcccaggcuguaguacaau

SEQ ID NO: 274538 - RNA, 24 nt, Human
uugcccaggcuguaguacaauggc

SEQ ID NO: 274539 - RNA, 32 nt, Human
uugcccaggcuguagugcaguggugcgaucuc

SEQ ID NO: 274540 - RNA, 23 nt, Human
uugcccaggcugucucaaacucc

SEQ ID NO: 274541 - RNA, 32 nt, Human
uugcccaggcugucucaaacuccuggccucaa

SEQ ID NO: 274542 - RNA, 24 nt, Human
uugcccaggcugucuuugaacucc

SEQ ID NO: 274543 - RNA, 32 nt, Human
uugcccaggcugucuuugaacuccugggauca

SEQ ID NO: 274544 - RNA, 24 nt, Human
uugcccaggcuguuauggaacucc

SEQ ID NO: 274545 - RNA, 24 nt, Human
uugcccaggcuguucucaaacucc

SEQ ID NO: 274546 - RNA, 24 nt, Human
uugcccaggcuguucuucaacucc

SEQ ID NO: 274547 - RNA, 24 nt, Human
uugcccaggcuguucuugaacucc

SEQ ID NO: 274548 - RNA, 21 nt, Human
uugcccaggcuugagugcaau

SEQ ID NO: 274549 - RNA, 22 nt, Human
uugcccaggcuugagugcaaug

SEQ ID NO: 274550 - RNA, 21 nt, Human
uugcccaggcuugagugcagu

SEQ ID NO: 274551 - RNA, 22 nt, Human
uugcccaggcuugagugcagug

SEQ ID NO: 274552 - RNA, 32 nt, Human
uugcccaggcuugagugcagugaugcaaucuu

SEQ ID NO: 274553 - RNA, 24 nt, Human
uugcccaggcuugccuggaacucc

SEQ ID NO: 274554 - RNA, 23 nt, Human
uugcccaggcuuggaguacagug

SEQ ID NO: 274555 - RNA, 24 nt, Human
uugcccaggcuugucucaaacucc

SEQ ID NO: 274556 - RNA, 32 nt, Human
uugcccagggcagagguuuuugaagugagcuu

SEQ ID NO: 274557 - RNA, 32 nt, Human
uugcccagggccuggcaucagaggggccugug

SEQ ID NO: 274558 - RNA, 22 nt, Human
uugcccagggcuggagugcagu

SEQ ID NO: 274559 - RNA, 25 nt, Human
uugcccagggcuggagugcaguggc

SEQ ID NO: 274560 - RNA, 32 nt, Human
uugcccaggguggagugcagcggugcgaucuc

SEQ ID NO: 274561 - RNA, 23 nt, Human
uugcccaggguggagugcagugg

SEQ ID NO: 274562 - RNA, 24 nt, Human
uugcccaggguggagugcaguggc

SEQ ID NO: 274563 - RNA, 24 nt, Human
uugcccaggguggucucaaacucc

SEQ ID NO: 274564 - RNA, 24 nt, Human
uugcccaggguggucucgaacucc

SEQ ID NO: 274565 - RNA, 21 nt, Human
uugcccagguuagagugcagu

SEQ ID NO: 274566 - RNA, 23 nt, Human
uugcccagguuagagugcagugg

SEQ ID NO: 274567 - RNA, 24 nt, Human
uugcccagguuagagugcaguggc

SEQ ID NO: 274568 - RNA, 32 nt, Human
uugcccagguuagagugcaguggcuugaucau

SEQ ID NO: 274569 - RNA, 24 nt, Human
uugcccagguugauauugaacucc

SEQ ID NO: 274570 - RNA, 23 nt, Human
uugcccagguuggagugcagugg

SEQ ID NO: 274571 - RNA, 24 nt, Human
uugcccagguuggagugcaguggc

SEQ ID NO: 274572 - RNA, 24 nt, Human
uugcccagguuggucucaaacucc

SEQ ID NO: 274573 - RNA, 24 nt, Human
uugcccagguuggucucgaacucc

SEQ ID NO: 274574 - RNA, 24 nt, Human
uugcccagguugguuucaaacucc

SEQ ID NO: 274575 - RNA, 32 nt, Human
uugcccaguauuggaccagcaguccucaugaa

SEQ ID NO: 274576 - RNA, 32 nt, Human
uugcccagucuggagugcaguggcgcagucuc

SEQ ID NO: 274577 - RNA, 24 nt, Human
uugcccagucuggaguucaguggc

SEQ ID NO: 274578 - RNA, 32 nt, Human
uugcccagucuggaguucaguggcgcgaucuc

SEQ ID NO: 274579 - RNA, 32 nt, Human
uugcccagugccuucuguuucccaggcagcuc

SEQ ID NO: 274580 - RNA, 32 nt, Human
uugcccagugugugcuuaucauccccugcaag

SEQ ID NO: 274581 - RNA, 32 nt, Human
uugcccauccagccaaggaugccagucuugcu

SEQ ID NO: 274582 - RNA, 32 nt, Human
uugcccaucuguagguagacacacagaucgcu

SEQ ID NO: 274583 - RNA, 21 nt, Human
uugcccaugcuggagugcaau

SEQ ID NO: 274584 - RNA, 24 nt, Human
uugcccaugcuggagugcaauggc

SEQ ID NO: 274585 - RNA, 32 nt, Human
uugcccaugcuggagugcaauggcacgaucuc

SEQ ID NO: 274586 - RNA, 32 nt, Human
uugcccaugcuggagugcaguggcgugaucau

SEQ ID NO: 274587 - RNA, 32 nt, Human
uugcccaugcuggagugcauuggcacaaucuc

SEQ ID NO: 274588 - RNA, 24 nt, Human
uugcccaugcuggucucgaacucc

SEQ ID NO: 274589 - RNA, 32 nt, Human
uugcccauuaacaaauggcuuuuaucuuuagc

SEQ ID NO: 274590 - RNA, 32 nt, Human
uugcccauucuggagugcaguggugugaucuc

SEQ ID NO: 274591 - RNA, 32 nt, Human
uugcccauucuuucuuacuucugacaacuggc

SEQ ID NO: 274592 - RNA, 22 nt, Human
uugcccauuuuaaauccuuuca

SEQ ID NO: 274593 - RNA, 32 nt, Human
uugcccauuuuucuucauuuauuugaauguau

SEQ ID NO: 274594 - RNA, 19 nt, Human
uugccccaccccugccuug

SEQ ID NO: 274595 - RNA, 32 nt, Human
uugccccacccuaccugccuuuuauaguaugc

SEQ ID NO: 274596 - RNA, 32 nt, Human
uugccccacggccauauccacccauugacucu

SEQ ID NO: 274597 - RNA, 32 nt, Human
uugccccacugcacuccacccugggcaaugga

SEQ ID NO: 274598 - RNA, 32 nt, Human
uugccccacugcacuccagccuaggcaacaga

SEQ ID NO: 274599 - RNA, 32 nt, Human
uugccccacugcaggcugccugggacgccuuc

SEQ ID NO: 274600 - RNA, 32 nt, Human
uugccccacuggcugcuccagggccuccaccc

SEQ ID NO: 274601 - RNA, 32 nt, Human
uugccccagcagagcagggguuuuggaaggag

SEQ ID NO: 274602 - RNA, 32 nt, Human
uugccccagccaacaggacguucuugcacaac

SEQ ID NO: 274603 - RNA, 32 nt, Human
uugccccagccacuuugccccaaccacuuuga

SEQ ID NO: 274604 - RNA, 23 nt, Human
uugccccagccauccaguauugu

SEQ ID NO: 274605 - RNA, 21 nt, Human
uugccccagccugcuucuugc

SEQ ID NO: 274606 - RNA, 32 nt, Human
uugccccagcuggucucaaaccccugggcuca

SEQ ID NO: 274607 - RNA, 32 nt, Human
uugccccagcuucacucucucccucagcaccu

SEQ ID NO: 274608 - RNA, 24 nt, Human
uugccccaggacagaugucuugca

SEQ ID NO: 274609 - RNA, 22 nt, Human
uugccccaggcuggagugcagu

SEQ ID NO: 274610 - RNA, 20 nt, Human
uugccccagggcugcuuugc

SEQ ID NO: 274611 - RNA, 25 nt, Human
uugccccaguucuuaucuguuuugc

SEQ ID NO: 274612 - RNA, 32 nt, Human
uugccccaucccucccacacacaggaccagac

SEQ ID NO: 274613 - RNA, 32 nt, Human
uugccccaugggaaacguaugugugcaggagc

SEQ ID NO: 274614 - RNA, 32 nt, Human
uugccccauucagguuggggagugaagugugg

SEQ ID NO: 274615 - RNA, 24 nt, Human
uugcccccacucuuuuugucuugc

SEQ ID NO: 274616 - RNA, 32 nt, Human
uugcccccaucaccugccgcccccaucaaaca

SEQ ID NO: 274617 - RNA, 32 nt, Human
uugcccccauguagcccauuucccagguuaug

SEQ ID NO: 274618 - RNA, 32 nt, Human
uugcccccauguucugcuuuccuccacugugc

SEQ ID NO: 274619 - RNA, 24 nt, Human
uugccccccagagcccugggcugg

SEQ ID NO: 274620 - RNA, 32 nt, Human
uugcccccgcuacacuccagccuggucgacag

SEQ ID NO: 274621 - RNA, 32 nt, Human
uugcccccuccacccacccccacgaccccacu

SEQ ID NO: 274622 - RNA, 32 nt, Human
uugcccccucccccuccuucuguccccucccu

SEQ ID NO: 274623 - RNA, 32 nt, Human
uugcccccucuucuuauacccuaaaaccuucu

SEQ ID NO: 274624 - RNA, 32 nt, Human
uugcccccugcucucuccugucgugccccacc

SEQ ID NO: 274625 - RNA, 32 nt, Human
uugcccccugggccaggcagagcaggcgcugc

SEQ ID NO: 274626 - RNA, 32 nt, Human
uugcccccuuguucuguaucccccuuugcccu

SEQ ID NO: 274627 - RNA, 32 nt, Human
uugcccccuuugaccuuccccaaaggaugguc

SEQ ID NO: 274628 - RNA, 22 nt, Human
uugccccggccaggccugcgag

SEQ ID NO: 274629 - RNA, 23 nt, Human
uugccccggccccuuuucuuccu

SEQ ID NO: 274630 - RNA, 32 nt, Human
uugccccggcuggagugcaguggcgcuaucuu

SEQ ID NO: 274631 - RNA, 32 nt, Human
uugccccguaggaagcuggagugcgggccucg

SEQ ID NO: 274632 - RNA, 32 nt, Human
uugccccguccacccugugcugcuucccuuca

SEQ ID NO: 274633 - RNA, 32 nt, Human
uugccccgucucaaccccaucugacuacccca

SEQ ID NO: 274634 - RNA, 21 nt, Human
uugccccuaccucuucugggc

SEQ ID NO: 274635 - RNA, 32 nt, Human
uugccccuaucuugugcucuucugucugcagu

SEQ ID NO: 274636 - RNA, 32 nt, Human
uugccccucacugggcaggccauggccuacag

SEQ ID NO: 274637 - RNA, 21 nt, Human
uugccccucccccauuucccu

SEQ ID NO: 274638 - RNA, 32 nt, Human
uugccccucccuucuggaccccagagugcccu

SEQ ID NO: 274639 - RNA, 32 nt, Human
uugccccucugccuugcccuccugggcccugg

SEQ ID NO: 274640 - RNA, 18 nt, Human
uugccccugcccugggcu

SEQ ID NO: 274641 - RNA, 32 nt, Human
uugccccugcuuguccuggaccacuuuuaaag

SEQ ID NO: 274642 - RNA, 32 nt, Human
uugccccuggaggugggggcugcuggcugagg

SEQ ID NO: 274643 - RNA, 32 nt, Human
uugcccgaagcggaacugcugaaggagcggca

SEQ ID NO: 274644 - RNA, 32 nt, Human
uugcccgagagggacgaggaggccgugcgggu

SEQ ID NO: 274645 - RNA, 32 nt, Human
uugcccgaguagcugggacuacaggcaugugc

SEQ ID NO: 274646 - RNA, 32 nt, Human
uugcccgcccagcugcuccaugccaggaggag

SEQ ID NO: 274647 - RNA, 32 nt, Human
uugcccgcccuccacccacuaggugaacagca

SEQ ID NO: 274648 - RNA, 32 nt, Human
uugcccgcgggugugugaagggagacagucag

SEQ ID NO: 274649 - RNA, 32 nt, Human
uugcccgcuagacucacuggcccugagcacuu

SEQ ID NO: 274650 - RNA, 32 nt, Human
uugcccggcgaggucgccgcugccucagcugc

SEQ ID NO: 274651 - RNA, 24 nt, Human
uugcccgggcuagucucgaacucc

SEQ ID NO: 274652 - RNA, 21 nt, Human
uugcccgggcuggaaugcaau

SEQ ID NO: 274653 - RNA, 32 nt, Human
uugcccgggcuggaaugcaauggcgcgauuca

SEQ ID NO: 274654 - RNA, 21 nt, Human
uugcccgggcuggagugcaau

SEQ ID NO: 274655 - RNA, 32 nt, Human
uugcccgggcuggagugcaauggcgcgaaguc

SEQ ID NO: 274656 - RNA, 32 nt, Human
uugcccgggcuggagugcaauggugagaucuc

SEQ ID NO: 274657 - RNA, 32 nt, Human
uugcccgggcuggagugcaguggugugaucuc

SEQ ID NO: 274658 - RNA, 22 nt, Human
uugcccuacucaucccuuugca

SEQ ID NO: 274659 - RNA, 32 nt, Human
uugcccuagagccauggcugggaaaaggugga

SEQ ID NO: 274660 - RNA, 32 nt, Human
uugcccucaaguuugcuaagcugcugguuuau

SEQ ID NO: 274661 - RNA, 20 nt, Human
uugcccucaccccaaugcuc

SEQ ID NO: 274662 - RNA, 32 nt, Human
uugcccucacugcccacucugcccacacuucc

SEQ ID NO: 274663 - RNA, 32 nt, Human
uugcccucagcccuuucuccugggaucuccau

SEQ ID NO: 274664 - RNA, 32 nt, Human
uugcccucagcuuugcagaaugaagccuugag

SEQ ID NO: 274665 - RNA, 18 nt, Human
uugcccucaggcagccaa

SEQ ID NO: 274666 - RNA, 32 nt, Human
uugcccuccagccugggugacagagugagacc

SEQ ID NO: 274667 - RNA, 19 nt, Human
uugcccuccagggugccaa

SEQ ID NO: 274668 - RNA, 32 nt, Human
uugcccucccaaagugcugggauuacaggcgu

SEQ ID NO: 274669 - RNA, 32 nt, Human
uugcccucccaaaguguugggauuauaggcau

SEQ ID NO: 274670 - RNA, 32 nt, Human
uugcccucccccagugggagaggggguugggu

SEQ ID NO: 274671 - RNA, 32 nt, Human
uugcccuccccuucuccuccauggcuucccag

SEQ ID NO: 274672 - RNA, 32 nt, Human
uugcccucccucuccuggccuuacaagcacuu

SEQ ID NO: 274673 - RNA, 32 nt, Human
uugcccuccuggcugccaacucuggcugcuaa

SEQ ID NO: 274674 - RNA, 32 nt, Human
uugcccucucuccagcucugcucccacauuuu

SEQ ID NO: 274675 - RNA, 32 nt, Human
uugcccucuucugcucuuuuccuggugcucuu

SEQ ID NO: 274676 - RNA, 32 nt, Human
uugcccugaauguacccugccucugcuuucuc

SEQ ID NO: 274677 - RNA, 32 nt, Human
uugcccugacuggaguucaguggugcaaacac

SEQ ID NO: 274678 - RNA, 32 nt, Human
uugcccugagccacauaugucugugccauggg

SEQ ID NO: 274679 - RNA, 32 nt, Human
uugcccugauccaaauguuagcacuugcuagu

SEQ ID NO: 274680 - RNA, 32 nt, Human
uugcccugcaggcuggagugcagcggcaugau

SEQ ID NO: 274681 - RNA, 32 nt, Human
uugcccugcagggaccaagaccacacucgggc

SEQ ID NO: 274682 - RNA, 32 nt, Human
uugcccugccaucgccuccaucagccagacga

SEQ ID NO: 274683 - RNA, 32 nt, Human
uugcccugccucccaaaccccauuagucuagc

SEQ ID NO: 274684 - RNA, 19 nt, Human
uugcccugcgucgccuugc

SEQ ID NO: 274685 - RNA, 32 nt, Human
uugcccugcucucuccuguugcucugggauug

SEQ ID NO: 274686 - RNA, 32 nt, Human
uugcccuggagacgcuuucccugcugccggcc

SEQ ID NO: 274687 - RNA, 31 nt, Human
uugcccuggcucucugguccuuguugcucua

SEQ ID NO: 274688 - RNA, 32 nt, Human
uugcccuguacaaaacuaagaaaccucuuugg

SEQ ID NO: 274689 - RNA, 32 nt, Human
uugcccugucccaaucccagaaacccaggacc

SEQ ID NO: 274690 - RNA, 32 nt, Human
uugcccugucgccuggcuggaguggaguggca

SEQ ID NO: 274691 - RNA, 32 nt, Human
uugcccuguggcugggcuggagugcaauggcg

SEQ ID NO: 274692 - RNA, 32 nt, Human
uugcccuguugccaggcuggaaugcaguggcg

SEQ ID NO: 274693 - RNA, 32 nt, Human
uugcccuuaaaccauuucuagcuguuaacccu

SEQ ID NO: 274694 - RNA, 32 nt, Human
uugcccuucagcucauaaaagcagaaggugug

SEQ ID NO: 274695 - RNA, 32 nt, Human
uugcccuuccauggaaacucaggcugaucucg

SEQ ID NO: 274696 - RNA, 32 nt, Human
uugcccuucccaaaucccuccaggccagaacu

SEQ ID NO: 274697 - RNA, 32 nt, Human
  misc_feature (28)..(28): n is a, c, g, or u
uugcccuucccaaggguauuugcauuunuauu

SEQ ID NO: 274698 - RNA, 32 nt, Human
uugcccuucccaggaaccacggcugccuuuuu

SEQ ID NO: 274699 - RNA, 32 nt, Human
uugcccuuccuaccccuuccucccuucaguca

SEQ ID NO: 274700 - RNA, 32 nt, Human
uugcccuuccucacagcccuuuggccauuggg

SEQ ID NO: 274701 - RNA, 32 nt, Human
uugcccuucucccucccgcuccugggcggagg

SEQ ID NO: 274702 - RNA, 32 nt, Human
uugcccuugguggaaucuuuaggguuuucuau

SEQ ID NO: 274703 - RNA, 32 nt, Human
uugcccuuguugcccaggcuggagugcaaugg

SEQ ID NO: 274704 - RNA, 32 nt, Human
uugcccuuuagucccaggacuaaccggaagcu

SEQ ID NO: 274705 - RNA, 22 nt, Human
uugcccuuucuucugcuuugua

SEQ ID NO: 274706 - RNA, 32 nt, Human
uugcccuuucuuugggggaaacagcuguuuaa

SEQ ID NO: 274707 - RNA, 32 nt, Human
uugcccuuuucuuauuuucugccuguaacuuc

SEQ ID NO: 274708 - RNA, 20 nt, Human
uugccgagagcccugagcca

SEQ ID NO: 274709 - RNA, 32 nt, Human
uugccgaggcaaccuccaagucccagaucaug

SEQ ID NO: 274710 - RNA, 19 nt, Human
uugccgaggcuggagugca

SEQ ID NO: 274711 - RNA, 21 nt, Human
uugccgaggcuggagugcaau

SEQ ID NO: 274712 - RNA, 22 nt, Human
uugccgaggcuggagugcaaug

SEQ ID NO: 274713 - RNA, 32 nt, Human
uugccgaggcuggagugcaauggcgcaaccuu

SEQ ID NO: 274714 - RNA, 32 nt, Human
uugccgaggcuggaguguaguagugugauccu

SEQ ID NO: 274715 - RNA, 18 nt, Human
uugccgagggugcagugg

SEQ ID NO: 274716 - RNA, 32 nt, Human
uugccgaucugccauguauuccagaaaggcca

SEQ ID NO: 274717 - RNA, 20 nt, Human
uugccgcagccgcccgggcc

SEQ ID NO: 274718 - RNA, 21 nt, Human
uugccgcagccuguccgaguc

SEQ ID NO: 274719 - RNA, 18 nt, Human
uugccgcccgccccggcc

SEQ ID NO: 274720 - RNA, 19 nt, Human
uugccgcccgccccgggcu

SEQ ID NO: 274721 - RNA, 18 nt, Human
uugccgcccuccgagcca

SEQ ID NO: 274722 - RNA, 32 nt, Human
uugccgccgucccggcucaccuggcggugccc

SEQ ID NO: 274723 - RNA, 21 nt, Human
uugccgcgcgagucccgggcc

SEQ ID NO: 274724 - RNA, 19 nt, Human
uugccgcucaccugagcua

SEQ ID NO: 274725 - RNA, 19 nt, Human
uugccgcuccccucgcguc

SEQ ID NO: 274726 - RNA, 19 nt, Human
uugccgcucguuuuuguca

SEQ ID NO: 274727 - RNA, 20 nt, Human
uugccgcucugugagggcca

SEQ ID NO: 274728 - RNA, 17 nt, Human
uugccgcugccacgggc

SEQ ID NO: 274729 - RNA, 21 nt, Human
uugccgcugcccagcagagcu

SEQ ID NO: 274730 - RNA, 32 nt, Human
uugccgcugggagcccaggcuccgucugccgc

SEQ ID NO: 274731 - RNA, 31 nt, Human
uugccggacgcucuguggccuguguggacag

SEQ ID NO: 274732 - RNA, 21 nt, Human
uugccggccuuccucgggcca

SEQ ID NO: 274733 - RNA, 20 nt, Human
uugccggcgcggcccgagcc

SEQ ID NO: 274734 - RNA, 16 nt, Human
uugccggcggcuccug

SEQ ID NO: 274735 - RNA, 17 nt, Human
uugccggcucccgggcc

SEQ ID NO: 274736 - RNA, 32 nt, Human
uugccggcucuggccuuccugugacugacugu

SEQ ID NO: 274737 - RNA, 32 nt, Human
uugccggcugcugggagccaggagagcccuga

SEQ ID NO: 274738 - RNA, 32 nt, Human
uugccggugccuaggauugugccuguaugcaa

SEQ ID NO: 274739 - RNA, 20 nt, Human
uugccguccaccccgggcca

SEQ ID NO: 274740 - RNA, 32 nt, Human
uugccguccaggcuggagugcaauggcgugau

SEQ ID NO: 274741 - RNA, 32 nt, Human
uugccguccaguggggaguggagggcagaggc

SEQ ID NO: 274742 - RNA, 32 nt, Human
uugccgucguaucagaaccacccggcccuucu

SEQ ID NO: 274743 - RNA, 32 nt, Human
uugccgucugcgcuccagccuucgccuggcag

SEQ ID NO: 274744 - RNA, 32 nt, Human
uugccgugaagcccaccaugaugagcuccgag

SEQ ID NO: 274745 - RNA, 32 nt, Human
uugccgugacucacacaccucuacuucuguuc

SEQ ID NO: 274746 - RNA, 18 nt, Human
uugccgugccccggacua

SEQ ID NO: 274747 - RNA, 32 nt, Human
uugccguggacuucagcacccagacaagccaa

SEQ ID NO: 274748 - RNA, 20 nt, Human
uugccguggggccucgagcc

SEQ ID NO: 274749 - RNA, 32 nt, Human
uugccguuacacuucccagccugguggucagu

SEQ ID NO: 274750 - RNA, 32 nt, Human
uugccuaagaauuaugacccaaaacuuacccc

SEQ ID NO: 274751 - RNA, 32 nt, Human
uugccuaaucaaacagaggcuuuuggccuuug

SEQ ID NO: 274752 - RNA, 32 nt, Human
uugccuaauuuguuuucccuucuuacaaugca

SEQ ID NO: 274753 - RNA, 32 nt, Human
uugccuacaggagcccccaccuucccugccca

SEQ ID NO: 274754 - RNA, 32 nt, Human
uugccuacaggugagggaagacccccuucacc

SEQ ID NO: 274755 - RNA, 18 nt, Human
uugccuacccucucccca

SEQ ID NO: 274756 - RNA, 32 nt, Human
uugccuacuauccugaauuugccuacuaucua

SEQ ID NO: 274757 - RNA, 32 nt, Human
uugccuacucuuugccccagcaauuccucgua

SEQ ID NO: 274758 - RNA, 32 nt, Human
uugccuagacaacaugagaaaucguggccagg

SEQ ID NO: 274759 - RNA, 32 nt, Human
uugccuagaccauucuccccuccagggagccc

SEQ ID NO: 274760 - RNA, 32 nt, Human
uugccuaggacuucucagcuucucccauaggu

SEQ ID NO: 274761 - RNA, 21 nt, Human
uugccuaggccagagugcagu

SEQ ID NO: 274762 - RNA, 23 nt, Human
uugccuaggcggaguacaguggc

SEQ ID NO: 274763 - RNA, 32 nt, Human
uugccuaggcuagggugcaguggcacaaucuc

SEQ ID NO: 274764 - RNA, 21 nt, Human
uugccuaggcuggaaugcagu

SEQ ID NO: 274765 - RNA, 22 nt, Human
uugccuaggcuggaaugcagug

SEQ ID NO: 274766 - RNA, 23 nt, Human
uugccuaggcuggaaugcagugg

SEQ ID NO: 274767 - RNA, 32 nt, Human
uugccuaggcuggaggacaguggcacaaucau

SEQ ID NO: 274768 - RNA, 21 nt, Human
uugccuaggcuggaguacagu

SEQ ID NO: 274769 - RNA, 24 nt, Human
uugccuaggcuggaguacaguggc

SEQ ID NO: 274770 - RNA, 32 nt, Human
uugccuaggcuggaguacaguggugcagucuc

SEQ ID NO: 274771 - RNA, 32 nt, Human
uugccuaggcuggagugaaaguggcgcaaccu

SEQ ID NO: 274772 - RNA, 19 nt, Human
uugccuaggcuggagugca

SEQ ID NO: 274773 - RNA, 21 nt, Human
uugccuaggcuggagugcaau

SEQ ID NO: 274774 - RNA, 32 nt, Human
uugccuaggcuggagugcaauggugcgaucuu

SEQ ID NO: 274775 - RNA, 21 nt, Human
uugccuaggcuggagugcagu

SEQ ID NO: 274776 - RNA, 22 nt, Human
uugccuaggcuggagugcagug

SEQ ID NO: 274777 - RNA, 32 nt, Human
uugccuaggcuggagugcagugaggcaaucug

SEQ ID NO: 274778 - RNA, 32 nt, Human
uugccuaggcuggagugcaguggcgcaaucuc

SEQ ID NO: 274779 - RNA, 32 nt, Human
uugccuaggcuggagugcaguggcgcagucuu

SEQ ID NO: 274780 - RNA, 32 nt, Human
uugccuaggcuggagugcaguggcgcgaucuu

SEQ ID NO: 274781 - RNA, 32 nt, Human
uugccuaggcuggagugcagugguacaaucuc

SEQ ID NO: 274782 - RNA, 32 nt, Human
uugccuaggcuggucucgaacuccugagcuca

SEQ ID NO: 274783 - RNA, 32 nt, Human
uugccuaggcuggucuugaaauucugggcuaa

SEQ ID NO: 274784 - RNA, 32 nt, Human
uugccuagggcugcuuuauugcucaccuacuu

SEQ ID NO: 274785 - RNA, 32 nt, Human
uugccuagggggcagagggugcaguggcagug

SEQ ID NO: 274786 - RNA, 20 nt, Human
uugccuagguuggaguacag

SEQ ID NO: 274787 - RNA, 32 nt, Human
uugccuaguacuuuaccagcagaccacaguuu

SEQ ID NO: 274788 - RNA, 32 nt, Human
uugccuagucuggucugaaacuucugggcgca

SEQ ID NO: 274789 - RNA, 32 nt, Human
uugccuauccccuccccucugcuugagccuug

SEQ ID NO: 274790 - RNA, 32 nt, Human
uugccuaucgccaagcaaaucgaggccaucaa

SEQ ID NO: 274791 - RNA, 32 nt, Human
uugccuaugaaauguaaaaugugaacucccug

SEQ ID NO: 274792 - RNA, 32 nt, Human
uugccuauuaaaccucugcuccuggccaggca

SEQ ID NO: 274793 - RNA, 32 nt, Human
uugccucacaugguucaacaccaccuuauacu

SEQ ID NO: 274794 - RNA, 32 nt, Human
uugccucacugcaacgccugccucucaggcuc

SEQ ID NO: 274795 - RNA, 32 nt, Human
uugccucaggagaauuguugggugcauggaug

SEQ ID NO: 274796 - RNA, 32 nt, Human
uugccucaugccagcaccuuugaaccggucuc

SEQ ID NO: 274797 - RNA, 32 nt, Human
uugccucauguuuguuagccagcacuucugcu

SEQ ID NO: 274798 - RNA, 23 nt, Human
uugccucauucacuuguacugua

SEQ ID NO: 274799 - RNA, 32 nt, Human
uugccucauuucccuaucuucucccccacggu

SEQ ID NO: 274800 - RNA, 32 nt, Human
uugccuccagaacuuggagagcagggaagugg

SEQ ID NO: 274801 - RNA, 32 nt, Human
uugccucccacacccagccacuaccucccagc

SEQ ID NO: 274802 - RNA, 32 nt, Human
uugccucccucagauagaaaacagcccccacu

SEQ ID NO: 274803 - RNA, 32 nt, Human
uugccucccuccagcucugcuuaggcauuuug

SEQ ID NO: 274804 - RNA, 32 nt, Human
uugccucccuggcugugucuuucuugagggag

SEQ ID NO: 274805 - RNA, 32 nt, Human
uugccuccucaaguagcuucaucacagagugu

SEQ ID NO: 274806 - RNA, 21 nt, Human
uugccuccucacccaccucuu

SEQ ID NO: 274807 - RNA, 32 nt, Human
uugccuccuccacgcucccuacacaccugaga

SEQ ID NO: 274808 - RNA, 32 nt, Human
uugccuccucuccuguccuggcaguagcuucu

SEQ ID NO: 274809 - RNA, 32 nt, Human
uugccuccugguguguuuuaaaggauccucca

SEQ ID NO: 274810 - RNA, 32 nt, Human
uugccuccuugaggaggguggcauucuguguc

SEQ ID NO: 274811 - RNA, 32 nt, Human
uugccucgagccgagcccugcccccgcgagcc

SEQ ID NO: 274812 - RNA, 32 nt, Human
uugccucgaucuguagcaagcaaucuguuguu

SEQ ID NO: 274813 - RNA, 32 nt, Human
uugccucgccaccgcgugcuccugggcgcgcc

SEQ ID NO: 274814 - RNA, 26 nt, Human
uugccucggccuucuuugcuuuuugu

SEQ ID NO: 274815 - RNA, 15 nt, Human
uugccucggcuccug

SEQ ID NO: 274816 - RNA, 32 nt, Human
uugccucuaucagggcuggaguggugcagccc

SEQ ID NO: 274817 - RNA, 32 nt, Human
uugccucucaacugcauuaaccagucacaggc

SEQ ID NO: 274818 - RNA, 23 nt, Human
uugccucucaauucauuccuccu

SEQ ID NO: 274819 - RNA, 32 nt, Human
uugccucucaggaugacaaacaacagcggcuc

SEQ ID NO: 274820 - RNA, 32 nt, Human
uugccucuccaaccucuucauccugcccccgc

SEQ ID NO: 274821 - RNA, 32 nt, Human
uugccucuccaccucccaaucauguaauuugc

SEQ ID NO: 274822 - RNA, 32 nt, Human
uugccucuccccugcucacuccagucacauag

SEQ ID NO: 274823 - RNA, 32 nt, Human
uugccucucucucugaauuaucuugcuuauuu

SEQ ID NO: 274824 - RNA, 32 nt, Human
uugccucucuggacgcucugcaccaaccccag

SEQ ID NO: 274825 - RNA, 32 nt, Human
uugccucucugggucucuaucuccuccucuua

SEQ ID NO: 274826 - RNA, 32 nt, Human
uugccucucuguguuuaaagagcaccaggacc

SEQ ID NO: 274827 - RNA, 32 nt, Human
uugccucugagcgggagagucuguguguaugu

SEQ ID NO: 274828 - RNA, 32 nt, Human
uugccucugcaacuugacucuccucuaggaag

SEQ ID NO: 274829 - RNA, 32 nt, Human
uugccucugcccaaccagguugcaguagcagu

SEQ ID NO: 274830 - RNA, 32 nt, Human
uugccucugggauaaagucuuaucucaguuua

SEQ ID NO: 274831 - RNA, 32 nt, Human
uugccucuggguguguguaggggugagagugg

SEQ ID NO: 274832 - RNA, 32 nt, Human
uugccucugugagcuuucuaggccuggguagg

SEQ ID NO: 274833 - RNA, 32 nt, Human
uugccucuucugcuuuaaucucauccugacag

SEQ ID NO: 274834 - RNA, 32 nt, Human
uugccucuucuuuuccacugcuuggcucuuaa

SEQ ID NO: 274835 - RNA, 32 nt, Human
uugccucuuggcagcccuugaacuugaguaaa

SEQ ID NO: 274836 - RNA, 32 nt, Human
uugccucuuuguccuggccucuaguuuucuuu

SEQ ID NO: 274837 - RNA, 32 nt, Human
uugccugaacauccuuccuucccacccaucgc

SEQ ID NO: 274838 - RNA, 32 nt, Human
uugccugaacccaggaagaggagguugcagug

SEQ ID NO: 274839 - RNA, 32 nt, Human
uugccugaacccaggaggcagagguugcagua

SEQ ID NO: 274840 - RNA, 32 nt, Human
uugccugaacccaggaggcggagguugcagug

SEQ ID NO: 274841 - RNA, 32 nt, Human
uugccugaacccaggagguggagguugcagug

SEQ ID NO: 274842 - RNA, 32 nt, Human
uugccugaaccccagagguggagguugcagug

SEQ ID NO: 274843 - RNA, 32 nt, Human
uugccugaaccuaggagguggaggcugcagcg

SEQ ID NO: 274844 - RNA, 32 nt, Human
uugccugaacuccagaggugucgggacauggu

SEQ ID NO: 274845 - RNA, 32 nt, Human
uugccugaaucuuuuccuuuaacuggugguac

SEQ ID NO: 274846 - RNA, 32 nt, Human
uugccugacagaauugcuuagaaaggagcaga

SEQ ID NO: 274847 - RNA, 32 nt, Human
uugccugagaccaggagguugaggcugcagug

SEQ ID NO: 274848 - RNA, 32 nt, Human
uugccugagagagaauuggcccuacucgaggc

SEQ ID NO: 274849 - RNA, 32 nt, Human
uugccugagcccagaaguuugagacugcagug

SEQ ID NO: 274850 - RNA, 32 nt, Human
uugccugagcccaggagguggaaacugcagag

SEQ ID NO: 274851 - RNA, 32 nt, Human
uugccugagcccaggaguucaagaccagcuug

SEQ ID NO: 274852 - RNA, 32 nt, Human
uugccugagcucaagagguugaggcugcagug

SEQ ID NO: 274853 - RNA, 32 nt, Human
uugccugagggcacacaguggggaagacacag

SEQ ID NO: 274854 - RNA, 32 nt, Human
uugccugaggggaaagagagaugggccaggca

SEQ ID NO: 274855 - RNA, 32 nt, Human
uugccugcaugucuaaaagaaaauaugggccu

SEQ ID NO: 274856 - RNA, 32 nt, Human
uugccugccagagcuuggaagggaggacucuu

SEQ ID NO: 274857 - RNA, 32 nt, Human
uugccugccagcugcucccgagguggccuuga

SEQ ID NO: 274858 - RNA, 32 nt, Human
uugccugcccacugcccaggccugcaccaugu

SEQ ID NO: 274859 - RNA, 32 nt, Human
uugccugccccgaggggcgucugguaggcacc

SEQ ID NO: 274860 - RNA, 32 nt, Human
uugccugcccgcugcccccgccuccuccgccu

SEQ ID NO: 274861 - RNA, 32 nt, Human
uugccugcccugucuccugggaucagagggua

SEQ ID NO: 274862 - RNA, 32 nt, Human
uugccugccuacugcccaggccugcaccaugu

SEQ ID NO: 274863 - RNA, 32 nt, Human
uugccugccuguauuaauuuuaguuuugaguc

SEQ ID NO: 274864 - RNA, 32 nt, Human
uugccugccuucaucccucauuuccucccucu

SEQ ID NO: 274865 - RNA, 20 nt, Human
uugccugcgcgcucugagcc

SEQ ID NO: 274866 - RNA, 32 nt, Human
uugccugcguagugaggaaacagcugauccug

SEQ ID NO: 274867 - RNA, 32 nt, Human
uugccugcucucucugugccuagccucaaagc

SEQ ID NO: 274868 - RNA, 18 nt, Human
uugccugcugcccugagc

SEQ ID NO: 274869 - RNA, 32 nt, Human
uugccugcugucagaggagcagcuaucugauu

SEQ ID NO: 274870 - RNA, 32 nt, Human
uugccugcuguugcuggaagagcuggcucaua

SEQ ID NO: 274871 - RNA, 32 nt, Human
uugccuggauauccccagcagaggcuacagaa

SEQ ID NO: 274872 - RNA, 32 nt, Human
uugccuggauuuggaggcagaguugucaggcu

SEQ ID NO: 274873 - RNA, 32 nt, Human
uugccuggcagaggaggagcaaacagccaugu

SEQ ID NO: 274874 - RNA, 32 nt, Human
uugccuggcccuguccuggacccagcuuugcu

SEQ ID NO: 274875 - RNA, 32 nt, Human
uugccuggccucccccugcauuccugucuggg

SEQ ID NO: 274876 - RNA, 32 nt, Human
uugccuggcuaaaagagucucucucuaaguau

SEQ ID NO: 274877 - RNA, 32 nt, Human
uugccugggaccuggaaaguguuuagauucuu

SEQ ID NO: 274878 - RNA, 32 nt, Human
uugccugggcuggaaugcaguggugcgaucuc

SEQ ID NO: 274879 - RNA, 21 nt, Human
uugccugggcuggagugcagu

SEQ ID NO: 274880 - RNA, 32 nt, Human
uugccugggcuggagugcaguggcccaagcua

SEQ ID NO: 274881 - RNA, 32 nt, Human
uugccugguccacccuugcccucccugggucg

SEQ ID NO: 274882 - RNA, 32 nt, Human
uugccuggugaggcuggagggagcaccaggac

SEQ ID NO: 274883 - RNA, 32 nt, Human
uugccugguucaucuuguagucuuccaaaaca

SEQ ID NO: 274884 - RNA, 32 nt, Human
uugccuguauagucaaacacauaggcaaauag

SEQ ID NO: 274885 - RNA, 32 nt, Human
uugccugucaucuggauagugucuaaaaauuu

SEQ ID NO: 274886 - RNA, 32 nt, Human
uugccuguccccaggagcugggaugccagguc

SEQ ID NO: 274887 - RNA, 32 nt, Human
uugccugugauugcccagcccagauucaucug

SEQ ID NO: 274888 - RNA, 32 nt, Human
uugccugugcucuccucucaggggcagcaugc

SEQ ID NO: 274889 - RNA, 32 nt, Human
uugccuguuccaccccuuuguucacuucgcgu

SEQ ID NO: 274890 - RNA, 32 nt, Human
uugccuguugccagacuggagugcaguggcac

SEQ ID NO: 274891 - RNA, 32 nt, Human
uugccuguuugcaccuuagacuuuuggguaua

SEQ ID NO: 274892 - RNA, 32 nt, Human
uugccuuagugaucaugauuacacaaaagagg

SEQ ID NO: 274893 - RNA, 32 nt, Human
uugccuuauccaaagauggggaaaguaagucc

SEQ ID NO: 274894 - RNA, 32 nt, Human
uugccuuauucacuaucugggucuuacaauac

SEQ ID NO: 274895 - RNA, 32 nt, Human
uugccuucacuaccuuccuggucagcugcgug

SEQ ID NO: 274896 - RNA, 32 nt, Human
uugccuucagcccuggagugggcagagaguau

SEQ ID NO: 274897 - RNA, 32 nt, Human
uugccuucaugcugguuuaccccaaagaguuc

SEQ ID NO: 274898 - RNA, 32 nt, Human
uugccuucauucuuaccaccuggccugcaaag

SEQ ID NO: 274899 - RNA, 32 nt, Human
uugccuucauuucaccuuccucuucguuuacg

SEQ ID NO: 274900 - RNA, 32 nt, Human
uugccuucauuucucuuuuuaucucccccuug

SEQ ID NO: 274901 - RNA, 32 nt, Human
uugccuucccaccugccucugccacaccuggu

SEQ ID NO: 274902 - RNA, 21 nt, Human
uugccuuccucccuucuuccu

SEQ ID NO: 274903 - RNA, 32 nt, Human
uugccuuccuugaccaucuaccuugacuaacc

SEQ ID NO: 274904 - RNA, 32 nt, Human
uugccuucugcgcaaaggguuucaccaaggau

SEQ ID NO: 274905 - RNA, 32 nt, Human
uugccuucuuacuguguuguguguuuuuccug

SEQ ID NO: 274906 - RNA, 32 nt, Human
uugccuucuugaucuuccguccuucuuggaga

SEQ ID NO: 274907 - RNA, 32 nt, Human
uugccuugcaaacuuccaucccugucaugucu

SEQ ID NO: 274908 - RNA, 32 nt, Human
uugccuugccuggugcuuccucccucauugug

SEQ ID NO: 274909 - RNA, 32 nt, Human
uugccuugcucacccuccacuuguccgucuac

SEQ ID NO: 274910 - RNA, 32 nt, Human
uugccuuggaggcagaagcugugaguuucaga

SEQ ID NO: 274911 - RNA, 32 nt, Human
uugccuugggcccagccccuggugaucacagg

SEQ ID NO: 274912 - RNA, 32 nt, Human
uugccuuguguuacagauucagccugcugaag

SEQ ID NO: 274913 - RNA, 32 nt, Human
uugccuuguuuaaaugaaaugcauguuuagug

SEQ ID NO: 274914 - RNA, 32 nt, Human
uugccuuguuuacucauccugcccuguaaugu

SEQ ID NO: 274915 - RNA, 32 nt, Human
uugccuuuagcguguaaauggaagcacugcca

SEQ ID NO: 274916 - RNA, 32 nt, Human
uugccuuuauuuuucugucccagaaggauucu

SEQ ID NO: 274917 - RNA, 32 nt, Human
uugccuuuccaccugcuuucuccugggcccgc

SEQ ID NO: 274918 - RNA, 32 nt, Human
uugccuuugaacacaucuucuugcugaacauu

SEQ ID NO: 274919 - RNA, 32 nt, Human
uugccuuugucgcccaggcuggagugcaaugg

SEQ ID NO: 274920 - RNA, 32 nt, Human
uugccuuugucgcccccgccccucucuucccu

SEQ ID NO: 274921 - RNA, 32 nt, Human
uugccuuuguucagaauacaugacauugguaa

SEQ ID NO: 274922 - RNA, 32 nt, Human
uugccuuuguuuugaacuuccuuucccacuug

SEQ ID NO: 274923 - RNA, 32 nt, Human
uugccuuuuacauuuuguuuaauuccugauuu

SEQ ID NO: 274924 - RNA, 23 nt, Human
uugccuuuuuaugccgauuaaca

SEQ ID NO: 274925 - RNA, 32 nt, Human
uugcgaaggagagaggcggcugagggacugca

SEQ ID NO: 274926 - RNA, 32 nt, Human
uugcgaccagccuggucaacauaguggacccc

SEQ ID NO: 274927 - RNA, 32 nt, Human
uugcgaccaugagagaaaaaccuggagaacgg

SEQ ID NO: 274928 - RNA, 32 nt, Human
uugcgaccuucucuuaacagugugaagugagg

SEQ ID NO: 274929 - RNA, 32 nt, Human
uugcgagagcauuuccuucuaagaauuauugu

SEQ ID NO: 274930 - RNA, 32 nt, Human
uugcgagcacauuacuugcugcaugggaggag

SEQ ID NO: 274931 - RNA, 32 nt, Human
uugcgaggccgaggcagguggaucacuugagc

SEQ ID NO: 274932 - RNA, 32 nt, Human
uugcgaggcuagggcaggagaaucacuugaac

SEQ ID NO: 274933 - RNA, 32 nt, Human
uugcgagggcuucacucuucuuucacuggaua

SEQ ID NO: 274934 - RNA, 32 nt, Human
uugcgaguggaggaugcagucucuuugugguu

SEQ ID NO: 274935 - RNA, 32 nt, Human
uugcgagugugagguuagguccagcaucugca

SEQ ID NO: 274936 - RNA, 32 nt, Human
uugcgaugggcugugaggaugggggugguggg

SEQ ID NO: 274937 - RNA, 32 nt, Human
uugcgaugugucaugugccuguguauggcuuu

SEQ ID NO: 274938 - RNA, 32 nt, Human
uugcgauucuucugugaagguacaguguguau

SEQ ID NO: 274939 - RNA, 32 nt, Human
uugcgcacagucauaagcaguguagacuugag

SEQ ID NO: 274940 - RNA, 32 nt, Human
uugcgcaccggauagaccccuuguauauaaag

SEQ ID NO: 274941 - RNA, 19 nt, Human
uugcgcagcgcgggggcug

SEQ ID NO: 274942 - RNA, 32 nt, Human
uugcgcaggcuggagugcaauggugcaaucuc

SEQ ID NO: 274943 - RNA, 21 nt, Human
uugcgcagggccccugggcca

SEQ ID NO: 274944 - RNA, 32 nt, Human
uugcgccaagaaagcauuuguucuccaaaugu

SEQ ID NO: 274945 - RNA, 32 nt, Human
uugcgccacagcauuccagccugggcgaugga

SEQ ID NO: 274946 - RNA, 32 nt, Human
uugcgccaccacacuccagccugggcaacaga

SEQ ID NO: 274947 - RNA, 32 nt, Human
uugcgccaccacugcacuccagccugggcaac

SEQ ID NO: 274948 - RNA, 32 nt, Human
uugcgccaccgcacuccagccugggcaacaga

SEQ ID NO: 274949 - RNA, 32 nt, Human
uugcgccaccgcacuccagccugggcgacaga

SEQ ID NO: 274950 - RNA, 32 nt, Human
uugggaggccgaggcaggugguucaucuaagg

SEQ ID NO: 274951 - RNA, 32 nt, Human
uugggaggccgaggcagguugaucaccugagg

SEQ ID NO: 274952 - RNA, 32 nt, Human
uugggaggccgaggcaguuggaucaccugagg

SEQ ID NO: 274953 - RNA, 32 nt, Human
uugggaggccgaggcaguuggauuacuugagg

SEQ ID NO: 274954 - RNA, 32 nt, Human
uugggaggccgaggcaugagaaucacuugaac

SEQ ID NO: 274955 - RNA, 32 nt, Human
uugggaggccgaggcauguggaucaccugagg

SEQ ID NO: 274956 - RNA, 32 nt, Human
uugggaggccgaggccaguggaucaccugagg

SEQ ID NO: 274957 - RNA, 32 nt, Human
uugggaggccgaggccggcggaucacaaggaa

SEQ ID NO: 274958 - RNA, 32 nt, Human
uugggaggccgaggccgguggaucacuugagg

SEQ ID NO: 274959 - RNA, 32 nt, Human
uugggaggccgaggcgaguggaucacgagguc

SEQ ID NO: 274960 - RNA, 32 nt, Human
uugggaggccgaggcgccuggaucaccugagg

SEQ ID NO: 274961 - RNA, 32 nt, Human
uugggaggccgaggcggacggaucacgagguc

SEQ ID NO: 274962 - RNA, 32 nt, Human
uugggaggccgaggcggaucauaaggucagga

SEQ ID NO: 274963 - RNA, 32 nt, Human
uugggaggccgaggcggcugaaucacuugagg

SEQ ID NO: 274964 - RNA, 32 nt, Human
uugggaggccgaggcgggaggaucacaaaguc

SEQ ID NO: 274965 - RNA, 32 nt, Human
uugggaggccgaggcgggaggaucaccugagg

SEQ ID NO: 274966 - RNA, 32 nt, Human
uugggaggccgaggcgggaggaucacuugagc

SEQ ID NO: 274967 - RNA, 32 nt, Human
uugggaggccgaggcgggcagaucacaagguc

SEQ ID NO: 274968 - RNA, 32 nt, Human
uugggaggccgaggcgggcagaucaccugaag

SEQ ID NO: 274969 - RNA, 32 nt, Human
uugggaggccgaggcgggcagaucaccugagg

SEQ ID NO: 274970 - RNA, 32 nt, Human
uugggaggccgaggcgggcagaucacgagguc

SEQ ID NO: 274971 - RNA, 32 nt, Human
uugggaggccgaggcgggcagaucacgagguu

SEQ ID NO: 274972 - RNA, 32 nt, Human
uugggaggccgaggcgggcagaucacgaguuc

SEQ ID NO: 274973 - RNA, 32 nt, Human
uugggaggccgaggcgggcagaucacuugagg

SEQ ID NO: 274974 - RNA, 32 nt, Human
uugggaggccgaggcgggcagaucaugagguc

SEQ ID NO: 274975 - RNA, 32 nt, Human
uugggaggccgaggcgggccgaucacgagguc

SEQ ID NO: 274976 - RNA, 32 nt, Human
uugggaggccgaggcgggcggaucaacugagg

SEQ ID NO: 274977 - RNA, 32 nt, Human
uugggaggccgaggcgggcggaucaauagguc

SEQ ID NO: 274978 - RNA, 32 nt, Human
uugggaggccgaggcgggcggaucacaaaguc

SEQ ID NO: 274979 - RNA, 32 nt, Human
uugggaggccgaggcgggcggaucacaagggc

SEQ ID NO: 274980 - RNA, 32 nt, Human
uugggaggccgaggcgggcggaucacaagguc

SEQ ID NO: 274981 - RNA, 32 nt, Human
uugggaggccgaggcgggcggaucacacgguc

SEQ ID NO: 274982 - RNA, 32 nt, Human
uugggaggccgaggcgggcggaucaccggagg

SEQ ID NO: 274983 - RNA, 32 nt, Human
uugggaggccgaggcgggcggaucaccugagg

SEQ ID NO: 274984 - RNA, 32 nt, Human
uugggaggccgaggcgggcggaucaccugagu

SEQ ID NO: 274985 - RNA, 32 nt, Human
uugggaggccgaggcgggcggaucacgagguc

SEQ ID NO: 274986 - RNA, 32 nt, Human
uugggaggccgaggcgggcggaucacuagguc

SEQ ID NO: 274987 - RNA, 32 nt, Human
uugggaggccgaggcgggcggaucacuugaga

SEQ ID NO: 274988 - RNA, 32 nt, Human
uugggaggccgaggcgggcggaucacuugagg

SEQ ID NO: 274989 - RNA, 32 nt, Human
uugggaggccgaggcgggcggaucagaccauc

SEQ ID NO: 274990 - RNA, 32 nt, Human
uugggaggccgaggcgggcggaucaugagguc

SEQ ID NO: 274991 - RNA, 32 nt, Human
uugggaggccgaggcgggcggaucaugagguu

SEQ ID NO: 274992 - RNA, 32 nt, Human
uugggaggccgaggcgggcggaucgcaggguc

SEQ ID NO: 274993 - RNA, 32 nt, Human
uugggaggccgaggcgggcggaucgccugagg

SEQ ID NO: 274994 - RNA, 32 nt, Human
uugggaggccgaggcgggcggaucgcuugagg

SEQ ID NO: 274995 - RNA, 32 nt, Human
uugggaggccgaggcgggcgggucacgagguc

SEQ ID NO: 274996 - RNA, 32 nt, Human
uugggaggccgaggcggggagaucaccugagg

SEQ ID NO: 274997 - RNA, 32 nt, Human
uugggaggccgaggcgggugaaucaugagguc

SEQ ID NO: 274998 - RNA, 32 nt, Human
uugggaggccgaggcgggugaucacuugaggu

SEQ ID NO: 274999 - RNA, 32 nt, Human
uugggaggccgaggcggguggaccaccugagg

SEQ ID NO: 275000 - RNA, 32 nt, Human
uugggaggccgaggcggguggaucacaagguc

SEQ ID NO: 275001 - RNA, 32 nt, Human
uugggaggccgaggcggguggaucaccaagac

SEQ ID NO: 275002 - RNA, 32 nt, Human
uugggaggccgaggcggguggaucaccuaaag

SEQ ID NO: 275003 - RNA, 32 nt, Human
uugggaggccgaggcggguggaucaccuaagg

SEQ ID NO: 275004 - RNA, 32 nt, Human
uugggaggccgaggcggguggaucaccugagg

SEQ ID NO: 275005 - RNA, 32 nt, Human
uugggaggccgaggcggguggaucacgagauc

SEQ ID NO: 275006 - RNA, 32 nt, Human
uugggaggccgaggcggguggaucacgagguc

SEQ ID NO: 275007 - RNA, 32 nt, Human
uugggaggccgaggcggguggaucacucaagg

SEQ ID NO: 275008 - RNA, 32 nt, Human
uugggaggccgaggcggguggaucacuugaga

SEQ ID NO: 275009 - RNA, 32 nt, Human
uugggaggccgaggcggguggaucacuugagg

SEQ ID NO: 275010 - RNA, 32 nt, Human
uugggaggccgaggcggguggaucagaagguc

SEQ ID NO: 275011 - RNA, 32 nt, Human
uugggaggccgaggcggguggaucaugagauc

SEQ ID NO: 275012 - RNA, 32 nt, Human
uugggaggccgaggcggguggaucaugagguc

SEQ ID NO: 275013 - RNA, 32 nt, Human
uugggaggccgaggcggguggaucaugugagg

SEQ ID NO: 275014 - RNA, 32 nt, Human
uugggaggccgaggcggguggaucauuugagg

SEQ ID NO: 275015 - RNA, 32 nt, Human
uugggaggccgaggcggguggguuacuugagg

SEQ ID NO: 275016 - RNA, 32 nt, Human
uugggaggccgaggcggguguaucaccugagg

SEQ ID NO: 275017 - RNA, 32 nt, Human
uugggaggccgaggcggucggaucacgagguc

SEQ ID NO: 275018 - RNA, 32 nt, Human
uugggaggccgaggcguguggaucaccugaga

SEQ ID NO: 275019 - RNA, 32 nt, Human
uugggaggccgaggcuggcggaucacgagguc

SEQ ID NO: 275020 - RNA, 32 nt, Human
uugggaggccgaggcugguggaucacaagguc

SEQ ID NO: 275021 - RNA, 32 nt, Human
uugggaggccgaggcugguggaucacgagguc

SEQ ID NO: 275022 - RNA, 32 nt, Human
uugggaggccgaggggaguggaucaccugagu

SEQ ID NO: 275023 - RNA, 32 nt, Human
uugggaggccgaggggaguggaucacuugagg

SEQ ID NO: 275024 - RNA, 32 nt, Human
uugggaggccgagguaggcagaucacgagguc

SEQ ID NO: 275025 - RNA, 32 nt, Human
uugggaggccgagguaggcggaucaccugagg

SEQ ID NO: 275026 - RNA, 32 nt, Human
uugggaggccgagguagguggaucgccugagg

SEQ ID NO: 275027 - RNA, 32 nt, Human
uugggaggccgaggugaguagaucaucugggg

SEQ ID NO: 275028 - RNA, 32 nt, Human
uugggaggccgaggugaguggaucaccugagg

SEQ ID NO: 275029 - RNA, 32 nt, Human
uugggaggccgaggugggaagaucauuucaac

SEQ ID NO: 275030 - RNA, 32 nt, Human
uugggaggccgaggugggaagauuguucaaga

SEQ ID NO: 275031 - RNA, 32 nt, Human
uugggaggccgaggugggagaaucacaagguc

SEQ ID NO: 275032 - RNA, 32 nt, Human
uugggaggccgaggugggagaaucacuugacg

SEQ ID NO: 275033 - RNA, 32 nt, Human
uugggaggccgaggugggcagaucaugagguc

SEQ ID NO: 275034 - RNA, 32 nt, Human
uugggaggccgaggugggcagaucauggguca

SEQ ID NO: 275035 - RNA, 32 nt, Human
uugggaggccgagguggguggaucacaagguc

SEQ ID NO: 275036 - RNA, 32 nt, Human
uugggaggccgagguggguggaucacaagguu

SEQ ID NO: 275037 - RNA, 32 nt, Human
uugggaggccgagguggguggaucaccagagg

SEQ ID NO: 275038 - RNA, 32 nt, Human
uugggaggccgagguggguggaucaccucagg

SEQ ID NO: 275039 - RNA, 32 nt, Human
uugggaggccgagguggguggaucaccugaag

SEQ ID NO: 275040 - RNA, 32 nt, Human
uugggaggccgagguggguggaucaccugaga

SEQ ID NO: 275041 - RNA, 32 nt, Human
uugggaggccgagguggguggaucaccugagg

SEQ ID NO: 275042 - RNA, 32 nt, Human
uugggaggccgagguggguggaucacgaaguc

SEQ ID NO: 275043 - RNA, 32 nt, Human
uugggaggccgagguggguggaucacgagguc

SEQ ID NO: 275044 - RNA, 32 nt, Human
uugggaggccgagguggguggaucacuugagg

SEQ ID NO: 275045 - RNA, 32 nt, Human
uugggaggccgagguggguggaucaguugagg

SEQ ID NO: 275046 - RNA, 32 nt, Human
uugggaggccgagguggguggaucaucugagg

SEQ ID NO: 275047 - RNA, 32 nt, Human
uugggaggccgagguggguggaucaugaaguc

SEQ ID NO: 275048 - RNA, 32 nt, Human
uugggaggccgagucagguggaucaccugagg

SEQ ID NO: 275049 - RNA, 32 nt, Human
uugggaggccgggacagguggaucaccugagg

SEQ ID NO: 275050 - RNA, 32 nt, Human
uugggaggccgggguuggaggaucauuugagc

SEQ ID NO: 275051 - RNA, 32 nt, Human
uugggaggccuaggcagguggaucaccugacg

SEQ ID NO: 275052 - RNA, 32 nt, Human
uugggaggccuaggcggguggaucaccugagg

SEQ ID NO: 275053 - RNA, 32 nt, Human
uugggaggccuaggcggguggaucacgacguc

SEQ ID NO: 275054 - RNA, 32 nt, Human
uugggaggccuagggugggcaugaaagcuugg

SEQ ID NO: 275055 - RNA, 32 nt, Human
uugggaggccuuggcagguggaucaccugaga

SEQ ID NO: 275056 - RNA, 19 nt, Human
uugggaggcggaagcagga

SEQ ID NO: 275057 - RNA, 32 nt, Human
uugggaggcggaagcaggaguaucccuugagu

SEQ ID NO: 275058 - RNA, 32 nt, Human
uugggaggcggguggaggagcagcagaggaag

SEQ ID NO: 275059 - RNA, 32 nt, Human
uugggaggcuaaagugggagaaucacuuaaac

SEQ ID NO: 275060 - RNA, 32 nt, Human
uugggaggcuaagacaggagaaucacuugagc

SEQ ID NO: 275061 - RNA, 32 nt, Human
uugggaggcuaaggcaggagaaucacuugaac

SEQ ID NO: 275062 - RNA, 32 nt, Human
uugggaggcuaaggcaggagaaucacuugaau

SEQ ID NO: 275063 - RNA, 32 nt, Human
uugggaggcuaaggcaggagaaucgcuugaac

SEQ ID NO: 275064 - RNA, 32 nt, Human
uugggaggcuaaggcaggagaauugcuugaac

SEQ ID NO: 275065 - RNA, 32 nt, Human
uugggaggcuaaggcagggagauggcuugaga

SEQ ID NO: 275066 - RNA, 32 nt, Human
uugggaggcugaaacaggagaauugcuugaac

SEQ ID NO: 275067 - RNA, 32 nt, Human
uugggaggcugaagcagaagaauugcuugaac

SEQ ID NO: 275068 - RNA, 32 nt, Human
uugggaggcugaagcaggagaacugccugaac

SEQ ID NO: 275069 - RNA, 32 nt, Human
uugggaggcugaagcaggagaaucacuuuaac

SEQ ID NO: 275070 - RNA, 32 nt, Human
uugggaggcugaagcaggagaaucccuugaac

SEQ ID NO: 275071 - RNA, 32 nt, Human
uugggaggcugaagcaggagaaucgcuugaac

SEQ ID NO: 275072 - RNA, 32 nt, Human
uugggaggcugaagcaggagaaucguuugaau

SEQ ID NO: 275073 - RNA, 32 nt, Human
uugggaggcugaagcaggagaauugccugaac

SEQ ID NO: 275074 - RNA, 32 nt, Human
uugggaggcugaagcaggagaauugcucaaac

SEQ ID NO: 275075 - RNA, 32 nt, Human
uugggaggcugaagcaggagaauugcucgaac

SEQ ID NO: 275076 - RNA, 32 nt, Human
uugggaggcugaagcaggagagucacuugaac

SEQ ID NO: 275077 - RNA, 32 nt, Human
uugggaggcugaagcaggagcauggcgugaac

SEQ ID NO: 275078 - RNA, 32 nt, Human
uugggaggcugaagcaggaggacugcuugagg

SEQ ID NO: 275079 - RNA, 32 nt, Human
uugggaggcugaagcaggaggauagcuagagc

SEQ ID NO: 275080 - RNA, 32 nt, Human
uugggaggcugaagcaggaggaucacuugagc

SEQ ID NO: 275081 - RNA, 32 nt, Human
uugggaggcugaagcaggaggauugaggaaga

SEQ ID NO: 275082 - RNA, 32 nt, Human
uugggaggcugaagcaggaggauugcuugagc

SEQ ID NO: 275083 - RNA, 32 nt, Human
uugggaggcugaagcaggcagaucaccugagg

SEQ ID NO: 275084 - RNA, 32 nt, Human
uugggaggcugaagcaggcagauugcuugagg

SEQ ID NO: 275085 - RNA, 32 nt, Human
uugggaggcugaagcaggcgggucaccugagg

SEQ ID NO: 275086 - RNA, 32 nt, Human
uugggaggcugaagcaugagaaucacuugaau

SEQ ID NO: 275087 - RNA, 32 nt, Human
uugggaggcugaagcgggaggaucgcuugaga

SEQ ID NO: 275088 - RNA, 32 nt, Human
uugggaggcugaagcggguggaucaccugagg

SEQ ID NO: 275089 - RNA, 32 nt, Human
uugggaggcugaagcggguggaucaugagguc

SEQ ID NO: 275090 - RNA, 32 nt, Human
uugggaggcugaagcugaaggaucacuugagc

SEQ ID NO: 275091 - RNA, 32 nt, Human
uugggaggcugaagggggcagauuagcugagg

SEQ ID NO: 275092 - RNA, 32 nt, Human
uugggaggcugaaguaggaggaucgucuugag

SEQ ID NO: 275093 - RNA, 32 nt, Human
uugggaggcugaagugggaagaucacuugagc

SEQ ID NO: 275094 - RNA, 32 nt, Human
uugggaggcugaagugggaggacugcuugggc

SEQ ID NO: 275095 - RNA, 32 nt, Human
uugggaggcugaagugggaggaucauuugugc

SEQ ID NO: 275096 - RNA, 32 nt, Human
uugggaggcugaagugggaggaucccuugagc

SEQ ID NO: 275097 - RNA, 32 nt, Human
uugggaggcugaagugggaggaucgcuugagc

SEQ ID NO: 275098 - RNA, 32 nt, Human
uugggaggcugaagugggaggauuacuugagc

SEQ ID NO: 275099 - RNA, 32 nt, Human
uugggaggcugaagugggaggguggcuugagu

SEQ ID NO: 275100 - RNA, 32 nt, Human
uugggaggcugaagugggcagauuacuugagg

SEQ ID NO: 275101 - RNA, 32 nt, Human
uugggaggcugaagugggugaaucacuugagg

SEQ ID NO: 275102 - RNA, 32 nt, Human
uugggaggcugaaguggguggaucacaaguca

SEQ ID NO: 275103 - RNA, 32 nt, Human
uugggaggcugaaguggguggaucaccagagg

SEQ ID NO: 275104 - RNA, 32 nt, Human
uugggaggcugacgcaggagaaucgcuugaac

SEQ ID NO: 275105 - RNA, 32 nt, Human
uugggaggcugagacaggagaaucacuugaac

SEQ ID NO: 275106 - RNA, 32 nt, Human
uugggaggcugagacaggagaaucccuugaac

SEQ ID NO: 275107 - RNA, 32 nt, Human
uugggaggcugagacaggagaaucgcuugaac

SEQ ID NO: 275108 - RNA, 32 nt, Human
uugggaggcugagacaggagaauugcuugaac

SEQ ID NO: 275109 - RNA, 32 nt, Human
uugggaggcugagacagguggaucaccugagg

SEQ ID NO: 275110 - RNA, 32 nt, Human
uugggaggcugagacagguggaucacuugagg

SEQ ID NO: 275111 - RNA, 32 nt, Human
uugggaggcugagagaggagaauagcuugaac

SEQ ID NO: 275112 - RNA, 32 nt, Human
uugggaggcugagauaggagaaucgcuugaac

SEQ ID NO: 275113 - RNA, 32 nt, Human
uugggaggcugagaugggagaaucacuugaac

SEQ ID NO: 275114 - RNA, 32 nt, Human
uugggaggcugagaugugagaaucacuugaac

SEQ ID NO: 275115 - RNA, 32 nt, Human
uugggaggcugagccaggagaaucacuugaac

SEQ ID NO: 275116 - RNA, 32 nt, Human
uugggaggcugagccaggagaaucgcuugaac

SEQ ID NO: 275117 - RNA, 32 nt, Human
uugggaggcugagccaggagaauugcuugaac

SEQ ID NO: 275118 - RNA, 32 nt, Human
uugggaggcugaggaaggagaauugcuugaac

SEQ ID NO: 275119 - RNA, 32 nt, Human
uugggaggcugaggaggguggaucacuugagg

SEQ ID NO: 275120 - RNA, 32 nt, Human
uugggaggcugaggcaagagaaucauuugaac

SEQ ID NO: 275121 - RNA, 32 nt, Human
uugggaggcugaggcaagcggaucauuugagg

SEQ ID NO: 275122 - RNA, 32 nt, Human
uugggaggcugaggcaagugaaucacuugaac

SEQ ID NO: 275123 - RNA, 32 nt, Human
uugggaggcugaggcaaguggaucacuugagg

SEQ ID NO: 275124 - RNA, 32 nt, Human
uugggaggcugaggcacaagaaucacuugaac

SEQ ID NO: 275125 - RNA, 32 nt, Human
uugggaggcugaggcacaagaaucacuugaau

SEQ ID NO: 275126 - RNA, 32 nt, Human
uugggaggcugaggcacgagaaucacuugagc

SEQ ID NO: 275127 - RNA, 32 nt, Human
uugggaggcugaggcagaagaaucacuugaac

SEQ ID NO: 275128 - RNA, 32 nt, Human
uugggaggcugaggcagaauugcuugaaccca

SEQ ID NO: 275129 - RNA, 32 nt, Human
uugggaggcugaggcagcauugcuugaacccg

SEQ ID NO: 275130 - RNA, 32 nt, Human
uugggaggcugaggcaggaaaauggcgugaac

SEQ ID NO: 275131 - RNA, 32 nt, Human
uugggaggcugaggcaggagaaccgcuuaaac

SEQ ID NO: 275132 - RNA, 32 nt, Human
uugggaggcugaggcaggagaacugcuugauc

SEQ ID NO: 275133 - RNA, 32 nt, Human
uugggaggcugaggcaggagaauagcuugaac

SEQ ID NO: 275134 - RNA, 32 nt, Human
uugggaggcugaggcaggagaaucaccugaac

SEQ ID NO: 275135 - RNA, 32 nt, Human
uugggaggcugaggcaggagaaucacucgaac

SEQ ID NO: 275136 - RNA, 32 nt, Human
uugggaggcugaggcaggagaaucacuugaac

SEQ ID NO: 275137 - RNA, 32 nt, Human
uugggaggcugaggcaggagaaucacuugaau

SEQ ID NO: 275138 - RNA, 32 nt, Human
uugggaggcugaggcaggagaaucacuugacc

SEQ ID NO: 275139 - RNA, 32 nt, Human
uugggaggcugaggcaggagaaucacuugagc

SEQ ID NO: 275140 - RNA, 32 nt, Human
uugggaggcugaggcaggagaaucacuugagg

SEQ ID NO: 275141 - RNA, 32 nt, Human
uugggaggcugaggcaggagaaucauuuaaac

SEQ ID NO: 275142 - RNA, 32 nt, Human
uugggaggcugaggcaggagaaucauuugaac

SEQ ID NO: 275143 - RNA, 32 nt, Human
uugggaggcugaggcaggagaaucauuugagc

SEQ ID NO: 275144 - RNA, 32 nt, Human
uugggaggcugaggcaggagaaucccuugaac

SEQ ID NO: 275145 - RNA, 32 nt, Human
uugggaggcugaggcaggagaaucgccugaac

SEQ ID NO: 275146 - RNA, 32 nt, Human
uugggaggcugaggcaggagaaucgcuggagc

SEQ ID NO: 275147 - RNA, 32 nt, Human
uugggaggcugaggcaggagaaucgcuuaaac

SEQ ID NO: 275148 - RNA, 32 nt, Human
uugggaggcugaggcaggagaaucgcuugaac

SEQ ID NO: 275149 - RNA, 32 nt, Human
uugggaggcugaggcaggagaaucgcuugaau

SEQ ID NO: 275150 - RNA, 32 nt, Human
uugggaggcugaggcaggagaaucgcuugacu

SEQ ID NO: 275151 - RNA, 32 nt, Human
uugggaggcugaggcaggagaaucgcuugagc

SEQ ID NO: 275152 - RNA, 32 nt, Human
uugggaggcugaggcaggagaaucgguugaac

SEQ ID NO: 275153 - RNA, 32 nt, Human
uugggaggcugaggcaggagaaucucuugaac

SEQ ID NO: 275154 - RNA, 32 nt, Human
uugggaggcugaggcaggagaauggcaagaac

SEQ ID NO: 275155 - RNA, 32 nt, Human
uugggaggcugaggcaggagaauggcauaaac

SEQ ID NO: 275156 - RNA, 32 nt, Human
uugggaggcugaggcaggagaauggcaugaac

SEQ ID NO: 275157 - RNA, 32 nt, Human
uugggaggcugaggcaggagaauggccugaac

SEQ ID NO: 275158 - RNA, 32 nt, Human
uugggaggcugaggcaggagaauggcgggaac

SEQ ID NO: 275159 - RNA, 32 nt, Human
uugggaggcugaggcaggagaauggcgugaac

SEQ ID NO: 275160 - RNA, 32 nt, Human
uugggaggcugaggcaggagaauggcuugaac

SEQ ID NO: 275161 - RNA, 32 nt, Human
uugggaggcugaggcaggagaauuacuugaac

SEQ ID NO: 275162 - RNA, 32 nt, Human
uugggaggcugaggcaggagaauucguugggc

SEQ ID NO: 275163 - RNA, 32 nt, Human
uugggaggcugaggcaggagaauucuuugaac

SEQ ID NO: 275164 - RNA, 32 nt, Human
uugggaggcugaggcaggagaauugauugaac

SEQ ID NO: 275165 - RNA, 32 nt, Human
uugggaggcugaggcaggagaauugcuuaaau

SEQ ID NO: 275166 - RNA, 32 nt, Human
uugggaggcugaggcaggagaauugcuugaac

SEQ ID NO: 275167 - RNA, 32 nt, Human
uugggaggcugaggcaggagaauugcuugaag

SEQ ID NO: 275168 - RNA, 32 nt, Human
uugggaggcugaggcaggagaauugcuugaau

SEQ ID NO: 275169 - RNA, 32 nt, Human
uugggaggcugaggcaggagaauugcuugagc

SEQ ID NO: 275170 - RNA, 32 nt, Human
uugggaggcugaggcaggagaauugcuugagu

SEQ ID NO: 275171 - RNA, 32 nt, Human
uugggaggcugaggcaggagaauuguuugacc

SEQ ID NO: 275172 - RNA, 32 nt, Human
uugggaggcugaggcaggagacuagcuggaac

SEQ ID NO: 275173 - RNA, 32 nt, Human
uugggaggcugaggcaggagacucgcuugaac

SEQ ID NO: 275174 - RNA, 32 nt, Human
uugggaggcugaggcaggagacuggcaugaac

SEQ ID NO: 275175 - RNA, 25 nt, Human
uugggaggcugaggcaggagagucg

SEQ ID NO: 275176 - RNA, 32 nt, Human
uugggaggcugaggcaggagagugcuugaacc

SEQ ID NO: 275177 - RNA, 32 nt, Human
uugggaggcugaggcaggaggacuguuugagu

SEQ ID NO: 275178 - RNA, 32 nt, Human
uugggaggcugaggcaggaggaucacucgagc

SEQ ID NO: 275179 - RNA, 32 nt, Human
uugggaggcugaggcaggaggaucacuuaagc

SEQ ID NO: 275180 - RNA, 32 nt, Human
uugggaggcugaggcaggaggaucacuucagc

SEQ ID NO: 275181 - RNA, 32 nt, Human
uugggaggcugaggcaggaggaucacuugagc

SEQ ID NO: 275182 - RNA, 32 nt, Human
uugggaggcugaggcaggaggaucacuugagg

SEQ ID NO: 275183 - RNA, 32 nt, Human
uugggaggcugaggcaggaggaucgccugagc

SEQ ID NO: 275184 - RNA, 32 nt, Human
uugggaggcugaggcaggaggaucgcuugaac

SEQ ID NO: 275185 - RNA, 32 nt, Human
uugggaggcugaggcaggaggaucgcuugagg

SEQ ID NO: 275186 - RNA, 32 nt, Human
uugggaggcugaggcaggaggaucgcuugagu

SEQ ID NO: 275187 - RNA, 32 nt, Human
uugggaggcugaggcaggaggauuguuugagg

SEQ ID NO: 275188 - RNA, 32 nt, Human
uugggaggcugaggcaggauugcuugagccca

SEQ ID NO: 275189 - RNA, 32 nt, Human
uugggaggcugaggcaggcagaucacaugagg

SEQ ID NO: 275190 - RNA, 32 nt, Human
uugggaggcugaggcaggcagaucaccugagg

SEQ ID NO: 275191 - RNA, 32 nt, Human
uugggaggcugaggcaggcagaucaccugaua

SEQ ID NO: 275192 - RNA, 32 nt, Human
uugggaggcugaggcaggcagaucacgagguc

SEQ ID NO: 275193 - RNA, 32 nt, Human
uugggaggcugaggcaggcagaucacgugagg

SEQ ID NO: 275194 - RNA, 32 nt, Human
uugggaggcugaggcaggcagaucagcugagg

SEQ ID NO: 275195 - RNA, 32 nt, Human
uugggaggcugaggcaggcagaucaucugagg

SEQ ID NO: 275196 - RNA, 32 nt, Human
uugggaggcugaggcaggcagaucaugagguc

SEQ ID NO: 275197 - RNA, 32 nt, Human
uugggaggcugaggcaggcggaucacaagguc

SEQ ID NO: 275198 - RNA, 32 nt, Human
uugggaggcugaggcaggcggaucacaggguc

SEQ ID NO: 275199 - RNA, 32 nt, Human
uugggaggcugaggcaggcggaucaccugaag

SEQ ID NO: 275200 - RNA, 32 nt, Human
uugggaggcugaggcaggcggaucaccugagg

SEQ ID NO: 275201 - RNA, 32 nt, Human
uugggaggcugaggcaggcggaucacgagguc

SEQ ID NO: 275202 - RNA, 32 nt, Human
uugggaggcugaggcaggcggaucacuugagg

SEQ ID NO: 275203 - RNA, 32 nt, Human
uugggaggcugaggcaggcggaucacuugaug

SEQ ID NO: 275204 - RNA, 32 nt, Human
uugggaggcugaggcaggcggaucaugagguc

SEQ ID NO: 275205 - RNA, 32 nt, Human
uugggaggcugaggcaggcgggucaccugagg

SEQ ID NO: 275206 - RNA, 32 nt, Human
uugggaggcugaggcaggcgggucaucugaca

SEQ ID NO: 275207 - RNA, 32 nt, Human
uugggaggcugaggcaggcugaucacuugagg

SEQ ID NO: 275208 - RNA, 32 nt, Human
uugggaggcugaggcaggggaaucacuugaac

SEQ ID NO: 275209 - RNA, 32 nt, Human
uugggaggcugaggcaggucgaucacgagguc

SEQ ID NO: 275210 - RNA, 32 nt, Human
uugggaggcugaggcaggugaaucacuugguc

SEQ ID NO: 275211 - RNA, 32 nt, Human
uugggaggcugaggcagguggaucacaagguc

SEQ ID NO: 275212 - RNA, 32 nt, Human
uugggaggcugaggcagguggaucacaauguc

SEQ ID NO: 275213 - RNA, 32 nt, Human
uugggaggcugaggcagguggaucaccuaagg

SEQ ID NO: 275214 - RNA, 32 nt, Human
uugggaggcugaggcagguggaucaccucaag

SEQ ID NO: 275215 - RNA, 32 nt, Human
uugggaggcugaggcagguggaucaccugagg

SEQ ID NO: 275216 - RNA, 32 nt, Human
uugggaggcugaggcagguggaucacgagguc

SEQ ID NO: 275217 - RNA, 32 nt, Human
uugggaggcugaggcagguggaucacuggagg

SEQ ID NO: 275218 - RNA, 32 nt, Human
uugggaggcugaggcagguggaucacuggagu

SEQ ID NO: 275219 - RNA, 32 nt, Human
uugggaggcugaggcagguggaucacuugaag

SEQ ID NO: 275220 - RNA, 32 nt, Human
uugggaggcugaggcagguggaucacuugaga

SEQ ID NO: 275221 - RNA, 32 nt, Human
uugggaggcugaggcagguggaucacuugagc

SEQ ID NO: 275222 - RNA, 32 nt, Human
uugggaggcugaggcagguggaucacuugagg

SEQ ID NO: 275223 - RNA, 32 nt, Human
uugggaggcugaggcagguggaucgccugagg

SEQ ID NO: 275224 - RNA, 32 nt, Human
uugggaggcugaggcagguggauugccugagg

SEQ ID NO: 275225 - RNA, 32 nt, Human
uugggaggcugaggcagguggauugcuugaac

SEQ ID NO: 275226 - RNA, 32 nt, Human
uugggaggcugaggcagguggauugcuuugag

SEQ ID NO: 275227 - RNA, 32 nt, Human
uugggaggcugaggcaggugguucacuggagg

SEQ ID NO: 275228 - RNA, 32 nt, Human
uugggaggcugaggcaguagaaucacuugaac

SEQ ID NO: 275229 - RNA, 32 nt, Human
uugggaggcugaggcaugagaaucaauugaac

SEQ ID NO: 275230 - RNA, 32 nt, Human
uugggaggcugaggcaugagaaucacuuaaac

SEQ ID NO: 275231 - RNA, 32 nt, Human
uugggaggcugaggccgguggaucaccuggga

SEQ ID NO: 275232 - RNA, 32 nt, Human
uugggaggcugaggcgagagaaucacuugaac

SEQ ID NO: 275233 - RNA, 32 nt, Human
uugggaggcugaggcgaguggaucacaagguc

SEQ ID NO: 275234 - RNA, 32 nt, Human
uugggaggcugaggcgcguggaucaccugagg

SEQ ID NO: 275235 - RNA, 32 nt, Human
uugggaggcugaggcggguggaucaagagguc

SEQ ID NO: 275236 - RNA, 32 nt, Human
uugggaggcugaggcggguggaucacaagcuc

SEQ ID NO: 275237 - RNA, 32 nt, Human
uugggaggcugaggcggguggaucacaagguc

SEQ ID NO: 275238 - RNA, 32 nt, Human
uugggaggcugaggcggguggaucaccuaagg

SEQ ID NO: 275239 - RNA, 32 nt, Human
uugggaggcugaggcggguggaucaccugagg

SEQ ID NO: 275240 - RNA, 32 nt, Human
uugggaggcugaggcggguggaucacgagguc

SEQ ID NO: 275241 - RNA, 32 nt, Human
uugggaggcugaggcggguggaucacuagguc

SEQ ID NO: 275242 - RNA, 32 nt, Human
uugggaggcugaggcggguggaucacuugagg

SEQ ID NO: 275243 - RNA, 32 nt, Human
uugggaggcugaggcggguggaucaucugggu

SEQ ID NO: 275244 - RNA, 32 nt, Human
uugggaggcugaggcggguggaucaugagguc

SEQ ID NO: 275245 - RNA, 32 nt, Human
uugggaggcugaggcggguggaucugcugaag

SEQ ID NO: 275246 - RNA, 32 nt, Human
uugggaggcugaggcgguagaaucacgugagu

SEQ ID NO: 275247 - RNA, 32 nt, Human
uugggaggcugaggcuaguggaucauguggcc

SEQ ID NO: 275248 - RNA, 32 nt, Human
uugggaggcugaggcuggagaaucgcuugaac

SEQ ID NO: 275249 - RNA, 32 nt, Human
uugggaggcugaggcuggagaaucgcuugagg

SEQ ID NO: 275250 - RNA, 32 nt, Human
uugggaggcugaggcuggagaaucguuugagg

SEQ ID NO: 275251 - RNA, 32 nt, Human
uugggaggcugaggguggagaaucgcuugaac

SEQ ID NO: 275252 - RNA, 32 nt, Human
uugggaggcugagguaggagaauggcguaaac

SEQ ID NO: 275253 - RNA, 32 nt, Human
uugggaggcugagguaggagaauggcgugaac

SEQ ID NO: 275254 - RNA, 32 nt, Human
uugggaggcugagguaggagaauuacuugaau

SEQ ID NO: 275255 - RNA, 32 nt, Human
uugggaggcugagguaggagaauugcuuaagc

SEQ ID NO: 275256 - RNA, 32 nt, Human
uugggaggcugagguaggagaauugcuugagc

SEQ ID NO: 275257 - RNA, 32 nt, Human
uugggaggcugagguagguggaucacccaagg

SEQ ID NO: 275258 - RNA, 32 nt, Human
uugggaggcugagguagguggaucaugagguc

SEQ ID NO: 275259 - RNA, 32 nt, Human
uugggaggcugagguggaaggaucauuugagc

SEQ ID NO: 275260 - RNA, 32 nt, Human
uugggaggcugaggugggagaaucaccugagc

SEQ ID NO: 275261 - RNA, 32 nt, Human
uugggaggcugaggugggagaaucacuugaac

SEQ ID NO: 275262 - RNA, 32 nt, Human
uugggaggcugaggugggaggaucauuugagg

SEQ ID NO: 275263 - RNA, 32 nt, Human
uugggaggcugaggugggggaaucacuugagc

SEQ ID NO: 275264 - RNA, 32 nt, Human
uugggaggcugagguggguggaucacaaggcc

SEQ ID NO: 275265 - RNA, 32 nt, Human
uugggaggcugagguggguggaucacaagguc

SEQ ID NO: 275266 - RNA, 32 nt, Human
uugggaggcugagguggguggaucacagguca

SEQ ID NO: 275267 - RNA, 32 nt, Human
uugggaggcugagguggguggaucaccuaagg

SEQ ID NO: 275268 - RNA, 32 nt, Human
uugggaggcugagguggguggaucaccugaga

SEQ ID NO: 275269 - RNA, 32 nt, Human
uugggaggcugagguggguggaucaccugagg

SEQ ID NO: 275270 - RNA, 32 nt, Human
uugggaggcugagguggguggaucacgagguc

SEQ ID NO: 275271 - RNA, 32 nt, Human
uugggaggcugagguggguggaucacuggagu

SEQ ID NO: 275272 - RNA, 32 nt, Human
uugggaggcugagguggguggaucacuggguc

SEQ ID NO: 275273 - RNA, 32 nt, Human
uugggaggcugagguggguggaucacuugaca

SEQ ID NO: 275274 - RNA, 32 nt, Human
uugggaggcugagguggguggaucacuugagg

SEQ ID NO: 275275 - RNA, 32 nt, Human
uugggaggcugagguggguggaucaucugagg

SEQ ID NO: 275276 - RNA, 32 nt, Human
uugggaggcugagguggguggaucaugagguc

SEQ ID NO: 275277 - RNA, 32 nt, Human
uugggaggcugagguggguggaucaugcgguc

SEQ ID NO: 275278 - RNA, 32 nt, Human
uugggaggcugagguggguggaucauuugagg

SEQ ID NO: 275279 - RNA, 32 nt, Human
uugggaggcugaggugugaggaucauuuaggc

SEQ ID NO: 275280 - RNA, 32 nt, Human
uugggaggcugaugcaggagaauagcuuaagc

SEQ ID NO: 275281 - RNA, 32 nt, Human
uugggaggcugaugcgggcggaucacaagguc

SEQ ID NO: 275282 - RNA, 32 nt, Human
uugggaggcuggcacaggagaaucgcuugaau

SEQ ID NO: 275283 - RNA, 32 nt, Human
uugggaggcuggggaaggagaaucacuugagc

SEQ ID NO: 275284 - RNA, 32 nt, Human
uugggaggcuggggcaggagaauugccugagc

SEQ ID NO: 275285 - RNA, 32 nt, Human
uugggaggcuguggcaggagaaucgcuagaac

SEQ ID NO: 275286 - RNA, 32 nt, Human
uugggaggcuguggcagguggaucaccugagg

SEQ ID NO: 275287 - RNA, 32 nt, Human
uugggaggcuuagucaggaggaucucuugagc

SEQ ID NO: 275288 - RNA, 32 nt, Human
uugggagggaaggucugaguucccugggaacu

SEQ ID NO: 275289 - RNA, 32 nt, Human
uugggagggagaaagagggaccuagcgcgggc

SEQ ID NO: 275290 - RNA, 32 nt, Human
uugggagggaggccaaggcgggcagaucaccu

SEQ ID NO: 275291 - RNA, 32 nt, Human
uugggagggcugguaagcuccauccuuucuca

SEQ ID NO: 275292 - RNA, 32 nt, Human
uugggaggggaacagggaaggaagggauggau

SEQ ID NO: 275293 - RNA, 32 nt, Human
uugggaggggauguuaagucaaaucacuaaaa

SEQ ID NO: 275294 - RNA, 32 nt, Human
uugggagggggaggcaggcggaucaugauguc

SEQ ID NO: 275295 - RNA, 21 nt, Human
uugggagggggucccagggaa

SEQ ID NO: 275296 - RNA, 32 nt, Human
uugggagggugaggcaggaggauggcucaagc

SEQ ID NO: 275297 - RNA, 32 nt, Human
uugggagggugaggcagguggaucaccugagg

SEQ ID NO: 275298 - RNA, 32 nt, Human
uugggagguacccuagaaucacuuagcuucag

SEQ ID NO: 275299 - RNA, 32 nt, Human
uugggaggucgaggcaggcagaucaccugagg

SEQ ID NO: 275300 - RNA, 32 nt, Human
uugggaggucgaggcaggcggaucaccugagg

SEQ ID NO: 275301 - RNA, 32 nt, Human
uugggaggucgaggcagguagaucacgagguc

SEQ ID NO: 275302 - RNA, 32 nt, Human
uugggaggucgaggcagguggaucacgaggcc

SEQ ID NO: 275303 - RNA, 32 nt, Human
uugggaggucgagguagguggaucaccugagg

SEQ ID NO: 275304 - RNA, 32 nt, Human
uugggaggucgagguggguggaucaccugagg

SEQ ID NO: 275305 - RNA, 32 nt, Human
uugggaggucgagguggguggaucacuugggg

SEQ ID NO: 275306 - RNA, 32 nt, Human
uugggagguggaggcagguggaucacgauguc

SEQ ID NO: 275307 - RNA, 32 nt, Human
uugggagguggaggccaagauuguaccacugu

SEQ ID NO: 275308 - RNA, 32 nt, Human
uugggagguggggaggaaugagaggguccagg

SEQ ID NO: 275309 - RNA, 32 nt, Human
uugggagguugaggcaagagaaucacuugaac

SEQ ID NO: 275310 - RNA, 32 nt, Human
uugggagguugaggcaggagaaucauuugaac

SEQ ID NO: 275311 - RNA, 32 nt, Human
uugggagguugaggcaggagaaucccuugaac

SEQ ID NO: 275312 - RNA, 32 nt, Human
uugggagguugaggcaggagaaucgcuugaac

SEQ ID NO: 275313 - RNA, 32 nt, Human
uugggagguugagggaggagaauccuuugaac

SEQ ID NO: 275314 - RNA, 32 nt, Human
uugggagguugagguggguggaucaugagguc

SEQ ID NO: 275315 - RNA, 32 nt, Human
uugggaguaggggguagguggggaagauguac

SEQ ID NO: 275316 - RNA, 32 nt, Human
uugggaguagugaccaacuucugcuuuuggaa

SEQ ID NO: 275317 - RNA, 32 nt, Human
uugggaguccauagcuaagcaccaggagcuga

SEQ ID NO: 275318 - RNA, 32 nt, Human
uugggaguccgaggcagguggaucaccugagg

SEQ ID NO: 275319 - RNA, 32 nt, Human
uugggagucugaagcaguagaaucgcuuaaac

SEQ ID NO: 275320 - RNA, 32 nt, Human
uugggagucugaggcaggagaauugcuugagc

SEQ ID NO: 275321 - RNA, 32 nt, Human
uugggagugaagagaauccaggcuggcagagc

SEQ ID NO: 275322 - RNA, 32 nt, Human
uugggaguggccugugcaccccagggccagcu

SEQ ID NO: 275323 - RNA, 32 nt, Human
uugggauaaagugaaaguuccauuuccuaaau

SEQ ID NO: 275324 - RNA, 32 nt, Human
uugggauaaagugaaguuccauuuccuaaaua

SEQ ID NO: 275325 - RNA, 32 nt, Human
uugggauaagagugugagagagacugaugggg

SEQ ID NO: 275326 - RNA, 32 nt, Human
uugggauaauucacacacuaaagccugaguuc

SEQ ID NO: 275327 - RNA, 32 nt, Human
uugggauacuguaauacuucuuuguuauuaua

SEQ ID NO: 275328 - RNA, 32 nt, Human
uugggauagaggccacauugacugaggguagu

SEQ ID NO: 275329 - RNA, 32 nt, Human
uugggaucagccuggccaaugugguaaaaccu

SEQ ID NO: 275330 - RNA, 32 nt, Human
uugggaucuaacuguuguuacuggaagacgaa

SEQ ID NO: 275331 - RNA, 32 nt, Human
uugggaucuaccuugggucuuacuugaguucc

SEQ ID NO: 275332 - RNA, 32 nt, Human
uugggaucugagggguccucucugugcccauc

SEQ ID NO: 275333 - RNA, 32 nt, Human
uugggaucugccaggcugggguguuuucggua

SEQ ID NO: 275334 - RNA, 32 nt, Human
uugggaucuguucaccuucaggcugagucgag

SEQ ID NO: 275335 - RNA, 32 nt, Human
uugggaucuuguguuugggagccaugggggag

SEQ ID NO: 275336 - RNA, 32 nt, Human
uugggaugaucugcuucaccuccagucacaca

SEQ ID NO: 275337 - RNA, 32 nt, Human
uugggaugcaguuaaagcaguguugagggaaa

SEQ ID NO: 275338 - RNA, 32 nt, Human
uugggaugccaauauuucuguuguauuucuau

SEQ ID NO: 275339 - RNA, 32 nt, Human
uugggaugcccaggccgcagaggaagcugggc

SEQ ID NO: 275340 - RNA, 32 nt, Human
uugggaugcugaggcaggagaaucgcuugaau

SEQ ID NO: 275341 - RNA, 32 nt, Human
uugggauggcuacaggacagugcaguggagag

SEQ ID NO: 275342 - RNA, 31 nt, Human
uugggaugguccucugggcccugguccacac

SEQ ID NO: 275343 - RNA, 32 nt, Human
uugggaugguuucagaugcucagcuuuuccau

SEQ ID NO: 275344 - RNA, 32 nt, Human
uugggaugucaccaaaggcagagcagauggga

SEQ ID NO: 275345 - RNA, 32 nt, Human
uugggaugucaucuuccuggaagcagagcugg

SEQ ID NO: 275346 - RNA, 32 nt, Human
uugggauguggacagaggggcagggggcuggg

SEQ ID NO: 275347 - RNA, 32 nt, Human
uugggauguucagagcuugaaauaugacacaa

SEQ ID NO: 275348 - RNA, 22 nt, Human
uugggauguuucagcagccccu

SEQ ID NO: 275349 - RNA, 22 nt, Human
uugggauuacagacaugagcca

SEQ ID NO: 275350 - RNA, 22 nt, Human
uugggauuacagacauuagcca

SEQ ID NO: 275351 - RNA, 32 nt, Human
uugggauuacagccaugagccaccaugcccgg

SEQ ID NO: 275352 - RNA, 22 nt, Human
uugggauuacaggcacgagcca

SEQ ID NO: 275353 - RNA, 20 nt, Human
uugggauuacaggcauaagc

SEQ ID NO: 275354 - RNA, 22 nt, Human
uugggauuacaggcauaagcca

SEQ ID NO: 275355 - RNA, 22 nt, Human
uugggauuacaggcaucagcca

SEQ ID NO: 275356 - RNA, 22 nt, Human
uugggauuacaggcaugagcca

SEQ ID NO: 275357 - RNA, 22 nt, Human
uugggauuacaggcaugagcua

SEQ ID NO: 275358 - RNA, 19 nt, Human
uugggauuacaggcgugag

SEQ ID NO: 275359 - RNA, 22 nt, Human
uugggauuacaggcgugagcca

SEQ ID NO: 275360 - RNA, 22 nt, Human
uugggauuacaggcuugagcca

SEQ ID NO: 275361 - RNA, 22 nt, Human
uugggauuaccggcaugagcca

SEQ ID NO: 275362 - RNA, 32 nt, Human
uugggauuacggaauagagggagaagaggaaa

SEQ ID NO: 275363 - RNA, 32 nt, Human
uugggauuccgaggcggguggaucacaugagg

SEQ ID NO: 275364 - RNA, 22 nt, Human
uugggauugcaggcaugagcca

SEQ ID NO: 275365 - RNA, 32 nt, Human
uugggauugugugucuggggcaagugaccuua

SEQ ID NO: 275366 - RNA, 32 nt, Human
uugggauuucauuucaggugcauuggagauuc

SEQ ID NO: 275367 - RNA, 32 nt, Human
uugggauuucuggcagcacagaacugcuuuuu

SEQ ID NO: 275368 - RNA, 32 nt, Human
uugggauuugaacccagguaguugggcugcag

SEQ ID NO: 275369 - RNA, 32 nt, Human
uugggauuuucaucacagaggagugggagagg

SEQ ID NO: 275370 - RNA, 32 nt, Human
uugggcaaacccuggcucggagcccagggcag

SEQ ID NO: 275371 - RNA, 23 nt, Human
uugggcaacaaagcaagacccca

SEQ ID NO: 275372 - RNA, 23 nt, Human
uugggcaacauagcaagacccca

SEQ ID NO: 275373 - RNA, 32 nt, Human
uugggcaacauggagaaaccccaucuuuacca

SEQ ID NO: 275374 - RNA, 32 nt, Human
uugggcaacauggcaaaacccugucucuacua

SEQ ID NO: 275375 - RNA, 32 nt, Human
uugggcaacauggcaaaacccugucucuauua

SEQ ID NO: 275376 - RNA, 32 nt, Human
uugggcaacauggcaaagccccaucucuacaa

SEQ ID NO: 275377 - RNA, 32 nt, Human
uugggcaacauggcgaaaccccgucucuacua

SEQ ID NO: 275378 - RNA, 32 nt, Human
uugggcaacauggcgaaacccugccucuacaa

SEQ ID NO: 275379 - RNA, 32 nt, Human
uugggcaacauggugaaacacugucucuacau

SEQ ID NO: 275380 - RNA, 32 nt, Human
uugggcaacauggugaaacccugucuacuaaa

SEQ ID NO: 275381 - RNA, 32 nt, Human
uugggcaacauggugaaaccugucucuacuaa

SEQ ID NO: 275382 - RNA, 29 nt, Human
uugggcaacauggugaaacuucucuacaa

SEQ ID NO: 275383 - RNA, 32 nt, Human
uugggcaacaugguggagcccugucucuacag

SEQ ID NO: 275384 - RNA, 32 nt, Human
uugggcacaguccagacccaagucaaagaugc

SEQ ID NO: 275385 - RNA, 32 nt, Human
uugggcacccaggacuuugcucugccuggugg

SEQ ID NO: 275386 - RNA, 22 nt, Human
uugggcaccgcacggugcgcac

SEQ ID NO: 275387 - RNA, 32 nt, Human
uugggcaccuggcacucaagcacuuugcacga

SEQ ID NO: 275388 - RNA, 32 nt, Human
uugggcaccuguaaucccagcuacucuggagg

SEQ ID NO: 275389 - RNA, 32 nt, Human
uugggcacgagcugggcagacagcaggaucug

SEQ ID NO: 275390 - RNA, 32 nt, Human
uugggcacugcuguuuacagccuguguacucc

SEQ ID NO: 275391 - RNA, 32 nt, Human
uugggcacugucugcuaugaugaugccagcug

SEQ ID NO: 275392 - RNA, 32 nt, Human
uugggcacuucacagccagccuagggucuucg

SEQ ID NO: 275393 - RNA, 32 nt, Human
uugggcagagagaggcagggaggccagugagg

SEQ ID NO: 275394 - RNA, 32 nt, Human
uugggcagagcugagugugagaagauggaaaa

SEQ ID NO: 275395 - RNA, 32 nt, Human
uugggcagcagugcccucaccuacaaggugag

SEQ ID NO: 275396 - RNA, 32 nt, Human
uugggcagccccagagaugaggggucagcaga

SEQ ID NO: 275397 - RNA, 32 nt, Human
uugggcagccuggggucccaggaacaagccag

SEQ ID NO: 275398 - RNA, 32 nt, Human
uugggcagcgcuagauggcaggaagcagccuu

SEQ ID NO: 275399 - RNA, 32 nt, Human
uugggcaggaaccuguuguuucaggagccagu

SEQ ID NO: 275400 - RNA, 32 nt, Human
uugggcaggaggcgaagccaaugacgucaguc

SEQ ID NO: 275401 - RNA, 32 nt, Human
uugggcaggagucaccaugcaagggugacauc

SEQ ID NO: 275402 - RNA, 32 nt, Human
uugggcagggcuagcaacaucguagguguuua

SEQ ID NO: 275403 - RNA, 32 nt, Human
uugggcaggggcugcuggugcugcuuggguuu

SEQ ID NO: 275404 - RNA, 32 nt, Human
uugggcagguggugggagagcgucaggcuuga

SEQ ID NO: 275405 - RNA, 32 nt, Human
uugggcaguagauuuacuuucucagguauguu

SEQ ID NO: 275406 - RNA, 32 nt, Human
uugggcagugcucccacccacccuccagaucc

SEQ ID NO: 275407 - RNA, 32 nt, Human
uugggcaguggcagcagcaggaggaaguagca

SEQ ID NO: 275408 - RNA, 32 nt, Human
uugggcaguucugcagagaggauccuggcaac

SEQ ID NO: 275409 - RNA, 32 nt, Human
uugggcaucuccuuaauuucugcuacuaaaga

SEQ ID NO: 275410 - RNA, 31 nt, Human
uugggcaugaagccucaaggcuuaaggauca

SEQ ID NO: 275411 - RNA, 32 nt, Human
uugggcaugguggcacacaccuguaaucccag

SEQ ID NO: 275412 - RNA, 32 nt, Human
uugggcaugguggcucacgccuguaaucccag

SEQ ID NO: 275413 - RNA, 32 nt, Human
uugggcaugguggugagcaccuguaaucccag

SEQ ID NO: 275414 - RNA, 32 nt, Human
uugggcauggugguggacaccuguaaucccag

SEQ ID NO: 275415 - RNA, 32 nt, Human
uugggcauuaaauauaaaaauaacaguucuuc

SEQ ID NO: 275416 - RNA, 32 nt, Human
uugggccaaaccaugaggccaccagaaccgcg

SEQ ID NO: 275417 - RNA, 32 nt, Human
uugggccaagggcagagggggcugcaccugcg

SEQ ID NO: 275418 - RNA, 32 nt, Human
uugggccacaguagcuggagauauaaugccgg

SEQ ID NO: 275419 - RNA, 32 nt, Human
uugggccacugcaaagauuccagccugggucc

SEQ ID NO: 275420 - RNA, 18 nt, Human
uugggccacugcacucca

SEQ ID NO: 275421 - RNA, 32 nt, Human
uugggccacugcacuccacccugggcgacaga

SEQ ID NO: 275422 - RNA, 32 nt, Human
uugggccacugcacucuagccuggcaacagag

SEQ ID NO: 275423 - RNA, 32 nt, Human
uugggccacugcagucgagccugggcgacaca

SEQ ID NO: 275424 - RNA, 32 nt, Human
uugggccaggcagaagguccacauggcagggc

SEQ ID NO: 275425 - RNA, 32 nt, Human
uugggccagggugggagcagggaaagaaaagg

SEQ ID NO: 275426 - RNA, 32 nt, Human
uugggccagggugggaggauggguggucaggu

SEQ ID NO: 275427 - RNA, 32 nt, Human
uugggccaguacgacuucuaaggaaucauagu

SEQ ID NO: 275428 - RNA, 32 nt, Human
uugggccaugaccagauauaauuggugauuac

SEQ ID NO: 275429 - RNA, 32 nt, Human
uugggccauuggugcaugcacauauauuaacu

SEQ ID NO: 275430 - RNA, 32 nt, Human
uugggcccaagaguucgagaccagccugggca

SEQ ID NO: 275431 - RNA, 32 nt, Human
uugggcccagcuuuucccuugugguggccucu

SEQ ID NO: 275432 - RNA, 32 nt, Human
uugggcccaggagauggagguugcggugagug

SEQ ID NO: 275433 - RNA, 32 nt, Human
uugggcccaggagauugagaccagccugggca

SEQ ID NO: 275434 - RNA, 32 nt, Human
uugggcccaggaggucgaggcugcggugagcc

SEQ ID NO: 275435 - RNA, 32 nt, Human
uugggcccaggagguggagguugcagugagcc

SEQ ID NO: 275436 - RNA, 32 nt, Human
uugggcccaggaguucaacgcugcagugagcu

SEQ ID NO: 275437 - RNA, 32 nt, Human
uugggcccaggaguucaaggcugcagugagcu

SEQ ID NO: 275438 - RNA, 32 nt, Human
uugggcccaggaguuugaggcugcagugagcc

SEQ ID NO: 275439 - RNA, 32 nt, Human
uugggcccaggucuugagcucuuuuggcucca

SEQ ID NO: 275440 - RNA, 32 nt, Human
uugggcccagugccuuggugaagguugauuac

SEQ ID NO: 275441 - RNA, 32 nt, Human
uugggccccagcccaaggguggagagggggcc

SEQ ID NO: 275442 - RNA, 32 nt, Human
uugggccccagcuggccagccuggcgaugggg

SEQ ID NO: 275443 - RNA, 32 nt, Human
uugggccccauccugagucuccaggacccaag

SEQ ID NO: 275444 - RNA, 20 nt, Human
uugggcccgggaggucaagg

SEQ ID NO: 275445 - RNA, 32 nt, Human
uugggcccgggaggucaagguugcagugagcu

SEQ ID NO: 275446 - RNA, 32 nt, Human
uugggcccgggagguggagguugcagugagcu

SEQ ID NO: 275447 - RNA, 32 nt, Human
uugggcccgggagguggagguugcagugaguc

SEQ ID NO: 275448 - RNA, 32 nt, Human
uugggcccgggaguuugaaguugcagugagcu

SEQ ID NO: 275449 - RNA, 32 nt, Human
uugggcccuggaggucaaggcugcagugaguc

SEQ ID NO: 275450 - RNA, 20 nt, Human
uugggcccugggaagcgugg

SEQ ID NO: 275451 - RNA, 19 nt, Human
uugggcccugggaagcugg

SEQ ID NO: 275452 - RNA, 32 nt, Human
uugggcccuucccugcuauccuuuuucuccuu

SEQ ID NO: 275453 - RNA, 32 nt, Human
uugggccggcgggcgggggcugaggggcugcc

SEQ ID NO: 275454 - RNA, 32 nt, Human
uugggccucgugagggaucugccuccugagca

SEQ ID NO: 275455 - RNA, 32 nt, Human
uugggccucucaaaaggaaaugcuuuuguuua

SEQ ID NO: 275456 - RNA, 32 nt, Human
uugggccucugccucugugccuauggguugca

SEQ ID NO: 275457 - RNA, 32 nt, Human
uugggccugcaccuccaagauaacaaagaaga

SEQ ID NO: 275458 - RNA, 32 nt, Human
uugggccugccuggcaugacuguuuccagcag

SEQ ID NO: 275459 - RNA, 19 nt, Human
uugggccuggccacucuga

SEQ ID NO: 275460 - RNA, 32 nt, Human
uugggccugggaggucgaggcugcagugagcu

SEQ ID NO: 275461 - RNA, 32 nt, Human
uugggccugggauaaguccacucuccacacau

SEQ ID NO: 275462 - RNA, 21 nt, Human
uugggccuggucucugcugcu

SEQ ID NO: 275463 - RNA, 32 nt, Human
uugggccuggugccaccaucgcucagcccagg

SEQ ID NO: 275464 - RNA, 32 nt, Human
uugggccuggugcugggaaccugcuagcugag

SEQ ID NO: 275465 - RNA, 32 nt, Human
uugggccuuagcaccugcagugccucaaagcc

SEQ ID NO: 275466 - RNA, 32 nt, Human
uugggccuuagguugagcugaugggggaagga

SEQ ID NO: 275467 - RNA, 32 nt, Human
uugggccuuaucagcccaucugauccagauca

SEQ ID NO: 275468 - RNA, 19 nt, Human
uugggccuucgaccugggg

SEQ ID NO: 275469 - RNA, 32 nt, Human
uugggccuugagagacagagaaaacagguauc

SEQ ID NO: 275470 - RNA, 32 nt, Human
uugggcgaacuguacuccaugugaauuaccuc

SEQ ID NO: 275471 - RNA, 32 nt, Human
uugggcgaggggcagaggccaucagaacugcc

SEQ ID NO: 275472 - RNA, 32 nt, Human
uugggcgccguggcucacaccuguaauccuag

SEQ ID NO: 275473 - RNA, 32 nt, Human
uugggcgccuggucagggagguuuguacaagc

SEQ ID NO: 275474 - RNA, 32 nt, Human
uugggcgccuguaaucccagcuacuggggagg

SEQ ID NO: 275475 - RNA, 32 nt, Human
uugggcgcgguggcucgcaccuguaaucccag

SEQ ID NO: 275476 - RNA, 32 nt, Human
uugggcggcggcgagcgcgcgggccgccaugu

SEQ ID NO: 275477 - RNA, 32 nt, Human
uugggcgugauucacaccuggcccaacaaacu

SEQ ID NO: 275478 - RNA, 32 nt, Human
uugggcgugguggcgugcgccuguaaucucag

SEQ ID NO: 275479 - RNA, 32 nt, Human
uugggcgugguggcucaugccuguaaucccac

SEQ ID NO: 275480 - RNA, 32 nt, Human
uugggcguuguggcucaugccuguaaucccag

SEQ ID NO: 275481 - RNA, 32 nt, Human
uugggcuagaggcaggaaggaagugggaugac

SEQ ID NO: 275482 - RNA, 32 nt, Human
uugggcuaggguagugguaugagguuuaaaac

SEQ ID NO: 275483 - RNA, 32 nt, Human
uugggcucaagaguucaagaccagucugggca

SEQ ID NO: 275484 - RNA, 32 nt, Human
uugggcucaagcaauccuccugccucagccuc

SEQ ID NO: 275485 - RNA, 32 nt, Human
uugggcucaagcgauccucccaccugggacuc

SEQ ID NO: 275486 - RNA, 32 nt, Human
uugggcucaagcuauccucccaccucagccuc

SEQ ID NO: 275487 - RNA, 32 nt, Human
uugggcucaagugauccucccaccucagccuc

SEQ ID NO: 275488 - RNA, 32 nt, Human
uugggcucaagugauccucccgccucagccuc

SEQ ID NO: 275489 - RNA, 32 nt, Human
uugggcucaagugauccuccuaccugagccuu

SEQ ID NO: 275490 - RNA, 32 nt, Human
uugggcucaaugauucuccugucucagccucc

SEQ ID NO: 275491 - RNA, 32 nt, Human
uugggcucaggagcuugagaccagccugagca

SEQ ID NO: 275492 - RNA, 32 nt, Human
uugggcucaggagucggagaccagccugggca

SEQ ID NO: 275493 - RNA, 32 nt, Human
uugggcucaggccacaacggccugagauugcc

SEQ ID NO: 275494 - RNA, 32 nt, Human
uugggcucccaaagugcugggauuacagaugu

SEQ ID NO: 275495 - RNA, 32 nt, Human
uugggcucccaaagugcugggauuauaggugu

SEQ ID NO: 275496 - RNA, 32 nt, Human
uugggcucccaaaguguugggauuacaggcgu

SEQ ID NO: 275497 - RNA, 32 nt, Human
uugggcucccaaaguguugggauuacaggugu

SEQ ID NO: 275498 - RNA, 32 nt, Human
uugggcucccccaaggguucugcgaagaggca

SEQ ID NO: 275499 - RNA, 32 nt, Human
uugggcuccuaagcuccugcucugcugggugc

SEQ ID NO: 275500 - RNA, 32 nt, Human
uugggcuccuaccugcugaagccaguccagcg

SEQ ID NO: 275501 - RNA, 32 nt, Human
uugggcuccuccugcccuccaucucagccauu

SEQ ID NO: 275502 - RNA, 32 nt, Human
uugggcuccugcagugauggugggaaagaaaa

SEQ ID NO: 275503 - RNA, 18 nt, Human
uugggcucgggaagccgg

SEQ ID NO: 275504 - RNA, 23 nt, Human
uugggcucuagcuccuggugcug

SEQ ID NO: 275505 - RNA, 32 nt, Human
uugggcucucaccacuucaguuuauaccuugc

SEQ ID NO: 275506 - RNA, 32 nt, Human
uugggcucucagaugaaggcaaagcuuugauc

SEQ ID NO: 275507 - RNA, 32 nt, Human
uugggcucucagcagccucuucugccagcacc

SEQ ID NO: 275508 - RNA, 32 nt, Human
uugggcucuccccagggucuaacgguuaaggg

SEQ ID NO: 275509 - RNA, 32 nt, Human
uugggcucucuucugucccagggcuuucugga

SEQ ID NO: 275510 - RNA, 32 nt, Human
uugggcucugaggaaauguccauagcuuuggu

SEQ ID NO: 275511 - RNA, 32 nt, Human
uugggcugaagcacccagccuggucaaggaca

SEQ ID NO: 275512 - RNA, 32 nt, Human
uugggcugaaggagauaacuuauuaucugucg

SEQ ID NO: 275513 - RNA, 32 nt, Human
uugggcugaaucuccuuccucccacuggcucc

SEQ ID NO: 275514 - RNA, 32 nt, Human
uugggcugagaacugaagggugagugaaugag

SEQ ID NO: 275515 - RNA, 32 nt, Human
uugggcugcacugagcuugucuucaggaaacc

SEQ ID NO: 275516 - RNA, 32 nt, Human
uugggcugcccaggcuggucagagcucagcac

SEQ ID NO: 275517 - RNA, 32 nt, Human
uugggcugcugaggggcuagugcagugguccu

SEQ ID NO: 275518 - RNA, 32 nt, Human
uugggcuggggaggggauuucaagauaguuca

SEQ ID NO: 275519 - RNA, 32 nt, Human
uugggcuggggccaugggaagaaaccauugug

SEQ ID NO: 275520 - RNA, 32 nt, Human
uugggcuggguauggagguucacugguaaucc

SEQ ID NO: 275521 - RNA, 32 nt, Human
uugggcuggugaguuuucgaggugacugugcu

SEQ ID NO: 275522 - RNA, 32 nt, Human
uugggcuguggggcuguaccuggugcccugug

SEQ ID NO: 275523 - RNA, 32 nt, Human
uugggcugugguggaaaaaugagggcuggagc

SEQ ID NO: 275524 - RNA, 32 nt, Human
uugggcuuaaugauggagaaaaaguguacccu

SEQ ID NO: 275525 - RNA, 32 nt, Human
uugggcuuacagagcaagaccccacaacugua

SEQ ID NO: 275526 - RNA, 32 nt, Human
uugggcuucccugagagcagaucuucagagaa

SEQ ID NO: 275527 - RNA, 24 nt, Human
uugggcuuccucauaaguauggug

SEQ ID NO: 275528 - RNA, 32 nt, Human
uugggcuucuuccuccuccaucaccugaaaca

SEQ ID NO: 275529 - RNA, 32 nt, Human
uugggcuugcccacccuaguuugcuuuuguag

SEQ ID NO: 275530 - RNA, 32 nt, Human
uugggcuugggccugggucuuugcugccaggu

SEQ ID NO: 275531 - RNA, 32 nt, Human
uugggcuuggggcagugagggcuuaggacacc

SEQ ID NO: 275532 - RNA, 32 nt, Human
uugggcuuucugcuuuacuucccuccuaacau

SEQ ID NO: 275533 - RNA, 32 nt, Human
uugggcuuugcugugggcaccugcacuggcau

SEQ ID NO: 275534 - RNA, 32 nt, Human
uugggcuuugguacaagaacugugacccccaa

SEQ ID NO: 275535 - RNA, 22 nt, Human
uuggggaaaaaagccuucaaag

SEQ ID NO: 275536 - RNA, 32 nt, Human
uuggggaaaacugcagcccggccaggcagcug

SEQ ID NO: 275537 - RNA, 22 nt, Human
uuggggaaaaugggaaaagcaa

SEQ ID NO: 275538 - RNA, 32 nt, Human
uuggggaaaauguuaugcauggaagccugacc

SEQ ID NO: 275539 - RNA, 32 nt, Human
uuggggaaacucaaccuggugcuggugcucuu

SEQ ID NO: 275540 - RNA, 32 nt, Human
uuggggaaagagaagagaauuuccuguggauu

SEQ ID NO: 275541 - RNA, 32 nt, Human
uuggggaaagagaccuuuaaaaucuuguggug

SEQ ID NO: 275542 - RNA, 22 nt, Human
uuggggaaagugaaaaauguaa

SEQ ID NO: 275543 - RNA, 32 nt, Human
uuggggaagagggagugaggccuaggcagcuu

SEQ ID NO: 275544 - RNA, 32 nt, Human
uuggggaagcccagggugaagacagucacuca

SEQ ID NO: 275545 - RNA, 32 nt, Human
uuggggaagcccaucuaacaggaggacauugg

SEQ ID NO: 275546 - RNA, 23 nt, Human
uuggggaaggacggaggacacag

SEQ ID NO: 275547 - RNA, 19 nt, Human
uuggggaaggcgacugagc

SEQ ID NO: 275548 - RNA, 32 nt, Human
uuggggaagggaaggagccaggaagccgcgcg

SEQ ID NO: 275549 - RNA, 32 nt, Human
uuggggaagggagggcaggguggggcugagga

SEQ ID NO: 275550 - RNA, 32 nt, Human
uuggggaagggccaugaccacccucguagacu

SEQ ID NO: 275551 - RNA, 24 nt, Human
uuggggaagguguuuuuaguacaa

SEQ ID NO: 275552 - RNA, 32 nt, Human
uuggggaagugucugcugagaauaucaagggg

SEQ ID NO: 275553 - RNA, 32 nt, Human
uuggggacaaugcucaggcaggaccaauccaa

SEQ ID NO: 275554 - RNA, 32 nt, Human
uuggggacacauaccccucaguacuguagcau

SEQ ID NO: 275555 - RNA, 32 nt, Human
uuggggacacuggcagcaguugccagguuuua

SEQ ID NO: 275556 - RNA, 32 nt, Human
uuggggacagggacuguguccaugaaacauuc

SEQ ID NO: 275557 - RNA, 32 nt, Human
uuggggaccacaggccugaccagggccugcac

SEQ ID NO: 275558 - RNA, 32 nt, Human
uuggggaccauggucugggagcuguucugggg

SEQ ID NO: 275559 - RNA, 32 nt, Human
uuggggacccuucucugaucaucaggauucuc

SEQ ID NO: 275560 - RNA, 32 nt, Human
uuggggaccuuugccuacauacugguauuguc

SEQ ID NO: 275561 - RNA, 32 nt, Human
uuggggacgcacauacuccuucacaagugcaa

SEQ ID NO: 275562 - RNA, 32 nt, Human
uuggggacuuaaucauguacauggacaagugu

SEQ ID NO: 275563 - RNA, 32 nt, Human
uuggggacuugagucccugaaaggcugauuga

SEQ ID NO: 275564 - RNA, 32 nt, Human
uuggggagagauagggugggaggcagggcaau

SEQ ID NO: 275565 - RNA, 32 nt, Human
uuggggagaugggguggccugcagugacacag

SEQ ID NO: 275566 - RNA, 32 nt, Human
uuggggagccucucagccucuggcaggggagg

SEQ ID NO: 275567 - RNA, 32 nt, Human
uuggggagcggucuaugugaccaaauauugug

SEQ ID NO: 275568 - RNA, 32 nt, Human
uuggggagcuugcccuuuaccuccagggcugc

SEQ ID NO: 275569 - RNA, 32 nt, Human
uuggggaggaagacgaagaggcacugcauuau

SEQ ID NO: 275570 - RNA, 32 nt, Human
uuggggaggcaagagacugggagccacuucuc

SEQ ID NO: 275571 - RNA, 32 nt, Human
uuggggaggcggagguugcagugagcugagau

SEQ ID NO: 275572 - RNA, 32 nt, Human
uuggggagggcuggaagaggaggacggucauc

SEQ ID NO: 275573 - RNA, 32 nt, Human
uuggggaggggagggggcgccuuguucucccu

SEQ ID NO: 275574 - RNA, 32 nt, Human
uuggggagguuuccagcucagaaugaugcaga

SEQ ID NO: 275575 - RNA, 32 nt, Human
uuggggagucccagagguauccagcagagggg

SEQ ID NO: 275576 - RNA, 32 nt, Human
uuggggagugugaauaggaguuugcagaugga

SEQ ID NO: 275577 - RNA, 32 nt, Human
uuggggauaaacacuucaacuuuuggcagaaa

SEQ ID NO: 275578 - RNA, 32 nt, Human
uuggggauggagucucacuuuguugcccaggc

SEQ ID NO: 275579 - RNA, 32 nt, Human
uuggggaugggcugggagugacaguagccuag

SEQ ID NO: 275580 - RNA, 32 nt, Human
uuggggauggggugggcugggguggauggaug

SEQ ID NO: 275581 - RNA, 22 nt, Human
uuggggauugcagcguucucga

SEQ ID NO: 275582 - RNA, 32 nt, Human
uuggggauuuacguuccuaacugcuaagcaac

SEQ ID NO: 275583 - RNA, 20 nt, Human
uuggggcaauuuccagugga

SEQ ID NO: 275584 - RNA, 32 nt, Human
uuggggcacagccugucacugcucugccuaag

SEQ ID NO: 275585 - RNA, 32 nt, Human
uuggggcacccuccucucagcaccaaaauggc

SEQ ID NO: 275586 - RNA, 32 nt, Human
uuggggcaccucagcucuggaugcuaccccug

SEQ ID NO: 275587 - RNA, 32 nt, Human
uuggggcagacagcacuggcccagggaugcua

SEQ ID NO: 275588 - RNA, 19 nt, Human
uuggggcagagccagugga

SEQ ID NO: 275589 - RNA, 32 nt, Human
uuggggcagccucuuguuccagccucuuggaa

SEQ ID NO: 275590 - RNA, 32 nt, Human
uuggggcagcuuuccgguuauauaacacauug

SEQ ID NO: 275591 - RNA, 32 nt, Human
uuggggcaggcaggagcagugugguaguacug

SEQ ID NO: 275592 - RNA, 32 nt, Human
uuggggcaggguggugggguaggugcauggga

SEQ ID NO: 275593 - RNA, 32 nt, Human
uuggggcagugggcucucugcccacacuugga

SEQ ID NO: 275594 - RNA, 32 nt, Human
uuggggcaguggugacgagcugugggaagagc

SEQ ID NO: 275595 - RNA, 18 nt, Human
uuggggcauaccaaccuu

SEQ ID NO: 275596 - RNA, 22 nt, Human
uuggggcauccccuuucugcug

SEQ ID NO: 275597 - RNA, 21 nt, Human
uuggggcaugcccugggcacc

SEQ ID NO: 275598 - RNA, 32 nt, Human
uuggggcauuugaaggauggcuucccuguuuc

SEQ ID NO: 275599 - RNA, 32 nt, Human
uuggggccacauuuaccagggauccccacuau

SEQ ID NO: 275600 - RNA, 32 nt, Human
uuggggccagaacuccagcccuggggaguggg

SEQ ID NO: 275601 - RNA, 32 nt, Human
uuggggccaggccauguuacaaaggauauuga

SEQ ID NO: 275602 - RNA, 32 nt, Human
uuggggcccagaggaagcugaugucauggcug

SEQ ID NO: 275603 - RNA, 32 nt, Human
uuggggcccagcugcagccugcugccugcccu

SEQ ID NO: 275604 - RNA, 32 nt, Human
uuggggcccagcugcccacugucuggguucag

SEQ ID NO: 275605 - RNA, 32 nt, Human
uuggggcccaugggaucauucugggaugcagc

SEQ ID NO: 275606 - RNA, 32 nt, Human
uuggggcccccagacaagagacagggagacug

SEQ ID NO: 275607 - RNA, 32 nt, Human
uuggggccccgggagagcaggagaaccggggu

SEQ ID NO: 275608 - RNA, 32 nt, Human
uuggggccccucuccuccccagcccuucuccu

SEQ ID NO: 275609 - RNA, 22 nt, Human
uuggggccccugucugcugcug

SEQ ID NO: 275610 - RNA, 24 nt, Human
uuggggcccucuugccagccuccu

SEQ ID NO: 275611 - RNA, 32 nt, Human
uuggggccuaucugccauugcaggaccugauu

SEQ ID NO: 275612 - RNA, 32 nt, Human
uuggggccuccccuuuccccagcgucuggcaa

SEQ ID NO: 275613 - RNA, 32 nt, Human
uuggggccugggaacgcucggcccccggcagc

SEQ ID NO: 275614 - RNA, 32 nt, Human
uuggggccugggacucagcucucucugcggua

SEQ ID NO: 275615 - RNA, 32 nt, Human
uuggggcgcugaggguggggccugugucagaa

SEQ ID NO: 275616 - RNA, 32 nt, Human
uuggggcggaguuucacucuuguugcccaggc

SEQ ID NO: 275617 - RNA, 32 nt, Human
uuggggcuacuuccugugcugaaggaaguccu

SEQ ID NO: 275618 - RNA, 32 nt, Human
uuggggcuagggguucgagaccagccugguca

SEQ ID NO: 275619 - RNA, 24 nt, Human
uuggggcucagcuccuaccccucu

SEQ ID NO: 275620 - RNA, 32 nt, Human
uuggggcucauuuugauucucugaauuaucgg

SEQ ID NO: 275621 - RNA, 32 nt, Human
uuggggcuccagggacguaccccaaauguugc

SEQ ID NO: 275622 - RNA, 32 nt, Human
uuggggcucccaccuuccccagacuacuguuc

SEQ ID NO: 275623 - RNA, 22 nt, Human
uuggggcuccgcgauacaguua

SEQ ID NO: 275624 - RNA, 24 nt, Human
uuggggcucuugaucagugugcua

SEQ ID NO: 275625 - RNA, 32 nt, Human
uuggggcugagcugcaaccacccaacuuucuu

SEQ ID NO: 275626 - RNA, 32 nt, Human
uuggggcugagggagcaccaugcagcuucacc

SEQ ID NO: 275627 - RNA, 32 nt, Human
uuggggcugaggggaaggaggagaagcuccug

SEQ ID NO: 275628 - RNA, 32 nt, Human
uuggggcugcagcugcacacuguccuugucca

SEQ ID NO: 275629 - RNA, 32 nt, Human
uuggggcugcgaccuccagacucuccauuaag

SEQ ID NO: 275630 - RNA, 32 nt, Human
uuggggcugcgggggaguggagcccccgugcc

SEQ ID NO: 275631 - RNA, 32 nt, Human
uuggggcugcucauguuggggcucuuccucua

SEQ ID NO: 275632 - RNA, 32 nt, Human
uuggggcugggggccagcuccaggagggcuug

SEQ ID NO: 275633 - RNA, 32 nt, Human
uuggggcuguggauuuagcuacucucaccuga

SEQ ID NO: 275634 - RNA, 20 nt, Human
uuggggcuuagcccagagga

SEQ ID NO: 275635 - RNA, 32 nt, Human
uuggggcuuagggagaggagggaggcaugccu

SEQ ID NO: 275636 - RNA, 20 nt, Human
uuggggcuucaggggaggug

SEQ ID NO: 275637 - RNA, 32 nt, Human
uuggggcuucccugccccuccuggucuguguc

SEQ ID NO: 275638 - RNA, 26 nt, Human
uuggggcuuucagucagcagccuccu

SEQ ID NO: 275639 - RNA, 21 nt, Human
uuggggcuuuuuggcaguggg

SEQ ID NO: 275640 - RNA, 32 nt, Human
uugggggaaaacagucaaccucccaguguaaa

SEQ ID NO: 275641 - RNA, 32 nt, Human
uugggggaaaagccaccccuggagucaccugu

SEQ ID NO: 275642 - RNA, 32 nt, Human
uugggggaaacugaggcaguggggaagacaga

SEQ ID NO: 275643 - RNA, 32 nt, Human
uugggggaagagcuccagccugucugcucccc

SEQ ID NO: 275644 - RNA, 32 nt, Human
uugggggacgcuggcagcuggguucucccggu

SEQ ID NO: 275645 - RNA, 32 nt, Human
uugggggagaaaggaaugggagcccagacagc

SEQ ID NO: 275646 - RNA, 32 nt, Human
uugggggagaagcagcauugaagugggaagau

SEQ ID NO: 275647 - RNA, 32 nt, Human
uugggggagacagggucuugcucugucaccca

SEQ ID NO: 275648 - RNA, 32 nt, Human
uugggggagagggggaccugggaccugcggcu

SEQ ID NO: 275649 - RNA, 32 nt, Human
uugggggagcccagagacaggggaaggcagcc

SEQ ID NO: 275650 - RNA, 32 nt, Human
uugggggaggagggaaagauuagcuuugaaca

SEQ ID NO: 275651 - RNA, 32 nt, Human
uugggggaggcagagccagcagguggacaggu

SEQ ID NO: 275652 - RNA, 32 nt, Human
uugggggaggcagagguggcacuggaggccuc

SEQ ID NO: 275653 - RNA, 19 nt, Human
uugggggaggcgggugcag

SEQ ID NO: 275654 - RNA, 32 nt, Human
uugggggaggucuugcuauguugcccaggcug

SEQ ID NO: 275655 - RNA, 32 nt, Human
uugggggagugaaggcagagccuggugcagau

SEQ ID NO: 275656 - RNA, 32 nt, Human
uugggggauagaggaacggucacagcuaggga

SEQ ID NO: 275657 - RNA, 21 nt, Human
uugggggaugccugggacuuu

SEQ ID NO: 275658 - RNA, 32 nt, Human
uugggggauucgacagcagugacagaucagug

SEQ ID NO: 275659 - RNA, 32 nt, Human
uugggggauugaagcaggcggaucacuugagc

SEQ ID NO: 275660 - RNA, 18 nt, Human
uugggggauugagcagca

SEQ ID NO: 275661 - RNA, 32 nt, Human
uugggggcaaaaacaacugcucaccaaucuua

SEQ ID NO: 275662 - RNA, 32 nt, Human
uugggggcagagcggggcaggaaagguagggc

SEQ ID NO: 275663 - RNA, 32 nt, Human
uugggggcaggagagagacacucuccaugaac

SEQ ID NO: 275664 - RNA, 32 nt, Human
uugggggcagggacucugucuugcuuaccauu

SEQ ID NO: 275665 - RNA, 32 nt, Human
uugggggcauggagggagacugaggcagggug

SEQ ID NO: 275666 - RNA, 32 nt, Human
uugggggccagccugagccagcagugggaggu

SEQ ID NO: 275667 - RNA, 32 nt, Human
uugggggccuuucuuuaacugccuuccuggcu

SEQ ID NO: 275668 - RNA, 32 nt, Human
uugggggcgaagcuguguugacugggagagcg

SEQ ID NO: 275669 - RNA, 32 nt, Human
uugggggcgcuaucuggggcugugcugcuugu

SEQ ID NO: 275670 - RNA, 32 nt, Human
uugggggcgcucaggguuacacugccugcagc

SEQ ID NO: 275671 - RNA, 32 nt, Human
uugggggcggggagcaggcggugcaggagagc

SEQ ID NO: 275672 - RNA, 32 nt, Human
uugggggcucagaugggacaagaagccgccuc

SEQ ID NO: 275673 - RNA, 32 nt, Human
uugggggcucccagggucuccgguggugcacc

SEQ ID NO: 275674 - RNA, 32 nt, Human
uuggggguccccgagcccauggaccaggaaga

SEQ ID NO: 275675 - RNA, 29 nt, Human
uugggggucugcucugugccugggaucag

SEQ ID NO: 275676 - RNA, 32 nt, Human
uugggggugaaacuuuccaguuuacugaacuc

SEQ ID NO: 275677 - RNA, 32 nt, Human
uugggggugaugaccccuucccugagguggcu

SEQ ID NO: 275678 - RNA, 32 nt, Human
uugggggugcuaauccaggacagcauuacacg

SEQ ID NO: 275679 - RNA, 32 nt, Human
uuggggguggaguaagggggagacugaugcua

SEQ ID NO: 275680 - RNA, 32 nt, Human
uugggggugggaacuccccuugcccugugcgg

SEQ ID NO: 275681 - RNA, 32 nt, Human
uuggggguggguggggagcuuuuggggaggac

SEQ ID NO: 275682 - RNA, 32 nt, Human
uuggggguggguggguggauaucuuaauuuuu

SEQ ID NO: 275683 - RNA, 32 nt, Human
uuggggguggucagacaccacaggagcuguca

SEQ ID NO: 275684 - RNA, 32 nt, Human
uuggggguguacuguccugccugugcaucuuc

SEQ ID NO: 275685 - RNA, 32 nt, Human
uuggggguuguuuucuacauaauugugaaaac

SEQ ID NO: 275686 - RNA, 32 nt, Human
uugggguacugcuggccagggguaggauagua

SEQ ID NO: 275687 - RNA, 32 nt, Human
uugggguagggaagggaggggaagcacuuuaa

SEQ ID NO: 275688 - RNA, 32 nt, Human
uugggguaucacacaaaacaccagagcugagg

SEQ ID NO: 275689 - RNA, 32 nt, Human
uuggggucaagccauccucccaccucagcuuu

SEQ ID NO: 275690 - RNA, 32 nt, Human
uuggggucagcccuucuguacgugcauggcag

SEQ ID NO: 275691 - RNA, 32 nt, Human
uuggggucauggggaggguagcaccaggcaua

SEQ ID NO: 275692 - RNA, 32 nt, Human
uuggggucauuuuucuuaaagacgagcuguaa

SEQ ID NO: 275693 - RNA, 22 nt, Human
uuggggucugucuguacaguua

SEQ ID NO: 275694 - RNA, 32 nt, Human
uuggggugaaaccaugagacugacagaucugc

SEQ ID NO: 275695 - RNA, 32 nt, Human
uuggggugacuggccauggugacauuguggac

SEQ ID NO: 275696 - RNA, 32 nt, Human
uuggggugaggaagagggagggauggacaagu

SEQ ID NO: 275697 - RNA, 32 nt, Human
uuggggugaggggagcaagggaagcacuggau

SEQ ID NO: 275698 - RNA, 32 nt, Human
uuggggugaguauaaagaggaauuagaaccug

SEQ ID NO: 275699 - RNA, 29 nt, Human
uuggggugcaggugugugccaggggucuu

SEQ ID NO: 275700 - RNA, 32 nt, Human
uuggggugcggggacuguagggggaggauuug

SEQ ID NO: 275701 - RNA, 32 nt, Human
uuggggugcucaggcugggaggguagaaugcc

SEQ ID NO: 275702 - RNA, 32 nt, Human
uuggggugcugaggcaggagaaucaacugaac

SEQ ID NO: 275703 - RNA, 32 nt, Human
uugggguggaguuuccucugugaggggcuugc

SEQ ID NO: 275704 - RNA, 31 nt, Human
uugggguggcacuucucaauuccucuuuaua

SEQ ID NO: 275705 - RNA, 32 nt, Human
uugggguggcuucucuccuuccuccucccaua

SEQ ID NO: 275706 - RNA, 32 nt, Human
uuggggugggagauggggaacaggcagugagg

SEQ ID NO: 275707 - RNA, 32 nt, Human
uuggggugggaggauggaugcaacugaagcag

SEQ ID NO: 275708 - RNA, 32 nt, Human
uuggggugggcaaggcagucagcaucaccagc

SEQ ID NO: 275709 - RNA, 32 nt, Human
uugggguggggaaaggggcaaaaagaaugauc

SEQ ID NO: 275710 - RNA, 31 nt, Human
uuggggugggugggaggauucgugagcugca

SEQ ID NO: 275711 - RNA, 32 nt, Human
uugggguggucagugcccucugugcuuuaugg

SEQ ID NO: 275712 - RNA, 32 nt, Human
uugggguguacaccuacaccauuaucuuggaa

SEQ ID NO: 275713 - RNA, 32 nt, Human
uuggggugugagagguuuucucgcucuaggga

SEQ ID NO: 275714 - RNA, 32 nt, Human
uuggggugugcacauccaggaggaggaggaga

SEQ ID NO: 275715 - RNA, 32 nt, Human
uugggguguuguacccagcccuaggaguaggg

SEQ ID NO: 275716 - RNA, 32 nt, Human
uugggguuagcauugcacaaagcccaguuucu

SEQ ID NO: 275717 - RNA, 32 nt, Human
uugggguuauuggagccugagcuugaccucaa

SEQ ID NO: 275718 - RNA, 22 nt, Human
uugggguucacaccccaaaaug

SEQ ID NO: 275719 - RNA, 32 nt, Human
uugggguucagggagaggcaggugcaugcugg

SEQ ID NO: 275720 - RNA, 19 nt, Human
uugggguucucgcagugga

SEQ ID NO: 275721 - RNA, 32 nt, Human
uugggguugcaacaucuuuuaacuucucaguu

SEQ ID NO: 275722 - RNA, 31 nt, Human
uugggguugcaugagagaugggugagucaug

SEQ ID NO: 275723 - RNA, 32 nt, Human
uugggguugcccagccuggagcggagcuugcc

SEQ ID NO: 275724 - RNA, 32 nt, Human
uugggguuggggaagcuagaaaaagaaauggg

SEQ ID NO: 275725 - RNA, 32 nt, Human
uugggguugugguugaugcagugugggauguc

SEQ ID NO: 275726 - RNA, 17 nt, Human
uugggguuucccaagug

SEQ ID NO: 275727 - RNA, 20 nt, Human
uugggguuuccugaaguggg

SEQ ID NO: 275728 - RNA, 21 nt, Human
uugggguuucgggagcaggga

SEQ ID NO: 275729 - RNA, 21 nt, Human
uugggguuucuuccuccagug

SEQ ID NO: 275730 - RNA, 19 nt, Human
uugggguuuggacagagga

SEQ ID NO: 275731 - RNA, 21 nt, Human
uugggguuuucuucccagcgg

SEQ ID NO: 275732 - RNA, 18 nt, Human
uugggguuuugccaggga

SEQ ID NO: 275733 - RNA, 25 nt, Human
uugggguuuuuggugcaugcaguug

SEQ ID NO: 275734 - RNA, 32 nt, Human
uuggguaaaccagcucugaacuuccaagcucc

SEQ ID NO: 275735 - RNA, 18 nt, Human
uuggguacauggcccgca

SEQ ID NO: 275736 - RNA, 32 nt, Human
uuggguacuguguuacugccugggugguagga

SEQ ID NO: 275737 - RNA, 23 nt, Human
uuggguagaugcguagcucuuca

SEQ ID NO: 275738 - RNA, 32 nt, Human
uuggguagccauuuauugacuucaccuuuuug

SEQ ID NO: 275739 - RNA, 32 nt, Human
uuggguagggaguggagcuggggaggggccca

SEQ ID NO: 275740 - RNA, 32 nt, Human
uuggguagucuuucaugugaaaaggcucacaa

SEQ ID NO: 275741 - RNA, 32 nt, Human
uuggguauaugcaguaugcuacccacagcguc

SEQ ID NO: 275742 - RNA, 32 nt, Human
uuggguaucugaggugucacacauccuugcca

SEQ ID NO: 275743 - RNA, 28 nt, Human
uugggucaaagugcugccuuuaaucgac

SEQ ID NO: 275744 - RNA, 32 nt, Human
uugggucacugcaaacuccgccucccagguuc

SEQ ID NO: 275745 - RNA, 32 nt, Human
uugggucaggaguucaagacuagccuggccaa

SEQ ID NO: 275746 - RNA, 32 nt, Human
uugggucagguuagcaugggguugugguugaa

SEQ ID NO: 275747 - RNA, 31 nt, Human
uugggucaguuucaguugauaccuccucacu

SEQ ID NO: 275748 - RNA, 32 nt, Human
uugggucauagaaauucuuuauacauucuaga

SEQ ID NO: 275749 - RNA, 32 nt, Human
uugggucaugccacuguuugagucucauaggg

SEQ ID NO: 275750 - RNA, 32 nt, Human
uugggucauggucaucuuccagcaccugcugu

SEQ ID NO: 275751 - RNA, 32 nt, Human
uuggguccaagcugccccugugcuguuucugu

SEQ ID NO: 275752 - RNA, 32 nt, Human
uuggguccacacugcuuuuaugagcuauaaca

SEQ ID NO: 275753 - RNA, 32 nt, Human
uuggguccaggagguggaggcugcagugagcu

SEQ ID NO: 275754 - RNA, 32 nt, Human
uuggguccauuuucuuuucauugccuccuuuu

SEQ ID NO: 275755 - RNA, 32 nt, Human
uugggucccaaaguggguuauuucaaggcauu

SEQ ID NO: 275756 - RNA, 32 nt, Human
uugggucccugaggccuuccucggagcauugg

SEQ ID NO: 275757 - RNA, 32 nt, Human
uugggucccuuccuugggcuguguucuugcug

SEQ ID NO: 275758 - RNA, 32 nt, Human
uuggguccuccacuguccucugucaaucuagu

SEQ ID NO: 275759 - RNA, 32 nt, Human
uuggguccugcaguggcaucuccugagggcag

SEQ ID NO: 275760 - RNA, 32 nt, Human
uuggguccugcugaagccaggagggucuuccc

SEQ ID NO: 275761 - RNA, 32 nt, Human
uuggguccuggguugacugagaagcggcgggg

SEQ ID NO: 275762 - RNA, 32 nt, Human
uuggguccuguucucuacuuuuuaauuggccg

SEQ ID NO: 275763 - RNA, 32 nt, Human
uugggucuacagcuacgucuuacccgccuccu

SEQ ID NO: 275764 - RNA, 32 nt, Human
uugggucucagcugcugacacgcagccugcuc

SEQ ID NO: 275765 - RNA, 32 nt, Human
uugggucuccagagcgcuugcaucaaacaccc

SEQ ID NO: 275766 - RNA, 32 nt, Human
uugggucuccuaggcccacccuuucuaggaca

SEQ ID NO: 275767 - RNA, 32 nt, Human
uugggucucuccacauugccccggcugcucuc

SEQ ID NO: 275768 - RNA, 32 nt, Human
uugggucucugacuuuggcuucugcucccggc

SEQ ID NO: 275769 - RNA, 32 nt, Human
uugggugaaaguaacggacaaugggcuccaga

SEQ ID NO: 275770 - RNA, 18 nt, Human
uugggugacagagcaaga

SEQ ID NO: 275771 - RNA, 32 nt, Human
uugggugacaggcuuuuaagguauauuuugua

SEQ ID NO: 275772 - RNA, 32 nt, Human
uugggugagacacuuuuccuugcugacucauu

SEQ ID NO: 275773 - RNA, 32 nt, Human
uugggugagccuuggagacaugugggaaacac

SEQ ID NO: 275774 - RNA, 32 nt, Human
uugggugagcugcuuucugccuucuugguaca

SEQ ID NO: 275775 - RNA, 32 nt, Human
uugggugaggcgggcaaaucaccugaggucag

SEQ ID NO: 275776 - RNA, 32 nt, Human
uugggugaucaaaggcacaggacagggguugg

SEQ ID NO: 275777 - RNA, 32 nt, Human
uugggugcaauggcucacgccuguaauccugg

SEQ ID NO: 275778 - RNA, 32 nt, Human
uugggugcaccuggccugcucuucccauguug

SEQ ID NO: 275779 - RNA, 32 nt, Human
uugggugcagagccaggagggcguuuggcugu

SEQ ID NO: 275780 - RNA, 32 nt, Human
uugggugcaguggcucacaccuguaauaccag

SEQ ID NO: 275781 - RNA, 32 nt, Human
uugggugccauggcucacaccuguaaucuuaa

SEQ ID NO: 275782 - RNA, 32 nt, Human
uugggugccugaggcaggagaaucucuuaaac

SEQ ID NO: 275783 - RNA, 32 nt, Human
uugggugcggugacaugcaccuguaaucccac

SEQ ID NO: 275784 - RNA, 31 nt, Human
uugggugcugcugcuacucagacuagcucua

SEQ ID NO: 275785 - RNA, 32 nt, Human
uugggugcugcugcuacucagacuagcucuaa

SEQ ID NO: 275786 - RNA, 32 nt, Human
uugggugcugggaaccaggaagagugggggaa

SEQ ID NO: 275787 - RNA, 32 nt, Human
uuggguggaaccuggggcccuggcaucacaca

SEQ ID NO: 275788 - RNA, 32 nt, Human
uuggguggaggcacacauuuggggcaaaggcc

SEQ ID NO: 275789 - RNA, 32 nt, Human
uuggguggcaagggacacagacgaaaagggca

SEQ ID NO: 275790 - RNA, 32 nt, Human
uuggguggcagugucagcacagggagggcuua

SEQ ID NO: 275791 - RNA, 32 nt, Human
uuggguggccaagguaggagaaucgcuugagc

SEQ ID NO: 275792 - RNA, 32 nt, Human
uuggguggccaucaauugcugcagaauagaag

SEQ ID NO: 275793 - RNA, 32 nt, Human
uuggguggccaucaauugcugcagaauagaau

SEQ ID NO: 275794 - RNA, 32 nt, Human
uuggguggccgagacggguggaucaccugagg

SEQ ID NO: 275795 - RNA, 32 nt, Human
uuggguggccgaggcaggagaaucacuugaac

SEQ ID NO: 275796 - RNA, 32 nt, Human
uuggguggcugaggcaggagaauuguuugaac

SEQ ID NO: 275797 - RNA, 32 nt, Human
uuggguggcugaggcaggcagagcauuugagg

SEQ ID NO: 275798 - RNA, 32 nt, Human
uuggguggcuguagcugcgccuaggagagggg

SEQ ID NO: 275799 - RNA, 32 nt, Human
uugggugggaaaggagagaggagccagccagg

SEQ ID NO: 275800 - RNA, 32 nt, Human
uugggugggaccaaggagaugccaccauagac

SEQ ID NO: 275801 - RNA, 32 nt, Human
uugggugggaggauugccugagaccaggaggu

SEQ ID NO: 275802 - RNA, 32 nt, Human
uugggugggcacccccugauugcuugucuguu

SEQ ID NO: 275803 - RNA, 31 nt, Human
uuggguggguuaaguacaugggugaauuuua

SEQ ID NO: 275804 - RNA, 32 nt, Human
uugggugguccuccaaccuccaauacccaggc

SEQ ID NO: 275805 - RNA, 32 nt, Human
uugggugguuccaauugguggagagaagcucu

SEQ ID NO: 275806 - RNA, 32 nt, Human
uugggugguugaggcaggaggauuguuugagc

SEQ ID NO: 275807 - RNA, 30 nt, Human
uugggugguuugcaaucugagacuucucca

SEQ ID NO: 275808 - RNA, 20 nt, Human
uugggugucaguucaggaua

SEQ ID NO: 275809 - RNA, 32 nt, Human
uugggugucccucuccugccucagcuuaauuu

SEQ ID NO: 275810 - RNA, 32 nt, Human
uugggugugaaauguugccagcuuccuauaau

SEQ ID NO: 275811 - RNA, 32 nt, Human
uuggguguggaagggggaaaaggggauggaga

SEQ ID NO: 275812 - RNA, 32 nt, Human
uuggguguggcuucaaccacuacaaacugaug

SEQ ID NO: 275813 - RNA, 32 nt, Human
uugggugugguggcuuacaccuguaaucccaa

SEQ ID NO: 275814 - RNA, 32 nt, Human
uugggugugugugcaugcacauguguguguuu

SEQ ID NO: 275815 - RNA, 32 nt, Human
uugggugugugugcguggucugagcuuccccc

SEQ ID NO: 275816 - RNA, 32 nt, Human
uuggguguuacggugcaugccuguaaucccag

SEQ ID NO: 275817 - RNA, 32 nt, Human
uuggguguuccuucuggccagucccauacuuu

SEQ ID NO: 275818 - RNA, 32 nt, Human
uuggguuaaagcuucugugaggaccuuuuggc

SEQ ID NO: 275819 - RNA, 32 nt, Human
uuggguuacugcaaccucugccccucgggauu

SEQ ID NO: 275820 - RNA, 32 nt, Human
uuggguuauuuggggguucuguuggcuuuuua

SEQ ID NO: 275821 - RNA, 32 nt, Human
uuggguucaaccgauucuccugccucaaccuc

SEQ ID NO: 275822 - RNA, 32 nt, Human
uuggguucaagcaacccugccucagcuaacca

SEQ ID NO: 275823 - RNA, 32 nt, Human
uuggguucaagcaauucucaugccucggccuc

SEQ ID NO: 275824 - RNA, 32 nt, Human
uuggguucaagcaauucugcugcaucagccuc

SEQ ID NO: 275825 - RNA, 32 nt, Human
uuggguucaagcaauucuucugccucagccuc

SEQ ID NO: 275826 - RNA, 32 nt, Human
uuggguucaagcgacucucgugccucagccuc

SEQ ID NO: 275827 - RNA, 32 nt, Human
uuggguucaagugauucuuccaccucagccuc

SEQ ID NO: 275828 - RNA, 32 nt, Human
uuggguucaggaguuuaagaccagccuggaca

SEQ ID NO: 275829 - RNA, 32 nt, Human
uuggguucaugccauucuccugccucagccuc

SEQ ID NO: 275830 - RNA, 32 nt, Human
uuggguucauuaaucugcucacuugaggacuu

SEQ ID NO: 275831 - RNA, 32 nt, Human
uuggguuccaggcuggaggaaugcaggcagaa

SEQ ID NO: 275832 - RNA, 32 nt, Human
uuggguuccauucucaccuauccacacaacau

SEQ ID NO: 275833 - RNA, 32 nt, Human
uuggguuccucucuccucucccccucucuccu

SEQ ID NO: 275834 - RNA, 18 nt, Human
uuggguuccuggggguuu

SEQ ID NO: 275835 - RNA, 31 nt, Human
uuggguugcagcuuaugacaugcaugauagg

SEQ ID NO: 275836 - RNA, 32 nt, Human
uuggguugcauucuucccucuggacuagagua

SEQ ID NO: 275837 - RNA, 32 nt, Human
uuggguuggagugcaguugcaggaucauaguu

SEQ ID NO: 275838 - RNA, 32 nt, Human
uuggguugggcgccguggcucacaccuguaau

SEQ ID NO: 275839 - RNA, 32 nt, Human
uuggguugggggcccuuccaggaggaaacccc

SEQ ID NO: 275840 - RNA, 32 nt, Human
uuggguugguagaaacggaaguagaaguaggc

SEQ ID NO: 275841 - RNA, 32 nt, Human
uuggguuggugugcuggauggaaguagggcug

SEQ ID NO: 275842 - RNA, 32 nt, Human
uuggguuguagucaauggcaggacagacagug

SEQ ID NO: 275843 - RNA, 32 nt, Human
uuggguugucacuguccugcagggggcagcag

SEQ ID NO: 275844 - RNA, 31 nt, Human
uuggguuuacaguucuuuacgcuuucugauu

SEQ ID NO: 275845 - RNA, 32 nt, Human
uuggguuuagacagcaggugcuguuccgagac

SEQ ID NO: 275846 - RNA, 32 nt, Human
uuggguuucacuucugcuucacuauguaguau

SEQ ID NO: 275847 - RNA, 32 nt, Human
uuggguuucagaaugaauuagaaacaaauaac

SEQ ID NO: 275848 - RNA, 32 nt, Human
uuggguuucuaguccuccuuaaccacuuaucu

SEQ ID NO: 275849 - RNA, 32 nt, Human
uuggguuugaccugcacaucugcagugagggc

SEQ ID NO: 275850 - RNA, 32 nt, Human
uuggguuugccauucauccccuaggcauggua

SEQ ID NO: 275851 - RNA, 32 nt, Human
uuggguuugcuuucacagucucucuuccuucu

SEQ ID NO: 275852 - RNA, 32 nt, Human
uuggguuugcuuuggaaaaugccugucucucu

SEQ ID NO: 275853 - RNA, 32 nt, Human
uuggguuuggucuccagcuccaauacuuauua

SEQ ID NO: 275854 - RNA, 32 nt, Human
uuggguuuuaaaggaaugguuuuacugcauua

SEQ ID NO: 275855 - RNA, 32 nt, Human
uugguaaaacuguuucaugaccagcuugauua

SEQ ID NO: 275856 - RNA, 32 nt, Human
uugguaaauacaacacaucuaauuaaauguag

SEQ ID NO: 275857 - RNA, 32 nt, Human
uugguaaauggaggcaggaguggggcagggau

SEQ ID NO: 275858 - RNA, 32 nt, Human
uugguaaauuucugagauauagcaggagacca

SEQ ID NO: 275859 - RNA, 32 nt, Human
uugguaaccagcuucccuuaacuagcuuuuuc

SEQ ID NO: 275860 - RNA, 32 nt, Human
uugguaaccuccauucuaguucugucucugug

SEQ ID NO: 275861 - RNA, 32 nt, Human
uugguaagagaaggaauuuaaaagagguauaa

SEQ ID NO: 275862 - RNA, 32 nt, Human
uugguaagccccgcaaggccaaggauccugaa

SEQ ID NO: 275863 - RNA, 30 nt, Human
uugguaagccucucuuacuccuguuaugca

SEQ ID NO: 275864 - RNA, 31 nt, Human
uugguaaggugugggugauggguggguugug

SEQ ID NO: 275865 - RNA, 32 nt, Human
uugguaagucuaagcauugagaacaaacauua

SEQ ID NO: 275866 - RNA, 32 nt, Human
uugguaaugcucacuccagguucugcaaaagu

SEQ ID NO: 275867 - RNA, 32 nt, Human
uugguaauuaccuggagaagaauggcuuucaa

SEQ ID NO: 275868 - RNA, 32 nt, Human
uugguaauuuguccuucuauagaagcuucaaa

SEQ ID NO: 275869 - RNA, 32 nt, Human
uugguaccaaaccugaggucuuuuggaagaua

SEQ ID NO: 275870 - RNA, 32 nt, Human
uugguaccacugccccuggccugagagccagg

SEQ ID NO: 275871 - RNA, 31 nt, Human
uugguaccaggagagcugcucacuuagggcc

SEQ ID NO: 275872 - RNA, 32 nt, Human
uugguaccucuacuuguucccuucuggaaucu

SEQ ID NO: 275873 - RNA, 32 nt, Human
uugguaccugcucuccccuggacuucuuuuuc

SEQ ID NO: 275874 - RNA, 32 nt, Human
uugguacguaguggaauaacaucucuacuugu

SEQ ID NO: 275875 - RNA, 32 nt, Human
uugguacuaccuaaugaaaggauuugguaaua

SEQ ID NO: 275876 - RNA, 32 nt, Human
uugguacugguugaauccuucaguuaacugcu

SEQ ID NO: 275877 - RNA, 32 nt, Human
uugguacuuauuuguucucuuuucccuuacau

SEQ ID NO: 275878 - RNA, 32 nt, Human
uugguagaaaugcgaagcgucaggguucccgc

SEQ ID NO: 275879 - RNA, 32 nt, Human
uugguagaacuguuaaccuagaaauguagcuu

SEQ ID NO: 275880 - RNA, 22 nt, Human
uugguagaagucuugggaucuu

SEQ ID NO: 275881 - RNA, 32 nt, Human
uugguagagacagaguuucaccagguugguca

SEQ ID NO: 275882 - RNA, 32 nt, Human
uugguagagacaggguaucuccauguugguca

SEQ ID NO: 275883 - RNA, 32 nt, Human
uugguagagacagggucucacuauguugccca

SEQ ID NO: 275884 - RNA, 32 nt, Human
uugguagagacaggguucaaccguguugguca

SEQ ID NO: 275885 - RNA, 32 nt, Human
uugguagagacaggguuucaccauguuagcca

SEQ ID NO: 275886 - RNA, 32 nt, Human
uugguagagacaggguuucaccauguuggcca

SEQ ID NO: 275887 - RNA, 32 nt, Human
uugguagagacaggguuucaccauguugguca

SEQ ID NO: 275888 - RNA, 32 nt, Human
uugguagagacaggguuucgccauguugccca

SEQ ID NO: 275889 - RNA, 32 nt, Human
uugguagagacaggguuucgcuauguuggcca

SEQ ID NO: 275890 - RNA, 32 nt, Human
uugguagagacaggguuuugccauguuucccu

SEQ ID NO: 275891 - RNA, 32 nt, Human
uugguagagacaggguuuugccguguuggccg

SEQ ID NO: 275892 - RNA, 32 nt, Human
uugguagagacaggguuuugcuguguugcuca

SEQ ID NO: 275893 - RNA, 32 nt, Human
uugguagagacggguuucaccauguuggucag

SEQ ID NO: 275894 - RNA, 32 nt, Human
uugguagcccccaaguggcgugcagugacacc

SEQ ID NO: 275895 - RNA, 32 nt, Human
uugguagccguagcacaagugauuggaguaga

SEQ ID NO: 275896 - RNA, 32 nt, Human
uugguagcggagcaaaagugaggggcaccaca

SEQ ID NO: 275897 - RNA, 22 nt, Human
uugguagcuaagacucccgaau

SEQ ID NO: 275898 - RNA, 32 nt, Human
uugguagcuguuucuccguccucucuccaccu

SEQ ID NO: 275899 - RNA, 32 nt, Human
uugguagcuuuuugauuuccccaaacuauuua

SEQ ID NO: 275900 - RNA, 32 nt, Human
uugguaggaggaaacauaagcacuaaacacua

SEQ ID NO: 275901 - RNA, 32 nt, Human
uugguaggcaaaggugggaggaucauuugagc

SEQ ID NO: 275902 - RNA, 32 nt, Human
uugguaggcugaggcaggagaaucgcuugaac

SEQ ID NO: 275903 - RNA, 32 nt, Human
uugguaggcugaggcaggagaauggcgggaac

SEQ ID NO: 275904 - RNA, 32 nt, Human
uugguaggcugagguagguggaucaccugagg

SEQ ID NO: 275905 - RNA, 32 nt, Human
uugguagggcgggguuucaccaugauggccag

SEQ ID NO: 275906 - RNA, 32 nt, Human
uugguaguauuucugcaagcuucuuuaguuuc

SEQ ID NO: 275907 - RNA, 32 nt, Human
uugguagugagugccuugcccucuuugagcua

SEQ ID NO: 275908 - RNA, 32 nt, Human
uugguagugucugaggugaacuguggggguug

SEQ ID NO: 275909 - RNA, 32 nt, Human
uugguaguuaacacaucaaauauuucuugcug

SEQ ID NO: 275910 - RNA, 32 nt, Human
uugguaguuuguuccuuuuauugcugaguaga

SEQ ID NO: 275911 - RNA, 32 nt, Human
uugguauaugauggagaaugaaaaacuagagu

SEQ ID NO: 275912 - RNA, 31 nt, Human
uugguauccaauaaauauuuguuggaugaaa

SEQ ID NO: 275913 - RNA, 31 nt, Human
uugguauccaauaaauauuuguuggaugaau

SEQ ID NO: 275914 - RNA, 32 nt, Human
uugguaugaaggccagaaggagugaaacaugu

SEQ ID NO: 275915 - RNA, 32 nt, Human
uugguauggccaaagucacuuccucgucuccu

SEQ ID NO: 275916 - RNA, 32 nt, Human
uugguaugugccaggcuugccugggcugggca

SEQ ID NO: 275917 - RNA, 32 nt, Human
uugguauuaaggaaaucucauuuuggaugccu

SEQ ID NO: 275918 - RNA, 32 nt, Human
uugguauucucuccaguauauagaugaggaaa

SEQ ID NO: 275919 - RNA, 32 nt, Human
uugguauuggccuggggcagagcagcuccucc

SEQ ID NO: 275920 - RNA, 32 nt, Human
uugguauugugccucugcucccaucucucucu

SEQ ID NO: 275921 - RNA, 32 nt, Human
uugguauuuauuuaugaaauauuugaacauuu

SEQ ID NO: 275922 - RNA, 32 nt, Human
uuggucaccagcaaucugccuuugaccauccu

SEQ ID NO: 275923 - RNA, 32 nt, Human
uuggucaccaggcaaugggagcuguagaccag

SEQ ID NO: 275924 - RNA, 32 nt, Human
uuggucacggccgcaggugaccccuuagccca

SEQ ID NO: 275925 - RNA, 32 nt, Human
uuggucacugcacuucauagcccggcauauca

SEQ ID NO: 275926 - RNA, 32 nt, Human
uuggucagagcaaaucacaaggcuuuacccag

SEQ ID NO: 275927 - RNA, 32 nt, Human
uuggucaggcuggucuugaucucuggccaccu

SEQ ID NO: 275928 - RNA, 32 nt, Human
uuggucaggcuggucuuggauucccgaccuca

SEQ ID NO: 275929 - RNA, 32 nt, Human
uuggucagugccugucaaggcuccaguccugc

SEQ ID NO: 275930 - RNA, 32 nt, Human
uuggucaguuaccugggaauucugggcugcca

SEQ ID NO: 275931 - RNA, 32 nt, Human
uuggucaguuucuagaagacauggaagcauau

SEQ ID NO: 275932 - RNA, 32 nt, Human
uuggucauaaguuggcauucucucacauucca

SEQ ID NO: 275933 - RNA, 32 nt, Human
uuggucauacccaaggggaagguggagcaaga

SEQ ID NO: 275934 - RNA, 32 nt, Human
uuggucauagagucuucauauuucaguauuug

SEQ ID NO: 275935 - RNA, 32 nt, Human
uuggucauagaguuggggaaugacagaauuuu

SEQ ID NO: 275936 - RNA, 32 nt, Human
uuggucaucugacuaaguucuagccaaaguaa

SEQ ID NO: 275937 - RNA, 32 nt, Human
uuggucaugagcugcugggaaguugugacuuu

SEQ ID NO: 275938 - RNA, 32 nt, Human
uuggucauuaacaggaagcaucuuuucuacau

SEQ ID NO: 275939 - RNA, 32 nt, Human
uuggucauuaaguauugugcagugcauuauuu

SEQ ID NO: 275940 - RNA, 32 nt, Human
uuggucauucugcagugcacugcaaccauugu

SEQ ID NO: 275941 - RNA, 32 nt, Human
uuggucauucuuccagccuccaugucaccacg

SEQ ID NO: 275942 - RNA, 32 nt, Human
uuggucauugcaggccagaagauagugucuga

SEQ ID NO: 275943 - RNA, 32 nt, Human
uuggucauuggguuugggugaggccuggaggc

SEQ ID NO: 275944 - RNA, 32 nt, Human
uugguccacaccucaccugcccucucugcccu

SEQ ID NO: 275945 - RNA, 32 nt, Human
uugguccacagcacuccauucuggguggcaga

SEQ ID NO: 275946 - RNA, 20 nt, Human
uugguccaccuuccagcaca

SEQ ID NO: 275947 - RNA, 32 nt, Human
uugguccagaggagggaggaggaagggaagac

SEQ ID NO: 275948 - RNA, 32 nt, Human
uugguccagauucgcuccucuggggcuacguc

SEQ ID NO: 275949 - RNA, 32 nt, Human
uugguccaggcaggcggggaugugcggugacc

SEQ ID NO: 275950 - RNA, 32 nt, Human
uugguccagguacugagggacaaguagaaaga

SEQ ID NO: 275951 - RNA, 32 nt, Human
uugguccagguagcaaugaugagacccuuuua

SEQ ID NO: 275952 - RNA, 32 nt, Human
uugguccaggucaucccuccccgggccugggg

SEQ ID NO: 275953 - RNA, 32 nt, Human
uugguccaguucugcaccgggguggggcuggg

SEQ ID NO: 275954 - RNA, 32 nt, Human
uugguccaugaaggagcagccagggguggugg

SEQ ID NO: 275955 - RNA, 32 nt, Human
uuggucccaacaaggcccaggaaacagacccu

SEQ ID NO: 275956 - RNA, 32 nt, Human
uuggucccaccgcacuccagccugggcaacag

SEQ ID NO: 275957 - RNA, 32 nt, Human
uuggucccagagaggcagccugggcagucugu

SEQ ID NO: 275958 - RNA, 32 nt, Human
uuggucccagagggagaggaggugggcugugc

SEQ ID NO: 275959 - RNA, 32 nt, Human
uuggucccaggaguucaagaccagccugugga

SEQ ID NO: 275960 - RNA, 32 nt, Human
uugguccccaaagccuuauacuuuuugcauug

SEQ ID NO: 275961 - RNA, 32 nt, Human
uugguccccagcgcagugagguggugagccuc

SEQ ID NO: 275962 - RNA, 32 nt, Human
uuggucccgagaugggaggggagcagcugggc

SEQ ID NO: 275963 - RNA, 32 nt, Human
uuggucccuccuucuauuuugugaaaggguag

SEQ ID NO: 275964 - RNA, 21 nt, Human
uugguccgaauuucucccgaa

SEQ ID NO: 275965 - RNA, 32 nt, Human
uugguccgaucuuugacucuuuugccauuaaa

SEQ ID NO: 275966 - RNA, 32 nt, Human
uugguccucacccuccuguuccugggcucccc

SEQ ID NO: 275967 - RNA, 32 nt, Human
uugguccucucuaaggagggcucucuucugag

SEQ ID NO: 275968 - RNA, 32 nt, Human
uugguccugaguguuccaggagcucuuugguu

SEQ ID NO: 275969 - RNA, 32 nt, Human
uugguccugcauccucucucucccagagccuc

SEQ ID NO: 275970 - RNA, 32 nt, Human
uugguccugcuguuuuugaugagccuuuuguc

SEQ ID NO: 275971 - RNA, 32 nt, Human
uugguccuuccaccagccucuuuugggaacag

SEQ ID NO: 275972 - RNA, 32 nt, Human
uuggucgagagggaaagcagaagaagucugcu

SEQ ID NO: 275973 - RNA, 32 nt, Human
uuggucgagauggggugucccuguguugccca

SEQ ID NO: 275974 - RNA, 32 nt, Human
uuggucgaugaggcaagagaucaaggaaagug

SEQ ID NO: 275975 - RNA, 32 nt, Human
uuggucggaagugagugaaggagccaggucgc

SEQ ID NO: 275976 - RNA, 32 nt, Human
uuggucggagucggccaguugccugaaguagg

SEQ ID NO: 275977 - RNA, 32 nt, Human
uuggucgggaacagccagcccagaugagcaac

SEQ ID NO: 275978 - RNA, 32 nt, Human
uuggucgggucagccugggggcugagggccug

SEQ ID NO: 275979 - RNA, 32 nt, Human
uuggucguaaagccccuccaguccagcuuuga

SEQ ID NO: 275980 - RNA, 32 nt, Human
uuggucuagagguggagcacagugaaagaauu

SEQ ID NO: 275981 - RNA, 32 nt, Human
uuggucuagccacagugaaaucuugauggagu

SEQ ID NO: 275982 - RNA, 32 nt, Human
uuggucucagcaggaccccauugcagcaaaga

SEQ ID NO: 275983 - RNA, 32 nt, Human
uuggucucagccacagcaccccuuauuccagc

SEQ ID NO: 275984 - RNA, 32 nt, Human
uuggucucagggggaccccagggaugccccag

SEQ ID NO: 275985 - RNA, 32 nt, Human
uuggucuccaaaagugcugggauuacaggcau

SEQ ID NO: 275986 - RNA, 32 nt, Human
uuggucucccaaagugaugggauuacaggcgu

SEQ ID NO: 275987 - RNA, 32 nt, Human
uuggucucccaaagugcugggaauacaggcau

SEQ ID NO: 275988 - RNA, 32 nt, Human
uuggucucccaaagugcugggauuacagacau

SEQ ID NO: 275989 - RNA, 32 nt, Human
uuggucucccaaagugcugggauuacaggcgu

SEQ ID NO: 275990 - RNA, 32 nt, Human
uuggucucccaaagugcugggauuacccacau

SEQ ID NO: 275991 - RNA, 32 nt, Human
uuggucucccaaagugcugggauuacgguguu

SEQ ID NO: 275992 - RNA, 32 nt, Human
uuggucucccaaagugcugggauuauaggcau

SEQ ID NO: 275993 - RNA, 32 nt, Human
uuggucucccaacgugcugggauuacaggcau

SEQ ID NO: 275994 - RNA, 18 nt, Human
uuggucuccugugaacuu

SEQ ID NO: 275995 - RNA, 20 nt, Human
uuggucuccugugguuucuu

SEQ ID NO: 275996 - RNA, 32 nt, Human
uuggucucgaacuccugaccucaugaucugcc

SEQ ID NO: 275997 - RNA, 32 nt, Human
uuggucucuacccucacuaccucaguucucaa

SEQ ID NO: 275998 - RNA, 32 nt, Human
uuggucucucaaagugcugggauuacaggcau

SEQ ID NO: 275999 - RNA, 18 nt, Human
uuggucucucuagguuuu

SEQ ID NO: 276000 - RNA, 32 nt, Human
uuggucucugccccaucucauuguuugauccu

SEQ ID NO: 276001 - RNA, 18 nt, Human
uuggucucuggagguuuu

SEQ ID NO: 276002 - RNA, 32 nt, Human
uuggucucuguggguaggucucgcagccucug

SEQ ID NO: 276003 - RNA, 18 nt, Human
uuggucucuguuggccuu

SEQ ID NO: 276004 - RNA, 32 nt, Human
uuggucugaacaaaccuuguaaaguuccauug

SEQ ID NO: 276005 - RNA, 32 nt, Human
uuggucugagggugagacauucccugguuucu

SEQ ID NO: 276006 - RNA, 32 nt, Human
uuggucugcuuuguguaugguacuugaaacca

SEQ ID NO: 276007 - RNA, 32 nt, Human
uuggucuggagccugaugauuugcauuuccaa

SEQ ID NO: 276008 - RNA, 32 nt, Human
uuggucugucgccaggcuggagugcaguggcg

SEQ ID NO: 276009 - RNA, 32 nt, Human
uuggucugucugucuguccuuguccuuguggu

SEQ ID NO: 276010 - RNA, 32 nt, Human
uuggucuguggagguaguugcugguggcacug

SEQ ID NO: 276011 - RNA, 32 nt, Human
uuggucuuccaaagugcugggauuacaggugu

SEQ ID NO: 276012 - RNA, 32 nt, Human
uuggucuugagcuggucaggugacaucagcag

SEQ ID NO: 276013 - RNA, 32 nt, Human
uuggucuugccagacagcagauucagggaaag

SEQ ID NO: 276014 - RNA, 32 nt, Human
uuggucuugcugcugauaucugccagaaaagg

SEQ ID NO: 276015 - RNA, 20 nt, Human
uuggucuugcuuggggcguu

SEQ ID NO: 276016 - RNA, 32 nt, Human
uuggucuuggacaacuguaaggaacaacacaa

SEQ ID NO: 276017 - RNA, 20 nt, Human
uuggucuuguucuuggucuu

SEQ ID NO: 276018 - RNA, 32 nt, Human
uuggucuuguuucauuggcuguggcagaaacu

SEQ ID NO: 276019 - RNA, 32 nt, Human
uuggucuuuguuuuuguuauucauccuguguc

SEQ ID NO: 276020 - RNA, 32 nt, Human
uuggucuuuucccuguucaucucccaacaugc

SEQ ID NO: 276021 - RNA, 18 nt, Human
uuggucuuuuggccucuu

SEQ ID NO: 276022 - RNA, 32 nt, Human
uuggugaaacacaucauaaugauuucuauagg

SEQ ID NO: 276023 - RNA, 32 nt, Human
uuggugaaagaccauuccagccauucaguuga

SEQ ID NO: 276024 - RNA, 32 nt, Human
uuggugaacaugccaucaguaaaagcccugga

SEQ ID NO: 276025 - RNA, 32 nt, Human
uuggugaagaccgcacuucaauggagcuuggg

SEQ ID NO: 276026 - RNA, 32 nt, Human
uuggugacauuuuucuagccuggcagaacaga

SEQ ID NO: 276027 - RNA, 32 nt, Human
uuggugagagacaggcuuuguucucuuguuca

SEQ ID NO: 276028 - RNA, 32 nt, Human
uuggugagauuccugacuugauaccuugcuaa

SEQ ID NO: 276029 - RNA, 32 nt, Human
uuggugaggaaagaguaugaauuugccaugug

SEQ ID NO: 276030 - RNA, 32 nt, Human
uuggugaggaagggaaagguuuuucuuguagg

SEQ ID NO: 276031 - RNA, 32 nt, Human
uuggugaggagcuguugggucaugugguugau

SEQ ID NO: 276032 - RNA, 32 nt, Human
uuggugagugugaaccagagucugagaucccc

SEQ ID NO: 276033 - RNA, 32 nt, Human
uuggugauagcgccugggggagggggacugga

SEQ ID NO: 276034 - RNA, 21 nt, Human
uuggugaucaugucuuuucca

SEQ ID NO: 276035 - RNA, 32 nt, Human
uuggugaugagacuuauggagugugccucucu

SEQ ID NO: 276036 - RNA, 32 nt, Human
uuggugauucaaaguguuguguuccuggcuga

SEQ ID NO: 276037 - RNA, 22 nt, Human
uuggugauugccaugggacuuu

SEQ ID NO: 276038 - RNA, 32 nt, Human
uuggugcaagggagauggucucaagucagagg

SEQ ID NO: 276039 - RNA, 31 nt, Human
uuggugcaauuagaagcaaaagacuguaccu

SEQ ID NO: 276040 - RNA, 32 nt, Human
uuggugcagaagcaugcaguggaauuuaacca

SEQ ID NO: 276041 - RNA, 32 nt, Human
uuggugcaggaaaacuaccuggaguaccggca

SEQ ID NO: 276042 - RNA, 31 nt, Human
uuggugcaguuucagcucacugcaaccuccg

SEQ ID NO: 276043 - RNA, 31 nt, Human
uuggugcauaauaaauauuguggaaauaaaa

SEQ ID NO: 276044 - RNA, 32 nt, Human
uuggugcauaauaaauauuguggaaauaaaaa

SEQ ID NO: 276045 - RNA, 32 nt, Human
uuggugccaaugcauuccagccuggaugaugg

SEQ ID NO: 276046 - RNA, 32 nt, Human
uuggugccaggaguucuagaccagccuggcca

SEQ ID NO: 276047 - RNA, 24 nt, Human
uuggugcccaggcuagagugcaau

SEQ ID NO: 276048 - RNA, 32 nt, Human
uuggugcccaggcuagagugcaauggcgcgau

SEQ ID NO: 276049 - RNA, 32 nt, Human
uuggugcccccaggaaccuggccaggggugcu

SEQ ID NO: 276050 - RNA, 21 nt, Human
uuggugccucacugggggcuu

SEQ ID NO: 276051 - RNA, 32 nt, Human
uuggugccugugagcucaucucccaggauggu

SEQ ID NO: 276052 - RNA, 32 nt, Human
uuggugccuuaaagacacgcauuccaaagugg

SEQ ID NO: 276053 - RNA, 32 nt, Human
uuggugcgggcagacaccaauuuaggcaacau

SEQ ID NO: 276054 - RNA, 32 nt, Human
uuggugcuaaggaaguggggagagcaggcucu

SEQ ID NO: 276055 - RNA, 32 nt, Human
uuggugcuaaugaggccagggugcaggguucg

SEQ ID NO: 276056 - RNA, 32 nt, Human
uuggugcuacagcccucuccccaccccuaaag

SEQ ID NO: 276057 - RNA, 32 nt, Human
uuggugcucaacuacagccugccuggauaugg

SEQ ID NO: 276058 - RNA, 32 nt, Human
uuggugcucaagucacucagaaugagaguccu

SEQ ID NO: 276059 - RNA, 32 nt, Human
uuggugcucagccucuggagccucaccugcag

SEQ ID NO: 276060 - RNA, 32 nt, Human
uuggugcuccagucccggguuggggcuggccu

SEQ ID NO: 276061 - RNA, 32 nt, Human
uuggugcucuauggagaaauggagucugugug

SEQ ID NO: 276062 - RNA, 32 nt, Human
uuggugcugaagacgcagggacaggaauggga

SEQ ID NO: 276063 - RNA, 32 nt, Human
uuggugcugggggcugugauucccucugccuc

SEQ ID NO: 276064 - RNA, 32 nt, Human
uuggugcuguuggcauggccugugccaucaau

SEQ ID NO: 276065 - RNA, 29 nt, Human
uuggugcuuaugugugugggcuugggacg

SEQ ID NO: 276066 - RNA, 32 nt, Human
uuggugcuugaggucucccugcucuugguggc

SEQ ID NO: 276067 - RNA, 24 nt, Human
uuggugcuuuguaugcaaguuuaa

SEQ ID NO: 276068 - RNA, 32 nt, Human
uugguggaaaguaggguggaccaaaggaggcc

SEQ ID NO: 276069 - RNA, 32 nt, Human
uugguggagacagggucucaccauguuggcua

SEQ ID NO: 276070 - RNA, 32 nt, Human
uugguggaggggccaggcuggacgcuuccugu

SEQ ID NO: 276071 - RNA, 32 nt, Human
uugguggaugucagugcuuacuccccaugaaa

SEQ ID NO: 276072 - RNA, 32 nt, Human
uugguggcaaggacagagggccuggaccagca

SEQ ID NO: 276073 - RNA, 17 nt, Human
uugguggcaaugugagg

SEQ ID NO: 276074 - RNA, 32 nt, Human
uugguggcaccacugcccuccagccuggauga

SEQ ID NO: 276075 - RNA, 32 nt, Human
uugguggcaccaggggacagcaguaggcugac

SEQ ID NO: 276076 - RNA, 32 nt, Human
uugguggcagcugccaucauggucauugccuu

SEQ ID NO: 276077 - RNA, 32 nt, Human
uugguggcaggauucucagcaggcauggccgu

SEQ ID NO: 276078 - RNA, 32 nt, Human
uugguggcaggcaccuguagucccagcuacac

SEQ ID NO: 276079 - RNA, 32 nt, Human
uugguggccacuuugagaugccagguuucuuu

SEQ ID NO: 276080 - RNA, 32 nt, Human
uugguggccccuccaggcccagccucugccuc

SEQ ID NO: 276081 - RNA, 32 nt, Human
uugguggccugggaucuggcacacucccucuc

SEQ ID NO: 276082 - RNA, 32 nt, Human
uugguggcgggcgccuguagucucagcuacuc

SEQ ID NO: 276083 - RNA, 32 nt, Human
uugguggcucacaccuguaauuccagcacuuu

SEQ ID NO: 276084 - RNA, 32 nt, Human
uugguggcuggcuagcuaguuucuacagaaca

SEQ ID NO: 276085 - RNA, 32 nt, Human
uugguggcuucauguaauguucucauuaauga

SEQ ID NO: 276086 - RNA, 32 nt, Human
uuggugggaaguaagcuggagauccaggcugc

SEQ ID NO: 276087 - RNA, 32 nt, Human
uuggugggaccccuguccacacccacccuauu

SEQ ID NO: 276088 - RNA, 32 nt, Human
uuggugggagccaaggcugagucggauguauc

SEQ ID NO: 276089 - RNA, 32 nt, Human
uuggugggaggaggagaaaacaauuguuuuua

SEQ ID NO: 276090 - RNA, 32 nt, Human
uuggugggcaucaucagcuggggccugggcug

SEQ ID NO: 276091 - RNA, 32 nt, Human
uuggugggcugcacucucaccuggaggcuccg

SEQ ID NO: 276092 - RNA, 32 nt, Human
uugguggggauggugauuaaacaccucuuuug

SEQ ID NO: 276093 - RNA, 32 nt, Human
uugguggggguaaggggcaguggugugaaggg

SEQ ID NO: 276094 - RNA, 32 nt, Human
uuggugggguacaguggaugugaauacuguaa

SEQ ID NO: 276095 - RNA, 32 nt, Human
uugguggguagggggucucucugguuuccccu

SEQ ID NO: 276096 - RNA, 32 nt, Human
uugguggguugguggcugggaauaucuguucc

SEQ ID NO: 276097 - RNA, 32 nt, Human
uuggugguaccaggaaagagagacugauuauc

SEQ ID NO: 276098 - RNA, 32 nt, Human
uuggugguacccucgagcacaccagacuugca

SEQ ID NO: 276099 - RNA, 32 nt, Human
uugguggucugggucacaggaggcagguuucg

SEQ ID NO: 276100 - RNA, 32 nt, Human
uugguggucuuugcuuauucugagguucuugu

SEQ ID NO: 276101 - RNA, 32 nt, Human
uugguggugcuaaaugccaggaagaaaaguaa

SEQ ID NO: 276102 - RNA, 32 nt, Human
uugguggugcuacccuuggccucccagagucc

SEQ ID NO: 276103 - RNA, 32 nt, Human
uugguggugggaggccagcgggcagaaauuua

SEQ ID NO: 276104 - RNA, 32 nt, Human
uuggugguuugagucccuucuacuuggcauuc

SEQ ID NO: 276105 - RNA, 32 nt, Human
uuggugguuuucuuuccuaacuucugauuuag

SEQ ID NO: 276106 - RNA, 32 nt, Human
uugguguacugaggugucugaugaggauguac

SEQ ID NO: 276107 - RNA, 32 nt, Human
uuggugucaggagaggacauggagggggcuga

SEQ ID NO: 276108 - RNA, 32 nt, Human
uuggugucaguccugugucuugucgguccuuc

SEQ ID NO: 276109 - RNA, 32 nt, Human
uuggugucauauccaagaaaucauuacagaau

SEQ ID NO: 276110 - RNA, 32 nt, Human
uugguguccagaaggaaugaaaaccagugaca

SEQ ID NO: 276111 - RNA, 32 nt, Human
uugguguccuggacuucauccugggugcugca

SEQ ID NO: 276112 - RNA, 32 nt, Human
uuggugucucagggauggcagaggcagaaaaa

SEQ ID NO: 276113 - RNA, 32 nt, Human
uuggugucugaggugccacuucugcugugaau

SEQ ID NO: 276114 - RNA, 32 nt, Human
uuggugugaacucgcuuaaaagcaauggugaa

SEQ ID NO: 276115 - RNA, 32 nt, Human
uuggugugcaguucacaguaggauuugggcuc

SEQ ID NO: 276116 - RNA, 32 nt, Human
uuggugugccaagaggagguggguagauggga

SEQ ID NO: 276117 - RNA, 20 nt, Human
uugguguggacggggcgcag

SEQ ID NO: 276118 - RNA, 32 nt, Human
uugguguguauaacuacauuuuuagugaugca

SEQ ID NO: 276119 - RNA, 32 nt, Human
uuggugugucauggugccucaucauucugggg

SEQ ID NO: 276120 - RNA, 32 nt, Human
uugguguguggugggaagcuaucagaacaaga

SEQ ID NO: 276121 - RNA, 32 nt, Human
uugguguucacuuugcuccucuugcccucugu

SEQ ID NO: 276122 - RNA, 32 nt, Human
uugguguucauccuauuuuucugacaagucca

SEQ ID NO: 276123 - RNA, 32 nt, Human
uugguguucuguagucugugaggggagagcag

SEQ ID NO: 276124 - RNA, 32 nt, Human
uugguguugcccaggcagagagggcagugugg

SEQ ID NO: 276125 - RNA, 32 nt, Human
uugguguuucaucagcucuuguuagcaaccag

SEQ ID NO: 276126 - RNA, 32 nt, Human
uugguguuugcucucccuugacccaccccagu

SEQ ID NO: 276127 - RNA, 32 nt, Human
uugguguuuguuucugacauuuuaacuugaaa

SEQ ID NO: 276128 - RNA, 32 nt, Human
uugguuaaaaggaaguuuguucacuucgauga

SEQ ID NO: 276129 - RNA, 22 nt, Human
uugguuaaagugaagaaacagu

SEQ ID NO: 276130 - RNA, 32 nt, Human
uugguuaaugccagucuuccuccccuggacac

SEQ ID NO: 276131 - RNA, 32 nt, Human
uugguuagcacacucagcgcugugagucguga

SEQ ID NO: 276132 - RNA, 32 nt, Human
uugguuauauggucagaccaagaucacacaca

SEQ ID NO: 276133 - RNA, 32 nt, Human
uugguuauucuacugccucuaggccaggguag

SEQ ID NO: 276134 - RNA, 32 nt, Human
uugguuauuuacucauuugucauuucauggau

SEQ ID NO: 276135 - RNA, 32 nt, Human
uugguucaacaacaagaacuuacuuaaaacaa

SEQ ID NO: 276136 - RNA, 32 nt, Human
uugguucacugcaaccuccaccuccaggguuc

SEQ ID NO: 276137 - RNA, 32 nt, Human
uugguucacugcaaccuccaccucccagguuc

SEQ ID NO: 276138 - RNA, 32 nt, Human
uugguucacugcaaccuccaccucuuggguuc

SEQ ID NO: 276139 - RNA, 32 nt, Human
uugguucacugcaaccuccgcauccgggguuc

SEQ ID NO: 276140 - RNA, 32 nt, Human
uugguucacugcaaccuccgccuccuggauuc

SEQ ID NO: 276141 - RNA, 32 nt, Human
uugguucacugcaaccucugccucccagguuc

SEQ ID NO: 276142 - RNA, 32 nt, Human
uugguucacugcaaccucugccucccggguuc

SEQ ID NO: 276143 - RNA, 32 nt, Human
uugguucacugcaagcuccaccucccggguuc

SEQ ID NO: 276144 - RNA, 32 nt, Human
uugguucacuuuuaaagugcagguguauauuu

SEQ ID NO: 276145 - RNA, 32 nt, Human
uugguucagaauauuguuugugccaguacaug

SEQ ID NO: 276146 - RNA, 32 nt, Human
uugguucagcagagcaugggggcgggggcucu

SEQ ID NO: 276147 - RNA, 32 nt, Human
uugguucagcuuuuagcaaaaagggcuacagu

SEQ ID NO: 276148 - RNA, 32 nt, Human
uugguucaugcucugagccucugccaagcuga

SEQ ID NO: 276149 - RNA, 32 nt, Human
uugguuccaaguauuugcuauugugaacagug

SEQ ID NO: 276150 - RNA, 32 nt, Human
uugguuccaagucuuugcuauuguaaauagca

SEQ ID NO: 276151 - RNA, 32 nt, Human
uugguuccaagucuuugcuauuguaaauagug

SEQ ID NO: 276152 - RNA, 32 nt, Human
uugguuccaagucuuugcuauugugaauaaug

SEQ ID NO: 276153 - RNA, 32 nt, Human
uugguuccaagucuuugcuauugugaauagug

SEQ ID NO: 276154 - RNA, 31 nt, Human
uugguuccagaaggaacugucagucaucagc

SEQ ID NO: 276155 - RNA, 32 nt, Human
uugguuccagugcuuuauguuguuguuguuuu

SEQ ID NO: 276156 - RNA, 32 nt, Human
uugguuccaugaauuugcuauuguaaauauug

SEQ ID NO: 276157 - RNA, 32 nt, Human
uugguucccaccacacugaggaaauggggguu

SEQ ID NO: 276158 - RNA, 32 nt, Human
uugguucccuuucaagaugauuuuggcugugu

SEQ ID NO: 276159 - RNA, 22 nt, Human
uugguuccggucuuuacuguug

SEQ ID NO: 276160 - RNA, 32 nt, Human
uugguuccucaugacugugcugugaggaaggc

SEQ ID NO: 276161 - RNA, 32 nt, Human
uugguuccuuagugaaggcucucuuccuggcu

SEQ ID NO: 276162 - RNA, 32 nt, Human
uugguuccuugucugugaugauuugcaaaugu

SEQ ID NO: 276163 - RNA, 32 nt, Human
uugguuccuuucaaaugcacuugagcagcggu

SEQ ID NO: 276164 - RNA, 32 nt, Human
uugguucgugugagcagcugcccagccccagg

SEQ ID NO: 276165 - RNA, 32 nt, Human
uugguucuaguauuaauaaagaaaaauguuau

SEQ ID NO: 276166 - RNA, 32 nt, Human
uugguucuccagcguagacuccugggagcagc

SEQ ID NO: 276167 - RNA, 32 nt, Human
uugguucucccaggagcucagggccugucaga

SEQ ID NO: 276168 - RNA, 32 nt, Human
uugguucuccccucccuucccuggccggcugc

SEQ ID NO: 276169 - RNA, 32 nt, Human
uugguucuccuggauguuuugcucuguuuuga

SEQ ID NO: 276170 - RNA, 32 nt, Human
uugguucugaggccugguuugcucuuaauuaa

SEQ ID NO: 276171 - RNA, 32 nt, Human
uugguucugccucuggcaugcugguagacuag

SEQ ID NO: 276172 - RNA, 28 nt, Human
uugguucugggaggggugagggaugggg

SEQ ID NO: 276173 - RNA, 32 nt, Human
uugguucuuacuuugcugcucguuuagucccu

SEQ ID NO: 276174 - RNA, 32 nt, Human
uugguucuuaguucuuaaagaaucaagaaguu

SEQ ID NO: 276175 - RNA, 32 nt, Human
uugguucuuuugacuuugcucuucugguagag

SEQ ID NO: 276176 - RNA, 32 nt, Human
uugguugaaagaagcgcagggaagagacuggg

SEQ ID NO: 276177 - RNA, 32 nt, Human
uugguugaaaucugaaauguacugucccaaua

SEQ ID NO: 276178 - RNA, 32 nt, Human
uugguugaacccaggaggcggagguugcagug

SEQ ID NO: 276179 - RNA, 32 nt, Human
uugguugaaugucuccagcacuaugcaucccu

SEQ ID NO: 276180 - RNA, 32 nt, Human
uugguugagcuuaggagguugaggcugcagug

SEQ ID NO: 276181 - RNA, 21 nt, Human
uugguugaggaaacaaacaug

SEQ ID NO: 276182 - RNA, 32 nt, Human
uugguugaggggauggaggaauguuuucgggg

SEQ ID NO: 276183 - RNA, 32 nt, Human
uugguugauauaacacaaagagauauuuagga

SEQ ID NO: 276184 - RNA, 32 nt, Human
uugguuggcacuuucaccucagcacuuaccua

SEQ ID NO: 276185 - RNA, 32 nt, Human
uugguugggcagaguggcaggagcaugggcac

SEQ ID NO: 276186 - RNA, 32 nt, Human
uugguugggccugugucacauccaggcagcca

SEQ ID NO: 276187 - RNA, 32 nt, Human
uugguuggugauuuugaugauagccacaaagc

SEQ ID NO: 276188 - RNA, 32 nt, Human
uugguuggugggcgccuguaaucccagcuagg

SEQ ID NO: 276189 - RNA, 32 nt, Human
uugguugucacaccuagggagaugcuauuggg

SEQ ID NO: 276190 - RNA, 31 nt, Human
uugguugugcuuuauauuugccaaaguccua

SEQ ID NO: 276191 - RNA, 32 nt, Human
uugguuguuuguuguuguugcauugcaguucu

SEQ ID NO: 276192 - RNA, 32 nt, Human
uugguuuaagaaagauuuucauacuuaaaaga

SEQ ID NO: 276193 - RNA, 32 nt, Human
uugguuuaaguucaaaugaaugaaacaacuau

SEQ ID NO: 276194 - RNA, 32 nt, Human
uugguuuaauaaucagaaaauauucaauacag

SEQ ID NO: 276195 - RNA, 32 nt, Human
uugguuuacacaauauuuuuaaugucuuaaaa

SEQ ID NO: 276196 - RNA, 32 nt, Human
uugguuuacagaaccggcguuucagauguuua

SEQ ID NO: 276197 - RNA, 32 nt, Human
uugguuuacuccugcacuugucuuacucauuc

SEQ ID NO: 276198 - RNA, 32 nt, Human
uugguuuacugcaaccuccaccuccuaggcuc

SEQ ID NO: 276199 - RNA, 32 nt, Human
uugguuuaucuucuguucuuccuaccuugugc

SEQ ID NO: 276200 - RNA, 32 nt, Human
uugguuuauuuuucaaugcaucuuuaauuugu

SEQ ID NO: 276201 - RNA, 32 nt, Human
uugguuuauuuuugagagugggguaagcaccc

SEQ ID NO: 276202 - RNA, 18 nt, Human
uugguuucacuggauuuu

SEQ ID NO: 276203 - RNA, 32 nt, Human
uugguuucagaaugagaggucacgccagcuga

SEQ ID NO: 276204 - RNA, 32 nt, Human
uugguuucauauugaauaaaucauugccaaau

SEQ ID NO: 276205 - RNA, 32 nt, Human
uugguuucauucuugcaguugccauacagugc

SEQ ID NO: 276206 - RNA, 32 nt, Human
uugguuucccaaaguguugggauuacaggcau

SEQ ID NO: 276207 - RNA, 32 nt, Human
uugguuuccuggaugcugacugugaagauucu

SEQ ID NO: 276208 - RNA, 18 nt, Human
uugguuucugagggcuuu

SEQ ID NO: 276209 - RNA, 32 nt, Human
uugguuucuggugaggccucucuccuuggcuu

SEQ ID NO: 276210 - RNA, 18 nt, Human
uugguuucuugcccccuu

SEQ ID NO: 276211 - RNA, 32 nt, Human
uugguuucuuuugagcccucucuccuuaacuu

SEQ ID NO: 276212 - RNA, 18 nt, Human
uugguuucuuuuggcuuu

SEQ ID NO: 276213 - RNA, 20 nt, Human
uugguuugccauggguacuu

SEQ ID NO: 276214 - RNA, 32 nt, Human
uugguuugcuaccacauaaagccaugcuguuu

SEQ ID NO: 276215 - RNA, 32 nt, Human
uugguuugcuuuguggcaugugcacuguuuuu

SEQ ID NO: 276216 - RNA, 32 nt, Human
uugguuugggucugcauugccauagugcccga

SEQ ID NO: 276217 - RNA, 21 nt, Human
uugguuuguaauuugggaccu

SEQ ID NO: 276218 - RNA, 32 nt, Human
uugguuugucaagccacaucuguaggaauguu

SEQ ID NO: 276219 - RNA, 32 nt, Human
uugguuuuauuugucaucuagucucaaguaua

SEQ ID NO: 276220 - RNA, 32 nt, Human
uugguuuucacugucucugucucaucuaguac

SEQ ID NO: 276221 - RNA, 20 nt, Human
uugguuuucagcuggggcuu

SEQ ID NO: 276222 - RNA, 32 nt, Human
uugguuuucauuucucuucuucacugccuuuu

SEQ ID NO: 276223 - RNA, 19 nt, Human
uugguuuuccaugggaucu

SEQ ID NO: 276224 - RNA, 32 nt, Human
uugguuuuccucuguuuuuaaacaucuuaggu

SEQ ID NO: 276225 - RNA, 18 nt, Human
uugguuuuccuguaccuu

SEQ ID NO: 276226 - RNA, 32 nt, Human
uugguuuuccuguaggcuggaaguaaaaaugu

SEQ ID NO: 276227 - RNA, 32 nt, Human
uugguuuuccuugcagucgccugcugcugucg

SEQ ID NO: 276228 - RNA, 20 nt, Human
uugguuuucuaaggggcuuu

SEQ ID NO: 276229 - RNA, 23 nt, Human
uugguuuucuccaggaaugaagu

SEQ ID NO: 276230 - RNA, 22 nt, Human
uugguuuucugggcuggggccu

SEQ ID NO: 276231 - RNA, 16 nt, Human
uugguuuucuguccuu

SEQ ID NO: 276232 - RNA, 32 nt, Human
uugguuuucuucuucucguccucguuuguguu

SEQ ID NO: 276233 - RNA, 18 nt, Human
uugguuuugggaagccug

SEQ ID NO: 276234 - RNA, 20 nt, Human
uugguuuuggugguggcuuu

SEQ ID NO: 276235 - RNA, 32 nt, Human
uugguuuuguguccuuuuuauuugcaguuuuu

SEQ ID NO: 276236 - RNA, 32 nt, Human
uugguuuuguuuucccagaggcugccauaugg

SEQ ID NO: 276237 - RNA, 32 nt, Human
uugguuuuuaugcaaccuauggucaugcaggg

SEQ ID NO: 276238 - RNA, 32 nt, Human
uugguuuuugagaaggaaugaagugggaacca

SEQ ID NO: 276239 - RNA, 18 nt, Human
uugguuuuuuggagucuu

SEQ ID NO: 276240 - RNA, 32 nt, Human
uuguaaaaacaaacauacuuguggggucugau

SEQ ID NO: 276241 - RNA, 32 nt, Human
uuguaaaaacuuggccccagaugcuugucccu

SEQ ID NO: 276242 - RNA, 32 nt, Human
uuguaaaaagagacuguuuugggggaaugggg

SEQ ID NO: 276243 - RNA, 32 nt, Human
uuguaaaaaguggacucagcuaggauguuaca

SEQ ID NO: 276244 - RNA, 32 nt, Human
uuguaaaacauauggggcaacaggaggcauug

SEQ ID NO: 276245 - RNA, 31 nt, Human
uuguaaaagagaccucuggggccgagugugg

SEQ ID NO: 276246 - RNA, 32 nt, Human
uuguaaaaguggauuccucaggauaugugaaa

SEQ ID NO: 276247 - RNA, 32 nt, Human
uuguaaaauacugugaacuaaccgcagagcug

SEQ ID NO: 276248 - RNA, 32 nt, Human
uuguaaaauagaaaaaguggaguuggugaauc

SEQ ID NO: 276249 - RNA, 32 nt, Human
uuguaaaauuuugccucucagaagaauggaau

SEQ ID NO: 276250 - RNA, 32 nt, Human
uuguaaacaaauucuaaugggcaaaauaucuu

SEQ ID NO: 276251 - RNA, 32 nt, Human
uuguaaacagaggagaaagggaaagaguacaa

SEQ ID NO: 276252 - RNA, 32 nt, Human
uuguaaaccugacaugguacugugcaucuauu

SEQ ID NO: 276253 - RNA, 32 nt, Human
uuguaaaccuucauucuuacuaguuucauucu

SEQ ID NO: 276254 - RNA, 32 nt, Human
uuguaaacucugcugcuucccaacacaacuag

SEQ ID NO: 276255 - RNA, 32 nt, Human
uuguaaacuugucgcuuuuugauaugauuuuc

SEQ ID NO: 276256 - RNA, 32 nt, Human
uuguaaagaaaauaccaguguuucucauccca

SEQ ID NO: 276257 - RNA, 32 nt, Human
uuguaaagcacaaauuaucugccuuaaagggg

SEQ ID NO: 276258 - RNA, 32 nt, Human
uuguaaagcugcauauucacugaauggauccu

SEQ ID NO: 276259 - RNA, 32 nt, Human
uuguaaagcuggaaccaaguuugcauuuuuga

SEQ ID NO: 276260 - RNA, 32 nt, Human
uuguaaaggacacucauuguugccaagaguuu

SEQ ID NO: 276261 - RNA, 32 nt, Human
uuguaaagggaagaucaaagagccagaagucg

SEQ ID NO: 276262 - RNA, 21 nt, Human
uuguaaauagcacuaguuaga

SEQ ID NO: 276263 - RNA, 32 nt, Human
uuguaaauagcaucuauguuacacucuccuag

SEQ ID NO: 276264 - RNA, 32 nt, Human
uuguaaaugaacauaaugaacagaauuuauga

SEQ ID NO: 276265 - RNA, 32 nt, Human
uuguaaauggcaaaguuuguuuugagguuuuu

SEQ ID NO: 276266 - RNA, 32 nt, Human
uuguaaaugucaguaaucacuucaugaaugcu

SEQ ID NO: 276267 - RNA, 32 nt, Human
uuguaaauguggcagugaugacugaagacuuu

SEQ ID NO: 276268 - RNA, 32 nt, Human
uuguaacaaugauaguugucuccuucaguauu

SEQ ID NO: 276269 - RNA, 32 nt, Human
uuguaacaauugcuucagccuacguuauaaau

SEQ ID NO: 276270 - RNA, 32 nt, Human
uuguaacaggaaauauucuauugaugcuacaa

SEQ ID NO: 276271 - RNA, 24 nt, Human
uuguaacccaggcuggaaugcaau

SEQ ID NO: 276272 - RNA, 32 nt, Human
uuguaacccaggcuggaaugcaauggcaugau

SEQ ID NO: 276273 - RNA, 32 nt, Human
uuguaacccuuguggguugcuaauaaccaagc

SEQ ID NO: 276274 - RNA, 32 nt, Human
uuguaaccuauguaugagaaagggauuuucug

SEQ ID NO: 276275 - RNA, 32 nt, Human
uuguaaccucaagugaugcucccaccucagcc

SEQ ID NO: 276276 - RNA, 32 nt, Human
uuguaacgugacugaaguugaguuuaaguagg

SEQ ID NO: 276277 - RNA, 32 nt, Human
uuguaacucacugcagccugaaacuccuuggc

SEQ ID NO: 276278 - RNA, 32 nt, Human
uuguaacucaugggcuauuccuaagugcccau

SEQ ID NO: 276279 - RNA, 32 nt, Human
uuguaacuccagccugggcaacagagugagac

SEQ ID NO: 276280 - RNA, 32 nt, Human
uuguaacucuuugcuauggcuuuuguuaucac

SEQ ID NO: 276281 - RNA, 32 nt, Human
uuguaacugcaaccugcagaaucaaauuuagg

SEQ ID NO: 276282 - RNA, 32 nt, Human
uuguaacuguaaucccaguuauaggggaggcu

SEQ ID NO: 276283 - RNA, 32 nt, Human
uuguaacuuguucugguaauguccuucccgga

SEQ ID NO: 276284 - RNA, 32 nt, Human
uuguaacuuuuuaaaugucuauagcacugaag

SEQ ID NO: 276285 - RNA, 32 nt, Human
uuguaagaaauccugugccuuccccuuugagc

SEQ ID NO: 276286 - RNA, 32 nt, Human
uuguaagacaacacucauucuaggugauucug

SEQ ID NO: 276287 - RNA, 32 nt, Human
uuguaagacaccagucuauggaauucuguuac

SEQ ID NO: 276288 - RNA, 32 nt, Human
uuguaagagagugaggaauacagugauaguaa

SEQ ID NO: 276289 - RNA, 32 nt, Human
uuguaagagauccugcaaauaucuucuuucca

SEQ ID NO: 276290 - RNA, 32 nt, Human
uuguaagaucuggugacuggcuuuucguucug

SEQ ID NO: 276291 - RNA, 32 nt, Human
uuguaagauggauuucacccccaggccaaugc

SEQ ID NO: 276292 - RNA, 32 nt, Human
uuguaagauuauguuuuacuuaucucaaagga

SEQ ID NO: 276293 - RNA, 32 nt, Human
uuguaagcaaaaaguuauuuuuauauuauaua

SEQ ID NO: 276294 - RNA, 32 nt, Human
uuguaagcagaacucuagcuauaugggguaga

SEQ ID NO: 276295 - RNA, 32 nt, Human
uuguaagccccuuccuuccucccuugcccaaa

SEQ ID NO: 276296 - RNA, 32 nt, Human
uuguaagcccuuaaaagggcuaggaauuucuu

SEQ ID NO: 276297 - RNA, 32 nt, Human
uuguaagccuaaaagugauucuuugaaaguuu

SEQ ID NO: 276298 - RNA, 32 nt, Human
uuguaagccugagaucaauaagaaauguucag

SEQ ID NO: 276299 - RNA, 32 nt, Human
uuguaagccuuucaacagcagcaucaaccuac

SEQ ID NO: 276300 - RNA, 19 nt, Human
uuguaagcucccugggcca

SEQ ID NO: 276301 - RNA, 32 nt, Human
uuguaaggacagugccugggaacugguguagc

SEQ ID NO: 276302 - RNA, 32 nt, Human
uuguaaggcugaggcgaguggaucacuugagg

SEQ ID NO: 276303 - RNA, 32 nt, Human
uuguaagggagacacugacuccagccaagaaa

SEQ ID NO: 276304 - RNA, 32 nt, Human
uuguaagguucuggggcagggagggagcauga

SEQ ID NO: 276305 - RNA, 32 nt, Human
uuguaaguaauuuggaaaguggugugaaauag

SEQ ID NO: 276306 - RNA, 32 nt, Human
uuguaaguaauuuuauaaaauccaccuccucc

SEQ ID NO: 276307 - RNA, 32 nt, Human
uuguaaguaggcuggauaaauggugcuuaaau

SEQ ID NO: 276308 - RNA, 32 nt, Human
uuguaagucugcauuuuuguauaucggguuua

SEQ ID NO: 276309 - RNA, 32 nt, Human
uuguaaguuauucugccaccaccuaacaggac

SEQ ID NO: 276310 - RNA, 32 nt, Human
uuguaauaaagugugauggaaaauccagguaa

SEQ ID NO: 276311 - RNA, 32 nt, Human
uuguaauacugauacaguuuggcugugucccc

SEQ ID NO: 276312 - RNA, 32 nt, Human
uuguaauaguacauugucucuacaaagcaccc

SEQ ID NO: 276313 - RNA, 31 nt, Human
uuguaauauuguccugggccuguguuggggu

SEQ ID NO: 276314 - RNA, 32 nt, Human
uuguaaucacaggggcuaccucccaggaaacc

SEQ ID NO: 276315 - RNA, 32 nt, Human
uuguaauccagugcccuacaaaggcuagaaca

SEQ ID NO: 276316 - RNA, 32 nt, Human
uuguaaucccagcuacucccaaggcugaggca

SEQ ID NO: 276317 - RNA, 32 nt, Human
uuguaaucucugaggagaagcagcagcaaaca

SEQ ID NO: 276318 - RNA, 31 nt, Human
uuguaaucugauuuucagccugugucgauac

SEQ ID NO: 276319 - RNA, 32 nt, Human
uuguaaugugguugcugcugaaggaggaggca

SEQ ID NO: 276320 - RNA, 32 nt, Human
uuguaauguguaugucugguaaauagguauua

SEQ ID NO: 276321 - RNA, 32 nt, Human
uuguaauuaacucuuuguuucccuucauaaaa

SEQ ID NO: 276322 - RNA, 32 nt, Human
uuguaauuaagauuauucuggccaggugcggu

SEQ ID NO: 276323 - RNA, 32 nt, Human
uuguaauuuauaguaaucggaggggaaaacac

SEQ ID NO: 276324 - RNA, 32 nt, Human
uuguaauuuuaguauuuguauuaauaucaggg

SEQ ID NO: 276325 - RNA, 32 nt, Human
uuguacaaaagcuucaaucagaaucacugugc

SEQ ID NO: 276326 - RNA, 32 nt, Human
uuguacaaacgaugugcuuugaagauguuagu

SEQ ID NO: 276327 - RNA, 31 nt, Human
uuguacaaguuccuucuuacauucuuucccu

SEQ ID NO: 276328 - RNA, 32 nt, Human
uuguacaauauguuguaaaauguagaucauag

SEQ ID NO: 276329 - RNA, 32 nt, Human
uuguacaauauugcaaaaauucaugcuugaga

SEQ ID NO: 276330 - RNA, 32 nt, Human
uuguacacaaauuuucuuuucucaguuuuaua

SEQ ID NO: 276331 - RNA, 20 nt, Human
uuguacacacugcccccuca

SEQ ID NO: 276332 - RNA, 32 nt, Human
uuguacaccauggaaaccccaucccugcuccu

SEQ ID NO: 276333 - RNA, 32 nt, Human
uuguacacugaacugcgcugcguguaugugaa

SEQ ID NO: 276334 - RNA, 32 nt, Human
uuguacagauaaucagaagaugauacugaaua

SEQ ID NO: 276335 - RNA, 32 nt, Human
uuguacagauacaagcaaagguuuaauaaaua

SEQ ID NO: 276336 - RNA, 32 nt, Human
uuguacagauggggucuugcuauguugcccaa

SEQ ID NO: 276337 - RNA, 32 nt, Human
uuguacagggaaauggugguuuacuuacaaau

SEQ ID NO: 276338 - RNA, 32 nt, Human
uuguacagggucgucacucagcagaucgagga

SEQ ID NO: 276339 - RNA, 32 nt, Human
uuguacaguauguaggagcaggagaacuuugu

SEQ ID NO: 276340 - RNA, 32 nt, Human
uuguacagugccuggcacucugggugcucaau

SEQ ID NO: 276341 - RNA, 32 nt, Human
uuguacagugccuggcacucugugggugcuca

SEQ ID NO: 276342 - RNA, 32 nt, Human
uuguacauacaaaaucaugucugcaaauagga

SEQ ID NO: 276343 - RNA, 19 nt, Human
uuguacauacuugcacaca

SEQ ID NO: 276344 - RNA, 32 nt, Human
uuguacauaugggaggagggggcagauuccug

SEQ ID NO: 276345 - RNA, 32 nt, Human
uuguacaucucuauuguaauguuuccaguugg

SEQ ID NO: 276346 - RNA, 32 nt, Human
uuguacauguaccaccucccuuuccucuuacu

SEQ ID NO: 276347 - RNA, 32 nt, Human
uuguacauguaccugacuggggucauugugua

SEQ ID NO: 276348 - RNA, 32 nt, Human
uuguacaugugcagaagaauaaggcagcugag

SEQ ID NO: 276349 - RNA, 32 nt, Human
uuguacaugugcuuuaacucugggugaaaaac

SEQ ID NO: 276350 - RNA, 27 nt, Human
uuguacauuauuuguuguccuuuacua

SEQ ID NO: 276351 - RNA, 23 nt, Human
uuguacauuuuuaaauucuuacu

SEQ ID NO: 276352 - RNA, 26 nt, Human
uuguacauuuuuuaugaaaguuacua

SEQ ID NO: 276353 - RNA, 32 nt, Human
uuguaccaaaaaccuugugaggagguggggga

SEQ ID NO: 276354 - RNA, 32 nt, Human
uuguaccaaauuuaaugaacgcguguucugua

SEQ ID NO: 276355 - RNA, 32 nt, Human
uuguaccaaggcaucuccuacucuccauuuau

SEQ ID NO: 276356 - RNA, 32 nt, Human
uuguaccaaguggagcaggugguugcgggcaa

SEQ ID NO: 276357 - RNA, 32 nt, Human
uuguaccaauucagguagaaguagaggccuac

SEQ ID NO: 276358 - RNA, 32 nt, Human
uuguaccaccagcugcugucacugucagagug

SEQ ID NO: 276359 - RNA, 32 nt, Human
uuguaccacugcacuccaaccuggguuacagc

SEQ ID NO: 276360 - RNA, 32 nt, Human
uuguaccacugcacuccagccuggcugacagu

SEQ ID NO: 276361 - RNA, 32 nt, Human
uuguaccacugcacuccagccugggcaacaga

SEQ ID NO: 276362 - RNA, 32 nt, Human
uuguaccacugcacuccagccugggcgacaga

SEQ ID NO: 276363 - RNA, 32 nt, Human
uuguaccacugcacuccagccugggugacaga

SEQ ID NO: 276364 - RNA, 32 nt, Human
uuguaccacugcacuccagccuggucaaugga

SEQ ID NO: 276365 - RNA, 32 nt, Human
uuguaccacugcacuccagcucggggaacaga

SEQ ID NO: 276366 - RNA, 32 nt, Human
uuguaccacugcacuccagucugggcaacaga

SEQ ID NO: 276367 - RNA, 32 nt, Human
uuguaccacugcacuccaguuuggcaacagag

SEQ ID NO: 276368 - RNA, 32 nt, Human
uuguaccacuguacuccagccugggcuggaca

SEQ ID NO: 276369 - RNA, 32 nt, Human
uuguaccacuguauuccagccuggacgacuga

SEQ ID NO: 276370 - RNA, 18 nt, Human
uuguaccaggcugcgugu

SEQ ID NO: 276371 - RNA, 32 nt, Human
uuguaccagguaauuuuugccggggaugggua

SEQ ID NO: 276372 - RNA, 21 nt, Human
uuguaccaugaaauauccaga

SEQ ID NO: 276373 - RNA, 32 nt, Human
uuguaccaugcacuccagccuggguaacagag

SEQ ID NO: 276374 - RNA, 32 nt, Human
uuguaccauggcacuccagccuggacaacaag

SEQ ID NO: 276375 - RNA, 32 nt, Human
uuguaccauugcacuccagccugggcaacaag

SEQ ID NO: 276376 - RNA, 32 nt, Human
uuguaccauugcacuccagccugggcaacaga

SEQ ID NO: 276377 - RNA, 32 nt, Human
uuguacccagauagcugggauuggaagugagg

SEQ ID NO: 276378 - RNA, 32 nt, Human
uuguacccaggaggcagagauugcagugagcu

SEQ ID NO: 276379 - RNA, 32 nt, Human
uuguacccaggaggcggagguuguagugagcu

SEQ ID NO: 276380 - RNA, 32 nt, Human
uuguacccaggagguggagguugcagugagcc

SEQ ID NO: 276381 - RNA, 32 nt, Human
uuguacccaggagguggagguugcggugaacu

SEQ ID NO: 276382 - RNA, 32 nt, Human
uuguaccccagaaaaacuuuuccucccucuuc

SEQ ID NO: 276383 - RNA, 24 nt, Human
uuguaccccaggcuggagugcaau

SEQ ID NO: 276384 - RNA, 32 nt, Human
uuguaccccaggcuggagugcaauggcgugau

SEQ ID NO: 276385 - RNA, 32 nt, Human
uuguaccccaugaccugagguaaagaaaauaa

SEQ ID NO: 276386 - RNA, 32 nt, Human
uuguacccccuuccacuucgucuccccuagcu

SEQ ID NO: 276387 - RNA, 32 nt, Human
uuguacccguaaucccagcacuuugggaggcc

SEQ ID NO: 276388 - RNA, 23 nt, Human
uuguacccuggccagcgcaugua

SEQ ID NO: 276389 - RNA, 32 nt, Human
uuguaccucuagucccagcuacuugggaggcu

SEQ ID NO: 276390 - RNA, 21 nt, Human
uuguaccugcagcuccugcca

SEQ ID NO: 276391 - RNA, 32 nt, Human
uuguaccugcagcuccugccauuucucauugg

SEQ ID NO: 276392 - RNA, 32 nt, Human
uuguaccugcugguauuagcucugccuccuuu

SEQ ID NO: 276393 - RNA, 32 nt, Human
uuguaccuguccagcccugcccuguguugggc

SEQ ID NO: 276394 - RNA, 32 nt, Human
uuguacgcuuuucaccccacccccaaguccug

SEQ ID NO: 276395 - RNA, 32 nt, Human
uuguacuaaaucagauuugccauguccaguac

SEQ ID NO: 276396 - RNA, 32 nt, Human
uuguacuaugacuaaaugaaauuauuucuuac

SEQ ID NO: 276397 - RNA, 32 nt, Human
uuguacucaccaggcuggagugugguagcacg

SEQ ID NO: 276398 - RNA, 32 nt, Human
uuguacucacucacccuaccuccagggcauag

SEQ ID NO: 276399 - RNA, 32 nt, Human
uuguacucaggagucugacuccuggguucuag

SEQ ID NO: 276400 - RNA, 32 nt, Human
uuguacuccagccuggacaacaagagcgaaac

SEQ ID NO: 276401 - RNA, 32 nt, Human
uuguacuccagccuggcaacagagcgagacuc

SEQ ID NO: 276402 - RNA, 32 nt, Human
uuguacuccagccugggcaacaagagugaaac

SEQ ID NO: 276403 - RNA, 32 nt, Human
uuguacuccagccugggcaacaagagugaaau

SEQ ID NO: 276404 - RNA, 32 nt, Human
uuguacuccagccugggcgacaaaagugaaac

SEQ ID NO: 276405 - RNA, 32 nt, Human
uuguacuccgcaccccagaugaucuccaggca

SEQ ID NO: 276406 - RNA, 22 nt, Human
uuguacuccuacacaccuugcu

SEQ ID NO: 276407 - RNA, 32 nt, Human
uuguacugagacaaauuuucauuguuauuuuu

SEQ ID NO: 276408 - RNA, 32 nt, Human
uuguacugcuucuguggcucuucacagaccuc

SEQ ID NO: 276409 - RNA, 32 nt, Human
uuguacuggccccauccucuccucacuguaau

SEQ ID NO: 276410 - RNA, 32 nt, Human
uuguacugugggcucagaaaccgugagagagc

SEQ ID NO: 276411 - RNA, 32 nt, Human
uuguacugugggggccauacugucuguugaca

SEQ ID NO: 276412 - RNA, 32 nt, Human
uuguacuucaaaauauauuuaguaugauuguu

SEQ ID NO: 276413 - RNA, 32 nt, Human
uuguacuucagaaugacugaaacccauauacc

SEQ ID NO: 276414 - RNA, 22 nt, Human
uuguacuuuaaauguaaauuca

SEQ ID NO: 276415 - RNA, 32 nt, Human
uuguacuuucuaugccucccagggagccacgu

SEQ ID NO: 276416 - RNA, 32 nt, Human
uuguacuuucucuuuauuucucagccagcuga

SEQ ID NO: 276417 - RNA, 32 nt, Human
uuguacuuucuggauuccaucuggaccugguu

SEQ ID NO: 276418 - RNA, 32 nt, Human
uuguacuuuucacucacuauuucacuuuauua

SEQ ID NO: 276419 - RNA, 32 nt, Human
uuguacuuuuuguuccagagcugcuucugucu

SEQ ID NO: 276420 - RNA, 32 nt, Human
uuguagaaaagcuuccuaaccaucgagauuac

SEQ ID NO: 276421 - RNA, 32 nt, Human
uuguagaaacaggauuucgccauguuggccag

SEQ ID NO: 276422 - RNA, 32 nt, Human
uuguagaaacagggucucaccauguuguccag

SEQ ID NO: 276423 - RNA, 32 nt, Human
uuguagaaaugggguuucaccauguuguccag

SEQ ID NO: 276424 - RNA, 32 nt, Human
uuguagaaaugggguuucgccauguugcucag

SEQ ID NO: 276425 - RNA, 32 nt, Human
uuguagaaugucgugcugucaccagaaagcug

SEQ ID NO: 276426 - RNA, 32 nt, Human
uuguagacacgggguuucaccauguuggccag

SEQ ID NO: 276427 - RNA, 32 nt, Human
uuguagacagcaguuucccuauauuauuugga

SEQ ID NO: 276428 - RNA, 32 nt, Human
uuguagacaucuauaaauauaaaagggccugu

SEQ ID NO: 276429 - RNA, 32 nt, Human
uuguagaccuguaaaccuuccuucccuucuuc

SEQ ID NO: 276430 - RNA, 32 nt, Human
uuguagacugcuuuuggcaguauggucauuuu

SEQ ID NO: 276431 - RNA, 32 nt, Human
uuguagacuuucaccuggauuauugauauucu

SEQ ID NO: 276432 - RNA, 32 nt, Human
uuguagagacaagguuucacuauguugcccag

SEQ ID NO: 276433 - RNA, 32 nt, Human
uuguagagacaagguuuugccauguugcccag

SEQ ID NO: 276434 - RNA, 32 nt, Human
uuguagagacaggauuucaccauauuggccag

SEQ ID NO: 276435 - RNA, 32 nt, Human
uuguagagacagggcuucaccauguugccaag

SEQ ID NO: 276436 - RNA, 32 nt, Human
uuguagagacagggucucaccaugucacccag

SEQ ID NO: 276437 - RNA, 32 nt, Human
uuguagagacagggucucgccauguugcccag

SEQ ID NO: 276438 - RNA, 32 nt, Human
uuguagagacagggucuucccauguugcccag

SEQ ID NO: 276439 - RNA, 32 nt, Human
uuguagagacagggucuugccauguugcccug

SEQ ID NO: 276440 - RNA, 32 nt, Human
uuguagagacaggguuucaccauauuggccag

SEQ ID NO: 276441 - RNA, 32 nt, Human
uuguagagacaggguuucaccauguugcccag

SEQ ID NO: 276442 - RNA, 32 nt, Human
uuguagagacaggguuucaccauguuggccag

SEQ ID NO: 276443 - RNA, 32 nt, Human
uuguagagacaggguuucaccauguugguuag

SEQ ID NO: 276444 - RNA, 32 nt, Human
uuguagagacaggguuucgccauguugacgag

SEQ ID NO: 276445 - RNA, 32 nt, Human
uuguagagacaggguuucuccauguugcccaa

SEQ ID NO: 276446 - RNA, 32 nt, Human
uuguagagacaggguuuugccauguugcucag

SEQ ID NO: 276447 - RNA, 32 nt, Human
uuguagagacaggguuuugccauguuguccag

SEQ ID NO: 276448 - RNA, 32 nt, Human
uuguagagacgaaguuucaccauguuggccag

SEQ ID NO: 276449 - RNA, 32 nt, Human
uuguagagacgaggucccaccauguugcccag

SEQ ID NO: 276450 - RNA, 32 nt, Human
uuguagagacgagguuucaccauguugcccag

SEQ ID NO: 276451 - RNA, 32 nt, Human
uuguagagacgagguuucgccauguugcccag

SEQ ID NO: 276452 - RNA, 32 nt, Human
uuguagagacggagucucccuauguugccuag

SEQ ID NO: 276453 - RNA, 32 nt, Human
uuguagagacgggguuucaccauguuagccaa

SEQ ID NO: 276454 - RNA, 32 nt, Human
uuguagagacgggguuucaccauguugaccag

SEQ ID NO: 276455 - RNA, 32 nt, Human
uuguagagacgggguuucaccauguuguccag

SEQ ID NO: 276456 - RNA, 32 nt, Human
uuguagagacgggguuucacuguguugcccag

SEQ ID NO: 276457 - RNA, 32 nt, Human
uuguagagacgggguuucgccaaguugaccag

SEQ ID NO: 276458 - RNA, 32 nt, Human
uuguagagacgggguuucgccauguuacccag

SEQ ID NO: 276459 - RNA, 32 nt, Human
uuguagagacgggguuuugccauguugcccag

SEQ ID NO: 276460 - RNA, 32 nt, Human
uuguagagacggguuuucgccauguugccuca

SEQ ID NO: 276461 - RNA, 32 nt, Human
uuguagagacgguguuuugccauguuggccag

SEQ ID NO: 276462 - RNA, 32 nt, Human
uuguagagacuagguuucaccauguuguccag

SEQ ID NO: 276463 - RNA, 32 nt, Human
uuguagagacuggguuuugccauguugaccaa

SEQ ID NO: 276464 - RNA, 32 nt, Human
uuguagagaggggguuucacuauguugcucaa

SEQ ID NO: 276465 - RNA, 32 nt, Human
uuguagagaggguauuuugccauguugcccag

SEQ ID NO: 276466 - RNA, 32 nt, Human
uuguagagauaggguuucauuacauugcucag

SEQ ID NO: 276467 - RNA, 32 nt, Human
uuguagagaugaggagugccacuguguugccc

SEQ ID NO: 276468 - RNA, 32 nt, Human
uuguagagaugaggucucaccauguugcccag

SEQ ID NO: 276469 - RNA, 32 nt, Human
uuguagagaugaggucucccuauguugcccag

SEQ ID NO: 276470 - RNA, 32 nt, Human
uuguagagaugagguuucaccauauuggccag

SEQ ID NO: 276471 - RNA, 32 nt, Human
uuguagagaugagguuucaccuuguuggccag

SEQ ID NO: 276472 - RNA, 32 nt, Human
uuguagagauggagucucccuauguugcucag

SEQ ID NO: 276473 - RNA, 32 nt, Human
uuguagagauggaguuucaccacguuggucag

SEQ ID NO: 276474 - RNA, 32 nt, Human
uuguagagauggaguuucaccauguuggccag

SEQ ID NO: 276475 - RNA, 32 nt, Human
uuguagagaugggaucucacuauguugcucag

SEQ ID NO: 276476 - RNA, 32 nt, Human
uuguagagaugggaucucacucuguuguccag

SEQ ID NO: 276477 - RNA, 32 nt, Human
uuguagagaugggauuucaccauguuacucag

SEQ ID NO: 276478 - RNA, 32 nt, Human
uuguagagaugggauuuugccauguugcccag

SEQ ID NO: 276479 - RNA, 32 nt, Human
uuguagagauggggacuugcuauguugcccag

SEQ ID NO: 276480 - RNA, 32 nt, Human
uuguagagauggggaucuccuuauguugucca

SEQ ID NO: 276481 - RNA, 32 nt, Human
uuguagagaugggggucucacuauguugccca

SEQ ID NO: 276482 - RNA, 32 nt, Human
uuguagagauggggucucacaguguugcccag

SEQ ID NO: 276483 - RNA, 32 nt, Human
uuguagagauggggucucacuauguugcccag

SEQ ID NO: 276484 - RNA, 32 nt, Human
uuguagagauggggucucccuauguugcccag

SEQ ID NO: 276485 - RNA, 32 nt, Human
uuguagagauggggucucgccauguugcccgg

SEQ ID NO: 276486 - RNA, 32 nt, Human
uuguagagauggggucuugcuguguugcccag

SEQ ID NO: 276487 - RNA, 32 nt, Human
uuguagagauggggucuugcuuuguugcccag

SEQ ID NO: 276488 - RNA, 32 nt, Human
uuguagagaugggguuucacaauuuuggccag

SEQ ID NO: 276489 - RNA, 32 nt, Human
uuguagagaugggguuucaucacguugcccag

SEQ ID NO: 276490 - RNA, 32 nt, Human
uuguagagaugggguuucgccauguugaccag

SEQ ID NO: 276491 - RNA, 32 nt, Human
uuguagagaugggguuucgccauguugcccag

SEQ ID NO: 276492 - RNA, 32 nt, Human
uuguagagaugggguuucgcguguuggucagg

SEQ ID NO: 276493 - RNA, 32 nt, Human
uuguagagaugggguuucgucauguugcccag

SEQ ID NO: 276494 - RNA, 32 nt, Human
uuguagagaugggguuucuccauguauugccc

SEQ ID NO: 276495 - RNA, 32 nt, Human
uuguagagaugggguuucuccauguuggucag

SEQ ID NO: 276496 - RNA, 32 nt, Human
uuguagagaugggguuucuccuuauugcccag

SEQ ID NO: 276497 - RNA, 32 nt, Human
uuguagagaugggguuucucgauguuggccag

SEQ ID NO: 276498 - RNA, 32 nt, Human
uuguagagaugggguuucucuguguugcccag

SEQ ID NO: 276499 - RNA, 32 nt, Human
uuguagagaugggguuuugccauguugcccag

SEQ ID NO: 276500 - RNA, 32 nt, Human
uuguagagaugggguuuugccauguugcucag

SEQ ID NO: 276501 - RNA, 32 nt, Human
uuguagagaugggguuuugccguguugcccag

SEQ ID NO: 276502 - RNA, 32 nt, Human
uuguagagccaccauucaaagccaggcagucu

SEQ ID NO: 276503 - RNA, 32 nt, Human
uuguagagcuucuggcacuuggagacuuguau

SEQ ID NO: 276504 - RNA, 32 nt, Human
uuguagaggcgggguuucaccauguugcccag

SEQ ID NO: 276505 - RNA, 32 nt, Human
uuguagaggcgggguuucgccauguugcccag

SEQ ID NO: 276506 - RNA, 32 nt, Human
uuguagagggggauaaaaagaaaagaaauugg

SEQ ID NO: 276507 - RNA, 32 nt, Human
uuguagaggugggguuucaccauauugcccag

SEQ ID NO: 276508 - RNA, 32 nt, Human
uuguagagucaggguuucacccuguugcccac

SEQ ID NO: 276509 - RNA, 32 nt, Human
uuguagagucggagcuuuaccauguuggucag

SEQ ID NO: 276510 - RNA, 32 nt, Human
uuguagauugagcugaauaaccaugggaagug

SEQ ID NO: 276511 - RNA, 32 nt, Human
uuguagauuuucauaagccacaauuuuaaaag

SEQ ID NO: 276512 - RNA, 22 nt, Human
uuguagcaaaaguucugagagg

SEQ ID NO: 276513 - RNA, 32 nt, Human
uuguagcagagggaaaugagacaggaagaugc

SEQ ID NO: 276514 - RNA, 32 nt, Human
uuguagcagcuggucuugaagguggggcauau

SEQ ID NO: 276515 - RNA, 32 nt, Human
uuguagcaggucccgcacuccagccucucgcu

SEQ ID NO: 276516 - RNA, 32 nt, Human
uuguagcagucaggaacuaggcauaucaugcc

SEQ ID NO: 276517 - RNA, 32 nt, Human
uuguagcaugcugucugaauucugggguaagu

SEQ ID NO: 276518 - RNA, 32 nt, Human
uuguagcauuugacaaauuuuaugcuuagcag

SEQ ID NO: 276519 - RNA, 32 nt, Human
uuguagccaccugugcaccaugaccaugcugg

SEQ ID NO: 276520 - RNA, 32 nt, Human
uuguagccauuaaauuuugagacauuuuuguu

SEQ ID NO: 276521 - RNA, 32 nt, Human
uuguagcccaggaguuugagaacagccugggc

SEQ ID NO: 276522 - RNA, 24 nt, Human
uuguagcccaggcuggagugcaau

SEQ ID NO: 276523 - RNA, 32 nt, Human
uuguagcccaggcuggagugcaauggcaggau

SEQ ID NO: 276524 - RNA, 32 nt, Human
uuguagcccaggcugggaugcaauggcauggu

SEQ ID NO: 276525 - RNA, 32 nt, Human
uuguagccucaaacucccaggcucaagcaauc

SEQ ID NO: 276526 - RNA, 32 nt, Human
uuguagccucaaccucccaggcuccaagcagu

SEQ ID NO: 276527 - RNA, 32 nt, Human
uuguagcucacugcagccuccaacuccauggc

SEQ ID NO: 276528 - RNA, 32 nt, Human
uuguagcucacugcagucuucagccuccccag

SEQ ID NO: 276529 - RNA, 32 nt, Human
uuguagcucagagagcaccugauguaucaucu

SEQ ID NO: 276530 - RNA, 21 nt, Human
uuguagcuccugcuggcccca

SEQ ID NO: 276531 - RNA, 32 nt, Human
uuguagcucuggguaagaugaccugagucccu

SEQ ID NO: 276532 - RNA, 32 nt, Human
uuguagcuggggcucaguagucugggcuguga

SEQ ID NO: 276533 - RNA, 20 nt, Human
uuguagcuuugccccagcca

SEQ ID NO: 276534 - RNA, 32 nt, Human
uuguaggaaucccuuugagaaugugauuccuu

SEQ ID NO: 276535 - RNA, 32 nt, Human
uuguaggauacuugcuccauucauacacaacg

SEQ ID NO: 276536 - RNA, 32 nt, Human
uuguaggcagccacacuguguccucacauggc

SEQ ID NO: 276537 - RNA, 32 nt, Human
uuguaggcucuuccagccugaacccauggagu

SEQ ID NO: 276538 - RNA, 32 nt, Human
uuguagggaaagggagagcuuuugauuuuugu

SEQ ID NO: 276539 - RNA, 32 nt, Human
uuguagggagaagggcaggauguuuuuaacug

SEQ ID NO: 276540 - RNA, 32 nt, Human
uuguagggagcuaugaucuugccauugcacuc

SEQ ID NO: 276541 - RNA, 32 nt, Human
uuguagggaggcauccaguguggcaagaaacu

SEQ ID NO: 276542 - RNA, 32 nt, Human
uuguagggggauguuacuccuaaugucacagu

SEQ ID NO: 276543 - RNA, 32 nt, Human
uuguagggguagcauuuaagauucaggaguca

SEQ ID NO: 276544 - RNA, 32 nt, Human
uuguagggucgaggcccaggaggaaggggagg

SEQ ID NO: 276545 - RNA, 32 nt, Human
uuguaggugauauuuauuuucuucugaaacuu

SEQ ID NO: 276546 - RNA, 24 nt, Human
uuguaggugcccugccuggcccca

SEQ ID NO: 276547 - RNA, 32 nt, Human
uuguagguugcuuuuucuuccuccugggcaac

SEQ ID NO: 276548 - RNA, 32 nt, Human
uuguaguagccuuaaaauaaacuguuaaacac

SEQ ID NO: 276549 - RNA, 32 nt, Human
uuguaguaggcuucacuagcuuccugcuucuc

SEQ ID NO: 276550 - RNA, 32 nt, Human
uuguaguauucuauaaaagaaaacauggcuua

SEQ ID NO: 276551 - RNA, 32 nt, Human
uuguagucacaccacuucaguucugggcccua

SEQ ID NO: 276552 - RNA, 32 nt, Human
uuguaguccaagcacacacaaauagugccagg

SEQ ID NO: 276553 - RNA, 32 nt, Human
uuguagucccagcuacucaugaggcuuaaaug

SEQ ID NO: 276554 - RNA, 32 nt, Human
uuguagucguuuccucagccucaucucacugu

SEQ ID NO: 276555 - RNA, 32 nt, Human
uuguagucucugcuucugugaguucaucuuuc

SEQ ID NO: 276556 - RNA, 32 nt, Human
uuguagucuuccuuccuuccucucaggguaag

SEQ ID NO: 276557 - RNA, 32 nt, Human
uuguagugagugcuguuuuccaggagauggag

SEQ ID NO: 276558 - RNA, 32 nt, Human
uuguagugcugagagcaagagcugaucuagcu

SEQ ID NO: 276559 - RNA, 17 nt, Human
uuguagugcuucugcaa

SEQ ID NO: 276560 - RNA, 32 nt, Human
uuguaguggguaaagacaguucagagagaccu

SEQ ID NO: 276561 - RNA, 32 nt, Human
uuguagugucugccauggaacacagacagacc

SEQ ID NO: 276562 - RNA, 32 nt, Human
uuguaguguucuguauuuaucugcacuuugug

SEQ ID NO: 276563 - RNA, 32 nt, Human
uuguaguuaaugaugguugauggguucuaauu

SEQ ID NO: 276564 - RNA, 32 nt, Human
uuguaguuacaguaaauacacugugaagagac

SEQ ID NO: 276565 - RNA, 31 nt, Human
uuguaguucaauaaauuguggguugaacuac

SEQ ID NO: 276566 - RNA, 32 nt, Human
uuguaguugauugugucucaaaccaugaauua

SEQ ID NO: 276567 - RNA, 32 nt, Human
uuguaguuuagauuguaucucuugccuuguuc

SEQ ID NO: 276568 - RNA, 32 nt, Human
uuguauaaaaugcuauguguagagguuuuauu

SEQ ID NO: 276569 - RNA, 24 nt, Human
uuguauaacuuuuauucuuuauua

SEQ ID NO: 276570 - RNA, 32 nt, Human
uuguauacaggaaucuacaucccucugugacu

SEQ ID NO: 276571 - RNA, 32 nt, Human
uuguauacagggggcaccuguggccaggccuc

SEQ ID NO: 276572 - RNA, 32 nt, Human
uuguauacaguggccaaagacaugcuucugcu

SEQ ID NO: 276573 - RNA, 32 nt, Human
uuguauacaguuucaucacugcugucagcuau

SEQ ID NO: 276574 - RNA, 32 nt, Human
uuguauaccuuuccaccaauauagacauucua

SEQ ID NO: 276575 - RNA, 32 nt, Human
uuguauacuauuaaaaccagcacauaaguauu

SEQ ID NO: 276576 - RNA, 32 nt, Human
uuguauagaaauagauauuucuuucgagguuu

SEQ ID NO: 276577 - RNA, 32 nt, Human
uuguauagccccacagauuaaauuuaauuaau

SEQ ID NO: 276578 - RNA, 32 nt, Human
uuguauagggcuggggucaggagaggagaaua

SEQ ID NO: 276579 - RNA, 32 nt, Human
uuguauagugagagaggaggccuggaccgaga

SEQ ID NO: 276580 - RNA, 32 nt, Human
uuguauauaaagcaaauaagccagcagauggg

SEQ ID NO: 276581 - RNA, 32 nt, Human
uuguauauacaacuuuguauccugccuuuucc

SEQ ID NO: 276582 - RNA, 32 nt, Human
uuguauauacuaguuucuuucaugcuauuuuu

SEQ ID NO: 276583 - RNA, 32 nt, Human
uuguauauagggacugaccaugauucuccauu

SEQ ID NO: 276584 - RNA, 32 nt, Human
uuguauaugcuccucaugagaaaagcugaaga

SEQ ID NO: 276585 - RNA, 32 nt, Human
uuguauauguuccucaugagaaaagcugaaga

SEQ ID NO: 276586 - RNA, 32 nt, Human
uuguauauguuuugucccaguuguauaguaau

SEQ ID NO: 276587 - RNA, 32 nt, Human
uuguauauugcauauucacaugaucauugcuc

SEQ ID NO: 276588 - RNA, 32 nt, Human
uuguauauuuuugcagagauggaguuucacca

SEQ ID NO: 276589 - RNA, 32 nt, Human
uuguaucaauccauuuucacacugcuauaagg

SEQ ID NO: 276590 - RNA, 32 nt, Human
uuguaucaauuuaacauauaguaaggauaguu

SEQ ID NO: 276591 - RNA, 32 nt, Human
uuguaucagauacaaaauuuuagugagguauc

SEQ ID NO: 276592 - RNA, 32 nt, Human
uuguauccaacccuccaaaaggcagggacaag

SEQ ID NO: 276593 - RNA, 32 nt, Human
uuguauccacaguagacaaaauagcacuaauc

SEQ ID NO: 276594 - RNA, 32 nt, Human
uuguauccaguucaucaucaagaguggagagu

SEQ ID NO: 276595 - RNA, 24 nt, Human
uuguauccauguguaugcuuguua

SEQ ID NO: 276596 - RNA, 32 nt, Human
uuguauccucuccuuuuagaggcuuugcauuc

SEQ ID NO: 276597 - RNA, 32 nt, Human
uuguauccucugguucuucauuuauugagcac

SEQ ID NO: 276598 - RNA, 32 nt, Human
uuguauccuuaugcccacacugggagaggucu

SEQ ID NO: 276599 - RNA, 32 nt, Human
uuguaucgaccaauggcuuaucagccccagga

SEQ ID NO: 276600 - RNA, 32 nt, Human
uuguaucuauuauuacaugugcugcugaaggg

SEQ ID NO: 276601 - RNA, 32 nt, Human
uuguaucucaaaagcaaaaauguaauaaagga

SEQ ID NO: 276602 - RNA, 32 nt, Human
uuguaucucagucuaaggucucaugcuguugc

SEQ ID NO: 276603 - RNA, 32 nt, Human
uuguaucugaacacaugaaucuuuuugaucag

SEQ ID NO: 276604 - RNA, 32 nt, Human
uuguaucugcacuugcagccucagcuuucaua

SEQ ID NO: 276605 - RNA, 21 nt, Human
uuguaucugucuguucuggga

SEQ ID NO: 276606 - RNA, 32 nt, Human
uuguaucuuggcugucugguuuuauugcauuu

SEQ ID NO: 276607 - RNA, 32 nt, Human
uuguaucuuuaaguacugcuacuugaauaacu

SEQ ID NO: 276608 - RNA, 32 nt, Human
uuguaugaagcugaaaccuaucaacacucuuc

SEQ ID NO: 276609 - RNA, 32 nt, Human
uuguaugaauauccaccuccuuuaaauacucu

SEQ ID NO: 276610 - RNA, 32 nt, Human
uuguaugacugcacuccagccugggugacaga

SEQ ID NO: 276611 - RNA, 32 nt, Human
uuguaugagguccucaggucagcugggagcca

SEQ ID NO: 276612 - RNA, 32 nt, Human
uuguaugaguuguaaguaaucuugccaaaggu

SEQ ID NO: 276613 - RNA, 32 nt, Human
uuguaugauaaauagcuuucauuaauaaacau

SEQ ID NO: 276614 - RNA, 32 nt, Human
uuguaugcucuuaaucucaauuuugaagccag

SEQ ID NO: 276615 - RNA, 32 nt, Human
uuguaugcuggucuuuacuuuuugccaaaauc

SEQ ID NO: 276616 - RNA, 32 nt, Human
uuguauggcaugagcugccacuguucaaggca

SEQ ID NO: 276617 - RNA, 32 nt, Human
uuguauggcuuugguaggcauacuuggagaac

SEQ ID NO: 276618 - RNA, 32 nt, Human
uuguaugggagaaauuuuugaccuuagaaagu

SEQ ID NO: 276619 - RNA, 32 nt, Human
uuguauggucucaaaguuggaugaccucauua

SEQ ID NO: 276620 - RNA, 32 nt, Human
uuguaugguguuuccuuagccuaaagaaugau

SEQ ID NO: 276621 - RNA, 32 nt, Human
uuguauguaaagaauuugggaaagcauuugcu

SEQ ID NO: 276622 - RNA, 32 nt, Human
uuguauguaucuaagauaagacauauagaugc

SEQ ID NO: 276623 - RNA, 32 nt, Human
uuguauguauuuccuccuucuccuccucuuuc

SEQ ID NO: 276624 - RNA, 29 nt, Human
uuguaugucuucccaccucauggauguua

SEQ ID NO: 276625 - RNA, 32 nt, Human
uuguaugucuuggaugcaaguauugcuaaaua

SEQ ID NO: 276626 - RNA, 32 nt, Human
uuguaugugugugaugcuucucccaaagguau

SEQ ID NO: 276627 - RNA, 32 nt, Human
uuguaugugugugcauauaugugaacuguaac

SEQ ID NO: 276628 - RNA, 32 nt, Human
uuguauguuacuggcuaagucuuuggaaaaua

SEQ ID NO: 276629 - RNA, 32 nt, Human
uuguauguucucucugucacugacuuauuugu

SEQ ID NO: 276630 - RNA, 32 nt, Human
uuguauguucuguuguugcaggccaaguggca

SEQ ID NO: 276631 - RNA, 32 nt, Human
uuguauguuuucacugucacugagucaaaccu

SEQ ID NO: 276632 - RNA, 32 nt, Human
uuguauguuuugaaacucuuguauuuaugaua

SEQ ID NO: 276633 - RNA, 32 nt, Human
uuguauguuuuuauguggaugaagagcauuuu

SEQ ID NO: 276634 - RNA, 32 nt, Human
uuguauuaauugccuuugagguuauuuuccgc

SEQ ID NO: 276635 - RNA, 32 nt, Human
uuguauuacaucuguuuucuaguguuauucag

SEQ ID NO: 276636 - RNA, 32 nt, Human
uuguauuauucccccagcucucagggacaaga

SEQ ID NO: 276637 - RNA, 32 nt, Human
uuguauuauugaaagccuuggagaucucacag

SEQ ID NO: 276638 - RNA, 32 nt, Human
uuguauuauuuuuguagagacgguguuuugcc

SEQ ID NO: 276639 - RNA, 32 nt, Human
uuguauucaaaugacgauuauuuuucuacuca

SEQ ID NO: 276640 - RNA, 32 nt, Human
uuguauucccagccugugucccaugggcacaa

SEQ ID NO: 276641 - RNA, 32 nt, Human
uuguauucucuccuguaccucuugagccuuga

SEQ ID NO: 276642 - RNA, 32 nt, Human
uuguauucucucuuacacuguagccucaacua

SEQ ID NO: 276643 - RNA, 32 nt, Human
uuguauucugaaguccuucagcacuugauucc

SEQ ID NO: 276644 - RNA, 32 nt, Human
uuguauucugguccaugguggggaagacccug

SEQ ID NO: 276645 - RNA, 32 nt, Human
uuguauugaagguggugcuucuggccuuggcc

SEQ ID NO: 276646 - RNA, 32 nt, Human
uuguauugcuuauuuuauuaugagcuacaaca

SEQ ID NO: 276647 - RNA, 32 nt, Human
uuguauugcuucuguuucagugcaaaaaugua

SEQ ID NO: 276648 - RNA, 32 nt, Human
uuguauugcuuugcacaaaauuaggaacaggu

SEQ ID NO: 276649 - RNA, 32 nt, Human
uuguauuggcuuuugaggauugcacaugagca

SEQ ID NO: 276650 - RNA, 32 nt, Human
uuguauuguuaaugcaucaucauagaaaaacu

SEQ ID NO: 276651 - RNA, 32 nt, Human
uuguauuucaaagaaggugcugagggaucugu

SEQ ID NO: 276652 - RNA, 32 nt, Human
uuguauuugcaguggcugaggaauucuuguac

SEQ ID NO: 276653 - RNA, 32 nt, Human
uuguauuugcugcaucguaaugacaugaguac

SEQ ID NO: 276654 - RNA, 20 nt, Human
uuguauuuguaaggcuggug

SEQ ID NO: 276655 - RNA, 32 nt, Human
uuguauuuuauuuugcauaaucaugcccuuca

SEQ ID NO: 276656 - RNA, 32 nt, Human
uuguauuuucagucuucgccaggucauugaga

SEQ ID NO: 276657 - RNA, 19 nt, Human
uuguauuuugaugauuuca

SEQ ID NO: 276658 - RNA, 32 nt, Human
uuguauuuugcacaucagauguuuacuagugg

SEQ ID NO: 276659 - RNA, 32 nt, Human
uuguauuuuucauagagacuggguuucaccau

SEQ ID NO: 276660 - RNA, 27 nt, Human
uugucaaaaaucaggcuggagugcagu

SEQ ID NO: 276661 - RNA, 32 nt, Human
uugucaaaaaucaggcuggagugcaguggcau

SEQ ID NO: 276662 - RNA, 32 nt, Human
uugucaaaaggagacaaccacagauccuacag

SEQ ID NO: 276663 - RNA, 32 nt, Human
uugucaaaaggaugagaacaucaugaggucca

SEQ ID NO: 276664 - RNA, 32 nt, Human
uugucaaagauuguuguuggauuuuacacaca

SEQ ID NO: 276665 - RNA, 32 nt, Human
uugucaaauagcaaggccagggcacagcugga

SEQ ID NO: 276666 - RNA, 20 nt, Human
uugucaaaugaauucuucac

SEQ ID NO: 276667 - RNA, 32 nt, Human
uugucaacacagauucugcucucaccaauuua

SEQ ID NO: 276668 - RNA, 32 nt, Human
uugucaacacccuggcagcggggucuucaccu

SEQ ID NO: 276669 - RNA, 32 nt, Human
uugucaacacugcuguaugaagcacaaaagca

SEQ ID NO: 276670 - RNA, 32 nt, Human
uugucaacagcccagaaagagaaagacggaga

SEQ ID NO: 276671 - RNA, 32 nt, Human
uugucaaccacaggugaggacaaggacaggaa

SEQ ID NO: 276672 - RNA, 32 nt, Human
uugucaaccagauuggagugcaguggugcaau

SEQ ID NO: 276673 - RNA, 24 nt, Human
uugucaaccgggcuggagugcagu

SEQ ID NO: 276674 - RNA, 25 nt, Human
uugucaaccgggcuggagugcagug

SEQ ID NO: 276675 - RNA, 32 nt, Human
uugucaaccgggcuggagugcaguggugcaau

SEQ ID NO: 276676 - RNA, 32 nt, Human
uugucaacucugguuagaaacagguccucagg

SEQ ID NO: 276677 - RNA, 32 nt, Human
uugucaagaaugucccaguaaccaggggacac

SEQ ID NO: 276678 - RNA, 32 nt, Human
uugucaagaaugucucaguaaccaggggacac

SEQ ID NO: 276679 - RNA, 32 nt, Human
uugucaagacacacccuugggcuuaucuacag

SEQ ID NO: 276680 - RNA, 32 nt, Human
uugucaagagccaagacacagguaaugcacga

SEQ ID NO: 276681 - RNA, 32 nt, Human
uugucaagagccaguaagcagacagaugcuga

SEQ ID NO: 276682 - RNA, 32 nt, Human
uugucaagauggcugcgcugucccuuugaguu

SEQ ID NO: 276683 - RNA, 32 nt, Human
uugucaagcaauuuguccauguggaaagaauu

SEQ ID NO: 276684 - RNA, 32 nt, Human
uugucaauaacagguuuguuugugcuuugucc

SEQ ID NO: 276685 - RNA, 32 nt, Human
uugucaaugugcacuccuagcuuggugucuca

SEQ ID NO: 276686 - RNA, 24 nt, Human
uugucacaaaaggcugcuaaggaa

SEQ ID NO: 276687 - RNA, 32 nt, Human
uugucacaccuggaagcuuggugaauaauugg

SEQ ID NO: 276688 - RNA, 21 nt, Human
uugucacacugaggggacugg

SEQ ID NO: 276689 - RNA, 32 nt, Human
uugucacacuguacuguaauucccucugugcc

SEQ ID NO: 276690 - RNA, 32 nt, Human
uugucacacuugaguauaagcuaauuuauccu

SEQ ID NO: 276691 - RNA, 32 nt, Human
uugucacaucuucccaagccaggccagccagg

SEQ ID NO: 276692 - RNA, 32 nt, Human
uugucacauguucuccugguucuugaauuugc

SEQ ID NO: 276693 - RNA, 23 nt, Human
uugucaccaggcuggagugcagu

SEQ ID NO: 276694 - RNA, 24 nt, Human
uugucacccacgcuggagugcaau

SEQ ID NO: 276695 - RNA, 25 nt, Human
uugucacccacgcuggagugcaaug

SEQ ID NO: 276696 - RNA, 32 nt, Human
uugucacccacgcuggagugcaaugguguggu

SEQ ID NO: 276697 - RNA, 22 nt, Human
uugucacccagacuggagugcg

SEQ ID NO: 276698 - RNA, 24 nt, Human
uugucacccagacuggagugcgau

SEQ ID NO: 276699 - RNA, 25 nt, Human
uugucacccagacuggagugcgaug

SEQ ID NO: 276700 - RNA, 32 nt, Human
uugucacccagacuggagugcgauggcacgau

SEQ ID NO: 276701 - RNA, 24 nt, Human
uugucacccaggauggagugcagu

SEQ ID NO: 276702 - RNA, 32 nt, Human
uugucacccaggcaggagugcaguggcguuau

SEQ ID NO: 276703 - RNA, 32 nt, Human
uugucacccaggccggagugcaguggcaugau

SEQ ID NO: 276704 - RNA, 23 nt, Human
uugucacccaggcuagagugcag

SEQ ID NO: 276705 - RNA, 24 nt, Human
uugucacccaggcuagagugcagu

SEQ ID NO: 276706 - RNA, 25 nt, Human
uugucacccaggcuagagugcagug

SEQ ID NO: 276707 - RNA, 32 nt, Human
uugucacccaggcuagagugcaguggcacgau

SEQ ID NO: 276708 - RNA, 32 nt, Human
uugucacccaggcuagagugcaguggcaugau

SEQ ID NO: 276709 - RNA, 32 nt, Human
uugucacccaggcuagagugcaguggugcaau

SEQ ID NO: 276710 - RNA, 32 nt, Human
uugucacccaggcuggaaugcaguggcacaau

SEQ ID NO: 276711 - RNA, 24 nt, Human
uugucacccaggcuggacugcagu

SEQ ID NO: 276712 - RNA, 22 nt, Human
uugucacccaggcuggaguaca

SEQ ID NO: 276713 - RNA, 24 nt, Human
uugucacccaggcuggaguacaau

SEQ ID NO: 276714 - RNA, 25 nt, Human
uugucacccaggcuggaguacaaug

SEQ ID NO: 276715 - RNA, 32 nt, Human
uugucacccaggcuggaguacaaugaugcgau

SEQ ID NO: 276716 - RNA, 24 nt, Human
uugucacccaggcuggaguacagu

SEQ ID NO: 276717 - RNA, 25 nt, Human
uugucacccaggcuggaguacagug

SEQ ID NO: 276718 - RNA, 32 nt, Human
uugucacccaggcuggaguacaguggcacgau

SEQ ID NO: 276719 - RNA, 32 nt, Human
uugucacccaggcuggaguacaguggcaugau

SEQ ID NO: 276720 - RNA, 32 nt, Human
uugucacccaggcuggaguacaguggcgugau

SEQ ID NO: 276721 - RNA, 32 nt, Human
uugucacccaggcuggaguauaguggcacaaa

SEQ ID NO: 276722 - RNA, 24 nt, Human
uugucacccaggcuggaguccagu

SEQ ID NO: 276723 - RNA, 32 nt, Human
uugucacccaggcuggaguccaguggcacaau

SEQ ID NO: 276724 - RNA, 21 nt, Human
uugucacccaggcuggagugc

SEQ ID NO: 276725 - RNA, 22 nt, Human
uugucacccaggcuggagugca

SEQ ID NO: 276726 - RNA, 24 nt, Human
uugucacccaggcuggagugcaau

SEQ ID NO: 276727 - RNA, 25 nt, Human
uugucacccaggcuggagugcaaug

SEQ ID NO: 276728 - RNA, 32 nt, Human
uugucacccaggcuggagugcaauggcacaau

SEQ ID NO: 276729 - RNA, 32 nt, Human
uugucacccaggcuggagugcaauggcacgau

SEQ ID NO: 276730 - RNA, 32 nt, Human
uugucacccaggcuggagugcaauggcaugau

SEQ ID NO: 276731 - RNA, 32 nt, Human
uugucacccaggcuggagugcaauggcgcgau

SEQ ID NO: 276732 - RNA, 32 nt, Human
uugucacccaggcuggagugcaauggcgugau

SEQ ID NO: 276733 - RNA, 32 nt, Human
uugucacccaggcuggagugcaaugguguguu

SEQ ID NO: 276734 - RNA, 24 nt, Human
uugucacccaggcuggagugcagu

SEQ ID NO: 276735 - RNA, 32 nt, Human
uugucacccaggcuggagugcaguagugcgau

SEQ ID NO: 276736 - RNA, 25 nt, Human
uugucacccaggcuggagugcagug

SEQ ID NO: 276737 - RNA, 32 nt, Human
uugucacccaggcuggagugcaguggcacaau

SEQ ID NO: 276738 - RNA, 32 nt, Human
uugucacccaggcuggagugcaguggcacgau

SEQ ID NO: 276739 - RNA, 32 nt, Human
uugucacccaggcuggagugcaguggcaugau

SEQ ID NO: 276740 - RNA, 32 nt, Human
uugucacccaggcuggagugcaguggcgcaau

SEQ ID NO: 276741 - RNA, 32 nt, Human
uugucacccaggcuggagugcaguggcgccau

SEQ ID NO: 276742 - RNA, 32 nt, Human
uugucacccaggcuggagugcaguggcgcgau

SEQ ID NO: 276743 - RNA, 32 nt, Human
uugucacccaggcuggagugcaguggcucaau

SEQ ID NO: 276744 - RNA, 32 nt, Human
uugucacccaggcuggagugcaguggggcaau

SEQ ID NO: 276745 - RNA, 32 nt, Human
uugucacccaggcuggagugcaguggugcaau

SEQ ID NO: 276746 - RNA, 32 nt, Human
uugucacccaggcuggagugcaguggugugau

SEQ ID NO: 276747 - RNA, 32 nt, Human
uugucacccaggcuggagugcagugucgugau

SEQ ID NO: 276748 - RNA, 32 nt, Human
uugucacccaggcuggagugccauggcacgau

SEQ ID NO: 276749 - RNA, 32 nt, Human
uugucacccaggcuggagugcuguggugugau

SEQ ID NO: 276750 - RNA, 32 nt, Human
uugucacccaggcuggagugcugugguguuac

SEQ ID NO: 276751 - RNA, 24 nt, Human
uugucacccaggcuggaguguagu

SEQ ID NO: 276752 - RNA, 32 nt, Human
uugucacccaggcuggaguguaguggugugau

SEQ ID NO: 276753 - RNA, 32 nt, Human
uugucacccaggcuguagugcgguggcgcgau

SEQ ID NO: 276754 - RNA, 32 nt, Human
uugucacccaugcuggaguacaauggcacaaa

SEQ ID NO: 276755 - RNA, 32 nt, Human
uugucaccccagcuggagugcaguagcacgau

SEQ ID NO: 276756 - RNA, 27 nt, Human
uugucaccccugcugcuggagugcaau

SEQ ID NO: 276757 - RNA, 32 nt, Human
uugucaccccugcugcuggagugcaauugcac

SEQ ID NO: 276758 - RNA, 32 nt, Human
uugucaccccugggaagauucucccaccuccu

SEQ ID NO: 276759 - RNA, 32 nt, Human
uugucacccgggacagaaaacucagucuuuuc

SEQ ID NO: 276760 - RNA, 32 nt, Human
uugucacccuuuuaccaucuuugcuauacuau

SEQ ID NO: 276761 - RNA, 24 nt, Human
uugucaccgaggcuggagugcaau

SEQ ID NO: 276762 - RNA, 25 nt, Human
uugucaccgaggcuggagugcaaug

SEQ ID NO: 276763 - RNA, 32 nt, Human
uugucaccgaggcuggagugcaaugacaugau

SEQ ID NO: 276764 - RNA, 32 nt, Human
uugucaccgaggcuggagugcaauggcccgau

SEQ ID NO: 276765 - RNA, 24 nt, Human
uugucaccuaagcuggaguacagu

SEQ ID NO: 276766 - RNA, 25 nt, Human
uugucaccuaagcuggaguacagug

SEQ ID NO: 276767 - RNA, 32 nt, Human
uugucaccuaagcuggagugcagugcgcgauc

SEQ ID NO: 276768 - RNA, 22 nt, Human
uugucaccuagacuggagugca

SEQ ID NO: 276769 - RNA, 24 nt, Human
uugucaccuagacuggagugcaau

SEQ ID NO: 276770 - RNA, 25 nt, Human
uugucaccuagacuggagugcaaug

SEQ ID NO: 276771 - RNA, 32 nt, Human
uugucaccuagacuggagugcaauggcgugau

SEQ ID NO: 276772 - RNA, 24 nt, Human
uugucaccuaggcaagagugcaau

SEQ ID NO: 276773 - RNA, 25 nt, Human
uugucaccuaggcaagagugcaaug

SEQ ID NO: 276774 - RNA, 32 nt, Human
uugucaccuaggcaagagugcaauggcacaau

SEQ ID NO: 276775 - RNA, 24 nt, Human
uugucaccuaggcuggagugcagu

SEQ ID NO: 276776 - RNA, 25 nt, Human
uugucaccuaggcuggagugcagug

SEQ ID NO: 276777 - RNA, 32 nt, Human
uugucaccugggcugcucucuccugggacauc

SEQ ID NO: 276778 - RNA, 32 nt, Human
uugucaccuguaccugucacacaucuugaaaa

SEQ ID NO: 276779 - RNA, 32 nt, Human
uugucacgaaggaaguguugaccuuggagggu

SEQ ID NO: 276780 - RNA, 24 nt, Human
uugucacgcaggcuagagugcagu

SEQ ID NO: 276781 - RNA, 25 nt, Human
uugucacgcaggcuagagugcagug

SEQ ID NO: 276782 - RNA, 21 nt, Human
uugucacuacugaggagcuga

SEQ ID NO: 276783 - RNA, 20 nt, Human
uugucacuaguaggagacug

SEQ ID NO: 276784 - RNA, 32 nt, Human
uugucacucaggcuggagugcaguggugugau

SEQ ID NO: 276785 - RNA, 21 nt, Human
uugucacucuauccaggcugg

SEQ ID NO: 276786 - RNA, 32 nt, Human
uugucacugaagcuacaggaauccaagaacca

SEQ ID NO: 276787 - RNA, 32 nt, Human
uugucacugaucugaagccacucccccuggag

SEQ ID NO: 276788 - RNA, 20 nt, Human
uugucacugcccucucccca

SEQ ID NO: 276789 - RNA, 32 nt, Human
uugucacugccgucugugcacugauucacacu

SEQ ID NO: 276790 - RNA, 17 nt, Human
uugucacuggagugcuu

SEQ ID NO: 276791 - RNA, 32 nt, Human
uugucacuggaugcuacuugaagagggaguac

SEQ ID NO: 276792 - RNA, 32 nt, Human
uugucacuggcguccuggaauccgaccguguu

SEQ ID NO: 276793 - RNA, 32 nt, Human
uugucacugugacaacacaggaaaaguugguu

SEQ ID NO: 276794 - RNA, 32 nt, Human
uugucacuuaaguuuggagugcaguggcauga

SEQ ID NO: 276795 - RNA, 32 nt, Human
uugucacuuagggcagcuucuccaacuuuaac

SEQ ID NO: 276796 - RNA, 32 nt, Human
uugucacuugaacccuguaauugucacacauc

SEQ ID NO: 276797 - RNA, 32 nt, Human
uugucacuugcaucuucacaaaggauaaacca

SEQ ID NO: 276798 - RNA, 32 nt, Human
uugucacuugcccucuggcuugggcuccuuuu

SEQ ID NO: 276799 - RNA, 32 nt, Human
uugucacuuguucacuguccccaaaccuaugg

SEQ ID NO: 276800 - RNA, 32 nt, Human
uugucacuuuauuacucccagaacaacaacua

SEQ ID NO: 276801 - RNA, 32 nt, Human
uugucacuuuauuuuucugucuguaaauaugc

SEQ ID NO: 276802 - RNA, 32 nt, Human
uugucacuuucuuaaucucugaucucuugagg

SEQ ID NO: 276803 - RNA, 23 nt, Human
uugucacuuuuuguucuuaacca

SEQ ID NO: 276804 - RNA, 32 nt, Human
uugucagaaaaacagcugcaggcuccaaagac

SEQ ID NO: 276805 - RNA, 32 nt, Human
uugucagagacacuaaccagcuauccaaaugc

SEQ ID NO: 276806 - RNA, 32 nt, Human
uugucagagccacugagugcugugcugcucga

SEQ ID NO: 276807 - RNA, 32 nt, Human
uugucagaggcgggggacagcagaggcugcag

SEQ ID NO: 276808 - RNA, 32 nt, Human
uugucagauauaaucaaaguucuguucaguga

SEQ ID NO: 276809 - RNA, 32 nt, Human
uugucagcacuuccaguuuagaacgcaauguu

SEQ ID NO: 276810 - RNA, 32 nt, Human
uugucagcagcccagaggcccuggaauugugg

SEQ ID NO: 276811 - RNA, 32 nt, Human
uugucagcaggucucugugcacugguauuggg

SEQ ID NO: 276812 - RNA, 32 nt, Human
uugucagcaucaggaaggccuuugcuucuugc

SEQ ID NO: 276813 - RNA, 24 nt, Human
uugucagccaggcuggagugcaau

SEQ ID NO: 276814 - RNA, 25 nt, Human
uugucagccaggcuggagugcaaug

SEQ ID NO: 276815 - RNA, 32 nt, Human
uugucagccaggcuggagugcaaugugcaaug

SEQ ID NO: 276816 - RNA, 24 nt, Human
uugucagccaggcuggagugcagu

SEQ ID NO: 276817 - RNA, 25 nt, Human
uugucagccaggcuggagugcagug

SEQ ID NO: 276818 - RNA, 32 nt, Human
uugucagcccucucauacuaugaacauauggg

SEQ ID NO: 276819 - RNA, 32 nt, Human
uugucagcccuuaaaagagcuaggaauuucuu

SEQ ID NO: 276820 - RNA, 32 nt, Human
uugucagcccuuaaaagggcuaggaauuucuu

SEQ ID NO: 276821 - RNA, 32 nt, Human
uugucagcgaagggaaugagacucugggaagu

SEQ ID NO: 276822 - RNA, 32 nt, Human
uugucagcucaaccugguggguucaguucugu

SEQ ID NO: 276823 - RNA, 32 nt, Human
uugucagcucccuguccugugugugggcagaa

SEQ ID NO: 276824 - RNA, 32 nt, Human
uugucagcucccuguccugugugugggcggaa

SEQ ID NO: 276825 - RNA, 32 nt, Human
uugucagcugcuugugaaacucagccagguug

SEQ ID NO: 276826 - RNA, 32 nt, Human
uugucagcugucuucauuuccugggcuaagca

SEQ ID NO: 276827 - RNA, 32 nt, Human
uugucagcugugguguaaaacauaucaaguuc

SEQ ID NO: 276828 - RNA, 30 nt, Human
uugucagcuuaucaaucagacugaucuaau

SEQ ID NO: 276829 - RNA, 32 nt, Human
uugucaggaacccccagugugaccucacacau

SEQ ID NO: 276830 - RNA, 32 nt, Human
uugucaggacaguaugugagugucuggagaca

SEQ ID NO: 276831 - RNA, 32 nt, Human
uugucaggcccagccacaucuuuacgccaugg

SEQ ID NO: 276832 - RNA, 32 nt, Human
uugucaggcccuucaucuucauggcccaccug

SEQ ID NO: 276833 - RNA, 32 nt, Human
uugucagggaggugccaguuacagcaggugau

SEQ ID NO: 276834 - RNA, 32 nt, Human
uugucagggcuggaacuauuguauagaagaua

SEQ ID NO: 276835 - RNA, 32 nt, Human
uugucaggggcagccugguucagagcucagag

SEQ ID NO: 276836 - RNA, 32 nt, Human
uugucaggucaccagauaaaggcaagucuugu

SEQ ID NO: 276837 - RNA, 32 nt, Human
uugucagucaugccagaagguucuagaacugc

SEQ ID NO: 276838 - RNA, 32 nt, Human
uugucaguccuccugaacauucaggaaaucaa

SEQ ID NO: 276839 - RNA, 32 nt, Human
uugucagucgucucucaguucuugagguauau

SEQ ID NO: 276840 - RNA, 32 nt, Human
uugucagugauuagaacaacacuguuuacaua

SEQ ID NO: 276841 - RNA, 32 nt, Human
uugucaguuauucaaaaauaagaaguuauagg

SEQ ID NO: 276842 - RNA, 32 nt, Human
uugucauagccuugggagccaggcugguauga

SEQ ID NO: 276843 - RNA, 32 nt, Human
uugucauaucaucuguaaugauuauucacuag

SEQ ID NO: 276844 - RNA, 32 nt, Human
uugucauauccagcagggagcagcuugguuca

SEQ ID NO: 276845 - RNA, 32 nt, Human
uugucauaugcugcuggugagguaaagguggg

SEQ ID NO: 276846 - RNA, 32 nt, Human
uugucauauugugcucugagcaauuucaauua

SEQ ID NO: 276847 - RNA, 32 nt, Human
uugucaucaccuuccaagaaaguuuccuucug

SEQ ID NO: 276848 - RNA, 32 nt, Human
uugucauccaagcuggaguacagugccaugau

SEQ ID NO: 276849 - RNA, 32 nt, Human
uugucauccccguguuacuguguagaauuucu

SEQ ID NO: 276850 - RNA, 32 nt, Human
uugucauccucccauggcuuccccugcccuca

SEQ ID NO: 276851 - RNA, 32 nt, Human
uugucauccuggcuggagugugauggugcgau

SEQ ID NO: 276852 - RNA, 32 nt, Human
uugucauccugguuguccaacucugaauguac

SEQ ID NO: 276853 - RNA, 32 nt, Human
uugucaucuccgcaaggccagaaagugaucac

SEQ ID NO: 276854 - RNA, 32 nt, Human
uugucaucuguugccacauccauggaacucag

SEQ ID NO: 276855 - RNA, 32 nt, Human
uugucaugaccagacaagauaggaaaggggaa

SEQ ID NO: 276856 - RNA, 32 nt, Human
uugucauggaaaugcaccuguuccaagucauu

SEQ ID NO: 276857 - RNA, 22 nt, Human
uugucauucaugagaagaaugg

SEQ ID NO: 276858 - RNA, 24 nt, Human
uugucauuccauugagaaagcuga

SEQ ID NO: 276859 - RNA, 32 nt, Human
uugucauucuuaucuccagccugggaaaaguu

SEQ ID NO: 276860 - RNA, 23 nt, Human
uugucauucuuggagagagguga

SEQ ID NO: 276861 - RNA, 24 nt, Human
uugucauucuuugcacgaaacugg

SEQ ID NO: 276862 - RNA, 32 nt, Human
uugucauugcauuuccacauucccaggaaagc

SEQ ID NO: 276863 - RNA, 32 nt, Human
uugucauuuaacauaguuugugauauuucagu

SEQ ID NO: 276864 - RNA, 32 nt, Human
uugucauuuaacauaguuugugguauuucagu

SEQ ID NO: 276865 - RNA, 32 nt, Human
uugucauuugccagacaaguggagauuuuugc

SEQ ID NO: 276866 - RNA, 31 nt, Human
uugucauuugugaaggaaguuggagagucac

SEQ ID NO: 276867 - RNA, 32 nt, Human
uugucauuuguggcuuucuuucuuaucaucau

SEQ ID NO: 276868 - RNA, 32 nt, Human
uugucauuuuuauccagagucaagauucucaa

SEQ ID NO: 276869 - RNA, 32 nt, Human
uuguccaaacuguuggggaagcucccagaacu

SEQ ID NO: 276870 - RNA, 32 nt, Human
uuguccaacauuuucuguagaagaacuucauc

SEQ ID NO: 276871 - RNA, 32 nt, Human
uuguccaacccaaaggcucuuuucagagccac

SEQ ID NO: 276872 - RNA, 32 nt, Human
uuguccaacucauugauuucagagauagggaa

SEQ ID NO: 276873 - RNA, 32 nt, Human
uuguccaagcuggucucaaacuccuggguuca

SEQ ID NO: 276874 - RNA, 32 nt, Human
uuguccaauacaguaacuuuuagccaccagug

SEQ ID NO: 276875 - RNA, 32 nt, Human
uuguccaauucuguaacauucaucuccauuuu

SEQ ID NO: 276876 - RNA, 32 nt, Human
uuguccacaggcacuuucaagaacuuugggau

SEQ ID NO: 276877 - RNA, 32 nt, Human
uuguccaccauuccuuuaaauucuccaaccca

SEQ ID NO: 276878 - RNA, 32 nt, Human
uuguccacccacuuaguccacucugagucgau

SEQ ID NO: 276879 - RNA, 32 nt, Human
uuguccacuguggccuugcaaugcuuuguggc

SEQ ID NO: 276880 - RNA, 32 nt, Human
uuguccacuuguuuacaauguccuccuuuuaa

SEQ ID NO: 276881 - RNA, 32 nt, Human
uuguccagaaaaccccagugcuacaagauguc

SEQ ID NO: 276882 - RNA, 32 nt, Human
uuguccagaaagauucaucuguggucugucug

SEQ ID NO: 276883 - RNA, 32 nt, Human
uuguccagacaacuuacauacacuccauggca

SEQ ID NO: 276884 - RNA, 32 nt, Human
uuguccagacucccccgcccccucucugaugc

SEQ ID NO: 276885 - RNA, 32 nt, Human
uuguccagcaguguuucugcaguggcugcagg

SEQ ID NO: 276886 - RNA, 32 nt, Human
uuguccagcugcacucuccucuccugggaccc

SEQ ID NO: 276887 - RNA, 32 nt, Human
uuguccagcugccuggcucuuuugcaauaaca

SEQ ID NO: 276888 - RNA, 21 nt, Human
uuguccaggcuagagugcagu

SEQ ID NO: 276889 - RNA, 22 nt, Human
uuguccaggcuagagugcagug

SEQ ID NO: 276890 - RNA, 23 nt, Human
uuguccaggcuagagugcagugg

SEQ ID NO: 276891 - RNA, 32 nt, Human
uuguccaggcuagagugcaguggugugaucac

SEQ ID NO: 276892 - RNA, 32 nt, Human
uuguccaggcuggagcgcaguugauuguagcu

SEQ ID NO: 276893 - RNA, 32 nt, Human
uuguccaggcuggaggagugcagucguacagu

SEQ ID NO: 276894 - RNA, 21 nt, Human
uuguccaggcuggaguauaau

SEQ ID NO: 276895 - RNA, 32 nt, Human
uuguccaggcuggaguauaauggugcgaucuc

SEQ ID NO: 276896 - RNA, 19 nt, Human
uuguccaggcuggagugca

SEQ ID NO: 276897 - RNA, 21 nt, Human
uuguccaggcuggagugcaau

SEQ ID NO: 276898 - RNA, 32 nt, Human
uuguccaggcuggagugcaauagcgcgaucug

SEQ ID NO: 276899 - RNA, 22 nt, Human
uuguccaggcuggagugcaaug

SEQ ID NO: 276900 - RNA, 32 nt, Human
uuguccaggcuggagugcaauggcacgaucuc

SEQ ID NO: 276901 - RNA, 32 nt, Human
uuguccaggcuggagugcaauggcgcaaucuu

SEQ ID NO: 276902 - RNA, 32 nt, Human
uuguccaggcuggagugcaauggugugaucuc

SEQ ID NO: 276903 - RNA, 32 nt, Human
uuguccaggcuggagugcagcgauauggucau

SEQ ID NO: 276904 - RNA, 21 nt, Human
uuguccaggcuggagugcagu

SEQ ID NO: 276905 - RNA, 32 nt, Human
uuguccaggcuggagugcaguggcaccaugcc

SEQ ID NO: 276906 - RNA, 32 nt, Human
uuguccaggcuggagugcaguggcgcgaucua

SEQ ID NO: 276907 - RNA, 32 nt, Human
uuguccaggcuggagugcaguggugugaucuc

SEQ ID NO: 276908 - RNA, 32 nt, Human
uuguccaggcuggucucagaauucuggugagu

SEQ ID NO: 276909 - RNA, 32 nt, Human
uuguccaggcuggucuugaacuccugagcuca

SEQ ID NO: 276910 - RNA, 32 nt, Human
uuguccaggcuggucuugaauuccugggcuca

SEQ ID NO: 276911 - RNA, 32 nt, Human
uuguccagggccugaggaaauggcuccccagg

SEQ ID NO: 276912 - RNA, 32 nt, Human
uuguccaggggagggcccugccacccacaauu

SEQ ID NO: 276913 - RNA, 32 nt, Human
uuguccaguauuuuucccuuuuuaaccauucc

SEQ ID NO: 276914 - RNA, 21 nt, Human
uuguccagucuggagugcaau

SEQ ID NO: 276915 - RNA, 22 nt, Human
uuguccagucuggagugcaaug

SEQ ID NO: 276916 - RNA, 32 nt, Human
uuguccagucuggagugcaauggcacaaucuc

SEQ ID NO: 276917 - RNA, 32 nt, Human
uuguccagugcucuccccaggcuggccccgcc

SEQ ID NO: 276918 - RNA, 32 nt, Human
uuguccaguuaauuugaaaaggccccagauga

SEQ ID NO: 276919 - RNA, 32 nt, Human
uuguccauaccagacagggagcaggggguagc

SEQ ID NO: 276920 - RNA, 32 nt, Human
uuguccaucagcaagagagagcagcuggaaca

SEQ ID NO: 276921 - RNA, 32 nt, Human
uuguccaugccaacagccugggagaugagaca

SEQ ID NO: 276922 - RNA, 32 nt, Human
uuguccaugccaccaauuccacugcuacuugc

SEQ ID NO: 276923 - RNA, 32 nt, Human
uuguccaugccauuuagcaaucucaucuccua

SEQ ID NO: 276924 - RNA, 32 nt, Human
uuguccauucaucugcccacccaucugucccu

SEQ ID NO: 276925 - RNA, 32 nt, Human
uuguccauuucucuucccuccucuugcauuuu

SEQ ID NO: 276926 - RNA, 32 nt, Human
uugucccaaguugaccuagggugacuuuuaua

SEQ ID NO: 276927 - RNA, 32 nt, Human
uugucccaaugaaauacugagaugcugggcug

SEQ ID NO: 276928 - RNA, 32 nt, Human
uugucccacaguaggucuucuguccgcacccg

SEQ ID NO: 276929 - RNA, 32 nt, Human
uugucccacaucaggauuuucuagagggcccu

SEQ ID NO: 276930 - RNA, 32 nt, Human
uugucccacccacucuucagaggcuaggcccc

SEQ ID NO: 276931 - RNA, 32 nt, Human
uugucccacuuuuacuaaacaguggcagcaga

SEQ ID NO: 276932 - RNA, 32 nt, Human
uugucccagacuaugaacggcauggaaaccaa

SEQ ID NO: 276933 - RNA, 32 nt, Human
uugucccagcuacucaggaggcugaggcagga

SEQ ID NO: 276934 - RNA, 32 nt, Human
uugucccagcuacucgggaggcugaggcagga

SEQ ID NO: 276935 - RNA, 32 nt, Human
uugucccagcuauucaggaggcugacguggga

SEQ ID NO: 276936 - RNA, 32 nt, Human
uugucccagcugcucuggaggcugaggcagga

SEQ ID NO: 276937 - RNA, 32 nt, Human
uugucccagcugcuugggaggcugaggcagga

SEQ ID NO: 276938 - RNA, 32 nt, Human
uugucccagcuguuccguaggcugaggcacga

SEQ ID NO: 276939 - RNA, 32 nt, Human
uugucccagcuucuccccugggggccugagag

SEQ ID NO: 276940 - RNA, 21 nt, Human
uugucccagguaccccugcug

SEQ ID NO: 276941 - RNA, 32 nt, Human
uugucccauucaagccaccgagcucaccacag

SEQ ID NO: 276942 - RNA, 32 nt, Human
uuguccccaagcaacagagugagggucugucu

SEQ ID NO: 276943 - RNA, 32 nt, Human
uuguccccaagccaugguggcagaggagcugg

SEQ ID NO: 276944 - RNA, 32 nt, Human
uuguccccacuaccaucucccucucucaguau

SEQ ID NO: 276945 - RNA, 32 nt, Human
uuguccccagagaggaggauguggugagcccc

SEQ ID NO: 276946 - RNA, 32 nt, Human
uuguccccaggaagcucgccagugcaugggac

SEQ ID NO: 276947 - RNA, 32 nt, Human
uuguccccaugcaacaaccaccaccuuauaca

SEQ ID NO: 276948 - RNA, 32 nt, Human
uugucccccaaacccagcauuuaugucgugag

SEQ ID NO: 276949 - RNA, 32 nt, Human
uugucccccaacacagcuucuguggcugacug

SEQ ID NO: 276950 - RNA, 24 nt, Human
uugucccccaagcuggaguacaau

SEQ ID NO: 276951 - RNA, 25 nt, Human
uugucccccaagcuggaguacaaug

SEQ ID NO: 276952 - RNA, 32 nt, Human
uugucccccagaacaugaccuagagguaccug

SEQ ID NO: 276953 - RNA, 32 nt, Human
uugucccccagacuggagugcaauggcacgau

SEQ ID NO: 276954 - RNA, 32 nt, Human
uugucccccagccucugccacccuccaccucc

SEQ ID NO: 276955 - RNA, 24 nt, Human
uugucccccaggcuggagugcagu

SEQ ID NO: 276956 - RNA, 25 nt, Human
uugucccccaggcuggagugcagug

SEQ ID NO: 276957 - RNA, 32 nt, Human
uugucccccaggcuggagugcagugguacaag

SEQ ID NO: 276958 - RNA, 24 nt, Human
uugucccccaggcuggagugcgau

SEQ ID NO: 276959 - RNA, 32 nt, Human
uugucccccaggcuggagugcgauggcaggau

SEQ ID NO: 276960 - RNA, 32 nt, Human
uugucccccaggcuggaguggugcaguggcac

SEQ ID NO: 276961 - RNA, 24 nt, Human
uugucccccaggcuugagugcaau

SEQ ID NO: 276962 - RNA, 25 nt, Human
uugucccccaggcuugagugcaaug

SEQ ID NO: 276963 - RNA, 32 nt, Human
uugucccccaggcuugagugcaaugacucaau

SEQ ID NO: 276964 - RNA, 21 nt, Human
uugucccccauggaugagccc

SEQ ID NO: 276965 - RNA, 32 nt, Human
uuguccccgggagggggcggggcagccucggg

SEQ ID NO: 276966 - RNA, 32 nt, Human
uuguccccgugucucauccuguccucacccuc

SEQ ID NO: 276967 - RNA, 32 nt, Human
uuguccccuggcuugggccuggaccacaaugc

SEQ ID NO: 276968 - RNA, 32 nt, Human
uugucccggcuacuugggaggcugaaguggga

SEQ ID NO: 276969 - RNA, 32 nt, Human
uugucccggugacuugcacccuggcugcuuug

SEQ ID NO: 276970 - RNA, 32 nt, Human
uugucccucguauuauuucuccacgucuguuu

SEQ ID NO: 276971 - RNA, 32 nt, Human
uugucccucguucuccccugaagugagucaua

SEQ ID NO: 276972 - RNA, 32 nt, Human
uugucccucucccuccccaggacuucugugac

SEQ ID NO: 276973 - RNA, 32 nt, Human
uugucccucugccccauccuccagcagggaaa

SEQ ID NO: 276974 - RNA, 32 nt, Human
uugucccucugucugucugucuaucuacuugu

SEQ ID NO: 276975 - RNA, 32 nt, Human
uugucccugaacuuagcuaaauggugcaacuu

SEQ ID NO: 276976 - RNA, 32 nt, Human
uugucccugcagcucaccggguuagccguggc

SEQ ID NO: 276977 - RNA, 32 nt, Human
uugucccugccuuggcuuuucuccccuucuca

SEQ ID NO: 276978 - RNA, 32 nt, Human
uugucccugcugccucccucuggaguggccac

SEQ ID NO: 276979 - RNA, 22 nt, Human
uugucccuggcaaaauuuucca

SEQ ID NO: 276980 - RNA, 32 nt, Human
uugucccuguucucuguccucuacuccacuca

SEQ ID NO: 276981 - RNA, 32 nt, Human
uugucccuguucugggggaagguguccacccc

SEQ ID NO: 276982 - RNA, 32 nt, Human
uugucccuuacaugauggugcugcaagaaaau

SEQ ID NO: 276983 - RNA, 32 nt, Human
uugucccuuccaggaggacauagccugcaaag

SEQ ID NO: 276984 - RNA, 32 nt, Human
uugucccuuccuccucccagcaacagucccaa

SEQ ID NO: 276985 - RNA, 32 nt, Human
uugucccuuggcacacuuguacccacagguga

SEQ ID NO: 276986 - RNA, 32 nt, Human
uuguccgucuucugcauucugggaacaugcgg

SEQ ID NO: 276987 - RNA, 32 nt, Human
uuguccuaaaaauacaaaaauuaguugggugc

SEQ ID NO: 276988 - RNA, 32 nt, Human
uuguccuagugugcucccugccccagacuuuu

SEQ ID NO: 276989 - RNA, 20 nt, Human
uuguccuaugcuucgagcca

SEQ ID NO: 276990 - RNA, 32 nt, Human
uuguccuauugucacugcccuguuuuucauug

SEQ ID NO: 276991 - RNA, 32 nt, Human
uuguccucaacaacagcaaagcuucuugggag

SEQ ID NO: 276992 - RNA, 32 nt, Human
uuguccucaagugauccucccaccuuagccuc

SEQ ID NO: 276993 - RNA, 28 nt, Human
uuguccucacuggcagcaugcuguaugu

SEQ ID NO: 276994 - RNA, 32 nt, Human
uuguccucacuuuuguucuugucccucuccaa

SEQ ID NO: 276995 - RNA, 32 nt, Human
uuguccuccacuacccucaggaaaccaagaaa

SEQ ID NO: 276996 - RNA, 32 nt, Human
uuguccuccagcugcuccugauuccugcguua

SEQ ID NO: 276997 - RNA, 32 nt, Human
uuguccuccaggaggugggggaaugugguaac

SEQ ID NO: 276998 - RNA, 32 nt, Human
uuguccuccaguuuuauaggaacaagagacua

SEQ ID NO: 276999 - RNA, 32 nt, Human
uuguccuccaucuuccccuccuuuacccuugg

SEQ ID NO: 277000 - RNA, 32 nt, Human
uuguccucccaccuucugguucuugaagacau

SEQ ID NO: 277001 - RNA, 32 nt, Human
uuguccuccucucuccuccaccgggacugcug

SEQ ID NO: 277002 - RNA, 21 nt, Human
uuguccuccucucuggcccca

SEQ ID NO: 277003 - RNA, 32 nt, Human
uuguccuccugccuccucuucuccuuggcugg

SEQ ID NO: 277004 - RNA, 32 nt, Human
uuguccucuucugcucuuuuccuggugcucuu

SEQ ID NO: 277005 - RNA, 32 nt, Human
uuguccucuugcuccuuccugcuaggacagca

SEQ ID NO: 277006 - RNA, 32 nt, Human
uuguccugcacugucuuuagguaucauaggua

SEQ ID NO: 277007 - RNA, 32 nt, Human
uuguccuggcaccuccauuuccuuaguuucug

SEQ ID NO: 277008 - RNA, 32 nt, Human
uuguccuggcacugcuggcccuccucacccua

SEQ ID NO: 277009 - RNA, 32 nt, Human
uuguccuggcuuacugggacagucuguaugag

SEQ ID NO: 277010 - RNA, 32 nt, Human
uuguccugggaagaaggagcaagagguaaaca

SEQ ID NO: 277011 - RNA, 32 nt, Human
uuguccugggauaguugagggagcagggagag

SEQ ID NO: 277012 - RNA, 32 nt, Human
uuguccugggucuugcacuuguuguccauggu

SEQ ID NO: 277013 - RNA, 32 nt, Human
uuguccuguauuuaucacaguuucuguugaac

SEQ ID NO: 277014 - RNA, 32 nt, Human
uuguccuguccccacagccauucugggagcug

SEQ ID NO: 277015 - RNA, 32 nt, Human
uuguccugugaggaaacgaugaggagacuucu

SEQ ID NO: 277016 - RNA, 32 nt, Human
uuguccuguggccucugcuccaggggcagugu

SEQ ID NO: 277017 - RNA, 32 nt, Human
uuguccuguguguguuuacaguauucaauuua

SEQ ID NO: 277018 - RNA, 32 nt, Human
uuguccuuaagguuuuugcaggccagugccaa

SEQ ID NO: 277019 - RNA, 32 nt, Human
uuguccuuagaaggagaaagacagagacacau

SEQ ID NO: 277020 - RNA, 32 nt, Human
uuguccuucauucaaguauacauuucugaugu

SEQ ID NO: 277021 - RNA, 32 nt, Human
uuguccuucccaguuucuccccaaccuccccu

SEQ ID NO: 277022 - RNA, 32 nt, Human
uuguccuuccucccauuuccucccuuuggccc

SEQ ID NO: 277023 - RNA, 32 nt, Human
uuguccuuccugaucaccuucacuuucucgua

SEQ ID NO: 277024 - RNA, 32 nt, Human
uuguccuucucaguuucuccccaaccuccccu

SEQ ID NO: 277025 - RNA, 32 nt, Human
uuguccuucucccacccccuuacuacacccua

SEQ ID NO: 277026 - RNA, 32 nt, Human
uuguccuugcccagcccugccagccgacugca

SEQ ID NO: 277027 - RNA, 32 nt, Human
uuguccuugucuuuucuucacacugaguucuc

SEQ ID NO: 277028 - RNA, 32 nt, Human
uuguccuuuaggcaggacaggagagucauuaa

SEQ ID NO: 277029 - RNA, 32 nt, Human
uuguccuuuagucccagcucucagaauccucg

SEQ ID NO: 277030 - RNA, 32 nt, Human
uuguccuuuccccucagcugucuuugcuucac

SEQ ID NO: 277031 - RNA, 32 nt, Human
uuguccuuugaaaugauugaccaggaaaaaga

SEQ ID NO: 277032 - RNA, 32 nt, Human
uuguccuuuggccuuucacuucugccuucugu

SEQ ID NO: 277033 - RNA, 32 nt, Human
uuguccuuuguggagccucagcaguucccucu

SEQ ID NO: 277034 - RNA, 32 nt, Human
uuguccuuuuccacccuuuuaagaguuacgcu

SEQ ID NO: 277035 - RNA, 32 nt, Human
uuguccuuuuggagcagggcaggcuggcugcu

SEQ ID NO: 277036 - RNA, 32 nt, Human
uugucgacauuuuagaaguucccuaaggcccu

SEQ ID NO: 277037 - RNA, 32 nt, Human
uugucgaccugcggaucagggcugcaaggggc

SEQ ID NO: 277038 - RNA, 32 nt, Human
uugucgagaagcuuccgugaaagggugggcca

SEQ ID NO: 277039 - RNA, 32 nt, Human
uugucgagagugaaacaguuugaagcagagcc

SEQ ID NO: 277040 - RNA, 32 nt, Human
uugucgagggagagaauaaccugguguguuca

SEQ ID NO: 277041 - RNA, 23 nt, Human
uugucgccaggcuggagugcagu

SEQ ID NO: 277042 - RNA, 24 nt, Human
uugucgccaggcuggagugcagug

SEQ ID NO: 277043 - RNA, 32 nt, Human
uugucgcccaggccggagugcaguggugcgau

SEQ ID NO: 277044 - RNA, 24 nt, Human
uugucgcccaggcuggagcgcagu

SEQ ID NO: 277045 - RNA, 32 nt, Human
uugucgcccaggcuggagcgcagucccgcaau

SEQ ID NO: 277046 - RNA, 24 nt, Human
uugucgcccaggcuggagguuaau

SEQ ID NO: 277047 - RNA, 32 nt, Human
uugucgcccaggcuggagguuaauggcaugau

SEQ ID NO: 277048 - RNA, 32 nt, Human
uugucgcccaggcuggaguacaguggugcgau

SEQ ID NO: 277049 - RNA, 22 nt, Human
uugucgcccaggcuggagugca

SEQ ID NO: 277050 - RNA, 32 nt, Human
uugucgcccaggcuggagugcaacgguaugau

SEQ ID NO: 277051 - RNA, 24 nt, Human
uugucgcccaggcuggagugcaau

SEQ ID NO: 277052 - RNA, 32 nt, Human
uugucgcccaggcuggagugcaaugcacgauc

SEQ ID NO: 277053 - RNA, 32 nt, Human
uugucgcccaggcuggagugcaauggcgcaau

SEQ ID NO: 277054 - RNA, 32 nt, Human
uugucgcccaggcuggagugcaauggcgugau

SEQ ID NO: 277055 - RNA, 24 nt, Human
uugucgcccaggcuggagugcagu

SEQ ID NO: 277056 - RNA, 32 nt, Human
uugucgcccaggcuggagugcaguggcacaau

SEQ ID NO: 277057 - RNA, 32 nt, Human
uugucgcccaggcuggagugcaguggcacgau

SEQ ID NO: 277058 - RNA, 32 nt, Human
uugucgcccaggcuggagugcaguggcagugu

SEQ ID NO: 277059 - RNA, 32 nt, Human
uugucgcccaggcuggagugcaguggcaugau

SEQ ID NO: 277060 - RNA, 32 nt, Human
uugucgcccaggcuggagugcaguggcgcaau

SEQ ID NO: 277061 - RNA, 32 nt, Human
uugucgcccaggcuggagugcaguggcgugau

SEQ ID NO: 277062 - RNA, 32 nt, Human
uugucgcccaggcuggagugcaguggugugau

SEQ ID NO: 277063 - RNA, 24 nt, Human
uugucgcccaggcuguagugcagu

SEQ ID NO: 277064 - RNA, 32 nt, Human
uugucgcccaggcuguagugcagugguacagu

SEQ ID NO: 277065 - RNA, 32 nt, Human
uugucgcccgggcaggagugcaguggcucaau

SEQ ID NO: 277066 - RNA, 32 nt, Human
uugucgcccuggcuggagugcaguugcgcagu

SEQ ID NO: 277067 - RNA, 24 nt, Human
uugucgccuacgcuggagugcagu

SEQ ID NO: 277068 - RNA, 32 nt, Human
uugucgccuaggcuggagugcaaugaugcgau

SEQ ID NO: 277069 - RNA, 24 nt, Human
uugucgcucagccuggagugcagu

SEQ ID NO: 277070 - RNA, 32 nt, Human
uugucgcucagccuggagugcagugagcugag

SEQ ID NO: 277071 - RNA, 18 nt, Human
uugucgcucagcuaguca

SEQ ID NO: 277072 - RNA, 32 nt, Human
uugucgcucaggcuggagugccauggcgcgau

SEQ ID NO: 277073 - RNA, 20 nt, Human
uugucgcuccccauggacca

SEQ ID NO: 277074 - RNA, 19 nt, Human
uugucgcuccugcgugcca

SEQ ID NO: 277075 - RNA, 32 nt, Human
uugucgcugaaccugucuccucccagguuucu

SEQ ID NO: 277076 - RNA, 32 nt, Human
uugucgcuuauccagaaugaugcuauguguag

SEQ ID NO: 277077 - RNA, 20 nt, Human
uugucgcuuccgccucgagc

SEQ ID NO: 277078 - RNA, 32 nt, Human
uugucggcaucgcuccccacaggccgacgucg

SEQ ID NO: 277079 - RNA, 24 nt, Human
uugucggccaggcuagagugcagu

SEQ ID NO: 277080 - RNA, 25 nt, Human
uugucggccaggcuagagugcagug

SEQ ID NO: 277081 - RNA, 32 nt, Human
uugucggcucacugcaaccugucucucagguu

SEQ ID NO: 277082 - RNA, 32 nt, Human
uugucguagagcccuccacauuuucuuuuucu

SEQ ID NO: 277083 - RNA, 20 nt, Human
uugucgugccguccugggcc

SEQ ID NO: 277084 - RNA, 31 nt, Human
uugucgugccguccugggccucaggcugucu

SEQ ID NO: 277085 - RNA, 32 nt, Human
uugucguggaagaaggaagugaacccucagaa

SEQ ID NO: 277086 - RNA, 32 nt, Human
uugucguuguuguuguuugccaugacugcucu

SEQ ID NO: 277087 - RNA, 32 nt, Human
uugucguuucuuggaagucacagggaagauug

SEQ ID NO: 277088 - RNA, 32 nt, Human
uugucguuugggguauguaucuccucucugag

SEQ ID NO: 277089 - RNA, 32 nt, Human
uugucuaaaaauaacauacgcacucaacuucc

SEQ ID NO: 277090 - RNA, 32 nt, Human
uugucuaaccccagguuuucugcucuguccaa

SEQ ID NO: 277091 - RNA, 32 nt, Human
uugucuaauguuccugagacuauuucacacuc

SEQ ID NO: 277092 - RNA, 32 nt, Human
uugucuaccacugcgaacuuuccaucuaggca

SEQ ID NO: 277093 - RNA, 32 nt, Human
uugucuaccuuaaaacuagcuuuauucacaga

SEQ ID NO: 277094 - RNA, 32 nt, Human
uugucuagacuugcaucuagagcuacguugua

SEQ ID NO: 277095 - RNA, 32 nt, Human
uugucuagccuccagccucaacuuacuugaug

SEQ ID NO: 277096 - RNA, 32 nt, Human
uugucuaggauuccauggauggauggaauaua

SEQ ID NO: 277097 - RNA, 32 nt, Human
uugucuaggcuggagugccguggugcgaucuu

SEQ ID NO: 277098 - RNA, 32 nt, Human
uugucuaggcuggucuugaacugggcucaagc

SEQ ID NO: 277099 - RNA, 32 nt, Human
uugucuagggcuugcugaccucacagucugug

SEQ ID NO: 277100 - RNA, 32 nt, Human
uugucuaggguucucagaugcuaucugccgcu

SEQ ID NO: 277101 - RNA, 32 nt, Human
uugucuaguucucauucuuucaauuguuaugc

SEQ ID NO: 277102 - RNA, 32 nt, Human
uugucuauccuggccccagcaggaugacccuc

SEQ ID NO: 277103 - RNA, 32 nt, Human
uugucuauggaguuauacuuccauccaauuac

SEQ ID NO: 277104 - RNA, 32 nt, Human
uugucuauucaucugauaaucuuuuggcuaaa

SEQ ID NO: 277105 - RNA, 32 nt, Human
uugucucaccucugaguuuuugcccaugaugu

SEQ ID NO: 277106 - RNA, 32 nt, Human
uugucucacugcaaccucugccucccggguuc

SEQ ID NO: 277107 - RNA, 32 nt, Human
uugucucacuguuuggugcuucuccuaacuca

SEQ ID NO: 277108 - RNA, 32 nt, Human
uugucucagccucugccacuucccagaccgaa

SEQ ID NO: 277109 - RNA, 32 nt, Human
uugucucagcuacacaggaggcugaaguggga

SEQ ID NO: 277110 - RNA, 32 nt, Human
uugucucaggcaggaagucagucuauaucucu

SEQ ID NO: 277111 - RNA, 32 nt, Human
uugucucagggugggaagugggagggcagggc

SEQ ID NO: 277112 - RNA, 32 nt, Human
uugucucagggugggaagugggaggguggggc

SEQ ID NO: 277113 - RNA, 23 nt, Human
uugucucagucauugcuguugua

SEQ ID NO: 277114 - RNA, 32 nt, Human
uugucucaguuacuugggaggcugaggcagga

SEQ ID NO: 277115 - RNA, 32 nt, Human
uugucucauccccagucuaccuccuuccuucu

SEQ ID NO: 277116 - RNA, 32 nt, Human
uugucuccaaaguccuuguuguaggaguugcu

SEQ ID NO: 277117 - RNA, 32 nt, Human
uugucuccaaauucuuaaaauuagucaucugu

SEQ ID NO: 277118 - RNA, 32 nt, Human
uugucuccaacuccaggcgcucagggaaucgc

SEQ ID NO: 277119 - RNA, 32 nt, Human
uugucuccacacacagcugggcugugguaggg

SEQ ID NO: 277120 - RNA, 32 nt, Human
uugucuccacagccccagccacagcuggaagc

SEQ ID NO: 277121 - RNA, 32 nt, Human
uugucuccacaugaagauguacugaugacgcc

SEQ ID NO: 277122 - RNA, 32 nt, Human
uugucuccacuccucccccaucauguccuucc

SEQ ID NO: 277123 - RNA, 32 nt, Human
uugucuccagcccaguucgaggaagaguaagc

SEQ ID NO: 277124 - RNA, 28 nt, Human
uugucuccaguacuugccucauucucau

SEQ ID NO: 277125 - RNA, 32 nt, Human
uugucucccagacuggagugcaauggcaugau

SEQ ID NO: 277126 - RNA, 24 nt, Human
uugucucccaggcuggagugcaau

SEQ ID NO: 277127 - RNA, 32 nt, Human
uugucucccaggcuggagugcaaucgcgcaau

SEQ ID NO: 277128 - RNA, 24 nt, Human
uugucucccaggcuggagugcagu

SEQ ID NO: 277129 - RNA, 25 nt, Human
uugucucccaggcuggagugcagug

SEQ ID NO: 277130 - RNA, 32 nt, Human
uugucucccaggcuggagugcagugacacaau

SEQ ID NO: 277131 - RNA, 32 nt, Human
uugucucccaggcuggagugcaguggcgugau

SEQ ID NO: 277132 - RNA, 32 nt, Human
uugucuccccggcuggagugcaguggcaugau

SEQ ID NO: 277133 - RNA, 32 nt, Human
uugucucccucgggcucuagagcuaggcccga

SEQ ID NO: 277134 - RNA, 32 nt, Human
uugucucccucucccuccacagucuccuuggc

SEQ ID NO: 277135 - RNA, 32 nt, Human
uugucuccgagggggagucauguuccccacuc

SEQ ID NO: 277136 - RNA, 32 nt, Human
uugucuccuagagaaagggacagggaaucgaa

SEQ ID NO: 277137 - RNA, 32 nt, Human
uugucuccuccuccuccugcuuccccugcuca

SEQ ID NO: 277138 - RNA, 32 nt, Human
uugucuccucuauccugggcuuuuguuuugcu

SEQ ID NO: 277139 - RNA, 32 nt, Human
uugucuccugagguggagagggggccucugaa

SEQ ID NO: 277140 - RNA, 32 nt, Human
uugucuccugcucuucuggagccuggaaggaa

SEQ ID NO: 277141 - RNA, 32 nt, Human
uugucuccuucccaccuggcccagagaugcuu

SEQ ID NO: 277142 - RNA, 32 nt, Human
uugucuccuucccccacucauccuggccuucc

SEQ ID NO: 277143 - RNA, 32 nt, Human
uugucucggggucccccgaugaggcgacccgg

SEQ ID NO: 277144 - RNA, 32 nt, Human
uugucucuacaaagcacccugaccccagaugc

SEQ ID NO: 277145 - RNA, 32 nt, Human
uugucucuacauuucuuuaucauuccaguggg

SEQ ID NO: 277146 - RNA, 32 nt, Human
uugucucuagcauaauaaacccagggaacacu

SEQ ID NO: 277147 - RNA, 32 nt, Human
uugucucuaguaguguggccugugccagcacc

SEQ ID NO: 277148 - RNA, 31 nt, Human
uugucucuauggauuuaccuguucuggauau

SEQ ID NO: 277149 - RNA, 32 nt, Human
uugucucuauugucacacaugguuauauuuaa

SEQ ID NO: 277150 - RNA, 32 nt, Human
uugucucucaacucugcuuuucuccaguucca

SEQ ID NO: 277151 - RNA, 32 nt, Human
uugucucucaggcuggguugcaauggcacaau

SEQ ID NO: 277152 - RNA, 32 nt, Human
uugucucucgcugcagucgcagcuccaggucu

SEQ ID NO: 277153 - RNA, 32 nt, Human
uugucucucugacuagcuaaacugccaacuag

SEQ ID NO: 277154 - RNA, 19 nt, Human
uugucucugcucuggguca

SEQ ID NO: 277155 - RNA, 32 nt, Human
uugucucuggccagaggugugguauagaacca

SEQ ID NO: 277156 - RNA, 32 nt, Human
uugucucugggcaguugcagagcagguuuguu

SEQ ID NO: 277157 - RNA, 32 nt, Human
uugucucuggggaaacuuuugcccuaugaacc

SEQ ID NO: 277158 - RNA, 32 nt, Human
uugucucugucucuuaauaauaguuuuuaacg

SEQ ID NO: 277159 - RNA, 32 nt, Human
uugucucuguucugugcuauuugacuugugaa

SEQ ID NO: 277160 - RNA, 32 nt, Human
uugucucuucacgcccaucuucugccucauag

SEQ ID NO: 277161 - RNA, 32 nt, Human
uugucucuuccuuuuugacauuuucugauuuu

SEQ ID NO: 277162 - RNA, 32 nt, Human
uugucucuugguccacaguauuuggaaagguc

SEQ ID NO: 277163 - RNA, 32 nt, Human
uugucugaaacaaacacagagcacuccaucaa

SEQ ID NO: 277164 - RNA, 32 nt, Human
uugucugagcccagcagaagcagcacaagacc

SEQ ID NO: 277165 - RNA, 32 nt, Human
uugucugagcuuccaucuuucucauauuuccu

SEQ ID NO: 277166 - RNA, 32 nt, Human
uugucugagguggcugccagcccagggggugg

SEQ ID NO: 277167 - RNA, 32 nt, Human
uugucugauuuucuccaucauccugauuagca

SEQ ID NO: 277168 - RNA, 32 nt, Human
uugucugcaaaguguuuggugcgaggaagauu

SEQ ID NO: 277169 - RNA, 32 nt, Human
uugucugcaaaugcauuuuucaucuauaaaau

SEQ ID NO: 277170 - RNA, 32 nt, Human
uugucugcacacagagcaguggucuagggagc

SEQ ID NO: 277171 - RNA, 32 nt, Human
uugucugcagaaccaccaccuugaaagaucca

SEQ ID NO: 277172 - RNA, 32 nt, Human
uugucugccaauaccaaggauauucuuguaua

SEQ ID NO: 277173 - RNA, 32 nt, Human
uugucugccauucaauguuuacauuuauguuc

SEQ ID NO: 277174 - RNA, 32 nt, Human
uugucugcccagcugcuccaagccaggcugau

SEQ ID NO: 277175 - RNA, 32 nt, Human
uugucugcucugagggagagugcguggggagc

SEQ ID NO: 277176 - RNA, 32 nt, Human
uugucugcuugaacucugggcuuggugcagag

SEQ ID NO: 277177 - RNA, 32 nt, Human
uugucuggagcagagggagaccauacuagggc

SEQ ID NO: 277178 - RNA, 32 nt, Human
uugucuggaucugagaaccugcauuugguauu

SEQ ID NO: 277179 - RNA, 32 nt, Human
uugucuggccaagacauuugcuucacuuuuaa

SEQ ID NO: 277180 - RNA, 32 nt, Human
uugucuggccacaggccaggcugcugggcauc

SEQ ID NO: 277181 - RNA, 32 nt, Human
uugucuggcuaauaaaucaucaccaacugccu

SEQ ID NO: 277182 - RNA, 32 nt, Human
uugucuggggacccuguagagucacugacccu

SEQ ID NO: 277183 - RNA, 32 nt, Human
uugucuggguuauuggacaauuuauaagaacu

SEQ ID NO: 277184 - RNA, 32 nt, Human
uugucuggguugcuggguuugaaggaaguuug

SEQ ID NO: 277185 - RNA, 32 nt, Human
uugucugguagccuugcuccagaagccuguuc

SEQ ID NO: 277186 - RNA, 32 nt, Human
uugucugguaggggagauguuucguuuucaug

SEQ ID NO: 277187 - RNA, 32 nt, Human
uugucuguacauacuggccucugugauuacau

SEQ ID NO: 277188 - RNA, 32 nt, Human
uugucuguccccacaucuggggauaguaaugc

SEQ ID NO: 277189 - RNA, 32 nt, Human
uugucuguccccaccacauggaggugggggug

SEQ ID NO: 277190 - RNA, 32 nt, Human
uugucuguccuggcugucugugugugugccau

SEQ ID NO: 277191 - RNA, 32 nt, Human
uugucugugcauucaugcaucuaccucauucc

SEQ ID NO: 277192 - RNA, 32 nt, Human
uugucuguggagcugcucucucucccucaucc

SEQ ID NO: 277193 - RNA, 21 nt, Human
uugucugugggcccugggcca

SEQ ID NO: 277194 - RNA, 32 nt, Human
uugucuguggugagcagaugacacccuucuua

SEQ ID NO: 277195 - RNA, 32 nt, Human
uugucugugugugaaccuuuguuuuaggccau

SEQ ID NO: 277196 - RNA, 32 nt, Human
uugucuguuguguucucugugugcccccagug

SEQ ID NO: 277197 - RNA, 32 nt, Human
uugucuuaaaacugaacaugaggauauuaaaa

SEQ ID NO: 277198 - RNA, 24 nt, Human
uugucuuaaaagucucuccuuccc

SEQ ID NO: 277199 - RNA, 32 nt, Human
uugucuuaaugucggggagcagccuggugucc

SEQ ID NO: 277200 - RNA, 32 nt, Human
uugucuuagcuacucaggaggcugaggcagga

SEQ ID NO: 277201 - RNA, 31 nt, Human
uugucuucacucaacgucagggugggggagu

SEQ ID NO: 277202 - RNA, 32 nt, Human
uugucuucagguguuuucucucuuaagucacu

SEQ ID NO: 277203 - RNA, 32 nt, Human
uugucuucccguuccuccccgcagugguuuug

SEQ ID NO: 277204 - RNA, 32 nt, Human
uugucuuccuaaugcuaccuuuguugguccuu

SEQ ID NO: 277205 - RNA, 32 nt, Human
uugucuuccuggauauuugggggugacucgcc

SEQ ID NO: 277206 - RNA, 32 nt, Human
uugucuucuaauuuugcaucccuggacugcgu

SEQ ID NO: 277207 - RNA, 32 nt, Human
uugucuucuacccugcccucuuuucuguucac

SEQ ID NO: 277208 - RNA, 32 nt, Human
uugucuucugcagcuuccuuucccuagagcuu

SEQ ID NO: 277209 - RNA, 32 nt, Human
uugucuucugguuucacaggcuucagcucaug

SEQ ID NO: 277210 - RNA, 32 nt, Human
uugucuucuguccucagacugggcuuuacccc

SEQ ID NO: 277211 - RNA, 32 nt, Human
uugucuucuuacuuccucuccccucucccauu

SEQ ID NO: 277212 - RNA, 32 nt, Human
uugucuucuucugugcuggagauguuuuagag

SEQ ID NO: 277213 - RNA, 32 nt, Human
uugucuucuuucucccuuucccuccuucccuc

SEQ ID NO: 277214 - RNA, 32 nt, Human
uugucuucuuucuccuuacuuuugugaugguu

SEQ ID NO: 277215 - RNA, 32 nt, Human
uugucuugauccaugaaccagaaccacagggc

SEQ ID NO: 277216 - RNA, 32 nt, Human
uugucuugccucugguuccugggauccaguga

SEQ ID NO: 277217 - RNA, 32 nt, Human
uugucuugcucugaaagcuuggagagcuacau

SEQ ID NO: 277218 - RNA, 32 nt, Human
uugucuuggccuuccuggugugcaguacugcu

SEQ ID NO: 277219 - RNA, 32 nt, Human
uugucuuguacccaguuggauuggcagcagcu

SEQ ID NO: 277220 - RNA, 32 nt, Human
uugucuuguauuuuccaaauguuaauacauuu

SEQ ID NO: 277221 - RNA, 32 nt, Human
uugucuugugcaaacauguagaauaugcucuu

SEQ ID NO: 277222 - RNA, 32 nt, Human
uugucuuguucucaacuacuacgcagguagac

SEQ ID NO: 277223 - RNA, 32 nt, Human
uugucuuguugaguuucuccaaaggagcauuu

SEQ ID NO: 277224 - RNA, 32 nt, Human
uugucuuucgugcuccauguuugaagaaauua

SEQ ID NO: 277225 - RNA, 32 nt, Human
uugucuuucugagugguccaagccacuaucac

SEQ ID NO: 277226 - RNA, 32 nt, Human
uugucuuucuuuccucuuccucuuccggcgcg

SEQ ID NO: 277227 - RNA, 32 nt, Human
uugucuuugcugggacugggccugugugccac

SEQ ID NO: 277228 - RNA, 29 nt, Human
uugucuuugucugaaugagaagugagaag

SEQ ID NO: 277229 - RNA, 32 nt, Human
uugucuuuguucugcugauguggagucauguu

SEQ ID NO: 277230 - RNA, 32 nt, Human
uugucuuuuccucugccccuugagccagccua

SEQ ID NO: 277231 - RNA, 32 nt, Human
uugucuuuuuaugacaggauguuugcucagcu

SEQ ID NO: 277232 - RNA, 32 nt, Human
uugucuuuuucccagccgcauccugccuguag

SEQ ID NO: 277233 - RNA, 25 nt, Human
uugucuuuuucucaguggagggagu

SEQ ID NO: 277234 - RNA, 32 nt, Human
uugugaaaaaggcauucagagacgggguuuca

SEQ ID NO: 277235 - RNA, 32 nt, Human
uugugaaaaucucagaaaccugaacauggaaa

SEQ ID NO: 277236 - RNA, 32 nt, Human
uugugaaaccaaaaacaaacgccuuuugugag

SEQ ID NO: 277237 - RNA, 32 nt, Human
uugugaaaucaauguguacaaguggacuuguu

SEQ ID NO: 277238 - RNA, 32 nt, Human
uugugaaaugugcaaaugauaucaccuaugca

SEQ ID NO: 277239 - RNA, 32 nt, Human
uugugaaauguucuuucacuuguaaguuucag

SEQ ID NO: 277240 - RNA, 32 nt, Human
uugugaacaaaugagacaaggcugcaaauuca

SEQ ID NO: 277241 - RNA, 32 nt, Human
uugugaacaagucccuguaauuguuguuugua

SEQ ID NO: 277242 - RNA, 32 nt, Human
uugugaacacauauuuguaaauagugccuuua

SEQ ID NO: 277243 - RNA, 32 nt, Human
uugugaacauuugugauauauguauuaauaaa

SEQ ID NO: 277244 - RNA, 32 nt, Human
uugugaaccaggcuccagucuuccuguggccu

SEQ ID NO: 277245 - RNA, 32 nt, Human
uugugaaccccaaauaucugagaccagucuca

SEQ ID NO: 277246 - RNA, 32 nt, Human
uugugaacggacugcacguuuguuacaaggga

SEQ ID NO: 277247 - RNA, 32 nt, Human
uugugaacugacaggcagccuggacauagaga

SEQ ID NO: 277248 - RNA, 32 nt, Human
uugugaacuuacugccuccccugcugcuccuc

SEQ ID NO: 277249 - RNA, 32 nt, Human
uugugaagaaggcuccugcuuccccuucaccu

SEQ ID NO: 277250 - RNA, 32 nt, Human
uugugaagaguauuugcauugugucuucauuu

SEQ ID NO: 277251 - RNA, 32 nt, Human
uugugaagcacaucauguccagcuaaccucgu

SEQ ID NO: 277252 - RNA, 32 nt, Human
uugugaagcuugagguuggaugugggaauugg

SEQ ID NO: 277253 - RNA, 32 nt, Human
uugugaagcuuugugugacuugcucaggauca

SEQ ID NO: 277254 - RNA, 32 nt, Human
uugugaagucugagguugcaaaaggacuguga

SEQ ID NO: 277255 - RNA, 32 nt, Human
uugugaagugagucugaguuguuuacacugau

SEQ ID NO: 277256 - RNA, 32 nt, Human
uugugaaguggcuguguucacccuggguggac

SEQ ID NO: 277257 - RNA, 32 nt, Human
uugugaaguuuggaagcucuauucgcuguauu

SEQ ID NO: 277258 - RNA, 32 nt, Human
uugugaauagccacugcacuucagccugggca

SEQ ID NO: 277259 - RNA, 32 nt, Human
uugugaaugaucaguggaggacuugcccacgu

SEQ ID NO: 277260 - RNA, 32 nt, Human
uugugaaugaucugcugauuugugcuauuuua

SEQ ID NO: 277261 - RNA, 31 nt, Human
uugugaaugaugggcucuuggaagcacuguc

SEQ ID NO: 277262 - RNA, 32 nt, Human
uugugaaugugacacacgaucucuccaguuuc

SEQ ID NO: 277263 - RNA, 32 nt, Human
uugugaauuuggcuccccaacuccucgcuuca

SEQ ID NO: 277264 - RNA, 32 nt, Human
uugugacaaauugaucacuuguguacgaaaaa

SEQ ID NO: 277265 - RNA, 32 nt, Human
uugugacacugcacuccagccugggcaacaga

SEQ ID NO: 277266 - RNA, 32 nt, Human
uugugacacugcauugcugggcuguguuccuc

SEQ ID NO: 277267 - RNA, 32 nt, Human
uugugacacugcccuccagccugggugacaga

SEQ ID NO: 277268 - RNA, 32 nt, Human
uugugacagagccaugguguguuuguaauaau

SEQ ID NO: 277269 - RNA, 32 nt, Human
uugugacagcacagccauccagcauuaucuua

SEQ ID NO: 277270 - RNA, 32 nt, Human
uugugacaggcagaggguguuccugacagagg

SEQ ID NO: 277271 - RNA, 32 nt, Human
uugugacaggcccugccugccacccuaggcag

SEQ ID NO: 277272 - RNA, 32 nt, Human
uugugacagugaggguugagggcugguccaga

SEQ ID NO: 277273 - RNA, 23 nt, Human
uugugacaucugcauugauuuca

SEQ ID NO: 277274 - RNA, 32 nt, Human
uugugaccagagaauuggcauuuucuacaaau

SEQ ID NO: 277275 - RNA, 32 nt, Human
uugugaccagccugaccaacauagugaaaccc

SEQ ID NO: 277276 - RNA, 32 nt, Human
uugugaccagccuggccaacauagugaaaucc

SEQ ID NO: 277277 - RNA, 32 nt, Human
uugugaccagggucuggaugagcuugaauuug

SEQ ID NO: 277278 - RNA, 32 nt, Human
uugugaccauuguaacaauagcacaauaaagc

SEQ ID NO: 277279 - RNA, 32 nt, Human
uugugaccccauucuguaaucaacugagcuag

SEQ ID NO: 277280 - RNA, 32 nt, Human
uugugaccugggaggcaggaggcgggucuguc

SEQ ID NO: 277281 - RNA, 32 nt, Human
uugugaccuucucugagguugcagcggcucuu

SEQ ID NO: 277282 - RNA, 32 nt, Human
uugugaccuuguacauaacccugggugacgug

SEQ ID NO: 277283 - RNA, 32 nt, Human
uugugacgccugccagccgcaggcuggguccc

SEQ ID NO: 277284 - RNA, 32 nt, Human
uugugacggaguuucccucuuguugcccaggc

SEQ ID NO: 277285 - RNA, 32 nt, Human
uugugacggaguuuugcucuugucucccaggc

SEQ ID NO: 277286 - RNA, 32 nt, Human
uugugacggugugaccagggaggggaagugua

SEQ ID NO: 277287 - RNA, 32 nt, Human
uugugacuagcuacugcacuccaaccugggca

SEQ ID NO: 277288 - RNA, 32 nt, Human
uugugacucuccagagagcaacagugauggcu

SEQ ID NO: 277289 - RNA, 32 nt, Human
uugugacucuuagcagcauggaagagaagugu

SEQ ID NO: 277290 - RNA, 32 nt, Human
uugugacucuucccucucccugccucacagga

SEQ ID NO: 277291 - RNA, 32 nt, Human
uugugacuggacuccagccugggcaacagagc

SEQ ID NO: 277292 - RNA, 32 nt, Human
uugugacugggacaaucagggaccuggauugg

SEQ ID NO: 277293 - RNA, 32 nt, Human
uugugacugggcugugugagggugggguggga

SEQ ID NO: 277294 - RNA, 32 nt, Human
uugugacuguguuugcauugucuaaugacaga

SEQ ID NO: 277295 - RNA, 32 nt, Human
uugugacuuaaagguugacuggucaaaauugu

SEQ ID NO: 277296 - RNA, 32 nt, Human
uugugacuugcagaaacauaggcaguaguccu

SEQ ID NO: 277297 - RNA, 32 nt, Human
uugugagaaagcugccucggggugggguccgg

SEQ ID NO: 277298 - RNA, 32 nt, Human
uugugagaaauccagcaucucaggcuccacug

SEQ ID NO: 277299 - RNA, 32 nt, Human
uugugagaacucccguuccugucccacauugu

SEQ ID NO: 277300 - RNA, 32 nt, Human
uugugagaaugugaugaacgcucugaaccccc

SEQ ID NO: 277301 - RNA, 32 nt, Human
uugugagauccagcccaaucucagccuugaga

SEQ ID NO: 277302 - RNA, 32 nt, Human
uugugagaugaauacuuccugagaaacuugac

SEQ ID NO: 277303 - RNA, 32 nt, Human
uugugagauuuaguuuuugucugccaugggca

SEQ ID NO: 277304 - RNA, 32 nt, Human
uugugagcaauaugcuuucccuuuacacccug

SEQ ID NO: 277305 - RNA, 32 nt, Human
uugugagcauauugagggcagaggaggacuua

SEQ ID NO: 277306 - RNA, 32 nt, Human
uugugagcggccgccucucccggggacaaugu

SEQ ID NO: 277307 - RNA, 32 nt, Human
uugugagcuaucugccccaggcaggccucgcc

SEQ ID NO: 277308 - RNA, 32 nt, Human
uugugagcucagaauuacuuuaaaaggaggua

SEQ ID NO: 277309 - RNA, 32 nt, Human
uugugagcuguggugugagagggugaagccag

SEQ ID NO: 277310 - RNA, 32 nt, Human
uugugaggaaaaagauggcacaaugcuaauaa

SEQ ID NO: 277311 - RNA, 30 nt, Human
uugugaggaagccgcuggggccaguugguc

SEQ ID NO: 277312 - RNA, 32 nt, Human
uugugaggaaggaaaaucagaggacuuggcac

SEQ ID NO: 277313 - RNA, 32 nt, Human
uugugaggagaaauacuaacuggacugacccu

SEQ ID NO: 277314 - RNA, 32 nt, Human
uugugaggccaggccuucugacugucagcacc

SEQ ID NO: 277315 - RNA, 31 nt, Human
uugugaggccuguuuuagccugugucuuuug

SEQ ID NO: 277316 - RNA, 32 nt, Human
uugugaggcugaagcaggaaaauggcaugaac

SEQ ID NO: 277317 - RNA, 32 nt, Human
uugugaggcugaagugggaggacugcuugagc

SEQ ID NO: 277318 - RNA, 32 nt, Human
uugugaggcugaggcgaguggaucacuugagg

SEQ ID NO: 277319 - RNA, 32 nt, Human
uugugaggcugagggaggagaaucgcuugaac

SEQ ID NO: 277320 - RNA, 32 nt, Human
uugugagggagaucugggggaggcaggaagcu

SEQ ID NO: 277321 - RNA, 32 nt, Human
uugugagggcaaggcuugggaggcggggcccu

SEQ ID NO: 277322 - RNA, 32 nt, Human
uugugagggccaaguuugcuaguagaaaucga

SEQ ID NO: 277323 - RNA, 32 nt, Human
uugugagggccagcagugccacccugguaaau

SEQ ID NO: 277324 - RNA, 32 nt, Human
uugugaggguuagacagccucagggcaccauu

SEQ ID NO: 277325 - RNA, 32 nt, Human
uugugagguacugaugagguguaaguggagcu

SEQ ID NO: 277326 - RNA, 32 nt, Human
uugugaguacugucucccucacggugaaugag

SEQ ID NO: 277327 - RNA, 32 nt, Human
uugugagucauugucucucaaaggcugggcca

SEQ ID NO: 277328 - RNA, 32 nt, Human
uugugagugaagaaugcugagaagauuguaau

SEQ ID NO: 277329 - RNA, 32 nt, Human
uugugagugaaugugaaggggagccagcgggc

SEQ ID NO: 277330 - RNA, 32 nt, Human
uugugagugagcugauuuauucugauucauua

SEQ ID NO: 277331 - RNA, 32 nt, Human
uugugaguggccugcugccucaccucccgcag

SEQ ID NO: 277332 - RNA, 32 nt, Human
uugugauauaauaaacuuuucuuauugugguu

SEQ ID NO: 277333 - RNA, 32 nt, Human
uugugauauuuucaccuguagucccagcugcu

SEQ ID NO: 277334 - RNA, 32 nt, Human
uugugaucacacuacgggaaucucugugguau

SEQ ID NO: 277335 - RNA, 32 nt, Human
uugugaucaggagagucaggggugcucagagg

SEQ ID NO: 277336 - RNA, 32 nt, Human
uugugaucaguuauuugcacaguggcucugac

SEQ ID NO: 277337 - RNA, 32 nt, Human
uugugauccaacauguacaguauguauauagu

SEQ ID NO: 277338 - RNA, 32 nt, Human
uugugaucucucucaccuacaucaauuaugua

SEQ ID NO: 277339 - RNA, 32 nt, Human
uugugaugcagaauuaugcacugacaugaccc

SEQ ID NO: 277340 - RNA, 32 nt, Human
uugugaugcccacaggccuggagccagcuagc

SEQ ID NO: 277341 - RNA, 32 nt, Human
uugugauggaugggaacgcaagagauacuuac

SEQ ID NO: 277342 - RNA, 32 nt, Human
uugugaugggcuuucucccacccuggagucuu

SEQ ID NO: 277343 - RNA, 32 nt, Human
uugugauuacaauaugcaaagagucauaaaua

SEQ ID NO: 277344 - RNA, 32 nt, Human
uugugauuggacaagacacaguguggagaaag

SEQ ID NO: 277345 - RNA, 32 nt, Human
uugugauuggucagucacugagccagggauac

SEQ ID NO: 277346 - RNA, 32 nt, Human
uugugauuuccucugaugcaggagaggaaaaa

SEQ ID NO: 277347 - RNA, 32 nt, Human
uugugauuucuuucuguuucuucccacaaaga

SEQ ID NO: 277348 - RNA, 32 nt, Human
uugugcaaccauugcuucauuucuuugcaaaa

SEQ ID NO: 277349 - RNA, 32 nt, Human
uugugcaaggaaaauguccaaaugaugcucuc

SEQ ID NO: 277350 - RNA, 32 nt, Human
uugugcaauucauauauuaaauugcacuuacu

SEQ ID NO: 277351 - RNA, 32 nt, Human
uugugcacacacacagggcucuuggguguguu

SEQ ID NO: 277352 - RNA, 32 nt, Human
uugugcacacagcuuucccagcuuuggugaga

SEQ ID NO: 277353 - RNA, 32 nt, Human
uugugcacacgaugggcaucuaacaucaucau

SEQ ID NO: 277354 - RNA, 32 nt, Human
uugugcacugcacucuagccugggggaagagu

SEQ ID NO: 277355 - RNA, 32 nt, Human
uugugcagaacaaacaaggcauucaugggaau

SEQ ID NO: 277356 - RNA, 32 nt, Human
uugugcagagagaaguagaagcuagaaagcac

SEQ ID NO: 277357 - RNA, 32 nt, Human
uugugcagaguguauaucucugccugggcaag

SEQ ID NO: 277358 - RNA, 32 nt, Human
uugugcagaguuguuugagucauuuccugccu

SEQ ID NO: 277359 - RNA, 21 nt, Human
uugugcagccagaugccugga

SEQ ID NO: 277360 - RNA, 20 nt, Human
uugugcagccaguuccugug

SEQ ID NO: 277361 - RNA, 32 nt, Human
uugugcagcccaccacucccacugaccccacc

SEQ ID NO: 277362 - RNA, 32 nt, Human
uugugcagccgauuucaaggcuaagagagaaa

SEQ ID NO: 277363 - RNA, 24 nt, Human
uugugcagccgggccugccucuga

SEQ ID NO: 277364 - RNA, 32 nt, Human
uugugcaggagaaagggggcgguuggcuuucu

SEQ ID NO: 277365 - RNA, 32 nt, Human
uugugcaggccuccccuccauccuggaccagc

SEQ ID NO: 277366 - RNA, 32 nt, Human
uugugcaggccugcccaguggcuggggcaugg

SEQ ID NO: 277367 - RNA, 21 nt, Human
uugugcaggcuggagugcagu

SEQ ID NO: 277368 - RNA, 22 nt, Human
uugugcaggcuggagugcagug

SEQ ID NO: 277369 - RNA, 32 nt, Human
uugugcaggcuggagugcaguggcacagucuu

SEQ ID NO: 277370 - RNA, 32 nt, Human
uugugcagguggauucuugcucugucacccag

SEQ ID NO: 277371 - RNA, 32 nt, Human
uugugcaguauuagcuugcuuuugcugcugug

SEQ ID NO: 277372 - RNA, 32 nt, Human
uugugcagucauguguuaaauauuucacauuu

SEQ ID NO: 277373 - RNA, 32 nt, Human
uugugcagugaagggaaaaguuggcauuuuga

SEQ ID NO: 277374 - RNA, 32 nt, Human
uugugcagugugacauggacuugcuguccuaa

SEQ ID NO: 277375 - RNA, 32 nt, Human
uugugcaucaccaaugaaugaaucagguugag

SEQ ID NO: 277376 - RNA, 32 nt, Human
uugugcaugcaccauuucucucuuacuaacag

SEQ ID NO: 277377 - RNA, 32 nt, Human
uugugcauugcacuccagccugagcaacagga

SEQ ID NO: 277378 - RNA, 32 nt, Human
uugugccaaaaaugcugaccuucaggccccgc

SEQ ID NO: 277379 - RNA, 32 nt, Human
uugugccaacagcccagaauugucacuuauau

SEQ ID NO: 277380 - RNA, 32 nt, Human
uugugccaauguacuccagccuaggugacaga

SEQ ID NO: 277381 - RNA, 32 nt, Human
uugugccacacacuccagccuggguggcaaag

SEQ ID NO: 277382 - RNA, 32 nt, Human
uugugccacagcacuguuuucuuucugcccuc

SEQ ID NO: 277383 - RNA, 32 nt, Human
uugugccaccacacuccagccugggcgacaga

SEQ ID NO: 277384 - RNA, 32 nt, Human
uugugccaccgcacuccagcaugggugacaga

SEQ ID NO: 277385 - RNA, 32 nt, Human
uugugccacggcacuccagccugggcagcaga

SEQ ID NO: 277386 - RNA, 32 nt, Human
uugugccacuacacuccagccuggccacagag

SEQ ID NO: 277387 - RNA, 32 nt, Human
uugugccacuacacuccagccuggccgacaga

SEQ ID NO: 277388 - RNA, 32 nt, Human
uugugccacuacacuccagccugggagacaga

SEQ ID NO: 277389 - RNA, 32 nt, Human
uugugccacuacacuccagccugggcaacaca

SEQ ID NO: 277390 - RNA, 32 nt, Human
uugugccacuacacuccagccugggcaacaga

SEQ ID NO: 277391 - RNA, 32 nt, Human
uugugccacuacacuccagccugggugacaaa

SEQ ID NO: 277392 - RNA, 32 nt, Human
uugugccacuaguacuccagccugggugacag

SEQ ID NO: 277393 - RNA, 32 nt, Human
uugugccacuccccuccagccugggcgacaga

SEQ ID NO: 277394 - RNA, 32 nt, Human
uugugccacugaacucuagccuggguaacaga

SEQ ID NO: 277395 - RNA, 32 nt, Human
uugugccacugcacaccagccuggacaacaga

SEQ ID NO: 277396 - RNA, 32 nt, Human
uugugccacugcacaccggccugggugacagc

SEQ ID NO: 277397 - RNA, 32 nt, Human
uugugccacugcacacuccaaucugggugaaa

SEQ ID NO: 277398 - RNA, 32 nt, Human
uugugccacugcaccccagccuuggcaacaga

SEQ ID NO: 277399 - RNA, 32 nt, Human
uugugccacugcacgcacuccagccugggcga

SEQ ID NO: 277400 - RNA, 32 nt, Human
uugugccacugcacucaagccugggugacgag

SEQ ID NO: 277401 - RNA, 32 nt, Human
uugugccacugcacucauccuggaagacagag

SEQ ID NO: 277402 - RNA, 32 nt, Human
uugugccacugcacuccaacaaccgagcgaga

SEQ ID NO: 277403 - RNA, 32 nt, Human
uugugccacugcacuccaaccugggugacaga

SEQ ID NO: 277404 - RNA, 32 nt, Human
uugugccacugcacuccacccugggcaacaga

SEQ ID NO: 277405 - RNA, 32 nt, Human
uugugccacugcacuccagacugggugacaca

SEQ ID NO: 277406 - RNA, 32 nt, Human
uugugccacugcacuccagccagagugacaga

SEQ ID NO: 277407 - RNA, 32 nt, Human
uugugccacugcacuccagccggggugacaga

SEQ ID NO: 277408 - RNA, 32 nt, Human
uugugccacugcacuccagccuaggcaacaga

SEQ ID NO: 277409 - RNA, 32 nt, Human
uugugccacugcacuccagccuaggcgacaga

SEQ ID NO: 277410 - RNA, 32 nt, Human
uugugccacugcacuccagccugagcaacaaa

SEQ ID NO: 277411 - RNA, 32 nt, Human
uugugccacugcacuccagccuggacgacaga

SEQ ID NO: 277412 - RNA, 32 nt, Human
uugugccacugcacuccagccuggcaacagag

SEQ ID NO: 277413 - RNA, 32 nt, Human
uugugccacugcacuccagccugggagacaga

SEQ ID NO: 277414 - RNA, 32 nt, Human
uugugccacugcacuccagccugggcaacaag

SEQ ID NO: 277415 - RNA, 32 nt, Human
uugugccacugcacuccagccugggcaacaca

SEQ ID NO: 277416 - RNA, 32 nt, Human
uugugccacugcacuccagccugggcaacaga

SEQ ID NO: 277417 - RNA, 32 nt, Human
uugugccacugcacuccagccugggcaacuga

SEQ ID NO: 277418 - RNA, 32 nt, Human
uugugccacugcacuccagccugggcaauaga

SEQ ID NO: 277419 - RNA, 32 nt, Human
uugugccacugcacuccagccugggcaccaau

SEQ ID NO: 277420 - RNA, 32 nt, Human
uugugccacugcacuccagccugggccacaga

SEQ ID NO: 277421 - RNA, 32 nt, Human
uuuaucuugaaggaaccauuagauauggaaaa

SEQ ID NO: 277422 - RNA, 20 nt, Human
uuuaucuugacccgcaagca

SEQ ID NO: 277423 - RNA, 32 nt, Human
uuuaucuugcccaaagagcucccucucaaggc

SEQ ID NO: 277424 - RNA, 32 nt, Human
uuuaucuugcuuuggaggaccuuaaaugcuac

SEQ ID NO: 277425 - RNA, 26 nt, Human
uuuaucuuuaccuaggguucagucag

SEQ ID NO: 277426 - RNA, 32 nt, Human
uuuaucuuuauuguugaaucuaaugccuaaug

SEQ ID NO: 277427 - RNA, 21 nt, Human
uuuaucuuucaugugggcuaa

SEQ ID NO: 277428 - RNA, 32 nt, Human
uuuaucuuugaaauuuuguacauugcuuuucc

SEQ ID NO: 277429 - RNA, 32 nt, Human
uuuaucuuugucaucucucaaauuagaauaua

SEQ ID NO: 277430 - RNA, 21 nt, Human
uuuaucuuuguucccaaggca

SEQ ID NO: 277431 - RNA, 32 nt, Human
uuuaucuuuuaagcuaucuauaccuuacugca

SEQ ID NO: 277432 - RNA, 32 nt, Human
uuuaucuuuucucugcugauacgguugcuuga

SEQ ID NO: 277433 - RNA, 32 nt, Human
uuuaucuuuugaaaucgaguuucuuuuguauu

SEQ ID NO: 277434 - RNA, 32 nt, Human
uuuaugaaaacugugcaauugugugcauguuu

SEQ ID NO: 277435 - RNA, 32 nt, Human
uuuaugaaaugagaaaauuauuggacaauuca

SEQ ID NO: 277436 - RNA, 21 nt, Human
uuuaugaaauuauauugcauu

SEQ ID NO: 277437 - RNA, 32 nt, Human
uuuaugaaccaccaggcugaacccuucucugg

SEQ ID NO: 277438 - RNA, 32 nt, Human
uuuaugaagagaguugaguuuaacaauccuag

SEQ ID NO: 277439 - RNA, 20 nt, Human
uuuaugaaggcaucauguca

SEQ ID NO: 277440 - RNA, 32 nt, Human
uuuaugacaagcuguaucacugccuucguuua

SEQ ID NO: 277441 - RNA, 32 nt, Human
uuuaugacagaauuauuauagcugagcugacu

SEQ ID NO: 277442 - RNA, 32 nt, Human
uuuaugacugcaacuugccuuuuccauuacag

SEQ ID NO: 277443 - RNA, 21 nt, Human
uuuaugacugugagcaucuca

SEQ ID NO: 277444 - RNA, 21 nt, Human
uuuaugacugugaugcauuca

SEQ ID NO: 277445 - RNA, 20 nt, Human
uuuaugacuguuagugacuc

SEQ ID NO: 277446 - RNA, 32 nt, Human
uuuaugacuucugcuuuuuaugucuuuuuaaa

SEQ ID NO: 277447 - RNA, 32 nt, Human
uuuaugacuuuuugaaaaagcuucugggaguu

SEQ ID NO: 277448 - RNA, 32 nt, Human
uuuaugagaacaaacucaaguccauagaaacc

SEQ ID NO: 277449 - RNA, 23 nt, Human
uuuaugagcauauauugcauuua

SEQ ID NO: 277450 - RNA, 32 nt, Human
uuuaugaguauuagccuuuuaaguuaugggag

SEQ ID NO: 277451 - RNA, 32 nt, Human
uuuaugagugauacccauuugagggccucuaa

SEQ ID NO: 277452 - RNA, 32 nt, Human
uuuaugaucuggguuacgguauguucugggga

SEQ ID NO: 277453 - RNA, 22 nt, Human
uuuaugauuauuauauuuuuca

SEQ ID NO: 277454 - RNA, 32 nt, Human
uuuaugauuguuuuguaaauaucuuuguauau

SEQ ID NO: 277455 - RNA, 32 nt, Human
uuuaugcaaccauaagacaaacuccugaaaug

SEQ ID NO: 277456 - RNA, 32 nt, Human
uuuaugcacacagagacccagggugagggagu

SEQ ID NO: 277457 - RNA, 32 nt, Human
uuuaugcagaauguugauuacagugcagugcg

SEQ ID NO: 277458 - RNA, 32 nt, Human
uuuaugcauagagagugcaguuaugaaaauga

SEQ ID NO: 277459 - RNA, 32 nt, Human
uuuaugcauauguagauacaaggaugcacaua

SEQ ID NO: 277460 - RNA, 32 nt, Human
uuuaugccccacugcuguccuaagucccuggc

SEQ ID NO: 277461 - RNA, 32 nt, Human
uuuaugcccccucuauucuccucucuccccca

SEQ ID NO: 277462 - RNA, 32 nt, Human
uuuaugcccuaucaccauggugaugggauuag

SEQ ID NO: 277463 - RNA, 32 nt, Human
uuuaugcccuggagaagaccuacuugaacagg

SEQ ID NO: 277464 - RNA, 32 nt, Human
uuuaugccucugcuuggcuaucacccucuuag

SEQ ID NO: 277465 - RNA, 28 nt, Human
uuuaugccugaacauagacucucucauc

SEQ ID NO: 277466 - RNA, 32 nt, Human
uuuaugccugcugcuucucugccucuuugagg

SEQ ID NO: 277467 - RNA, 32 nt, Human
uuuaugccuguaaucccagcacugugggaggc

SEQ ID NO: 277468 - RNA, 32 nt, Human
uuuaugccuuuggccuuccauucugauuucuc

SEQ ID NO: 277469 - RNA, 32 nt, Human
uuuaugcuauggaggaaaaagaaaaagaaaua

SEQ ID NO: 277470 - RNA, 32 nt, Human
uuuaugcucuuccuccacaucuucauuuggcu

SEQ ID NO: 277471 - RNA, 32 nt, Human
uuuaugcugaagaccuggcaggaggcaacucc

SEQ ID NO: 277472 - RNA, 32 nt, Human
uuuaugcugaggcuuuaauucaggugacuugc

SEQ ID NO: 277473 - RNA, 32 nt, Human
uuuaugcugcuggcuuuugugcccuggaagau

SEQ ID NO: 277474 - RNA, 32 nt, Human
uuuaugcuggacccaguaagaugaggaagucg

SEQ ID NO: 277475 - RNA, 32 nt, Human
uuuaugcugggugauauagucaaaauuugcuu

SEQ ID NO: 277476 - RNA, 32 nt, Human
uuuaugcuucuuugaaaaccagugugugacuc

SEQ ID NO: 277477 - RNA, 32 nt, Human
uuuaugcuugggaggucgaggcugcagugagu

SEQ ID NO: 277478 - RNA, 32 nt, Human
uuuauggaaucagcucucgcacugcccaucuu

SEQ ID NO: 277479 - RNA, 32 nt, Human
uuuauggaguucccuggaguggcagagcuaua

SEQ ID NO: 277480 - RNA, 32 nt, Human
uuuauggaguuuuugggcaggagcucauugca

SEQ ID NO: 277481 - RNA, 32 nt, Human
uuuauggauguggcugagaccuuaaacuugag

SEQ ID NO: 277482 - RNA, 32 nt, Human
uuuauggcacacugggauaaacaagcaagauu

SEQ ID NO: 277483 - RNA, 32 nt, Human
uuuauggcaggagggagaaaaaguguuacaac

SEQ ID NO: 277484 - RNA, 32 nt, Human
uuuauggcaucacucccuucuaaucagcaagu

SEQ ID NO: 277485 - RNA, 32 nt, Human
uuuauggcauuugagauugaaacuaagaaaug

SEQ ID NO: 277486 - RNA, 32 nt, Human
uuuauggcccaggagaaaauguagacccugag

SEQ ID NO: 277487 - RNA, 32 nt, Human
uuuauggcucagggggcaucacagaaccugcc

SEQ ID NO: 277488 - RNA, 32 nt, Human
uuuauggcugcugggcugagugacacaagcac

SEQ ID NO: 277489 - RNA, 32 nt, Human
uuuauggcuguaaucugcaaacucugggaggc

SEQ ID NO: 277490 - RNA, 32 nt, Human
uuuauggcuuugccaagcuacaucaagaacuc

SEQ ID NO: 277491 - RNA, 32 nt, Human
uuuaugggagaagggcaaagacuucaugggaa

SEQ ID NO: 277492 - RNA, 32 nt, Human
uuuaugggccucccccaauugucuuuuuauuu

SEQ ID NO: 277493 - RNA, 32 nt, Human
uuuaugggcucaagaaugccaugcgcuggcag

SEQ ID NO: 277494 - RNA, 32 nt, Human
uuuauggggaaagggagggacugagggcagag

SEQ ID NO: 277495 - RNA, 32 nt, Human
uuuaugggguggaaacagcauuaagaauacug

SEQ ID NO: 277496 - RNA, 32 nt, Human
uuuauggguauuucccuaauugugagagauua

SEQ ID NO: 277497 - RNA, 32 nt, Human
uuuaugggugagguacuuugggccaguagagu

SEQ ID NO: 277498 - RNA, 32 nt, Human
uuuauggguggcccagcuucuucaagaccuuc

SEQ ID NO: 277499 - RNA, 32 nt, Human
uuuauggucaguugauuuuaaaccagagugcc

SEQ ID NO: 277500 - RNA, 32 nt, Human
uuuauggugggguacuuuauuggugauuaaua

SEQ ID NO: 277501 - RNA, 32 nt, Human
uuuaugguugauauuagguuuaauaccuagaa

SEQ ID NO: 277502 - RNA, 32 nt, Human
uuuaugguuucaaagcaguuuaugggaacuuc

SEQ ID NO: 277503 - RNA, 32 nt, Human
uuuaugguuuuuccugcuucugagcgucguuc

SEQ ID NO: 277504 - RNA, 32 nt, Human
uuuauguaaagagcaacucagcaggacacaga

SEQ ID NO: 277505 - RNA, 25 nt, Human
uuuauguaaagguauuuaugggcca

SEQ ID NO: 277506 - RNA, 32 nt, Human
uuuauguaaauacuuuugugacuucauuguaa

SEQ ID NO: 277507 - RNA, 21 nt, Human
uuuauguaaauauucugcagu

SEQ ID NO: 277508 - RNA, 32 nt, Human
uuuauguagagcuggaagaaggccguccaucc

SEQ ID NO: 277509 - RNA, 32 nt, Human
uuuauguauaugcacauacacacaaaauuagg

SEQ ID NO: 277510 - RNA, 32 nt, Human
uuuauguauuuuuaguagagaugggguuucac

SEQ ID NO: 277511 - RNA, 32 nt, Human
uuuaugucacuccccaccuccucauauuuaau

SEQ ID NO: 277512 - RNA, 32 nt, Human
uuuaugucagccgcgaucccacccccacaagc

SEQ ID NO: 277513 - RNA, 32 nt, Human
uuuauguccauuggauacuuuccuuuuuauca

SEQ ID NO: 277514 - RNA, 32 nt, Human
uuuauguccuccaagagcugcuggagggcaug

SEQ ID NO: 277515 - RNA, 32 nt, Human
uuuauguccucuucucccuuuccauccuucag

SEQ ID NO: 277516 - RNA, 32 nt, Human
uuuauguccucuucucccuuuccaucuuucag

SEQ ID NO: 277517 - RNA, 32 nt, Human
uuuauguccucuucucuguuucuaccuuucag

SEQ ID NO: 277518 - RNA, 32 nt, Human
uuuauguccugagagccaugugcagaugagga

SEQ ID NO: 277519 - RNA, 32 nt, Human
uuuaugucuagacuguugcuuaugacaccucc

SEQ ID NO: 277520 - RNA, 32 nt, Human
uuuaugucuccaugcaaacauucaaagugcuu

SEQ ID NO: 277521 - RNA, 32 nt, Human
uuuaugucuggcuucucucacuuaacauauug

SEQ ID NO: 277522 - RNA, 32 nt, Human
uuuaugucugguguuaagauuaauauuucaga

SEQ ID NO: 277523 - RNA, 32 nt, Human
uuuaugucuuucuccucuuccuauucugucau

SEQ ID NO: 277524 - RNA, 32 nt, Human
uuuaugugagugugucuuuuacagaaaccauu

SEQ ID NO: 277525 - RNA, 32 nt, Human
uuuauguggaucccuguguaugcugaacuaca

SEQ ID NO: 277526 - RNA, 32 nt, Human
uuuauguggucacauuacaucucuccaccucu

SEQ ID NO: 277527 - RNA, 32 nt, Human
uuuaugugguccagagaggcugcaucagucuc

SEQ ID NO: 277528 - RNA, 32 nt, Human
uuuaugugugugccucauuccuuucccaccaa

SEQ ID NO: 277529 - RNA, 32 nt, Human
uuuauguuauuuggcuaaauguuaugaugcag

SEQ ID NO: 277530 - RNA, 32 nt, Human
uuuauguucauguccuguaaauuuuuaaguac

SEQ ID NO: 277531 - RNA, 32 nt, Human
uuuauguugauuuugacccucuuauuuaaucu

SEQ ID NO: 277532 - RNA, 32 nt, Human
uuuauguugcagcaucuuuucuuuguggcuca

SEQ ID NO: 277533 - RNA, 32 nt, Human
uuuauguugcauucaaagacuguugucuuguu

SEQ ID NO: 277534 - RNA, 32 nt, Human
uuuauguuucaucaaacuuguuccagcuaauc

SEQ ID NO: 277535 - RNA, 32 nt, Human
uuuauguuuuaaaaaugaucaauguuuugauu

SEQ ID NO: 277536 - RNA, 32 nt, Human
uuuauuaaaaccagucucagauaucauacuga

SEQ ID NO: 277537 - RNA, 32 nt, Human
uuuauuaaaacuuuacauggaggggaagaaua

SEQ ID NO: 277538 - RNA, 32 nt, Human
uuuauuaaaggcuaaaaacaauaccaccaaua

SEQ ID NO: 277539 - RNA, 32 nt, Human
uuuauuaaaugauggauguucucacugucagu

SEQ ID NO: 277540 - RNA, 32 nt, Human
uuuauuaacuuagggcagauauaaaauaaagg

SEQ ID NO: 277541 - RNA, 32 nt, Human
uuuauuaauaaauugguaauauacaaaacaau

SEQ ID NO: 277542 - RNA, 32 nt, Human
uuuauuaauguucaaaacacuggaauuacaaa

SEQ ID NO: 277543 - RNA, 32 nt, Human
uuuauuaauuuuccuucuguguguucaauuug

SEQ ID NO: 277544 - RNA, 32 nt, Human
uuuauuacaaugauuuucucccuucuuuuaca

SEQ ID NO: 277545 - RNA, 32 nt, Human
uuuauuacauuuucacgugucuucacgcaucu

SEQ ID NO: 277546 - RNA, 32 nt, Human
uuuauuacccuuuugcauguauuugugugaca

SEQ ID NO: 277547 - RNA, 32 nt, Human
uuuauuaccuaggaugggguuucucuaauugc

SEQ ID NO: 277548 - RNA, 32 nt, Human
uuuauuacuacugcuuuacugccuguagcagg

SEQ ID NO: 277549 - RNA, 32 nt, Human
uuuauuacucacaagaccuuuuuccuccguuu

SEQ ID NO: 277550 - RNA, 32 nt, Human
uuuauuacuuaucuugcguauauuuuagaggu

SEQ ID NO: 277551 - RNA, 32 nt, Human
uuuauuacuuuuguuuuuaauuuuaaccauag

SEQ ID NO: 277552 - RNA, 32 nt, Human
uuuauuagaaggagaggguaggugcagagcug

SEQ ID NO: 277553 - RNA, 32 nt, Human
uuuauuagacuuuucucauaaguuuugacugg

SEQ ID NO: 277554 - RNA, 32 nt, Human
uuuauuagagacauaguguggcagucucuaga

SEQ ID NO: 277555 - RNA, 32 nt, Human
uuuauuagauaacauuugaaguaaugacuuag

SEQ ID NO: 277556 - RNA, 32 nt, Human
uuuauuagggcucucauuucaugaccuaauua

SEQ ID NO: 277557 - RNA, 22 nt, Human
uuuauuaugaaucauuuucccc

SEQ ID NO: 277558 - RNA, 32 nt, Human
uuuauuauguguugugguguacuccucuuugg

SEQ ID NO: 277559 - RNA, 32 nt, Human
uuuauuauuagaaaagauugcugagaguauuu

SEQ ID NO: 277560 - RNA, 32 nt, Human
uuuauuauuauuuaguacaaaaauagauuccc

SEQ ID NO: 277561 - RNA, 32 nt, Human
uuuauuauuuacacugaauuccaauuucauuu

SEQ ID NO: 277562 - RNA, 32 nt, Human
uuuauuauuucauaagaaaacuacguuaauuu

SEQ ID NO: 277563 - RNA, 32 nt, Human
uuuauucaagcuucagcuuucagcuggguugu

SEQ ID NO: 277564 - RNA, 32 nt, Human
uuuauucacuuucaacagcaguggcccugggc

SEQ ID NO: 277565 - RNA, 32 nt, Human
uuuauucacuuuccucauuucugccuuucuac

SEQ ID NO: 277566 - RNA, 32 nt, Human
uuuauucagaggagaugcucaauagauguuug

SEQ ID NO: 277567 - RNA, 32 nt, Human
uuuauucagcaacuauuuauuaagcaucaacu

SEQ ID NO: 277568 - RNA, 32 nt, Human
uuuauucauauaaaugugcagaaagauuccaa

SEQ ID NO: 277569 - RNA, 32 nt, Human
uuuauucaucaccccuguccucucauccauaa

SEQ ID NO: 277570 - RNA, 32 nt, Human
uuuauucaugccagucuguugcaugcaggcuu

SEQ ID NO: 277571 - RNA, 32 nt, Human
uuuauucauuagauacagaaggugcaguauua

SEQ ID NO: 277572 - RNA, 32 nt, Human
uuuauucauucaacaaacaguggccgaaggcu

SEQ ID NO: 277573 - RNA, 32 nt, Human
uuuauuccaagacucaguuuugcauuucugac

SEQ ID NO: 277574 - RNA, 32 nt, Human
uuuauuccagcacuucucuguguuuuacagac

SEQ ID NO: 277575 - RNA, 32 nt, Human
uuuauuccauaggguuucucuccugugcagcu

SEQ ID NO: 277576 - RNA, 32 nt, Human
uuuauucccuccaucaucuagacuugauuuua

SEQ ID NO: 277577 - RNA, 32 nt, Human
uuuauuccuccaccucuugcuccaaucagugg

SEQ ID NO: 277578 - RNA, 32 nt, Human
uuuauuccuccaccucuugcugcaaucagugg

SEQ ID NO: 277579 - RNA, 32 nt, Human
uuuauuccugcuguuuuguuuuggggaccagg

SEQ ID NO: 277580 - RNA, 32 nt, Human
uuuauuccuggcauccagagugacagugaacu

SEQ ID NO: 277581 - RNA, 32 nt, Human
uuuauuccuuucccccaggcccucucuauuug

SEQ ID NO: 277582 - RNA, 32 nt, Human
uuuauucgcugggcuccagcccauuugcauaa

SEQ ID NO: 277583 - RNA, 32 nt, Human
uuuauucggaccaagcagagcucacagcugga

SEQ ID NO: 277584 - RNA, 32 nt, Human
uuuauucgugagccucucggcuccuggggucc

SEQ ID NO: 277585 - RNA, 32 nt, Human
uuuauucuacagcgcagcuaccaagccuuuua

SEQ ID NO: 277586 - RNA, 32 nt, Human
uuuauucucucccgcccuccuacaagcgcucu

SEQ ID NO: 277587 - RNA, 32 nt, Human
uuuauucugagaaguugaggcaaaucaguauu

SEQ ID NO: 277588 - RNA, 32 nt, Human
uuuauucugcugucuggcuucaugccauugca

SEQ ID NO: 277589 - RNA, 32 nt, Human
uuuauucuuagacucaugugauccaagcugua

SEQ ID NO: 277590 - RNA, 32 nt, Human
uuuauucuuauucaaagaaauaucugagcucu

SEQ ID NO: 277591 - RNA, 32 nt, Human
uuuauucuuauuuuuggagacagggucucgcu

SEQ ID NO: 277592 - RNA, 32 nt, Human
uuuauucuucacugaggauuucugaucugauu

SEQ ID NO: 277593 - RNA, 32 nt, Human
uuuauucuucauucugacuuuuuaacuguuug

SEQ ID NO: 277594 - RNA, 31 nt, Human
uuuauugaacaauguagucacuugaagguuu

SEQ ID NO: 277595 - RNA, 32 nt, Human
uuuauugacaagugauuuucaagucuguguuc

SEQ ID NO: 277596 - RNA, 32 nt, Human
uuuauugagcacugcugguggccaggagugcg

SEQ ID NO: 277597 - RNA, 32 nt, Human
uuuauugaugauuuuuauuuucuuuauuuuuc

SEQ ID NO: 277598 - RNA, 32 nt, Human
uuuauugcaaaugcacaaucuuuuucccauug

SEQ ID NO: 277599 - RNA, 32 nt, Human
uuuauugcagagacccagcagauguaacucuc

SEQ ID NO: 277600 - RNA, 32 nt, Human
uuuauugcaugguuccugggaacauguggcac

SEQ ID NO: 277601 - RNA, 32 nt, Human
uuuauugccaacacccuuggaagaacaucucc

SEQ ID NO: 277602 - RNA, 32 nt, Human
uuuauugcccaggcuggaguguaguggcgcaa

SEQ ID NO: 277603 - RNA, 32 nt, Human
uuuauugccucgucuuauucacugaccuuugu

SEQ ID NO: 277604 - RNA, 32 nt, Human
uuuauugcuauuugaagcagauguucaccaau

SEQ ID NO: 277605 - RNA, 32 nt, Human
uuuauugcugaaggacuuuuucaggcuuuagc

SEQ ID NO: 277606 - RNA, 32 nt, Human
uuuauugcugaguugcauuccaugguacggau

SEQ ID NO: 277607 - RNA, 32 nt, Human
uuuauugcuucuucucccaucugcccguugac

SEQ ID NO: 277608 - RNA, 32 nt, Human
uuuauugcuuguuuuucucccaauuguaaauu

SEQ ID NO: 277609 - RNA, 32 nt, Human
uuuauuggacuaaaaacuaacagaacuucauu

SEQ ID NO: 277610 - RNA, 32 nt, Human
uuuauuggccuggaguguggccuaggcauuag

SEQ ID NO: 277611 - RNA, 32 nt, Human
uuuauuggcuuugcucccaacccccugcccua

SEQ ID NO: 277612 - RNA, 32 nt, Human
uuuauugggcagggggagggggagggcacagg

SEQ ID NO: 277613 - RNA, 32 nt, Human
uuuauugguccucugguguuugguggcaugaa

SEQ ID NO: 277614 - RNA, 32 nt, Human
uuuauuggucucagcaaauugaacucaagcau

SEQ ID NO: 277615 - RNA, 21 nt, Human
uuuauuggucuguuccuuugg

SEQ ID NO: 277616 - RNA, 28 nt, Human
uuuauugguugaauguguaucuauuuga

SEQ ID NO: 277617 - RNA, 32 nt, Human
uuuauuguaauaccucacagacguuguaccau

SEQ ID NO: 277618 - RNA, 32 nt, Human
uuuauugugauuuauauuuccacagcguuuag

SEQ ID NO: 277619 - RNA, 32 nt, Human
uuuauuguggaccccauggaaugugauuaaau

SEQ ID NO: 277620 - RNA, 32 nt, Human
uuuauugugugguuagcacaaggaaucuaauu

SEQ ID NO: 277621 - RNA, 32 nt, Human
uuuauuguguuuuggaacauuaauugugagau

SEQ ID NO: 277622 - RNA, 23 nt, Human
uuuauuguuauuaauugcacuua

SEQ ID NO: 277623 - RNA, 32 nt, Human
uuuauuguuccaagggagccucaucaaaacca

SEQ ID NO: 277624 - RNA, 32 nt, Human
uuuauuguucugcucauuguguuugugacaaa

SEQ ID NO: 277625 - RNA, 18 nt, Human
uuuauuguugcuggcaca

SEQ ID NO: 277626 - RNA, 32 nt, Human
uuuauuguuguauuaaaguaccuguguuacac

SEQ ID NO: 277627 - RNA, 32 nt, Human
uuuauuguuuuuauuccacacuuccuacuugg

SEQ ID NO: 277628 - RNA, 32 nt, Human
uuuauuuaauuucuuuucuuccugucuguucc

SEQ ID NO: 277629 - RNA, 32 nt, Human
uuuauuuacagucuuauuuauguucuguuuaa

SEQ ID NO: 277630 - RNA, 32 nt, Human
uuuauuuacauacaaguucucucucccucacu

SEQ ID NO: 277631 - RNA, 32 nt, Human
uuuauuuagaaccugguucuguguuuaauaua

SEQ ID NO: 277632 - RNA, 32 nt, Human
uuuauuuagaucuuuccuuguggaaaaauaag

SEQ ID NO: 277633 - RNA, 32 nt, Human
uuuauuuagcacaaaccaagcacaaaaguccu

SEQ ID NO: 277634 - RNA, 32 nt, Human
uuuauuuaggucuggccccacccuggagucuu

SEQ ID NO: 277635 - RNA, 21 nt, Human
uuuauuuaguucacacauuau

SEQ ID NO: 277636 - RNA, 24 nt, Human
uuuauuuauaacacuuuuuuggca

SEQ ID NO: 277637 - RNA, 32 nt, Human
uuuauuuauuacagggcugcuauuuucauaau

SEQ ID NO: 277638 - RNA, 32 nt, Human
uuuauuuauuguauuuaaaccuggugagagga

SEQ ID NO: 277639 - RNA, 32 nt, Human
uuuauuuauuucaaaugcaguuguauuaguuc

SEQ ID NO: 277640 - RNA, 32 nt, Human
uuuauuucaaacucucuaaugcaccugccuca

SEQ ID NO: 277641 - RNA, 32 nt, Human
uuuauuucaaugagaaagcacugugaaauugu

SEQ ID NO: 277642 - RNA, 32 nt, Human
uuuauuucacacauuuucuuuacauaugcaca

SEQ ID NO: 277643 - RNA, 32 nt, Human
uuuauuucaccuugccaagacacccacacuac

SEQ ID NO: 277644 - RNA, 32 nt, Human
uuuauuucacucaggggcacugugguugcugu

SEQ ID NO: 277645 - RNA, 32 nt, Human
uuuauuucauguuugcauacuauaaaaucuga

SEQ ID NO: 277646 - RNA, 31 nt, Human
uuuauuucauuaaauaccuugaagaaucuua

SEQ ID NO: 277647 - RNA, 32 nt, Human
uuuauuucauugacuaacccaggacaguuuca

SEQ ID NO: 277648 - RNA, 32 nt, Human
uuuauuuccacugcacgcuggugcugggagcg

SEQ ID NO: 277649 - RNA, 32 nt, Human
uuuauuucccuaauaucaggaaaucccaguug

SEQ ID NO: 277650 - RNA, 32 nt, Human
uuuauuucccuccugaggggucucugggaaga

SEQ ID NO: 277651 - RNA, 32 nt, Human
uuuauuuccuggauaguaacuggucaggauau

SEQ ID NO: 277652 - RNA, 32 nt, Human
uuuauuucuauuaaacguuucugcacuggcaa

SEQ ID NO: 277653 - RNA, 32 nt, Human
uuuauuucucaaauggaaacaccugaaaaagc

SEQ ID NO: 277654 - RNA, 32 nt, Human
uuuauuucucacuguauuuuccucaacgucug

SEQ ID NO: 277655 - RNA, 32 nt, Human
uuuauuucucagaacaagguaaaaaggugagu

SEQ ID NO: 277656 - RNA, 32 nt, Human
uuuauuucuccccuggcaacagauuucaaauc

SEQ ID NO: 277657 - RNA, 32 nt, Human
uuuauuucucguucucucuuccuuguccuccc

SEQ ID NO: 277658 - RNA, 32 nt, Human
uuuauuucucucucagugcaucuugcuaugag

SEQ ID NO: 277659 - RNA, 32 nt, Human
uuuauuucucucucccauaacagugcagugau

SEQ ID NO: 277660 - RNA, 32 nt, Human
uuuauuucucuugacaaccaagggccuccguc

SEQ ID NO: 277661 - RNA, 32 nt, Human
uuuauuucugagauguugaugugaacuguaca

SEQ ID NO: 277662 - RNA, 32 nt, Human
uuuauuucugcuauuugcuguuguguaauauc

SEQ ID NO: 277663 - RNA, 32 nt, Human
uuuauuucuggugugauuucucugucuuaccu

SEQ ID NO: 277664 - RNA, 32 nt, Human
uuuauuucuguauugaaaauguuacacaaagc

SEQ ID NO: 277665 - RNA, 32 nt, Human
uuuauuucuguggaguauugccuacaaaucuu

SEQ ID NO: 277666 - RNA, 32 nt, Human
uuuauuucugugucuacagucuugcccugcca

SEQ ID NO: 277667 - RNA, 24 nt, Human
uuuauuucuuacgcauucuuggca

SEQ ID NO: 277668 - RNA, 32 nt, Human
uuuauuugaacaaagaccagucuccaccacca

SEQ ID NO: 277669 - RNA, 32 nt, Human
uuuauuugaacuuggaauguucccagugauuu

SEQ ID NO: 277670 - RNA, 32 nt, Human
uuuauuugaauuacccgaauagcaauauguaa

SEQ ID NO: 277671 - RNA, 32 nt, Human
uuuauuugagaaguagagcucuugccauuuuu

SEQ ID NO: 277672 - RNA, 32 nt, Human
uuuauuugauuuuuauccucaucccagcaggc

SEQ ID NO: 277673 - RNA, 32 nt, Human
uuuauuugcaguaucaaacauuccauuucaug

SEQ ID NO: 277674 - RNA, 32 nt, Human
uuuauuugcgggaucaaucagggacucccaga

SEQ ID NO: 277675 - RNA, 32 nt, Human
uuuauuuggaaacugccucucucccuaguucu

SEQ ID NO: 277676 - RNA, 32 nt, Human
uuuauuuggaaaugggaccuuuaaggagguaa

SEQ ID NO: 277677 - RNA, 32 nt, Human
uuuauuuggaggauaaaaugaaguucugaaaa

SEQ ID NO: 277678 - RNA, 32 nt, Human
uuuauuugggaaaggaaagcccagauuugaau

SEQ ID NO: 277679 - RNA, 32 nt, Human
uuuauuugggcuguggcgugaggagcgggcgg

SEQ ID NO: 277680 - RNA, 32 nt, Human
uuuauuuguguauuugcuuucauuucaaaguc

SEQ ID NO: 277681 - RNA, 32 nt, Human
uuuauuuguuauacaauggaagcacaauguua

SEQ ID NO: 277682 - RNA, 32 nt, Human
uuuauuuuaaaaaguaaacaugcggcugggcg

SEQ ID NO: 277683 - RNA, 32 nt, Human
uuuauuuuaaugcucaaauugucccaaauuau

SEQ ID NO: 277684 - RNA, 32 nt, Human
uuuauuuuacuuuugagccagggccucacucu

SEQ ID NO: 277685 - RNA, 26 nt, Human
uuuauuuucauuuuauaucuuuugua

SEQ ID NO: 277686 - RNA, 22 nt, Human
uuuauuuuccacggaugaguca

SEQ ID NO: 277687 - RNA, 32 nt, Human
uuuauuuucccuccucccucuuguuuuagcug

SEQ ID NO: 277688 - RNA, 32 nt, Human
uuuauuuucccugagccuauaucuucaucugu

SEQ ID NO: 277689 - RNA, 26 nt, Human
uuuauuuuccgcagcaugucagcuaa

SEQ ID NO: 277690 - RNA, 32 nt, Human
uuuauuuuccuccuccuccuucuucuucuccu

SEQ ID NO: 277691 - RNA, 26 nt, Human
uuuauuuuccuggagguauuagccaa

SEQ ID NO: 277692 - RNA, 32 nt, Human
uuuauuuucuauuuucuucuguuuccuuugga

SEQ ID NO: 277693 - RNA, 32 nt, Human
uuuauuuucucuucccuguaucugccucuccc

SEQ ID NO: 277694 - RNA, 32 nt, Human
uuuauuuucugugagccacguccuccucgagc

SEQ ID NO: 277695 - RNA, 32 nt, Human
uuuauuuugaagcucuauuuuaauaguauuua

SEQ ID NO: 277696 - RNA, 32 nt, Human
uuuauuuugagcaauucuccugccucagccuc

SEQ ID NO: 277697 - RNA, 32 nt, Human
uuuauuuugccaagguuggggaugcauaugca

SEQ ID NO: 277698 - RNA, 32 nt, Human
uuuauuuugcuuguugaacucuuagagcuauu

SEQ ID NO: 277699 - RNA, 32 nt, Human
uuuauuuuggauacuaaggaugugccaaauga

SEQ ID NO: 277700 - RNA, 32 nt, Human
uuuauuuugguauuaaagaaggacuaagggcu

SEQ ID NO: 277701 - RNA, 32 nt, Human
uuuauuuuggugcaagaaaauuuauguucuca

SEQ ID NO: 277702 - RNA, 32 nt, Human
uuuauuuuguaggcacuaaggguuucuaaaac

SEQ ID NO: 277703 - RNA, 32 nt, Human
uuuauuuuguauuugcagugcaguuuggcacc

SEQ ID NO: 277704 - RNA, 32 nt, Human
uuuauuuugugaaaugaaaauuguucacccaa

SEQ ID NO: 277705 - RNA, 32 nt, Human
uuuauuuuuaaaacacaaguagaaugauuuaa

SEQ ID NO: 277706 - RNA, 32 nt, Human
uuuauuuuuaaugcaguaauauauggagaaau

SEQ ID NO: 277707 - RNA, 32 nt, Human
uuuauuuuuaauucucucuucuccuccagaca

SEQ ID NO: 277708 - RNA, 21 nt, Human
uuuauuuuuagggagugggua

SEQ ID NO: 277709 - RNA, 32 nt, Human
uuuauuuuuagguauuuuaggggaaaugauuu

SEQ ID NO: 277710 - RNA, 32 nt, Human
uuuauuuuuauuuuugagugggaaggaauuuu

SEQ ID NO: 277711 - RNA, 32 nt, Human
uuuauuuuuccccucaaauucaugauuuuuac

SEQ ID NO: 277712 - RNA, 32 nt, Human
uuuauuuuucuugucuuuauuuuaaccuuuga

SEQ ID NO: 277713 - RNA, 32 nt, Human
uuuauuuuugagacagagacuugcuuugucgc

SEQ ID NO: 277714 - RNA, 32 nt, Human
uuuauuuuugagacagagccucgcucguuacc

SEQ ID NO: 277715 - RNA, 32 nt, Human
uuuauuuuugagacagagucucacucugucac

SEQ ID NO: 277716 - RNA, 32 nt, Human
uuuauuuuugagacagaguuuugcucuuguca

SEQ ID NO: 277717 - RNA, 32 nt, Human
uuuauuuuugagacagggucuugcucugucac

SEQ ID NO: 277718 - RNA, 32 nt, Human
uuuauuuuugagacagucucgcccugucaccc

SEQ ID NO: 277719 - RNA, 32 nt, Human
uuuauuuuugagacggagucucgcucugucgc

SEQ ID NO: 277720 - RNA, 32 nt, Human
uuuauuuuugagacggagucuugcugugucac

SEQ ID NO: 277721 - RNA, 32 nt, Human
uuuauuuuugagacggaguuucgcucuugucg

SEQ ID NO: 277722 - RNA, 32 nt, Human
uuuauuuuugagacugagucuugcucugucau

SEQ ID NO: 277723 - RNA, 32 nt, Human
uuuauuuuugagagguagucuugcucugucac

SEQ ID NO: 277724 - RNA, 32 nt, Human
uuuauuuuugagauagagucuugcucugucgc

SEQ ID NO: 277725 - RNA, 32 nt, Human
uuuauuuuugagauggagucucacucugucac

SEQ ID NO: 277726 - RNA, 32 nt, Human
uuuauuuuugagauggagucucuguugcccag

SEQ ID NO: 277727 - RNA, 32 nt, Human
uuuauuuuugagauggagucuugcucugucac

SEQ ID NO: 277728 - RNA, 32 nt, Human
uuuauuuuugagauggaguuucacucuuuuua

SEQ ID NO: 277729 - RNA, 32 nt, Human
uuuauuuuugagauggaguuucgcucuguugc

SEQ ID NO: 277730 - RNA, 32 nt, Human
uuuauuuuugagauggaguuucgcuguuguca

SEQ ID NO: 277731 - RNA, 32 nt, Human
uuuauuuuugagauggaguuuuacucucgccc

SEQ ID NO: 277732 - RNA, 32 nt, Human
uuucaaaacaucaccuugccacccugacacuc

SEQ ID NO: 277733 - RNA, 32 nt, Human
uuucaaaacauccuggagauuuguacuaaggc

SEQ ID NO: 277734 - RNA, 32 nt, Human
uuucaaaaccaggcagggccaagccuuggccc

SEQ ID NO: 277735 - RNA, 32 nt, Human
uuucaaaacccgccccaagcccauuaucacca

SEQ ID NO: 277736 - RNA, 32 nt, Human
uuucaaaaccuacaaucccccauuugcacuac

SEQ ID NO: 277737 - RNA, 32 nt, Human
uuucaaaauauaauuccaucgccuuaauaaua

SEQ ID NO: 277738 - RNA, 32 nt, Human
uuucaaaauuuuguuaacuauuacaaauguaa

SEQ ID NO: 277739 - RNA, 23 nt, Human
uuucaaacagauuucaggcugca

SEQ ID NO: 277740 - RNA, 32 nt, Human
uuucaaaccaaaacucuccaaccaaaaaucaa

SEQ ID NO: 277741 - RNA, 32 nt, Human
uuucaaaccagacgggccaacauggugaaacc

SEQ ID NO: 277742 - RNA, 32 nt, Human
uuucaaaccaguuucacaucuuaaugaaauaa

SEQ ID NO: 277743 - RNA, 32 nt, Human
uuucaaaccccugaaucauauuucuugaugcu

SEQ ID NO: 277744 - RNA, 32 nt, Human
uuucaaacuagagaauaaagauuuggguuuua

SEQ ID NO: 277745 - RNA, 32 nt, Human
uuucaaagaaaauuauucucaucucaaugcca

SEQ ID NO: 277746 - RNA, 32 nt, Human
uuucaaagaauugccucauucagucccuaaaa

SEQ ID NO: 277747 - RNA, 32 nt, Human
uuucaaagacaggacucgugcugcagugaaau

SEQ ID NO: 277748 - RNA, 32 nt, Human
uuucaaagaugacauacuggguuguuuguuug

SEQ ID NO: 277749 - RNA, 32 nt, Human
uuucaaagcauacaauuugauucaugcagaag

SEQ ID NO: 277750 - RNA, 32 nt, Human
uuucaaagcuuccucuggccagguagacuuuu

SEQ ID NO: 277751 - RNA, 32 nt, Human
uuucaaaggaaaacauuaaaaucccuuaggaa

SEQ ID NO: 277752 - RNA, 32 nt, Human
uuucaaaggagccacaguuuaaugggguuagu

SEQ ID NO: 277753 - RNA, 32 nt, Human
uuucaaagguauguaguuacagaauuccuacc

SEQ ID NO: 277754 - RNA, 32 nt, Human
uuucaaaggugagaaaacagaggcucagagag

SEQ ID NO: 277755 - RNA, 32 nt, Human
uuucaaaguccccugacagcucagcauguugu

SEQ ID NO: 277756 - RNA, 32 nt, Human
uuucaaagugauuuuucgucuauucuuaauau

SEQ ID NO: 277757 - RNA, 32 nt, Human
uuucaaauaaugaugugaaguuugagguaggu

SEQ ID NO: 277758 - RNA, 32 nt, Human
uuucaaauauguaaacuuuaacuuccacuuug

SEQ ID NO: 277759 - RNA, 32 nt, Human
uuucaaaucaaauuaucuaagaaaacaagaaa

SEQ ID NO: 277760 - RNA, 32 nt, Human
uuucaaaucaaauuuggaugccaacuaugugg

SEQ ID NO: 277761 - RNA, 32 nt, Human
uuucaaaugaaggugauauauacuuuuucacu

SEQ ID NO: 277762 - RNA, 32 nt, Human
uuucaaaugaugguuccuaauacuucacauua

SEQ ID NO: 277763 - RNA, 32 nt, Human
uuucaaauguuagauauugcuacuauaaucaa

SEQ ID NO: 277764 - RNA, 32 nt, Human
uuucaaauuaaccuuccgcuuuguugcugugu

SEQ ID NO: 277765 - RNA, 32 nt, Human
uuucaaauucauuuuguuuuugcuguuucauu

SEQ ID NO: 277766 - RNA, 32 nt, Human
uuucaaauucugggaaaccaguuccaaacauu

SEQ ID NO: 277767 - RNA, 32 nt, Human
uuucaaauucuuuuuauuaugacuaugcccuu

SEQ ID NO: 277768 - RNA, 32 nt, Human
uuucaaauuuaagagugagucuuugcggcaac

SEQ ID NO: 277769 - RNA, 32 nt, Human
uuucaacaaacauguauuagcacucccuccau

SEQ ID NO: 277770 - RNA, 32 nt, Human
uuucaacaaaggagcuccgaugugaggggcaa

SEQ ID NO: 277771 - RNA, 32 nt, Human
uuucaacaaaggaggaaguauaaggagaucua

SEQ ID NO: 277772 - RNA, 32 nt, Human
uuucaacaagcagguacagaauaucuuauuuc

SEQ ID NO: 277773 - RNA, 32 nt, Human
uuucaacacugagggccuggagaccucggcuc

SEQ ID NO: 277774 - RNA, 32 nt, Human
uuucaacagaacuucacagacuguuagagcug

SEQ ID NO: 277775 - RNA, 32 nt, Human
uuucaacagccaagccaaguuucaugaaugug

SEQ ID NO: 277776 - RNA, 32 nt, Human
uuucaacagcccugccccuccucggagccugc

SEQ ID NO: 277777 - RNA, 32 nt, Human
uuucaacaucuucuccagccaguuuacuggaa

SEQ ID NO: 277778 - RNA, 32 nt, Human
uuucaacaucuuuucauuuucucccauaucua

SEQ ID NO: 277779 - RNA, 32 nt, Human
uuucaacauguuggccaggauggucucaaucu

SEQ ID NO: 277780 - RNA, 32 nt, Human
uuucaacauguuggccaggcuggucaugaacu

SEQ ID NO: 277781 - RNA, 24 nt, Human
uuucaaccaccuuuuaggcugcau

SEQ ID NO: 277782 - RNA, 23 nt, Human
uuucaaccacuaaaaggcuggau

SEQ ID NO: 277783 - RNA, 32 nt, Human
uuucaaccagcacauucguuuuguucauauuc

SEQ ID NO: 277784 - RNA, 32 nt, Human
uuucaaccauguucugaacugcagcuuuacag

SEQ ID NO: 277785 - RNA, 32 nt, Human
uuucaacccaggaggcagacguugcagcgagc

SEQ ID NO: 277786 - RNA, 32 nt, Human
uuucaacccaggaguucaagaccugccagagc

SEQ ID NO: 277787 - RNA, 32 nt, Human
uuucaacccgggaggcugagguugcagugagu

SEQ ID NO: 277788 - RNA, 32 nt, Human
uuucaacgaguuugucagcuuuauuaauguug

SEQ ID NO: 277789 - RNA, 32 nt, Human
uuucaacuauuuaacccacuugccuuauuuug

SEQ ID NO: 277790 - RNA, 32 nt, Human
uuucaacuccucucuucuuaacacuaugaagu

SEQ ID NO: 277791 - RNA, 32 nt, Human
uuucaacuuccucuuccucauuuucuugagau

SEQ ID NO: 277792 - RNA, 32 nt, Human
uuucaacuuuaaaauggaaaacagucauauaa

SEQ ID NO: 277793 - RNA, 32 nt, Human
uuucaagaaagagacaaagaaggaaaauuuua

SEQ ID NO: 277794 - RNA, 32 nt, Human
uuucaagaagaaccuguuauuuguugauuuug

SEQ ID NO: 277795 - RNA, 32 nt, Human
uuucaagaagccacuucugaucuaagaaucua

SEQ ID NO: 277796 - RNA, 32 nt, Human
uuucaagaccccaaaagaggccaaaggucuga

SEQ ID NO: 277797 - RNA, 32 nt, Human
uuucaagagacaccucuggaccugcagcaccg

SEQ ID NO: 277798 - RNA, 32 nt, Human
uuucaagaggacagaauggaguugggggaacu

SEQ ID NO: 277799 - RNA, 32 nt, Human
uuucaagaggcugcuccugccugcuucgauca

SEQ ID NO: 277800 - RNA, 32 nt, Human
uuucaagauacaagaucaauauacaaaaauga

SEQ ID NO: 277801 - RNA, 32 nt, Human
uuucaagauaccuuaagagaucaaaggggagg

SEQ ID NO: 277802 - RNA, 32 nt, Human
uuucaagaucuuauuuaauuuaauaaacuuac

SEQ ID NO: 277803 - RNA, 32 nt, Human
uuucaagauuacucuaaacagaaacaagagug

SEQ ID NO: 277804 - RNA, 32 nt, Human
uuucaagauuauucuaaaucaccagaaaauua

SEQ ID NO: 277805 - RNA, 32 nt, Human
uuucaagcauggccaaccuccaccuuccccuc

SEQ ID NO: 277806 - RNA, 32 nt, Human
uuucaagccagccccaggaccaggcuagcucc

SEQ ID NO: 277807 - RNA, 23 nt, Human
uuucaagcgauucuccugccuca

SEQ ID NO: 277808 - RNA, 32 nt, Human
uuucaagcggacugucacucagaucugcagag

SEQ ID NO: 277809 - RNA, 32 nt, Human
uuucaagcuauacaaauuacuuccaaguuuuc

SEQ ID NO: 277810 - RNA, 32 nt, Human
uuucaagcugcagaggaacguguucacaggcu

SEQ ID NO: 277811 - RNA, 32 nt, Human
uuucaaggaaacacaaucgcugaaccaaaacg

SEQ ID NO: 277812 - RNA, 32 nt, Human
uuucaaggccucuguggcuuucuucugaacuu

SEQ ID NO: 277813 - RNA, 32 nt, Human
uuucaaggcuuccuggagaaauggggguaggg

SEQ ID NO: 277814 - RNA, 32 nt, Human
uuucaagggagcuccuggaguugacaguagca

SEQ ID NO: 277815 - RNA, 32 nt, Human
uuucaagggcugcagccagggugaggccucug

SEQ ID NO: 277816 - RNA, 32 nt, Human
uuucaaggggauguuuaauacugaaucaagcu

SEQ ID NO: 277817 - RNA, 32 nt, Human
uuucaaggucucuaaaccuugaaaauccaaag

SEQ ID NO: 277818 - RNA, 32 nt, Human
uuucaaggucuucuaucuguuuucuuuuggau

SEQ ID NO: 277819 - RNA, 32 nt, Human
uuucaaguaagcaaucagucuacuaccaucag

SEQ ID NO: 277820 - RNA, 32 nt, Human
uuucaaguauuuuucuauaaucacuuuccccu

SEQ ID NO: 277821 - RNA, 32 nt, Human
uuucaagucuggaaguagugagagaagcuggu

SEQ ID NO: 277822 - RNA, 23 nt, Human
uuucaagugauccuccugccuca

SEQ ID NO: 277823 - RNA, 32 nt, Human
uuucaagugauccuccugccucagcuuccuga

SEQ ID NO: 277824 - RNA, 32 nt, Human
uuucaaguuguuguuuuucuggaccuuaguuu

SEQ ID NO: 277825 - RNA, 24 nt, Human
uuucaauaaaccuuccaggcugca

SEQ ID NO: 277826 - RNA, 32 nt, Human
uuucaauaaaccuuuugauauuucucaaggcc

SEQ ID NO: 277827 - RNA, 32 nt, Human
uuucaauacauccuccugaaucauaccucguu

SEQ ID NO: 277828 - RNA, 32 nt, Human
uuucaauaucuuuucauuuucucccauaucua

SEQ ID NO: 277829 - RNA, 32 nt, Human
uuucaauaugauugaaccuggacucuugcccu

SEQ ID NO: 277830 - RNA, 32 nt, Human
uuucaaucuuauuagggugcagaaggaaaacu

SEQ ID NO: 277831 - RNA, 30 nt, Human
uuucaaugggacaccuguggcuccugggua

SEQ ID NO: 277832 - RNA, 31 nt, Human
uuucaauguuuauuauacuguugaaagcaua

SEQ ID NO: 277833 - RNA, 32 nt, Human
uuucaauguuugaacauuaaauagcaaaugac

SEQ ID NO: 277834 - RNA, 32 nt, Human
uuucaauuacuaacacaaagaaacccauuguc

SEQ ID NO: 277835 - RNA, 32 nt, Human
uuucaauucaguuaagacuucugugauagaug

SEQ ID NO: 277836 - RNA, 32 nt, Human
uuucacaaaacauguggcugggcgcagcggcu

SEQ ID NO: 277837 - RNA, 32 nt, Human
uuucacaaaaccuugucaaagaccucaugcaa

SEQ ID NO: 277838 - RNA, 32 nt, Human
uuucacaaaaggcaucugaacuuuuaaugaac

SEQ ID NO: 277839 - RNA, 32 nt, Human
uuucacaaaauaauacugaaggguaaacccuu

SEQ ID NO: 277840 - RNA, 32 nt, Human
uuucacaaacuccuccaaaccccaaaccccaa

SEQ ID NO: 277841 - RNA, 32 nt, Human
uuucacaacaccucaaacuuuucuaaacauaa

SEQ ID NO: 277842 - RNA, 32 nt, Human
uuucacaacuuuggacuguccaacuugcuucc

SEQ ID NO: 277843 - RNA, 32 nt, Human
uuucacaagaucugccccaugauugguuccuu

SEQ ID NO: 277844 - RNA, 32 nt, Human
uuucacacagaagaaaacugagguuggcacuc

SEQ ID NO: 277845 - RNA, 32 nt, Human
uuucacacagaauuguacaagcaaaguuugag

SEQ ID NO: 277846 - RNA, 21 nt, Human
uuucacacagggcuggucuug

SEQ ID NO: 277847 - RNA, 32 nt, Human
uuucacacccacuacagaccucagccccaguu

SEQ ID NO: 277848 - RNA, 32 nt, Human
uuucacacggaguccaaggcccugccaccccu

SEQ ID NO: 277849 - RNA, 32 nt, Human
uuucacacuccacuuuggaacuacccaggagc

SEQ ID NO: 277850 - RNA, 32 nt, Human
uuucacagacagacaauaagccagacaacaca

SEQ ID NO: 277851 - RNA, 32 nt, Human
uuucacagacuggggaaauggacgccuggaga

SEQ ID NO: 277852 - RNA, 32 nt, Human
uuucacagagggcucaaccaccuuuggaguga

SEQ ID NO: 277853 - RNA, 32 nt, Human
uuucacagauugggguaguggcuuccaaguug

SEQ ID NO: 277854 - RNA, 32 nt, Human
uuucacagccaugauucuuuugcccacacuug

SEQ ID NO: 277855 - RNA, 32 nt, Human
uuucacagccucccccucuuucuucagaccua

SEQ ID NO: 277856 - RNA, 32 nt, Human
uuucacagccuucaugcaggccccugugcaac

SEQ ID NO: 277857 - RNA, 32 nt, Human
uuucacagcucugauucuacagaaggaggccg

SEQ ID NO: 277858 - RNA, 32 nt, Human
uuucacaggccugggccuggaaaaagaaaucu

SEQ ID NO: 277859 - RNA, 32 nt, Human
uuucacaggggacaggaugguucccuugauga

SEQ ID NO: 277860 - RNA, 32 nt, Human
uuucacaguaugggcuacacagcagcuguuca

SEQ ID NO: 277861 - RNA, 32 nt, Human
uuucacagugaaccuguauucagcuauucuca

SEQ ID NO: 277862 - RNA, 31 nt, Human
uuucacagugagaguagaagguagauuugga

SEQ ID NO: 277863 - RNA, 32 nt, Human
uuucacagugcccaugguauucaugccaacau

SEQ ID NO: 277864 - RNA, 32 nt, Human
uuucacaguggggaaguggguuacaauauugg

SEQ ID NO: 277865 - RNA, 32 nt, Human
uuucacaguucugcaggcuggaaauccaagau

SEQ ID NO: 277866 - RNA, 32 nt, Human
uuucacauagcccagucuuccuccuugugcug

SEQ ID NO: 277867 - RNA, 32 nt, Human
uuucacauauagccaguguccacagcaccuuc

SEQ ID NO: 277868 - RNA, 32 nt, Human
uuucacaucuauacucccugcacccuucugac

SEQ ID NO: 277869 - RNA, 32 nt, Human
uuucacaucugggucacucuuguugagaaaug

SEQ ID NO: 277870 - RNA, 32 nt, Human
uuucacaucuuccacaaacuccauuuagggag

SEQ ID NO: 277871 - RNA, 32 nt, Human
uuucacauuguugacagugaaaugcuauguug

SEQ ID NO: 277872 - RNA, 32 nt, Human
uuucacauuuuuaaaauguucuagucauuuug

SEQ ID NO: 277873 - RNA, 32 nt, Human
uuucacauuuuucugccugcuuuauauucuac

SEQ ID NO: 277874 - RNA, 32 nt, Human
uuucaccaacccagaaccuccuugaucaucac

SEQ ID NO: 277875 - RNA, 32 nt, Human
uuucaccaaguuggcuagacuagucuugaacu

SEQ ID NO: 277876 - RNA, 32 nt, Human
uuucaccaauucucaaaagccccacaccaccc

SEQ ID NO: 277877 - RNA, 32 nt, Human
uuucaccacaucugaauccagagaaaccggcu

SEQ ID NO: 277878 - RNA, 32 nt, Human
uuucaccacauggccuugccucgguggcccug

SEQ ID NO: 277879 - RNA, 32 nt, Human
uuucaccacauuggccaggauggucucgaucu

SEQ ID NO: 277880 - RNA, 32 nt, Human
uuucaccacguuggccaagcugguuuugaacu

SEQ ID NO: 277881 - RNA, 32 nt, Human
uuucaccacguuggccaggauggucucgaacu

SEQ ID NO: 277882 - RNA, 32 nt, Human
uuucaccacguuggccaggauggucucgauau

SEQ ID NO: 277883 - RNA, 32 nt, Human
uuucaccacguuggccaggauggucucgaucu

SEQ ID NO: 277884 - RNA, 32 nt, Human
uuucaccacguuggccaggaugguuucgaucu

SEQ ID NO: 277885 - RNA, 32 nt, Human
uuucaccacguuggccaggguggucuugagcu

SEQ ID NO: 277886 - RNA, 32 nt, Human
uuucaccacugcauucuagccugggcaacaga

SEQ ID NO: 277887 - RNA, 32 nt, Human
uuucaccacuguguccuuuuacacacuuugua

SEQ ID NO: 277888 - RNA, 32 nt, Human
uuucaccagacaugcagauuugaguucauuaa

SEQ ID NO: 277889 - RNA, 32 nt, Human
uuucaccagccaaguguuuugcuauuuccaau

SEQ ID NO: 277890 - RNA, 32 nt, Human
uuucaccagcccugccccuccucggagccugc

SEQ ID NO: 277891 - RNA, 32 nt, Human
uuucaccagugcacuccagccugggugacaga

SEQ ID NO: 277892 - RNA, 32 nt, Human
uuucaccaguuuacccucccaaccuuagcccu

SEQ ID NO: 277893 - RNA, 32 nt, Human
uuucaccaucuuggccagguuggucuugaacu

SEQ ID NO: 277894 - RNA, 32 nt, Human
uuucaccaugaaggagacagaccgggaggccg

SEQ ID NO: 277895 - RNA, 32 nt, Human
uuucaccaugucagccaggauggucuugaucu

SEQ ID NO: 277896 - RNA, 32 nt, Human
uuucaccauguuagccaggauggucuugauuu

SEQ ID NO: 277897 - RNA, 32 nt, Human
uuucaccauguuagccaggauggucuuuaucu

SEQ ID NO: 277898 - RNA, 32 nt, Human
uuucaccauguuagccgggauggucuugaucu

SEQ ID NO: 277899 - RNA, 32 nt, Human
uuucaccauguuagcuaggauggucuugaucu

SEQ ID NO: 277900 - RNA, 32 nt, Human
uuucaccauguuggccaagauggucucaaucu

SEQ ID NO: 277901 - RNA, 32 nt, Human
uuucaccauguuggccacgcuggucuugaagc

SEQ ID NO: 277902 - RNA, 32 nt, Human
uuucaccauguuggccagacugaucuugaacu

SEQ ID NO: 277903 - RNA, 32 nt, Human
uuucaccauguuggccagacuggucuugaacu

SEQ ID NO: 277904 - RNA, 32 nt, Human
uuucaccauguuggccagccuggucuugaacu

SEQ ID NO: 277905 - RNA, 32 nt, Human
uuucaccauguuggccagcguggucuugaacg

SEQ ID NO: 277906 - RNA, 32 nt, Human
uuucaccauguuggccaggaugauccucaauc

SEQ ID NO: 277907 - RNA, 32 nt, Human
uuucaccauguuggccaggauggccuccaccu

SEQ ID NO: 277908 - RNA, 32 nt, Human
uuucaccauguuggccaggauggccucgaucu

SEQ ID NO: 277909 - RNA, 32 nt, Human
uuucaccauguuggccaggauggucucaaacu

SEQ ID NO: 277910 - RNA, 32 nt, Human
uuucaccauguuggccaggauggucucaaucu

SEQ ID NO: 277911 - RNA, 32 nt, Human
uuucaccauguuggccaggauggucucgaacu

SEQ ID NO: 277912 - RNA, 32 nt, Human
uuucaccauguuggccaggauggucucgaguc

SEQ ID NO: 277913 - RNA, 32 nt, Human
uuucaccauguuggccaggauggucucgaucu

SEQ ID NO: 277914 - RNA, 32 nt, Human
uuucaccauguuggccaggauggucucgcccu

SEQ ID NO: 277915 - RNA, 32 nt, Human
uuucaccauguuggccaggauggucucggucu

SEQ ID NO: 277916 - RNA, 32 nt, Human
uuucaccauguuggccaggauggucuggaucu

SEQ ID NO: 277917 - RNA, 32 nt, Human
uuucaccauguuggccaggauggucuugaacc

SEQ ID NO: 277918 - RNA, 32 nt, Human
uuucaccauguuggccaggauggucuugaucu

SEQ ID NO: 277919 - RNA, 32 nt, Human
uuucaccauguuggccaggcuagucuugaacu

SEQ ID NO: 277920 - RNA, 32 nt, Human
uuucaccauguuggccaggcuagucuugaauu

SEQ ID NO: 277921 - RNA, 32 nt, Human
uuucaccauguuggccaggcugauuuugaacu

SEQ ID NO: 277922 - RNA, 32 nt, Human
uuucaccauguuggccaggcuggucuugaaca

SEQ ID NO: 277923 - RNA, 32 nt, Human
uuucaccauguuggccaggcuggucuugaacc

SEQ ID NO: 277924 - RNA, 32 nt, Human
uuucaccauguuggccaggcuggucuugaacu

SEQ ID NO: 277925 - RNA, 32 nt, Human
uuucaccauguuggccaggcuggucuugaauu

SEQ ID NO: 277926 - RNA, 32 nt, Human
uuucaccauguuggccaggcuguguugaacuc

SEQ ID NO: 277927 - RNA, 32 nt, Human
uuucaccauguuggccagguuggucuugaacu

SEQ ID NO: 277928 - RNA, 32 nt, Human
uuucaccauguuggccaugcuggucuugaacc

SEQ ID NO: 277929 - RNA, 32 nt, Human
uuucaccauuuucuccccacuuccagugacug

SEQ ID NO: 277930 - RNA, 19 nt, Human
uuucaccauuuuggccagg

SEQ ID NO: 277931 - RNA, 32 nt, Human
uuucaccauuuuggccaggauggucucaaucc

SEQ ID NO: 277932 - RNA, 32 nt, Human
uuucaccauuuuggccaggauggucucgaucu

SEQ ID NO: 277933 - RNA, 24 nt, Human
uuucacccaagccugacugcagug

SEQ ID NO: 277934 - RNA, 32 nt, Human
uuucacccaagugccagucaacagaguacaug

SEQ ID NO: 277935 - RNA, 32 nt, Human
uuucacccacacugccagccuggguuggggcc

SEQ ID NO: 277936 - RNA, 32 nt, Human
uuucacccacccuuucuguucuaugguggacu

SEQ ID NO: 277937 - RNA, 32 nt, Human
uuucacccacgugaacaccaccaccagcgcca

SEQ ID NO: 277938 - RNA, 32 nt, Human
uuucacccagcacugugggggccuucagacuc

SEQ ID NO: 277939 - RNA, 22 nt, Human
uuucacccaggccggacugcag

SEQ ID NO: 277940 - RNA, 24 nt, Human
uuucacccaggcuggaguauagug

SEQ ID NO: 277941 - RNA, 24 nt, Human
uuucacccaggcuggagugcagug

SEQ ID NO: 277942 - RNA, 24 nt, Human
uuucacccaggcuggagugcugug

SEQ ID NO: 277943 - RNA, 32 nt, Human
uuucacccauugucuguguuuaguccuuguuc

SEQ ID NO: 277944 - RNA, 32 nt, Human
uuucaccccagccuguaguccuccucacuuca

SEQ ID NO: 277945 - RNA, 32 nt, Human
uuucaccccugccccuguggcuccacauccuc

SEQ ID NO: 277946 - RNA, 23 nt, Human
uuucacccuccuaucuccuccca

SEQ ID NO: 277947 - RNA, 32 nt, Human
uuucacccuugcauuccagccugugaaauaaa

SEQ ID NO: 277948 - RNA, 21 nt, Human
uuucacccuuggaagacaaug

SEQ ID NO: 277949 - RNA, 32 nt, Human
uuucacccuuucuacuuugucagaaacacuga

SEQ ID NO: 277950 - RNA, 22 nt, Human
uuucacccuuugagcacauccu

SEQ ID NO: 277951 - RNA, 32 nt, Human
uuucaccgaggacaugaaacuccaccuugcgg

SEQ ID NO: 277952 - RNA, 32 nt, Human
uuucaccggcaggcccgccugcaggaguggcu

SEQ ID NO: 277953 - RNA, 32 nt, Human
uuucaccggguuggccaggcuggucuugaacu

SEQ ID NO: 277954 - RNA, 32 nt, Human
uuucaccguauuagccaggauggucuugaucu

SEQ ID NO: 277955 - RNA, 32 nt, Human
uuucaccgucaagccuuucaccuuccucaaaa

SEQ ID NO: 277956 - RNA, 32 nt, Human
uuucaccguguuagccaggauggucuugaucu

SEQ ID NO: 277957 - RNA, 32 nt, Human
uuucaccguguuggccaggauggucucaaucu

SEQ ID NO: 277958 - RNA, 32 nt, Human
uuucaccguguuggccaggauggucucgaucu

SEQ ID NO: 277959 - RNA, 32 nt, Human
uuucaccguguuggccaggauggucuugaucu

SEQ ID NO: 277960 - RNA, 32 nt, Human
uuucaccuacaacccagagauggaggaugaau

SEQ ID NO: 277961 - RNA, 32 nt, Human
uuucaccucacuccagccugggugacagcgua

SEQ ID NO: 277962 - RNA, 32 nt, Human
uuucaccucagcaaggccaggggaucugcacg

SEQ ID NO: 277963 - RNA, 32 nt, Human
uuucaccucccguugaggccgggugugaggaa

SEQ ID NO: 277964 - RNA, 31 nt, Human
uuucaccuccucucugaagcugucucugacu

SEQ ID NO: 277965 - RNA, 32 nt, Human
uuucaccuccugccauguucugaggccucccc

SEQ ID NO: 277966 - RNA, 32 nt, Human
uuucaccucuccagacuuccauuucuucacaa

SEQ ID NO: 277967 - RNA, 32 nt, Human
uuucaccucuucacuuauccuuagucccagua

SEQ ID NO: 277968 - RNA, 32 nt, Human
uuucaccugaauccuucucuugcucauuuaag

SEQ ID NO: 277969 - RNA, 32 nt, Human
uuucaccugcagcuuucagucugcuuugucug

SEQ ID NO: 277970 - RNA, 32 nt, Human
uuucaccuggaaugggcuaaguacagugaaua

SEQ ID NO: 277971 - RNA, 32 nt, Human
uuucaccuguaaucccagcacuuugggaggcu

SEQ ID NO: 277972 - RNA, 32 nt, Human
uuucaccuguagucccagcugcucuggaguuu

SEQ ID NO: 277973 - RNA, 32 nt, Human
uuucaccuuauucccaggcuggagugcaaugu

SEQ ID NO: 277974 - RNA, 32 nt, Human
uuucaccuucaguugucucugauguagcuuau

SEQ ID NO: 277975 - RNA, 32 nt, Human
uuucaccuucuuuggggcucucggcugggcgc

SEQ ID NO: 277976 - RNA, 32 nt, Human
uuucaccuuguugcccaggcuggucucaaacu

SEQ ID NO: 277977 - RNA, 32 nt, Human
uuucaccuuguuggccaggaugaucucgaucu

SEQ ID NO: 277978 - RNA, 32 nt, Human
uuucaccuuguuggccaggauggucucgaucu

SEQ ID NO: 277979 - RNA, 32 nt, Human
uuucacgacucagagauagaaaucucuugcua

SEQ ID NO: 277980 - RNA, 23 nt, Human
uuucacgagaucugaugguuuua

SEQ ID NO: 277981 - RNA, 32 nt, Human
uuucacggacacugacaagauccagagcuauc

SEQ ID NO: 277982 - RNA, 32 nt, Human
uuucacgggugaggagacuuagagagacgaag

SEQ ID NO: 277983 - RNA, 32 nt, Human
uuucacguagagucucggccugggcagucacg

SEQ ID NO: 277984 - RNA, 32 nt, Human
uuucacguauguggaugccaguuaauuaaaug

SEQ ID NO: 277985 - RNA, 32 nt, Human
uuucacguauuccgucugcacaggcaaccaag

SEQ ID NO: 277986 - RNA, 32 nt, Human
uuucacuacaccucaaacuuuucuaaacauaa

SEQ ID NO: 277987 - RNA, 32 nt, Human
uuucacuacauucuuccucccacugccaggua

SEQ ID NO: 277988 - RNA, 32 nt, Human
uuucacuacuuacaucuucucacauuucccgg

SEQ ID NO: 277989 - RNA, 32 nt, Human
uuucacuagagcauccugccugccuucuccac

SEQ ID NO: 277990 - RNA, 32 nt, Human
uuucacuagaggaguugugcugguuuuuaaau

SEQ ID NO: 277991 - RNA, 32 nt, Human
uuucacuaguacaccaggaaacuacagauuga

SEQ ID NO: 277992 - RNA, 32 nt, Human
uuucacuaguggcaugaguuaauaggaguguu

SEQ ID NO: 277993 - RNA, 32 nt, Human
uuucacuauagacauuacuugcauuaucuccu

SEQ ID NO: 277994 - RNA, 32 nt, Human
uuucacuauguuggccaggauagucuugaucu

SEQ ID NO: 277995 - RNA, 32 nt, Human
uuucacuauguuggccaggcuagucuugaacu

SEQ ID NO: 277996 - RNA, 32 nt, Human
uuucacucagaagcucaggucgccuccagccc

SEQ ID NO: 277997 - RNA, 32 nt, Human
uuucacucagcaguguuaugaaaggcacguag

SEQ ID NO: 277998 - RNA, 32 nt, Human
uuucacuccagccugggcgacaagagugaaac

SEQ ID NO: 277999 - RNA, 32 nt, Human
uuucacuccucccagacuuuuugacuauccuc

SEQ ID NO: 278000 - RNA, 32 nt, Human
uuucacucguugcccaggcuggagugcagugg

SEQ ID NO: 278001 - RNA, 32 nt, Human
uuucacucuaagacuggcaaaaggacagcagu

SEQ ID NO: 278002 - RNA, 32 nt, Human
uuucacucuccuccgccaugcccgacccggcu

SEQ ID NO: 278003 - RNA, 32 nt, Human
uuucacucugggaggagaggguggagaaagca

SEQ ID NO: 278004 - RNA, 32 nt, Human
uuucacucuuguuguccagucuggagugcaau

SEQ ID NO: 278005 - RNA, 32 nt, Human
uuucacugacaggagagcagagacaggacgug

SEQ ID NO: 278006 - RNA, 32 nt, Human
uuucacugaccagccacagaaagaaacagaag

SEQ ID NO: 278007 - RNA, 32 nt, Human
uuucacugacuaaaccugcugcagcucucuuu

SEQ ID NO: 278008 - RNA, 32 nt, Human
uuucacugcaacucugccuuuguguguauugg

SEQ ID NO: 278009 - RNA, 32 nt, Human
uuucacugcagccucaaacuccuggaguccag

SEQ ID NO: 278010 - RNA, 32 nt, Human
uuucacugcagguauucuggccccagagucuu

SEQ ID NO: 278011 - RNA, 32 nt, Human
uuucacugccuccugcccacagacccaggccu

SEQ ID NO: 278012 - RNA, 32 nt, Human
uuucacugugaagagucagcugccugggccgu

SEQ ID NO: 278013 - RNA, 32 nt, Human
uuucacugugaggaaguguggaaaaauagcuc

SEQ ID NO: 278014 - RNA, 32 nt, Human
uuucacuguguuagccaggauggucuugaucu

SEQ ID NO: 278015 - RNA, 32 nt, Human
uuucacuguguuagccaggauggucuugauuu

SEQ ID NO: 278016 - RNA, 32 nt, Human
uuucacuguguuagccaggauggucuuggucu

SEQ ID NO: 278017 - RNA, 32 nt, Human
uuucacuuaaaaggaaggucauuuggagaugu

SEQ ID NO: 278018 - RNA, 32 nt, Human
uuucacuuacagcacccccaacccuggcaccc

SEQ ID NO: 278019 - RNA, 32 nt, Human
uuucacuucaaacauguaugaguagucagcug

SEQ ID NO: 278020 - RNA, 32 nt, Human
uuucacuuccucacugacauuuugugaaaaau

SEQ ID NO: 278021 - RNA, 32 nt, Human
uuucacuucuccccacaucucccuuuccacuu

SEQ ID NO: 278022 - RNA, 32 nt, Human
uuucacuuggagaaggcggagggcucuuccug

SEQ ID NO: 278023 - RNA, 32 nt, Human
uuucacuugguauccuggaguuggguugcuaa

SEQ ID NO: 278024 - RNA, 32 nt, Human
uuucacuugucacccaggcuggagugcagugg

SEQ ID NO: 278025 - RNA, 32 nt, Human
uuucacuuuuuacauauaguuuuugcaggguu

SEQ ID NO: 278026 - RNA, 23 nt, Human
uuucagaaaauaaaacacaaccu

SEQ ID NO: 278027 - RNA, 22 nt, Human
uuucagaaaauagugcuuauca

SEQ ID NO: 278028 - RNA, 32 nt, Human
uuucagaaaaugucuuucauuucaaucaauaa

SEQ ID NO: 278029 - RNA, 32 nt, Human
uuucagaaacaacauggugucagggcuccaug

SEQ ID NO: 278030 - RNA, 32 nt, Human
uuucagaaaccagcagagcugucaacucuucu

SEQ ID NO: 278031 - RNA, 32 nt, Human
uuucagaaagagaccuacucugggucauuuaa

SEQ ID NO: 278032 - RNA, 32 nt, Human
uuucagaaaugaguaacauuguaggauaguac

SEQ ID NO: 278033 - RNA, 32 nt, Human
uuucagaacucagguuaaucucugugcagcag

SEQ ID NO: 278034 - RNA, 32 nt, Human
uuucagaagagcaagcacaaaguaauuuagcu

SEQ ID NO: 278035 - RNA, 32 nt, Human
uuucagaagauaagaguucacugaaugcaccu

SEQ ID NO: 278036 - RNA, 32 nt, Human
uuucagaagaucuccacuaguuuuuguuccaa

SEQ ID NO: 278037 - RNA, 32 nt, Human
uuucagaaucuuaucaagcaacaggaaaggau

SEQ ID NO: 278038 - RNA, 32 nt, Human
uuucagaaugaggaaaagcuguggggaccaaa

SEQ ID NO: 278039 - RNA, 25 nt, Human
uuucagaauucccagaguuuacuca

SEQ ID NO: 278040 - RNA, 23 nt, Human
uuucagaauuuuacucugcauca

SEQ ID NO: 278041 - RNA, 32 nt, Human
uuucagacaacagcagagaagcccaguuggcu

SEQ ID NO: 278042 - RNA, 32 nt, Human
uuucagacaagcaauuacccaguuuccuuauc

SEQ ID NO: 278043 - RNA, 32 nt, Human
uuucagacauagaauuucacuuuuggagggga

SEQ ID NO: 278044 - RNA, 32 nt, Human
uuucagacaugacgcccccgugccccaaguuc

SEQ ID NO: 278045 - RNA, 32 nt, Human
uuucagaccagccugggcaacauagccagacc

SEQ ID NO: 278046 - RNA, 32 nt, Human
uuucagaccagccugggcaacaugacaaaacu

SEQ ID NO: 278047 - RNA, 32 nt, Human
uuucagaccauacucuuuacgguacuaggcac

SEQ ID NO: 278048 - RNA, 32 nt, Human
uuucagaccauguccaacccagcugugcugcu

SEQ ID NO: 278049 - RNA, 32 nt, Human
uuucagacccuauccugagaaugggguuugaa

SEQ ID NO: 278050 - RNA, 32 nt, Human
uuucagacuagccuugccaacauggugaaacc

SEQ ID NO: 278051 - RNA, 32 nt, Human
uuucagacuggcuucuuucacuuaauaauaug

SEQ ID NO: 278052 - RNA, 31 nt, Human
uuucagagaaacacaacggagggaaggagcc

SEQ ID NO: 278053 - RNA, 32 nt, Human
uuucagagaaccaggagguuugggguuaagag

SEQ ID NO: 278054 - RNA, 32 nt, Human
uuucagagacaagguuucgccauguugccuag

SEQ ID NO: 278055 - RNA, 32 nt, Human
uuucagagagcuggaagagaggcuuuggaaug

SEQ ID NO: 278056 - RNA, 32 nt, Human
uuucagagauagagucucaugcuguugcccag

SEQ ID NO: 278057 - RNA, 32 nt, Human
uuucagagauggugccuucuggcauaguagug

SEQ ID NO: 278058 - RNA, 32 nt, Human
uuucagagcacccauaucccacccuggugaga

SEQ ID NO: 278059 - RNA, 32 nt, Human
uuucagagcaguagugugaggaagcuuggagu

SEQ ID NO: 278060 - RNA, 32 nt, Human
uuucagagccacccacaucagcacuuggaaga

SEQ ID NO: 278061 - RNA, 32 nt, Human
uuucagagccagaaucauacucuccaggaaau

SEQ ID NO: 278062 - RNA, 32 nt, Human
uuucagagcccccagcccugggaaccacuccc

SEQ ID NO: 278063 - RNA, 32 nt, Human
uuucagagccuccuaugguuugggaaggaaua

SEQ ID NO: 278064 - RNA, 18 nt, Human
uuucagagccucuuccca

SEQ ID NO: 278065 - RNA, 32 nt, Human
uuucagagccugcuccccgcccucucugcucg

SEQ ID NO: 278066 - RNA, 32 nt, Human
uuucagagcguggagguguggaaggaguggcu

SEQ ID NO: 278067 - RNA, 32 nt, Human
uuucagagcugcagggacagggugagcagcug

SEQ ID NO: 278068 - RNA, 32 nt, Human
uuucagaggaaggccuguccugcuggaacugg

SEQ ID NO: 278069 - RNA, 32 nt, Human
uuucagaggcuucuuuugaagauuccccaagu

SEQ ID NO: 278070 - RNA, 24 nt, Human
uuucagagggagaucccccuccca

SEQ ID NO: 278071 - RNA, 32 nt, Human
uuucagagggccaggcaagagcacuucagaug

SEQ ID NO: 278072 - RNA, 32 nt, Human
uuucagagggcugccuaaaauauuuuauuucu

SEQ ID NO: 278073 - RNA, 32 nt, Human
uuucagaggggaggcagaaaggagaggucuau

SEQ ID NO: 278074 - RNA, 32 nt, Human
uuucagagucuucuccucucucugaucucugu

SEQ ID NO: 278075 - RNA, 32 nt, Human
uuucagagugacucagaagaaaaagaagcuga

SEQ ID NO: 278076 - RNA, 31 nt, Human
uuucagagugagagugcucaaggcugcaggu

SEQ ID NO: 278077 - RNA, 32 nt, Human
uuucagagugaguuuucuauggagccuguggc

SEQ ID NO: 278078 - RNA, 32 nt, Human
uuucagaguggggcuccccaucugcagggucc

SEQ ID NO: 278079 - RNA, 32 nt, Human
uuucagagugugaggaagggagggaccauuug

SEQ ID NO: 278080 - RNA, 32 nt, Human
uuucagaguucuuaguguggcuuuuuccauuu

SEQ ID NO: 278081 - RNA, 32 nt, Human
uuucagauaagaauguccagcaaggaagugaa

SEQ ID NO: 278082 - RNA, 32 nt, Human
uuucagauaauucccugugauaggacaacuag

SEQ ID NO: 278083 - RNA, 32 nt, Human
uuucagauaucuuggacaaaucacauauuuua

SEQ ID NO: 278084 - RNA, 32 nt, Human
uuucagaucagucuggccaacaaacaugagcc

SEQ ID NO: 278085 - RNA, 32 nt, Human
uuucagauccucugcuauuuuauugaguggaa

SEQ ID NO: 278086 - RNA, 32 nt, Human
uuucagaucuguuuucugaaaucuuuuaagcu

SEQ ID NO: 278087 - RNA, 32 nt, Human
uuucagaugaaggcuuuuccagaagcuucccc

SEQ ID NO: 278088 - RNA, 32 nt, Human
uuucagaugaaugcuuacugugguauuuggaa

SEQ ID NO: 278089 - RNA, 32 nt, Human
uuucagaugaggccacaauccuagccaacauu

SEQ ID NO: 278090 - RNA, 32 nt, Human
uuucagaugccuuugcucaaagcuugggguuu

SEQ ID NO: 278091 - RNA, 32 nt, Human
uuucagcaacagugaaaaacugagaugaaaga

SEQ ID NO: 278092 - RNA, 32 nt, Human
uuucagcaccuacaguguacagucuuguauua

SEQ ID NO: 278093 - RNA, 31 nt, Human
uuucagcacucuggggagguugaggcaggag

SEQ ID NO: 278094 - RNA, 32 nt, Human
uuucagcacuggagaccuucuuugcuauuacu

SEQ ID NO: 278095 - RNA, 32 nt, Human
uuucagcagggacuuuuauugggggcugguac

SEQ ID NO: 278096 - RNA, 32 nt, Human
uuucagcaguuaaugugcuuucuuggauccaa

SEQ ID NO: 278097 - RNA, 32 nt, Human
uuucagcauugacuuuuuaauucccauccuaa

SEQ ID NO: 278098 - RNA, 22 nt, Human
uuucagcauuuuacucacuuua

SEQ ID NO: 278099 - RNA, 32 nt, Human
uuucagccaacacucuucauggcagugucgac

SEQ ID NO: 278100 - RNA, 32 nt, Human
uuucagccaagugccugcccagagcucugcag

SEQ ID NO: 278101 - RNA, 32 nt, Human
uuucagccauggccacaagugaacagaguauc

SEQ ID NO: 278102 - RNA, 31 nt, Human
uuucagccauugcuagauaccaaaguggaga

SEQ ID NO: 278103 - RNA, 32 nt, Human
uuucagcccacuguuuaccuugucucaauaaa

SEQ ID NO: 278104 - RNA, 32 nt, Human
uuucagcccaggaauucaagaccagccugggc

SEQ ID NO: 278105 - RNA, 32 nt, Human
uuucagcccaugcccccucccaaaaagaaauu

SEQ ID NO: 278106 - RNA, 32 nt, Human
uuucagccccucucuacugucagcgagcugug

SEQ ID NO: 278107 - RNA, 32 nt, Human
uuucagcccuaaccccagugugaggggacgug

SEQ ID NO: 278108 - RNA, 32 nt, Human
uuucagccucaagcuuuacacagcuguccuua

SEQ ID NO: 278109 - RNA, 32 nt, Human
uuucagccucuagccuucacuccugggcucca

SEQ ID NO: 278110 - RNA, 32 nt, Human
uuucagccugggaggucaaggcugcagugagc

SEQ ID NO: 278111 - RNA, 32 nt, Human
uuucagccugucugucucagggugcagccuua

SEQ ID NO: 278112 - RNA, 18 nt, Human
uuucagccuucugcugcc

SEQ ID NO: 278113 - RNA, 32 nt, Human
uuucagcgcugagguccaggagcgccuggccc

SEQ ID NO: 278114 - RNA, 32 nt, Human
uuucagcgguuauguaauugugccucauuuua

SEQ ID NO: 278115 - RNA, 32 nt, Human
uuucagcuaagaaaggagaggccaggcaagca

SEQ ID NO: 278116 - RNA, 22 nt, Human
uuucagcuacucaggaagcuga

SEQ ID NO: 278117 - RNA, 32 nt, Human
uuucagcuagaauauguuggauucaggagcuu

SEQ ID NO: 278118 - RNA, 32 nt, Human
uuucagcuagauucagccaccagaucccagaa

SEQ ID NO: 278119 - RNA, 32 nt, Human
uuucagcucacuacaaccuccugcuccugggu

SEQ ID NO: 278120 - RNA, 32 nt, Human
uuucagcucacugaaccucugccucccagguc

SEQ ID NO: 278121 - RNA, 32 nt, Human
uuucagcucacugcaaccuccaccucccaggu

SEQ ID NO: 278122 - RNA, 32 nt, Human
uuucagcucacugcaaccuccgccucccaggu

SEQ ID NO: 278123 - RNA, 32 nt, Human
uuucagcucacugcaaccucugccucccaggu

SEQ ID NO: 278124 - RNA, 32 nt, Human
uuucagcucacugcaaccucugccucccgggu

SEQ ID NO: 278125 - RNA, 32 nt, Human
uuucagcucacugcaaccuucgccaccugggu

SEQ ID NO: 278126 - RNA, 32 nt, Human
uuucagcucacugcaaccuucgccucccagcu

SEQ ID NO: 278127 - RNA, 32 nt, Human
uuucagcucacugcaaucucugccacccagau

SEQ ID NO: 278128 - RNA, 32 nt, Human
uuucagcucacugugaagccagacuccccaac

SEQ ID NO: 278129 - RNA, 32 nt, Human
uuucagcucauuguaaccuccaucuccugugc

SEQ ID NO: 278130 - RNA, 32 nt, Human
uuucagcuccucuguuggacauguaagugugu

SEQ ID NO: 278131 - RNA, 32 nt, Human
uuucagcugagguuugcacuuccucucgcggc

SEQ ID NO: 278132 - RNA, 32 nt, Human
uuucagcugcaacucccuacuggguggggcac

SEQ ID NO: 278133 - RNA, 32 nt, Human
uuucagcuggagugcagacaucacuggaacuu

SEQ ID NO: 278134 - RNA, 32 nt, Human
uuucagcuguucuguaggcugcauaaccacuc

SEQ ID NO: 278135 - RNA, 32 nt, Human
uuucagcuuaauuauaaacaaaggaacaaaua

SEQ ID NO: 278136 - RNA, 32 nt, Human
uuucagcuuauuugaaguccugccucauucuc

SEQ ID NO: 278137 - RNA, 32 nt, Human
uuucagcuuccagauagccggaguuauuucuc

SEQ ID NO: 278138 - RNA, 32 nt, Human
uuucagcuucucagucucugguguuuuguuau

SEQ ID NO: 278139 - RNA, 32 nt, Human
uuucaggaaacagagggcuggagccagguucu

SEQ ID NO: 278140 - RNA, 32 nt, Human
uuucaggaaagggaggagcacaaggacucugu

SEQ ID NO: 278141 - RNA, 32 nt, Human
uuucaggaaauguaagaaaccauuauuucagg

SEQ ID NO: 278142 - RNA, 32 nt, Human
uuucaggaaguuucugcagcagaugcuuuugg

SEQ ID NO: 278143 - RNA, 32 nt, Human
uuucaggaccccugcauuuaccaaaauuugug

SEQ ID NO: 278144 - RNA, 32 nt, Human
uuucaggagcaggggugggaggcagguggacu

SEQ ID NO: 278145 - RNA, 32 nt, Human
uuucaggagcuacucuccuccuggugaggugg

SEQ ID NO: 278146 - RNA, 32 nt, Human
uuucaggaucagcugccgguucgaacacacgc

SEQ ID NO: 278147 - RNA, 32 nt, Human
uuucaggcaaagcuuuaauuuauacuaagcuu

SEQ ID NO: 278148 - RNA, 32 nt, Human
uuucaggcagggcugaagucuuccuuuucaca

SEQ ID NO: 278149 - RNA, 32 nt, Human
uuucaggcauccugccucacugcccccaggcc

SEQ ID NO: 278150 - RNA, 32 nt, Human
uuucaggccaacauggccgugcugcugcugcu

SEQ ID NO: 278151 - RNA, 32 nt, Human
uuucaggccagaaaaucucuuaacacuauuuu

SEQ ID NO: 278152 - RNA, 32 nt, Human
uuucaggcucaggcuccagccuuggcagccuu

SEQ ID NO: 278153 - RNA, 21 nt, Human
uuucaggcuuggggcuggggc

SEQ ID NO: 278154 - RNA, 32 nt, Human
uuucaggcuuugcauuuuguauaugggaagaa

SEQ ID NO: 278155 - RNA, 32 nt, Human
uuucagggaagaggcucuuacagucuauggug

SEQ ID NO: 278156 - RNA, 22 nt, Human
uuucagggauucuuuugcuuca

SEQ ID NO: 278157 - RNA, 32 nt, Human
uuucagggcaaauggggccaggagcugccugu

SEQ ID NO: 278158 - RNA, 32 nt, Human
uuucagggggagagguggagggcagauguccu

SEQ ID NO: 278159 - RNA, 32 nt, Human
uuucaggggugggaguuauggggaaggggugg

SEQ ID NO: 278160 - RNA, 32 nt, Human
uuucagggucccagcuuaguuaagucacccau

SEQ ID NO: 278161 - RNA, 32 nt, Human
uuucagggucuaccuaacugagccuagauaug

SEQ ID NO: 278162 - RNA, 23 nt, Human
uuucaggguugggcugggcccag

SEQ ID NO: 278163 - RNA, 21 nt, Human
uuucagguacucaaucaggaa

SEQ ID NO: 278164 - RNA, 32 nt, Human
uuucagguagagagagaaagugcaugcgguau

SEQ ID NO: 278165 - RNA, 32 nt, Human
uuucaggucaccaucagaaaagcuaaguuugc

SEQ ID NO: 278166 - RNA, 32 nt, Human
uuucagguccagaguaguuucuuucugucugc

SEQ ID NO: 278167 - RNA, 32 nt, Human
uuucaggucccuguaguucacacugugucccc

SEQ ID NO: 278168 - RNA, 23 nt, Human
uuucaggugauccuccugccuca

SEQ ID NO: 278169 - RNA, 32 nt, Human
uuucagguuuacagccacugggccugggcaca

SEQ ID NO: 278170 - RNA, 32 nt, Human
uuucaguaaguccaugccucuggcaggggaug

SEQ ID NO: 278171 - RNA, 32 nt, Human
uuucaguacugaggcgaauacagggaauuuca

SEQ ID NO: 278172 - RNA, 32 nt, Human
uuucaguagaugagcacacaaauguggcagag

SEQ ID NO: 278173 - RNA, 32 nt, Human
uuucaguaguacaggcuucuugccgauaugaa

SEQ ID NO: 278174 - RNA, 32 nt, Human
uuucaguagugagcacaguugacagggucccu

SEQ ID NO: 278175 - RNA, 32 nt, Human
uuucaguauaaauauaaugaacaugucagaac

SEQ ID NO: 278176 - RNA, 32 nt, Human
uuucaguaucaucuggcacacaacuguccaag

SEQ ID NO: 278177 - RNA, 32 nt, Human
uuucagucacuugcugaugacuucugaugucc

SEQ ID NO: 278178 - RNA, 23 nt, Human
uuucagucaggugugccauccca

SEQ ID NO: 278179 - RNA, 21 nt, Human
uuucagucauauaauggugug

SEQ ID NO: 278180 - RNA, 32 nt, Human
uuucagucaugcccccugcucuuuuguauuug

SEQ ID NO: 278181 - RNA, 32 nt, Human
uuucagucauggugucaagcacauuaauacuu

SEQ ID NO: 278182 - RNA, 32 nt, Human
uuucagucauuuucuuuuaccucguugucagu

SEQ ID NO: 278183 - RNA, 32 nt, Human
uuucagucccagaucuugcucugccuuggggu

SEQ ID NO: 278184 - RNA, 32 nt, Human
uuucagucccagcuguaggcuuguaaauaccc

SEQ ID NO: 278185 - RNA, 32 nt, Human
uuucaguccuuaucucaaccacauaagacaga

SEQ ID NO: 278186 - RNA, 32 nt, Human
uuucagucgcaaaucacaucuugaaagacaaa

SEQ ID NO: 278187 - RNA, 32 nt, Human
uuucagucgcaaaucacaucuugaaagacaua

SEQ ID NO: 278188 - RNA, 32 nt, Human
uuucagucuaacugggguuccuuagcuggaag

SEQ ID NO: 278189 - RNA, 32 nt, Human
uuucagucucaaagcaaacaaaagaguauuga

SEQ ID NO: 278190 - RNA, 32 nt, Human
uuucagucuccgcuggcaacagaaaucaagau

SEQ ID NO: 278191 - RNA, 32 nt, Human
uuucagugaacugcuggaacucacacaugccc

SEQ ID NO: 278192 - RNA, 32 nt, Human
uuucagugaagucacaggaugugccuuauuua

SEQ ID NO: 278193 - RNA, 32 nt, Human
uuucagugcccaggaagaaggcagcugggaca

SEQ ID NO: 278194 - RNA, 32 nt, Human
uuucagugcccuggcccuggggugggggacaa

SEQ ID NO: 278195 - RNA, 32 nt, Human
uuucaguguaguucucuccucuucaaauaaac

SEQ ID NO: 278196 - RNA, 29 nt, Human
uuucagugucugucuucccuggguugaca

SEQ ID NO: 278197 - RNA, 32 nt, Human
uuucaguguguauguguguguauauguaaggg

SEQ ID NO: 278198 - RNA, 32 nt, Human
uuucaguguguauguguuaguguguuacggga

SEQ ID NO: 278199 - RNA, 32 nt, Human
uuucaguguguggggaagcuguccugggggcu

SEQ ID NO: 278200 - RNA, 32 nt, Human
uuucaguguuccacauuucucccuuuagaaaa

SEQ ID NO: 278201 - RNA, 32 nt, Human
uuucaguguuuuaaaaucagagcucugaauac

SEQ ID NO: 278202 - RNA, 32 nt, Human
uuucaguuaauuuugcuucauguaucuugaag

SEQ ID NO: 278203 - RNA, 32 nt, Human
uuucaguuaccugagccacagcuuaaggucag

SEQ ID NO: 278204 - RNA, 32 nt, Human
uuucaguucaaagucaugauguuuuuaaaauc

SEQ ID NO: 278205 - RNA, 32 nt, Human
uuucaguucacugcaaccuccaccucccaggu

SEQ ID NO: 278206 - RNA, 32 nt, Human
uuucaguucacugcagccucgaccucccaggc

SEQ ID NO: 278207 - RNA, 32 nt, Human
uuucaguugugagccuucuagggccccaggcu

SEQ ID NO: 278208 - RNA, 32 nt, Human
uuucaguuuagacccagcuaaguugggagcug

SEQ ID NO: 278209 - RNA, 32 nt, Human
uuucaguuucaaaucaaaccuugaaagacaua

SEQ ID NO: 278210 - RNA, 32 nt, Human
uuucaguuucacccucuauuuccaaagccauu

SEQ ID NO: 278211 - RNA, 32 nt, Human
uuucaguuucagacugaggucugcuaagaagc

SEQ ID NO: 278212 - RNA, 32 nt, Human
uuucaguuucccacccugccuggcuuucucuc

SEQ ID NO: 278213 - RNA, 32 nt, Human
uuucauaaacaacaugagugguuucuggagac

SEQ ID NO: 278214 - RNA, 32 nt, Human
uuucauaaacucauauaaggcacauggcauuu

SEQ ID NO: 278215 - RNA, 22 nt, Human
uuucauaaggccugcccuccca

SEQ ID NO: 278216 - RNA, 32 nt, Human
uuucauaaguucugcuuucagcauuuuccuua

SEQ ID NO: 278217 - RNA, 32 nt, Human
uuucauaauccugggauauauguaccauuguc

SEQ ID NO: 278218 - RNA, 32 nt, Human
uuucauaccaaagaagauggagagucuaaaau

SEQ ID NO: 278219 - RNA, 32 nt, Human
uuucauaccaguaccugaaguaggcucaauaa

SEQ ID NO: 278220 - RNA, 32 nt, Human
uuucauacccuuguaaguggguuauguggugg

SEQ ID NO: 278221 - RNA, 32 nt, Human
uuucauacuccccgcuuccacccuccaaccuc

SEQ ID NO: 278222 - RNA, 32 nt, Human
uuucauagaagagcccuggagaagacaguaga

SEQ ID NO: 278223 - RNA, 32 nt, Human
uuucauagacucauggaacugaagggaccuua

SEQ ID NO: 278224 - RNA, 32 nt, Human
uuucauagaggcagaaaguaggaaccagauag

SEQ ID NO: 278225 - RNA, 21 nt, Human
uuucauagauuugaaaaacuu

SEQ ID NO: 278226 - RNA, 32 nt, Human
uuucauagcuaagaaauaaaacuguuaaaguc

SEQ ID NO: 278227 - RNA, 32 nt, Human
uuucauagcugcauuaccauagcuaaacuccu

SEQ ID NO: 278228 - RNA, 32 nt, Human
uuucauaggcgagauccguguucuccauuuau

SEQ ID NO: 278229 - RNA, 32 nt, Human
uuucauaguacacaugagguggauauuugaua

SEQ ID NO: 278230 - RNA, 32 nt, Human
uuucauaguugggauuucagagcacugauacc

SEQ ID NO: 278231 - RNA, 32 nt, Human
uuucauauagggaagaguucugaucuguaccu

SEQ ID NO: 278232 - RNA, 32 nt, Human
uuucauaucacacuguuaaaaguuguguuuug

SEQ ID NO: 278233 - RNA, 32 nt, Human
uuucauaucgaguauggaacccuucagaucaa

SEQ ID NO: 278234 - RNA, 22 nt, Human
uuucauaugaaauugaaaaauu

SEQ ID NO: 278235 - RNA, 32 nt, Human
uuucauaugcccuauaaauguaaagaauuuau

SEQ ID NO: 278236 - RNA, 32 nt, Human
uuucauauucaccauucuuccaccucauugaa

SEQ ID NO: 278237 - RNA, 32 nt, Human
uuucauauuguucaaacacacaugcucuacaa

SEQ ID NO: 278238 - RNA, 32 nt, Human
uuucauauuuggaacuuuguaauagcgggagu

SEQ ID NO: 278239 - RNA, 32 nt, Human
uuucauauuuggaguaugaaaguagauucuau

SEQ ID NO: 278240 - RNA, 32 nt, Human
uuucaucaaucacgucuauguaaugaagccuc

SEQ ID NO: 278241 - RNA, 32 nt, Human
uuucaucacacccuuuuaacauuuaucuaaaa

SEQ ID NO: 278242 - RNA, 32 nt, Human
uuucaucacccagguauuaagcccagugccua

SEQ ID NO: 278243 - RNA, 32 nt, Human
uuucaucacggugaaacccccucucugcuaaa

SEQ ID NO: 278244 - RNA, 32 nt, Human
uuucaucagucacucacaugugcucaaggaau

SEQ ID NO: 278245 - RNA, 32 nt, Human
uuucaucauaauacauuauguuuaccuccauc

SEQ ID NO: 278246 - RNA, 32 nt, Human
uuucaucaucuacccaucuauuuggaaagcac

SEQ ID NO: 278247 - RNA, 32 nt, Human
uuucaucaugaauauuuugagcacacacucua

SEQ ID NO: 278248 - RNA, 32 nt, Human
uuucaucaugaggaaagcaguugaaaugaggc

SEQ ID NO: 278249 - RNA, 32 nt, Human
uuucaucauguuagccaggauggucuugaucu

SEQ ID NO: 278250 - RNA, 32 nt, Human
uuucaucauguuggccaggauggucucgaucu

SEQ ID NO: 278251 - RNA, 32 nt, Human
uuucaucauguuggccaggauggucucuuaac

SEQ ID NO: 278252 - RNA, 32 nt, Human
uuucaucauguuggccaggauggucuugaucu

SEQ ID NO: 278253 - RNA, 32 nt, Human
uuucaucauguuggccaggaugguuuugaucu

SEQ ID NO: 278254 - RNA, 32 nt, Human
uuucaucauguuggccaggcuagucuugaacu

SEQ ID NO: 278255 - RNA, 32 nt, Human
uuucauccagcucugguuucuguguuucaugu

SEQ ID NO: 278256 - RNA, 32 nt, Human
uuucauccaguugggaaacccaggaagccggc

SEQ ID NO: 278257 - RNA, 28 nt, Human
uuucaucccagaggggccucaucagcaa

SEQ ID NO: 278258 - RNA, 32 nt, Human
uuucauccccugacauugugggagaaauuuug

SEQ ID NO: 278259 - RNA, 32 nt, Human
uuucauccgcuguuuccuccccaaaacacaca

SEQ ID NO: 278260 - RNA, 32 nt, Human
uuucauccuacuuggagugcagagauaaaacc

SEQ ID NO: 278261 - RNA, 32 nt, Human
uuucauccucaccaauccugccagggagcuac

SEQ ID NO: 278262 - RNA, 19 nt, Human
uuucauccugacucugccc

SEQ ID NO: 278263 - RNA, 32 nt, Human
uuucauccugauucagcucugccuugcaucac

SEQ ID NO: 278264 - RNA, 32 nt, Human
uuucauccugcaggaggauguagcgccucagu

SEQ ID NO: 278265 - RNA, 32 nt, Human
uuucauccuggcuggagaauguggagaacuaa

SEQ ID NO: 278266 - RNA, 32 nt, Human
uuucauccuuuaguuacccaggccaguagcuu

SEQ ID NO: 278267 - RNA, 32 nt, Human
uuucaucgguucccucgcacuggaggaggcag

SEQ ID NO: 278268 - RNA, 32 nt, Human
uuucaucuacgaaggcccugagguucccauca

SEQ ID NO: 278269 - RNA, 24 nt, Human
uuucaucuaggcuggagugcaaug

SEQ ID NO: 278270 - RNA, 32 nt, Human
uuucaucucaacuauguuauaccuggacauuu

SEQ ID NO: 278271 - RNA, 32 nt, Human
uuucaucucaagggguucccugggucuugaac

SEQ ID NO: 278272 - RNA, 32 nt, Human
uuucaucucccaaggucuucuuucugaaacca

SEQ ID NO: 278273 - RNA, 32 nt, Human
uuucaucuccucauauugaaucauggaccaug

SEQ ID NO: 278274 - RNA, 32 nt, Human
uuucaucucggccccugucaaucugguuuuug

SEQ ID NO: 278275 - RNA, 32 nt, Human
uuucaucucucaucuuuuguccuccuuagcac

SEQ ID NO: 278276 - RNA, 32 nt, Human
uuucaucucugccaucucuaaagcacuuuuca

SEQ ID NO: 278277 - RNA, 21 nt, Human
uuucaucucuuccccuuguca

SEQ ID NO: 278278 - RNA, 32 nt, Human
uuucaucucuuccucccuauggguauuagaaa

SEQ ID NO: 278279 - RNA, 32 nt, Human
uuucaucucuuguauaugaugaucuggaucca

SEQ ID NO: 278280 - RNA, 32 nt, Human
uuucaucucuuuuucucugaguacguuucagu

SEQ ID NO: 278281 - RNA, 32 nt, Human
uuucaucugcuguugauacugaucucaaugca

SEQ ID NO: 278282 - RNA, 32 nt, Human
uuucaucugcuuacacugccucuuucucuugc

SEQ ID NO: 278283 - RNA, 32 nt, Human
uuucaucuggggauuuaccuguucauuuaauc

SEQ ID NO: 278284 - RNA, 32 nt, Human
uuucaucuguaaaugucagugucugaacagca

SEQ ID NO: 278285 - RNA, 32 nt, Human
uuucaucuguucacuuucuuagggaggguaaa

SEQ ID NO: 278286 - RNA, 32 nt, Human
uuucaucuucaguugucucugaugcagcuuau

SEQ ID NO: 278287 - RNA, 32 nt, Human
uuucaucuucuuucuuuuccuaaagaaucacg

SEQ ID NO: 278288 - RNA, 32 nt, Human
uuucaucuuuaagagugcaugugaguauauug

SEQ ID NO: 278289 - RNA, 24 nt, Human
uuucaucuuuccucccuccuccca

SEQ ID NO: 278290 - RNA, 32 nt, Human
uuucaugaaaugcaaaacaauaggacagcugc

SEQ ID NO: 278291 - RNA, 32 nt, Human
uuucaugaagcacaaguggaauuuaauacaua

SEQ ID NO: 278292 - RNA, 32 nt, Human
uuucaugagccccaaggcuggggccacagcuc

SEQ ID NO: 278293 - RNA, 32 nt, Human
uuucaugagcuuccaugcuugcuuuguuucug

SEQ ID NO: 278294 - RNA, 29 nt, Human
uuucaugaucaacaugggagacucccacg

SEQ ID NO: 278295 - RNA, 29 nt, Human
uuucaugcacacauuggacuccaggaacc

SEQ ID NO: 278296 - RNA, 32 nt, Human
uuucaugcaguuucugcuucauuuuccaagga

SEQ ID NO: 278297 - RNA, 32 nt, Human
uuucaugcaucguggaggccacguggucacug

SEQ ID NO: 278298 - RNA, 32 nt, Human
uuucaugcccagcauuaaaccaaguaucucau

SEQ ID NO: 278299 - RNA, 32 nt, Human
uuucaugcuacugcucuccuaauguuaguucu

SEQ ID NO: 278300 - RNA, 32 nt, Human
uuucaugcuaucucaguucaccuuccagcuac

SEQ ID NO: 278301 - RNA, 32 nt, Human
uuucaugcucuccccaaauucugucugauuuu

SEQ ID NO: 278302 - RNA, 32 nt, Human
uuucaugcuggcaugagaagauauccuuugaa

SEQ ID NO: 278303 - RNA, 31 nt, Human
uuucaugcuguggaaagagggugaaaagguu

SEQ ID NO: 278304 - RNA, 32 nt, Human
uuucaugcuuccuccucugauuuugccugugu

SEQ ID NO: 278305 - RNA, 32 nt, Human
uuucaugcuucugcccugucaaaggucccuau

SEQ ID NO: 278306 - RNA, 32 nt, Human
uuucauggaaccuggaggcugggcuucaggcu

SEQ ID NO: 278307 - RNA, 32 nt, Human
uuucauggagcagccacuuagcauugaauugc

SEQ ID NO: 278308 - RNA, 32 nt, Human
uuucauggaucagcuaaguugcaccaacuuug

SEQ ID NO: 278309 - RNA, 32 nt, Human
uuucauggaugcauacaccugccugcaggcgc

SEQ ID NO: 278310 - RNA, 32 nt, Human
uuucaugguugcgaagaccuaaccucaaaugc

SEQ ID NO: 278311 - RNA, 32 nt, Human
uuucauguagcagcaaugcagauuuggugaau

SEQ ID NO: 278312 - RNA, 32 nt, Human
uuucauguagccagcagaacugaagugugcug

SEQ ID NO: 278313 - RNA, 32 nt, Human
uuucauguauuuccacaagugccaaacauuuc

SEQ ID NO: 278314 - RNA, 32 nt, Human
uuucaugucaggcuugcuuugccuugugggcu

SEQ ID NO: 278315 - RNA, 32 nt, Human
uuucaugucccccaccucauguuuucaccuuu

SEQ ID NO: 278316 - RNA, 19 nt, Human
uuucauguggccucccacu

SEQ ID NO: 278317 - RNA, 23 nt, Human
uuucauguguuuuuuggcugcau

SEQ ID NO: 278318 - RNA, 32 nt, Human
uuucauguucuuggaccuuuuguacugaaaau

SEQ ID NO: 278319 - RNA, 32 nt, Human
uuucauguugaacacagcucucuccacucccu

SEQ ID NO: 278320 - RNA, 32 nt, Human
uuucauguuggggcuguaggccuggggcaggu

SEQ ID NO: 278321 - RNA, 32 nt, Human
uuucauguugggguggggacggaggggaaagg

SEQ ID NO: 278322 - RNA, 32 nt, Human
uuucauguuuuggguaucaguguuacauuaaa

SEQ ID NO: 278323 - RNA, 32 nt, Human
uuucauuaaacuugaagcagucguggcuuugg

SEQ ID NO: 278324 - RNA, 27 nt, Human
uuucauuaaagaauguuuuggaacuuu

SEQ ID NO: 278325 - RNA, 32 nt, Human
uuucauuaauucagugaaguugagacuucaua

SEQ ID NO: 278326 - RNA, 32 nt, Human
uuucauuacauacuuguuuaaacucugucuuc

SEQ ID NO: 278327 - RNA, 32 nt, Human
uuucauuaccaccaccacgugaccuggucuua

SEQ ID NO: 278328 - RNA, 32 nt, Human
uuucauuaccaccaccaucugaccuagucuua

SEQ ID NO: 278329 - RNA, 32 nt, Human
uuucauuaccaccaccaucugaccuggucuua

SEQ ID NO: 278330 - RNA, 32 nt, Human
uuucauuacccaagccucagaaaaacacacaa

SEQ ID NO: 278331 - RNA, 32 nt, Human
uuucauuagcaguugcucacaugucuuugggu

SEQ ID NO: 278332 - RNA, 22 nt, Human
uuucauuagccuggcuguccac

SEQ ID NO: 278333 - RNA, 32 nt, Human
uuucauuauucugccacaugcuuccagugcua

SEQ ID NO: 278334 - RNA, 22 nt, Human
uuucauucacauucacaaagca

SEQ ID NO: 278335 - RNA, 32 nt, Human
uuucauucagcaggguauuuucugccuuguug

SEQ ID NO: 278336 - RNA, 32 nt, Human
uuucauucauucuggagucuacuaauuuaccu

SEQ ID NO: 278337 - RNA, 32 nt, Human
uuucauucauuugugcuuuugcauuaaacugu

SEQ ID NO: 278338 - RNA, 32 nt, Human
uuucauuccagccugggcaacaugagugaaag

SEQ ID NO: 278339 - RNA, 25 nt, Human
uuucauuccagggaguucuccccuc

SEQ ID NO: 278340 - RNA, 32 nt, Human
uuucauuccauucuauuguuuacacaacgauu

SEQ ID NO: 278341 - RNA, 32 nt, Human
uuucauucgcugaaggaaaggcaagagaguug

SEQ ID NO: 278342 - RNA, 32 nt, Human
uuucauucuccacauccucuuuuguucuagug

SEQ ID NO: 278343 - RNA, 32 nt, Human
uuucauucucucuggaaacagacucagguuuc

SEQ ID NO: 278344 - RNA, 32 nt, Human
uuucauucuguaauucagcaguucugggugaa

SEQ ID NO: 278345 - RNA, 32 nt, Human
uuucauucuuuauccaugagcaccaggcuuug

SEQ ID NO: 278346 - RNA, 32 nt, Human
uuucauugaauuauaaccacaagccaccaccc

SEQ ID NO: 278347 - RNA, 32 nt, Human
uuucauugauuuuauugaucagugcauugaac

SEQ ID NO: 278348 - RNA, 24 nt, Human
uuucauugucacaccaaauaacca

SEQ ID NO: 278349 - RNA, 32 nt, Human
uuucauugugcaaaugaaaacguguguaucaa

SEQ ID NO: 278350 - RNA, 32 nt, Human
uuucauuguguuagccgggauggucuugaucu

SEQ ID NO: 278351 - RNA, 32 nt, Human
uuucauuuacaagcaagcaggccaggcagcug

SEQ ID NO: 278352 - RNA, 32 nt, Human
uuucauuuauucauccauccauucaacaagua

SEQ ID NO: 278353 - RNA, 32 nt, Human
uuucauuucauagcuuucaaaaaucaugcuaa

SEQ ID NO: 278354 - RNA, 28 nt, Human
uuucauuucaugaggcauuguauuauau

SEQ ID NO: 278355 - RNA, 32 nt, Human
uuucauuuccccaggucuucaguguugaugua

SEQ ID NO: 278356 - RNA, 21 nt, Human
uuucauuucccuggcuugcca

SEQ ID NO: 278357 - RNA, 32 nt, Human
uuucauuuccuacugauacaaggccuggagag

SEQ ID NO: 278358 - RNA, 19 nt, Human
uuucauuuccuccccaccc

SEQ ID NO: 278359 - RNA, 23 nt, Human
uuucauuuccugggggcuugcca

SEQ ID NO: 278360 - RNA, 32 nt, Human
uuucauuucuuucugcccuucuccuuugccuu

SEQ ID NO: 278361 - RNA, 21 nt, Human
uuucauuugcaaacuucuaca

SEQ ID NO: 278362 - RNA, 22 nt, Human
uuucauuugcagugguuaguca

SEQ ID NO: 278363 - RNA, 32 nt, Human
uuucauuugguuaguuucugggugauacugug

SEQ ID NO: 278364 - RNA, 32 nt, Human
uuucauuuguguaaauacgaugcugaauuuua

SEQ ID NO: 278365 - RNA, 26 nt, Human
uuucauuuguuauauauuacaaacca

SEQ ID NO: 278366 - RNA, 32 nt, Human
uuucauuuuagagaauggggcagauggggcaa

SEQ ID NO: 278367 - RNA, 32 nt, Human
uuucauuuucauuuuccagucuacuuuggggu

SEQ ID NO: 278368 - RNA, 32 nt, Human
uuucauuuuccaccuucucugccuccaguccc

SEQ ID NO: 278369 - RNA, 32 nt, Human
uuucauuuucuuucuuguuugacuguaugcaa

SEQ ID NO: 278370 - RNA, 32 nt, Human
uuucauuuugcaccugcagccaagcaaaugcc

SEQ ID NO: 278371 - RNA, 32 nt, Human
uuucauuuuuauuugggagucuuugugaccag

SEQ ID NO: 278372 - RNA, 32 nt, Human
uuuccaaaaagggaguuuccaggccagaagcc

SEQ ID NO: 278373 - RNA, 22 nt, Human
uuuccaaaacacuuuauacuuu

SEQ ID NO: 278374 - RNA, 24 nt, Human
uuuccaaaauacuuuauucucuca

SEQ ID NO: 278375 - RNA, 20 nt, Human
uuuccaaaauuacuucucuc

SEQ ID NO: 278376 - RNA, 32 nt, Human
uuuccaaagagcugggauuacaggcaugagcc

SEQ ID NO: 278377 - RNA, 32 nt, Human
uuuccaaagauagugacaggagagaacuggaa

SEQ ID NO: 278378 - RNA, 32 nt, Human
uuuccaaagaugacugcauagggaccaacacu

SEQ ID NO: 278379 - RNA, 32 nt, Human
uuuccaaagguggauuccuacaaggauuguaa

SEQ ID NO: 278380 - RNA, 22 nt, Human
uuuccaaaguauaggacauuug

SEQ ID NO: 278381 - RNA, 32 nt, Human
uuuccaacagcaugugcucacuuggugucucu

SEQ ID NO: 278382 - RNA, 32 nt, Human
uuuccaacauuguuuuguuauuacaaguaggg

SEQ ID NO: 278383 - RNA, 32 nt, Human
uuuccaaccaacaugaaaugacuauaaacggu

SEQ ID NO: 278384 - RNA, 32 nt, Human
uuuccaaccaaccaaauuucugcauucgaguc

SEQ ID NO: 278385 - RNA, 32 nt, Human
uuuccaacccaagcccccagaccaucugugga

SEQ ID NO: 278386 - RNA, 20 nt, Human
uuuccaaccuaacgagggaa

SEQ ID NO: 278387 - RNA, 32 nt, Human
uuuccaaccuccauuucagccugucugucuca

SEQ ID NO: 278388 - RNA, 32 nt, Human
uuuccaacucagcugaugaaucugucuagguc

SEQ ID NO: 278389 - RNA, 32 nt, Human
uuuccaacuccaguuucugucuugcuccaaaa

SEQ ID NO: 278390 - RNA, 32 nt, Human
uuuccaagcccacccuuuuccccugagcucag

SEQ ID NO: 278391 - RNA, 32 nt, Human
uuuccaagcuguuucgcuuugcaauauauuac

SEQ ID NO: 278392 - RNA, 32 nt, Human
uuuccaaggaagcagaagacgggaggggaggc

SEQ ID NO: 278393 - RNA, 32 nt, Human
uuuccaaggaaggaaaggcacacaaugguauc

SEQ ID NO: 278394 - RNA, 32 nt, Human
uuuccaaggacugggagcaaacuugcaggcuc

SEQ ID NO: 278395 - RNA, 32 nt, Human
uuuccaaggcauuucuguuuauucuuuaguaa

SEQ ID NO: 278396 - RNA, 32 nt, Human
uuuccaaggcuucuccaauucugcccaaaaau

SEQ ID NO: 278397 - RNA, 32 nt, Human
uuuccaagggaaaugcuggcuuuccaguggag

SEQ ID NO: 278398 - RNA, 32 nt, Human
uuuccaagggagcgauacuaaggcagacucag

SEQ ID NO: 278399 - RNA, 28 nt, Human
uuuccaaggucugcugccuucaucuaug

SEQ ID NO: 278400 - RNA, 24 nt, Human
uuuccaaguagcugggauuacagg

SEQ ID NO: 278401 - RNA, 32 nt, Human
uuuccaaguagcugggauuacaggcacccauc

SEQ ID NO: 278402 - RNA, 32 nt, Human
uuuccaagucuugccauauuucaagcaaagag

SEQ ID NO: 278403 - RNA, 31 nt, Human
uuuccaagugagaaggggagcagguguuuac

SEQ ID NO: 278404 - RNA, 32 nt, Human
uuuccaaucaccgacuguccugucuacauuag

SEQ ID NO: 278405 - RNA, 32 nt, Human
uuuccaaucccauguuccuccauucguguguc

SEQ ID NO: 278406 - RNA, 32 nt, Human
uuuccaauguggugacacaauuuuauauccca

SEQ ID NO: 278407 - RNA, 32 nt, Human
uuuccaauuauuccagccucguuguugaaaag

SEQ ID NO: 278408 - RNA, 32 nt, Human
uuuccaauuccauuaagggacccucucuuuuu

SEQ ID NO: 278409 - RNA, 32 nt, Human
uuuccaauugaugagaggagcagagaggaagg

SEQ ID NO: 278410 - RNA, 32 nt, Human
uuuccacaacuaagaaagcagaggccgggcau

SEQ ID NO: 278411 - RNA, 32 nt, Human
uuuccacaagaucugucuccagccuggccuca

SEQ ID NO: 278412 - RNA, 32 nt, Human
uuuccacaagauucccagagacaggaaaaucc

SEQ ID NO: 278413 - RNA, 32 nt, Human
uuuccacaaugccguggaugcugcagucaggc

SEQ ID NO: 278414 - RNA, 32 nt, Human
uuuccacacuugacagugguuggcuuugauga

SEQ ID NO: 278415 - RNA, 32 nt, Human
uuuccacagaggaggaaagagcaggcagcaga

SEQ ID NO: 278416 - RNA, 32 nt, Human
uuuccacagauggggagauagaagcucagaua

SEQ ID NO: 278417 - RNA, 32 nt, Human
uuuccacagucuugcauuucuagauacuucca

SEQ ID NO: 278418 - RNA, 32 nt, Human
uuuccacagugauauauuaaacccaaaaggaa

SEQ ID NO: 278419 - RNA, 32 nt, Human
uuuccacauguuggccaggaugguuucggucu

SEQ ID NO: 278420 - RNA, 32 nt, Human
uuuccacauucugauucaccagccuggaaacu

SEQ ID NO: 278421 - RNA, 32 nt, Human
uuuccaccccucucagcuugagguccuaccug

SEQ ID NO: 278422 - RNA, 32 nt, Human
uuuccacccucaccugcccccucauacagagu

SEQ ID NO: 278423 - RNA, 32 nt, Human
uuuccaccgugccaaggcuccuuacacgcauc

SEQ ID NO: 278424 - RNA, 32 nt, Human
uuuccaccuagcugauccuaaauguuccuucc

SEQ ID NO: 278425 - RNA, 32 nt, Human
uuuccaccuauuggcuauugugaauggugcug

SEQ ID NO: 278426 - RNA, 32 nt, Human
uuuccaccucacugucuccauccuccaccucu

SEQ ID NO: 278427 - RNA, 32 nt, Human
uuuccaccuccccuacaagugcccucgggucu

SEQ ID NO: 278428 - RNA, 32 nt, Human
uuuccaccuccugggccggggcucuggccccc

SEQ ID NO: 278429 - RNA, 32 nt, Human
uuuccaccucugccuuuaaggcauuuuuguca

SEQ ID NO: 278430 - RNA, 32 nt, Human
uuuccaccuuuaagaaugauuuugccaagaau

SEQ ID NO: 278431 - RNA, 32 nt, Human
uuuccacgggaggagaaucaagagugagccau

SEQ ID NO: 278432 - RNA, 32 nt, Human
uuuccacucaacaaccucccaccccuguccug

SEQ ID NO: 278433 - RNA, 32 nt, Human
uuuccacucugggaguggaggucaagaggccc

SEQ ID NO: 278434 - RNA, 32 nt, Human
uuuccacucugucuggugagcucugcuuuuuc

SEQ ID NO: 278435 - RNA, 32 nt, Human
uuuccacugaagcugaaccucugccuuuagga

SEQ ID NO: 278436 - RNA, 32 nt, Human
uuuccacugucagguacuucugacucccuggg

SEQ ID NO: 278437 - RNA, 32 nt, Human
uuuccacuucuuccuuucucuuucucucuucc

SEQ ID NO: 278438 - RNA, 32 nt, Human
uuuccacuugugaggccagccugguagaccuc

SEQ ID NO: 278439 - RNA, 32 nt, Human
uuuccacuugugggcuucagguguuuucaagc

SEQ ID NO: 278440 - RNA, 32 nt, Human
uuuccagaaacccgcuggacccucucuucucc

SEQ ID NO: 278441 - RNA, 32 nt, Human
uuuccagaaggucuuuaaugagcugcuggucc

SEQ ID NO: 278442 - RNA, 32 nt, Human
uuuccagacaucuuuuucagauugucuuaagc

SEQ ID NO: 278443 - RNA, 32 nt, Human
uuuccagaccaggacugaaauccagagagggu

SEQ ID NO: 278444 - RNA, 32 nt, Human
uuuccagagaccacaugugagcuucuuuuagg

SEQ ID NO: 278445 - RNA, 31 nt, Human
uuuccagagagagucaugcuggaggagaagg

SEQ ID NO: 278446 - RNA, 32 nt, Human
uuuccagagccccuaguuccaggauuuccaug

SEQ ID NO: 278447 - RNA, 32 nt, Human
uuuccagagcucccaguggacaugucagagac

SEQ ID NO: 278448 - RNA, 32 nt, Human
uuuccagagcucugucucuguacagcccucuc

SEQ ID NO: 278449 - RNA, 22 nt, Human
uuuccagaggauaggauauuua

SEQ ID NO: 278450 - RNA, 32 nt, Human
uuuccagagggggagcccagagcuugaaaggc

SEQ ID NO: 278451 - RNA, 32 nt, Human
uuuccagagguguguggcucuuaaguugacau

SEQ ID NO: 278452 - RNA, 32 nt, Human
uuuccagagguuagaaaacuugcuugaaguuc

SEQ ID NO: 278453 - RNA, 32 nt, Human
uuuccagagugcucgauacuguuaauuacauc

SEQ ID NO: 278454 - RNA, 32 nt, Human
uuuccagauagugucagcuuauuugaagauua

SEQ ID NO: 278455 - RNA, 32 nt, Human
uuuccagauauuaggucacagcagaagcagcc

SEQ ID NO: 278456 - RNA, 32 nt, Human
uuuccagauguccuagaaauccuagcaacaga

SEQ ID NO: 278457 - RNA, 32 nt, Human
uuuccagaugucugccaacaagaaaugacuca

SEQ ID NO: 278458 - RNA, 32 nt, Human
uuuccagauuacacuccagccugagucagcac

SEQ ID NO: 278459 - RNA, 32 nt, Human
uuuccagcaaacugagaaccugggaauuccug

SEQ ID NO: 278460 - RNA, 32 nt, Human
uuuccagcaggcagccuugcucuggcuggugg

SEQ ID NO: 278461 - RNA, 32 nt, Human
uuuccagcaugcaaucauuuccaucuuaugga

SEQ ID NO: 278462 - RNA, 32 nt, Human
uuuccagcccuuuuaugccugugugaucccac

SEQ ID NO: 278463 - RNA, 32 nt, Human
uuuccagccucaguccagggccccagaacuga

SEQ ID NO: 278464 - RNA, 32 nt, Human
uuuccagccuccagccucucauuucuggggcu

SEQ ID NO: 278465 - RNA, 32 nt, Human
uuuccagccuccaggauugugagaaauacaug

SEQ ID NO: 278466 - RNA, 32 nt, Human
uuuccagccuuccuccccaucucccauucucc

SEQ ID NO: 278467 - RNA, 32 nt, Human
uuuccagccuuugucacuagucuuugaggagg

SEQ ID NO: 278468 - RNA, 22 nt, Human
uuuccagcgagcccuguuccag

SEQ ID NO: 278469 - RNA, 32 nt, Human
uuuccagcuaggacacagcaggucgugauccg

SEQ ID NO: 278470 - RNA, 32 nt, Human
uuuccagcugagccacgccugccgggccaccu

SEQ ID NO: 278471 - RNA, 32 nt, Human
uuuccagcugcaauaagccgugccucauuaua

SEQ ID NO: 278472 - RNA, 32 nt, Human
uuuccaggaaccuugccaugcccacaccuacg

SEQ ID NO: 278473 - RNA, 32 nt, Human
uuuccaggaaguggccauauuggauccauuca

SEQ ID NO: 278474 - RNA, 32 nt, Human
uuuccaggacaguggcagaggcugauggagga

SEQ ID NO: 278475 - RNA, 32 nt, Human
uuuccaggacuagaaccgggaaccuggagccc

SEQ ID NO: 278476 - RNA, 32 nt, Human
uuuccaggacucaggaguggcacugggaagaa

SEQ ID NO: 278477 - RNA, 32 nt, Human
uuuccaggacugcccucuccagaaaaacagua

SEQ ID NO: 278478 - RNA, 32 nt, Human
uuuccaggaggaagacuagugguggauuccau

SEQ ID NO: 278479 - RNA, 32 nt, Human
uuuccaggauacugcauuggaaauugagucag

SEQ ID NO: 278480 - RNA, 32 nt, Human
uuuccaggauuuccuccaccuguaccuccagg

SEQ ID NO: 278481 - RNA, 32 nt, Human
uuuccaggccaccuucuccaucugcucacuga

SEQ ID NO: 278482 - RNA, 32 nt, Human
uuuccaggcccaccuucggccucccagcagcc

SEQ ID NO: 278483 - RNA, 32 nt, Human
uuuccaggcucucuucucucccucucucuccu

SEQ ID NO: 278484 - RNA, 32 nt, Human
uuuccaggcucuggagagaagcccucacccug

SEQ ID NO: 278485 - RNA, 32 nt, Human
uuuccaggcugaagugauucauucauuauucu

SEQ ID NO: 278486 - RNA, 32 nt, Human
uuuccagggacagaggcccaacuccaggacgc

SEQ ID NO: 278487 - RNA, 32 nt, Human
uuuccagggacucaaaauuccaaaaagguggu

SEQ ID NO: 278488 - RNA, 32 nt, Human
uuuccagggauuaggauuagaaggaauauuag

SEQ ID NO: 278489 - RNA, 32 nt, Human
uuuccagggccccagccugauggggcugcccu

SEQ ID NO: 278490 - RNA, 32 nt, Human
uuuccagggcuaaugccuccaucccagucauc

SEQ ID NO: 278491 - RNA, 32 nt, Human
uuuccaguaaaaacaugaccagcuuacaaaaa

SEQ ID NO: 278492 - RNA, 32 nt, Human
uuuccaguaaaacagucuucuccccucccucg

SEQ ID NO: 278493 - RNA, 32 nt, Human
uuuccaguaguuagcuuucuuccuggauuccu

SEQ ID NO: 278494 - RNA, 32 nt, Human
uuuccaguccucaugcaggguaucagcauugc

SEQ ID NO: 278495 - RNA, 32 nt, Human
uuuccagucugccaaucauauugggaaagugc

SEQ ID NO: 278496 - RNA, 31 nt, Human
uuuccaguggaaaaaggaaaagacugguaca

SEQ ID NO: 278497 - RNA, 32 nt, Human
uuuccaguggauacaaggggccuguucacgag

SEQ ID NO: 278498 - RNA, 32 nt, Human
uuuccagugguagcuugaccugagaugauacc

SEQ ID NO: 278499 - RNA, 32 nt, Human
uuuccaguucagaugcaacagggauacauuug

SEQ ID NO: 278500 - RNA, 32 nt, Human
uuuccaguucauuuacauuaagggccuggggg

SEQ ID NO: 278501 - RNA, 32 nt, Human
uuuccaguucccaguauguggcccagagugau

SEQ ID NO: 278502 - RNA, 32 nt, Human
uuuccauagcugggauauaggcugcagcuaua

SEQ ID NO: 278503 - RNA, 32 nt, Human
uuuccauaggaagaagucuuugcagaggaaau

SEQ ID NO: 278504 - RNA, 32 nt, Human
uuuccauaggcagagcgggugucagacugagg

SEQ ID NO: 278505 - RNA, 32 nt, Human
uuuccauaguuggcucuuuugugucaucuuac

SEQ ID NO: 278506 - RNA, 32 nt, Human
uuuccauauagacuauauacugugcaacuccc

SEQ ID NO: 278507 - RNA, 32 nt, Human
uuuccauaugaacugguuauuuuguauaaagu

SEQ ID NO: 278508 - RNA, 32 nt, Human
uuuccauaugacuggggaggccucagaaucau

SEQ ID NO: 278509 - RNA, 24 nt, Human
uuuccauauguauauaguaaaaua

SEQ ID NO: 278510 - RNA, 32 nt, Human
uuuccaucaagcaccagaguugcaguggcuug

SEQ ID NO: 278511 - RNA, 32 nt, Human
uuuccaucacaagccuuugggggaucugggac

SEQ ID NO: 278512 - RNA, 32 nt, Human
uuuccaucagagcccucggacacucccagccc

SEQ ID NO: 278513 - RNA, 32 nt, Human
uuuccaucauaguugcccacucccucuccuua

SEQ ID NO: 278514 - RNA, 32 nt, Human
uuuccaucccacccuggcuuccuuccuccacc

SEQ ID NO: 278515 - RNA, 32 nt, Human
uuuccaucccacccuuuucuuaaucgcuuccg

SEQ ID NO: 278516 - RNA, 32 nt, Human
uuuccauccuagugagaagcuggcccugcagg

SEQ ID NO: 278517 - RNA, 25 nt, Human
uuuccaucuaggacuagaaaaacuu

SEQ ID NO: 278518 - RNA, 32 nt, Human
uuuccaucucagacuggcuggccagggaacgc

SEQ ID NO: 278519 - RNA, 32 nt, Human
uuuccaucuccaccaucuauagugagccucuc

SEQ ID NO: 278520 - RNA, 32 nt, Human
uuuccaucuccagcuccccauuuccuuucuca

SEQ ID NO: 278521 - RNA, 32 nt, Human
uuuccaucugagaccaccucagccuggauuuu

SEQ ID NO: 278522 - RNA, 32 nt, Human
uuuccaucugcucucucuucuggguggagcug

SEQ ID NO: 278523 - RNA, 32 nt, Human
uuuccaucuuauuucauuuccauaacaguuga

SEQ ID NO: 278524 - RNA, 32 nt, Human
uuuccaucuucaguuucuaugacuguggaaua

SEQ ID NO: 278525 - RNA, 32 nt, Human
uuuccaucuucccacacaucucauugaauuug

SEQ ID NO: 278526 - RNA, 32 nt, Human
uuuccaucuuucuuuuucuuccuucugcugcu

SEQ ID NO: 278527 - RNA, 24 nt, Human
uuuccaugagaaaccaagaaacuu

SEQ ID NO: 278528 - RNA, 32 nt, Human
uuuccaugagcucuuggaggcaccaagaaaua

SEQ ID NO: 278529 - RNA, 32 nt, Human
uuuccaugcagcugaucuaaaagggaauaaaa

SEQ ID NO: 278530 - RNA, 32 nt, Human
uuuccaugccugggagggagaauaagaguaag

SEQ ID NO: 278531 - RNA, 32 nt, Human
uuuccaugcuccucucccuccaccuccuggcu

SEQ ID NO: 278532 - RNA, 32 nt, Human
uuuccauggcaaaauuugaagccacauguggu

SEQ ID NO: 278533 - RNA, 32 nt, Human
uuuccauggcagcaggaugcagggauuaauaa

SEQ ID NO: 278534 - RNA, 32 nt, Human
uuuccauggccuuuauuucuccucuuccagug

SEQ ID NO: 278535 - RNA, 32 nt, Human
uuuccaugggaggagagcaguaacccccagcg

SEQ ID NO: 278536 - RNA, 32 nt, Human
uuuccauguccccucccagagcugguggaccc

SEQ ID NO: 278537 - RNA, 32 nt, Human
uuuccauguuacccucccuuccucacauuguu

SEQ ID NO: 278538 - RNA, 32 nt, Human
uuuccauuaaaggguguguccaggaaggaaau

SEQ ID NO: 278539 - RNA, 32 nt, Human
uuuccauuacccuuuauuucugcuaacuuuuu

SEQ ID NO: 278540 - RNA, 32 nt, Human
uuuccauuaguaaaacacaagacuucagauuc

SEQ ID NO: 278541 - RNA, 32 nt, Human
uuuccauuccuauacaggaugugaaggucaga

SEQ ID NO: 278542 - RNA, 32 nt, Human
uuuccauuccucagcacagagcagaaaugaua

SEQ ID NO: 278543 - RNA, 32 nt, Human
uuuccauucucugcccagcagucucuuaccuu

SEQ ID NO: 278544 - RNA, 32 nt, Human
uuuccauugcaauuucuguggcugaggagacu

SEQ ID NO: 278545 - RNA, 32 nt, Human
uuuccauugcccacuuucuucucccucuccuu

SEQ ID NO: 278546 - RNA, 32 nt, Human
uuuccauugugccuuuugaauguugucuucuc

SEQ ID NO: 278547 - RNA, 32 nt, Human
uuuccauuuacccuucuuuucugacuauuuuu

SEQ ID NO: 278548 - RNA, 32 nt, Human
uuuccauuucaaagugguguucuaagucugcg

SEQ ID NO: 278549 - RNA, 32 nt, Human
uuuccauuucuuuuguauuuguuuucugugag

SEQ ID NO: 278550 - RNA, 32 nt, Human
uuuccauuugacuugcuguaagccugagggag

SEQ ID NO: 278551 - RNA, 32 nt, Human
uuuccauuuuauaaguagggaugcaaaauccg

SEQ ID NO: 278552 - RNA, 32 nt, Human
uuuccauuuuccacuuuuauagaccauccuuu

SEQ ID NO: 278553 - RNA, 20 nt, Human
uuuccauuuuuggggggcuu

SEQ ID NO: 278554 - RNA, 32 nt, Human
uuucccaaacauccuuuucauccugugcuucu

SEQ ID NO: 278555 - RNA, 32 nt, Human
uuucccaaacuaagugaacauuagauuuaauu

SEQ ID NO: 278556 - RNA, 32 nt, Human
uuucccaaaguguugggauuacaggcaugagc

SEQ ID NO: 278557 - RNA, 21 nt, Human
uuucccaaaguuucucuuugu

SEQ ID NO: 278558 - RNA, 22 nt, Human
uuucccaagaagaugaagaaug

SEQ ID NO: 278559 - RNA, 32 nt, Human
uuucccaagacuuggcuucuuccuccagauua

SEQ ID NO: 278560 - RNA, 32 nt, Human
uuucccaagcuccuucugcaaggggccugcag

SEQ ID NO: 278561 - RNA, 23 nt, Human
uuucccaagcuggagugcagugg

SEQ ID NO: 278562 - RNA, 32 nt, Human
uuucccaagcuggagugcaguggugcgaucau

SEQ ID NO: 278563 - RNA, 32 nt, Human
uuucccaagggaaagacuuucuggccugcuga

SEQ ID NO: 278564 - RNA, 32 nt, Human
uuucccaagucagacagaugucagcuucccag

SEQ ID NO: 278565 - RNA, 22 nt, Human
uuucccaauaguuuccucugca

SEQ ID NO: 278566 - RNA, 32 nt, Human
uuucccaauccaauccagccuugguuuuauuu

SEQ ID NO: 278567 - RNA, 32 nt, Human
uuucccacacaacuugcugggcaaagcacgau

SEQ ID NO: 278568 - RNA, 32 nt, Human
uuucccacacccacuucucuccuaucaccuuc

SEQ ID NO: 278569 - RNA, 32 nt, Human
uuucccacacgggcagaucaucagccuucaug

SEQ ID NO: 278570 - RNA, 32 nt, Human
uuucccacaggcugcagggcaggaaagguauu

SEQ ID NO: 278571 - RNA, 32 nt, Human
uuucccacaggcugcuuggcaggaaagauauu

SEQ ID NO: 278572 - RNA, 32 nt, Human
uuucccacauuauccaacugugcaucucaaac

SEQ ID NO: 278573 - RNA, 32 nt, Human
uuucccacauucuuuacauuuguaggauucau

SEQ ID NO: 278574 - RNA, 32 nt, Human
uuucccaccccagcugaccaugagacuuugcu

SEQ ID NO: 278575 - RNA, 19 nt, Human
uuucccaccccugcuucag

SEQ ID NO: 278576 - RNA, 32 nt, Human
uuucccacccucucccugacccaagucuuugc

SEQ ID NO: 278577 - RNA, 19 nt, Human
uuucccacucuuccacuga

SEQ ID NO: 278578 - RNA, 32 nt, Human
uuucccacugaaucccaggaagaaggcggcgg

SEQ ID NO: 278579 - RNA, 32 nt, Human
uuucccacugcacccccuccugcugcagaggg

SEQ ID NO: 278580 - RNA, 32 nt, Human
uuucccacugcacuccagccugagugacagag

SEQ ID NO: 278581 - RNA, 25 nt, Human
uuucccacugcuuacugugaguucu

SEQ ID NO: 278582 - RNA, 32 nt, Human
uuucccacugcuucuuccuccuuucucaacca

SEQ ID NO: 278583 - RNA, 32 nt, Human
uuucccacugggugggggugggaauggcggug

SEQ ID NO: 278584 - RNA, 32 nt, Human
uuucccacuuccucuccugagaccaggaacuc

SEQ ID NO: 278585 - RNA, 32 nt, Human
uuucccagaagggagagaggcagcaagucaga

SEQ ID NO: 278586 - RNA, 32 nt, Human
uuucccagaccagccggugguguggagagaaa

SEQ ID NO: 278587 - RNA, 32 nt, Human
uuucccagagcaacguggcauccugagaguca

SEQ ID NO: 278588 - RNA, 32 nt, Human
uuucccagaggagggacuaaaagagagggcag

SEQ ID NO: 278589 - RNA, 32 nt, Human
uuucccagagucuugcucugucgcccagguug

SEQ ID NO: 278590 - RNA, 32 nt, Human
uuucccagauagcaccuacccaacccaggaug

SEQ ID NO: 278591 - RNA, 32 nt, Human
uuucccagauucucggauucucgacucuuugc

SEQ ID NO: 278592 - RNA, 25 nt, Human
uuucccagccaggcccagccaccca

SEQ ID NO: 278593 - RNA, 20 nt, Human
uuucccagcccuccaccacu

SEQ ID NO: 278594 - RNA, 32 nt, Human
uuucccagccuauucuaaaucuuguuaaugac

SEQ ID NO: 278595 - RNA, 22 nt, Human
uuucccagccuccuggcugccu

SEQ ID NO: 278596 - RNA, 32 nt, Human
uuucccagcuacuccggaggcugcgguggaag

SEQ ID NO: 278597 - RNA, 32 nt, Human
uuucccagcuccagccuggagggaaggggaca

SEQ ID NO: 278598 - RNA, 32 nt, Human
uuucccagcuccucacagaggccugguuugcu

SEQ ID NO: 278599 - RNA, 32 nt, Human
uuucccagcugcacucgcccuguggacagccc

SEQ ID NO: 278600 - RNA, 32 nt, Human
uuucccagcugcaucugccccaaaagguugua

SEQ ID NO: 278601 - RNA, 32 nt, Human
uuucccagcuugccucuccugaaaaggccccc

SEQ ID NO: 278602 - RNA, 32 nt, Human
uuucccaggaaggccauugcaguuugacuggc

SEQ ID NO: 278603 - RNA, 32 nt, Human
uuucccaggcagccgcugcagucgccacaccu

SEQ ID NO: 278604 - RNA, 22 nt, Human
uuucccaggccuggguauccag

SEQ ID NO: 278605 - RNA, 32 nt, Human
uuucccaggcuaguagggcugugaggaaugca

SEQ ID NO: 278606 - RNA, 32 nt, Human
uuucccaggcuggagugcaauggcacaaucuu

SEQ ID NO: 278607 - RNA, 32 nt, Human
uuucccaggcuggagugcaaugggugaucuca

SEQ ID NO: 278608 - RNA, 32 nt, Human
uuucccaggcuggagugcacaaacauggcuca

SEQ ID NO: 278609 - RNA, 23 nt, Human
uuucccaggcuggagugcagagg

SEQ ID NO: 278610 - RNA, 32 nt, Human
uuucccaggcuggagugcaguggcgcuaucuu

SEQ ID NO: 278611 - RNA, 32 nt, Human
uuucccaggcuggagugcaguggugggaucuc

SEQ ID NO: 278612 - RNA, 32 nt, Human
uuucccaggcuggcgcugagaugggcaggugc

SEQ ID NO: 278613 - RNA, 32 nt, Human
uuucccaggcuggucucaaacuccugagcuca

SEQ ID NO: 278614 - RNA, 32 nt, Human
uuucccaggcuggucuugaacuccugagcgca

SEQ ID NO: 278615 - RNA, 32 nt, Human
uuucccaggcuggucuugaauuccugggauca

SEQ ID NO: 278616 - RNA, 32 nt, Human
uuucccagggggcagaggcaggggcgggaggg

SEQ ID NO: 278617 - RNA, 32 nt, Human
uuucccagguauaaaaccuaaaauuaagaagu

SEQ ID NO: 278618 - RNA, 32 nt, Human
uuucccagguuggaguauaguggugccgucau

SEQ ID NO: 278619 - RNA, 32 nt, Human
uuucccaguaaagaagguaaagaagauauaaa

SEQ ID NO: 278620 - RNA, 32 nt, Human
uuucccaguaggggcggccgggcagaggcgcc

SEQ ID NO: 278621 - RNA, 32 nt, Human
uuucccagugucuccccaugggguuaagcucu

SEQ ID NO: 278622 - RNA, 32 nt, Human
uuucccaguguguguucauuguaaacacuuuu

SEQ ID NO: 278623 - RNA, 32 nt, Human
uuucccaguguuguuagugaaauguuaaaauc

SEQ ID NO: 278624 - RNA, 32 nt, Human
uuucccaguuuauccggagcaggaugaauccc

SEQ ID NO: 278625 - RNA, 32 nt, Human
uuucccaguuugggaagugaggagaaccugcc

SEQ ID NO: 278626 - RNA, 32 nt, Human
uuucccaguuuuugcaccaaaauaaacuggua

SEQ ID NO: 278627 - RNA, 32 nt, Human
uuucccauaauuccagaaagcaaaaggcuuac

SEQ ID NO: 278628 - RNA, 32 nt, Human
uuucccauauacaaucuuccuuccuuagguaa

SEQ ID NO: 278629 - RNA, 32 nt, Human
uuucccauaugcauaggugcaccccuugggau

SEQ ID NO: 278630 - RNA, 32 nt, Human
uuucccaucagccuguuucuccaccuuagaaa

SEQ ID NO: 278631 - RNA, 32 nt, Human
uuucccaucccaggagcucauuauccagucug

SEQ ID NO: 278632 - RNA, 32 nt, Human
uuucccauccccaccuuccuuccuuuguccuu

SEQ ID NO: 278633 - RNA, 32 nt, Human
uuucccauccugcuguagacuucuugauuguc

SEQ ID NO: 278634 - RNA, 32 nt, Human
uuucccaugaacacuugcaguugcuaagggac

SEQ ID NO: 278635 - RNA, 32 nt, Human
uuucccauggcugcuucauuuguuguucauuu

SEQ ID NO: 278636 - RNA, 32 nt, Human
uuucccauggcuggaauacuuaccucagggac

SEQ ID NO: 278637 - RNA, 32 nt, Human
uuucccaugucagagcccccaaauggggguag

SEQ ID NO: 278638 - RNA, 32 nt, Human
uuucccauucacugcagucaucugacucauuu

SEQ ID NO: 278639 - RNA, 32 nt, Human
uuucccauucucuuucucaggaauggcuguua

SEQ ID NO: 278640 - RNA, 32 nt, Human
uuucccauuggguauucuuggaaccuuuguaa

SEQ ID NO: 278641 - RNA, 32 nt, Human
uuucccauuguucuguugcuccaccuuauugu

SEQ ID NO: 278642 - RNA, 32 nt, Human
uuuccccaaaggagguagaagauggggaagau

SEQ ID NO: 278643 - RNA, 32 nt, Human
uuuccccaacagcacagcuaaauuuccaaguc

SEQ ID NO: 278644 - RNA, 32 nt, Human
uuuccccaacagcucccggcaggggcgcucca

SEQ ID NO: 278645 - RNA, 32 nt, Human
uuuccccaacuaaagcgugaacuccuaguagg

SEQ ID NO: 278646 - RNA, 32 nt, Human
uuuccccaagcagaggagucaggacuugagaa

SEQ ID NO: 278647 - RNA, 32 nt, Human
uuuccccaaggcggcagagaggauggggcuga

SEQ ID NO: 278648 - RNA, 32 nt, Human
uuuccccaagugcugggauuacaggugugagc

SEQ ID NO: 278649 - RNA, 20 nt, Human
uuuccccacacuggggggcu

SEQ ID NO: 278650 - RNA, 32 nt, Human
uuuccccaccacaacccaccacggccaggcag

SEQ ID NO: 278651 - RNA, 23 nt, Human
uuuccccacccgagaugaaggau

SEQ ID NO: 278652 - RNA, 32 nt, Human
uuuccccaccucuuccuuccgcuccuuuaccu

SEQ ID NO: 278653 - RNA, 32 nt, Human
uuuccccagaagcagacuaugagaccaggauu

SEQ ID NO: 278654 - RNA, 32 nt, Human
uuuccccagaguacacagccugccuuuccacu

SEQ ID NO: 278655 - RNA, 32 nt, Human
uuuccccagcacagccuccugucgcugcaugc

SEQ ID NO: 278656 - RNA, 32 nt, Human
uuuccccagcauuuccaaaacuaccuaguccc

SEQ ID NO: 278657 - RNA, 32 nt, Human
uuuccccagcuccuauaccucuaccuuuccag

SEQ ID NO: 278658 - RNA, 32 nt, Human
uuuccccagcuggccuggacugccugugcucu

SEQ ID NO: 278659 - RNA, 32 nt, Human
uuuccccagcugugaaauggggccagucccca

SEQ ID NO: 278660 - RNA, 32 nt, Human
uuuccccaggagaagccaagaacuuguguguc

SEQ ID NO: 278661 - RNA, 32 nt, Human
uuuccccaggagagaguggucuggugggcuuc

SEQ ID NO: 278662 - RNA, 32 nt, Human
uuuccccaggcagagagagggggccccagccu

SEQ ID NO: 278663 - RNA, 32 nt, Human
uuuccccaguauaguggaaagacugaggcuuc

SEQ ID NO: 278664 - RNA, 32 nt, Human
uuuccccagucccuaucucccccauccccucc

SEQ ID NO: 278665 - RNA, 32 nt, Human
uuuccccauagacguaucaaaauauuacccau

SEQ ID NO: 278666 - RNA, 32 nt, Human
uuuccccauaggaagacagaccauaggcaaac

SEQ ID NO: 278667 - RNA, 32 nt, Human
uuuccccauaucuucucucccccaccuuuauc

SEQ ID NO: 278668 - RNA, 20 nt, Human
uuuccccaucccucugcacu

SEQ ID NO: 278669 - RNA, 32 nt, Human
uuuccccaucuucuucuuucagaucauuaaug

SEQ ID NO: 278670 - RNA, 32 nt, Human
uuuccccauguuggccaggcuggucuugaacu

SEQ ID NO: 278671 - RNA, 32 nt, Human
uuuccccauuguucuaugcacacagacagggu

SEQ ID NO: 278672 - RNA, 32 nt, Human
uuucccccaaaggcaucccagccugggggcca

SEQ ID NO: 278673 - RNA, 32 nt, Human
uuucccccaaccucccccuccuguccccucug

SEQ ID NO: 278674 - RNA, 32 nt, Human
uuucccccaccgccaucuccagagccaccauc

SEQ ID NO: 278675 - RNA, 32 nt, Human
uuucccccaguuuuggucugugacacauuugg

SEQ ID NO: 278676 - RNA, 24 nt, Human
uuucccccgucagucugggggcuu

SEQ ID NO: 278677 - RNA, 32 nt, Human
uuucccccucacugcaguugucugcauuuuua

SEQ ID NO: 278678 - RNA, 32 nt, Human
uuucccccugcucccccacagccgguucugca

SEQ ID NO: 278679 - RNA, 32 nt, Human
uuucccccuucucucucccucucccucucucu

SEQ ID NO: 278680 - RNA, 32 nt, Human
uuuccccguucacugaaggcccugcagucagg

SEQ ID NO: 278681 - RNA, 32 nt, Human
uuuccccuagcuuuccccagacacccuguuuu

SEQ ID NO: 278682 - RNA, 32 nt, Human
uuuccccuccacuugcugccaagaucauauuc

SEQ ID NO: 278683 - RNA, 32 nt, Human
uuuccccucccucccucccucccucccuuccu

SEQ ID NO: 278684 - RNA, 32 nt, Human
uuuccccuccggcacugacucucccccuccaa

SEQ ID NO: 278685 - RNA, 32 nt, Human
uuuccccuccuuuccuccuccugccccauaau

SEQ ID NO: 278686 - RNA, 32 nt, Human
uuuccccuccuuuucuuuuuccuuccuucuuu

SEQ ID NO: 278687 - RNA, 32 nt, Human
uuuccccucguugguccucccauucagagagg

SEQ ID NO: 278688 - RNA, 32 nt, Human
uuuccccucucccuccuacucucccccuuucu

SEQ ID NO: 278689 - RNA, 32 nt, Human
uuuccccugaaccagcccuggaccuuucugag

SEQ ID NO: 278690 - RNA, 32 nt, Human
uuuccccugcacucccgaccuuagcuuauuga

SEQ ID NO: 278691 - RNA, 32 nt, Human
uuuccccugccugcuccuccaugcugugagcu

SEQ ID NO: 278692 - RNA, 32 nt, Human
uuuccccugccuuucucauuccuuccuucguc

SEQ ID NO: 278693 - RNA, 32 nt, Human
uuuccccugcuguuugccccucagucuuuaua

SEQ ID NO: 278694 - RNA, 32 nt, Human
uuuccccuggacaaaaugauaccuaaacuguu

SEQ ID NO: 278695 - RNA, 32 nt, Human
uuuccccugggcagaugguaggcagggagcug

SEQ ID NO: 278696 - RNA, 32 nt, Human
uuuccccuggugccccagagacaggagcacaa

SEQ ID NO: 278697 - RNA, 32 nt, Human
uuuccccuguucuuuuuguguuaugcacuuaa

SEQ ID NO: 278698 - RNA, 32 nt, Human
uuuccccuucauucucacccugucugcuuuua

SEQ ID NO: 278699 - RNA, 32 nt, Human
uuuccccuucucccuucucucccagcagaacg

SEQ ID NO: 278700 - RNA, 32 nt, Human
uuuccccuuguacaauuaugcuguguuuuuaa

SEQ ID NO: 278701 - RNA, 32 nt, Human
uuuccccuuuucccaguccccugcuuuuugaa

SEQ ID NO: 278702 - RNA, 21 nt, Human
uuuccccuuuuccucuuugca

SEQ ID NO: 278703 - RNA, 32 nt, Human
uuucccgaguagcugggacuacagagauggca

SEQ ID NO: 278704 - RNA, 32 nt, Human
uuucccgcacugucuccagucacgauccagcc

SEQ ID NO: 278705 - RNA, 32 nt, Human
uuucccgccuccuugaugcuucuugaaaccua

SEQ ID NO: 278706 - RNA, 32 nt, Human
uuucccguggccccagccuggcccagcucccc

SEQ ID NO: 278707 - RNA, 32 nt, Human
uuucccuagggaccaggcacucauauggcggg

SEQ ID NO: 278708 - RNA, 32 nt, Human
uuucccuaggugccaucuccucaagcuacaaa

SEQ ID NO: 278709 - RNA, 32 nt, Human
uuucccuauaauuaaaagagguggugaguccu

SEQ ID NO: 278710 - RNA, 32 nt, Human
uuucccuaucuucucccccacgguauccuaaa

SEQ ID NO: 278711 - RNA, 32 nt, Human
uuucccuauucuguggauacagucccagaguu

SEQ ID NO: 278712 - RNA, 32 nt, Human
uuucccucagcacuuggcaucuugucaucuac

SEQ ID NO: 278713 - RNA, 32 nt, Human
uuucccucagcuuaaugcuuuugagucauuca

SEQ ID NO: 278714 - RNA, 32 nt, Human
uuucccucauccagcagcuggcaucugaccuu

SEQ ID NO: 278715 - RNA, 32 nt, Human
uuucccucauccaugcugugcuguguuauuua

SEQ ID NO: 278716 - RNA, 32 nt, Human
uuucccuccaccacugaugcagucccaccgaa

SEQ ID NO: 278717 - RNA, 32 nt, Human
uuucccuccaucugccccaggacaagagcaag

SEQ ID NO: 278718 - RNA, 32 nt, Human
uuucccucccaggagcccccuagguggcuggg

SEQ ID NO: 278719 - RNA, 32 nt, Human
uuucccucccucccucuccgcauucuucccuu

SEQ ID NO: 278720 - RNA, 32 nt, Human
uuucccuccucccauucucccaagggccucag

SEQ ID NO: 278721 - RNA, 32 nt, Human
uuucccuccuccucccccucuccgcucugugc

SEQ ID NO: 278722 - RNA, 22 nt, Human
uuucccuccugcuggagcaccg

SEQ ID NO: 278723 - RNA, 32 nt, Human
uuucccucgcucuccccucccugcuuggcccc

SEQ ID NO: 278724 - RNA, 32 nt, Human
uuucccucgucaauuaaacaaaggccaagaaa

SEQ ID NO: 278725 - RNA, 32 nt, Human
uuucccucgucaugcauuuccacauauccaca

SEQ ID NO: 278726 - RNA, 32 nt, Human
uuucccucuaauuuauuuugcauccuagugga

SEQ ID NO: 278727 - RNA, 23 nt, Human
uuucccucucagccuggaggcug

SEQ ID NO: 278728 - RNA, 32 nt, Human
uuucccucucccaggggccugaugucaucauu

SEQ ID NO: 278729 - RNA, 21 nt, Human
uuucccucugccuagaaugcu

SEQ ID NO: 278730 - RNA, 25 nt, Human
uuucccucugcuguggcggugacug

SEQ ID NO: 278731 - RNA, 32 nt, Human
uuucccucuggcccugacucucacugacucac

SEQ ID NO: 278732 - RNA, 32 nt, Human
uuucccucugggcccagccucuccccaccccc

SEQ ID NO: 278733 - RNA, 21 nt, Human
uuucccucugugcggcggccg

SEQ ID NO: 278734 - RNA, 28 nt, Human
uuucccucuuccgcugccucauuccuuu

SEQ ID NO: 278735 - RNA, 32 nt, Human
uuucccucuuuccugguaauuccuaaguaauu

SEQ ID NO: 278736 - RNA, 32 nt, Human
uuucccugacaauccccaucaccuuuaggggu

SEQ ID NO: 278737 - RNA, 32 nt, Human
uuucccugacggcccuugcugccugcauggcu

SEQ ID NO: 278738 - RNA, 32 nt, Human
uuucccugaggagugggcuccugcuccaugag

SEQ ID NO: 278739 - RNA, 32 nt, Human
uuucccugaguauagaguucuaauuuggggaa

SEQ ID NO: 278740 - RNA, 32 nt, Human
uuucccugagugcccagggugucuccucugcc

SEQ ID NO: 278741 - RNA, 32 nt, Human
uuucccugcaucccuuggccccucucuguuua

SEQ ID NO: 278742 - RNA, 19 nt, Human
uuucccugccuguauuaca

SEQ ID NO: 278743 - RNA, 32 nt, Human
uuucccugcgaguggacgugcccagcuguccc

SEQ ID NO: 278744 - RNA, 32 nt, Human
uuucccugcucucucugcucagaacacuacca

SEQ ID NO: 278745 - RNA, 32 nt, Human
uuucccugcuuugguuuguuugaaaucuaaau

SEQ ID NO: 278746 - RNA, 32 nt, Human
uuucccuggagguucuggaugaaggcugaaca

SEQ ID NO: 278747 - RNA, 32 nt, Human
uuucccuggcuggucucggacuccugggcuca

SEQ ID NO: 278748 - RNA, 32 nt, Human
uuucccugggcaaaguaaaagcuuucuuggag

SEQ ID NO: 278749 - RNA, 32 nt, Human
uuucccugggcugagaggggaagugcauaugu

SEQ ID NO: 278750 - RNA, 32 nt, Human
uuucccugucuucugcauaaucaugccuucuu

SEQ ID NO: 278751 - RNA, 32 nt, Human
uuucccugugacugaaccaggagaucuggcug

SEQ ID NO: 278752 - RNA, 32 nt, Human
uuucccugugcugugugcuugugugcaugugc

SEQ ID NO: 278753 - RNA, 32 nt, Human
uuucccuguucauggcaggccauggcccgggc

SEQ ID NO: 278754 - RNA, 32 nt, Human
uuucccuguuccagggaaggcguugggaugau

SEQ ID NO: 278755 - RNA, 32 nt, Human
uuucccuuaaguuccuccuuagugccaucaca

SEQ ID NO: 278756 - RNA, 32 nt, Human
uuucccuuacuucauccucccccucaucuccu

SEQ ID NO: 278757 - RNA, 32 nt, Human
uuucccuuauucacagagaauuuguccagcau

SEQ ID NO: 278758 - RNA, 32 nt, Human
uuucccuucagagcucacacaguggucaccau

SEQ ID NO: 278759 - RNA, 32 nt, Human
uuucccuucauuucccccuccuuugcuggaug

SEQ ID NO: 278760 - RNA, 32 nt, Human
uuucccuuccgcuucccucccuuucuucccac

SEQ ID NO: 278761 - RNA, 32 nt, Human
uuucccuuccuccuccucuucuccucccucuu

SEQ ID NO: 278762 - RNA, 32 nt, Human
uuucccuuccuuccuuccuuccuuccuuccuu

SEQ ID NO: 278763 - RNA, 32 nt, Human
uuucccuucuucaaauccucccacccuucaau

SEQ ID NO: 278764 - RNA, 32 nt, Human
uuucccuugcagaguguuugcugguagcagug

SEQ ID NO: 278765 - RNA, 32 nt, Human
uuucccuugccaguucccuggugacaguuacc

SEQ ID NO: 278766 - RNA, 32 nt, Human
uuucccuugccuggcccacugcaccugucccc

SEQ ID NO: 278767 - RNA, 18 nt, Human
uuucccuugcgugaagga

SEQ ID NO: 278768 - RNA, 32 nt, Human
uuucccuugcugcuccccuuguggccugacgc

SEQ ID NO: 278769 - RNA, 21 nt, Human
uuucccuugcuuuuggggguu

SEQ ID NO: 278770 - RNA, 32 nt, Human
uuucccuuggcugcccagucacccugccuggg

SEQ ID NO: 278771 - RNA, 32 nt, Human
uuucccuuuacacccuguaauuuauucaaaug

SEQ ID NO: 278772 - RNA, 32 nt, Human
uuucccuuuauuccuugccuggaccacuccac

SEQ ID NO: 278773 - RNA, 32 nt, Human
uuucccuuuccuucacauuuguggacuccugg

SEQ ID NO: 278774 - RNA, 32 nt, Human
uuucccuuugagaugaagugcuguucuuuugc

SEQ ID NO: 278775 - RNA, 32 nt, Human
uuucccuuugcaggaggguggagucccugggu

SEQ ID NO: 278776 - RNA, 32 nt, Human
uuucccuuugccacacugugguagguguuuga

SEQ ID NO: 278777 - RNA, 32 nt, Human
uuucccuuuggguuccauguuuuccuuguucc

SEQ ID NO: 278778 - RNA, 22 nt, Human
uuucccuuuucuaugaggacuu

SEQ ID NO: 278779 - RNA, 32 nt, Human
uuucccuuuuucucccuucccugaaagggccu

SEQ ID NO: 278780 - RNA, 32 nt, Human
uuucccuuuuugaguuugaaucauagccuuga

SEQ ID NO: 278781 - RNA, 32 nt, Human
uuucccuuuuugcuuccaaacuccucaacugg

SEQ ID NO: 278782 - RNA, 32 nt, Human
uuuccgaaaauggaggcauuccuuuccaaauc

SEQ ID NO: 278783 - RNA, 32 nt, Human
uuuccgacaaggacagccugggggaugagaug

SEQ ID NO: 278784 - RNA, 22 nt, Human
uuuccgcagacaccuucuguga

SEQ ID NO: 278785 - RNA, 32 nt, Human
uuuccgcaguuaggggcugcuauuucaacgca

SEQ ID NO: 278786 - RNA, 32 nt, Human
uuuccgcccugagcguggcagcugcugccggg

SEQ ID NO: 278787 - RNA, 32 nt, Human
uuuccgcuacucacccucccacccugagccug

SEQ ID NO: 278788 - RNA, 32 nt, Human
uuuccgcucacugcaaccuccgccucccaggu

SEQ ID NO: 278789 - RNA, 32 nt, Human
uuuccgcugcaaccaaucagaugagaggauuc

SEQ ID NO: 278790 - RNA, 32 nt, Human
uuuccgcugcugagcccugcccgccggccggc

SEQ ID NO: 278791 - RNA, 32 nt, Human
uuuccgcuguauuuucuugcagugugccauuc

SEQ ID NO: 278792 - RNA, 23 nt, Human
uuuccgcuguuccucagcgggcc

SEQ ID NO: 278793 - RNA, 32 nt, Human
uuuccgcuuugcacuccaccccgguagcagcu

SEQ ID NO: 278794 - RNA, 32 nt, Human
uuuccggaggacagccaacaagcgaugcugcc

SEQ ID NO: 278795 - RNA, 32 nt, Human
uuuccggaggggagauggauucccuggaaugg

SEQ ID NO: 278796 - RNA, 32 nt, Human
uuuccggcacacacggaguggcuuugacagau

SEQ ID NO: 278797 - RNA, 32 nt, Human
uuuccggcagugacgaccuacccacacgagaa

SEQ ID NO: 278798 - RNA, 32 nt, Human
uuuccgggaaccuggaccagacucuggcccag

SEQ ID NO: 278799 - RNA, 32 nt, Human
uuuccgggaacucacccaggagcaagcgagac

SEQ ID NO: 278800 - RNA, 32 nt, Human
uuuccgggggcggggaugagugcagcugggcu

SEQ ID NO: 278801 - RNA, 32 nt, Human
uuuccguauuucugcuguagaaguagaaauaa

SEQ ID NO: 278802 - RNA, 32 nt, Human
uuuccguccaacaacucuguagagcucucugc

SEQ ID NO: 278803 - RNA, 32 nt, Human
uuuccgucugggaacaguaccucugccccuga

SEQ ID NO: 278804 - RNA, 32 nt, Human
uuuccgucugucucaacagcugagauggggcc

SEQ ID NO: 278805 - RNA, 32 nt, Human
uuuccgugaacucuggugcuccugcaucucau

SEQ ID NO: 278806 - RNA, 32 nt, Human
uuuccuaaacccugcugccuucccaaaaauac

SEQ ID NO: 278807 - RNA, 32 nt, Human
uuuccuaaauauucuucuuuaccuuuaacaag

SEQ ID NO: 278808 - RNA, 32 nt, Human
uuuccuaagagggaguggaggcucggggccac

SEQ ID NO: 278809 - RNA, 32 nt, Human
uuuccuaauagggaagggaagcacaauggaaa

SEQ ID NO: 278810 - RNA, 32 nt, Human
uuuccuacaagugauuuaggggcagauccuga

SEQ ID NO: 278811 - RNA, 32 nt, Human
uuuccuacacagauucuuuuccccaucuccuc

SEQ ID NO: 278812 - RNA, 32 nt, Human
uuuccuacagaugaaggcucucauugcaaaca

SEQ ID NO: 278813 - RNA, 32 nt, Human
uuuccuaccccuucuacccucuccuuaaacau

SEQ ID NO: 278814 - RNA, 32 nt, Human
uuuccuacccuugugaacuuggagcacauuuc

SEQ ID NO: 278815 - RNA, 32 nt, Human
uuuccuaccuaguuucucccucuuguccugca

SEQ ID NO: 278816 - RNA, 32 nt, Human
uuuccuacuacaaagaauaacagcaguuagaa

SEQ ID NO: 278817 - RNA, 20 nt, Human
uuuccuacucugaguuacug

SEQ ID NO: 278818 - RNA, 32 nt, Human
uuuccuacugaguguaccacugccuucccuuc

SEQ ID NO: 278819 - RNA, 32 nt, Human
uuuccuacuucugcccuucccugccaccccuc

SEQ ID NO: 278820 - RNA, 32 nt, Human
uuuccuacuucuucagugccucuuucaccaau

SEQ ID NO: 278821 - RNA, 32 nt, Human
uuuccuagaagagaucaaagagugguugcuuc

SEQ ID NO: 278822 - RNA, 32 nt, Human
uuuccuagcccuucccccuccccaagacugug

SEQ ID NO: 278823 - RNA, 32 nt, Human
uuuccuaggaaacacagacauaggauagcuau

SEQ ID NO: 278824 - RNA, 32 nt, Human
uuuccuaguucuuuugucagaagaacucucuu

SEQ ID NO: 278825 - RNA, 32 nt, Human
uuuccuaucacugugaacuuugcugguacaga

SEQ ID NO: 278826 - RNA, 32 nt, Human
uuuccuaucucccauuugccuucgguccucaa

SEQ ID NO: 278827 - RNA, 32 nt, Human
uuuccuaucucuagcaaccuccugggccccau

SEQ ID NO: 278828 - RNA, 32 nt, Human
uuuccuaucuucacaccugccaccucauguuc

SEQ ID NO: 278829 - RNA, 32 nt, Human
uuuccuaucuuccuccagcuuccagcuaggcc

SEQ ID NO: 278830 - RNA, 32 nt, Human
uuuccuaucuuccuuccucucucucuuccucu

SEQ ID NO: 278831 - RNA, 32 nt, Human
uuuccuauucaagacguccuggaaaacuacau

SEQ ID NO: 278832 - RNA, 32 nt, Human
uuuccuauuuuaauugcuuuagggaagagcaa

SEQ ID NO: 278833 - RNA, 32 nt, Human
uuuccucaagggcaggggcuccuggccaucuu

SEQ ID NO: 278834 - RNA, 31 nt, Human
uuuccucaaguaauauaccuguuugaagcuu

SEQ ID NO: 278835 - RNA, 32 nt, Human
uuuccucaagugccgacaccucccucaucucu

SEQ ID NO: 278836 - RNA, 32 nt, Human
uuuccucacaugcucucaggagacaaggugug

SEQ ID NO: 278837 - RNA, 32 nt, Human
uuuccucaccagaaaaaugggaacaaggcaau

SEQ ID NO: 278838 - RNA, 32 nt, Human
uuuccucaccgacaguaccaucaugccuugag

SEQ ID NO: 278839 - RNA, 32 nt, Human
uuuccucaccuccagaucacacacaugcacac

SEQ ID NO: 278840 - RNA, 32 nt, Human
uuuccucacugauauugggaggagggaaaggc

SEQ ID NO: 278841 - RNA, 21 nt, Human
uuuccucagauugaaaagcuu

SEQ ID NO: 278842 - RNA, 32 nt, Human
uuuccucagauuuauuuugucuugccccauug

SEQ ID NO: 278843 - RNA, 32 nt, Human
uuuccucagccaaaggucccagccuuccuucu

SEQ ID NO: 278844 - RNA, 32 nt, Human
uuuccucaggcuuagguuucuggauuugaagu

SEQ ID NO: 278845 - RNA, 32 nt, Human
uuuccucagggauccaccacagucuaggccag

SEQ ID NO: 278846 - RNA, 32 nt, Human
uuuccucaucccuucaccuguggauggucagg

SEQ ID NO: 278847 - RNA, 32 nt, Human
uuuccucaucugagagcgaggcguggcagcgu

SEQ ID NO: 278848 - RNA, 32 nt, Human
uuuccucaucugcaaaaugggggcaauauguc

SEQ ID NO: 278849 - RNA, 32 nt, Human
uuuccucaucuguaaaggagagaggcuaagaa

SEQ ID NO: 278850 - RNA, 32 nt, Human
uuuccucaucuguaaaguggggagaaaagucu

SEQ ID NO: 278851 - RNA, 32 nt, Human
uuuccucaucuuccucuugcugcugccaugua

SEQ ID NO: 278852 - RNA, 32 nt, Human
uuuccuccaaaacaaaaauuagaggauuauuu

SEQ ID NO: 278853 - RNA, 32 nt, Human
uuuccuccacccuuuccucucccucaguuugc

SEQ ID NO: 278854 - RNA, 32 nt, Human
uuuccuccagccugaagucuucggcaaauagc

SEQ ID NO: 278855 - RNA, 32 nt, Human
uuuccuccagcucugcugaagccagcacagaa

SEQ ID NO: 278856 - RNA, 32 nt, Human
uuuccuccaguggagugggacuucucuggcuc

SEQ ID NO: 278857 - RNA, 32 nt, Human
uuuccuccauuguuguaaaacauguguuuugc

SEQ ID NO: 278858 - RNA, 23 nt, Human
uuuccuccauuuucuguguauug

SEQ ID NO: 278859 - RNA, 32 nt, Human
uuuccucccacuuagacucaaacacauuuuag

SEQ ID NO: 278860 - RNA, 32 nt, Human
uuuccucccagacucugacauggauguucaug

SEQ ID NO: 278861 - RNA, 32 nt, Human
uuuccuccccaaguuugcuauucaaaucaacu

SEQ ID NO: 278862 - RNA, 32 nt, Human
uuuccuccccaccccacuccccaaauacagag

SEQ ID NO: 278863 - RNA, 32 nt, Human
uuuccuccccuccaccaggggucacacaauca

SEQ ID NO: 278864 - RNA, 32 nt, Human
uuuccucccgcuucccucuccaugaagugauu

SEQ ID NO: 278865 - RNA, 32 nt, Human
uuuccucccucuaaaaucaaagagcugaauua

SEQ ID NO: 278866 - RNA, 32 nt, Human
uuuccucccucuucaucaacauaguaaaauaa

SEQ ID NO: 278867 - RNA, 32 nt, Human
uuuccucccugccucagcucccugcccagcca

SEQ ID NO: 278868 - RNA, 32 nt, Human
uuuccucccuuucauuugauaauuuuuccuuc

SEQ ID NO: 278869 - RNA, 32 nt, Human
uuuccucccuuucucccucucucccucuuccu

SEQ ID NO: 278870 - RNA, 32 nt, Human
uuuccuccucaagcaagcuuguugcaggcacu

SEQ ID NO: 278871 - RNA, 32 nt, Human
uuuccuccuccccuuuccccuucuccccacca

SEQ ID NO: 278872 - RNA, 32 nt, Human
uuuccuccuccuccucaccaagggcccaaccg

SEQ ID NO: 278873 - RNA, 32 nt, Human
uuuccuccuccuccuuggccuacucaacauga

SEQ ID NO: 278874 - RNA, 32 nt, Human
uuuccuccuguucccuccaccuacagguugua

SEQ ID NO: 278875 - RNA, 32 nt, Human
uuuccuccuucccaucuucugugcuuccagag

SEQ ID NO: 278876 - RNA, 32 nt, Human
uuuccuccuucccccucuaucuccuucuuucc

SEQ ID NO: 278877 - RNA, 32 nt, Human
uuuccuccuuguaggcauuucaucugugugug

SEQ ID NO: 278878 - RNA, 32 nt, Human
uuuccuccuuuaucacaaccaccguuacaagu

SEQ ID NO: 278879 - RNA, 32 nt, Human
uuuccuccuuucuccacuccaaugguuuaaug

SEQ ID NO: 278880 - RNA, 32 nt, Human
uuuccuccuuucucuguauauugggcucagag

SEQ ID NO: 278881 - RNA, 32 nt, Human
uuuccucgcagguggcaccugguaaaugguua

SEQ ID NO: 278882 - RNA, 32 nt, Human
uuuccucgcuuuuaaugaccucagccccgccu

SEQ ID NO: 278883 - RNA, 32 nt, Human
uuuccucggcauuuccccaacuccuucuccac

SEQ ID NO: 278884 - RNA, 32 nt, Human
uuuccucuaaccccucuccuccauagccuucu

SEQ ID NO: 278885 - RNA, 32 nt, Human
uuuccucuauacaucucuccccaacccuaggu

SEQ ID NO: 278886 - RNA, 32 nt, Human
uuuccucuccaccaucucacauuuugcuuuua

SEQ ID NO: 278887 - RNA, 32 nt, Human
uuuccucuccauccuucauccuccauuggucc

SEQ ID NO: 278888 - RNA, 32 nt, Human
uuuccucuccgccucuccuccccagccggccc

SEQ ID NO: 278889 - RNA, 32 nt, Human
uuuccucuccuccccucuggauuucucagaga

SEQ ID NO: 278890 - RNA, 32 nt, Human
uuuccucuccugggugcucugugcuucaacau

SEQ ID NO: 278891 - RNA, 32 nt, Human
uuuccucuccugugggaaggagaguugacucu

SEQ ID NO: 278892 - RNA, 32 nt, Human
uuuccucucuagugaaguccuuggggaucugc

SEQ ID NO: 278893 - RNA, 32 nt, Human
uuuccucucugccugcccuuuccugucccucc

SEQ ID NO: 278894 - RNA, 32 nt, Human
uuuccucucugccugcuccugucucucccugg

SEQ ID NO: 278895 - RNA, 32 nt, Human
uuuccucucuucuucccuucuuucugguuggu

SEQ ID NO: 278896 - RNA, 32 nt, Human
uuuccucucuucuucuuucgcgguucagcaug

SEQ ID NO: 278897 - RNA, 32 nt, Human
uuuccucugaguguguuuguguccuaaucuuc

SEQ ID NO: 278898 - RNA, 32 nt, Human
uuuccucugcagcugcuaaaacuacauguggc

SEQ ID NO: 278899 - RNA, 24 nt, Human
uuuccucugccccacucccugcca

SEQ ID NO: 278900 - RNA, 32 nt, Human
uuuccucugccuggaccccacuugcuccagcu

SEQ ID NO: 278901 - RNA, 32 nt, Human
uuuccucugcuccuccuucuccuacucuauau

SEQ ID NO: 278902 - RNA, 32 nt, Human
uuuccucugcuccucugccuguccucucccaa

SEQ ID NO: 278903 - RNA, 32 nt, Human
uuuccucuggacaaaaugacagcauccuggcg

SEQ ID NO: 278904 - RNA, 32 nt, Human
uuuccucugggaguuugacuagcccagcucug

SEQ ID NO: 278905 - RNA, 32 nt, Human
uuuccucuguacugugagacugugggagauuu

SEQ ID NO: 278906 - RNA, 24 nt, Human
uuuccucuguuuuuaaacaucuua

SEQ ID NO: 278907 - RNA, 32 nt, Human
uuuccucuuaaagagcugcucugagcuguggg

SEQ ID NO: 278908 - RNA, 32 nt, Human
uuuccucuuaagucucuacacacacauuuuga

SEQ ID NO: 278909 - RNA, 32 nt, Human
uuuccucuucaauuucuugccuauucaaguuu

SEQ ID NO: 278910 - RNA, 32 nt, Human
uuuccucuucagauccuggucugcaccucuag

SEQ ID NO: 278911 - RNA, 32 nt, Human
uuuccucuucccucgcaugucucccuccaguc

SEQ ID NO: 278912 - RNA, 32 nt, Human
uuuccucuuccuccuccuccuccuuggcaucc

SEQ ID NO: 278913 - RNA, 32 nt, Human
uuuccucuuccucuugaaugucuuuccaaugg

SEQ ID NO: 278914 - RNA, 32 nt, Human
uuuccucuucucucccuucaagccccacacuu

SEQ ID NO: 278915 - RNA, 32 nt, Human
uuuccucuucugaggcagaggcuggagcaguu

SEQ ID NO: 278916 - RNA, 32 nt, Human
uuuccucuucuuuuuccucugaccucugugac

SEQ ID NO: 278917 - RNA, 32 nt, Human
uuuccucuugccugagugccucacauacccua

SEQ ID NO: 278918 - RNA, 32 nt, Human
uuuccucuuggucacucccauucuugucucca

SEQ ID NO: 278919 - RNA, 32 nt, Human
uuuccucuuguccaggcucacgaguuagucca

SEQ ID NO: 278920 - RNA, 32 nt, Human
uuuccucuuuccccucuccaaugcccagcccc

SEQ ID NO: 278921 - RNA, 32 nt, Human
uuuccucuuucuuugugucucucuugaauaua

SEQ ID NO: 278922 - RNA, 32 nt, Human
uuuccucuuuugaaaucuccccaaaucgcuua

SEQ ID NO: 278923 - RNA, 32 nt, Human
uuuccucuuuuugccuuuaucuccccaacuaa

SEQ ID NO: 278924 - RNA, 21 nt, Human
uuuccugaagaauugaaaaac

SEQ ID NO: 278925 - RNA, 32 nt, Human
uuuccugaagccaccaccacuguggccacucc

SEQ ID NO: 278926 - RNA, 32 nt, Human
uuuccugacagauggauaagaaaacaauagaa

SEQ ID NO: 278927 - RNA, 32 nt, Human
uuuccugacagcagguguacacaugccaacac

SEQ ID NO: 278928 - RNA, 32 nt, Human
uuuccugacugcacuggccuggcagucuggcu

SEQ ID NO: 278929 - RNA, 32 nt, Human
uuuccugagaccucaaugaagcagaaauguac

SEQ ID NO: 278930 - RNA, 32 nt, Human
uuuccugagccaagcauccaauaucaugcccc

SEQ ID NO: 278931 - RNA, 32 nt, Human
uuuccugagccccagccacauggaugugucca

SEQ ID NO: 278932 - RNA, 32 nt, Human
uuuccugaggagaaaagccagaguggagucug

SEQ ID NO: 278933 - RNA, 32 nt, Human
uuuccugaggggaaggacugugaccugccaua

SEQ ID NO: 278934 - RNA, 32 nt, Human
uuuccugagguggugaggagagacugaaggcu

SEQ ID NO: 278935 - RNA, 32 nt, Human
uuuccugaguagcugacauuacggguacacuc

SEQ ID NO: 278936 - RNA, 32 nt, Human
uuuccugaguuggccaggcaugguggcucacg

SEQ ID NO: 278937 - RNA, 32 nt, Human
uuuccugauagcugcaggcuugagauugcagc

SEQ ID NO: 278938 - RNA, 18 nt, Human
uuuccugcaacgaaggag

SEQ ID NO: 278939 - RNA, 32 nt, Human
uuuccugcacagagaaggggugagggaagcau

SEQ ID NO: 278940 - RNA, 32 nt, Human
uuuccugcagcugacagauagacucagauuuu

SEQ ID NO: 278941 - RNA, 19 nt, Human
uuuccugccaguaacuaua

SEQ ID NO: 278942 - RNA, 32 nt, Human
uuuccugccaguucaggagagauucuuggcau

SEQ ID NO: 278943 - RNA, 32 nt, Human
uuuccugcccaggcuuggccucccaggacauc

SEQ ID NO: 278944 - RNA, 32 nt, Human
uuuccugcccugcagucugcagugccagcacg

SEQ ID NO: 278945 - RNA, 32 nt, Human
uuuccugccgcuuuuugacaaucuuguguauu

SEQ ID NO: 278946 - RNA, 32 nt, Human
uuuccugccuccaggagaauggagagaaaggg

SEQ ID NO: 278947 - RNA, 32 nt, Human
uuuccugccuccuuccucuccucucucuucuu

SEQ ID NO: 278948 - RNA, 32 nt, Human
uuuccugcgcuguuccaccucauucaacuuca

SEQ ID NO: 278949 - RNA, 32 nt, Human
uuuccugcuacugcuacugcugcugcugccac

SEQ ID NO: 278950 - RNA, 32 nt, Human
uuuccugcugaguacugcuaauaaaagugcua

SEQ ID NO: 278951 - RNA, 21 nt, Human
uuuccugcuucuuuggguugc

SEQ ID NO: 278952 - RNA, 20 nt, Human
uuuccugcuuuggggagcuu

SEQ ID NO: 278953 - RNA, 32 nt, Human
uuuccuggaagguguuuuuaucuggaagauag

SEQ ID NO: 278954 - RNA, 32 nt, Human
uuuccuggacugcucucuccagaaacagcaca

SEQ ID NO: 278955 - RNA, 32 nt, Human
uuuccuggauauccccagcagaggcuacagaa

SEQ ID NO: 278956 - RNA, 32 nt, Human
uuuccuggcaaggcaggcucucacaugccugg

SEQ ID NO: 278957 - RNA, 32 nt, Human
uuuccuggcauuucucuuccacgcgacgaggu

SEQ ID NO: 278958 - RNA, 32 nt, Human
uuuccuggcccagcuucuccuucucccucugc

SEQ ID NO: 278959 - RNA, 32 nt, Human
uuuccuggcccaggaccccgggaaugcccgag

SEQ ID NO: 278960 - RNA, 32 nt, Human
uuuccuggccuuucuccacucucccucaagcc

SEQ ID NO: 278961 - RNA, 30 nt, Human
uuuccuggcuucuccaugcacugucccugc

SEQ ID NO: 278962 - RNA, 32 nt, Human
uuuccugggcaagaguguaugcauacaaaguu

SEQ ID NO: 278963 - RNA, 31 nt, Human
uuuccuggguagaagggaaaagacuggaaaa

SEQ ID NO: 278964 - RNA, 32 nt, Human
uuuccuggguaguauuugggagagggaaaggc

SEQ ID NO: 278965 - RNA, 32 nt, Human
uuuccuggguccccucuccagcaagccuccac

SEQ ID NO: 278966 - RNA, 32 nt, Human
uuuccuggucccucacccccauggccccaggc

SEQ ID NO: 278967 - RNA, 32 nt, Human
uuuccuggucuguccuaggagcuguauaaaga

SEQ ID NO: 278968 - RNA, 32 nt, Human
uuuccugguucugcaggauggugcaggcucug

SEQ ID NO: 278969 - RNA, 32 nt, Human
uuuccugguugaaggaauaaugggugauuauu

SEQ ID NO: 278970 - RNA, 32 nt, Human
uuuccuguaggggagaggaagcaggcagcagg

SEQ ID NO: 278971 - RNA, 32 nt, Human
uuuccuguaucaaauaucuggcaauuuacaau

SEQ ID NO: 278972 - RNA, 32 nt, Human
uuuccugucauguucacucaucuuuaaauccu

SEQ ID NO: 278973 - RNA, 32 nt, Human
uuuccuguccuguaauugcauuuuaaguuuuc

SEQ ID NO: 278974 - RNA, 32 nt, Human
uuuccugucugugcuuucuuuuuccacgcugu

SEQ ID NO: 278975 - RNA, 32 nt, Human
uuuccugucuuauuucuaaauuuccuucuucc

SEQ ID NO: 278976 - RNA, 32 nt, Human
uuuccugugaagccugcgggccagcgagcuga

SEQ ID NO: 278977 - RNA, 32 nt, Human
uuuccugugccuuauuguuucucccucuucuc

SEQ ID NO: 278978 - RNA, 32 nt, Human
uuuccuguggagcugcucagugcccggcuuag

SEQ ID NO: 278979 - RNA, 32 nt, Human
uuuccuguggccaggcacagagccaggugcuu

SEQ ID NO: 278980 - RNA, 32 nt, Human
uuuccuguggucccuggagcagcacauccccc

SEQ ID NO: 278981 - RNA, 32 nt, Human
uuuccugugucaccccucccacaacaccaggc

SEQ ID NO: 278982 - RNA, 32 nt, Human
uuuccuguuacccagcccaaguuuucaucguc

SEQ ID NO: 278983 - RNA, 32 nt, Human
uuuccuguucagauccauacaggauuugcaag

SEQ ID NO: 278984 - RNA, 32 nt, Human
uuuccuguuggaacuucugaccugucagaaag

SEQ ID NO: 278985 - RNA, 32 nt, Human
uuuccuguugucucacuccugagggcuccugc

SEQ ID NO: 278986 - RNA, 32 nt, Human
uuuccuguuuccagggucugagugcaaguuca

SEQ ID NO: 278987 - RNA, 32 nt, Human
uuuccuguuugaccaaagauugcccaagucug

SEQ ID NO: 278988 - RNA, 32 nt, Human
uuuccuuauagaacauguugacauuaugugga

SEQ ID NO: 278989 - RNA, 32 nt, Human
uuuccuuaucuucucccccauggcauccuaaa

SEQ ID NO: 278990 - RNA, 32 nt, Human
uuuccuuaugucuggcaccgagguguacacaa

SEQ ID NO: 278991 - RNA, 32 nt, Human
uuuccuucaacucuggcaguuccccaggccuu

SEQ ID NO: 278992 - RNA, 30 nt, Human
uuuccuucaagccguaccuguaagaguaaa

SEQ ID NO: 278993 - RNA, 32 nt, Human
uuuccuucaccacuucuauuccuaaggucacc

SEQ ID NO: 278994 - RNA, 32 nt, Human
uuuccuucagccccucugcccugucccugcac

SEQ ID NO: 278995 - RNA, 32 nt, Human
uuuccuucaguaccagucuauaagcuacuguc

SEQ ID NO: 278996 - RNA, 32 nt, Human
uuuccuucauucucugacguauuucagaaauc

SEQ ID NO: 278997 - RNA, 32 nt, Human
uuuccuuccaagggcagcuccgucuuggcagg

SEQ ID NO: 278998 - RNA, 32 nt, Human
uuuccuuccaccucuuugaccuucccuccagc

SEQ ID NO: 278999 - RNA, 32 nt, Human
uuuccuuccaugucaguuugcuucuuuggguc

SEQ ID NO: 279000 - RNA, 22 nt, Human
uuuccuucccauuggggugcug

SEQ ID NO: 279001 - RNA, 32 nt, Human
uuuccuuccccuggacuguccucugacccuuu

SEQ ID NO: 279002 - RNA, 32 nt, Human
uuuccuuccccuuucucugucaucccagagga

SEQ ID NO: 279003 - RNA, 32 nt, Human
uuuccuucccuaauaccccacacccaaccugu

SEQ ID NO: 279004 - RNA, 32 nt, Human
uuuccuuccucuccucuuccccaucaggcaau

SEQ ID NO: 279005 - RNA, 32 nt, Human
uuuccuuccucuuuaucccuccuguuuuacuu

SEQ ID NO: 279006 - RNA, 32 nt, Human
uuuccuuccugaguuggggcaccagaaagaac

SEQ ID NO: 279007 - RNA, 32 nt, Human
uuuccuuccuguucucuggagaucuugcagaa

SEQ ID NO: 279008 - RNA, 32 nt, Human
uuuccuuccuuuaccauuuccuccuuggaauu

SEQ ID NO: 279009 - RNA, 32 nt, Human
uuuccuuccuuuugcucuuuccuuccuuccuu

SEQ ID NO: 279010 - RNA, 32 nt, Human
uuuccuucuagccugugacccuagggcugcug

SEQ ID NO: 279011 - RNA, 32 nt, Human
uuuccuucucaaggaguuggcuaagcaucagg

SEQ ID NO: 279012 - RNA, 32 nt, Human
uuuccuucucagacuugccaccuuuccccucu

SEQ ID NO: 279013 - RNA, 32 nt, Human
uuuccuucuccaggaauacugaacaugggagc

SEQ ID NO: 279014 - RNA, 32 nt, Human
uuuccuucuccucaugcccaagagaucugugc

SEQ ID NO: 279015 - RNA, 32 nt, Human
uuuccuucuccucuccugcauuuuccuccauc

SEQ ID NO: 279016 - RNA, 32 nt, Human
uuuccuucucuucucuuuccucccucucuucc

SEQ ID NO: 279017 - RNA, 24 nt, Human
uuuccuucugggccugggcagcug

SEQ ID NO: 279018 - RNA, 24 nt, Human
uuuccuucugucugcuggugacug

SEQ ID NO: 279019 - RNA, 32 nt, Human
uuuccuucuucagcaggaagggugggaaggga

SEQ ID NO: 279020 - RNA, 32 nt, Human
uuuccuucuuccuuccccuccucgccgccacc

SEQ ID NO: 279021 - RNA, 32 nt, Human
uuuccuucuuugcuuucaucccuguugcacug

SEQ ID NO: 279022 - RNA, 32 nt, Human
uuuccuugacaaguugauuuugcaauuguggu

SEQ ID NO: 279023 - RNA, 32 nt, Human
uuuccuugacuucucaacccagccugaagucc

SEQ ID NO: 279024 - RNA, 32 nt, Human
uuuccuugcugucucccuucuuucuauuugaa

SEQ ID NO: 279025 - RNA, 32 nt, Human
uuuccuuggcugagggaaguggccucuccccg

SEQ ID NO: 279026 - RNA, 32 nt, Human
uuuccuugggaacuggagugcaguaugagcug

SEQ ID NO: 279027 - RNA, 32 nt, Human
uuuccuugggagcuucugccuccgugggccuc

SEQ ID NO: 279028 - RNA, 32 nt, Human
uuuccuugggauagagguuguguuggggaaua

SEQ ID NO: 279029 - RNA, 32 nt, Human
uuuccuuggggaggggcgggugggucuggaug

SEQ ID NO: 279030 - RNA, 32 nt, Human
uuuccuuuaacucccuuuuuacacuuuauggu

SEQ ID NO: 279031 - RNA, 32 nt, Human
uuuccuuuaccaaggccagucaucccugcuuc

SEQ ID NO: 279032 - RNA, 32 nt, Human
uuuccuuuaugcaguagaugcuuucuuccucc

SEQ ID NO: 279033 - RNA, 32 nt, Human
uuuccuuuccaauauccucaugacauucaaua

SEQ ID NO: 279034 - RNA, 32 nt, Human
uuuccuuuccccucccccucccucuccaagcc

SEQ ID NO: 279035 - RNA, 32 nt, Human
uuuccuuucccuuucuuuccuuuuucccuguc

SEQ ID NO: 279036 - RNA, 32 nt, Human
uuuccuuucccuuucuuuucuuuugcuuuccu

SEQ ID NO: 279037 - RNA, 23 nt, Human
uuuccuuuccugugggcaugcug

SEQ ID NO: 279038 - RNA, 32 nt, Human
uuuccuuuccuuucuuucuuccuuuccuuccc

SEQ ID NO: 279039 - RNA, 32 nt, Human
uuuccuuucggagccucgguuuucucaucugc

SEQ ID NO: 279040 - RNA, 32 nt, Human
uuuccuuucuaaagauuaauuucuugggagca

SEQ ID NO: 279041 - RNA, 32 nt, Human
uuuccuuucuaggagggaagcuucugugcugc

SEQ ID NO: 279042 - RNA, 32 nt, Human
uuuccuuucucucuccucccgccgcccaagau

SEQ ID NO: 279043 - RNA, 32 nt, Human
uuuccuuucuggccccagccuagguggaggca

SEQ ID NO: 279044 - RNA, 32 nt, Human
uuuccuuucuuucuuguccaaguucagguuaa

SEQ ID NO: 279045 - RNA, 32 nt, Human
uuuccuuugccauuaaggaaugaacucuuuca

SEQ ID NO: 279046 - RNA, 32 nt, Human
uuuccuuuguagaaacaagggccaggccagcu

SEQ ID NO: 279047 - RNA, 32 nt, Human
uuuccuuugucgccccuccuuuuucugauuga

SEQ ID NO: 279048 - RNA, 32 nt, Human
uuuccuuuguuaaaggaggaaccguaacucuc

SEQ ID NO: 279049 - RNA, 32 nt, Human
uuuccuuuguuuccuugggugaaugcaggagc

SEQ ID NO: 279050 - RNA, 32 nt, Human
uuuccuuuuccaccauaggccccaaagcacuc

SEQ ID NO: 279051 - RNA, 32 nt, Human
uuuccuuuuccaccauaggccucaaagugcuc

SEQ ID NO: 279052 - RNA, 32 nt, Human
uuuccuuuuccaccauaugccucaaagcgcuc

SEQ ID NO: 279053 - RNA, 32 nt, Human
uuuccuuuuccucuugacugucuuuacgagug

SEQ ID NO: 279054 - RNA, 32 nt, Human
uuuccuuuucuugccaauucugaucugaacag

SEQ ID NO: 279055 - RNA, 32 nt, Human
uuuccuuuugagauggagucuugcucuguugc

SEQ ID NO: 279056 - RNA, 32 nt, Human
uuuccuuuugcacuugaaggacaaaggugcca

SEQ ID NO: 279057 - RNA, 32 nt, Human
uuuccuuuugccugaaggacuuuuucugcugg

SEQ ID NO: 279058 - RNA, 23 nt, Human
uuuccuuuuguccugggggugcc

SEQ ID NO: 279059 - RNA, 32 nt, Human
uuuccuuuuuccugugacaaaacaucuuuuca

SEQ ID NO: 279060 - RNA, 32 nt, Human
uuuccuuuuucuccucuuccauuucuuggguu

SEQ ID NO: 279061 - RNA, 32 nt, Human
uuuccuuuuucuuccuccuccagcaccuucgu

SEQ ID NO: 279062 - RNA, 32 nt, Human
uuuccuuuuuggggguacuuagcuuccaugcc

SEQ ID NO: 279063 - RNA, 32 nt, Human
uuucgaacucuguaaucccagcacuuugggag

SEQ ID NO: 279064 - RNA, 32 nt, Human
uuucgaagacucugcugccauccguucuccca

SEQ ID NO: 279065 - RNA, 32 nt, Human
uuucgaagucacaugauaacacacacaggaga

SEQ ID NO: 279066 - RNA, 32 nt, Human
uuucgaaguugagaagagaaccccuggaacgu

SEQ ID NO: 279067 - RNA, 32 nt, Human
uuucgaauuagaguguucugcuguucuagaag

SEQ ID NO: 279068 - RNA, 32 nt, Human
uuucgacaccucugccuggccugcugcuagcc

SEQ ID NO: 279069 - RNA, 22 nt, Human
uuucgacccagcuaggggccag

SEQ ID NO: 279070 - RNA, 32 nt, Human
uuucgacucacugcaaccucugccucccaggu

SEQ ID NO: 279071 - RNA, 32 nt, Human
uuucgacucgagcagugccacuuuaaaaaucu

SEQ ID NO: 279072 - RNA, 32 nt, Human
uuucgagaccagccuggccaacauggugaaac

SEQ ID NO: 279073 - RNA, 32 nt, Human
uuucgaggcaccuagaaguugaggcagccagc

SEQ ID NO: 279074 - RNA, 32 nt, Human
uuucgaggggaguuacaggcaaguuugguaaa

SEQ ID NO: 279075 - RNA, 32 nt, Human
uuucgagguauucuuuccaggccgagauugag

SEQ ID NO: 279076 - RNA, 32 nt, Human
uuucgcaacauaaucccagcacuuuggaacgc

SEQ ID NO: 279077 - RNA, 32 nt, Human
uuucgcaacugaaagucgcuacucgagccuug

SEQ ID NO: 279078 - RNA, 32 nt, Human
uuucgcaaguccagaaauugaggacucuggau

SEQ ID NO: 279079 - RNA, 32 nt, Human
uuucgcacaacccugaagcccaaagaaacugg

SEQ ID NO: 279080 - RNA, 17 nt, Human
uuucgcagccgcugccg

SEQ ID NO: 279081 - RNA, 32 nt, Human
uuucgcaucuauucgggagagacuagggcagg

SEQ ID NO: 279082 - RNA, 32 nt, Human
uuucgccacugcacaccagccugggugacagu

SEQ ID NO: 279083 - RNA, 32 nt, Human
uuucgccagguuggccaggcuggucuugugaa

SEQ ID NO: 279084 - RNA, 32 nt, Human
uuucgccauauuggccaggauggucucgaacu

SEQ ID NO: 279085 - RNA, 32 nt, Human
uuucgccaucuucuccauggaccacuauauac

SEQ ID NO: 279086 - RNA, 24 nt, Human
uuucgcccaggcuggagugcaaug

SEQ ID NO: 279087 - RNA, 24 nt, Human
uuucgcccaggcuggagugcagug

SEQ ID NO: 279088 - RNA, 32 nt, Human
uuucgccccaaaauaaugagaccucaccuggu

SEQ ID NO: 279089 - RNA, 32 nt, Human
uuucgccguguuggccaggauggucucgaucu

SEQ ID NO: 279090 - RNA, 32 nt, Human
uuucgccugagauauaaguuguacugcguaug

SEQ ID NO: 279091 - RNA, 32 nt, Human
uuucgccugcagcugcucaccggauccucagu

SEQ ID NO: 279092 - RNA, 32 nt, Human
uuucgccugcugucucugauggcucuggcaag

SEQ ID NO: 279093 - RNA, 32 nt, Human
uuucgccuggccaacagcaucucucaggugug

SEQ ID NO: 279094 - RNA, 32 nt, Human
uuucgccuguaaucccaacacuuugggaggcc

SEQ ID NO: 279095 - RNA, 32 nt, Human
uuucgcucaucucuuuucagauuggaagccug

SEQ ID NO: 279096 - RNA, 32 nt, Human
uuucgcucuuucuacugcuuacucuucggguc

SEQ ID NO: 279097 - RNA, 32 nt, Human
uuucgcuguucccaggcuggucucaaacuccu

SEQ ID NO: 279098 - RNA, 32 nt, Human
uuucgcuugaacauucccuugaucucaucagu

SEQ ID NO: 279099 - RNA, 32 nt, Human
uuucgcuuguugcccaggcuggagugcaaugg

SEQ ID NO: 279100 - RNA, 32 nt, Human
uuucggaccagccuggccaacguggugaaacc

SEQ ID NO: 279101 - RNA, 32 nt, Human
uuucggacuggccuggccgacgugguaaaacc

SEQ ID NO: 279102 - RNA, 32 nt, Human
uuucggagaguggagggugaaaggagggagag

SEQ ID NO: 279103 - RNA, 32 nt, Human
uuucggagaugggguuuugcuauguugcccag

SEQ ID NO: 279104 - RNA, 32 nt, Human
uuucggcaacuuguacgggcccagcuccuccc

SEQ ID NO: 279105 - RNA, 21 nt, Human
uuucggcaucgggccaucuca

SEQ ID NO: 279106 - RNA, 32 nt, Human
uuucggccacccugcuguccaucgugaacuuu

SEQ ID NO: 279107 - RNA, 32 nt, Human
uuucggcggggcugggagacugaggcccgcgg

SEQ ID NO: 279108 - RNA, 32 nt, Human
uuucggcucacuacaaccaccaccuccugggu

SEQ ID NO: 279109 - RNA, 32 nt, Human
uuucggcucacugcaacccccgucucccgggu

SEQ ID NO: 279110 - RNA, 32 nt, Human
uuucggcucacugcaaccuccaccuccugggu

SEQ ID NO: 279111 - RNA, 32 nt, Human
uuucggcucacugcaaccuccuccucccagag

SEQ ID NO: 279112 - RNA, 32 nt, Human
uuucggcucacugcaaccucugccucccaagu

SEQ ID NO: 279113 - RNA, 32 nt, Human
uuucggcucacugcaaccucugucuccugggu

SEQ ID NO: 279114 - RNA, 32 nt, Human
uuucggcucacugcaacuucugccucccgggu

SEQ ID NO: 279115 - RNA, 32 nt, Human
uuucggcuucugagacggcggcagcagcggca

SEQ ID NO: 279116 - RNA, 32 nt, Human
uuucgggaacuggaacuguuuaacuugaaccc

SEQ ID NO: 279117 - RNA, 32 nt, Human
uuucgggaaucaccgucgcugccaucaacaug

SEQ ID NO: 279118 - RNA, 32 nt, Human
uuucgggaggcugaggcaggaggaucauuuga

SEQ ID NO: 279119 - RNA, 32 nt, Human
uuucgggcaggguauggucucaaucaguuuuc

SEQ ID NO: 279120 - RNA, 32 nt, Human
uuucggggacaguaggguuggugggaguugcg

SEQ ID NO: 279121 - RNA, 32 nt, Human
uuucggggcccuggggcaucucacagggacca

SEQ ID NO: 279122 - RNA, 32 nt, Human
uuucggggccuuuuuaguuggcuacugaccug

SEQ ID NO: 279123 - RNA, 32 nt, Human
uuucggggguagccgcacccccagcacuucgg

SEQ ID NO: 279124 - RNA, 32 nt, Human
uuucgggggucaagggauccacacucaaguga

SEQ ID NO: 279125 - RNA, 32 nt, Human
uuucggggucucccccuccuuguugcuaaggc

SEQ ID NO: 279126 - RNA, 32 nt, Human
uuucggguuguggcaaaccccaaagagagcac

SEQ ID NO: 279127 - RNA, 32 nt, Human
uuucgguaucugcuguucacagcucuccacug

SEQ ID NO: 279128 - RNA, 32 nt, Human
uuucgguccggaggaggcgggagcagcuuccc

SEQ ID NO: 279129 - RNA, 32 nt, Human
uuucggucuccaaacucccuguuggcuuuuua

SEQ ID NO: 279130 - RNA, 32 nt, Human
  misc_feature (27)..(27): n is a, c, g, or u
uuucggugacagaagagaugggcaganaacuu

SEQ ID NO: 279131 - RNA, 32 nt, Human
uuucgguggucacaaguaggggagacgggugc

SEQ ID NO: 279132 - RNA, 32 nt, Human
uuucgguuucuuccaagauuccuggccuuccc

SEQ ID NO: 279133 - RNA, 32 nt, Human
uuucgguuuucugccagccauugcgguuaaaa

SEQ ID NO: 279134 - RNA, 32 nt, Human
uuucguaagucagguuucuaagugagcucccu

SEQ ID NO: 279135 - RNA, 32 nt, Human
uuucguaucugcaaaggccacaggauccauuc

SEQ ID NO: 279136 - RNA, 32 nt, Human
uuucgucagcuggcuggagcagcaucgguccg

SEQ ID NO: 279137 - RNA, 32 nt, Human
uuucgucccuugccugccuucccaggagagac

SEQ ID NO: 279138 - RNA, 32 nt, Human
uuucguccugaguuucucaggccccaaccaug

SEQ ID NO: 279139 - RNA, 32 nt, Human
uuucgucugaagguaaugauagcuauacaguc

SEQ ID NO: 279140 - RNA, 32 nt, Human
uuucgucugcgcuggagaaccaggacaucaga

SEQ ID NO: 279141 - RNA, 32 nt, Human
uuucgugaccuugauuucuucccccaaauuua

SEQ ID NO: 279142 - RNA, 32 nt, Human
uuucgugagcccccucgaggaaccuggucucc

SEQ ID NO: 279143 - RNA, 31 nt, Human
uuucgugaugagcaugaaaaagauuguuuaa

SEQ ID NO: 279144 - RNA, 32 nt, Human
uuucguggauuucuguggagcuggcagagcuc

SEQ ID NO: 279145 - RNA, 32 nt, Human
uuucguggugagcagcagguccuucauggcuc

SEQ ID NO: 279146 - RNA, 32 nt, Human
uuucgugguucugcugagcauggucuuggcag

SEQ ID NO: 279147 - RNA, 32 nt, Human
uuucguuguauaauuaugaacaugcacaaguu

SEQ ID NO: 279148 - RNA, 32 nt, Human
uuucguuugguaguucaucugccuuuuaaccc

SEQ ID NO: 279149 - RNA, 32 nt, Human
uuucguuuucccaggcuaguagggcugugagg

SEQ ID NO: 279150 - RNA, 32 nt, Human
uuucuaaaaauacaaaaauuagccagguaugg

SEQ ID NO: 279151 - RNA, 32 nt, Human
uuucuaaaagacacaucucuugaaaaaugaga

SEQ ID NO: 279152 - RNA, 32 nt, Human
uuucuaaaaugacuuguucagggcuccuuuug

SEQ ID NO: 279153 - RNA, 32 nt, Human
uuucuaaacuauuuacuacacaguaauccaug

SEQ ID NO: 279154 - RNA, 32 nt, Human
uuucuaaagaaagagugaauaggcugggcaug

SEQ ID NO: 279155 - RNA, 32 nt, Human
uuucuaaaggaaaucaaaugaauggaggaacu

SEQ ID NO: 279156 - RNA, 32 nt, Human
uuucuaaauacucuauugucuuuaauaauugu

SEQ ID NO: 279157 - RNA, 32 nt, Human
uuucuaaaucugagaucucccuccagggaauc

SEQ ID NO: 279158 - RNA, 32 nt, Human
uuucuaaaugugaguucguguccucugccaga

SEQ ID NO: 279159 - RNA, 32 nt, Human
uuucuaaauucuuucaugagcuugccuaaaau

SEQ ID NO: 279160 - RNA, 32 nt, Human
uuucuaaccagcauccagaagguucguuagcc

SEQ ID NO: 279161 - RNA, 32 nt, Human
uuucuaacuguagcuaucauuacuggcugugg

SEQ ID NO: 279162 - RNA, 32 nt, Human
uuucuaacuucucaaguucuagagaaagaauu

SEQ ID NO: 279163 - RNA, 32 nt, Human
uuucuaagaggcaccuccaucgagggccgguc

SEQ ID NO: 279164 - RNA, 32 nt, Human
uuucuaagcaacucaaguuugcagugauucag

SEQ ID NO: 279165 - RNA, 32 nt, Human
uuucuaagucuucuccuggaucuacauuucca

SEQ ID NO: 279166 - RNA, 32 nt, Human
uuucuaaguuccccaacuacucucacacccuu

SEQ ID NO: 279167 - RNA, 32 nt, Human
uuucuaaucccucccuccucauucucucccua

SEQ ID NO: 279168 - RNA, 32 nt, Human
uuucuaaucuaucacuucaaaagaugguaauc

SEQ ID NO: 279169 - RNA, 32 nt, Human
uuucuaaugagcuguaugagaggugaaucucc

SEQ ID NO: 279170 - RNA, 32 nt, Human
uuucuaaugucuacaccauauuuuggauaaca

SEQ ID NO: 279171 - RNA, 32 nt, Human
uuucuacaaaaauacaaaacuuagcugggugu

SEQ ID NO: 279172 - RNA, 32 nt, Human
uuucuacaaaccuaugaauguagaaaccuacc

SEQ ID NO: 279173 - RNA, 32 nt, Human
uuucuacaacacagaguacugacucugccugg

SEQ ID NO: 279174 - RNA, 32 nt, Human
uuucuacaacuccgacucauuugcuacauucc

SEQ ID NO: 279175 - RNA, 32 nt, Human
uuucuacacaauaaaugcaguuuaugucuuuu

SEQ ID NO: 279176 - RNA, 32 nt, Human
uuucuacagaauugaaugccuguuauagaaaa

SEQ ID NO: 279177 - RNA, 32 nt, Human
uuucuacagagcugaguguugguuccuuuuuc

SEQ ID NO: 279178 - RNA, 32 nt, Human
uuucuacagugagaugugaucuugccaaagcc

SEQ ID NO: 279179 - RNA, 32 nt, Human
uuucuacauagacugcuuguuuugcacaagaa

SEQ ID NO: 279180 - RNA, 32 nt, Human
uuucuacaucuucauuauuuggaccuaaaacc

SEQ ID NO: 279181 - RNA, 32 nt, Human
uuucuaccagcccugcaaguuuccucauggac

SEQ ID NO: 279182 - RNA, 32 nt, Human
uuucuacccaaucaucuggauuucaagauucc

SEQ ID NO: 279183 - RNA, 32 nt, Human
uuucuacccugccucgucuuaagacauauuua

SEQ ID NO: 279184 - RNA, 32 nt, Human
uuucuacccuggcuccccuugguuucuacccu

SEQ ID NO: 279185 - RNA, 32 nt, Human
uuucuacccuuuacucccugcaaagaaacaag

SEQ ID NO: 279186 - RNA, 32 nt, Human
uuucuacccuuuccuuuguaaguuccugggca

SEQ ID NO: 279187 - RNA, 32 nt, Human
uuucuaccuuccagccucuccuuagagacacc

SEQ ID NO: 279188 - RNA, 21 nt, Human
uuucuaccuuugaaacugcaa

SEQ ID NO: 279189 - RNA, 21 nt, Human
uuucuacuaaaaauacaaaau

SEQ ID NO: 279190 - RNA, 32 nt, Human
uuucuacuaaaaauacaaaauuagcugggcau

SEQ ID NO: 279191 - RNA, 32 nt, Human
uuucuacuaagguaugaaugaagauaguggga

SEQ ID NO: 279192 - RNA, 32 nt, Human
uuucuacucauucaaagcacauuguagauauu

SEQ ID NO: 279193 - RNA, 32 nt, Human
uuucuacuccuccucagccucauaaagaccuu

SEQ ID NO: 279194 - RNA, 22 nt, Human
uuucuacucuccccauauucca

SEQ ID NO: 279195 - RNA, 32 nt, Human
uuucuacucuucaugccucauccugcagccuc

SEQ ID NO: 279196 - RNA, 32 nt, Human
uuucuacugcaaaccuccacauccuggaauca

SEQ ID NO: 279197 - RNA, 32 nt, Human
uuucuacuggaaaagauugugagauugaacuu

SEQ ID NO: 279198 - RNA, 32 nt, Human
uuucuacuucaaaccuuccucuagcagacugu

SEQ ID NO: 279199 - RNA, 32 nt, Human
uuucuacuucuaaagaauugcuuggcacuuuc

SEQ ID NO: 279200 - RNA, 32 nt, Human
uuucuacuuucagaaaagauucuguaguuuug

SEQ ID NO: 279201 - RNA, 32 nt, Human
uuucuagaaauggccccaugcacauauaaaca

SEQ ID NO: 279202 - RNA, 32 nt, Human
uuucuagaaauuacagcugccaguuuauagua

SEQ ID NO: 279203 - RNA, 32 nt, Human
uuucuagaacaucccugccagcucuucugccg

SEQ ID NO: 279204 - RNA, 32 nt, Human
uuucuagaaggaacccagccagccggcggaau

SEQ ID NO: 279205 - RNA, 32 nt, Human
uuucuagaaguuuccuguggaaccuggaggcu

SEQ ID NO: 279206 - RNA, 32 nt, Human
uuucuagaauggaaauagugagggccaaugcc

SEQ ID NO: 279207 - RNA, 32 nt, Human
uuucuagagacaggaguuuugcucuguugccc

SEQ ID NO: 279208 - RNA, 32 nt, Human
uuucuagagauucuaaugaaagcugccgaaag

SEQ ID NO: 279209 - RNA, 32 nt, Human
uuucuagagccagcaguacguggcuucagagg

SEQ ID NO: 279210 - RNA, 32 nt, Human
uuucuagagccuggcaagagcuccugaaccag

SEQ ID NO: 279211 - RNA, 32 nt, Human
uuucuagagguugggccuuaguucuguuaucc

SEQ ID NO: 279212 - RNA, 32 nt, Human
uuucuagauauaaggucuuugaggcagggcuc

SEQ ID NO: 279213 - RNA, 32 nt, Human
uuucuagauuuguggcuuuaagaaaaacaaaa

SEQ ID NO: 279214 - RNA, 32 nt, Human
uuucuagcagaacuccagguccucugaguuaa

SEQ ID NO: 279215 - RNA, 32 nt, Human
uuucuagcagggaauuucuuccacuugcagac

SEQ ID NO: 279216 - RNA, 32 nt, Human
uuucuagcaucucuccccacccucugagagcu

SEQ ID NO: 279217 - RNA, 32 nt, Human
uuucuagcccuagugggcaguccugucuuagc

SEQ ID NO: 279218 - RNA, 32 nt, Human
uuucuagccuucacucuccauugucuuuucug

SEQ ID NO: 279219 - RNA, 31 nt, Human
uuucuagcuaccuucugcccugugucuggca

SEQ ID NO: 279220 - RNA, 32 nt, Human
uuucuagcuugaucuugaugguuccuagagcc

SEQ ID NO: 279221 - RNA, 32 nt, Human
uuucuaggaaaggccggacaccagguuuugag

SEQ ID NO: 279222 - RNA, 32 nt, Human
uuucuaggaacauagguugauaugaaauaaag

SEQ ID NO: 279223 - RNA, 32 nt, Human
uuucuaggagcaccuccaggcuugcaaagaaa

SEQ ID NO: 279224 - RNA, 32 nt, Human
uuucuaggauccuaaccuguaagccauugaac

SEQ ID NO: 279225 - RNA, 32 nt, Human
uuucuaggcacaacuucuggcugucagacacu

SEQ ID NO: 279226 - RNA, 32 nt, Human
uuucuaggcaucucucagaucagacagcaaag

SEQ ID NO: 279227 - RNA, 32 nt, Human
uuucuaggccuugguuccuugccugaaaaaug

SEQ ID NO: 279228 - RNA, 32 nt, Human
uuucuaggcuacaauuuucucccaggaagcuu

SEQ ID NO: 279229 - RNA, 32 nt, Human
uuucuaggcuaggaguugggugcauuuguacc

SEQ ID NO: 279230 - RNA, 32 nt, Human
uuucuaggcugcagacgugguauagagaaucc

SEQ ID NO: 279231 - RNA, 32 nt, Human
uuucuagggacauuuuucuucuaagcucugua

SEQ ID NO: 279232 - RNA, 32 nt, Human
uuucuagggcugggaaacacuccuugcaucaa

SEQ ID NO: 279233 - RNA, 32 nt, Human
uuucuaggggaggugguaggcugcaugugcca

SEQ ID NO: 279234 - RNA, 32 nt, Human
uuucuagguaacugugcuuccacugagcaagc

SEQ ID NO: 279235 - RNA, 32 nt, Human
uuucuaggugugagcccuggugugggcguuuu

SEQ ID NO: 279236 - RNA, 32 nt, Human
uuucuagguucaccaguugagggacauuugga

SEQ ID NO: 279237 - RNA, 32 nt, Human
uuucuagguuuggguuuuucuaaaaauaaaag

SEQ ID NO: 279238 - RNA, 32 nt, Human
uuucuagucauuugaauaucuuccuguuaucu

SEQ ID NO: 279239 - RNA, 32 nt, Human
uuucuagucucagaaggaaggagagggaagcc

SEQ ID NO: 279240 - RNA, 32 nt, Human
uuucuagucuccuauaucaccaugaagaaagc

SEQ ID NO: 279241 - RNA, 32 nt, Human
uuucuagucucuacagcuguuucccucuuuuc

SEQ ID NO: 279242 - RNA, 32 nt, Human
uuucuagugcaagaaacugcaggcuggaucag

SEQ ID NO: 279243 - RNA, 32 nt, Human
uuucuaguuccuucugcuugcuuuauuaacuc

SEQ ID NO: 279244 - RNA, 32 nt, Human
uuucuauagaauaauaacauacccacacaauu

SEQ ID NO: 279245 - RNA, 32 nt, Human
uuucuauagauaaugaggaagaaaugguaugu

SEQ ID NO: 279246 - RNA, 32 nt, Human
uuucuauagcccuggcacugggcacagagccu

SEQ ID NO: 279247 - RNA, 32 nt, Human
uuucuauaggaaaugaagcuucccuggucccc

SEQ ID NO: 279248 - RNA, 32 nt, Human
uuucuauaguacagugcuuuucuguauuaacu

SEQ ID NO: 279249 - RNA, 32 nt, Human
uuucuauauccccuuaguccagccucucuucu

SEQ ID NO: 279250 - RNA, 32 nt, Human
uuucuaucaagcaagaaugccacguacucaga

SEQ ID NO: 279251 - RNA, 32 nt, Human
uuucuaucaaggugucauggauuuuuaaaauu

SEQ ID NO: 279252 - RNA, 32 nt, Human
uuucuaucacuauuguaauuugccaguucauu

SEQ ID NO: 279253 - RNA, 32 nt, Human
uuucuaucagccuuuuacuuuaggcaaaucuc

SEQ ID NO: 279254 - RNA, 32 nt, Human
uuucuauccaauaaugauugauaccucaaaug

SEQ ID NO: 279255 - RNA, 32 nt, Human
uuucuaucuccaugccuggcuuuuucuaauua

SEQ ID NO: 279256 - RNA, 32 nt, Human
uuucuaucuuccagaagguuccagugucugcc

SEQ ID NO: 279257 - RNA, 32 nt, Human
uuucuaugauguggcagaaaugggcuuggcuu

SEQ ID NO: 279258 - RNA, 23 nt, Human
uuucuaugauuaaucugcuguua

SEQ ID NO: 279259 - RNA, 32 nt, Human
uuucuaugcaguggccccuuaggccagugaug

SEQ ID NO: 279260 - RNA, 32 nt, Human
uuucuaugcauuucgauuugacaugacaaaga

SEQ ID NO: 279261 - RNA, 32 nt, Human
uuucuaugccccucccaccacccuccaccuag

SEQ ID NO: 279262 - RNA, 32 nt, Human
uuucuauguaguaaaccuggaauauggagaau

SEQ ID NO: 279263 - RNA, 32 nt, Human
uuucuaugugugccacacacaaugcaguauua

SEQ ID NO: 279264 - RNA, 32 nt, Human
uuucuauguuaucaagguaggagggaguguuu

SEQ ID NO: 279265 - RNA, 32 nt, Human
uuucuauuaaaaacuuaagugcauuccaagga

SEQ ID NO: 279266 - RNA, 32 nt, Human
uuucuauuaucaccaaacaauauguuaagugg

SEQ ID NO: 279267 - RNA, 32 nt, Human
uuucuauucaaagaugcuuuugccagucacau

SEQ ID NO: 279268 - RNA, 32 nt, Human
uuucuauucaaggaaccagacugugaacaagu

SEQ ID NO: 279269 - RNA, 32 nt, Human
uuucuauucuuauuuuucauccuuguuccuca

SEQ ID NO: 279270 - RNA, 32 nt, Human
uuucuauugaaguagaggaacagaguacaacu

SEQ ID NO: 279271 - RNA, 32 nt, Human
uuucuauuuuccucccuucucagacagggcca

SEQ ID NO: 279272 - RNA, 32 nt, Human
uuucucaaaagaauacauacauguggcaauaa

SEQ ID NO: 279273 - RNA, 32 nt, Human
uuucucaaaagcaucuuucccccaaauguaug

SEQ ID NO: 279274 - RNA, 32 nt, Human
uuucucaaacuacagagugagaguugguaaua

SEQ ID NO: 279275 - RNA, 32 nt, Human
uuucucaaagcacacaccacccacucugccaa

SEQ ID NO: 279276 - RNA, 32 nt, Human
uuucucaacccuugccugccucccuccagucu

SEQ ID NO: 279277 - RNA, 32 nt, Human
uuucucaaggugccguguuugccugaaaggac

SEQ ID NO: 279278 - RNA, 32 nt, Human
uuucucaaucuugaacucauagauuauuaucu

SEQ ID NO: 279279 - RNA, 22 nt, Human
uuucucacacuccacugcccaa

SEQ ID NO: 279280 - RNA, 32 nt, Human
uuucucacagcuuuuuguucuguuuuguauuu

SEQ ID NO: 279281 - RNA, 22 nt, Human
uuucucacauguggcucccccu

SEQ ID NO: 279282 - RNA, 32 nt, Human
uuucucaccaaagaguaugccugggagccucc

SEQ ID NO: 279283 - RNA, 32 nt, Human
uuucucaccauggggcagcauuucggggccuc

SEQ ID NO: 279284 - RNA, 32 nt, Human
uuucucaccccguucugcucccacaaggcccc

SEQ ID NO: 279285 - RNA, 32 nt, Human
uuucucaccuuucuuuccuguuucugggacuc

SEQ ID NO: 279286 - RNA, 32 nt, Human
uuucucacuaagugagaaugagaacugcugug

SEQ ID NO: 279287 - RNA, 32 nt, Human
uuucucacucucuauauccauuugaaauugau

SEQ ID NO: 279288 - RNA, 32 nt, Human
uuucucacuggaggcuggaaugaaugaucacu

SEQ ID NO: 279289 - RNA, 32 nt, Human
uuucucacugguaucacauggucuugcaguuu

SEQ ID NO: 279290 - RNA, 32 nt, Human
uuucucagaacugccguagucacuguauggaa

SEQ ID NO: 279291 - RNA, 32 nt, Human
uuucucagaccagcccuggaguaguggcccgg

SEQ ID NO: 279292 - RNA, 32 nt, Human
uuucucagagagauucccaucugcuuuaauuu

SEQ ID NO: 279293 - RNA, 32 nt, Human
uuucucagagcugaguaaaaugaaggaaaagc

SEQ ID NO: 279294 - RNA, 32 nt, Human
uuucucagagcuggagguugcugggcaccuaa

SEQ ID NO: 279295 - RNA, 32 nt, Human
uuucucagaggaggaggaauagacuuaaacga

SEQ ID NO: 279296 - RNA, 32 nt, Human
uuucucagcaucauuauugcucuuucagcauc

SEQ ID NO: 279297 - RNA, 18 nt, Human
uuucucagcaucugcuuu

SEQ ID NO: 279298 - RNA, 32 nt, Human
uuucucagcccuggaagggagggaaggcaugg

SEQ ID NO: 279299 - RNA, 32 nt, Human
uuucucagccuauuuuguguccuaaugauucg

SEQ ID NO: 279300 - RNA, 32 nt, Human
uuucucagcuucugcauuuccuucccugcucc

SEQ ID NO: 279301 - RNA, 32 nt, Human
uuucucaggauggagugaagaccuggagagga

SEQ ID NO: 279302 - RNA, 32 nt, Human
uuucucaggccugugauucacagacuuuaaca

SEQ ID NO: 279303 - RNA, 32 nt, Human
uuucucagguguucuucguucuggcccuucca

SEQ ID NO: 279304 - RNA, 32 nt, Human
uuucucagguucuuaacagccugugcaaacuc

SEQ ID NO: 279305 - RNA, 32 nt, Human
uuucucaguacaacagccauagugauucuguu

SEQ ID NO: 279306 - RNA, 32 nt, Human
uuucucagugggacaaaccagagcagagagca

SEQ ID NO: 279307 - RNA, 21 nt, Human
uuucucaguguucaucuucca

SEQ ID NO: 279308 - RNA, 32 nt, Human
uuucucauacuggccuguuuaggcccagcuca

SEQ ID NO: 279309 - RNA, 32 nt, Human
uuucucauaguuaauuucaucucuccgguaag

SEQ ID NO: 279310 - RNA, 32 nt, Human
uuucucauauuaugaccuucucauguuagcac

SEQ ID NO: 279311 - RNA, 18 nt, Human
uuucucauauucugcuuu

SEQ ID NO: 279312 - RNA, 32 nt, Human
uuucucauauuugguguaagauaaaaacuuaa

SEQ ID NO: 279313 - RNA, 32 nt, Human
uuucucaucaaaaccaauauagaccagaagac

SEQ ID NO: 279314 - RNA, 32 nt, Human
uuucucaucccucacccccucccaccuuguca

SEQ ID NO: 279315 - RNA, 32 nt, Human
uuucucaucuuucugcugccuucuccuccauu

SEQ ID NO: 279316 - RNA, 32 nt, Human
uuucucaucuuucuguguucaacuauccucuu

SEQ ID NO: 279317 - RNA, 32 nt, Human
uuucucaugaggccauauuuugaguucuuaaa

SEQ ID NO: 279318 - RNA, 32 nt, Human
uuucucaugccuugcguaugcagcaggaacug

SEQ ID NO: 279319 - RNA, 32 nt, Human
uuucucaugcuguacacaauaaauuuguuaga

SEQ ID NO: 279320 - RNA, 32 nt, Human
uuucucaugcuuucucuaacuuccucaccccu

SEQ ID NO: 279321 - RNA, 32 nt, Human
uuucucauggugcuauccuggugcuauugggg

SEQ ID NO: 279322 - RNA, 32 nt, Human
uuucucauguaguuucugugugguguucagag

SEQ ID NO: 279323 - RNA, 32 nt, Human
uuucucauguugaagccacugccuucaccuuc

SEQ ID NO: 279324 - RNA, 32 nt, Human
uuucucauuaaauauuaauauaugacauguaa

SEQ ID NO: 279325 - RNA, 32 nt, Human
uuucucauuggguggauggaugggugaggagg

SEQ ID NO: 279326 - RNA, 32 nt, Human
uuucuccaacuuggucuuucacagugguucgu

SEQ ID NO: 279327 - RNA, 32 nt, Human
uuucuccaagaagguacagauaccucagauuc

SEQ ID NO: 279328 - RNA, 19 nt, Human
uuucuccaagccagaggua

SEQ ID NO: 279329 - RNA, 32 nt, Human
uuucuccacaacaaaaaccacaacuugaagug

SEQ ID NO: 279330 - RNA, 32 nt, Human
uuucuccacacgugucacagccagauuucagc

SEQ ID NO: 279331 - RNA, 32 nt, Human
uuucuccacagaaccgucucaguucuaauugc

SEQ ID NO: 279332 - RNA, 32 nt, Human
uuucuccacagcuuuaccagcaucuguuguuu

SEQ ID NO: 279333 - RNA, 32 nt, Human
uuucuccacaguuggggucauggaaaugugua

SEQ ID NO: 279334 - RNA, 32 nt, Human
uuucuccaccaaaaauaacugauccugaaaca

SEQ ID NO: 279335 - RNA, 32 nt, Human
uuucuccaccauggacucaaucugagaacaac

SEQ ID NO: 279336 - RNA, 32 nt, Human
uuucuccacccuggcucccaaggcuuggcugu

SEQ ID NO: 279337 - RNA, 32 nt, Human
uuucuccacugagcacagccugguagggcugg

SEQ ID NO: 279338 - RNA, 32 nt, Human
uuucuccacugcacuggagcuuugaagaccua

SEQ ID NO: 279339 - RNA, 32 nt, Human
uuucuccagcagcugaggaaagaagggacacg

SEQ ID NO: 279340 - RNA, 32 nt, Human
uuucuccagcccugucuccaucugccccaacc

SEQ ID NO: 279341 - RNA, 32 nt, Human
uuucuccaggcagagggaggacaagugaugga

SEQ ID NO: 279342 - RNA, 32 nt, Human
uuucuccagggucacuguuuauuucaaagagg

SEQ ID NO: 279343 - RNA, 32 nt, Human
uuucuccaggugggagugcaguggcaugaucu

SEQ ID NO: 279344 - RNA, 32 nt, Human
uuucuccagugccauaauugcauuucauuuac

SEQ ID NO: 279345 - RNA, 32 nt, Human
uuucuccaguggaacaaagauugagaaccaca

SEQ ID NO: 279346 - RNA, 20 nt, Human
uuucuccauagucugccgcu

SEQ ID NO: 279347 - RNA, 32 nt, Human
uuucuccaucauccugauuagcauguuuauuc

SEQ ID NO: 279348 - RNA, 32 nt, Human
uuucuccauccagauugugacgguugcuaccu

SEQ ID NO: 279349 - RNA, 32 nt, Human
uuucuccauguaacuugcucacaugccuaucu

SEQ ID NO: 279350 - RNA, 19 nt, Human
uuucuccauguuggccagg

SEQ ID NO: 279351 - RNA, 32 nt, Human
uuucuccauugucucugccuuuacaacagagg

SEQ ID NO: 279352 - RNA, 32 nt, Human
uuucuccauuuugccuucuuauguauuuucaa

SEQ ID NO: 279353 - RNA, 19 nt, Human
uuucuccauuuuggucagg

SEQ ID NO: 279354 - RNA, 32 nt, Human
uuucucccaagauggcacaucucaguaccuuc

SEQ ID NO: 279355 - RNA, 32 nt, Human
uuucucccacagccaucagagcaggacucugg

SEQ ID NO: 279356 - RNA, 32 nt, Human
uuucucccagcuggguggaaggagaacacuag

SEQ ID NO: 279357 - RNA, 32 nt, Human
uuucucccaggagaggcuggaguguccaaaag

SEQ ID NO: 279358 - RNA, 32 nt, Human
uuucucccagggacccaggaaacuaggacuuu

SEQ ID NO: 279359 - RNA, 19 nt, Human
uuucucccagugaagcagg

SEQ ID NO: 279360 - RNA, 32 nt, Human
uuucucccaguggaggaaggugugcugugcac

SEQ ID NO: 279361 - RNA, 32 nt, Human
uuucucccaguuuggcacugugacacaguuca

SEQ ID NO: 279362 - RNA, 32 nt, Human
uuucucccauaauguuuccauaauuuuguaaa

SEQ ID NO: 279363 - RNA, 32 nt, Human
uuucucccaucuuaaggggcucuccucccuca

SEQ ID NO: 279364 - RNA, 32 nt, Human
uuucuccccaaaaauacauccuagccuuaaug

SEQ ID NO: 279365 - RNA, 32 nt, Human
uuucuccccaaaacugguaaugccaaccuuau

SEQ ID NO: 279366 - RNA, 23 nt, Human
uuucuccccaaauaugguccagg

SEQ ID NO: 279367 - RNA, 32 nt, Human
uuucuccccacacccuggaguggcaugguccu

SEQ ID NO: 279368 - RNA, 32 nt, Human
uuucuccccacccuggggcucuucuguggucu

SEQ ID NO: 279369 - RNA, 32 nt, Human
uuucuccccacggagcccagccuggauuccug

SEQ ID NO: 279370 - RNA, 20 nt, Human
uuucuccccagcauacagug

SEQ ID NO: 279371 - RNA, 32 nt, Human
uuucucccccaccccacuccccaaagcucugc

SEQ ID NO: 279372 - RNA, 32 nt, Human
uuucucccccacugccaccaccaggggugugu

SEQ ID NO: 279373 - RNA, 32 nt, Human
uuucucccccucucucucugccuuaggcucug

SEQ ID NO: 279374 - RNA, 32 nt, Human
uuucucccccuucucucccuuucuccuucucg

SEQ ID NO: 279375 - RNA, 32 nt, Human
uuucuccccugagaggagcuucugcuacucug

SEQ ID NO: 279376 - RNA, 32 nt, Human
uuucuccccugccccaccccggggcugacauu

SEQ ID NO: 279377 - RNA, 32 nt, Human
uuucuccccugcugugcggcuugggguaagug

SEQ ID NO: 279378 - RNA, 32 nt, Human
uuucucccgagacagggucuugcucuggcgcc

SEQ ID NO: 279379 - RNA, 18 nt, Human
uuucucccuccagccagg

SEQ ID NO: 279380 - RNA, 32 nt, Human
uuucucccuccccuaccagccucauucuucuc

SEQ ID NO: 279381 - RNA, 32 nt, Human
uuucucccuccccucagucccuagcaaccacu

SEQ ID NO: 279382 - RNA, 32 nt, Human
uuucucccuccuccuuuuccuguguucucuua

SEQ ID NO: 279383 - RNA, 32 nt, Human
uuucucccugccaaccuccuccucuccugcca

SEQ ID NO: 279384 - RNA, 32 nt, Human
uuucucccuggcugcagaacuagacacccuug

SEQ ID NO: 279385 - RNA, 27 nt, Human
uuucucccugucucugccugucuucca

SEQ ID NO: 279386 - RNA, 32 nt, Human
uuucucccuucccacucugccucaagugaaaa

SEQ ID NO: 279387 - RNA, 32 nt, Human
uuucucccuucccauuucuccccacuuucauc

SEQ ID NO: 279388 - RNA, 32 nt, Human
uuucucccuugcuuuuucucuggaccauccug

SEQ ID NO: 279389 - RNA, 32 nt, Human
uuucucccuuuuccucuucucacugcccugga

SEQ ID NO: 279390 - RNA, 32 nt, Human
uuucuccgaauguuauguuuugcuuuuaucuc

SEQ ID NO: 279391 - RNA, 32 nt, Human
uuucuccguagugcuugucuuuguuccaggaa

SEQ ID NO: 279392 - RNA, 32 nt, Human
uuucuccuacaaagggaagcagccuggaagaa

SEQ ID NO: 279393 - RNA, 32 nt, Human
uuucuccuacuuccucuugcucucuggcauuu

SEQ ID NO: 279394 - RNA, 32 nt, Human
uuucuccuagacccgugaccugagauguguga

SEQ ID NO: 279395 - RNA, 32 nt, Human
uuucuccuauuuuguuuuacuaguuuuaagau

SEQ ID NO: 279396 - RNA, 32 nt, Human
uuucuccucaagaaaagcgaaaggacagacug

SEQ ID NO: 279397 - RNA, 32 nt, Human
uuucuccuccaaccuccaucagucccagggcc

SEQ ID NO: 279398 - RNA, 32 nt, Human
uuucuccuccacccucuuaauugaugcuaugg

SEQ ID NO: 279399 - RNA, 32 nt, Human
uuucuccuccacccucuucccuucgcagcugu

SEQ ID NO: 279400 - RNA, 32 nt, Human
uuucuccucggaacaugacaaugaagcucuuu

SEQ ID NO: 279401 - RNA, 32 nt, Human
uuucuccucuccccaucggggauccgagacuc

SEQ ID NO: 279402 - RNA, 32 nt, Human
uuucuccucuccccucucccaagcacaucuga

SEQ ID NO: 279403 - RNA, 32 nt, Human
uuucuccucugucuuucucucucccucuccca

SEQ ID NO: 279404 - RNA, 32 nt, Human
uuucuccucuucucuucuugggacaggaauaa

SEQ ID NO: 279405 - RNA, 32 nt, Human
uuucuccucuuggcccuggccuacagaccaua

SEQ ID NO: 279406 - RNA, 32 nt, Human
uuucuccugcagccauggaugccgcucugcuc

SEQ ID NO: 279407 - RNA, 32 nt, Human
uuucuccugcagcuccccugggcuccgcggcc

SEQ ID NO: 279408 - RNA, 32 nt, Human
uuucuccugcucucccccaccgccguccccuu

SEQ ID NO: 279409 - RNA, 32 nt, Human
uuucuccugcugcacggaaagcuugcugggag

SEQ ID NO: 279410 - RNA, 32 nt, Human
uuucuccuggcugaggaagggaagggaacauc

SEQ ID NO: 279411 - RNA, 32 nt, Human
uuucuccuuaaccuuggggucaugguucagca

SEQ ID NO: 279412 - RNA, 32 nt, Human
uuucuccuuccagcagaugcagaaggagagaa

SEQ ID NO: 279413 - RNA, 32 nt, Human
uuucuccuuccugaccuuccucagucugcagc

SEQ ID NO: 279414 - RNA, 32 nt, Human
uuucuccuuccuuccuuccucuuucucucuuu

SEQ ID NO: 279415 - RNA, 32 nt, Human
uuucuccuucuccccuccuucuuuuucagacu

SEQ ID NO: 279416 - RNA, 32 nt, Human
uuucuccuucucuuucccuugagguuaggaaa

SEQ ID NO: 279417 - RNA, 19 nt, Human
uuucuccuucuucccuucc

SEQ ID NO: 279418 - RNA, 32 nt, Human
uuucuccuucuucuugguccuggcucccaagg

SEQ ID NO: 279419 - RNA, 22 nt, Human
uuucuccuuuauggccucccca

SEQ ID NO: 279420 - RNA, 20 nt, Human
uuucuccuuuuucuaccuuu

SEQ ID NO: 279421 - RNA, 24 nt, Human
uuucuccuuuuugggaucugccca

SEQ ID NO: 279422 - RNA, 32 nt, Human
uuucucgaaagccaugccagaagcagucuucc

SEQ ID NO: 279423 - RNA, 32 nt, Human
uuucucgauuuuaucuuucgcacagcaguucc

SEQ ID NO: 279424 - RNA, 32 nt, Human
uuucucgcacaggcuuggagugcaguggugcg

SEQ ID NO: 279425 - RNA, 32 nt, Human
uuucucgcugggccuuagcugccuucccucag

SEQ ID NO: 279426 - RNA, 32 nt, Human
uuucucggggcugggaaucacccuggaucccu

SEQ ID NO: 279427 - RNA, 32 nt, Human
uuucucgguuccaucucauccauuuccuuuuc

SEQ ID NO: 279428 - RNA, 32 nt, Human
uuucucguuugccuuucuauuuccuuccaaau

SEQ ID NO: 279429 - RNA, 20 nt, Human
uuucucguuuucaucauaua

SEQ ID NO: 279430 - RNA, 19 nt, Human
uuucucuaaucauuuuuuc

SEQ ID NO: 279431 - RNA, 24 nt, Human
uuucucuacaguuuaguuuuguca

SEQ ID NO: 279432 - RNA, 32 nt, Human
uuucucuaccggcuugcuuggaguuuggacag

SEQ ID NO: 279433 - RNA, 32 nt, Human
uuucucuacugaaaauauaaaaauuagccagg

SEQ ID NO: 279434 - RNA, 32 nt, Human
uuucucuacuucccucuccaccuugcucucuc

SEQ ID NO: 279435 - RNA, 32 nt, Human
uuucucuagaucugugcucuccgauguggcag

SEQ ID NO: 279436 - RNA, 32 nt, Human
uuucucuagcuaauuuuguggccaauguaaaa

SEQ ID NO: 279437 - RNA, 32 nt, Human
uuucucuagcucagccucacaggccaaagcau

SEQ ID NO: 279438 - RNA, 32 nt, Human
uuucucuauagugcaacaaacaugguuucuca

SEQ ID NO: 279439 - RNA, 23 nt, Human
uuucucuaucuuuuauuuuuuca

SEQ ID NO: 279440 - RNA, 32 nt, Human
uuucucuaugcucucucccaccccuguggcuc

SEQ ID NO: 279441 - RNA, 32 nt, Human
uuucucucaaagcguuuauugagaaacucaaa

SEQ ID NO: 279442 - RNA, 32 nt, Human
uuucucucacauuugcugaaugugagaucaga

SEQ ID NO: 279443 - RNA, 32 nt, Human
uuucucucagcaucuccacccaaccagcagaa

SEQ ID NO: 279444 - RNA, 32 nt, Human
uuucucucauuuguguucauggagauuguuuu

SEQ ID NO: 279445 - RNA, 32 nt, Human
uuucucucccucccucccuuccuuccucccau

SEQ ID NO: 279446 - RNA, 32 nt, Human
uuucucuccuccacuucauauuucauacccau

SEQ ID NO: 279447 - RNA, 32 nt, Human
uuucucuccuccccuucucucuuucugucuuu

SEQ ID NO: 279448 - RNA, 32 nt, Human
uuucucuccucuucucccuuuccuuucccaaa

SEQ ID NO: 279449 - RNA, 31 nt, Human
uuucucuccuuuucugggccuccucgcaaau

SEQ ID NO: 279450 - RNA, 32 nt, Human
uuucucucucacuauacaguauauugucaaug

SEQ ID NO: 279451 - RNA, 32 nt, Human
uuucucucuccuccugccauccugaguucugc

SEQ ID NO: 279452 - RNA, 32 nt, Human
uuucucucuccucucugcuucauaacggaaaa

SEQ ID NO: 279453 - RNA, 32 nt, Human
uuucucucugacccucuccccacugcucauuu

SEQ ID NO: 279454 - RNA, 32 nt, Human
uuucucucugaccucauuccaagaucaguuuu

SEQ ID NO: 279455 - RNA, 26 nt, Human
uuucucucuggugguucuggaggcug

SEQ ID NO: 279456 - RNA, 32 nt, Human
uuucucucuguccugucgucucuugucccucg

SEQ ID NO: 279457 - RNA, 24 nt, Human
uuucucucugucuuuggccagcug

SEQ ID NO: 279458 - RNA, 32 nt, Human
uuucucucuguggcgacuuuucugccuucccu

SEQ ID NO: 279459 - RNA, 32 nt, Human
uuucucucuuaacguuccugggagacuccaac

SEQ ID NO: 279460 - RNA, 32 nt, Human
uuucucucuuucucccuuucucuuuucucuac

SEQ ID NO: 279461 - RNA, 32 nt, Human
uuucucucuuucuuggugucuguccuuugccc

SEQ ID NO: 279462 - RNA, 32 nt, Human
uuucucucuuuuccuuuuauucugucauccuu

SEQ ID NO: 279463 - RNA, 32 nt, Human
uuucucugacaccuguagcagugucucaugca

SEQ ID NO: 279464 - RNA, 32 nt, Human
uuucucugagccugucuccuuccuucaauuuu

SEQ ID NO: 279465 - RNA, 32 nt, Human
uuucucugaucuccucucucucugugucugcu

SEQ ID NO: 279466 - RNA, 32 nt, Human
uuucucugcacuccagccuaggcaacagagca

SEQ ID NO: 279467 - RNA, 21 nt, Human
uuucucugcaguccccagcca

SEQ ID NO: 279468 - RNA, 20 nt, Human
uuucucugccauugcuuuca

SEQ ID NO: 279469 - RNA, 32 nt, Human
uuucucugcuaggagccagccuggguggcgcu

SEQ ID NO: 279470 - RNA, 32 nt, Human
uuucucuggcccuguccaugugacuuuggccc

SEQ ID NO: 279471 - RNA, 32 nt, Human
uuucucuggcgcuuuacuggccugggcacacc

SEQ ID NO: 279472 - RNA, 32 nt, Human
uuucucuggcuggaguguaggcuguaccccau

SEQ ID NO: 279473 - RNA, 32 nt, Human
uuucucuggcuucccuccaccaauccuggagc

SEQ ID NO: 279474 - RNA, 32 nt, Human
uuucucuggggucugcacagaggcagcagcau

SEQ ID NO: 279475 - RNA, 32 nt, Human
uuucucugugagccgcugccuccagggccaua

SEQ ID NO: 279476 - RNA, 32 nt, Human
uuucucugugccagaucuucagugccccuuuc

SEQ ID NO: 279477 - RNA, 32 nt, Human
uuucucugugcccuuuugacagcuccagggau

SEQ ID NO: 279478 - RNA, 32 nt, Human
uuucucuguguguguaguuuuguaaacacuau

SEQ ID NO: 279479 - RNA, 32 nt, Human
uuucucuguuacuggcgggaaguggauugugu

SEQ ID NO: 279480 - RNA, 32 nt, Human
uuucucuguucgggggccucccacagcacagc

SEQ ID NO: 279481 - RNA, 32 nt, Human
uuucucuguuuuguggacaggcagcagccucc

SEQ ID NO: 279482 - RNA, 32 nt, Human
uuucucuuagugcuuuuaguagguuauuguuu

SEQ ID NO: 279483 - RNA, 32 nt, Human
uuucucuucagcuguaaauaacaggauacaga

SEQ ID NO: 279484 - RNA, 32 nt, Human
uuucucuucccccagugccuagguugccagag

SEQ ID NO: 279485 - RNA, 32 nt, Human
uuucucuucccuucuuuucccuuuuccuuccc

SEQ ID NO: 279486 - RNA, 32 nt, Human
uuucucuucucccaccucucccacccaacacu

SEQ ID NO: 279487 - RNA, 32 nt, Human
uuucucuucuccccuuccauuucugccuuuug

SEQ ID NO: 279488 - RNA, 32 nt, Human
uuucucuucucccugccuuuccucugccuccu

SEQ ID NO: 279489 - RNA, 32 nt, Human
uuucucuucuuacugucccacagcuugguuuc

SEQ ID NO: 279490 - RNA, 32 nt, Human
uuucucuucuuagcuucuccauugucuaaauc

SEQ ID NO: 279491 - RNA, 32 nt, Human
uuucucuucuuccucagcuucuccauguuuag

SEQ ID NO: 279492 - RNA, 32 nt, Human
uuucucuucuuccucuugcgucuucccggccc

SEQ ID NO: 279493 - RNA, 32 nt, Human
uuucucuugaguuuuguuauguguuuugcugu

SEQ ID NO: 279494 - RNA, 32 nt, Human
uuucucuugcagccgccaugauucugaggccu

SEQ ID NO: 279495 - RNA, 32 nt, Human
uuucucuugcuaaucucucuuuuguuauagag

SEQ ID NO: 279496 - RNA, 32 nt, Human
uuucucuugggcaggcagagaguacagacugc

SEQ ID NO: 279497 - RNA, 32 nt, Human
uuucucuugucucugcugcucacaggccugcc

SEQ ID NO: 279498 - RNA, 32 nt, Human
uuucucuuguguuccugacuccuucccaauga

SEQ ID NO: 279499 - RNA, 32 nt, Human
uuucucuuuaguucuuugcaagaagguagaga

SEQ ID NO: 279500 - RNA, 32 nt, Human
uuucucuuucaguuagcuggaggacaggaugu

SEQ ID NO: 279501 - RNA, 32 nt, Human
uuucucuuucuuccugucacccugaggaaggu

SEQ ID NO: 279502 - RNA, 32 nt, Human
uuucucuuugcucuccuagauguggcucuucu

SEQ ID NO: 279503 - RNA, 32 nt, Human
uuucucuuuggguuucuuguuuaccaaagaag

SEQ ID NO: 279504 - RNA, 26 nt, Human
uuucucuuuguuuuuguccaguguug

SEQ ID NO: 279505 - RNA, 32 nt, Human
uuucucuuuucuccucuugauccuuucaagcg

SEQ ID NO: 279506 - RNA, 32 nt, Human
uuucucuuuucugggauuuccugggcuuuuau

SEQ ID NO: 279507 - RNA, 32 nt, Human
uuucucuuuucuucccuuccuuuguuuucaua

SEQ ID NO: 279508 - RNA, 32 nt, Human
uuucucuuuuggaucacuagcugcaaauuaag

SEQ ID NO: 279509 - RNA, 32 nt, Human
uuucucuuuuucuuccuccuuugggaucauug

SEQ ID NO: 279510 - RNA, 32 nt, Human
uuucucuuuuugagacagucucgcucuguuac

SEQ ID NO: 279511 - RNA, 32 nt, Human
uuucugaaaacaaugaaaagaguauauuuaac

SEQ ID NO: 279512 - RNA, 32 nt, Human
uuucugaaaccagcccaacuuuucucccagag

SEQ ID NO: 279513 - RNA, 32 nt, Human
uuucugaaacuugaacucagagcccaguggga

SEQ ID NO: 279514 - RNA, 32 nt, Human
uuucugaaaggcugggucccagguugucacgg

SEQ ID NO: 279515 - RNA, 32 nt, Human
uuucugaaauucacagaagccuaggaggacug

SEQ ID NO: 279516 - RNA, 32 nt, Human
uuucugaacccccuuuuccuugagagacgagu

SEQ ID NO: 279517 - RNA, 32 nt, Human
uuucugaagaagugggagagccauuggcgugg

SEQ ID NO: 279518 - RNA, 32 nt, Human
uuucugaagcugccuucaccacugccuaccug

SEQ ID NO: 279519 - RNA, 32 nt, Human
uuucugaaggcuguuccagcagggcugcccug

SEQ ID NO: 279520 - RNA, 32 nt, Human
uuucugaauucugcaguauuuucuaaacagga

SEQ ID NO: 279521 - RNA, 32 nt, Human
uuucugacagauuuuaaaaauugauaugauaa

SEQ ID NO: 279522 - RNA, 32 nt, Human
uuucugaccaaaggagcaagagguauaaugga

SEQ ID NO: 279523 - RNA, 32 nt, Human
uuucugaccccaaacccagcugcagcuucuca

SEQ ID NO: 279524 - RNA, 32 nt, Human
uuucugacccuucugguuucugugccauggcc

SEQ ID NO: 279525 - RNA, 32 nt, Human
uuucugaccucaugcugccacuucuucgaggc

SEQ ID NO: 279526 - RNA, 17 nt, Human
uuucugacuacagcauc

SEQ ID NO: 279527 - RNA, 32 nt, Human
uuucugacucugcuuggccauuuuauccuuuu

SEQ ID NO: 279528 - RNA, 32 nt, Human
uuucugacucuggugauauaaaaaucaaaucu

SEQ ID NO: 279529 - RNA, 32 nt, Human
uuucugacugguuuucuucagucccuuuaucu

SEQ ID NO: 279530 - RNA, 32 nt, Human
uuucugagacagagucucgcucuguugcccag

SEQ ID NO: 279531 - RNA, 32 nt, Human
uuucugagacaggggucucccucugucaccca

SEQ ID NO: 279532 - RNA, 32 nt, Human
uuucugagagaaggaaauaacaucugcaaaug

SEQ ID NO: 279533 - RNA, 32 nt, Human
uuucugagagcauucaauggaaguuaugucau

SEQ ID NO: 279534 - RNA, 32 nt, Human
uuucugagaugggagagcaacaaguagagaug

SEQ ID NO: 279535 - RNA, 32 nt, Human
uuucugagccugcuggacaugaagagcagaug

SEQ ID NO: 279536 - RNA, 32 nt, Human
uuucugaggaagagaaaauucagcgcuacagc

SEQ ID NO: 279537 - RNA, 32 nt, Human
uuucugaggggcccuugaggccaaucuuuucu

SEQ ID NO: 279538 - RNA, 32 nt, Human
uuucugagguucuagcuaguacagauuguaua

SEQ ID NO: 279539 - RNA, 32 nt, Human
uuucugagucauacuuuauguauuauuucuua

SEQ ID NO: 279540 - RNA, 32 nt, Human
uuucugauaccacugcacugucugagaauuuc

SEQ ID NO: 279541 - RNA, 32 nt, Human
uuucugauacuuuaugucuuugcucacccuca

SEQ ID NO: 279542 - RNA, 17 nt, Human
uuucugauaggacauuu

SEQ ID NO: 279543 - RNA, 32 nt, Human
uuucugauagugcccuugcucuucugucuguc

SEQ ID NO: 279544 - RNA, 21 nt, Human
uuucugauaguugaacuguaa

SEQ ID NO: 279545 - RNA, 32 nt, Human
uuucugauauagaauugcaauuuuaacacaca

SEQ ID NO: 279546 - RNA, 22 nt, Human
uuucugauauuagauauuaaaa

SEQ ID NO: 279547 - RNA, 32 nt, Human
uuucugauauuccucuaguuuuggauugccaa

SEQ ID NO: 279548 - RNA, 27 nt, Human
uuucugaucucagcuguguggcugcaa

SEQ ID NO: 279549 - RNA, 32 nt, Human
uuucugaucugugaaauggcccccaaaauacc

SEQ ID NO: 279550 - RNA, 32 nt, Human
uuucugaucuuaaaauuugguuaaugccuaua

SEQ ID NO: 279551 - RNA, 32 nt, Human
uuucugaugaggaggcagaugaugcagaugcu

SEQ ID NO: 279552 - RNA, 32 nt, Human
uuucugaugcagauucuugucuuguucuccac

SEQ ID NO: 279553 - RNA, 32 nt, Human
uuucugaugcccaccgaggagccccagccccg

SEQ ID NO: 279554 - RNA, 32 nt, Human
uuucugaugccucuguggguguguguaaguua

SEQ ID NO: 279555 - RNA, 24 nt, Human
uuucugauuccagauuggaaaaua

SEQ ID NO: 279556 - RNA, 32 nt, Human
uuucugauugcuacugugcugugugauaggcc

SEQ ID NO: 279557 - RNA, 32 nt, Human
uuucugauuguccaguuaagugaucaccaaag

SEQ ID NO: 279558 - RNA, 32 nt, Human
uuucugauuucacaagugugguguuuucccaa

SEQ ID NO: 279559 - RNA, 32 nt, Human
uuucugcaacugugcacuccucccuugguggc

SEQ ID NO: 279560 - RNA, 32 nt, Human
uuucugcaagggaaaucaugaaugacauaagu

SEQ ID NO: 279561 - RNA, 32 nt, Human
uuucugcacagcaaaagaaacuaccaucagag

SEQ ID NO: 279562 - RNA, 32 nt, Human
uuucugcacauccuuaccaacauuuguuauug

SEQ ID NO: 279563 - RNA, 20 nt, Human
uuucugcacccucgcaccca

SEQ ID NO: 279564 - RNA, 32 nt, Human
uuucugcacuuucgccccaucuaccagucuuu

SEQ ID NO: 279565 - RNA, 32 nt, Human
uuucugcaggaaaaccaacgagcauacccaca

SEQ ID NO: 279566 - RNA, 32 nt, Human
uuucugcaggaaaugugcccagcagcucuugg

SEQ ID NO: 279567 - RNA, 32 nt, Human
uuucugcaggacuccuuccuggcacucucucc

SEQ ID NO: 279568 - RNA, 32 nt, Human
uuucugcagggauaaaacuuuugagguggcca

SEQ ID NO: 279569 - RNA, 32 nt, Human
uuucugcaguuuaucacauuuugcuucaggca

SEQ ID NO: 279570 - RNA, 31 nt, Human
uuucugcaguuucgguuuucauuugcuucag

SEQ ID NO: 279571 - RNA, 26 nt, Human
uuucugcauaugaaguguguaaaaua

SEQ ID NO: 279572 - RNA, 32 nt, Human
uuucugcaucaucuguagauccuagucuaucu

SEQ ID NO: 279573 - RNA, 19 nt, Human
uuucugcaucuucccccaa

SEQ ID NO: 279574 - RNA, 32 nt, Human
uuucugcauuugauguuauaguuaauuauaca

SEQ ID NO: 279575 - RNA, 32 nt, Human
uuucugccaaucguucuugacuuucuggagcc

SEQ ID NO: 279576 - RNA, 32 nt, Human
uuucugccacaggaagcugggccgggcugcug

SEQ ID NO: 279577 - RNA, 32 nt, Human
uuucugccacccaggcuggaguacaguggcau

SEQ ID NO: 279578 - RNA, 32 nt, Human
uuucugccaccuacaggauagaccaugaagcu

SEQ ID NO: 279579 - RNA, 32 nt, Human
uuucugccacuuccgggucuaggcccugccca

SEQ ID NO: 279580 - RNA, 32 nt, Human
uuucugccagccugggcaacauagugagacuu

SEQ ID NO: 279581 - RNA, 32 nt, Human
uuucugccauauuucaaaaugguagaauaaau

SEQ ID NO: 279582 - RNA, 32 nt, Human
uuucugcccaaccgcauggugccuggaccuga

SEQ ID NO: 279583 - RNA, 22 nt, Human
uuucugcccagccugcucagca

SEQ ID NO: 279584 - RNA, 32 nt, Human
uuucugcccaggaucucagccccaggcugguu

SEQ ID NO: 279585 - RNA, 28 nt, Human
uuucugcccauguucgccucaucuaacc

SEQ ID NO: 279586 - RNA, 32 nt, Human
uuucugcccugcuuuccugggcucucagaagu

SEQ ID NO: 279587 - RNA, 32 nt, Human
uuucugccuaauuaaggagaagucuuuuauca

SEQ ID NO: 279588 - RNA, 32 nt, Human
uuucugccuaguuugaagacacuggucauccc

SEQ ID NO: 279589 - RNA, 32 nt, Human
uuucugccucagaacugucucuccugggccca

SEQ ID NO: 279590 - RNA, 32 nt, Human
uuucugccucauucaguuucuggggucaaauc

SEQ ID NO: 279591 - RNA, 32 nt, Human
uuucugccuccaggagcggcuccgugucacac

SEQ ID NO: 279592 - RNA, 32 nt, Human
uuucugccuccagguacagucuggcaccuggc

SEQ ID NO: 279593 - RNA, 32 nt, Human
uuucugccuggcaacagagcgagacuccgucu

SEQ ID NO: 279594 - RNA, 32 nt, Human
uuucugccuugugauggacccaggaggucucu

SEQ ID NO: 279595 - RNA, 32 nt, Human
uuucugccuuuccccucucacuucuuccccaa

SEQ ID NO: 279596 - RNA, 32 nt, Human
uuucugccuuuccuuugcaucuucucauauau

SEQ ID NO: 279597 - RNA, 32 nt, Human
uuucugccuuugauggcaauuuccuucgguuu

SEQ ID NO: 279598 - RNA, 32 nt, Human
uuucugccuuuguccucaauagaaccaacuug

SEQ ID NO: 279599 - RNA, 32 nt, Human
uuucugcgaguucuucugccuccugcuggaga

SEQ ID NO: 279600 - RNA, 32 nt, Human
uuucugcgcuccuagccugggugacagagcaa

SEQ ID NO: 279601 - RNA, 32 nt, Human
uuucugcgcuggaccugcucaccugagccugc

SEQ ID NO: 279602 - RNA, 20 nt, Human
uuucugcggggcaucaggcu

SEQ ID NO: 279603 - RNA, 32 nt, Human
uuucugcgucucucccuguaccaggcucaaaa

SEQ ID NO: 279604 - RNA, 32 nt, Human
uuucugcgucugcaaguggccugugggacugc

SEQ ID NO: 279605 - RNA, 22 nt, Human
uuucugcuaauuucaugcucca

SEQ ID NO: 279606 - RNA, 32 nt, Human
uuucugcuagaugcaaaacugacuaagcaugu

SEQ ID NO: 279607 - RNA, 21 nt, Human
uuucugcuauuuugcauccca

SEQ ID NO: 279608 - RNA, 32 nt, Human
uuucugcucaccgcaaccuccgccucccaggu

SEQ ID NO: 279609 - RNA, 18 nt, Human
uuucugcucccugcccag

SEQ ID NO: 279610 - RNA, 32 nt, Human
uuucugcuccuuggcuucuagauggcaccaug

SEQ ID NO: 279611 - RNA, 32 nt, Human
uuucugcucugccugcaggcccccaggcacuu

SEQ ID NO: 279612 - RNA, 32 nt, Human
uuucugcucuuuccccugucacucccacauca

SEQ ID NO: 279613 - RNA, 32 nt, Human
uuucugcugaaugccugcucccagcuguagcc

SEQ ID NO: 279614 - RNA, 32 nt, Human
uuucugcugagcacugggccugugcugggugg

SEQ ID NO: 279615 - RNA, 32 nt, Human
uuucugcugaguaguauuucauuguauggaug

SEQ ID NO: 279616 - RNA, 32 nt, Human
uuucugcugaucuguuccaagacagguuaaaa

SEQ ID NO: 279617 - RNA, 22 nt, Human
uuucugcugcaggaugaggcua

SEQ ID NO: 279618 - RNA, 32 nt, Human
uuucugcugccuccagcccuguuugcaugugc

SEQ ID NO: 279619 - RNA, 32 nt, Human
uuucugcugccuggcuauuccaugcucauggc

SEQ ID NO: 279620 - RNA, 32 nt, Human
uuucugcugcugcugacagauuaacccaacaa

SEQ ID NO: 279621 - RNA, 32 nt, Human
uuucugcugcuugcaaggaaaggaucccaugu

SEQ ID NO: 279622 - RNA, 32 nt, Human
uuucugcugguauucuggaggugggaaggacu

SEQ ID NO: 279623 - RNA, 32 nt, Human
uuucugcuguguccuuaggaugugcaguaaaa

SEQ ID NO: 279624 - RNA, 32 nt, Human
uuucugcuguuacuugcugccuccaggccagg

SEQ ID NO: 279625 - RNA, 32 nt, Human
uuucugcuuacucacuccuucucccucuuucu

SEQ ID NO: 279626 - RNA, 32 nt, Human
uuucugcuucaguugcugucagggcagcaguu

SEQ ID NO: 279627 - RNA, 32 nt, Human
uuucugcuuugaggcccuucccuuagauuaug

SEQ ID NO: 279628 - RNA, 32 nt, Human
uuucugcuuuucucccaccccuccuagcaccc

SEQ ID NO: 279629 - RNA, 32 nt, Human
uuucuggaaaacugccuuuuaucugcccagaa

SEQ ID NO: 279630 - RNA, 32 nt, Human
uuucuggaaauggcuguaggugguguugagaa

SEQ ID NO: 279631 - RNA, 32 nt, Human
uuucuggaaggggacagugaaaagaggaguga

SEQ ID NO: 279632 - RNA, 22 nt, Human
uuucuggaaguaguaauugcaa

SEQ ID NO: 279633 - RNA, 32 nt, Human
uuucuggacuccuaccuaucugugcauuuuac

SEQ ID NO: 279634 - RNA, 32 nt, Human
uuucuggacucuuuaaguucuaccacugaaaa

SEQ ID NO: 279635 - RNA, 32 nt, Human
uuucuggacugcacuguuguccuugcccucac

SEQ ID NO: 279636 - RNA, 32 nt, Human
uuucuggagagacagcauugauaaguggcaca

SEQ ID NO: 279637 - RNA, 32 nt, Human
uuucuggagaugaaccuuuaaauaagucguac

SEQ ID NO: 279638 - RNA, 25 nt, Human
uuucuggaggaaaagcuggggccag

SEQ ID NO: 279639 - RNA, 32 nt, Human
uuucuggaggcugcaccuacugaggaucucgg

SEQ ID NO: 279640 - RNA, 32 nt, Human
uuucuggagugagaguaaagaggcuuaauuag

SEQ ID NO: 279641 - RNA, 32 nt, Human
uuucuggaguuccaggaacacaaaccccaaca

SEQ ID NO: 279642 - RNA, 32 nt, Human
uuucuggaguuuuguuuugacuucugaggugc

SEQ ID NO: 279643 - RNA, 22 nt, Human
uuucuggauaccuuaauuguaa

SEQ ID NO: 279644 - RNA, 32 nt, Human
uuucuggauccuaggcuuaucuccacagagga

SEQ ID NO: 279645 - RNA, 32 nt, Human
uuucuggaugguucccagaggguuuccauggg

SEQ ID NO: 279646 - RNA, 32 nt, Human
uuucuggcagugagguaaaaucaggucuuuuu

SEQ ID NO: 279647 - RNA, 32 nt, Human
uuucuggccagaaaaucgacaccccaaaaguc

SEQ ID NO: 279648 - RNA, 32 nt, Human
uuucuggccuccagaacugggaaggaguaaau

SEQ ID NO: 279649 - RNA, 32 nt, Human
uuucuggccugaagcagucugcacugaaaggu

SEQ ID NO: 279650 - RNA, 32 nt, Human
uuucuggcgaguuaaguccagcagguucugcg

SEQ ID NO: 279651 - RNA, 32 nt, Human
uuucuggcgugagucaacagaucauguagaua

SEQ ID NO: 279652 - RNA, 32 nt, Human
uuucuggcucuagaccccuccuggaugugcca

SEQ ID NO: 279653 - RNA, 32 nt, Human
uuucuggcugcugugcugccuccugggcucca

SEQ ID NO: 279654 - RNA, 32 nt, Human
uuucuggcuucugcuucauccugcuccaucgg

SEQ ID NO: 279655 - RNA, 32 nt, Human
uuucugggaacacauucacacgcccauugcag

SEQ ID NO: 279656 - RNA, 32 nt, Human
uuucugggaagagaucaaaauggagucuccuu

SEQ ID NO: 279657 - RNA, 32 nt, Human
uuucugggaccuggaguuggccagucaccacc

SEQ ID NO: 279658 - RNA, 32 nt, Human
uuucugggaggaugacaugcagaggaacugag

SEQ ID NO: 279659 - RNA, 22 nt, Human
uuucugggagggugaauugcaa

SEQ ID NO: 279660 - RNA, 32 nt, Human
uuucugggcagcuuccuugaggacagaaacuu

SEQ ID NO: 279661 - RNA, 32 nt, Human
uuucugggcgcacagaagucacugugaaacag
